United States Patent Application Publication US 2004/0214272 A1 - sequence listing, part 18

SEQ ID NO: 73366 - DNA, 412 bp, Zea mays
  Clone ID: MRT4577_16690C.1
aaaaaacaatatggagctttaacaagcaatccaatctggggacaattttttttaaaacaaaccctttggggttcaattcagccgggggagctatggtttgggatataaaaatggtccatagatgggccccaacaggggtaactaatttcgccgcacgcctagcactgggtctccttaagaccatgaaagaaataggggaagggcggattaggggccccatccttgtaatgggggaatcccacagacgcataatccttcaggggctcaccaacaaaaaatgggggggccttcagctggctaaggaaaaactgggttgccccctcgaccccctttttgaactaatccgctttctcgggctccaacacagcagggagattctggaggtattttttgagggaagacacaaataatt

SEQ ID NO: 73367 - DNA, 398 bp, Zea mays
  Clone ID: MRT4577_166910C.1
aacgggggggaaaacgagatttttacatttttttcacccccaaaaaaaaaagggaaatgaatggcccagggcaaaggcccattatattgggccatacatgcttacacaaccattaattgaacgggggggggggcaaaagcaaacgacgacgggtttgaatcccttcttcccaaggggggaggggggggggaataaattaggggtaaccctggtcccccacctggtgggaggagcccccaatgaaaactttcccctaaaccaggccagggaggccccccccgacaagggggcccacccaataaacccaattttcggggaaatcccccccggggaccggggggcccaaagagcgggcggggtttatggagcccccccttaagggccccccggggagggtg

SEQ ID NO: 73368 - DNA, 429 bp, Zea mays
  Clone ID: MRT4577_166911C.1
ccgggggcaaaactaggcctcggacccctccggggattcgggaacgggcggggggcgggcccccccctaaaaaaaaaaaggggtaggctgggccaaaaacgggtaaacaaaaaaacaacccgggcggggataatcggggaaaaaacaacgggggggacccacccccggaattggaatccctcttgggggggcgggccccttaaaaccccccccaaaaaacccccccccaacaagaaaaaccagaggggggcggaacccggggcccaattaaggccccacccctgaaaaatgggggggacaaaccccgggggggccatctggctttttagccttaaaaaagctttaaggcttttgggataaaaccccccaccaaacggggaaccccgggaaggcgaccccccccccgggaaaaaaaaaaccccttagggg

SEQ ID NO: 73369 - DNA, 181 bp, Zea mays
  Clone ID: MRT4577_166912C.1
atgtggaaggaagcaggcttccaggatggttaagggactcacgggacaccacgtcacgctctacttccggtgcaccaacctagcatacatgaggtacaagtcgaaccagtacaagaccacttcaattattaaaatataatgggtacactacaattgtgaatgattgtgatttatcaacttt

SEQ ID NO: 73370 - DNA, 378 bp, Zea mays
  Clone ID: MRT4577_166913C.1
ttttcgacaaattatctctgttaagaagcttatcattggacattagccaaaaagaaaatagttatctgataagtcctgccttttctgtttggaagatgaatcaatttatcacctcttttttgaatgttactccctccgtttctttttatttgtcgctgcaaataaaaagaaacggaggaagtacatagctaagagaatgtggaatgtgattaacaacctgttgaactggaacgtgggtgaggacttggaatatgtgctgctgttttatggtctatggaaaacccgtaatgctttgtgctttcaggggaaaatgggagatgtgtgaaggaggtgtcgagaagagtgacacagacgctctggaggcctcttttcaagcca

SEQ ID NO: 73371 - DNA, 284 bp, Zea mays
  Clone ID: MRT4577_166914C.1
gatcaactgctaaaacaagacgtcttgtaaaactatcctgtccagatcatgcactattttccattctggtattgttttgttctgtcttgttttaacccatttatgctggaggttgcaactttttgtgtgctacaaacatcagcattttgagcgcatgacccttaaagacagtcagagatgtcaaatcaactgctcaccagcacttaagtacttcccactgagggcgaacggctaggccataaactaggttcaatgctgagtacaaagctattaaactgatttca

SEQ ID NO: 73372 - DNA, 284 bp, Zea mays
  Clone ID: MRT4577_166915C.1
acaaccccccaggttttattgccaacaaaaaaatccaaaggggaataaccccgcccgaactgacacatgggaggcaaagggggatcacccctttaagggggggaaaccccgttctacaattaaaaaccccaaaccaactccaaatccaccgccccaaagttggcggtggccccattattattcccccgccggaaaaaataacaaacgggttaccttaataaagcgggcgcgtctttttttaaggccttttcctcaagcacaattttgttaaaggggcacacccg

SEQ ID NO: 73373 - DNA, 275 bp, Zea mays
  Clone ID: MRT4577_166916C.1
ggccgctttttcttttttttttttcttttttttttcttttttttttttttttttttttgatacatagacaaactcaacaataatcactccgtcattgcctctgcatgattggcggtcgttccaggaccccggcatgacacagcagcgcccacagctgcgtcatgaactccccgccggcgcccaccatctccccgcgaatgccaacgttgctccacggcgcgcggaaccgcaccagctccgtccaaaacttggccagcacctcccaccgccgcgcg

SEQ ID NO: 73374 - DNA, 253 bp, Zea mays
  Clone ID: MRT4577_166917C.1
aatcccaaaaaggccggcggcaaaaatccctctttggcaagcaatttcggggggggaccggttctacaaactcgcttttattccccccccaaaaaaaggggaggtttggactaacttaaacaaaatgccccggtgaacctgctccaaaaaaagggatttgccccacaaatcttgttaaaaaccaaacccatggaatgggggcctaaccaaccaaaaaagggccgaagccatagatttaccggcaaccaggaac

SEQ ID NO: 73375 - DNA, 208 bp, Zea mays
  Clone ID: MRT4577_166918C.1
ggggcgggcgccagggacgaaccggtaattcccaaccggttcctttaggtaatctaatcttattgttatccgatgtcttttagagctagcaaaaataatgggcatagctgttctcctgagaaaaattgtataactctaacaaatccccaccacaccattagacggaaccataaagtactaacctggggtgtctaacgggggagcaaac

SEQ ID NO: 73376 - DNA, 681 bp, Zea mays
  unsure (1)..(681): unsure at all n locations
  Clone ID: MRT4577_166919C.1
aattcggcacgagggtccaccccaccaggcaccagtccaccaccgacgcccgcacgcacgaggcacacgatggcctcgctggaggcggcggagacatcaccgccgtctacgcccaccaccagcgcgtccccctgcccgaccccgcgcccgctggctaccgcaccgccgaccatgggtgcggcgcttctccgcgccgcgcgcagcggcgacgagaggcagctcgtgaaagcgcttctggcggaccctgcggccccagaccttgagaccgccgccacagccggagggaacacgctcctccacgtggcggccgcgggcgggcacgtggacctcgcgttgctcctcctccgccgcgccccgcgcctcctcacggcgcgtaacgcggcgctcgacaccccgctccacctcgccgcacgcgcgggggcgcacaaggtcgtcgcgctcctcgccgcctcctcgtcctcgtcatcgtcctcaccagcttgctccctgcgcgccctgacccgggccacgaaccggcgcggggagacggcgctgcacgacgccgtgcggngcggccacgaggccgcggcgcgtgcgctggccaccgcggaccctggtctcggggggatgtgcggcggcgctgggagacgccgttttacatgcgtcggcggctgggtcctggnggatgctgcgcatgctctt

SEQ ID NO: 73377 - DNA, 733 bp, Zea mays
  Clone ID: MRT4577_16691C.1
gggtacccgggcccccccctcgagcttgttttccctttttcttttttttttttttttttttttttttttttttttttttttttttttttttttttttttttttttttttttttttggccaaccgggaattttttttaaccttttggggggcccaacaaaaggggcccctaaaattaaaaaaaaaaggggtttgggggggaattaaaggggccccccgggcaggggaaaaaccaacttttgggccaaaaaaccctttcctttttgttaaactagggggggcccaaaattttccgggggggggtaaacagggaaccttttttattcccccaagggatggcccaaaattgccaaaacctccccggggggggtttccccccccccttccttaaaatgttaaagggggccttttggggcccttttgggcccttgttcctttaatggaaaaccccaccccggccctggggaaaattttagcccggccccccccccaaaggggtttttttggaaatttggggggggcttttttccttcctggggggtggaaaatccacccaggggtttaatttgttttgcaaccccccctggggggggttaatttttttaaaaacccattctttttgaacccttaagggaggggtggcccttaaaggcagggtccctttccccatcacaaaaaaacctttttggcctccctttaaggcccccccagggcccaaaaaggggcccaaaaagg

SEQ ID NO: 73378 - DNA, 374 bp, Zea mays
  Clone ID: MRT4577_166920C.1
attcggctcgaggcgtatacacgaaggatctgacacccaggaagggcgacggtgacccaagcgggttcgaccaccgatgctagccggcggacactcgcacgaactgactgatcctggtgcaggtaaatctgcccatgccgcattctaaggggcaggacaaacctgcacacacctcaaccagaagcgaaacctagcgccaacacgaggccacggggataggctgccaagatcgaccagccacggaggctacgcctagagaaggaggagccacgagggcaacatgcagacgccgctaagctcgtaagcgggcctagctgccaccccataatggagaggcaagtccccttatagcagagaccactgaacgaggactc

SEQ ID NO: 73379 - DNA, 747 bp, Zea mays
  unsure (1)..(747): unsure at all n locations
  Clone ID: MRT4577_166921C.1
gcagcaacgccccggagctctgactctgaggcctcggcccggcgacgacgacgagtgcgcggtgacgcgagcgcaagagagaacaaagctttgacgcgcacccactcctgccgcctccctcagtcccgactcccgaacacgcgcgcgcaggcccagcacagcacggacgacgacgcagcgagaggctcggaaggaggaaagagtcgccggcggagaccccaatcgatcgaaggcccccggtcgcttcgcccgcgaggcatatcagtgcccccttggccaccgggagtaaaaaaaaactgtgaaagctaagctttgggaatggagttgacagcttcgactgaataacagaagaattttcactcgtcttctcctgatctcatggaacttcttgacagtaatggccagggggaaacaagagcacatggtgctgaaaacattggaccagtttctgctaagagtccagatacatcatcggaaatgcaagagaagttacctcacagtttgacagagcaccaggaagaactggggtcccctgcaggccatgcagggnagtttgtcgccgaaaattgtctcccacatagaaccagctcgagcatctgatgacccctcaaaagatgaggggacgtcatgctgctttattaacagataagggttgggaggttgaaatcatatacgaaaaatggttttactggcgccagtagtattatgccagcagctgaaatgaaaatctgaagaagacatatgtac

SEQ ID NO: 73380 - DNA, 481 bp, Zea mays
  Clone ID: MRT4577_166922C.1
cccccccccacgtctcggttgatttaaacaaaaacaacaaggttctcactgaagacgaagggtaccgcaaaattttttttttttttttttttttttttcccctccacacgtctcggttgatttagacaaaagcaacaaggttctccctgatgacgatggttaccgccaatttttttttttttttttttttttttttttttttttccccttttttttttttttttttttttttttttagtgaattttcatcaacattaaataagctggcatcacatagtaatgagtcttgactggtctaaaaagttccctttgcatcagtcaccactttggaattttcaaaataggcagggcagtaattgcagttacatatataagaccaactacctcgacttgcttggccttctccaaaggatcggatcaactttggattacataggtatcactgaagttattaaatacttaggcatcaccggacgcgtgg

SEQ ID NO: 73381 - DNA, 340 bp, Zea mays
  Clone ID: MRT4577_166923C.1
ttttttttttttttttttttttttttttttttttttttttttttagaggaacttattatattccacaaaaaaaaaaaaaaaaaagcgagaactcattcctcaaaccatacacgctataattaaactctctttctgggtctctgagcatgaacacggagaaaagagcgtttaattacactcgtcttttcggcctgttcctggggcgtggaccgacaacgggggcgggttccttttcctccaccggtaccggggggagcttttcctttgggtcctcatccgcttcgttaatggcgtcgtcttcctcaccggggccgtcgtcatcggccgggaatttttccag

SEQ ID NO: 73382 - DNA, 585 bp, Zea mays
  Clone ID: MRT4577_166924C.1
tcgaggccggccgggaactctagtttccaaaatggagcctctctgtcacaaatgtgcccctgctgtcgtccagccctccaggggtgcctgacttccggcggtactactacaacctgctgtaacgagccctcaatgtacggcgcaagttatacagcgacgacaagaccatgaacgccgaccacgaactaaccgagcagaccggcagctgccaacactctgattgcgatatgctcactcgtcgtgtctatgagcttcacccagagagaaatgaccactgcaaattttgtgcaactcgtggtcgccctgaggcgataaatatcgtatcggcgttagctgatacctgcgattacccgctccaaaccaagtgcatgctttgtctgttgctcggccacaactacaacggctacttcgtcctcaaccattacttcgacttcttcatcgatcatcttgtggatgctgagcacagcagcacgccaaggattactacccacagaaagttaacatgatacacaggtgctgataccggtactaacatcgttgacaaagaggaatctcaactacatcctctgcagtatgtgatgcgga

SEQ ID NO: 73383 - DNA, 253 bp, Zea mays
  Clone ID: MRT4577_166925C.1
ggaacagaactcgcatccaagtttcttctccccccattaattacacccccagtctcaaccaatcacgtcaacaatctacaccaccggcagctaaatctaacaccccgctccagcaagaggagaaccgggacgacgacgacaaaaaaaaaaaacgagcgatcactcggccagcgccgtcgcgctggcgctgctccggctcacggggccggcgttggctccaagccggggccgttcctgctcgcaagcgctggca

SEQ ID NO: 73384 - DNA, 307 bp, Zea mays
  Clone ID: MRT4577_166926C.1
gcagtcatggctttatcggtggccgccgcggcgagcacattcctgggcacccgcctggcggacccggcgccacaaaacagggcgcatctgtggcccggttcgggttcgggttgggcggcaaggcgaagcctgcttcttttttaagaggggaagacatagacctcctctgaccggccgctgtggttcccccgcgccgtggcgcccgactacctggacggctcgctggtcggtgactacaggttatacccggtcagtctctggaagccccgggagtacctacacttcgaggtggactctctggaccaga

SEQ ID NO: 73385 - DNA, 348 bp, Zea mays
  unsure (1)..(348): unsure at all n locations
  Clone ID: MRT4577_166927C.1
gggggggttntggtggttttggggttaattttcttgggaacggggccccctcctgcggtttttccttttttttttttttttacttgcaaggagaagcatcgggtggctgatcattaataaacgatatggtccagattgagatctcaccacattaaagcccacttagacctgcgtatttgacccaccaattcaaacagtacttcaaacctgagcaaagattaccagaggttaatataccgagaactacttgatgagatgaaaggtcaaaggaacgagaagggattcctgttcctttgacgcatattgtttctgctgctggtgattgaactactcgacctttggctctgt

SEQ ID NO: 73386 - DNA, 444 bp, Zea mays
  Clone ID: MRT4577_166928C.1
ggacctttgggctgatttatgtgcttggacgccctcagcttcaagagagtcagggctcgaaaagaaccctaccgcaaaaaaacaccgcgacacgggagaagtcaccggagaaaacgagttacgtatcccgccgttcatagttcgcaattcatcattatattaagtcaactcgggcgaggcactttgcgtctagtgtatcaccgaagttgcggagaagtcgccgtcgtaggggacgggcctagccaccgaacttaaggataccaccggaactcataggatcttaccaccggacgattatggataagcttgccattacacctattaaaagtaagcataggccattggacgctactgcggaaatgtaaacgcttgccacgtacggtccttccgtcttaaaagtatcgcgtacgcaacgacgtcgaacggcgcccgtaagccgacaag

SEQ ID NO: 73387 - DNA, 147 bp, Zea mays
  Clone ID: MRT4577_166929C.1
tgtccagaacgaggcccaagcttggttttggccgaagtacaatattaatcttatttttttaagcctaacaagaacgaccaggcataagcaggaggcaagataacccttactaaccctaagggcttccagacaccataagcccaataa

SEQ ID NO: 73388 - DNA, 316 bp, Zea mays
  Clone ID: MRT4577_16692C.1
agaaatgtactttcttatttctgggacgccacaaacatcatccaaaaaactcattattgaactataacgcataagcaatctaaaagagggcaccaccaatgatgggttgtgggtcgaacactgtggggtttggcaaaacaagggggttgattggcagcaattgctgcatttgtaagagggtgccagccttgggcatagcgggcacgtccaacgggttcaactcctgttgtgtcaagaaggcactggggctcatattggctggctggctgaatggtcgtacatgctgctgctgtgaataagacctgctgttgcatgt

SEQ ID NO: 73389 - DNA, 521 bp, Zea mays
  Clone ID: MRT4577_166930C.1
cattggtacctcgagccggccgggacatgattcttgatggtgaactctgttaatgccgctcgcgcatcatattgtcctcgcggcgccgattccgcagctagcagggagccaccggcctgacatcgactgaggtatagatgctgccactcgccatgagatggtatggaccttcgactccaaaggtatctattcatcgcagctggcggactgcactactactccgatctgcctcgagacagctaccaccgacatgctcgagatgattaccaaggctgggaacaactcacagatggcgactgatattgatgatctgctccgtgaccatgacgatatcacggttgtcttcaatgagagtgaaatgaatattctccccatccacgacgaccatgggtctgtggacgcaagatcccaggacgatctctacttcctccttaagatcgccagcactgattaagcttcatatgcagaggaaccagaaccacaacgactccagactcagactcgttcttcgtgagacatat

SEQ ID NO: 73390 - DNA, 524 bp, Zea mays
  unsure (1)..(524): unsure at all n locations
  Clone ID: MRT4577_166931C.1
aattcggcacgaggaaaaccccaagggcaaaataatatggactgtagatgctgcagtgctccactccattcagagacagacagcgctcggttcatcagttgcattgcgttcatctgctgccccagctcgtgctctctcccagtcccagtccctcgcaagctgacctctgcgttccttcagcactggcactggcagtgaggcgctgtgctgctccagtagctgtagctgtaagccctgttgccagttcgtgaagaaagggagcaaatctggggtgcctgcaggagggggtggaagaggggagaggcattggcatccagtgcttgcttgcttgcttgccagggggtgaaaagaaccggcggtctaccactcagatccgtcccctgtgcagtgcaggattggacatttttttttctggtcgccagtagctatctccaataactatacctcgttgctgcgagttcccaagttcgntgctgccttcgttttgctggctcaggctccctgcgtaactgcattcagagctt

SEQ ID NO: 73391 - DNA, 384 bp, Zea mays
  Clone ID: MRT4577_166932C.1
aaaaataaaatttaaaatatttcccatgatttgtttgagtccagagatgacagaagagaataacttaaaaaagaaaaatgacccactaaagggaagaacaccacagaggaaagggcaaacggctccccctgtcatgaaagagactttaatctacacttatccacaatcttgaagacataatcgagagggtcaaagaaacgttgcaaatacaaagccaaaagcatttcccattattaaacttgccatatcaacctccatctctccaattatcttctttccactagagccatcttcatgagaggaagacatttcaattttggggggtacttctggaaggacccaggggcttgggttgcccctgttttaaaaataaacggggggaaa

SEQ ID NO: 73392 - DNA, 337 bp, Zea mays
  Clone ID: MRT4577_166933C.1
ccccaagcagaacttaccccaaaaaatatttttcccccggaaatttaaaaaaaaaaggtcccccaccccttaaacatataaatacattaccgttcccaccaccttaaaaaatggttgcctccacaaaccaaaaaaaaaaaaaaactgttgtgggaaaaaaaaaaaccaaggcccgggggaaccaaactaccactaggggtttgccctttttttttgtgccccccctctcttaaaaaaaaaggtaaaacaattatcttgacccaaattaagcagccttaataataaaacctggccggaaagccaaaccaacccacctcgccaaaacccgggaacccct

SEQ ID NO: 73393 - DNA, 261 bp, Zea mays
  Clone ID: MRT4577_166934C.1
cgcatttatatttctttctccatacatttttactgcactctatgttgcacatgatttatgcgcggttcattatttccaaaaaattgttgcccaccgtgggggtttttttttcaaaccgggaaaacaccaacccattaaccctctctgacgtagacggaaaaaaccccctccttttttaacggaaaaaaatgctttcgcctgggtatatcaccaaacacctttcagacctgggtttattttttaacaaaaaacaattagggc

SEQ ID NO: 73394 - DNA, 501 bp, Zea mays
  unsure (1)..(501): unsure at all n locations
  Clone ID: MRT4577_166935C.1
cagccaatactcctctcgcttaccactctgcagcccgccgggnaagcgagagcagnaagagcacgcgctcacggctgtcggatccgggcagaccccctaggacaaagtgccaaggggcagagatagccaccgagaagaaacagcctgggaggggggaggaagaaacacctgcgcaaaagaatcaggcaccaacaccaaaataggagtagactatagagggaagggtccagatttgcgagtcctggcgagaaaaatgcgaaagcaggcacagcagtagtatcgggtgtacaaggagcatataccagtaacacagctagtgcgggagacgctgctgagaagcaggagtgcacacagtcaggtggagtaagaccacttggnagtatcgctgtcagattgctgggtnatgaangaacaaggcccacagttgtatcaggttggatccctcaggatcatacggcccctgggaagcatcagccatgggaaaaaaagcgggcaaagcaa

SEQ ID NO: 73395 - DNA, 244 bp, Zea mays
  Clone ID: MRT4577_166936C.1
cacacacacgcgcgtgcgaggcgatatctcttttatagagtgacctataaacacaacactgtgcgcggctttacaccgcggcgactgtgaaaaccctgtggcgacccaacttaaactccttgtgcaacataccccttttgcccgctggggtaatatcgagaagaggcccaccccgagcgcttttcaacagatgtgcacactctatatggaaagtgacacgcgctgtatcggcgcatttaacgcg

SEQ ID NO: 73396 - DNA, 399 bp, Zea mays
  Clone ID: MRT4577_166937C.1
gttcacccgttcaaaatccttgcataataaaccatgtatagacacagatatgggctcttgaatggacaaattggaaaatcactacccaagaggccactgggtacagctgtaaacaaaggaacaacacagaaggtggcaaactggatccataacaaagcggcgagtttaaccctaagcgccaccataaaccgtgaagatcttagaaaaactatccattcccattctcaaagagtcgcgtacggaaaacgatcaaggaatattacctccctgcgtcatccactggaccataaaaggtatttacactgcaccaccaagaaactgcccaaacttccataattgtatatgaaacctacttgattgatgaacttgatccctcctacaaaagaacaacatgtcaaa

SEQ ID NO: 73397 - DNA, 247 bp, Zea mays
  Clone ID: MRT4577_166938C.1
ggccggggagaagcctcggcgcacgagagagagtgagaacaggcgaattagtcacgactcccgaccccgagcgatcctggcctgctgcagccatggcgacctccgcggggctctccaccgccggcaatcccacccagctctaccggtcccgcgcttcgctgggcaagccggtgaaggcgcttggcctgagcatgggccgcgagcgcgcccagcggggcattgcgagacagacgtatatcagcttatc

SEQ ID NO: 73398 - DNA, 173 bp, Zea mays
  Clone ID: MRT4577_166939C.1
ccaaacatccttttcccctataaattattcctttccattaaaagggttcattcagggcatggctcacactgccacccagggggaggggggacactccgttactcatcgccggtaaacaagggaactagctatagggagctagccaggggctccattacattatggctacaggc

SEQ ID NO: 73399 - DNA, 1804 bp, Zea mays
  Clone ID: MRT4577_16693C.1
ccggccgagaggccctcttcttgccccctacgcagccgcgtgtgccactgtgccgtacaccgtgcacgcacgccgctcctcgcctccctgcaccatggacgccggcgagtgctccacctccaaacctcctcagccctctgccgcctccccgtcctcccccaccgtatgggctaggctggtgcccgccgattctgcgtgcccgacggtggaggtggccgaagacgactccgtggtctgctccctcgttgcgccgccctgcggcggggaggaggtcgcgtggtgcgagatcaggcggaatgccggggacgcgtcgttcgccactattcggaaccttagcttggatgcaattattgttgatggaagaattgtcaaacaagaatgcgtaggcatcaaaccaggcagtgagattgtctctggaccccagaaagaagggcatttaatatatacatttgaaattacagaggcagaggatcatgaaaaaaagaatgtcaagattgttctagatatcgagaatgcaaaatgcagcatatgcctgaatttgtggcatgatgttgttactgttgctccatgcctgcacaacttctgcaatggatgtttctcagagtggttaaggaggtcttcatctaattcacgtgataaaagccagagcgctgcatgcccacaatgtaggacaacagttcaatcagttgcaaggaatcaccgcatgcgtgggcttttgtaggctatattgcaagctttttcctcactacagagatctgatgaggagattgcgttgttagagtcgtatgcttcagttaagtcgaatatggttttgggtcaacagaaaaaccaatcaaggaaaagacgtttttcacgttctagtgatgataccgacaattcagatctaccatgtcctcaatgccgtaatgaatttggtggatttagatgcagcccaggatctgtgcacttgcaatgcagtggatgtggaggaatgatgccagccagatctaacatcagtatatcacaaaaatgcttggggtgtgataaaacgttttgtggggcttattggtattcgcaaggtgtgagttcaagtcattgcaatctgatctgcaaccaggatactttgaagagtatttctcagcgacatatctctgcacttcctgacacaattcatgggggcaatccatatgaaaaagatattacagaaagatgtatacagcaatcaggcaaaacattgcaagttgtaatctcagagtggatatcaaaatttgacaacatggaaattgatcgttcaaggttgcaattgaataatgtggatgcaattacttccaggacatatatctgcaaccattgctacagcaagtttgttgatttcctgctctactggttccgtgtatcattgccccaaaatcttcttccacgagatgctgcggagagggagagctgctggtacggcttcatgtgccgcacccagcaccatcggcctgaccacgccaagaagctgaaccacgtgtgtcgcccgacaagaggcaaccagccctagcctccggcacaaagtagaaccacatgtaacgatgtcacgtgagacttgactgtttctgtgaccattgtcatcaccatccattgtatgtgtgtgtcatcaaaatggtcaggaagtgtggcgtccatgtttggaacccttttttggtttgatcctggctggacctgacaaggaaattatattgctgctggtgccggaaccgccgctctgtcggcaggtcgggggggatggttgaattgaatgaaaataccccaggctagtttcacaaaaaaaaaaaaaaaaaaa

SEQ ID NO: 73400 - DNA, 460 bp, Zea mays
  unsure (1)..(460): unsure at all n locations
  Clone ID: MRT4577_166940C.1
gcgagcggccgccctttttttttttttttttttttttttttttttttttttttttttttttgttttttttttttggaggcgccgccaccaccctacgcgctgtttatatttcatactttcctatctcacgatcttcctgacaaaaaaactgaaggctctaaagttcaaactcttcaacgggagatcttttcagtttgacgtctgcaacgtggtcatggtggcaaggaacaccaaatntttaggaatgatcaaaaacccggaaaaacccaaaggcatctttgaagtcatccaccttcttcttggaaccttttgcatgctatgtctagctttctcctatttgttgtacaagaaaacataaaatggaatttaaattttgtggtcccaaaaatgtggaaacctgaagtcctgtaaaattaggcttaacattaatgcaaacaattttattttagtttaaaattaa

SEQ ID NO: 73401 - DNA, 618 bp, Zea mays
  Clone ID: MRT4577_166941C.1
ccggggacttcctgttctctatctgaccacccttagagcgcgcgctctatgctaaagccgaggtatccctagatgacggctatctgcagaagaccctgaaagcctcctttggatccacacgatcaccttactcctatagaccgacgaccgaatacagaacatgcgtgtgtggacaaaccatgatagtcacctcaacatgatacaacactacgctcaacatgagacagcattgcactcatggccttgtcaaaccacaacaatcacaatggggactgaaacgcttcggccatctatagcggattcttctcacggtccatcacactatcctgcatcaaggttgacgccgcatttagctcgtgctcttgcttcggggcagcctgattaaaggcctacacggagattattaagcgtaactgtcctggttatcccacgcacaccctagggcgatacaagtgaggcaggtgctacattgcatgcttataccagtgatcttgacacttgaatagaaacgttgatcgctgctactgaccttatgtgtacacaatttttctatgataccgacatcctttcaagtctgtgaacgactgccgccaaaccgtgactacttgctccattgac

SEQ ID NO: 73402 - DNA, 613 bp, Zea mays
  Clone ID: MRT4577_166942C.1
ggccgcttttttttttttttttttctttttgtttttttttttttttttttttttttttttctttttttttttcttttttgaaaaaagcccgactgcccgcttatttatttctccaaaggtccgattatccacccccactcgttgggggccaatcattatttgaacaaacaaatcacttgttgggggggggggggtataggcctagcttgaaactaatacgaactgattgggtatggtttaaaattaacaaactcatccccgaataaaataagcttgaaagaaacttttgcatgtgtagccgtagttggtgcttgcttcccacaacaggcctggataaatcttacccctggctggagtcaaaaacaaccttgccgggcccgaggttgccgatggtggcaaaggcctgctgggggaggaccaacgtggcctggaacccgggccacgggaagaggccgacgatctttacggtgaccagggccccggggttacaggggttccgagacacggtggggcccccgacccaggtcaccgggtacatggggccggacggggggccgccgttccagagcgcggagttccccctcaagaccaaggggccctcgatctgggtccc

SEQ ID NO: 73403 - DNA, 304 bp, Zea mays
  Clone ID: MRT4577_166943C.1
cacaccggaaaggggaagctatagttctcacttaaattagggggggcccaaaaagcataaattttgcaaattgcccactaaaaacaaatttttcggacgtttggactttggaagagttgtcccttaactcccaaagaaaaaaaagaatggggggcccccaacttaaataaacatgaaacccgctaaacatttcatggcaagaaatacataacgatggtaatgccaaaaaacaaaccctggatgagttccactgagttttgatgggccagccctaaaagggttttttgaacaccaacaaatggtc

SEQ ID NO: 73404 - DNA, 553 bp, Zea mays
  Clone ID: MRT4577_166944C.1
cctcgagccggccgggaacacttcaacactctcctctaatttctttccattcgatccccccttcgcaatcaaaaccccatctcgtcccttatctatggcgcccatagccgagaaaaagcccgcgccgaacaagacgaaggaggaggatgccgcgctgcgataatgcgcccgccgggaacaacccgaacgcggataaccgtttccccgctgttaagtccgctgccaaggagggcggtgcggatgagaggatgaagatcaaggtgaagaagatcgtggagacctgacatatctacatcttctgggtgctgaagcaagagcacccgtacattggcatctcctccaaggccatgtcgatcatgaactccttcattaacgatatcttcgagaagctcgctgctgaggcagccaagctcgcgcgctataacaagaagcccaccatcacatcccgtgagatccagacctccgtacgcctcgtccttcccggggagctcgccaagcacgccgtctccgagggcaccaaggccgtcaccaagttcacctcggcctaggctgc

SEQ ID NO: 73405 - DNA, 736 bp, Zea mays
  Clone ID: MRT4577_166945C.1
ctcaaagcagcctactgccgctcaaagtagcttagcttaggcctcagggcagtccagtccacagggccttcttcaagcagatagcagtaccgtccatgggcaactgcacggcgtcgcagcgcgcagcggagtcgtgggccgacgacggcgagtgggaggaggcggcgtcatcgtcgccgttgtcgtcggagggcgaccaccaccaccaccaccaccatcatcatcaccgcgacgagaggagagaggagcaccacgactccgaggtgaccatcaggatcaccaagaggcagctgcacgagctgatggagaagaacggcggcggcggcggccacgggttaccgctaccggggcgacggcggtcgtccgcggagcagctgctggccgacatcatggactccggcgaggtgcaccaccgcgaccaccactggcactggaagcccgcgctgcagagcatccccgagaccgtcgagtcatgactgtcatgcatgatctttcttggtgtttggtggttcagtagctcaggcgtcgttgttttcgcctcttagcttgttcggtgtgcaattaagtgtagtcgctagctagtcggtgacacggtgtacatatcaaagttttcagacgtgtacatataggtcttgggaggtgggaattaattgttaggttaggtccattatatttcagatgtgtgggaaaagaagaatctgtgcaaggccaattgctgaagaagttgttttgtgtt

SEQ ID NO: 73406 - DNA, 243 bp, Zea mays
  Clone ID: MRT4577_166946C.1
gacactcgaacatactcgtgagaagataacatacctcttgtgataacgatatcaaaatcgtagagctttgctagctgaaggtcgatgaaccccaggtaggaatagaatgtaccgcggcagacatgcgatctggaaaacaacattggcttggtatcctccgactatgactcgatagacgaaatctatcagtactacgactcttcttacgctcaggcgctacatgagaagccttgatccaactac

SEQ ID NO: 73407 - DNA, 144 bp, Zea mays
  Clone ID: MRT4577_166947C.1
agccctgaggaccgctcgagcaaatatcagtacttatgggcatcccacattctgaaataaagaaaagagatagctcatccccgtgccgaaccgattataaagatgcatgaacaacctaaagcaaagattaaagccatcaatgct

SEQ ID NO: 73408 - DNA, 1039 bp, Zea mays
  Clone ID: MRT4577_166948C.1
cggggggcctcgagaccggccgggattattcaggcaggcgcattgactgatacacatatatacaacaagcaaggcggctagctacagcggctagtgcgcgcgtggtgcaggcgcatctagctactacctggtgcttgttgtgcatacaatggcgacttcgctgggactgaaccctgaagatctcttcacttcgtactcgtcttcctactactcctcgccgccgttcatgtccgactacgcggcgagcttcacgccggcggccggggactccacggccttctcctcggagctcgacgaccttcaccacttcgactactcaccggcgccgatcgtcactgctgccggagccggggctgggggcggcgatcgcaacgagaagatgatgtggtgtgagggtggtggtgacgagagaagactcagaagcaacggaaggatcgggttcagaacgaggtcagaggtggagatcttggacgacggattcaagtggaggaagtacgggaagaaggccgtcaagaacagcccaaatccaaggaactactaccgctgctcgtcggagggctgcggcgtgaagaagcgggtggagagggaccgcgacgacccccgctacgtcatcaccacctacgacggcgtccacaaccacgccagccccggagccgctgctatcatcgtcccgtacggcagcggcggcggcaatagcggcttctacagcccgccgcacagcggctccccgtcggccacctcctactcgggctccctagccttctgacttttccgggccttgacccatagttacctttacactccagtcgtcggataagaagaatgttcagcggctggctaaacagtctcaactgctgcagctattcaaattagtgttggagatgcaatttatagagataaaatactctagaagctatcgctgtagccggattaaattctgacctacttgtatagttttacacttacacagtgcaagtaataatatttaagggaagcagagagcactctaagcggctacctctcaaaaaaaaaaaaaaaa

SEQ ID NO: 73409 - DNA, 1581 bp, Zea mays
  Clone ID: MRT4577_166949C.1
cattgggacctcgagccggccgggacacaccgccgtgttcccctcccttgtcagttgtcccttcccccacttccctttccttcccgaagagacgggcggaaacggcagagccaccatggccatggaggacgccgcctcggagagcagcgactgggaggtgctctctgccacctccgcctgcgggggcggcgacgacgatgaggtattaatcgtctctggcgggggcggcgacgtcgtcctcgaccacttcgctctcacccccgacaccgcagccgcctgtcctggcgacggcgagggctcgtggtcggacgaccggggcgcctggcaaggattagaattactggatgggttcgatccgattccggaagtaagattcaatcttgcagctggtgtttggaaccagccgctgctgataagcggcgtggatgacgcccgcgaaggggcgcgcggtgcgacccgcagcgcagatggaaatcaagaggaggtggtagacgccgagattcagcaggagagtaattctgtgtttagccgcggtgaattgcgcccggtgctgcaaccggcgtatcatggcgtgggagaaactctggattctgatgcagctacacgtacaggtgcctcgctccagggtgaggtatcggagagttcccttgtgcgattggatggaggaattggtactggtgtagaaagatcgtgccttgaagatgctgtgtcaagtgatgagatccatggtgaacaagaagagcaggaacaagggagcaacgttaatgctgccactggttgcgatgaaccagatggagaggtcaaggatgatgctctgcctctggctcacacggcaggtactgaagagggggagaagcaatttgttgtctggtggaagctgccgttcaagctgctgcactactgtgcttggaaggtgaagccggtatggtccttctccatcgccgcagcacttcttggcctggtcgtgctggggaggaggatgtacagaatgaagcgcaaggcaaggggcttgccccagattaagattgcgtttgatgataagagggcctcccaatttgctgatcgcgcggcatatctcaaggaagccttcctggtagctagacgtgtacctatgctgagaacatcatctggtgctacgcttccatggtcaatggttcaggagagatgagtgaagctgctcaaagctccattctggatggtgtacatcagtacgagcatctgatttggctttgtctataaccttttgttttagatgacgcgtcaaggaggattccaatgttgatgtcagtggtctctctttctcgatcttctccatttttactttaccttatctttcttttttaaggaaccacttcttgtgctcctgatttccttttttttctttgcccttactctgtttagtccgtggttagtagtggtgtcctaaatttatcgttcgtacagacgggctcttttctttatcttgttaatttaaatgctagttgttgacgctgaattggattggatgacatatcagtaaggctagattgcgcggatcgtcacagaccgaaaaacacgtggtaaagagcaggtttacgaatg

SEQ ID NO: 73410 - DNA, 300 bp, Zea mays
  unsure (1)..(300): unsure at all n locations
  Clone ID: MRT4577_16694C.1
cctgccggtatccgggtcggaattccgaggttcgtgccacgccgccacgctttancggttctgtacgagggtgagttattgtcgaagataggtgggtggataaaaggttaacaaagccatagttggtcgaaggattctcctcataagagatggtccggatgcatacatcacgcgactgattacacttatgcgaattcatagatagatggtgaattaacctatttgtccgactagatagctaactgtatgggaaatgaaaggccagaaacatgacacccgagtaaactacatatcgctata

SEQ ID NO: 73411 - DNA, 199 bp, Zea mays
  Clone ID: MRT4577_166950C.1
tccgggaggctatgggacgcgacaaacagagggaatggcatgtctcgcggtgcctgctctgcagtgcacgccttgatgcaatgccctgccctgccggctgcaggtgacggcctggcccgctacacgatatggcgccggggcttcccctaccgagactgagaccgatgacccgtggggcgccctatacccttgggcagac

SEQ ID NO: 73412 - DNA, 1263 bp, Zea mays
  Clone ID: MRT4577_166951C.1
atggattgctcgtctgcggccacgggggaccactacgactgcggtgccgcgtggacgacggcgaactacaggctgcagccgcgggtgacgcggtggaaggccaagcggcggcggtggctgcaccagaacccggggttcccgtcccgcgacgcgcgcggcggcccgcgggtgctgctggtcacggcatcgccgcaggggccctgcggcagccccgacggtgaccggttcctgctccgggccaccaagaacaggctcgactactgccgcctccatggcgtcgatatggtgcacgccacggcgcgactggaggaccccgagctgcggtcggccggctacggcgacgggtgggccaagctcgcgctgctgcggcgcctcatgctggcgcacccggaggtggagtggttgtggtggctggacgtcggcgcgctcgtcaccgacatggggttcgagctcccgctggcgcgctacgagggcgcccacctcgtggtgcgcggcgactcgtaccagctcttccagcgtcgggcctgggacgccgccagcaccgccagcttcctgctccgcaacttccgcgcttgtacacctgctcatcaccgagaaggagcggtggatggaccgggtgtacctcgagaaccagtactacctgcacggcgtctggacggcgctggtcggcacgagaaggccatggagaagcaccacctggggtacggcgatgaccgctggcccttcgtcacgaacttcgccggctgtaatccttgcgacggcggcaagaatcgcagtgatgagtacccgatggaccggtgcgccagcggcatggagcgcgccttcaacttcgccgacaaccagaacacaaagcctccaacaacaacctgtatcgcatctgctaaaatagtgttcgcctctggtgcccgccaaatctgggtgtctttgttcgtccgctatctgcatcttcatgggcccgaggcatattgcacatcacactactacaacgacaacaagatgcagttgggggcgaaggcgatggtgagcaaagagcgatgtgagaggcgccgggaggaagttgcctctgctggcgtgggatgcgagcggcaccagcgtctagctcgcattctttccatgacgttagagcatctggtccatagcgcgggatccggatgcgaagttgtcaagagtggcatgttccgtggggaggtgagggcgaaggccgctgccaacggcgcaacggagaagacgttcttgcgtccgagcgtgggctctttcccttga

SEQ ID NO: 73413 - DNA, 1657 bp, Zea mays
  Clone ID: MRT4577_166952C.1
tcccctcttctctggccattgggtacctcgaggccggccggggcgaaacagaagcacggcaatctcgatctcgttcgttcccctgagcggcagtcagtgcgagcgagcgcgcacacagacaactcatcctctcccctctctctctcacacacacacatccatcatcccatccctgtgacgggcgatccgagggcctaccgacgatggtgtccgccgtgctccggaccatcctcgtgacgggcggcgccgggtacatcggcagccacacggtgctgcagctgctgcagcagggcttccgcgtcgtcgtcgtcgacaacctcgacaacgcctccgaggccgccctcgcccgcgtcgccgagctcgccgggcacgacggcgccaacctcgtcttccacaaggttgaccttcgcgacaggcacgcgttggtggacatcttctcgtcgcacaggttcgaggctgtcattcactttgctgggctcaaggctgttggggagagcgtgcacaagcccctgctttactacgacaacaacctggtcggcaccatcaccctcctcgaggtgatggctgcgaacggctgcaagaagctggtgttctcgtcatctgcaactgtctatgggtggcccaaggaagtaccatgcaccgaagaattcccgctctgcgccaccaatccctatgggcggacaaagcttgtgattgaagacatctgccgcgacgtccaccgctccgaccccgactggaagatcatactgctcaggtacttcaaccccgttggcgctcatccaagcgggtacatcggcgaagacccctgcggtgtcccgaacaacctgatgccctacgtgcagcaagtcgctgttgggaggttacctcacctcacggtctacgggacggactacagcaccaaggatgggactggggtgcgtgattacatccacgttgtcgacctggctgacggccacatagcagccctgaggaagctctacgaagactccgacaaaataggctgtgaagtgtacaacttggggactggaaaggggacgtcggtgttggaaatggtggctgcattcgagaaggcttctgggaagaaaatccctctggtgttcgctgggcgaagacccggagacgcagagatcgtctacgccgcaactgccaaggcagagaaggagctcaaatggaaggccaagtacgggatcgaggagatgtgcagagatctgtggaactgggcgagcaagaacccgtacgggtacgctgggtcacgcgacaacagcaaatgaaccacccatccatgcatcccatcctgcagtaggagcaagcagcagccttatagcctatgctaccataattagtaactcatcaatcatgctaccataattagtaactcatcaatcatgcatacataatcagccagtcatctgattaggaggtactgcgatgggcctcgcttcttcagtgtatagagggaggaggaggggggtcatcttgatattcttttttttatcattcccgaatgattattattagtagccagttcgatattactccatggttggttgctagagaaggaataagctccattcatatacctaactaaagatatatatatacatgcattcactgaaaaaaaaaaaaaaaaaagcggccgacagggacgccttgtacc

SEQ ID NO: 73414 - DNA, 915 bp, Zea mays
  Clone ID: MRT4577_166953C.1
cccacgcgtccgccgctggccttggcgggggcgccgagtggccgattggcacacgctttcctttcctgcagacaagctgtaaatctcgcctagctcgtcgtcggagaccaaggagaagagcaagggggggcgcagaggcttgctggcttgccagcctacctagctcgtcggggccctatggagatccagcaccaccgggggctgggcaactccaaggttgtcaaggtgcagagcgaggaggcgtgggatctgttcaccgatcaagcgagcaacgaaggccggcccgttgttgcccatttcggggcgtcatggtgcgtgacgtccctgtccatgaactacaagtttgaggagctggcgcagacccaccccgaggtcttgttcctctacgtggacgtcgacgatgtccagagtgtttcatccaggtacggagtgaaggccatgccgacgttcttcctcatcaagagcaaggaggtggtggggaagatcgtcggggcgaacccagacgaggtgaagaagctggtggatgcttccgccgagcccttggagactcagatagtcgtggagtagtagtcgtttcagacttttttttttttttgaagagtcgttcgtgtcttccgaaactgctccgcgagactgtgcgaccgtgagtgcttcttggtcagggtctggatcgtcccggactgtccagtgtcgcccgtgtgtgtgcgcgtgtgatgggtttctgtcgctttgtagcagtagtagcacagccttgcctgttgggctggtagtggtactgctagtgccaggtgccggctgactgtagtgtgactctgaatgctgcatctgttctggggttgaaaaaaaaataaaaaccaacaaaacgagctcccttcgaagcgcatttgcagggcagcttccctctttctcgattct

SEQ ID NO: 73415 - DNA, 586 bp, Zea mays
  Clone ID: MRT4577_166954C.1
cggcgctcgagccggccgtgtcgggtcagacgaaccccctcgcagacggagtcccctcacggcacgcgacagatatgtgcaagatcaagatgcccgtgccgtccctgttccgccggcgctcctccaagccgccgcatgagtaagcgactgccgcgcacgacgttcacgacagaggttcctctcgtcatacttctacgttctgaggaggagatgacgcgcgtgttccgtaagctctactgtcgaacgtcgacgggcgcatatcgcgcctgcagctgcggacgctgttcgagagcctgcaccacgtcagcgacggacgacgaggggcagagcatgatggacgagaggaacgaggacgatgacggcttcattaatctgaccgagttcgcgggcctcaacggcatggagaccggagattactgctactacgaggagatactgcgccacaccttccttttcttcgatgcccatgggagcggcctgatcatcgacctcgtcctcttgcggaactcctgagcctaagcattgcatgctccaagttgtgctcgctcacttggatgaacaaaaatgctcatcacaaattcgcacg

SEQ ID NO: 73416 - DNA, 266 bp, Zea mays
  unsure (1)..(266): unsure at all n locations
  Clone ID: MRT4577_166955C.1
cgnganccgaccgtctcagtgtgcgcgcnaagaagagaaggaggaggnagangaagaaaaatgtntccggccaancncaccgtcgcnaccgccagcnanccggtcaccgggatggcggcnccgccngtgaccggcatccccatcagcagccccggccccgccgtcgctgccagcnagtngtcctcnngcntctgcgcctgcttcgangactgcggcctctgctgcatgacgtgctggtgcccgtgngtgacgttcgggcggatcac

SEQ ID NO: 73417 - DNA, 452 bp, Zea mays
  Clone ID: MRT4577_166956C.1
atatgaatcttttttttttttttcttttttttttcttggccaaaacaactaatttattttttggatgatggggcccaccaaaccaaaacagaaccttgccttaatggcctgtaaatattaaaagcagcagggggctttaaactaaggggatttttttaaactaaaccccccaaataaaactaaagcaacctgggggggaagcccggttttttcaagcttgcaaaggattacccccccctggcctggtttatccaaagcccccccacttccgccttttgaaaatcttggcccaaaaggattccaaccctttttaaacccaaatgctgggcggggcttaaatgcccggaacaagcttttggaagctcccattctctgcctccggaaataccgcttttaggtaaagttctttgaagaggctcttcacttttcccacccagggggggacttttttg

SEQ ID NO: 73418 - DNA, 304 bp, Zea mays
  Clone ID: MRT4577_166957C.1
acgcccacgcgtccacaggaaccaacaagtcgaacaacgtccaagcttttgtgttatgaggctctctcacgcatggcgacaagcaaagcgtcctccaccatggcttccacgacgactacggcattcaacaacctgactgacgtgcggctcgccgagctttagtcagcgctgtatgggacaaggcaggccatatccgctggacgaactcacggactaggcgaggacgacaacgcgccgctgccctgctagcagcagccgaggccgtaggcactggacgactggagcagcatcgtcaacaaggcgt

SEQ ID NO: 73419 - DNA, 212 bp, Zea mays
  Clone ID: MRT4577_166958C.1
gcctggaatcagatgggcccaacatgacagagaatggcctggaagatgaatcaagacctcagcgtcgtaatcgcagccgccgccgccgtaaccgtggtaatcggactgatggctctatcagtggagaccgccagccagtgactgtggctgactattctcacgagcagagtctcagagccgccagaggcccaccctggaacgcactaaaccct

SEQ ID NO: 73420 - DNA, 310 bp, Zea mays
  Clone ID: MRT4577_166959C.1
gaaggaggatgacaccatcattgggggggcctgaatgactgtgggggtgggcaagggcaagcaaatatacatcacggtacaaagcgtgcatctctaatgcactgctcgccatccaaccaaatctagtgtacgtcgcataggccgccttacagtatagtaagggctcaccataattattcgccggacccagcagagtgggcctaacacttgtccaggatgacatccctccagcaccgactggctgcctacctagatcggcaggtggacgtgcaggggtccctaaagtggatcgtcgctcagctccctccag

SEQ ID NO: 73421 - DNA, 342 bp, Zea mays
  unsure (1)..(342): unsure at all n locations
  Clone ID: MRT4577_16695C.1
acccacgcgtacgtgactgtntcgaactctnctgcntacctacaacatttacaacanttacttaatccactggcnnttgctaacttataaatcgttgccgtcctacaacancaacaattnctttccatacaaccatttctctttgatgaaccctgccttgttgtgtcatcaacccatctttttattttccatcttttatattacatattataattactctataatggtaccctcatatcctcatctttttcctataaataatcaatttttttcatttatattttattaaatcttatctattattcttatcatctcttatactcacatctcatactatcttta

SEQ ID NO: 73422 - DNA, 295 bp, Zea mays
  Clone ID: MRT4577_166960C.1
cgcgcgcatgccgccgacacttcattcccattcctctccactcacgccgagctcgttactcttctcccccattgaaatgctgctaatgtttcttcttggacaccattaatagcagccgcccacgcccgcctcttctccttccccactagtcgtgccatcaagtagccccactcagctattaatggccgtcgaatcctgtcctctcgccatcgacgtctgtttcttctccaagttataaatagcagtgccggcgccctgtggaaccagttactcacctaccctcgctaccaagcgc

SEQ ID NO: 73423 - DNA, 317 bp, Zea mays
  Clone ID: MRT4577_166962C.1
attcggctcgagggctaggccatgctgtttatggatctttccggaagaaggtgaacgctgctaagcacaagtttcaatcttgatagcatctgtagttatcgctggatagtgtacaatgctagaagattagggaacactagcaccatgctttgctattgacagatagggccattgtgtacttctgctgcttcgttatgggatgtggatccatccccaacattatatgtgcagagatcttgtaaaccagtgtgcaaagagctctgtcttgccaaatagcgcctatacatgctggatcaacaaatattaaatgtcaccta

SEQ ID NO: 73424 - DNA, 567 bp, Zea mays
  Clone ID: MRT4577_166963C.1
tttcccagtacgagaggaggtactgattcttgactaggcacactaatttccgctgaacgtaggttcccttgctatggcccgtgatggcgctagaggaggggctgcccgaacaggtacaagaactggccatgacgcttgtacgacctcttaccctctggtctcggtaccggtgtgggaatacgatgtgtcacccaagaactccgcgactgacagtcttgttgctgggaacgctgatcccatgatgcactgccactcagcctcgacttactctgtgaacttttcactgctatctgccatgtacgatggtaccactccctgagatatccaagaaaatagatatgtacgacttgttggtatcgcagctgaaaattgtcatgcctgaatgtgtacattgcgagcttgaggtcccgtaacaggcaaactccccgacaccggcgatactgccggcgctgaggtcgcgtactcgcgacaagctggggattgccccagctgtgccaactaaatatagagcgtatcgataccgccgaccgatagggtcttccctggaccccattcgccctatgaaga

SEQ ID NO: 73425 - DNA, 391 bp, Zea mays
  Clone ID: MRT4577_166964C.1
aacatcgcaatacagaggtacagtatttgtctagccaatgatatacatagatagaaaaccactgttgtacgccactatagctcacgttctccatgagctcttctctctgctgtttcttcctctgctaactgcgttatgatatgacgtcgtataaataatctcacaatacttccttattttcagcatggcctcctttatgtttatttaacagtagcaaccaacgccgatcgatgtttccttcaagaaacggccactcactatgtggtgtgcagaagaacaaatgtaagcagctcctacgggtaccagtagtcatgtcagtgtggaagctttccaaccaacgcctccttcgaggaacccggtcgtgctgacatgaatgtaggccatgcaaaca

SEQ ID NO: 73426 - DNA, 353 bp, Zea mays
  Clone ID: MRT4577_166965C.1
atagtgctctcgggcccccacgggggcccgggtggcccagtgggcccggttggcgtgctcttttggtctttgtgaccctttgtttcctttgggccttttggggggggagagggacgggaaatccttgaacggtttacgggggtcctggggacaaacgcgccatatcgtcccctcgggccccccgggtcctcagagcctctggacgtgtgcatatgtccccgtggccctcgtctcctgccctgtgtagcctggcctccgggccgccccttccggggtccccggtgggcctttttggcctttcttgggttcacccttgtgggggttttcgtttgttcctttttgcccctgcgggc

SEQ ID NO: 73427 - DNA, 327 bp, Zea mays
  unsure (1)..(327): unsure at all n locations
  Clone ID: MRT4577_166966C.1
aaccatgttctctcagaagcatcagcaaacgtatcaagcatatatataaactgtacgtaaacaccaagcacgcacataaccacatgcaatgcaatgcattctcgtgttctaatgacaacgcggccggatcagctggtggcgttgttgctagtcatcggtcatcagcctctgcactatcagctctaccacggcaggggcatcgacggtgacagcgaccttcacggtgggcatgccactccaggcttgtgatctctccgtacctttcttggntgttgtcgaaaacagtaaggccccttgggtgatcccaaaccgtctgtaccctcacaa

SEQ ID NO: 73428 - DNA, 1178 bp, Zea mays
  Clone ID: MRT4577_166967C.1
gaaggttggtttttaggctaagtgacctttaatattttagtcactaagtatccctaacgagctaaggctagctgagatccaaaagtaccctacccttggttttgtgctccagtaagccctttaggctagaagcttctttaatattttagttactgataaattttctgctgtaggggtttcccctacagtttcctggtcaaaaaaaatattttagttactgtgaaaaatcactatacctcaggattgtttccttgctatgcacttgtattgtgatgtaatgaataaggtgttagttgtaatggtcactatcaacaaacgggagatgtatgtatattggcgatactgatctagagtacactaatgacaacatgcctatcactacactgtaaagcaaactattgtatgctatgtggatgcagcagattatgattgcagtatgctggaactgcaatatcacagtgtcagggtttcttttagccttgtggctgactggctgtagcagatagccagatatttcattgcatctaaccatttctcatgtccatttaagctgctgttgtttacaacacctttgtactctagcttgaatctgcaatgcgattgatgagctttattgtgcagatagcattgtttgtttcagcaagtgatgctgtgcaaccgggctggctcttgaaatacctaagaggaatcaatgccaaaagaataagagaaattcagtctaatcttgtgaagtattcaagacattttctgtattcaagtcctgcccaacctctcggaccagaagaccttacatggagaatgattgctggtaagctggtaaatatcaagttgcagattcgccgttctcaacgtttggtcaaagagtcaaggagcatatgtacatgtgaatgtagagttgggaacaccacgagaatgctttgaccaatattttcatttgtgcctttaaacttttgtagcatagccgttttttgttaccaatgaggcgagctttgagtttggcaaaatttgccgatgtatttgtaaatgcaactgagctggaaagagttgtgatactgtacctgccccgatgcttgtgtttgctttactgcccgttaggaacaaaaggaatgtaaaacagagaaatgtaaaaaaaaatcaagagcttgaagtagatatttatttcctccatttcatgaatg

SEQ ID NO: 73429 - DNA, 804 bp, Zea mays
  unsure (1)..(804): unsure at all n locations
  Clone ID: MRT4577_166968C.1
ccggccgggctagcactccctcccgtgcacacccatccactcgccgcccaagcccttagcttcctgcccaacgctgctgcgcttcacgctccatcgcccctcatccaataactccaacaaagaccgggttgcttcgagctgcacacaacagaagaagcacgcccatccgcggctcttgcttcttttggcgctatgatgtcgtcggcgccggaggagacgttgttcaacctggaccagcagcagcctccgccggcggagcaggagcagatctgctacgtgcactgcagctactgcgacaccatcctcgcggtgggcgtgccgtgcagcagcttgttccagacagtcaccgtgcggtgcggccactgctccaacctgctctacgtcaacctccgcgccctcctgctgccggcggcggcggccaataaccagctaccacccttcggccagcctctcctctcccccacctccccgcacggtctacttgacgctgaggcgatgtcgttccaggcgccgagcctgccgggtgctgaaccgccgagcgcttgcgtgagcggcgtcacgagcatcaacaacacgtgcggtggcaacaccaccacgtcgtcggccatgtcgtccatggcgccgccaccggccaaacatgcactgcaggaggcgcagcagctgcccaggaccgcggcgtcggtgaacagaacttcagagaagcggcagagagttccttccgcgtacaaccgtttcatcaaagatgaaatccagcgcatcaaggccagcaatccngacatcactcacagggaagctttcagcgcg

SEQ ID NO: 73430 - DNA, 1605 bp, Zea mays
  Clone ID: MRT4577_166969C.1
gtccaggcggaactcttggttctgtgcgggtgggggtcagcgtgcctgtaagcgtcagcgtgttccagttccagcttctatttttgctccaaacaagtcgtgccccactagggatcctatccagattcgtggggacacccccgtccagttccagccttccaacttccaaccctctcctctccgcaggctgtagcatttgtcgggttggattgggttgttccgcttgggtagcctggtgggatcgaaatctgtgtgggatccatggcggcggtcgaggggacgacgaagaagaaggtaatcatcgacaccgaccccggaattgatgacgcgatggccatcttcgtggcactgcggtcgccggagctggaggtgctgggcctcaccactaccttcggcaacgtccacaccgccctcgccacgcgcaatgcgctccacctgttggaggctgttggaaggactgacatccccgtggcagagggatcccatgtaacaatcaagaaagccaccaagctgaggatcgcaagctttgtccacggttctgacggcctgggaaaccaggatttccctccaccggctaccaagcctatagatcagtcggctgctgccttcctagttgagcaagcaaatctgtaccctggacaagttaccatcgtcgccctcggtccactaaccaaccttgctctggcagtggagcttgacccttcgttcccgaagaagatagggcagattattattcttggaggtgcgtattcagttaatggaaatgtgaaccctgcagctgaggcaaatatctttggggatcctgatgcggcagatattgtgttcacctgcggtgctgatattttggccgtgggactaaatgtaacccaccaagtagttctaaccgatgctgacagggagaagcttgaacagtgtgatagcaaatatgcccgctacatatgcaagagaatgaacatttattttgctaacaagtggttctactcgatcctgaaagggatgtgcttgaacgatctaacaacagttattgctgctgtttgtgcaaggctactgacgtttatattaagtatcacaggggcggttactgttgaaaacaagcagagccttacggtctaacgacagtcctagaatgggtacggccaattgctaccgtcgagtgcaatgcccattgtgaggggttggtgagtcgggagatgcaccggccgtagtgtattcgataacaccaagattagttactgaggaatcacagccatacaagctaattgccagcgcgaacgttaataccacttccagtgcccaagggatgaacaaattgttgaacatgaaagtgcatgtcttgttaccaagaaatttggtagtcttgtcatcaaaacagcagtgtcattatattgcgcgaatgcaattcattgcattggatgtggtgttctgcgtgcttggtgattaccagttgtattatatatatatggggcatacgttcagttagacaatgtcaaacagttatactatactagtacattgcttttaaatgaaattgcacacatgatgatgccgtaaaaaaaaaaaaaaaaaaaaaaaaaaaaaaaagaaaaaaaaaaaaaaaaagcggcc

SEQ ID NO: 73431 - DNA, 524 bp, Zea mays
  Clone ID: MRT4577_16696C.1
gtgaaaatctggtctaaatcactatatctgcaaattttcgtgggcgcatgtgcaccccctacactggacttagcttcgcccctgccagcaaggggaggcggcggcacaaggaacgggagaagaggagaagtggaggggagagaagaaagaaaaccggatctctatacgatattggaggaaaatgagagcattgcatatgagcctctagggcaagagtgcatatagtgaagggacaaaagactctagcagctaggtcaaagagaagtaatcaatccatgttctgaaaaggactatgaaggatgatgcctcttcaaaaaataacatttccacaaaggacaagacctctaactaagatggttaggttgtatgttagaacctgagctcgactctacatgggagagaattttatgctcaggataaaaaaatgtatcgtgtgtcttatgccaaagcacagtctaaggcctaggttgaatccggggtcgttctcacatgggctgatgggggtttgtggtgaccctcgagca

SEQ ID NO: 73432 - DNA, 264 bp, Zea mays
  Clone ID: MRT4577_166970C.1
acaaactaaatccaacgacaccataccctctatctaacaactcctacaaacaccataaaccccactataatcacccaacataccaaaaatcaacacctacagttgctaatcaaataaccaataacctcgccagaccacacataggtcaaactaaaacaactagcacacataacaatcctccaacgaatcacatacctatcaaactacaaatatatctttcaaaaacaactatacaccatgtgtgaccaacacaccctacttcac

SEQ ID NO: 73433 - DNA, 1819 bp, Zea mays
  unsure (1)..(1819): unsure at all n locations
  Clone ID: MRT4577_166971C.1
cctcgaggccggccgggccgggagcgtgttccagttccactagggatcctatcctatccagattcgtggggacaccctcgtccagttccagccttccagccttccaaccccgggctctccgcaggctgtagcatttgtcgggttggattgggttgttccgcttgggtagcctggtgggatcgaaatctgtgtgggatccatggcggcggtcgaggggacgacgaagaagaaggtaatcatcgacaccgaccccggaattgatgacgcgatggccatcttcgtggcactgcggcgccggagctggaggtgctgggcctaccactaccttcggcaacgtccacaccgccctcgccacgcgcaatgcgctccatctctgggggcagagggagttatgttcttgtgtagggttttgtgtggtttcgtggagccaaggcaatgtacataaccagattttactgtttggagaacatagttttttttaaggttcgaaaatgttctgtgtggttaaaaaaatttgtcaaaatgtaaacatttgttttgaggtcatttaggccccaaacaaaattttttggacttatttcgttggttggaagggctgacatccccgtggcagagggatcccatgtaacaatcaagaaagccaccaagctgaggatcgcaagctttgtccacggttctgacggcctggngaaaccaggatttccctccaccggctaccaagcctatagatcagtcggctgctgccttcctagttgagcaagcaaatctgtaccctggacaagttaccatcgtcgccctcggtccactaaccaaccttgctctggcagtggagcttgaccctgcgttcccggagaagatagggcagattattattcttggcggtgcgtattcagttaatggaaacgtgaaccctgcagctgaggcgaacatcttcggggatcctgacgcggcagatattgagttcacctgcggtgctgatattctggccgtgggactaaatgtaacccaccaagtgggtctaaccgatgctgaccgggagaagcttgagcagtgtgacagcaaatatgcccgctacttgtgcaagctaatggacgtttattttgattaccacagggacgcctactttataaaaggagtcgctggtctatatataacgacggttattgctgcggtgaatccatcactgctgaactcgttcgactatgtgttggactggaccattctaatgtatcctcaaataggcgccaatccgtgaaccagggtgatcttattgtattgggagctgatcttattgtaatggcaataagtgtagttgatggatggactaatgctgacactaaacttatggagcatgttttgcttgtggtgttaaagagggctaggatggagcgtatgaaggcattggagaagatgatgaattccaaatcagcatcttccattgcgaatctggtggctttgatcatttctgtcatcttttgcttcttcgtactttggcaaggccgttttgttgcgctgttgtgcacgcggttgtagggagggcgtattgtggcggctacaagggaccgatgttcctatgtggcggtgacaacgacaccgtggagccaaggcaatgtcagcaagctgannnnnnagattgggaactattgttcnnnnnaaagatcgaatatgttctagcatcttnnnnngatttgtcagaatgtaaacatttgttctgaggtcatttaggcctcaaacagaatttcttgaacttatttcgttggagggaatagcacatctcgagatctaaatgtgtatagaacatatannnnnnatgggtatc

SEQ ID NO: 73434 - DNA, 1553 bp, Zea mays
  Clone ID: MRT4577_166972C.1
acctcgaggccggccgggccgggatccgattagcgatcaaggctagaattgtttatcgctcgcgggcgggaagtgtggtgatgcgtctcgatccgcgcaccgcttgggcttctcgtaggagtactgctcagcctgtcaccgtcagcgtatgttcttgttccagttcctatttttactccaagtccactagggatcctatccagattcgtggggacaccctcttcgagttccaggtttccaaggtccaaccttctcctctctgaggccgtagcatttgtctggttggattgggttgttccgcttgggtagccgggtgggatcgaaatctgtgtggcacccatatggctgcggtcgaggggacgaagaagaaggtaatcatcgacaccgaccccggaattgatgacgcgatggccatcttcttggcgctgcggtcgccggagctggaggtgctgggcctcaccactaccttcggcaacgtccacaccgccctcgccacgcgcaacgcgctccacctgctggaggctgttggcaggactgacatccccgtggcagagggatcccatgtaacgatcaagaaagccaccaagctgaggatcgcaagcttcgtccacggttcagacggcctgggaaaccaggacttccctccaccagctaccaagcctgtagatcagtctgctgctgccttcctggttgagcaggcaaatctgtaccctggtcaagttagcgttgtcgccctcggcccacttaccaaccttgctctggcagtcgagcttgaccctgcgttcccggagaagatagggcagattattattcttggcggtgcgtattcagttaatggaaacgtgaaccctgcagctgaggcgaatatctttggggatcccgacgctgcagatatcgtgttcacctgcggcgctgatattttggccgtgggactaaatgtaacccaccaagtggttctaaccgatgctgaccgggaaaagcttgagcagtgtgacagcaaatacgcccgctacttgtgcaagctaatgggcgtttattttgattaccacagggacgcttacttcataaaaggagcgtatcttcacgatccaacgacggttattgctgcggtgaacccatcgctgctgacttacacagaaggcgttgtgagggtacagacagtcgggatcaccaagggccttactgttttcgacaacaccaagaaaaggtacggagagatcacagcctggagtggcatgcccaccgtgaaggtcgctgtcaccgtcgatgcccctgccgtggtagagctgatagtgcagaggctgatgaccgatgactagcaacaacgccaccagctgatccggccgcgttgtcattagaacacgagaatgcattgcattgcattgcattgcatgtggttatgtgcgtgcttggtgtttacgtacagtttatatatatatgcttgatacgtttgctgatgcttctgagagaacatgattaaattaaattatgatgccagataatgctccgcctagagtgttgcgagagacgaggttataactgtaagatgactg

SEQ ID NO: 73435 - DNA, 1694 bp, Zea mays
  Clone ID: MRT4577_166973C.1
aatcacgcgtgctgccgagccggggtctgctcagcctgtaagcgtcagcgtgttccggttccagcttctatttttgctccaaacaagtcgtgctccactagggatcctatccagattcgtggggacacccccgtccagttccagccttccaacttccaaccctctcctctccgcaggctgtagcatttgtcgggttggattgggttgttccgcttgggtagcctggtgggatcgaaatctgtgtgggatccatggcggcggtcgaggggacgacgaagaagaaggtaatcatcgacaccgaccccggaattgacgacgcgatggccatcttcgtggcactgcggtcgccggagctggaggtgctgggcctcaccactaccttcggcaacgtccacaccgccctcgccacgcgcaatgcgctccacctgttggaggctgttggaaggactgacatccccgtcgcagagggatcccatgtaacaatcaagaaagccaccaagctgaggatcgcaagctttgtccacggttctgacggcctgggaaaccaggatttccctccaccggctaccaagcctgtagatcagtcggctgctgccttcctggttgagcaagcaaatctgtaccctggacaagttaccattgtcgccctcggtccactgaccaaccttgctctggcagtggagcttgacccttcgttcccaaagaagatagggcagattattattcttggaggtgcgtattcagttaatggaaatgtgaaccctgcagctgaggcaaatatctttggggatcctgatgcggcagatattgtgttcacctgcggtgctgatattttggccgtgggactaaatgtaacccaccaagtagttctaactgatgctgacagggagaagcttgaacagtgtgatagcaaatatgcccgctacttatgcaagataatgggcatttattttgattaccacaaggatgcctacttcattaaaggagtgtatcttcatgatccaacaacggttattgctgctgtgaatccatcgctgctgacttacacagaaggtgttgtgagggtacagacggttggaatcacaaagggccttactgtttttgataacaccaagaaaaggtacggagagatcacagcctggagtggcatgcccaccgtgaaggttgctgtcaccgtcgatgcccctgccgtggtagagctgatgatgcagaggttgatgactgatgactagcagcaataccagctaattggcagcgccaccattaagacaatttccagttcttaagggagaaacaaatgttggaacatggaagtgcatttgttgttcaccagaaatttggtcgtcttgtcatcaaaacaccagaattgcattattgcacgctagctactcatttctttggtaattatgtgcgtgcttggtgtttatgtacagttttatgtgcttgataatgggcacatggccagttcgacaatgtcatacagttatactatactagtacattgcttatgcttgtgagagaacataattaagtttgtcatcaaaacaccagaattgctttattgcacgctagctactcatttctttggtaattatgtgcgtgcttggtgtttatgtacagttttatgtgcttgataatgggcacatggccagttcgacaatgtcatacagttatactatactagtacattgctt

SEQ ID NO: 73436 - DNA, 238 bp, Zea mays
  Clone ID: MRT4577_166974C.1
caaaaatacaggcaaactagcgctagaacacgcactaagaactatcgagaatatccttccactctcggggcaagagccacgcgcaggattgtatagattaccaaggaagggagcatcacactatgacttccgcggtaaattcaagatttgtgaaagccacaatacccccttatcagatgaggaagatggtatgggcgacacaaaaacatgatggttatatcatgtcacaattttctgc

SEQ ID NO: 73437 - DNA, 186 bp, Zea mays
  Clone ID: MRT4577_166975C.1
cacccccaaacccccgattgcatgactttatttaacaagcaggccggctcccacacttgttcctattgccaatgaacaaaagcacacgctcgttactaacaccgcatgacatactagatataccctaaattccactactgctattactaaaatcattcatgcaaaccatcctgttattctgcacat

SEQ ID NO: 73438 - DNA, 290 bp, Zea mays
  Clone ID: MRT4577_166976C.1
ggacctttgggctgatttatgtgcttgtggatgtgcaggtacatctgcgcctggcctacatgtgtaacattccggttaaaaagtccgggtcactaccaaagtgacattggatgacgcgtagcacttaataccgatctaagttcacgatacatcacaatactaacacaactctagccaggcgcatcgtatctagtgtatcaccgtaatttcgagaacgtcaaaatcttatgataggttaatacatactgtacgtaagataaataccggcactcagacgatcctacaaccgc

SEQ ID NO: 73439 - DNA, 342 bp, Zea mays
  Clone ID: MRT4577_166977C.1
cccacgcgtccgcccacgcgtccgcccacgcgtccgcccacgcgtccgcggacgcgtgggcagtgatgtttcgtgcccaatgcagccttgttgttgactgtggcttctctttcacccatgcatcccctgtacttcagaactttactcttaattatggtgttcggcgtatggaccttggcggcaaggcccttacaaactatctcaaggagctcgtctcataccgttcccttaatgttatggatgaaactctcctcattgatgatgcaaaggaaaagctatgttttgtctcgcttgatgtccctggtggtctacacgttgccaggttatcatttaaggataacc

SEQ ID NO: 73440 - DNA, 536 bp, Zea mays
  Clone ID: MRT4577_166978C.1
gcctaccctctagatggccaccagggtcgcacttgcaccacccatgggggccgtagcatcagtggcagtgctattcgtcatgtgtgctgtctgcatcagttgcgcgggcaagggcatactccaggtcggctactacaacaagacttgcccggcagcggagcagatcgtgcgcaacgagaccacggtcgccatcggtagctcgccggacctcgccgccgcgctcctcaggctgcactaccacgactgcttcgtccagggctgcgacgcctccgtgcttctggactcgacacccaacaacaccgcggagaaggagtcgctgcccaacggcagcctccgaggcttcgacgtcgtggcgcgggtcaaggaccagctggagaaggcgtgcccgggcaccgtctcctgcgccgacatcctggccctcatggcccgcgacgccgtctcgctggccaggggcccctcctggcccgtggcgctgggcaggcgggacggccgcacctccagcgccgccagctgcggggaccttccgccgctgcacg

SEQ ID NO: 73441 - DNA, 195 bp, Zea mays
  Clone ID: MRT4577_166979C.1
catagcgcatcacgcggccgggtcggatctgagacgagacgagttaccatctcatcccaactccggaacgaacagttaccatctcatcccaataccgcctcgaacggatactcgtcggactacggactcgacccgaccaccccgacgccgccgcagatcaaagaagatggcagctgtcgacacattcctacttca

SEQ ID NO: 73442 - DNA, 356 bp, Zea mays
  Clone ID: MRT4577_16697C.1
aaaccaaaagtgacaatttattatttaaagcaccaacgtaaaaccacacagtatcagttaagtcccaaaatgaacaaaggaagagaaaaaggctgcgctgaaggctctgtgagacagaatagttgtatcctctccatcaccaactacaaactaggaacatagaaatgtcacatacaaaatgtcacagatttcttcatgactaaaaggctggcattgctgctcatagatccttaacaatcgcaatacccatagagttggctgtgccaatgatggacttgcacagcgcctcaagagagatgtgcttgcagaaggggtcagcctgcttcaactttgcaatctcgtatacgtggcggagg

SEQ ID NO: 73443 - DNA, 101 bp, Zea mays
  Clone ID: MRT4577_166980C.1
acacccagcgcaaagcgatggcgtcgctcaccatgatggcgttcttcgacgccctcgaggtggccgcgcactagcgccgtaggacacttcacgtggtcaag

SEQ ID NO: 73444 - DNA, 645 bp, Zea mays
  Clone ID: MRT4577_166981C.1
aatcacaataccacagcaatcaagcaagcaagcaacaatggccgcctcgtcgtcggcgctcatcctcctcctggccgtggggctcgtcgccggtgccagcgccaccagcttctccatcaccaaccgctgctccttcacggtgtggccggcggccacccccgtgggcggtggccggcagctcaacagaggcgaaacgtggaacctcgatatccccggcggcaccagctccggcaggatctggggccgcacgggctgcagcttcaacggcaacagcgggagatgcagcaccggcgactgcggcggcgcgctgtcctgcaccctgtccggccagtccccgttgacgctggcggagttcaccctcggctcgcaggacttctacgacatctcggtgatcgacgggtacaacctccccatggacttctcctgcagcaccggcgtcaacatccagtgccgcgaccccagctgccccgacgcctaccaccagcccaacgacgtcaggaccaaagcttgcagcggcaacaggaggttcaatgtcgtcttctgcccatgatgagctactctatcatatgcatgcgtgccatgccacggacgaccataatactatctgaagtgtaatactatgtccgcgcgaaagctaaactattt

SEQ ID NO: 73445 - DNA, 365 bp, Zea mays
  Clone ID: MRT4577_166982C.1
agagtatcataatttatgtttaaaaaatacatggtgaacttttcattattgggttggatagcttatgtgtctaataataaatttactctgctgatagagaagagaactatatggaaacattatgacgaaaaactataatgtattttcaaacataagttatgatatctgctgtcaccctataaaattcgaactaaaatatctacttgtgtcttttgtgtctgggtgggggaaacaaaaaaagggaaatcttaataaggggttagattggatcaactggaagatccgaagggtaaattgagcacaaaattgtttaggggttaccctaaaacaacttatctgtgcaggggagtaatttggactttttc

SEQ ID NO: 73446 - DNA, 2130 bp, Zea mays
  Clone ID: MRT4577_166983C.1
gggtacctcgaagccggccgggattcgatgctcggaagaaaggcttcctcgcacactggcagttgacttgtctccgctcgtcccacctcatcctcctccctgatttttgccacgagctcgtcctagctagatatgtatttcctctgaggataatctcgtccccgcatcgtatgtctaggatatctcacttggttattgtcccgcctccaaatcaaacgcatcctaagtgacacaggcatagagaagctttgctagcgaagtccagtgcaactccaccctctccacctagctaccactcccttagagcgccactgccgccaagcgcatggcgggaggaggggcggcctaccagagctcgtcggcgtcgccggactggctgaacaagggagacaatgcgtggcagatgacgtccgcgacgctggtgggcctgcagagcatgcccgggctggtgatcctgtacggcagcatcgtgaagaagaagtgggccatcaactcggcgttcatggcgctgtacgccttcgccgccgtctggctctgctgggtggtgtgggcctacaacatgtcgttcggcgaccggctgctgcccttctggggcaaggcgaggccggcgctcgggcagcgcttcctggtggcgcagtcccagctcacggccaccgccgtgcggtaccgcgacgggtcgctcgaggcggagatgctccaccccttctacccggccgccaccatggtgtacttccagtgcgtgttcgccagcatcaccgtcatcatcctcgccggctcgctgctgggccgcatggacatcaaggcctggatggccttcgtcccgctctggatcaccttctcctacaccgtctccgccttctcgctctggggcggcggcttcctcttccagtggggcgtcatcgactactccggcggctacgtcatccacctctcctcgggaatcgccggcctcaccgccgcttactgggtagggccaaggtcggcgtcggaaacagggagcggttccctcccaacaacatactgctggtgctggcgggggcaggcctgctgtggctcggatggactggcttcaacggcggcgacccgtactcggccaacatcgactcgtccatggcggtgctcaacacgcacatctgcgcctccaccagcctcctcatgtggaccctccttgacgtcttcttcttcgggaagccgtcggtgatcggtgctgtgcagggcatgatcaccggccttgtgtgcatcacgcctggcgcaggcctggtgcaagggtgggcagccattgtcatgggaattctctcaggtagcatcccctggtacactatgatggtactgcacaagaaatggtccttcatgcagaggatcgacgacaccctcggcgtattccacacccatgcggtcgctgggctcctcggcggcgccactactggactctttgctgagcctgtcctctgcaacctcttcctcgccatcccggactccagaggtgcattttatggtggtgatggtggatcacagtttgggaagcagatcgctggcgcactcttcgtcattggctggaacattgttatcacttccataatctgtgttcttattggcctagtcctgcccctccgaattcctgatgcacagctgcttatcggggatgatgctgtacatggtgaggaggcgtatgctatatgggcagaaggcgagctcaacgatgtaacccgccaagatgaaagcaggcatggcagcgtcgctgtaggagtctcacagaatgtttgagcatagttcttgtaaggttgaaagaaagaaaaatacaagtgcatttgtttgctaattgctattaactgatggcacaattgtatgcaacaaaacacctgttcacggaggaatgtagagtgtcaggatttgattcttagcagataagtctaggaggttaattagtgatcctttcaagtggcataaggtgcatgttgggtaacgttttctaggtatctctccaattctttctcaccactttcaagagtctcccacagtgctttccttaatgcatcctgcccttggctcttcgtgacaagatcataagcatctctcataacatagttgcagtatgcagcttcatcattcatacattcctgatatgatgat

SEQ ID NO: 73447 - DNA, 220 bp, Zea mays
  Clone ID: MRT4577_166984C.1
ggattatatcttatataaattgttttagtgttatctttgaaggaaactaacataatactaatgacacattccaccaactcacataattatagaatagataataacttttgtttattaaggaatctctattatcaatattagatggtgtttttcctttttagaatatttttgtctgaatatatgtgtttttttcatacacaaagtaaacagaaaataataa

SEQ ID NO: 73448 - DNA, 887 bp, Zea mays
  Clone ID: MRT4577_166985C.1
agaggtcaccacatataagcttggtattaaataatttcgagaagattaaactatacactgaccaggactaaccgaactcaagttgtgtgtgatgtccacttggcttgggcattttgtcgaacaagtggtgcacaaggctcgacgtctacaacagcagcgcggacgacgacaatggtcagagctgcccaaaacaccggaatgatgacgggcctcgaccatgtagaccacgggcatgatgctcgtcctcacggagctagagaagacatggcgcacacggaggccagcaccgtacgatgtccgcaaccatggaggcgacgcatcggcagaattagagccgagcagctgagggagatcgacaaccaacgaggacgaagattcgacgaggctgcaggttgggatgaggtcgacgttcggagtccacgacgagggaggcagcgacggttgtcgaggggagctcgcaggggatccccatccgacctgggagagctcggatggaggccagggcagcgcgacgagctgaaagcgagaacgtaccggaggggaagcaggaagatagatccgaccacggccaggagagcacgccggccaggcttggtggaggagcaccgggcgcggcccaaggaaaaagaggcaggggcgtcagcttggcgaagacgggcggacctaggcgacctgctggtgcaaacctggccaagaactggagcagggacggcggccatcagtagagagggctgggcgtgggaggaagcctccacgggctgctcggctgggcaccatgggagatggatgagcaggaggcggtgcagagcaaggaaccgaagatggaagatgtggtgggagagaggcttccccggccggcctcgagggtcccaatcgcccataggagt

SEQ ID NO: 73449 - DNA, 1677 bp, Zea mays
  Clone ID: MRT4577_166986C.1
atggggtctaggcccgctggtgatgccccagagtgtgcagctctctggacacgtggcggtaccagacctgcccaggtggtgagcagtagggggtacccctattttagggtaccgacagtggcccccgggaccacctcaggggaggatgcgagcctgcagtgcatgcagacgcactcaccgttaatccgccttcgatcacgccaactgccatatctgtccccgcggctgactgtctcatggcccccatgcctgccgcggccccgaggaggcgcactactggcgcgtgcggcggttcgctctttctacacccgggaatcgacacccaaggattatgacctgtgggcctggcccccccgtgtcatagactgggctattgtcttttgcggcggaaatgaagaggcgcgctaccgcgtgcggtggttcgctcttcaagcgcgtgcggcggtgcccgtcacgcgtgatctcctgcggcgattgaggggcgcgcagaagggtttccttgaaaaagggttcacctccgcgtgcagtagttaccctttcgcattctcttccaatcgactgtgctctttcgccttcgagctctctgcgcccctttgcattcgcgctctcctgctctacacccgctccgccaccgacgccatgacttcgcttggccatcccgaccgcttccagtctgaggcggcactcaatctggcggccatcttcgttcacctctgcgagatgtttgtgggggtggccccctacacctccccgttccgtcatttcttcgtgttggtgaagtctgggaaggctaaggaccacctcggcgcctactacttccatacaagcgccgaggccaacgacgggccagcactcaaccggaagcaatggagggccaagccatcgctatcgccagagctcctgcccgtactggacaggatcaagaccttggcaaccggtggtatgacctccatgcatgtggtcgacgacttcctaaagcgctgggtcatgccactgcagaggaggccgcgcctgtgctgctggatccagcgcgggacaggtaccgatctgtcctgggaggagctggaactcctggtgaaggggattactggtgagtcctttatccctgaatccttgatactcccccaggacatcccggcgctctgtgatgatccagggctacgaacggcggtgctggccatgctgccgaccctcgatgacagcagcgtggcggtcgcgcagaggcgcgtcagtcctccgccaccaccaccatcgggcccgccgccaccaccaccaccaccaccatcggtcccgccgccaccaccaccacctgggggtgatctcccccaggggcagcagcagcaacaacaaccacagcagcagcaacaacaacactccatcccgccgcccactccggaggagacagaggtggtttttgggtggcggctccggtccggcgccgagccagaagcagcgctagttcccctccttcgggtgctgtctcgtgcccatcaggctcttcatgggactgaggcagcaatcctgcgggagtgggaggcgcttgaggccgagcaccagcgcctcagcgaccggcgcacccatctggaggagcgcaccaaggcggtgtcccgccagttcgcctctgagcggtccgagctcgagcgggaccgcaaggattacaaaagggacctccagaag

SEQ ID NO: 73450 - DNA, 705 bp, Zea mays
  Clone ID: MRT4577_166987C.1
cggcgggcgggatttcacaaacactcgggagggaggaaaccctccgagtacactgtacacagatccaatggatatggagtcgtcggtggcggtggtggcggtgccgttcccgatgcagggccacctcaaccagctgctgcacctgtcgctgcagctcgcgtccgagccgcgcgggctggacctcgacctgcactacgcggcgcccgcggcgcacgtccgccaggcccgcgcgcgcgtgcacggctgggacgaatcggcgctccgctccgtccacttccacgagctcgacatccccgcgttcgccgccccgccgcccgacccggacgccgcctcgcccttccccacccacatcatgcccatgttcgaggcctacgtcgccggcgcagccgccccgctcgcggcgctcctccgggacctctccgcgtcccgccgccgcgtcgtcgtcctgcacgacgtcctcaacgccttcgccggcgtcgaggcggagcggctgcccaacggcaacggggagtccttcgggctctactgcggcgccgtgtcgtacatggtcggcatggtggacgccgggcaccgcctcctgcgggactgcggcctcgagtacgcgcccatggacaggtatgtgtctagggagttcatggagtgcgccaagaggcagtccagcttggcgcggtcggtctcgcgcggcggcggcatggtcgccaacac

SEQ ID NO: 73451 - DNA, 601 bp, Zea mays
  unsure (1)..(601): unsure at all n locations
  Clone ID: MRT4577_166988C.1
ggcagcccgtcacccctgctgtcatttcgtcgagcatctcgccagcatcacgaccgccgggcgccggctccctcggcatcgcatcggttgattcccagcgaggatggagaggttcttctccaacccttcaaacgccccgcggtgcgacacagacaccggcatcaccctaatctcgggccctccgtgttgcgggaagacctcgctcctcttccagttcgcggtgaaccgcgcggcggagagtggccgcggcgtcgtgttcatctgcagcaaggggaggntggagagcaaccctcctttcctgtcccagggcgncgatccatcgatgagcttacttcagaggatacaaatcaaatatattgaagacggtgatgaaatcagaaagtactttgctgcatttcaccttcttgacgacttccctgctgcagtcattgttgatgattttgcagatttcttctccgacaggagntgccaacaaagatatggaattgctagggctcgagatctagcaatggtgcgtgcactagctttgtgcnacaatgctattgggcatgcaaatgcaaagcttggaactcntggttattgcaaactattactttctgat

SEQ ID NO: 73452 - DNA, 466 bp, Zea mays
  Clone ID: MRT4577_166989C.1
cccaagactgccggggaagaatgcagaggccatctatgatactcacgggctctaatataccatgaaaaacctgacacaggggcatcactaaacctcggggttgctcccatcctgtgcctcagcttaaaggcaagacctgcatgatctgacatttgggggtggacatctaccagagggaggctcatgtacatacctgtaatgacattgcaaaaccacccatgacgatcgacgccagaacataaacaccctacccaagagctgatatgatgaacaaaccgctctactttctacttgacatcttgcgctgatccccgaacatctctaattcaaaaatgccaatatggatcagcttaagatcctcatggatctcatcgaatccaaggatactcagctgatcacaccagactaccaagattatgcaacacttaaactcattaaagagcccaaactagacttacacctgacc

SEQ ID NO: 73453 - DNA, 269 bp, Zea mays
  Clone ID: MRT4577_16698C.1
atgtgaagagcgctttcctcatacggccaatgcaaggaggaggtgtccttttagagcccccctgcctccaaggttaattggtcccccacccccttttgtaagctttttaaggccctttatgaacttaaccaagcccaaaaaccttggattaaaggccttaaaaattcctaaatggctaaggcttcaaaggttggaaaagccgatccaactcttttcactaagacatgtgatggtgatttggttgtgtgccaaatttatgtcgatgacat

SEQ ID NO: 73454 - DNA, 806 bp, Zea mays
  Clone ID: MRT4577_166990C.1
cgggatacccctaatctcgggccctccgtgttggtacgcgctctattgctcacccttgcccttctaaactagcccgtttggcacgcgctgagccggaatcgaaccggagctaccttattaccgctcggatcatgcagtgcccttgttttggtccaaggtcagcgggaagacctcgctcctcttccagttcgcggtgaaccgcgcggcggagagtggccgcggcgtcgtgttcatttgttttaaggggaggctggagagcaaccctcctttcctgtcccagggcgtcgatccatcgatgagcttacttcagaggatacaaatcaaatatattgaagacggtgatgaaatcagaaagtactttgctgcatttcaccttcttgacgacttccctgctgcagtcattgttgatgattttgcagatttcttctccgacaggtagctctgaccttgctgaaactgtcataggagctgccaacaaagatatggaattgctagggctcgagatctagcaatggtgcgtgcactagctttgtgccacaatgctattgggcatgcaaatgcaaagcttggaactcttggttattgcaatctattactttctgatgtacatcaaggtgatactccaagattgttgttcatttaccagagatgggtaaattccatatacacaatccgaggtgacggcaatggatcctacatacttcagaaccttggcagttcagaaactgggtcaaaggaagcaagaaaagctaaatactcaatagcactacaatatcttgttcttgaagagaccagcacctaaaaat

SEQ ID NO: 73455 - DNA, 648 bp, Zea mays
  Clone ID: MRT4577_166991C.1
ccggccggggtttgttatacaaaccgtagcatgaggatggccgatatgcatcctctaccccttgatcccaaatataaatacgtggtcgtagccccgtgacccctccgcgtccgttcgactaatcgccgggtgcataccgaggaacatcaacgccgagagtgccacgctctcccctgccggcattaactacgaagtagtgtctctctgatggccatcgggacggagctggagaacccctgttccggcttgacgctgcgactgccctgctcgcccggcgtctccgacctccgtatcgacatccagcagccgcggatcggcgccgcctaactggtcctgcccgtacgtatcgtccagggccccatgtcatccagcctcccctgcgacatctccgcctgctccgaccgccgtcgtggatccagaaccactatccctgctagagcccgtcgagtctgttgtccccatcctcctacacgtgtgctccattccgagcagtgcggtcatgaggatccgaagaatcaccctggtaactggaatctcaagtgccaggtcaagaacaggtaccgcaggatgaggcgcgtggtggatgctgtgatgtgttcgtgagaagtctaggtcgtcgtctcccagtcaactttgggttgctggacc

SEQ ID NO: 73456 - DNA, 334 bp, Zea mays
  unsure (1)..(334): unsure at all n locations
  Clone ID: MRT4577_166992C.1
gcagcaccaagaagcaccatttttttccttaggatttaacttagaataaagcctgacgggggtnacagcacccatcgatccgcagtccatgctggtttatgcatggttctgctggagccgnggatgaacacgggggggggggggggacacatagcgaccttcantcaaaaacacagatgggcaacaacaaacacgagacgaacgaagataaacactgtgggctggggtgaacaacacggtggcgaacagggttacttgtggcgggcgggccccaccggtcagttgctgcagttcccgtgggtgttgccgtggtcggcgtcacggttggcaccgg

SEQ ID NO: 73457 - DNA, 338 bp, Zea mays
  Clone ID: MRT4577_166993C.1
ttcagaccttgactatttggtgtttccagttcacaaaggtgatgaagactgtcttgggagcagcttaatcccaaaatttgtacatttcttgctgctcctggcgtggacacttaagtgagaccaccaaatacattggtcctgtccaattctactgaatgggggtggacctggcatttatctggccaaaaacaggagccagagaaatatgaatataccaaagttgtttgtttagcctccaacttaaattacattagtcaacttatagatactcatatgatcacgtttctttttagatactacatcaactagattcaggagtatatcattgcagtgcatgt

SEQ ID NO: 73458 - DNA, 289 bp, Zea mays
  Clone ID: MRT4577_166994C.1
ggaaaaaaaagggcatttcattcgggggacaaaaataagggtcatcaagcattggactgataaggactcccggggctgaaactatcccggcaaacaattaaaaaggggttcgtttaccattcaacgaaacattccttgcgaaaactccaaacgaactatgcaggaatggccaactttttccgggatatgctcacaaggttgggaacttcgtactggactccaagggggacataaaagtccctggaaacaattttccaaggaaccatttttcctgaagggcattttgggc

SEQ ID NO: 73459 - DNA, 321 bp, Zea mays
  unsure (1)..(321): unsure at all n locations
  Clone ID: MRT4577_166995C.1
cccacgcgttcgaccacctccgtctccgcgatcgaagctcctcacaaaccgttatcgtggccatggcagccgtcgcgcctgcaagctccttgtaggaagtgctgccatcttccctggcctgcgtcttctagccctctcccctcttcgatggcactaccaggctgtacgttttgtttcattgtccgttcgctcagtgctcttgatttgncattttcntctatgttttttatgtcttttatttatttagactattttnctatctttaacgttaanntttttggaacaggtgtttatgaaggggatctattagttttgtgaggt

SEQ ID NO: 73460 - DNA, 107 bp, Zea mays
  Clone ID: MRT4577_166996C.1
ggacgccaaggaacagtcacgtctcccagatctaactccccccgactcacgaatcgcggggagggtgcatggcgacgcaccgccactgcctgcgactcctcctcgtg

SEQ ID NO: 73461 - DNA, 802 bp, Zea mays
  unsure (1)..(802): unsure at all n locations
  Clone ID: MRT4577_166997C.1
aaaatgaggaagctggtggtccaaaaattccaatgaaatatggacgtgttgatgtcacagcagctgaacagtgtccgcccgaggggaggcttcccgatgctggcccacgtgatcctgctgaacaccttagggaggtattttatagaatgggccttgatgacaaggaaattgttgcactatctggagcacacacacttggaagagcaaggcctgaccggagtggctggggaaagctagaaacaaaatatactgtatgtttttatggtctattttcttcagtttaaataagaaacaataggttattctcaggaattcggagtttttgggcctgcttgaaccatctactgtctcttatcctgtttttttagtacggaacgcacagtttgctatcatattctgacttacaattcctggggtgcttttccttacagtggaattacctgataagacttgataactttttttgataaaacgataagacttgataacttctatactccagactccttttgctaatgtttagtgtcagaacataatcaagatgcaaaaacttacctgatagcatattcnttggtgttgtactatgatatggattggctggggcagcaggaagaacccacgtgggtccctggactggtccacttgccataacatactattgacaacttctgttcttctcacttctcatacccatactatcttctttgcaaattntattaccgngcaggttgtgaatctggttagtttcaattaaccagtactggaggtgttgcattttgcagaaggatgggcctggtgagcc

SEQ ID NO: 73462 - DNA, 224 bp, Zea mays
  Clone ID: MRT4577_166998C.1
gaaaagtatgaactttgatgcctacgcgaaactcaatctcgtggaccatgatcttcccggatggcgaggggaacacccatccagaaggggtagcgggttacaataatttgataaactatttgcttccgcaaggtatgactccttacatcaacctgtaccactataaccttcctgtagcgctagaaaaaaaatacctagggtggttaagcccgaatatggcgaac

SEQ ID NO: 73463 - DNA, 236 bp, Zea mays
  unsure (1)..(236): unsure at all n locations
  Clone ID: MRT4577_166999C.1
cttnnnnnaagnacaagacacagggaggacaatttaaggacgaacccgccaagacacgcccgcacgnaacaaacnggcgagnagaaaacgacacacacacanggacacccacaaagaacaaagaagcaccnaaggaccccgcaagcagcacaacccaggccananacaaanaaaagaacngacccacaaaaccggccgccaaaaaagaaacaaccgngcaaagccaccaggagacc

SEQ ID NO: 73464 - DNA, 1013 bp, Zea mays
  Clone ID: MRT4577_16699C.1
gagcgcatttcaaaaacaccggacactaccgaggccggccgggtgctccagcgagggcactagccgccgccgtttccatctccccggcgctccatcgctgggcacgcaggcgacggcgacggcgctcaggctcgtgctctcaggaacggcgtcagctgcttcctttctcgcctcttgccagtcgcctcgcgccctcgcctttggtcctccgcacggctgacatacgtagaccgatggcaacactgaaagatgcagcggcaaggaagtctatactggcaacaatccgtcttgttgtcccagccggtgcagcccgtcctgcacctccagttggtccagcacttggtttctaccggctcaatttgatggccttttgcaaggacttcaatgccaggacccaaaaatacaaggcagaaactccaatgcaagtcaccctaactgcctacaaggatagcaccttcgagttcgtggtcaagtcgccctcggtatcatggttcctcaagaaggcagcaggaatcgaaaccgccagcactcgcccaagccacgtgaatgtatcgtccctcaccctccgccacgtatacgagattgcaaagttgaagcaggctgaccccttctgcaagcacatctctcttgaggcgctgtgcaagtccatcattggcacagccaactctatgggtattgcgattgttaaggatctatgagcagcaatgccagccttttagtcatgaagaaatctgtgacattttgtatgttcctagtttgtagttggtgctggagaggatacaactcatctgtctcacagagcttcctgccactgccatgtcaggagtatgaaactctatgcaattcctgggagagccttcagcgcagcctttttctcttcctttgttcattttgtgacttaactggtactatgtggttttacgttggtgctttaaataataaattgtagttttggtttcttccaaaaaaagcaggcaagagacaacctggcgaactgaaacatcttagtagcc

SEQ ID NO: 73465 - DNA, 490 bp, Zea mays
  Clone ID: MRT4577_1669C.1
gtgacactatagaagagctatgacgtcgcatgcacgcgtacgtaagctcggaattcggctcgaggtttcagcaagagcagcaggaggaggtccaggcgagcggcgagctcgtacggcttaaggcgaagcacgcgctcgtcggcgccggcgcgagggtgctgttctacccgacgctgctctacaacgtcttgcgcaaccggttcgaggcggacttccggtggtgggatcgcgtcgaccagtttattttgctgggcgctgttcctttcccaagtgatgttccacggttgaagcagcttggagttcaaggggttgtaacgttgaatgaaccttatgaaactcttgttccaacatctttataccaggctaatgagattgagcacctggtaattccaacaagagattacctctttgcaccttcattcgaggatatgtctcaagccatagatttcatccatcggaatgcatcacaaggcggtactacatatgttca

SEQ ID NO: 73466 - DNA, 226 bp, Zea mays
  Clone ID: MRT4577_166C.1
cacacgccttcgtacccactgcgcctacgttgaacatgtacctttaggtacccacacaaggcctaggctaatttttgatattgataagagtgctcattataaagcaatacttgcgatttatttaagaattgaccaaagcatcattaggtgtcaaaataaagaaaacccatcctagtggatccgtatggtaaggaaaaatgcctaatctattcacttaacaaacatg

SEQ ID NO: 73467 - DNA, 519 bp, Zea mays
  Clone ID: MRT4577_167000C.1
ctcgaggccggccgggacactatctggatgtcaggtgcgtgcctgctgatcgatcatccatccatcacatgatgcatgtgatttatttgtactagcaggatgtgggaggattttgacaagggccatgtcgccggtgctcggaatgttccctactacctctccgtcactccgcatgggaaggagaagaatccccagtttgtggaacaggtttccgcgctctacgccaaggaccaaaacttgattgtgggttgccgctctggcatccggtccaaactcgccactgcagacctcgtcaacgcgggcttcaccaacgtgaggaacctacaaggcggatacctttccttgctccgaagcgcaaactagctagcttcctgcttatttgttcgcatgcttggaataagtgagtcaacatatgcttgaaagatctgttcatgaagaagcagcatcaactccatcatgaaaaatgattaatgacactgcaaatgtgcataccctaaaaaaaaaaaaaaaaaagcggcc

SEQ ID NO: 73468 - DNA, 381 bp, Zea mays
  Clone ID: MRT4577_167001C.1
ctataaacaccattgcagtttgtccaacaactttgaaacgaatatgcagacaacatggaatttccagatggccatctcgaaagataaacaaggtcaaccgttcactgaagaagatcgagaaggtcatcaaatcggttcatggtgtggacagatccttgcagtacgatcctgccactggatctcttgttccagcaacctcccttccggataagatgcctacctcatctgcgggcgtaaaaacagtggaggaaaaatctagcccagaaccaggacaggatttctcttcgcctgatggatggcaaagagaaagtagccaacttcatgcctccagtatacctacaagggtaggtgatgaagtccaaatgctggcaatcaacaacg

SEQ ID NO: 73469 - DNA, 766 bp, Zea mays
  Clone ID: MRT4577_167002C.1
ctcgtagccggccgggccgggaacatctcacgcgcgcccccctattcttgggagagcccaaactcctccctccctccccggcgtacaaacacgcgcgcgcccccgcccgtgccggcccatgcccatggaggtcgacctcgaccgtgcacgcgctctgcgcgttctcggccgaggcgccatgggcaccgtcttcctcgtcgaggccgacccggcgcggcccggctgcggctgctacgccctcaaggtcttcgacaagcgctccgccgggccgaccaagcccaacgccgaccgccgcgcacggtgggaggtgaccctgctctcccgcctcgcgcacccgcacctcccgtccctcctcggcagcgctgagacgcccgacctcctcgcctgggccgtccactactgccccggcggtgacctgaacgagctccgctactccctagctgaccgtgtcttttctccggccgccatacgcttctacatcgccgagactgtgtccgcgctcgccgacctccacgcctccggcatcgtgtaccgcgacctcaagcccgagaacgtgctcctccgagccgacggccatgttacccttaccgacttcgacctctcgcgcctcctcccggcttctacctcctccccgtcaacgtcgcctcctcctcaggtgaagcccgtcttccaccacggtcaccgccgggcgcgcgcctccgctgctggccaccacgccaagcgcaagtcttcgtctgcggccgcgtcgacgccgaagctgcagcag

SEQ ID NO: 73470 - DNA, 863 bp, Zea mays
  Clone ID: MRT4577_167003C.1
catgatggagttgatgctgcttcttcatgaacagatctttcaagcatatgttgactcacttattacaagcatgcgaacaaataagcaggaagctagctagtttgcgcttcggagcaaggaaaggtatccgccttgtaggttcctcacgttggtgaagccctgcttatatgcagcacacgtacacaataaactcactcttataataaatatataaaaaaacaattagttgtaaatctaagatgagatagcactaggttaaggtaagcttaccgcgttgacgaggtctgcagtggcgagtttggaccggatgccagagcggcaacccacaatcaagttttggtccttggcgtagagcgcggaaacctgttccacaaactggggattcttctccttcccatgcggagtgacggagaggtagtagggaacattccgagcaccggcgacatggcccttgtcaaaatcctcccacatcctgctagtacaaataaatcacatgcatcatggcctcatgggatggatggatgatcgatcagcaggcacgcacctgacatccagatagtggtgtgtggaagagctgaggagggcgcatgcttcctccgctgtccaccggcgaacacaagcagtaggggatggaggggagtgggataccagggatgagcgtcaaacggataggacgaggctgcggtaagacagagacccgccaactgtctttttattgaatcttttacagcatagatattatgattagtccttttctttactatctaccgtccttctatttttttttttttagttattcactggagcaattatatattgaagtcaatccgaggcaaggttctccggccggcctcgaggtaccc

SEQ ID NO: 73471 - DNA, 543 bp, Zea mays
  Clone ID: MRT4577_167004C.1
agacaccggaaactcaggaccttttttttttttcctcttctcatcaaccacatcatatgaagcaaattacaaacattatagcttataacaaaggtacaactcgtgcatggtacagtcttcacaggaagctagcgagcaaaagaacttggcatggcaaataatgtaggaacttcacgagtagcaacaaaggatataacaacggaacttgtaaagatcccccacagagcaagcactagcttagtttttcaccattggccagtggagagaagtgcttttgctatatataagcggcatcgtttcgaaacaaagtaactcggaacaaggagcagctgcaggggcacgcacaaggcaagttaagtcagatcattctgaactcacggacacagtgtagcttcagataggagcatccacaatgcaccctgaagcgataaaaaatcgcgcttccatcagtcgagagacctcgggttcccattgccaccacctccatgctcgcccatcttggaagccagtttcttctcccaccttgctgcgcctcccggccgg

SEQ ID NO: 73472 - DNA, 154 bp, Zea mays
  Clone ID: MRT4577_167005C.1
atgcatactcagatggtgcaagatcaccatctactaggccagcagatcccatccctgctaaagccatctggcctaccacagaatctcgctgtacagctgcagaatgcctagccgggaccgcctctgcagcggcatattgcacagattggtcatc

SEQ ID NO: 73473 - DNA, 230 bp, Zea mays
  Clone ID: MRT4577_167006C.1
attctgacaaagttctaaccacagatatgttctatcaaggtataaaaaccttaatcgggggcgggatcctaagacttacgtgcaatttgtctgaatgcttcaaacctttgtggcggaacctttgtatgtttgaacctctgttgtggaagatctaatgtgctgtaattgtctatgactcgcgatgagaatgtagagtatgatgactcatctgtgtaccttaaataaacatc

SEQ ID NO: 73474 - DNA, 503 bp, Zea mays
  Clone ID: MRT4577_167007C.1
gtgctggcaattcgtccctcttcgtaacggcgcgccgcgtggcgaggtggagaaaaaaaaaaaaaaaaagtaaaaaaaactaaaaaaaaaaaaaaaaaaaaaaaaaatataaaaaaaataatttttttttttttttttttttttttttttttttttttttttttttttttttttaaaaaaaaaaaaatatggggggggggggggggttttcccctccctctctctttatggggatttttttaaaattggtgcaaactggggggggtgggagtaattttttaagggggcccctttcccttttttagggggtttttaaaataaccctggggcgggttttaaaaaattgggtttgggaaaaaactttttgggcgccctttaaaacccctttaaaaatatcccttttttacaagttgggaaaaagggaaaaaaggcccagcggggtttccttctccaaaaaggggggcctttttttggggatttgaccccccctttttgcgggtttt

SEQ ID NO: 73475 - DNA, 150 bp, Zea mays
  Clone ID: MRT4577_167008C.1
tggtcgtgctagttctagatcgcgatttgccgccacttacaaaggcacggggagacgggagaaaaaatactgcaatcatacagcgatggcaccgggggaaataaactctggttattgcataacattacgacaacgtgtcacacgttcgac

SEQ ID NO: 73476 - DNA, 667 bp, Zea mays
  Clone ID: MRT4577_167009C.1
cccacgcgtccgctcaattgcccaccataacaccgtttcgctttctcgctccaactcccacagaaacggccgccagcgccgcaggcccgcagcgttgatggccgccgcacctggcgcaccagaggagcgactcggcgtcctcactcctcaatgcctccgggagaagaccggaatctccgagcccaggtcggaggtgcacagggacggaaactaccaccgagcggtgaacgtgtggatctacagcgagagcaccggagctgctgctgcagcgccgagctgattgcgaggaattgtggcctgggcagtgagacatcattagcgccggccacatctccgccggcgattcctcgcactctcggcagagggaccttctggaagatccaggcatcaaccatttcagtcgatgctttcgagctcatgtgtgtgtttcttcaggaacggttagtatgcttataccgcaatccattatattctgcaaccgatgacaccattgttgtcaggatttgtcatatcacatttacataacaactttgatcaacctttagccaaacattggtggacacttgcctagtacagtttatataagcattattattttatattatctataagatactttttaatacatagtagggtgtttgggactgttccgcttcataaattttag

SEQ ID NO: 73477 - DNA, 1352 bp, Zea mays
  Clone ID: MRT4577_16700C.1
cccacgcgtccgcccacgcgtccgggattttctcagccaccttcttcacgttctctgatcagttgtgagcagggatgggtgacattgcaactaactagagaaccaggatatggcagaggcttcttttctcctagatctgttactggttttctatctgatgtttgttcagctgctgcagatgaagttggcaaaatatacataacagcagatgagaatgtccaaggagcagtcttcgatttacctgaggaaattgcaaaggacctgcttactatggaggtccccccgggaaacacactaacgtccggcttccagctgcctgcgttgcaagatgatagtcctgctactgatagctatggtcgcttttcaaacgaccgaggttccaggaacaggcgttcaaggggtggaggcgcttcaagaggccggggtggttgggacaccgacagtgaggaccgataccggcgtggtggcaggagcttgaggtctgacaacgatagttggtcagatgatgactggtcaggcggtgggagaaaatcaaaccgttcctcctcatcctttggtggccgctcatcatcctacggcagccgtggctcaccatcaccatccttcggtgtccgctcatcatccttgggcggtagggagagcagcagaagcttcagtggcgcttgtttcaactgcggcgaatccggtcaccgtgcatcggactgcccaaacaagtagatggcgcattcttccctgcccaagcaagtagacagctcgagcatcaggacgcacgcagagcgaaaacccaagcgcgcccctgatcgaccagtatactacgcctgacagccagctacagtttttgtgtggctgtctcgtcaggactgaagattttggcatgctgattccagttatttagatccagaggagtccttactctacagggatatgttgagtctcagtagaattgtgtaaccagtaaccacacacacgaacaatggcggaggactaaaatataaaatcatagctggcatattgaacacgtaacatatattgcagttggcatggctcttttcttttccttccaatttgactccagtggtcgcactgtgtcgatcgtttttacatgcactactacacatgcagcctcctttgcttgctggcagctatgcatagttgcgtgtgcgacacagcatctccaagctctggcaatcgcttgtcaaatgtctgctcctcagagctgtcctccgtatcaatcctctttctgacttttctagtcttctctagagattttatcttgtatatcttatttctcttcaacattttctaaatcatgtcctctatatgtaaatatctatattagaaacaatttcttc

SEQ ID NO: 73478 - DNA, 429 bp, Zea mays
  Clone ID: MRT4577_167010C.1
cagtaatccacacaagcacttcgacgtcgcacgggttttgtactcagacacaccaagtgtcggcaccgggggcttactaccaggaggtggactactgctcggaggaggtgaggtcggtggccccggccggatttggtcgccacggaagcggtgtccagtagcacgttgctaaggagaagttcgaggaggttgacacggttttacgcgccggcgccaactaccaccactcaccaccatggtcaccacggtggccaccgatttatggtgcgcgagaccagggttgatgaggacattaacacctgcaccggataggtccatgagcgcagggagagctttttcgccagggctatttgagccgtccggtggccggaattcacgcccgttcgggcctgcctgcgtgccttatgtatgtctgggggttgactgggt

SEQ ID NO: 73479 - DNA, 347 bp, Zea mays
  Clone ID: MRT4577_167011C.1
ggaaaaaaacaaacaaggcccacttttttggaaacgaaccaggtgttcgggggggggccaccttttttgatcagggggggagtgggtaacagggtacatcacaattgggtgtgaaattttcacttctctagggggggcaagcttttgcggacagcttgggttccttccaagacgcaaaagatttggcgcccccccagggtttgggtggggttgggttctgaaaagggaagccctcaccaatgggggcggtgttggagtgcatcttctttccaaacatgaagaggagggttttggggcgacaatctttggcaaaaccctgttggtttacaacagaatccttggggggg

SEQ ID NO: 73480 - DNA, 222 bp, Zea mays
  Clone ID: MRT4577_167012C.1
tttacataggggggggccgtagcattaccaaagccgaccaggaaacacctggcaacacgaccagacgagagttggccacccatcatatcaaaagggagccagataccccaggacaagagaccaaaaacacaccccacaatttgttctccccagggacgacggggaccataggggggggcgctctcgattgggtgtagataaggaaaacgaacgcccaacatc

SEQ ID NO: 73481 - DNA, 625 bp, Zea mays
  Clone ID: MRT4577_167013C.1
atataattattataatttattgattcagaggccaagttctcagcctcactttttaacaaatcatgaaactaatgcatcctctctaaacctgctttcctaaagctcccctagaccaatgagcagaactaatcaaaagccaacgccgccttcaccacaagagggctcctcacgaactgcctcccgttggtccagacgagcgctccgaacgagtagtccctagcgagcgtggcgttaaccaccttgaaatgcacctcgaaccccttctcctcccccttggcgctgaacttgagcaccgatggggtcaccagcacggcaacgccggcgggctcggccacgaaggccgtgtacgtgccgggcttgccgacgttcttgaccttgcggagcgccgtggcgcccgccgcagtgacgttgacgacagtgatggacgggtagttgaggtccgcgatgcgccggggcgcctcgctggggcacgtgtagggcgcgcccttgaacatggccatcaccgtggcattgtacttgagcgcgcagaggaagtcgaggtagtccgcgtcgccgaggtcgtagacgaggcccgggttcatggcgcgggcgggggagatgtggccagcgccgtagccaaaggggc

SEQ ID NO: 73482 - DNA, 167 bp, Zea mays
  unsure (1)..(167): unsure at all n locations
  Clone ID: MRT4577_167014C.1
cgnntccggttaaatagtatcatcacgttcagctccgttctctcatacataataaaactagaatgagattgttgtgggtagattcaataatctgtgtatccatatgcaatgttttgacatgcgcgtaatgaatgggatgtgcgctgctaactaaaaaaaaatacaaa

SEQ ID NO: 73483 - DNA, 1428 bp, Zea mays
  Clone ID: MRT4577_167015C.1
cattgggtacctcgaggccggccctgcgccgagttctggatgggacgcaccccgccgcgccctcctcgctggcgcccgacgtctcgctccgcgactgggtcgcgcgcaacccggccgcgctcggccgcgccgtcgccgcgcgctggggcggcgacctcccgttcctcttcaaggtgctgtcggtggccaaggcgctgtccatccaggcgcacccggaccgggagctcgccgcggcgctgcacgcgctgcgcccggccacgtaccgcgacgccaaccacaagcccgagatggccgtcgccgtcaccgagttccacgcgctctgcggcttcgccgccacgcaggagctcaaggaagttttgaggactgtccctgaggttcaagaattagttggcaaagaagaatctaggaagcttttgagtgtcaaagagcaagatgggggaatcggagtgaggtcatatttgaaatcagctttcaccaagttaatgacagcgtgtgatgaagcagtttctgaagcaattacaaaccttaagagtcgcttaaaaagtgagagtaaggctagaagtttaacgaagaaggagcaacttgttctgtcattggagaagcagtacccaggagatgttggtgttctggcagcattcttccttaattttgttaagctcaatcctggtgaagcactttatgttagtgcaaacgaacctcatgcatatctctcaggggagtgcatcgaatgtatggccacttcagacaatgttgtccgtgcaggtctaactcctaaatacagagatgtgcaaactctctgctcgatgttgacttataatcaggccttccctgaaattctgcaaggaatgcctgtacagccatacgtgactcgttacaccccatcaactgatgaattcgaagttgaccgctacttgctacctcctggaaaatcagtcaccatgtctccggtgcctggtccatccatattcatcgtcttgacaggagaaggagaaatccaggcaggtttcatgactggcagtgcaaaggcgaaggaaggtgacgttttctttgtgccggctaacaccaaggtcaagctctacacttcttgccccaggtccatgcaactgtatagggctggggttaacagcagtttcctgagttgatgggcaactggtttctagggttggcatctgtaggttaggtaccagctacacaaggattttcatgtttggcacttgtccaagaagtaagttaattatgtgggttctcatcgtgtataggaaatatggagaataagttcatcccttgtttattttataaatttgtatttcatttccaaatctgacgagctgctgggatcacaaggatatgtaataaaaaaaaaaagaaaaaaaaaaaaaaaaaaaaaaaaaaaaaaaaaaaaaaaaaaaaactcgcaagggggcgcgg

SEQ ID NO: 73484 - DNA, 297 bp, Zea mays
  Clone ID: MRT4577_167016C.1
ataatttcaaatattaaatgtgtggggtggcatgttaccttttttgtcctgaatttgatcatgaatgtgtaagagatgagagtacacctgctgaaaaaaaaaaaacaaaaagaatccgatattgaccatgagtagcatgatacagggacgattaataacaagacatggcttctattacttgaatcaccaacttgaagaaggcgcgactaaaccacgaaaatgactttagatagaaacaaacgacatctagtctgggtactgcacaatcaattgttaaaacccccctttacaataggg

SEQ ID NO: 73485 - DNA, 282 bp, Zea mays
  Clone ID: MRT4577_167017C.1
accaggagtcagctttgacacaactgctgaaagctggaggttctctgaagaagtttctttttcaccctggggacactgtgccttccacagccaggattggttatgagcagctggctctaggggtgactcagatattgctgggggttgtgtgttgtgttcttggagtgtgtctcagcttggggccctggactgtgctgagtgcctcaggctgtgccttctgggcggggtctgtggtgatcgcagcaggagctggggcccttgtccatgagaagcacccgggca

SEQ ID NO: 73486 - DNA, 233 bp, Zea mays
  Clone ID: MRT4577_167018C.1
aatttttcttattataacaaactgaacctccatatatgtaaaatctgccaaaaacgagacaggagctgttttaatatcctcaaaggaaaactccaccatataaaatatcaaaacacaataggaccctttttttacataacttatactatacgtattttcatataccaacacctgacttgattaccactcacatgttacacataacaaaagcatatccttatatttaaattact

SEQ ID NO: 73487 - DNA, 413 bp, Zea mays
  unsure (1)..(413): unsure at all n locations
  Clone ID: MRT4577_167019C.1
ttanagcccaaaccaacaggaccacacagagagcctgtgagccagggagcatgtacgctggggcacgcccgagcaacacatgagcaggggtaagagagtgagagagcgatgcggcactagggacgaccgaacagagattactcaggaaggcgtgcagtcctcatgcacacacatggggtcgcaaggacacctgtccccgggcgacgactgacaagggactacagacgagcccccgcacccgcccttgatgaagctcggtgagcttacgacatggtgccttttaccgttcggccctccgcgaactagaccccaccttactttttctgtacatcaccgggctaaccgtcatgtgtgtatgctagtgcactcttccagtgctccactcacgcgcattcatggacatacggctgctc

SEQ ID NO: 73488 - DNA, 3116 bp, Zea mays
  Clone ID: MRT4577_16701C.1
gaattcggcaccgggccatttcttatcccctctcctccggtcctcccccctccccccgatggcgtccctcacgctcccagcactcgctctcgccctctctaaccccggcgccgtccgcctacgcgctgcggccttccgctgctgggcgctccggcggcgcggctgggcggcggcgggcgccctggcctcgcccaactccgtgcttagcgagcatgccttcaagcggctccagctcgggagcgacgacgaggacggggaagggccgtacgggagcgacgccgacgaggggttcgaggcgggggagggggacaacgaggaactcgccattgccaggctcggcctgcccgacgagctcgtcgccacgctcgagaagcgcgggattacgcacctgttccccatccagagggctgtgttgattcccgctctcgagggccgtgacctgattgctagagcaaagactggaactggaaagacactggcctttggcatacccatgatcaagcaattaatcgagcaagacgatggtcggattacaaggagaggtcgtactcctcgggttctggttctagcacctaccagagagttagccaaacaagtcgagaaggaaataaaggaatcagcacccaagctcggcacagtgtgtgtttatggcggtgtctcatataatgtccagcagaatgcactctctcgtggtgtcgatgttgttgttggaacacctggccgcataatcgatttgataaatggcggaagcctccagttgggagaagttcagtatttggtcctggatgaggctgaccaaatgcttgcagtggggtttgaggaagatgtggaaacaatattacaacagcttcctgcaggcaggcaaagcatgttgttctctgcgacgatgcctagctgggtgaagaaactgtccaggcggtacttgaacaaccctttgacgattgacttggttggcgatcaagatgaaaagcttgctgaaggaatcaaactccatgctatcccactcacagcaacatcaaagcgtaccattcttagtgatctaatcacggtttatgcaaagggtgggaaaaccatagttttcactcgcacaaagaaagatgcagatgaggtatcattggcactgacaaacagtattgcttctgaggcacttcatggtgatatttcacagcatcagcgtgaaaggacactaaatggattccgtcaagggaaatttactgttctagtagcaacagatgttgctgcccgtggtcttgatataccaaatgttgatctgattatccattacgaattgccaaatgatccagaaacttttgtccatcgttctggacgcactggacgtgctgggaaagcaggaactgcaatcttgatgtttaccagcagccagaaaaggacagttaagtcacttgagcgtgatgttggttgcaactttgagtttataagccctccgtccatagaagaagtgctggagtcatctgctgagcatgtcattgctacattgagaggtgtgcacccagagtcaactaaatactttcttggagctgctgagaaattaacagaagaattgggacctcatgctcttgcttctgcactggcacatctgagtggattttctcagccaccttcgtcacgttctctcatcagtcatgagcagggatgggtgacgttgcaactaactagagaacagggatttggcagaggcttcttttctcctagatctgttactggttttctatctgatgtttgttcagctgctgcagatgaagttggcaaaatatacctaacagcagatgagaacgtccaaggagcagtcttcgatttacctgaggaaattgcaaaggacctgcttactatggagctccccccaggaaacacattaaccaaaatttccaagctgcctgcgttgcaagacgatggccctgctactgatagctacggtcgcttttcaaacgaccgaggttccaggaacaacaggcgttctaggggtggcggcgcttcaagaggccggggtggttgggacactgacggcgaggaccgattccgccgtggtggtaggagcttgaggtctgacaatgacagttggtcagatgatgactggtcaggcggtgggagaaaatcaaaccgttcctcatcattcggtagccgctcatcatcctacagcagccgtggctcaccatccttcggtggccgctcatcatccttcggcggtagggagagcaacagaagcttcagcggtgcttgtttcaactgcggcgaatccggccaccgcgcaacggactgcccaaacaagtagtaagatggaagagatggcgcggtctcccctgccgcacggggtcgatgatcctgattggccggagcatgcagagcgaaatcccaaagcccactccacctgctgatcggtgtactacgcccgacacccagccgacgttattactggctacagttttgcgtggtcgtctggcgtcggaaaacagaggaaggttttggcatcctgactacagttactacatcaagcggagttccttcagcttattcatgtcacacggacactactctacactacagggatatgttagtatttcttttatatatatgtattttttttgtggtgctcttgattgaggatctcggtataactgtaaccacacgcactggttacggttgcttctgcttcacaatcgctggcgacggttggattctttgaatgttatagatggcgcattcttccctgcccaagcaagtagacagctcgagcatcaggacgcacgcagagcgaaaacccaagcgcgcccctgatcgaccagtatactacgcctgacagccagctacagtttttgtgtggctgtctcgtcaggactgaagattttggcatgctgattccagttatttagatccagaggagtccttactctacagggatatgttgagtttcagtagaattgtgtaaccagtaaccacacacacgaacaatggcggaggactaaaatataaaatcatagctggcatattgaacacgtaacatatattgcagttggcatggtcttttcttttcgaaaaaaaaaaaaaaaaaaaaaaaaaaaaaaaaaaaaaaaaaaaaaaaaaaaaactcgaggaggggc

SEQ ID NO: 73489 - DNA, 1199 bp, Zea mays
  Clone ID: MRT4577_167020C.1
attgggtacctcgaggccggccgggacgcgccgccgttctctgaagccttatcttccacgcacgcagctttcctctgctcaagctcaatcgcggcgtccctctgctcactctcctgaccgccatctccatggccgcgcgcacccttgcttctctctccctcctcttcctccttgcgtcatttgccaggccgctacgcagccccttggcttcatcttcccccttctcctctatgtcggtgccttctctgctcctcaaatccatggcaccgcggcctcccagctcggactgtgccgctctttgatttccggtggccgacgtcttcctctgtgccgtcagcttgccggactctcgccatcctccaccgccctggattttttcctgaagcaccgcgcccctggtcgagctcccccatggcgtcttccccctggcgcccctgtgctcgcgtccctgtggccgcgactctccctctggtcacagggatgcgcacgtcccatccccaatggcgattggtcgcccagctccctgctccttgcactcgtccggcctagagttccctgcgcgcgctcctctgctcgccggttctccttgccccagcaccatcagtcctctatccggcttcaaccccaccgtcggtctctagttcgccatggcgctgaattttttcctcgtgtcatccctgctcctcgcgtgttgggcaccgggagactttccctgcttggtctggcatgggctgtagctgccggacaagcgtgcccctatttcctttgtcgccggtcgtcgactccaactttgccgtgagccagctctggtctccgtttgacctcgtcctgctacgcagttcctagtcataatcataaccatctcggactgcgctatcgcccagatccgaaaccgaactccccaacgccctggcgcttaatgaaatgtccaagccaggccttcgccacattcactgcctttgtgcgcacgctactgcttccgtgccgcaacattcgccaacaactcgagctaatgtaaagtttggtcaactatcattgactcgtggtcgcccctgttccttgcgtacctgtgaattagtcgatgtcgtgagtttgggtgcctgattaaagaaagaaatcctagggttttgtgggaaaagaaatcatagttcaacgcttgccaaatatctaataaaatgcttgcgctaggatttatcgtc

SEQ ID NO: 73490 - DNA, 256 bp, Zea mays
  unsure (1)..(256): unsure at all n locations
  Clone ID: MRT4577_167021C.1
gtccagtcgcccaactccttcttcatggatgttaagtgccaggagtactccagcatacccactgttgaacgnctctcgcacaccaaccacgtgtgcaccggctgccaagctctgctcagccaacccacaggaggaaaggacaggctcactgagggctgctctttccgcagacagggagactagagcggatgtggtcttcaagttttgctctatgctagatactagcgtcatgaactgcctttagctaagattttcc

SEQ ID NO: 73491 - DNA, 520 bp, Zea mays
  Clone ID: MRT4577_167022C.1
tcgagtttttttttttttttttttttttttttttttttttttttttttttttttttttttttttttttttttttttttttttttgggaaacaccttgcgtgggaccaattttttcactttttttttgggaaaccaacgggaaaaattacaggggtccctggaaaaaaggggttcccgccagccccagtaccccaaggaataccgggggcgcacgcaattaaaaacttttttattaccaccctttttatttttgtaaaaaatgaaacgggtgacatacgggaatcaccgtttgttttttttttttgggggaaacgctggccaggacttgatcgaataaaatggaaatgctgttggggatccccttggggggaaccccggttttatcccccttttcggaggtgttgggaaaaaacagggtgtagggaaactggccccccctttaacgttttttaaaacgcgggtccttgttaatggcctccacccgttttttgatctgggaaaaccgcgccccaaaccgttt

SEQ ID NO: 73492 - DNA, 888 bp, Zea mays
  Clone ID: MRT4577_167023C.1
aattcggcacgagggggtcacggggggagcggagagggatatgggatgtgggatgatccagataatattattcgttggatttgagtaagggagaaggggtcatctagcgatctgaaccgttagttttgatggtgtgttgagtctgggtgcaatttgtttgatggatttagtggaggctttgagcgtggggctgatttggttgggtggggtatagatggtatagatataataacttattagctgggagggtgtcagtggcccaagcccacgcgtttctttaccgtaaccttttcactgctccagcgaagatcttcatcttcctcgtagcaccggcgctcgacatgcaagcaacaacggcgccgttcaggttcaggctctcaactacggtatcagtggcttcccctcccgcctctcgccctcgcctccggtccttcgcacaccggccgatgaccttgcgtgcgtgcctctctctcctcccggctccggtggatcgtcaacgaagcccagccctggcggctacgtagtccgctagaatccctctttgttagggggatggggattgtgccaatttaatcccgacggggattaaaatgtgaaacatttatttctgttgggtttgtggggacagtgatggtgcaccatccttattccccacatacccgtctcgtgttcaatttatattgggttaatataattaatttgcatttgtctctaaatattgcattttgtaatggggacggcttcccaagaaaataaattccctgtgtggggatggggacatgatggtggggttttttttggctgcggagacccaaagattgagagccaattctcattgacatccctggtactgctgttttttggaacccaagaatttacctccctatt

SEQ ID NO: 73493 - DNA, 456 bp, Zea mays
  Clone ID: MRT4577_167024C.1
ttctcgagttttttttttttttttttttttttttttttttttttttttttttttttttttttttttttttttttttttttttttttggggaaaccccttgcgtgggcccaatattttcacattttttttgggaaacccacgggaaaaattccaggggcccctggaaaaaaggggttcccgcccgcccccgtcccccaaggaatacccggggggcacccaaataaaaactttttttttacccccctttttatttatggaaaaaaagaaacgggggacatacgggaatcaccgcttgttttttttttttgggggaaacgctggccaggacttgatcgaaaaaaaaggaaatgctgtgggggatgcccttgggggggaccccggggttttcccccttttcggaggggttggggaaaaccagggtgtagggaaactggccccccctttaacggtttttta

SEQ ID NO: 73494 - DNA, 289 bp, Zea mays
  Clone ID: MRT4577_167025C.1
acccacacgtccgcaatacaagatatgttgcttggggacactccactcttgttggaacttttggaaatgtgattgcaacacctgaacatgaggaagcaactataataacgggcggtgactctacaggttcttgacctaattacgcattttcgtcacctgaaacaccttctaaatggtcacttaaatcaattcagtggcctcctttttacaacttctcgacggggaaaacaccaagcttgacaacattataccctttacgctaaatccccctttctccaacatgcgatat

SEQ ID NO: 73495 - DNA, 418 bp, Zea mays
  Clone ID: MRT4577_167026C.1
ctggggcaggagccccccaacaaaaaaggatttcgttaaacctttgggggggctaatggcccatgctttttcagctaaaatcctacaacttagtgggggcatttttaaatagaaaaaggccttccgggggcaaattttatgttaaaactgaaaaaaaacgggaacggagcttggctccaatcaaccacgggatggggttcgttctttaaaaaaccccgggggggtttttcctaaaaaggacgggggtcccccgttccaagagctttttaagccgttttgggggccgcttttcctgttctttaaacaactggggattctcctcctgggggggggttaccagcgattttagctgggggatataagcctgtttcctttcccgggaccgggcagaaaactcggggttttggaacattcgttt

SEQ ID NO: 73496 - DNA, 914 bp, Zea mays
  Clone ID: MRT4577_167027C.1
ggccttcctagatggcgagcggccgacctttttttttccttttttttggagttacaaggagatcctgttgcttgtccagcactggggcatcgctgacactctccgagtcacaagaacctgcatatatgccgcaggcgcaaagggaaagcactgtccacgggcttcgcgatcttcccaagttgccagctcgggcgaaggaccagaccatgccaccagtgcctgcccaccagaacctgctgtatgagcttacaatgtcttccaatgaataacttgggtaagcacactgaactcaggtagcgcaacaggtaaaggaagaggatccagacccttgaaaccccgagcaagtttttgagacacatacaccacttacgtgtatacgactggtagggggcaaactgaggcggtaagccacctgtcccacgcgagctagtatctgataggggccaaaaaaacttgaaactgagcttgtgatgagcacggggcatgacagatgcttgcacataaggctgaaggcgaagataaacccaatcccccacggcaaaggtgcgttctgaacatttcttgtcggcttggcgcttcatgcggtcctgggcacgaacaagatgttgatgcaagagttcccgtgaccgggcagcggaaactgggtagattatacccattaccactgtcccagttgaagatctcagggctaggcccaaaacgtgagccatcagtgttgttgaagataacaggagagcgccccatcaccgatccgggtgtaccgaggatgccaggcgtgccgccatcgctgggatgcaggcaagacgacacctggagcccgatctactcgatctcggaacaaatggcctccatgtccgtgtagatcccgccgatcgtggactcgatccgtagtcgtcacagctcgaagacgtggg

SEQ ID NO: 73497 - DNA, 286 bp, Zea mays
  Clone ID: MRT4577_167028C.1
acccttgggggaccatatattaaccagaaatgttaagtgaccaaaagcataacccaaggctttgaacaattatcaccttgaagcagagaggagtaaaacctaaaagcttcttgagctcttgattgccaaaaccctgatcaaggaggttggaggatgattaggaggggggggtcaagaattagcctttggacgatatttaggaatcagttataatctaatcaccagattaaagagatgtaggcagaaacccctcatgaggcacgagatatttagttaggagaggaga

SEQ ID NO: 73498 - DNA, 257 bp, Zea mays
  Clone ID: MRT4577_167029C.1
ggatcggaagtgtaaccttggttgggattactcgcacatgggaggagacattcgacgcagtaagaagatttagaatccacgacatgcaagagctcgacaaggagtaccgggcaccatgggtcgggggcagtttaggggcagggcgagtgcatgatatgaagaaagagaattaagcaaaagtacatgcatacgcgaggagcgggagggagcagcgcaataaccagaagaagacgacgacggcgacgtacgatacgagg

SEQ ID NO: 73499 - DNA, 381 bp, Zea mays
  Clone ID: MRT4577_16702C.1
agttatgatcactacctctactatattatgttttgcagcacttgaagcatcttcgaaaggaaataagtacatcaattcgtgcttgaggtgatcagcttgaccacaatgttcttcatctctcatcttggcatgctttagtgtgctagtacagtatgtagacagcttatattctaacactgaattgtaataattctggaattaacagcaaactgcagatttcaatattggttaaaaatcttgctgattacatgattattgtgattcttaaagtaaaagaagatgtatgacgaaaaatgtgtctgtctttggcacaataaaggcttctaaatatatggacaatggtgagcccatattatgccttgactctgaatagcattgtct

SEQ ID NO: 73500 - DNA, 382 bp, Zea mays
  Clone ID: MRT4577_167030C.1
aaaagcttgactcgttgtctaaaaattttgaattgcacaaaaaaaaggggggggatattacaaaattggtacaaataaattacaagtttgggttcggataaaagcagctcccaactttgaaagaggaatggaactccacgtaacatagtgggggatcatttgaaacagccacaaatccttttttttaaaaccgggagaattttaaaacaaaagaattggtttttttaaaacctacttttgaacgggatccccctgataaacacctgggggtaaatggcaaccagcccaaccccaataaaggggcccacccaaaaaatccaggggtcaccccacccatggggctggttgaaaattacgggggggccaaggttccccgcggggt

SEQ ID NO: 73501 - DNA, 776 bp, Zea mays
  unsure (1)..(776): unsure at all n locations
  Clone ID: MRT4577_167031C.1
ctcgaggccggccggggctcgcttcgctccacgcgcggctcccaagcccgctgccgctttccctctctctcttctcctctcctgccacgccgccgtcggagctggccgccggcatggccgtccggccggcagggagggtggcggcgaggctctcttcttcgcgttggtgacgcgctccgcagcaggccggcaagccatccctcgcgcggctgcgtggttttgtctgggtggctgctgcggctgtggtggcgccggctggtgcccgcgcagttgcaggggacgatggctggggtcgctggcccgtggcccagatggtcggattcagtgctcgtgggcgagatctagtgccgatcggatctgcctcaacagctggcagttagtgcggtggcggcaagtggtggttgcggtggcggcagttggttggggcttgtgcaggtgctgtggggtggcgctctctcctttgccacctctcccctcacgtccatacgcgtcgctcactccgcgggtgacacgagcggcgactccgccaccatgacctcctcgtgggttcggcgaggccttgtttggagctacggtcgtcagatctggctccccggtggtgatgtgtggcaacaacaagtggacagcagtggccccggcggcgacctgcggngttttgtgcgtcggcggcggaggtagcttgcttttgtcctgggggcctcgcttgcattgtgctgggttttcttgggcgaagccttggcgacggcgacgtccctgggcgccgcttcccctgttga

SEQ ID NO: 73502 - DNA, 439 bp, Zea mays
  Clone ID: MRT4577_167032C.1
aatgaccacgcatcaaagacgcgttcttcatactgacagtatgggaatagcaccggcgagccaatggggccaatgaattgtaacggtaatgggccagaatagttcaattacaacaggtccggagggccaatgactagcaacaactccgaaaaggcgcaaggcttgaccttctcggagagctccggaagcggatagagcaagacgtgggaggtgacccccttgacaaaggtgcagaaacactgaaaatgatattgactcgagacaaaggggagggtaaccttagatatccagatcccggattacgggcccttaccgatggcctccattctttcggccatggtgacgttctctgcgaacacgtcgcatcatggtgatgccggggaccctgggccaaagaattatggagcggaacactgcagcgaaccacctttccctataa

SEQ ID NO: 73503 - DNA, 584 bp, Zea mays
  Clone ID: MRT4577_167033C.1
aaatatatatcgaagaacttttaacgacttttagtagtttccaccaaacgatttttagctttttaacggctcacagcctacagcagcttttttcatagctcataacaacttttttcacagaccaaacagacccatagatttgttcgtcacatcacgttcgtgtatggctggccctggccgtttcatgaccgctcgtttcctccgccagcgcagtagcgccgctattgttttttttaaaaaaaacgtgctgcctcgcccactgccagtttcgcaccatgtttgttgtgacttttatccggctgatgttgtctactataatattctacaatattttgtttctatatattacagctgcagtagttcgaacagcagctagctgtgggtgtagggcaaccaaataggatgtcgaagattaacacccagatgttcgtcacgtgctaaatagcggtcgtgaacctaagctggagattattgaagtataataaactctatgtcgtatttatctttatctatctaggtgatattaaagatcttgcgtgacttgaattatgtcgtcacactaaataatgagtccgggtttcgtc

SEQ ID NO: 73504 - DNA, 289 bp, Zea mays
  unsure (1)..(289): unsure at all n locations
  Clone ID: MRT4577_167034C.1
ccggaagctaagnaaaaaaaagcaacagggcctgacggatgggggccaagcctctcctttccgcccggaacttgctggcccgcccggggcaacgggccgctttaggcggcggcgaaggaaagcccctttggcgacaaggcccagttccagccctccagccaagcaaggtgccgacgggaagttgggattgcgggccaaaagaacccttgtctaacctggaagggagcgctggcccgcgaacaatggataagatccgggtgggcctgtgggacccggagggcagcagggg

SEQ ID NO: 73505 - DNA, 483 bp, Zea mays
  Clone ID: MRT4577_167035C.1
gggaaacacaattcagcagcacacgcaccaccaaaaagagggagaagagtcttcgcctcgcggagagacgtgctgcctagcataatatatagccacgaaatagagtgctgggtctagctatagctaactagccagcagcagcagcagcgtgcgtgcgttcaaggcagcagaggtagagaggttttgagagagaatggcaagcaggcaaggtgtagccgcctccatgttcgccacggcattgctcctcggcgtctttgcatccatcccacaaagtgctgaggccatcggcgtatgctacggcatgagcgccaacaacctgccggcggcgagcacggtggtgagcatgtacaaggcgaacggcatctcggcgatgcggctgtacgcgccggaccagggcgcgctgcaggcggtgggcggcacgggcatcagcgtggccgtgggcgcccccaacgacgtgctgtcgaacatcgcggctagccccgc

SEQ ID NO: 73506 - DNA, 320 bp, Zea mays
  Clone ID: MRT4577_167036C.1
ggccccagccccccgcggcgtgggcgtgatcccccacggtgcggcgctgcagccccggacgcgcggccggccccgatccgggctcctccggcggacgcgggcgcggcacggtggcgatgtggggcgcagtccctggcgcggcgggtccggctatggcgcgcgcgggcgcggtggcgaagcaccagcggcccctcccggcgcgagcagtgccagccctcccggcggcgcgggtgtcagccaaagcacgggggctcgggtgtggcggcggtggcccggtcgcaagccttcgcgcacgggctcgggtgcggggcaagccccag

SEQ ID NO: 73507 - DNA, 575 bp, Zea mays
  Clone ID: MRT4577_167037C.1
aaggaacccacaattcagcacacgcaccaccaaaaagagggagaagaggggatctcggagaagagtcttcgcctcggagagacgtgctctgcctagcatatatagccacgaaagagagtgctggccctgccggccttcgtctagctatagctaactagccagcagcagcgtgcgtgcgtgcgttcaaggcagcagaggtagagaggttttgagagagagaatggcaagcaggcaaggtgtagccgcctccatgttcgccacggcattgctcctcggcgtctttgcatccatcccacaaagtgattgcctttccatctctctctctctctatctatgtctcccctctcatccatgcatgcatcttgggaaaaaattgattagctaggcagagtagtatttttgtttatatactcctacatgcaatattcatgcatagcagaagaccttgccatggcatgaatgaatagataaaatataggagcgagacagagaagctagcgcgcgcacgcacgcacgcgcacacacatctctctcccatcaacaacgtcatgcaagggcaaggatccctcctttcc

SEQ ID NO: 73508 - DNA, 885 bp, Zea mays
  Clone ID: MRT4577_167038C.1
aaaaaaaaccggccggaaaggaaacacacaattcagcacacgcaccaccaaaaagagcggagaagaggggatctcggagaagagtcttcgcctcgcggagagacgtgctctgcctagcatatatagccacacgaaagagagtgcttggcctgccggccttcatctagctagctattgctaactagccagcagcagcgtgcgtgcgttgaaggcagcagaggtagagaggtttttgagagagagaatggcaagcaggcaaggtgtagccgcctccatgttcgccacggcattgctcctcggcgtctttgcatccatcccacaaagtgattgcctttctctctatctctctctcgtgcatgcatgcatcttgaaaaaaaaatgtttggctaggcaggttaatatatgcactgttcatacatagcagaagaccttgccatggcatgaatgaatagataaaaaatataggagcgagacagagaagctagcgcgcgcacgcacgcacgcgcacacacatctctctcccatcaacaacgtcatgcaaggggcaaggatccctcctttcctttggccgtccaaaccgccgggtccattgggtgcccggccgtcgctttcctttctgcgtctattttattttattttatttatttattctgtctactctattagctaggtcgcagcagggtaaacggcgtctccttcactcgccatggatcacgtactcctgcgccaatggaacagtagtattagtaattcggtgatgtcccccgcccctttcttacgaaaaccatgcacgggacccaaattttgactgccggcatgcatgcatgttaacttgtggacttactgtatttaacgactactaatgttttttttttctttgcttgc

SEQ ID NO: 73509 - DNA, 381 bp, Zea mays
  unsure (1)..(381): unsure at all n locations
  Clone ID: MRT4577_167039C.1
gggggggggggggagaacccaagagcncncgcctgcgcgccgccgccgccggagcgagcgccccancnncagccggcaaccagggcgacccagancagcaagaagaagaggncgnagcgacgngnnnncacgccggcncaagagagcngggggggggcgggcggaggagggcnacgcnggcgnggaggngcgcgncacgccgnagcgcacggagancancanccgcgccacgcgcacgcagaacgngcacggcgagaagggccgcaggaccagggagcgaaccaccggcgaccagaagaggggcaacgacccngagaagggcgccgagccggacgccgagaaggacggcaaccgggggacacgagccaacgcgcaggccga

SEQ ID NO: 73510 - DNA, 1681 bp, Zea mays
  unsure (1)..(1681): unsure at all n locations
  Clone ID: MRT4577_16703C.1
cgtccgaccaaagtgttgatttgattattccattacgagattgccaaancgatcgcagaaacttttgtccatcggtgctggacgcactaggacggtgctgggaaagcaggaactgcaatcttgatgtttaccagcagccagaaaaggacagttatgtcacttgagcgtgatgttggttgcaagtttgagtttataagccctccgtccatagaagaagtgctggagtcatctgctgagcatgtcattgctacattgcgaggggtgcacccagagtcaactcaatactttcttggagcagctgagaaattaacagaagaactaggacctcatgcccttgcttctgcactggcacatctgagtggattttctcagccaccttcttcacgttctctgatcagttatgagcaggtaagaagtgacacaacaaaattacatatgcattgttctatattatacctagcatagagggactggtcaggcggtgggagaaaatcaaaccgttcctcgtcattcggtagccgttcctcatcatcctacagcagccgtggctcaccatccttcggtggccgctcatcatccttcggcggtagggagagcaacagaagcttcagcggtgcttgtttcaactgcggcgaatctggtcaccgcgcatcggactgcccaaacaagtagtaagatggaaagagatggcgcagtctcccctgccgcacggggtcgattatcctgatcggccggagcatcaatcaggacgcacgcagagcgaaatcaatcccaaagaccactccacctgctgatcggtgtactacgcccgacacccagccgacgttattactggctacagttttgcgtggtcgtctggcgtcggaaaacagaggaaggttttggcatgctgactacagttactacatcaagagttccttcagcttattcatgtcacacggacactcctctacactacagggatatatatggtagtattttttttatatgtattttttgtggtgctcttgattgaggatctcggtataactgtaaccacacgcactggttacggttgcttctgcttcacaatcgctggcgacggttggattctttgaatgttatagatctgtatgctgtcttgcttcgggacgtgaacgtccatccctaggttagccagccccctttcgcttcttttggcacagaaaatactgccagacttcgttgcgttagataaaaaaaaggggggttggttacgctaccccgacccgggttgctctggcagctcgtcctcctgatctgaccttgcaggaaagaaacacgggttagtcaacgcggtcgcagcgcacggcacgactgcagggagaaagtaaaaataataaaccatccaggggtgcaacatgctagtcggtggttggccgtcgaggcgaaacagccagccagaccccacccacccccgggtggatgcgtcgcagcgtggtgtgttgtacatgtactagatggaatgcggggagtttgacagcgtggggagcttctgccggtccatcggccgatggagtgggtggcgaatgctataccgagcgatcctgcatgcagatagtagtatcaaaaaagacctgagcctgagactattcccgtcagacgtgaggtcaaggtccatgtcccggccagccaggcctgtgtgtgtacatacccgctccag

SEQ ID NO: 73511 - DNA, 355 bp, Zea mays
  unsure (1)..(355): unsure at all n locations
  Clone ID: MRT4577_167040C.1
cccacgcgtccgcgaagggtctggaaaaaaatcccanncgagcgacgaatacgagcggtgggttggcggcggcggagaagacgaggtgcaggcgcgcggcggtcgcgacgacgacatcctccccgtcgccggcgacatctactgtgctgccagccttctctctgacaggaaatattggtcatatagagacagttctgcacagcgttctgagtgccagtatgagctatatatatgttgcatttctccatgtttgggctcagcatgtaatagaactgaaggaaagttgttgcaagacttgaatggcatgcttaaatttctggntnnaaaaaaaaaaaaaaaaaattaaatttanntt

SEQ ID NO: 73512 - DNA, 370 bp, Zea mays
  Clone ID: MRT4577_167041C.1
attatatcttatcttttatttttgggtgttgggtttttttctttttttataattaggacccgggggtaatcccggaatttccggaccgtgccctggggggataccatctttccttaatgggagtattataaaaggttggggaaaactatggcaaatcttgtttctgtggaaaaattgttatcccctaaaaatttcacaaaaaaaaaaatccgtaaaaaaaaaattaaaagcccggggtgccaaattgagggaacctaatcaatttaattggggtggcctaaattccctttttcaaaaaagaaaaaactgcgtgccattttataaaaaaaattccccaaccccggggaagaggcttttttttttttggccc

SEQ ID NO: 73513 - DNA, 330 bp, Zea mays
  Clone ID: MRT4577_167042C.1
atgtccctcataaaagtttacaacaacgactcaaacatttatggactaaacggtcattctatttttaagtcggccaagcgggtgttcattagggccattgagtggcccgggctcgccgactcggacaaggaggaggaggaggaagatgaggatgactacgatgaggacgacgacggcaaggatggcaacggcgatggtggcgagggtcgcaacggtgacaacaacagcaagggttgcagcggtgacaacaacaacaagggcggtaacaacgatggcagtgacatgggtggcagcgacgttggcaagggtgatagcggcgatgaaggatag

SEQ ID NO: 73514 - DNA, 1499 bp, Zea mays
  Clone ID: MRT4577_167043C.1
cccgcgcgtccgcccacgcgtccgcccactcgtccgcccacgcgtccgcggagacaggcgtcttcgtactcgcctatctccgggcggaaaaaaaaaaaaaaaaaaaaaaaaaaaaaaaattcacctctcgctccaagcgcacccccgaggcaggaggggagcgcacctcatctcgctccaagcacaccaccactccacagtgcacttcactctacagcaacgacagaaaagtgagcagcagacagcagcagctgctgccatggaggcgtggagatctctcctcgcgagcttcgtgctcgccgtgctggccgcgcaggccttggtggccgtggtcgagtccaggaccggccccgtggagcaggcgagccaaggtgacgacgtgaagaagccggactgcgtgccggggatggacccgcgctcgttcccagggaccggcggcggccacggcatcacgcccgtgacgccatcgcacggaggctccagctccccgacgccgtcccacggcggcggcggcgggtacgttccaacgccgtcgcatggcgggacgctgcctttcccgtcccacggcggctccggctccggctcctctccgacgtcgccctccaccggtggcggctcgtacggtggatccccgtctactcccggcggcggcgcgtacggtgggtctcctccgtccacccccagcggcggcggcgcgtacggtgggtctccgtctacccccagcggtggcggcgcctacggaggcgggtccccctcgcctgctcatggtgctggtggcgcctatgggagctctccgacgcccgcgtacggcgattcccccttgcacggcggcatcgggacctcgtcaccgacgacatttgtccccatggacccccacagcttcggcacctgcgactactggaggtcgcacccgatggagatctggtcggcggtcggcggccggttcccgagcacgtcatcgtcgatgggccacttcttcggcgcggcggcgggcagcgtgggcggggctgacgtgatgagcatccaggacgcggtgggcaacacgcgggcggacggcacgggcgcgctgctgcgcgagggcgccgccgcgctgctcaactccatgacccgcgccgggttcccctacaccacggagcaggtccgcgacgctttcgcggcggcggcggcggccgggtccgacggcgcggccgctctagggcggcggccgggtccgacggcgcggccgcggcgcaggcggcggccttccggaaggccaacgagggcaaggcgtagctgcctgtgctgtgcatatgcatgcgtggttaattagctggagtgctccggtcgcttaatctgttggatttggtggtttgttggttgtgttgtgtgcgtgtgtttcagtgatttgcatccttttttttttcatttctcgtggatctatcgatggatgaacatgaatgaatgaaccgaactgcacagctccgttgtgagctgatgcattcatgcatgcacatgcacta

SEQ ID NO: 73515 - DNA, 649 bp, Zea mays
  Clone ID: MRT4577_167044C.1
gccctccctcgagttttttttttttttttttttttttttttttttttttttttttttttttttttttttttttttttttttttttttttttttttttttttttttaaacccaaaaaaaggggcgggggggcccaaaaaagggggcttttttttggaaccaaaggggaccccgaaaaacccccccgcccaaaattttaaaaaaaaaaaacccgggggtttccccaggggggtaaaccacttttaataaacccaaaaggacggaaaccatttttaaattggggcgggggggggggaaaccttggggccaaaaaaaatgaagggggccccaaaacttggtcccggcaaaaaaaattttccttgcccctggttaaaaaaaaaagttatttggcccctttgggggagatccccccccaggaattcccaagggtttttttggacgggatttccccaagggttttgggggcccaattttttgtcctcatgaaacccaaaaggggccccctaaaccggggggcctttttgttaaaaaacccaaattgggggccccccttttttttgaaaaacccaaaaaaaaaggtgaaggggcgggtaaaaaaaccccggaccctaatccaccccctgggtgggggggggggaccccccccctccc

SEQ ID NO: 73516 - DNA, 1054 bp, Zea mays
  Clone ID: MRT4577_167045C.1
tcgttgaatacctcccggccgggaggacctcatctcgctccaacacaccaccactccacagtgcacttcactctacagcaacgacagaaaagtgagcagcagacagcagcagctgctgccacggaggcgtggagatctctcctcgcgagcttcgtgctcgccgtgctggccgcgcaggccttggtggccgtggtcgagtccaggaccggccccgtggagcaggcgagccaaggtagtacattgcatcttctttcttacgccgtgttcattcagacgctgtgtgtagcaacgttgatgacctttgcgcgcgtgcgtggtaccgttgcaccgccgccgcaggtgacgacgtgaagaagccggactgcgtgccggggatggacccgcgctcgttcccagggaccggcggcggccacggcatcacgcccgtgacgccatcgcacggaggctccagctccccgacgccgtcccacggcggcggcggcgggtacgttccaacgccgtcgcatggcgggacgctgccttccccgtcccacggcggctccagctccggctcctctccgacgtcgccctccaccggtggcggctcgtacggtggatccccgtctactcccggaggcggcgcgtacggtgggtctcctccgtccacccccagcggcggcggcgcgtacggtgggtctccgtctactcccagcggtggcggcgcctacggaggcgggtccccctcgcctgctcatggtgctggtggcgcctatgggagctctccgacgcccgcgtacggcgattcccccttgcacggcggcatcgggacctcgtcaccgacgacatttgtccccatggacccccacagcttcggcgcggcggcgggcagcgtgggcggggctaaaataatgagcaccccccacgcggtgggcaacacgcgggcggacggcacgggcgcgctgctgcgcgagggcgccgccgcgctgctcaactccatgacccgcgccgggttcccctacaccacggagcaggtccgcgacgcttcgcggcggcggcgccgccccccccccccggc

SEQ ID NO: 73517 - DNA, 534 bp, Zea mays
  Clone ID: MRT4577_167046C.1
ggaaaccaaaaaaaaattttttttggaaaaaaggggaaaaaaaaaccccaaatctcccaattcccaaaaaaaggaaaaacgggttttttaaaaaaacatcaacacggggggtggggcttccccccccccgaaaaaatgggggctcaatctaagggtggggaaacttgatcagggggaagggggcaaagggccccccccccttaacttcccggagggggggggttttaaacaccccccggggtggagggggtaaaaggggcccgttcgggaaaaaaacgggtggccccaaaagggcccccgcccgcccccctgggggcaagggaaaactggggggggggaaataaaaagttcaggggggcgaaggatcccttggccgaaaaaaaaccccccaaaaaaattttcggggggggccccaacccaagaaggggttttcttaagggggcttttttgggggggttccaagggcccacaaagggggtcgggccccaacgctggttctttttggtgggggggatccccccccccatccccccc

SEQ ID NO: 73518 - DNA, 217 bp, Zea mays
  Clone ID: MRT4577_167047C.1
agcgtgtgcgagacacaccgtcaaacggacccgagagagtcactgaccagaggctatggcatcgacgcgcggcacgcatggggctcccgccgaggcgggcgtggagcgcgccgtacgtgagctagctcgggggcgggacgggacgtggactaaggcggtgatgaacgcccggcacggccgcggaggagatcgcgcgctcgcacgccaaccgtgctgc

SEQ ID NO: 73519 - DNA, 1825 bp, Zea mays
  Clone ID: MRT4577_167048C.1
aatatgggctgatgggtaggtttagccaactactgtacctagatgctgaagaaccaaggtcgcagccaactgaggagcaacttgctgcccagaggaatgctttggagaccgtaaagaaatgccaaataggtaccatcttcactgagagcaaattcttgcaagctgattcactttcaaatctggcaagagccctcattcaggcagcaggcagacctcagaaaatcagcagctcacttgatgatgaaggcatagctgtcttctgcttagagcttctaattactgtcacattaaacaacagagacaggattgtccttttgtggcaggatgtttttgagcacataacccatattgtccagtccacggtgatgccctgcaacctagtggagaaggctgtttttgggctcctacacatctgtcagaggttgcttccctataaggcgaacttagtagatgatttgctgaggtcattgcagctgattttgaaacttgatgcccgtgtagctgatgcttactgtgagaacattaccttggaggtcacactgcttgtcaaggccaatgcaacccatataaaatcccagatgggctggcggactatcatatccttgctctgcatcacggcacgccatcctgatgcttctgatgcaggatttgaagccctggtttttatcatgtcagaaggagcgcacctctcacctgccaacttcatcctttcagtggaggcatcaaggcagtttgcagaatctcggcttgggtctgcagaaagatctatccatgctttgaacctaatggcagactcagttaattgtcttgtgcgatggtcacaagaggttagagaagctggtggagaggcagatagaatattggaaggaattgcagagatgtggctgcggctagtgcaggctctacgcaaggtgtgcatggatcaaagagaagaagtgaggaaccatgcattgttatcgttgcatagatgcttggtagttgatggaatatcagttaagtcttcaacatggttgatggcatttgacattattttccagttgcttgacgaactgttggagattgctcagagctactcaccaaaggatttcagaaacatggaggtatctctcttgcatgctgtaaaactgttatgcaaggtgttcttgcagtcacttaaagacctctcaggacagcacagttttgataagctgtggttggaggtccttgacatgatagagaagttcatgaaagtcaaagtgagagggaggaggactgagaagctaaaagaggctatcccagagttagtcaagaacattctgatggtgatgaaagcgagtggggtcctgtcaaagacaggtgccagtgaaaacagtttctgggaagcaacatggcttcaagttaacaagattgcaccctctctacaatcagaattttttcctgacaatgaggatggcagcacaactcaaattgaagaaaacaaattggatacacaagcacaatctgaccagaacaatgatcaataggacattatacttcccccatccaatcaagttagttgcagctggatcctgtcaacttttgttcacaaaccatacacagatgcttggcagttctgtatgtgccattaggaagagtaaggtggtatactgtaattttcttagtttttatatataattttgttcttgacaaggttgttgctttggcttattgttgcaacaccgaagctgtatgataaatataccgtgttaccggccttggagaatcaaagcttttggctgtttatattgttaaaaaaaaaaaaaaaaaaaaaaaaaaaaaaaaaaaaaaaaaaaaaaaaaaaaaaaaa

SEQ ID NO: 73520 - DNA, 141 bp, Zea mays
  Clone ID: MRT4577_167049C.1
gagctatgcgtgctaacgcgcgcgttcagtagccagaagctaaacaagcacgcgctgtctgtcgtgagatgttgaccgccggcctgcactgcatgctgatgctgttgccatcacaggacctaccccgtgagacatcccata

SEQ ID NO: 73521 - DNA, 203 bp, Zea mays
  Clone ID: MRT4577_16704C.1
ggtcccctccgggcccggcgcggcctcagccccaatgccatgagcgcaagtaccgcagcggaatcgagaacctgctggtcctgtcgatcggtggtatcctaatcgtcatgcctaccgttctttccgtctaccatggttattggttcggacaagctggcacagcagggcgccatcactcagaggatgagtgccattgaagagat

SEQ ID NO: 73522 - DNA, 427 bp, Zea mays
  unsure (1)..(427): unsure at all n locations
  Clone ID: MRT4577_167050C.1
aaacactcatcagatccaatacacaaatctggaacaattgttgacaatatccggcaaatatcccaatagttggcctacagactagacatccagctgtgatgtgtttgcggacatactaatttagtcatacancaggtttaacacaagctcacaaaggcncgagcccctcaagggtccagctctaggagcntcagaggacatatccaatgtcaattggggccatacttatggcctcgaanctaaatcacctactcagagttttcacaggattgatttccgccgataaccacatgactcacgtccttggcgcacagctggccccgtgcgccttgaaattctccagttctgtccgaacttcctcctcagggcggtcgatcaaatccctcatgcgccatatctgcagtgttccggcttccccagtgctctc

SEQ ID NO: 73523 - DNA, 458 bp, Zea mays
  Clone ID: MRT4577_167051C.1
tcgaggccggccgggatctcgtactcctaatcctctgttacttctctcgcagccgcacaatctgctgctgttctgccgccaccgccaatccctctctcgtcgctcgcgcgcacctctgctgagagcgagaagagataggacgaaaagggtgatggtacgcataatcggagattgatctcgcgacgatctactcttgagttggtgagtggcaccaggaccgtgttgagatcatcttcaacgaccagggtagacgcacacacaccctcgcacgtcgcctttaccgactacgagcgtctcatagaagatgactgcaagaaccaggacgccgtgaaccccatcaagcaccgcatttgatgccaaacggctcagtgatacgaggcttattgatgcctctgaccaaaatgatattgagctagtggaccttcaaggatgttcctgtagccagcgagaagctatga

SEQ ID NO: 73524 - DNA, 333 bp, Zea mays
  Clone ID: MRT4577_167052C.1
gcaggggcgcagatccatccaagatggctgggcacccaggtcaacctccgcggacctactcgcgctacgacaccggagagcccaccgagggggctaagaagatggagatgcctataaagccagaagcctgaccaggagcccaagcaccgagccgaatcgatactctgctgcagacatcagcgacgagctggccaaggggcatggccctgacaggaggagctacctgccggacgggcatggtggagcggtccgaggtgcagggagtacctcaccggagaggcccctgcaagactagggctaccatccctcctgggctgggcaagaagccagagg

SEQ ID NO: 73525 - DNA, 332 bp, Zea mays
  Clone ID: MRT4577_167053C.1
attcggctcgaggggtgctacatccttttttgcagcggcttcgtgcagacgacgaacaagattgcaattggggcggctgtcaccccgaagtcggtgtacatgggcaggcagcacgacatcactctaatgctatggaaggacccacagcactggcactggttgctggagctatgcccgggcctagtatcaatgtactggccgtcgcacctcatcagccacactgataagacacgccaacatagcgcagttaatgcggcgaggagcacaacaccctgtcgtcggggtcgcataccgcgacgcagatgggcacgagccaccttcccagagagggc

SEQ ID NO: 73526 - DNA, 332 bp, Zea mays
  Clone ID: MRT4577_167054C.1
ttgcccgcctttgttttggtttttttattattcactctttttttgcgggcactcattctttctaacgaggaattggcacaatcaaaaaaggcctcattggggggaaacacccaagcaggccgttacatttgaatgggggccccaaacaatgtctcttttttaaacgagtgggggtgcttgataaaaaataaactaaacccaatgcggcacttgttatttttttttttttcgaaccaaaaacttattttagcttactttgttacaaaaaactgaaagacattgagggttgatcaacccctactatatatccaaagttttaacaggaacaaact

SEQ ID NO: 73527 - DNA, 396 bp, Zea mays
  unsure (1)..(396): unsure at all n locations
  Clone ID: MRT4577_167055C.1
naaaaaaaccctcctacccccaaacagacgaaacctaccgagggtttttttaaaaagcggacccgcggtttcccccctcaaaaaaaccatggaccgttttttcgatgggggaaccgggaaaaaacactgtcatggggcccgaccgtaatcaagggtccttaaaggccccaggggccctaaaaataaacccccacaggaataggggggggttcaaagagggaaccaaacgccggctgccaaatcattcattgggcgcaaccgttcattctttaatgggcgggtagggaatcaggacccccttccacccaattttttgccccctttgggaatcccccaacagggactggtaaaacgggccccaccaccattcccaattttaagggccccccccgtggc

SEQ ID NO: 73528 - DNA, 538 bp, Zea mays
  Clone ID: MRT4577_167056C.1
taccttctgccctcaggcgtgtccaatgcggtgaataatcacgggggtgtcttcatgccccatgtgtccaccttcccctgcatgtggattcaggccacaaacatagatatgggggcggcggataccgaatttggttttcagatcatggttgagaatagtgactacttctctcagtgaatcaaacgtaatcgccttgggaacatgcataatcggcagatgcgtcgttgccagagccacccgtagctcttctggtgccagcatcatgactacccttgagcattggctgtggtcagcaaaaaactgagtatgcccggtaaaaggaacgcctgcctcgttgatgacacctttgtggaccgggcctgtcaccagtgcagaaaactcgccattcagacaaccctcgcaggcttttgccagcgtttccgtgacataaataccgtgttcccggttcaattcaccggcaatgacaggcgaatggagggaaacgggcagaatagtcagggatccggcggcctgtgttggggaaatgtattcaggggag

SEQ ID NO: 73529 - DNA, 2448 bp, Zea mays
  unsure (1)..(2448): unsure at all n locations
  Clone ID: MRT4577_167057C.1
tcctcctgtaaccagatctgaacccgcgngcgacaggaaacaaacgctcgctcgctcgctcgttgtccgttcattgtcttcgccggcgccgagggaccctgagagggcaggcgggcgagatggcgggcggcggcgttgaggacgtgtacggcgaggaccgcgctaccgaggagcagctgatcacgccgtgggccttctccgtcgcaaggtcccatcgattcggatccattcccatgctcacgatctcgtcttcttccacctctctctctctcggctctcgccctcgcgcgtcgcctgcctacgctaaccaaacattcctctccacgttatgcgaaagctgccttttcttttgccgtcttcgtccaaacatcttcgattcgtcatcattcgccacagttctgcacatttttttcatcaattattattattcttatggtatacagtagtattgtacagtagaccaacaccagtcagcgattacttccagcgtataatatattatgcgcgcgtaagcggtaagcggatctgacgaagtttgcatgtgatgatctgacgatcggtttctttttccctcctcctcctcctcctcctccatccagcggctacaccctgctgcgcgacccgcggcacaacaagggtctggccttctcggaggcggagcgcgacgcgcactacctccggggcctgctgccgcccgcgctggcgtcgcaggagctgcaggagaagaagctcatgcagaacctgcgccagtacgagcggccgttgcaccgctacatcgccatgatggacctgcaggagcgcaacgagaggctcttctacaagctcctcatcgacaacgtcgaggagctgctccccgtcgtctacacgcccaccgtcggcgaggcctgccagaagtacggcagcatctaccgccggccgcaggggctctacatcagcctcaaggacaagggcaagatcctcgaggtgctcaagaactggcccgagaggagcatccaggtcatcgtcgtcaccgacggcgagcgcatcctcggcctcggggatctcggctgccaggggatggggattcccgttggcaagctctccctctacaccgccctcggaggtgtccgcccgtcagcttgcctgcccatcacaatcgacgtcggcaccaacaacgaggccttgctcaacgacgatttctacatcggcctccgccagaggcgtgccaccggcgaggagtaccatgaacttgtcgaggagttcatggccgccgtcaagcaaaactacggcgagaaggtcctcacccagttcgaagactttgcgaaccacaacgcttttgacctgctcgagaagtacagggagagccatctcgtcttcaacgacgatatccagggaacggcctccgtggtcctcgcaggcctcttggcggcgctcaaggtggtcggcgggacacttgcagaccacacctacctgttcctcggtgccggcgaggccgggactggcattgccgagctcattgctcttgagatgtcaaaacatactgggtccccgatcgaagagtgccggcccaagatctggctgatggactcgaggggcctgatcgtggcgtcgcggaaagagtcgctgcaggcgttcaagaagccgtgggcgcacgagcacggggcggtggagaccctgctggaggcggtgcggtccctgaagccgacggtgctgatcggcacgtcgggcaagggcggcaccttcaccaaggacgtggtggaggccatggcgtcccagaacgagaggccggtggtcttcgcgctgtccaacccgacgtcgcactcggagtgcacggcggagcaggcgtacacgtggaccgagggccgcgcggtgttcgccagcggcagccctttccccgcggtggagctggacggcagggcgctggtgccgggccagtccaacaacgcctacatcttcccgggcttcggcctcggcgtcgtcatctcgggcgccatccgcgtccgcgacgacatgctgctggccgcctcggaggcgctggcggagcaggtcaccgaggcgcactacgccaagggcctcatcttcccgcccttcaccaacatccgcgccatctccgcgcgcatcgccgccaaggtggccgccaaggcctacgagctcggcctcgccagccgcctgccccgacccgacgacctcgtcagctacgcggagagctgcatgtacacccccacctaccgcagctaccggtaaggaccacccatgccgccatgcgtggcatggagccatggccggcgctagaggagtgagttttacacgtacgtactttgattttttttatgtactgtatttctgtgtacggcaaaatacaccacacccacatatatacggaggtgaagttgattcttctgacaaaaaaaaaaaaaaaaaaaaaaaaaaaaaaaaaaaaaaaaaaaaaaaaaaaaaaaaggggcggcc

SEQ ID NO: 73530 - DNA, 2187 bp, Zea mays
  Clone ID: MRT4577_167058C.1
aaaaaacccgcccggccgcccgtggagactactcggcgtctggagcgctataaatccgcgtcaccgtccgttgcttcttcttccacatccgtcttcctcctgtaaccagatctgaacccgcggcgacagaaacaaacgctcgctcgctcgttcgttgtccgttcattgtcttcgccggcgccgagggaccctgagagggcaggcgggcgagatggcgggcggcggcgttgaggacgtgtacggcgaggaccgcgctaccgaggagcagctgatcacgccgtgggccttctccgtcgcaagcggctacaccctgctgcgcgacccgcggcacaacaagggcctggccttctcggaggcggagcgcgacgcgcactacctccggggcctgctgccgccggcgctggcgtcgcaggagctgcaggagaagaagctcatgcagaacctgcgccggtacgagcagccgctgcaccgctacatcgccatgatggacctgcaggagcgcaacgagaggctcttctacaagctcctcatcgacaacgtcgaggagctgctccccgtcgtctacacgcccaccgtcggcgaggcatgccagaagtacggcagcatctaccgccgcccgcaggggctgtacatcagcctcagagacaagggcaagatcctcgaggtgctcaagaactggcccgagaggagcatccaggtcatcgtcgtcaccgacggcgagcgcatcctcggcctcggtgatctcggttgccaggggatgggaattcccgttggcaagctctccctctacactgccctcggaggtgttcgaccgtcagcttgcctgcccatcacaattgatgtcggcaccaacaacgaggccttgctcaaggacgagttctacatcggcctccgccagaggcgtgccaccggcgaggagtaccatgaacttcttgaagagttcatgaccgccgtcaagcaaaactacggcgagaaggtcctcacccagttcgaagacttcgccaaccacaacgcctttgacctgctcgagaagtacagggagagccatctcgtcttcaacgacgatatccagggaacagcctccgttgtcctcgctggcctcctggcggcgctcaaggtggtcggcgggacacttgcggaccacacttacctgttcctcggcgccggcgaggccgggactggcattgccgagctcattgctctcgagatgtccaaacatactgggtctccgatcgaagagtgccgcccgaagatctggctgatggactccaagggcctgatcgtggcgtcacggaaggactcgctgcaggcgttcaagaagccatgggcgcacgagcacgagcccgtggcgaccctgctggaggccgtgcagtccctgaagccgacggtgctgatcggcacctcgggcaagggcggcaccttcaccaaggaggtggtggaggcgatggcgtcccagaacgagaagccggtcatcttcgcgctgtcgaacccgacctcgcactcggagtgcacggcggagcaggcctacacctggaccaagggccgcgcggtgttcgcgagcggcagccccttcgacagcgtggagctggacggcaaggtgctggtgccggggcagtccaacaacgcctacatcttcccggggttcggcctcggcgtcgtcatctccggcgccatccgcgtccgcgacgacatgctgctggccgcctcggaggcgctggcggagcaggtcaccgaggagcacttcgccaaggggctcatcttcccgcccttcaccaacatccgcgccatctccgcgcgcatcgccgccaaggtggccgccaaggcctacgagctcggcctcgccagccgcctgccacgccctgacgatctcgtcaagtacgctgagagctgcatgtacacccccatctaccgcagctaccggtaaggaaaggaccatggccggggcggcggcctgagcaaaaggaaaggaaacgggtaaattatgagtcagtgagtgaataaagggtcgatgcgatatttgttgcagctagaggagtgagtttacacatactttcatttctatacactgtatttctgtgtaccgtatacggcataccatacaacactactacatactcgtcagtcatttcaatacagttaatgtacctggttagaacgctaaagaaaaaaaaaaaaaaaaaagcggcc

SEQ ID NO: 73531 - DNA, 987 bp, Zea mays
  Clone ID: MRT4577_167059C.1
cggccgctcgaggcggcgggccggatttcagcacataccacctgctcctctcctccacccacgcgcccgcgcccacgcacgcactaactacctccctcccccggagctccgtcaagccatgggcgaggacaagaaggagaagccgggcaaggcagacggcgccgaccacaacaaggacgccgcggcgccgcccgagcccatcgtgctcaaggtcgacttgcattgcgccggctgcgccaccaaggttaagcgggccatcaagaacgcccctggcgtggagtcggttaagactgacacggcggccaacaaggtggtcgtcaccggcgcggtggacgcggcggagatcaaacagcgcatcgaggccaggaccaagaagcccgttcaaatcgtctccgccggagccgcctcgcccaacaaggacaacaaggagaaaggcaaggacaacaaggcggacgccggcgataagccggagaaagagaagagcaaggcagcagaaaaggagaagggcggtgccggtgccggtgctgagaaaaaggagaaaaaagtggaaaccgccgacaagcccaaggaggaggagaagaaaccaaaggagcccaaagaggagaccgtgacgctcaagatcaggctgcactgcgacggctgcatcgaccgcatcaagcgccgcgtcaacaagatcaaaggagtgaaggaagtgacggtggacgctgccaaggacctggtgaaggtgactggcaccatggacgcagccgccctgccgggctacctcagggacaagctcagtcggccggtggaggtggtcacccccggcaagaaggacggcgacaagaaagacgacggggagaagaagaaggacaagggcgctggcgagggcggcgaaaagaagaaggacggcggtggcggcggcgaggacaagaaggacaagtccgcggcgtccgtggcgccgatgcccatggcggacccgagcatgtaccagatgcccccacagta

SEQ ID NO: 73532 - DNA, 738 bp, Zea mays
  Clone ID: MRT4577_16705C.1
ccggccgggaaataatcgtggcgagctgacaaatacccctctcaaaccctcgcccatcccgaagcctgtataaaaagctctgcgttcctccaccctctttcggctcgccgttcttatcccctcctcctcccagtcccagccatcgcctcccgatggcgtccctcgtcacgctccccgccatcgccttctctaaccccgccacagcctccggcgctgtccgcctacgcgccgcggccttccgctgctgggcgctccggcggcgcgggtgggcggtggcggctgccgtggcctcgcccaactccgtgctcagcgagcacgccttcaagcggctccagctcgggagtgacgacgaggacgaagaagggccgtacgggagcgacgccgacgaggggttccagggggacgaggaggagctcgccattgccaggctcggcctgcccgacgagctcgtcgccacgctcgagaagcgcgggattacgcacctgttccccatacagagggctgtgttgattcccgctcttgggggccgtgacctgattgctagagcaaagaccggaaccggaaagacacttgcctttggtattcccatgatcaaaaaattaatggagcaagacgatggtcggagtacaaggcgaggtcgtactcctcgggttctggttctagcacctaccagagagttagccaaacaagtcgagaaggaaataaaggaatcagcacccaagcttggcaacgtgtgtg

SEQ ID NO: 73533 - DNA, 238 bp, Zea mays
  Clone ID: MRT4577_167060C.1
cttgggtttttttttttttttttttttgttttttttttttgggccctgaaaagctttgaaaacaaatcccctgggccctaaaataatttttacaccttgttggttccagagggtggggcctatatttgtttctctacccccgctactttaatctatattacatgagcaaaacctttttttactggaggcacaaaaaaggagccctggatctgcatcactaaaaagttgtagaaccccc

SEQ ID NO: 73534 - DNA, 827 bp, Zea mays
  Clone ID: MRT4577_167061C.1
cggccgctcgaggcggcgggcgggtttcagcaccacgtgctcctctcctccaacccacgcccacgcccacgcactacctccctccctccctcccccggagctccgccaagccaccgctacgtacgccatgggcgaggacaagaaggagaagccgggcaaggcagacggcggcgaccagaagaaggacgccgcggcggcggcccagcccatcgtgctcaaggtcgacttgcattgcgccggctgcgccaccaaggttaagcgggccatcaagaacgcccctggcgtggagtcggttaagactgacacggcggccaacaaggtggtcgtcaccggcgccgcggacgcggcggagatcaaagagcgcatcgaggccaggaccaagaagcccgttcaaatcgtctccgccggagccgcctcgcccaacaaggacaacaaggagaaagacaaggacaagaagcccgacgccggcgataagccggagaaagagaagagcaaggcagcagacaaggagaagggcggtgccggtgccggtgctgagaaaaaagagaaaaaagtggaaaccgccgacaagcccaaggaggaggagaagaaaccaaaggagcccaaagaggagacggtgacgctcaagatcaggctgcactgcgacggctgcatcgaccgcatcaagcggcgcgtcaacaagatcaaaggagtgaaggaagtgacggtggacgctgccaaggacctggtgaaggtgactggcaccatggacgcagccgccctgccgggctacctcagggaccagctcagtcggccggtggtagttggtcacccccggcaagaaagac

SEQ ID NO: 73535 - DNA, 500 bp, Zea mays
  unsure (1)..(500): unsure at all n locations
  Clone ID: MRT4577_167062C.1
cccgggtgcgaccgacgcgtnccgatgtcngttgcagctgcgcgatctaagctgcggttttgttgctctaagctgcaagtnnngcggcaagaagggaccctgactctggaggggagactaggctaccgccgcgcagggcctacctgtcgtccttctggcgtggcctccggagaaagaagggccgcgctccgagttctgtcgagggccgcggcggagtctcggctgaggctcgcccacgtgcttgcagcttgcggtggcaactgcaagtgcgaccctctgtcaactgctgatcacatccgatcgacgaccatggatatgattattatctatctagcttgtggtggtggttgaacaataataagcgaggccgagctggctgccatacataagtattgtgtggtgtcactggtgtgtgtgtgagagagagagaaacagagttctttagtttgctatctctctctctttctctctctgcatgcttggcgtcagtctttgtgctc

SEQ ID NO: 73536 - DNA, 752 bp, Zea mays
  unsure (1)..(752): unsure at all n locations
  Clone ID: MRT4577_167063C.1
aattcggcacgagggtttgacctcacctgcccctcctctcctctctccgccccctgctcctccgagtgaccgtacgccgtagcctcgacccggccgatccccgaaaccctagacgcgccgctggtcgccggaggccgggccatggacgtcggcgcggagctgcgcgaggcccaccgcctgacgggccacgccgaccgcgtgtgggcgctcgcttggaaccccgccccgggccccggctccggccctgttctcgcctcctgcagcggcgacaagaccgtccggatctggaagcgcgcccctgacggcgcctggcagtgctcggatgtgctggaagacacgcacaaccgcacggtgaggtcctgcgcctggtcccccaacgggaagctgctcgccaccgcgagcttcgacgccaccacggcagtgtgggagtacaacggcgccgactttgagtgcgtcgccacgctggaggggcacgacaacgaggtgaagagcgtgtcatggagcccgtctgggtcactgctcgccacatgcagccgggacaagatggtgtggatatggggaggtgctgccagggaacgagttcgagtgtgtctcggtgctgccgggccacacgcaggacgtcaagatggtgcagtggcacccaattcttgacattttggtctccgtcagctatgataattccatcagggtctgggctggtgatggagacnatgagtggcgctgtgtgcagacactaactgaagccaataact

SEQ ID NO: 73537 - DNA, 343 bp, Zea mays
  Clone ID: MRT4577_167064C.1
tcgagatgaccagcgtgtggaagaccaaggttctgcctggcctcaacaggagctttgacaaggatgacaaggtcgcggaggcctacgaagcatctcctcctgaggtcaaggctctgttcaaggataagaagccagtcaaggtcagcaagaagaactcggctgcagtcaccaagttcctcgatgagctggctaagattgacttccctggagccaaggtggtgagcgaggcggtggccaagtccggcacctcgcccctgcttacggcgatcaccttcatcttggacaaggtcgcaccgtttatccccaaggaggagcccaaggcggagccggcggcggaggccac

SEQ ID NO: 73538 - DNA, 1212 bp, Zea mays
  Clone ID: MRT4577_167065C.1
gggtacctcgaggccggccgggacttcctgtcatgtatgtatgcggctctgcttggtttcttgcctgttcattcatcatcgccctgctggtggttttccattcatcatcgatcttcctgcgtctctgaactttttctgctgtgtctgttggccgggagcagaggttgctacacgtatatattctgaagaagagatcgagatgaccagcgtgtggaagaccaaggttctgcctggcctcaacaagatctttgacaaggatggcaagaaggctgcagctgcaggcttcttgaagtccttcaacaaggaggagattgacaaggagattgaggacaagaagacagagctggagcccaaggtcgtggaggcctacgaagcatctcctcctgaggtcaaggctctgttcaaggataagaagccagtcaaggtcagcaagaagaactcggctgcagtcaccaagttcctcgatgagctggctaagattgacttccctggagccaaggtggtgagcgaggcggtggccaagtccggcacctcgcccctgcttccggcgatcaccttcatcttggacaaggtcgcaccgtttatccccaaggaggagcccaaggcggagccggcggcggaggccacctcccgggaagtcgccgtggaggagaagaaggaggaggccgagccagctgcagcgacggaggcggcaccggcgccggcagagacaccgtcggaggcggcggtggtagaggagaagaaggaagaagagaagaaggaagaggaggataagccggctgccgaagaggcggcgccgccagcagcagcagcagctgctgctgaggagaagtgatcctgttgacggatcgagcatgcaaagcgctccctcctcgctcccttgcttgcttgctgctggtaaattaaattaagttgccgtgatacttaagcgtagccgcacggagtgaaaagttatcaagtaaaagcagacaaacacttggcatgcatggacattaatttgttattctttgtaccgtcgtcgtctcgatgaaccgcgtgtacatttgtagtgtggggttttctttgttttcgatttgggggtgatcattacaagaatgtgtaattatttatgttcatatgtatgtttgttgatgatggacggacatatttaagaagacaaaaaaaaaaaaaaaaaaaaaaaaaaaaaacggactctgcgttgttaccactgct

SEQ ID NO: 73539 - DNA, 1058 bp, Zea mays
  Clone ID: MRT4577_167066C.1
gttttccattcatcatcgatcttcctgcgtctctgaactttttctgctgtgtctgttggccgggagcagagcttgttgctacacgtatatattctgaagaagagagatgaccagcgtgtggaagaccaaggttctgcctggcctcaacaagatctttgacaaggatggcaagaaggctgcagctgcaggcttcttgaagtccttcaacaaggaggagattgacaaggagattgaggacaagaagacagagctggagcccaaggtcgtggaggcctacgaagcatctcctcctgaggtcaaggctctgttcaaggataagaagccagtcaaggtcagcaagaagaactcggctgcagtcaccaagttcctcgatgagctggctaagattgacttccctggagccaaggtggtgagcgaggcggtggccaagtccggcacctcgcccctgcttccggcgatcaccttcatcttggacaaggtcgcaccgtttatccccagaggagcccaaggtggagccggcggctgaggttgaggccacctcccgggaagtcgccgtggaggagaagaaggaggaggccgagccggctgccgccgaggaggccgcgccggcgccggcagagacgccggcggcagaggagaagaaggaagaggaggaggagaagaaggaggaggaggcgaagccggctgccgaggaggcggcgccaccggcagcagctgctactgaggagaagtgatccggccgatccgattgatggagcaaagctgctggtaaattaaattaagttaccgtgagattaaaaagttactggatcatcactgcttgtcaaccacgtagatgcgtagatcgagttaaaattaagtgattaagtcatcagacacacacttggcataatttgttattcttttctctactgtcacctcgatggatggaccttgctgtgtacatttgtaatgtggggttttctttgtttttgatttgggggtgattattacaaatgtgtaattatttatattgatatgtttgttgatatgatggatggacgtatttaagaagacac

SEQ ID NO: 73540 - DNA, 2486 bp, Zea mays
  unsure (1)..(2486): unsure at all n locations
  Clone ID: MRT4577_167067C.1
cacgactctcggcaacggatatctcggctctcgcatcgatgaagaacgtagcaaaatgcgatacctggtgtgaattgcagaatcccgcgaaccatcgagtttttgaacgcaagttgcgcccgaagccttctggcggagggcacgtctgcctgggcgtcgccccgggaaaggggtacggagtaccggagacatcgtcaacgccatggccggaggaggtgcaacggtgtgcgtgaccggagccggcgggttcatcgcctcgtgggtagtgaagctcctgctctcccgcgggtacaccgtgcacggcaccgtccgccacctcagtgacgagaagacaggccacctgaagcgcctggagaatgctgccggaaaccttagggtcttcaaggctgacctgctggactacgacgccatggcagctgcggtcgtcgggtgccagggggttttccatgtggccactcctgtgccttcggaggacctgactgacccagagctacaaatgctgggtcctgctgttaccggcaccacgaatgtgctcaaagctgcctccagcgcgaacgtccagcgagtggtggtggtgtcgtccatggttgccgtcgagatcagccccaaagattggcctgaaggtaaggtccgagatgagaggtgctggtcagaccgagagttctgcaggagcattgagagctggtacccggtggctaagatcatctcagaggaggcggcgctggcgtacgggcagcaaaccgggctcgacgtggtgactatcaatccagggttggtgttcggccccatgctgcagccgacggtcaacacgaccatccagttcctcatctactttctcaaaggaggtccgacccggggaagaacaagctcgcagagatcgcaaagaagcccctggctttcctgccgccattcctctcgcaccgtgcctctgcctgaactgttgtgggctgtgagccgtactgcgtgcctggccgggctggtgatcacaactccacgtcacacacctcacagagctgcagcagcatcagctgccacctcctgcctctcctccttccttccttcctgcataggttgttgctacacgtatatattctgaagaagagatcgagatgaccagcgtgtggaagaccaaggttctgcctggcctcaacaagatctttgacaaggatggcaagaaggctgcagctgcaggcttcttgaagtccttcaacaaggaggagattgacaaggagattgaggacaagaagacagagctggagcccaaggtcgtggaggcctacgaagcatctcctcctgaggtcaaggctctgttcaaggataagaagccagtcaaggtcagcaagaagaactcggctgcagtcaccaagttcctcgatgagctggctaagattgacttccctggagccaaggtggtgagcgaggcggtggccaagtccggcacctcgcccctgcttccggcgatcaccttcatcttggacaaggtcgcaccgtttatccccaaggaggagcccaaggcggagccggcggcggaggccacctcccgggaagtcgccgtggaggagaagaaggaggaggccgagccagctgcagcgacggaggcggcaccggcgccggcagagacaccgtcggaggcggcggtggtagaggagaagaaggaagaagagaagaaggaagaggaggataagccggctgccgaagaggcggcgccgccagcagcagcagctgctgctgaggagaagtgatcctgttgacggatcgagcatgcaaagcgctccctcctcgctcccttgcttgcttgcttgctgctggtaaattaaattaagttgccgtgatacttaagcgtagccgcacggagtgaaaagttattaagtaaaagcagacaaacacttggcatgcatggacattaatttgttattctttgtaccgtcgtcgtctcgatgaaccgcgtgtacatttgtagtgtggggttttctttgttttcgatttgggggtgatcattacaagaatgtgtaattatttatgttcatatgtttgttgatgatggacggacatatttaagaagacaactcttttgtgtatatatatttcttgttattttcaaaggattaaagtggataatccaattgttataaaaaaaaaaaaaaaaaaaaaaaaaaaaaaaaaaaaggagtgtagaagcccccatggatattagacacgttgaagaaatcttaaagcagaggaggaaaaactccaagctgaaaaagtggaagctgctaggaagcaggaagaggtgcaatctgtttgaagccttttaaagaacagatatgtggttaggnntttgtcaccccccccccccccccagtttnaatggttcaaagtattgtggagaaacatttgtaggtatgaaccgcggatgaggaagaacaagtgcgcaggaattgtgtaagacgggagatgagaatgttgngcaccacccccttnntgtgtattaaaaaccccccccc

SEQ ID NO: 73541 - DNA, 333 bp, Zea mays
  Clone ID: MRT4577_167068C.1
ggggggaaacaacacccttaccctgttttagggagatttaccggatacaaaaggggaagtttttccttttttccaaagcaaaatgggcgggggccacccttcaaaaaaccctttggccggggtgttaaactattttttaaaccttagggttaccccccaccctcaaataaaaagaactttttttaaaggggtttttccggccttttaaacaaactttacaggggggggtggtccccacctctcctctgggaacattttttttttggggcaacaccctctttttaattttgggtttcttgggaacttaagcttcctaaaccttttttttttttt

SEQ ID NO: 73542 - DNA, 243 bp, Zea mays
  Clone ID: MRT4577_167069C.1
gtttaatatttcttaaattactaggtaagtgcccgtgcgttgcaacggaataatataataccacgataacttatgaaaaaaaaaaaaaaagaaaaaaaaaataaaaaaaaaaaaattaaaaaaaaaaaaaatggggcggcctatctagatttaaaacgttggcataattgatttttcttgcggggagggtaaatggagggcacctggaaagccctttattaaaaaaaattaaatatccttgag

SEQ ID NO: 73543 - DNA, 1851 bp, Zea mays
  Clone ID: MRT4577_16706C.1
agaaatatgaacccacaacccgaaaccagcaggcaaggccgcgcgtcctcctgcgccgcccgccccgggcccgggcccaaagcaaccagacgcagagcgttcttcttccccgacggcccgggccgacggctcgactccactagtcgctggaaccctctgcaacaaagccgcctccacctgaccacctcccttgagctcttccccttcctcgtgggttgtgcgagccctctaccggcgcgcagtacaggggctgattgggtgatcaaacccgcaagatttgggtttgtgatttaggagcaggaggcggtggcaatatggaatataaggcgagatctactggaacttcaggaacttcgtctaaaagtttccgtgatctgtacaatatgaagtactcgagctacttaaacgacgaaccaatgccggatgctacatcggaaaaggagcagggaaatgagtatttcaaacagaagaagttcactgatgctattgaatgctactccagaagtattgggctgtctcctacagcagtcacatttgcaaatagagctatggcatatcttaaactaagaagattcaaggaggcagaggacgattgcactgaagctctgaatctggatgatcgctatattaaagcatactcacgccgaattactgcacgaaaagaacttgggaagcttaaggaggcaatggatgatgctgaatttgctatcagtcttgatccaaacaattcagagctaaggaagcagtattctgagataaaagctttgcacatggagaaaatggctaaaaaggttccagtgccagctaaacgtgcagtttctggaattgataaaactgcagatgtcacttctcacccaccgactatctcccagaaggacactattatggaagttgatctgcctgttagagatgcaatgaagatcaaagagagtgcaagcgtcaagtctaacggaggacctggagtaatcatcaatggcaataacgtgcagcagctccaaggtcgagatgccaaccagaagactgggccagaagtttcagtccaagatcttgcagctcgtgctgcttcacggtatatggccggcactgtgaaaagcattaagacacccaaaacagcttatgactttgaggtttcttggagagctctttctgatgacactgcccagcaaatacagttactaaagtcgattccaccagcaagcctaccagagattttcaagaacgcactttctgcaccttttcttattgacatcgtgaagtgtgcagcctcaattttccgggatgcggaggcattagctgtcagtattttggataatttggctcgagttccacgcttcgacttgataatcatgtgcctttcatccatgcacaaatttgaactgaggaagatatgggatcaagtattccttgctgaaaaagcgctggctgatgatcagatggaagctctgaggcagctgcgaggcagatacattccgggaggatggcaggatagcatgctcacttcgagttaaatcaatcaatcaaatgacgacgatgtaaagcaggattgttacaaaaaccttttgctggcttcgcaactgatgtctctgcatccatctgttctagaatcaggagtgcctgtcgattgttaagcccactggtctggatgtagcgaacggttgaagcatccagtgtaggaacatgtgtcgactgcaaatggttgagatttgttctgttgtgcttgccgctactgtaacctcgctttgttgtgcgccggattcctgacgctggcacatcgtacgcttgtcggcgacaactttatggaacacacacattttgatgatttaaagaattctctataaaatgtcttctaat

SEQ ID NO: 73544 - DNA, 980 bp, Zea mays
  Clone ID: MRT4577_167070C.1
cactcctaagggcgattgggaccctcgaggccggccggggcactgcagctgcatcaccatcattcataggctgcctgcctgcctgctgatctcgcacctcaaacccacacacagcagcataggttgagatagatggccagtctgtggaagaccaaggttctgcctggcctcaacaagatcttcgacaaggatggcaagaaggctgcagctgcaggcttcttcaagtccttcaacaaggaggagattggcaaggagattgaggagaagaaggcagaactggagcccaaggttgcggaggcttatgaagcatctcctcctgaggtcaaggctctgttcaaggataagaagccagtcaagatcagcaagaagaactcgactgcagttaccaagttcctcgatgagctggctaagattgacttccctggagccaaggtggtgagcgaggcggtggccaagtccggcgcctcgcccctgtctccggcgatcaccttcatcttggacaaggtcgcaccgtacatccccaaggaggagcccaaggcggaggacgcggtggctgaggccacttcccgggaagtcgccgtggaggtggaggatgccgagccggctatagctgatgcagcggccgagacaccatcggaggcgaagaagggagaggaggaaaagccggctgccgaggaggcggcgccaccggcagcggctgctactgaggagaagtaatactccgatccacagccatgcctctccctacgtagctgcagcagagtgaaaagtgattcagtcagtcagacatacacacttgcattggcacgcattattcatggacatgtacgttgctgccccgtgtgtgcgtgtgcgtgtgcgtgtgtgtgggggttctttgttttttattttggggcgattgttacaaatgtgtaattatttatatcgatatgtttgtttcattgatggaccgcatttaataagacaattctttcttgtgt

SEQ ID NO: 73545 - DNA, 2360 bp, Zea mays
  Clone ID: MRT4577_167071C.1
cgtgcgaaggagcattttaagtactgaaccggagcccaaagaccaggaggcctgcgaagcatctcctcctgaggccaaggctctgttcaaggataagaagccagtcaaggtcagcaagaagacgaaaggagtacggagtaccggagacatcgtcaacgccatggccggaggaggtgcaacggtgtgcgtgaccggagccggcgggttcatcgcctcgtgggtagtgaagctcctgctctcccgcgggtacaccgtgcacggcaccgtccgccacctcagtgacgagaagacaggccacctgaagcgcctggagaatgctgccggaaaccttaggatcttcaaggctgacctgctggactacgacgccatggcagctgcggtcgtcgggtgccagggggttttccatgtggccactcctgtgccttcggaggacctgactgacccagagctacaaatgctgggtcctgctgttaccggcaccacgaatgtgctcaaagctgcctccagcgcgaacgtccagcgagtggtggtggtgtcgtccatggttgccgtcgagatcagccccaaagattggcctgaaggtaaggtccgagatgagaggtgctggtcagaccgagagttctgcaggagcattgagagctggtacccggtggctaagatcatctcagaggaggcggcgctggcgtacgggcagcaaaccgggctcgacgtggtgactatcaatccagggttggtgttcggccccatgctgcagccgacggtcaacacgaccatccagttcctcatctacttcctcaaaggaggccccgacccggtgaagaacaagctctggcatatcgtcgacgtccgtgatgtggccgacgccatgctgctgctctacgaggtgcctgaagcgaccggcagacacatctgcgcgcctcatgttatcagtgcccgcgacctgctggatctgctgaagagcatgtaccctgactacccttgcattgccaacgagagcatacttgacagagaccacccagcgccgatgacctctgacaagctgaagaagatcgggtggagctgccgaccgctggaggagacgatcgtggacaccgtcgagtgctgcctgcgggctggatttctggaccatgtgggtggggagacttcctgtcgcttccctcctcttttaaaccagatctagcctcggcgaaagcatgaattgtgattgcctatgctcttgcttatgttaccgtggacgacgagcgtcagcttttaaataaacgttgttgcatgctgttgtattccttatattactgtggacaagcatcgatcagagcttttgcccaagttgcggaggcttatgaagcatctcctcctgaggtcaaggtaattaattaacttatttatttatttatttttctgattgggcttgcttgctttagaagaactaagcaacgaaaactaggctgacgattgtacccgctgaatgattaattaggctctgttcaaggataagaagccagtcaagatcagcaagaagaactcgactgcagttaccaagttcctcgatgagctggctaagattggtaagcaaagtagagaaaactcttgtctcttcttctcttctctgtcgtatgtacctagctacttttccatgcatgatgtatacagttcctcaactgtttattatttgtcccacgtacgtccagacttccctggagccaaggtggtgagcgaggcggtggccaagtccggcgcctcgcccctgtctccggcgatcaccttcatcttggacaaggtcgcaccgttcatccccaaggaggagcccaaggcggagccggcggcggaggccacctcccgggaagtcgccgtggaggagaagaaggaggaggccgagccagctgcagcgacggaggcggcaccggcgccggcagagacaccgtcggaggcggcggtggtagaggagaagaaggaagaagagaagaaggaagaggaggataagccggctgccgaagaggcggcgccgccagcagaagcagcagctgctgctgaggagaagtgatcctgttgacggatcgagcatgcaaagctctccctcctcgctcccttgcttgcttgcttgcttgctgctggtaaattaaattaagttgccgtgatacttaagcgtagccgcacggagtgaaaagttattaagtaaaagcagacaaacacttggcatgcatggacattaatttgttattctttgtaccgtcgtcgtctcgatgaaccgcgtgtacatttgtagtgtggggttttctttgttttcgatttgggggtggtcattacaagaatgtgtaattatttaaaaaaaaaaaaaaagggcggccgccaccgcggtggag

SEQ ID NO: 73546 - DNA, 292 bp, Zea mays
  Clone ID: MRT4577_167072C.1
atcggttttttctgcaatcaggattcacggatcctcacagttgttggatcacataaatgctgcaaccattcatggtagggcgaaagcgccgatgcttgttatgctactgatcgcaaccatgaacaggataaaatcgaacgtatttccatgagtagattgaaacttgtaccagcccacaaacttgttcggacacagcggtagactaaccatgggttgcttatattttaacagatggacatgatgttggacatccttgcagaatacctttgtactagcagaattggagtatcag

SEQ ID NO: 73547 - DNA, 382 bp, Zea mays
  Clone ID: MRT4577_167073C.1
attattaattttgggggtgttttttaagcaaaaaaaaatggcataactgctgaaacatcactggggtgcaaaaaggaataaataacattggtgataaacaatctgagctgccggcttggcaatgtatttgaaaagataacacagacgctctaaaaaaattggcaaaagctaccagtcttttgacattttaccattaaatcgtgctcgggtttgacgacttttggtggttggcctcttcaaccagagggtttaagatgctgttctctgaaagccatctttgcatgttgaacaaagaaagggttgttgttttgtttccttccaaaggagtctacttttttccagatataggaacttactattaattccatgaaagaccctattc

SEQ ID NO: 73548 - DNA, 299 bp, Zea mays
  Clone ID: MRT4577_167074C.1
cacgcgtccgtgagcattaagaaacacacccatgccgaagcacatttagcatcaacttaccaacaatggctaccaagatattatccctacttgcgctacttgcgcttttggcgagcgcaacaaatgcgaacattattccacaatgctcactggctccaagtcccattattacacaagctcctcccaccagttacttcaatgggcttcaaaaacccagctgtgcaagcctataggctacaccaaacaatagcggtaagcgtattacaacaaccaatttccaagctgcaccaacattcctt

SEQ ID NO: 73549 - DNA, 230 bp, Zea mays
  Clone ID: MRT4577_167075C.1
cccctagtttgtttatacctttggtactttttgtttcccttctctgaacaaagaaagagcggcatgcagcttcctcttccttgagaggaaggcaggtatagtggccacaacaatgatagtggcgatgctagctgatggctgacttacttcgattctttctttcttgcttgcttgcttgctcgcttgcttgccccctatcctaatgaatggactatgtgcctttaataatt

SEQ ID NO: 73550 - DNA, 1926 bp, Zea mays
  Clone ID: MRT4577_167076C.1
cattgggacctcgagccggccaggtggacctcgaggccggccgggctatgctatgcccggctccaggtgaccaggttcagcaggcgtccggcccggcagcccccaagtcccatcgccgagcagaaagtcaggaacagaactcaggcgttggcgattggcatctccctcccctaagccatggctaccgggcggcccgtacgactcgtgctggatgcctccctcctcctcgacccctcctccaccagggaggcggcggcggtggcgctgcggcccggggtagaggagttgctgcggcggttgcgctactccaacctgagcgtggcaatctgctatgcagagggcatgccaactaatgagtcagactttcttgaaaaggtcgcaagctcacacttgtttggatctatagtacttcttgcaaaaagtgggaatctttctccaattgaattaatgatagaatggagccgaacaagtttttgtttttatgcgacttcaagagttgacaaaggtttaatttctgagctccagaatcagaactggagagttctttctgtagctaatgaatgtagcatagaggttcctggtgttttaaatgttcaaaggcttcaggagttgcttctcaccttggctactctaatgaaaaaggaactttgtggctcatctgttctggtgattggatatataatgaaaaaatcccgtgaggaagacttcgcaaagagaggagcatttcccatatatcctagtaagggcagtcttatctttgttcccctctctttcgaaattccattaagtttgcaactgcaagaagttgatatggtcctccacaaaataaccgatgagattgtcaagatcgatccaaactgctccattgattttccaaaagggatttcattttctgcaggaatgtctgaaattataagatttgtggaagagcaccctgatttttgtatcatggacccatttaaaaacatttacccattgcttgaccgtcttcaaatccaaaaaatccttgtccggttgcaagaacttggcactgaaggaaagccaaaacttcgagcaccgtattcttgcaaggttgacagttttcataatggtgaattggataagcatctagtagaagctaatttatccttcccactcattgtgaagccacaagtcgcttgtggagtcgctgatgcccacaatatggcactggtttttcagattgaagaatttagcaacctcagtgtgccccttcctgctgtgctacaggaatacgtggatcacggatccaagattttcaagttctatgtgatcggagacaaggttttctacgccgttagagactcaatgcccaacgcgcgcttcctgaagccgtcgtcaggaggtgaagctcttacatttaatagtttgaagactcttccggtggctacgaatgagcagcgaccgcagaccggcgcggaagatggcaagctgttagatgccgatctggtagaagaggccgcaaaattcctgaaggggctgcttgggcttacagtatttggattcgatgtcgtcgtccaagaaggcaccggagaccatgtcatagtggacctgaactacctgccgtcgttcaaagaggttcccgactcggaggcggtgcctgcgttctgggacgcggtcaggcaggcgtacgagtcgacgcgcgggaatgcgaatgcccagggttaataaggtgtcaaggctcttcccgaataagtgaatctacgtggagtggagcgcagcagagagaggagagccgcagtggttgtaatggttctggagcagactcggagtaatgttcggctgtagctgtgggaataagcgaaatcgggagcggaataataattaacaacaatccgccatgtttagctgtcgatctcgtcgccgtggtgtattctgtcaaataaaaaaaaaaaaaaaaaagcggcc

SEQ ID NO: 73551 - DNA, 333 bp, Zea mays
  Clone ID: MRT4577_167077C.1
gtcatgatggcgccctggcctcatgctcgcgtgcggcagctaattgtgcgcctcgaggagcacatgacgaacttctacaatcagtataagagtatcgagccctggctgaagaggaagaacccaccggtgccgtgaaaagagattctgcagagcaagaaggagagggagaagctcgacgggatgtacgagtgcattctctgcgcctgctgtagcacctcttgccccagctactggtggaaccccgagtcctatctcggtcccgctgcgttgctccacgctaataggtggataagcgacagccgtgatgagtacactaaggaggattggatgcca

SEQ ID NO: 73552 - DNA, 2040 bp, Zea mays
  Clone ID: MRT4577_167078C.1
gcgcgagctgaactggctcgctcttttattgagccagaaaaaaactccgctcgaccttgttctaagcacagtttctggatcggaggagcatccccgcctaggtctctgcagccatggttcgcggatcgctcggcaagcttgcatcgcgcgccctctccgtcgccgggagatggcagcaccagcagctccgccgcctcaacatccacgagtaccagggcgcatagttgatgggtaaatacgggatcaacgtgcccaggggcgcggcggctgggtccgtacatgaggtcaaggacgccttgaagaacatgttccccagcgagaaagagatagttgttaaaagtcaaatccttgctggtggccgagggctgggaactttcaaaagcggattgtaaagtggtgtccatattgttaaggctgaggaagctgaattgattgtaagtaaaatgttaggccagattctgataacgaaacaaactggtccagagggaaagattgtgagcaaggtctacttgtgtgagaaactatctcttacaaatgagatgtactttgccatcacccttgataggaaaactgctggtccgctcattattgcttgcagcaggggaggaaaacactatagttgacctcaatgttcaaaggatggccagggctacatcatcttgttgttgacgggttccgtgtgttcaatcgccgagcagaaagccaggaacagaacttaggcgttggcgattggcatctccctcccctaagccatggccaccgggcggcccgtacgactcgtgctggatgcctccctcctcctcgacccctcctccaccagggaggcggcggcggtggctctgcggcccggggtagaggagctgttgcggcggttgcgctactccaacctgactgtggcaatctgctatgcagagggcatgccaactaatgaggtgctctacttatctacattattattacatccctctgaagttgtatcttcagaagttcacattgacagtatttgcttcctcttgccatacttacccatcatggcccatggggtgtctatcttatcatgccatcttcaaagaatggcatcatgttaacaaaaatgaatgagaaatcagtcatttctaatggaaagtcaggctttcttgaaaaggtcacaagctcacacttgtttggctctatagcacttcttgcgaaaagtgggaatctttctctaactgaattaatgttagaatggagccgaacaagtttatgtttttatgcgacttcaagagttgacaaaggtttaagttctgagctccagaatcagaattggagagttctttctgtagctaatgaatgtagcatagaggttcctgtgttttaaatgttcaaaggcttcagcagttgcttctcaccttggctactctaataaaaagggaactatgtgactcatctgttctggtgattggatatataatgaaaatattctgtgaggaagacttcgcaaggagatgtggttctgtcacttatgtgactgttgccgtgtatggagacgaggacaagccagcgcttataatgtttacagagatgtggttctgtgactgttgtcgtgtactcaggctttatttcaacaggatttaaatatgagatgtagagtgattgatgtacatcacttcactaatcatgaaatctgtagaaggcgaaactactagccatatatgatatgcataatccgtgtggtaaacattatcaatatcacacaaattatttctaatgggttttgcattagaagcccaaggaaaaaaaaaaaaaaaaaaaaaaaaagtccgccgcgtaaggagggcggcgagggcaagaaggggaaaaagaaagcgaagaagtccgtggagacctacaagatctacatcttcaaggtgctgaagcaggtgcaccccgacatcggcatctcgtccaaggccatgtccatcatgaacttcttcatcaacgacatcttttagaagctcgcggtcgaatcccccgagctggcgcgctataacaagaagcccaacggcaccttctgcgagatcc

SEQ ID NO: 73553 - DNA, 167 bp, Zea mays
  Clone ID: MRT4577_167079C.1
tagaacgcgccaaggcgctggataagacgcagagcgacatcgccaaggcgcggctcaagtgcgaagtagaagcgggcgtcggcggaggcccggctgggcctcaacgccggccaaagttctggagctcgccaacttcatgaaggccttcggcagggtgcccaccaagc

SEQ ID NO: 73554 - DNA, 348 bp, Zea mays
  Clone ID: MRT4577_16707C.1
gggcgtacgaaaggatcccggggcccttggcgagttctacgctccctggtgtggtcactgcaagacgcttgctcctgagtatgacagactgggtgcagctttgaacaaagctaaatatgtcttgattgctaaggtggattgtgatgagctcaatagtttgagcagaatgatggagtgtgcggctatctcaacgatgcagtggttcactggaggatccttggatcgccagtaatattgaggacaacgaacatgccaagcccttgctgtgttcctgagtgctgagtgaggctcaatggaaaggggggcaccattcgttcttcccccggagtgatgaccggaaacaccttt

SEQ ID NO: 73555 - DNA, 271 bp, Zea mays
  Clone ID: MRT4577_167080C.1
ctgagaaggcagcaggctcggtgtccaagagcacgcagttgagtacgcctggtgcctggtgcggacaagtacaatgatgacatccgtaaaggcatcgtgctgctcgaggagctgctgcccaaagggagcaaggaggaacagcgggattacgtcttctacctggccgtggggaactctcggctcaaggaatacgagaaggccttaaagtacgtccgcgggttgctgcagacagagccccagaacaaccaggccaaggaactggagcggctca

SEQ ID NO: 73556 - DNA, 287 bp, Zea mays
  Clone ID: MRT4577_167081C.1
gacacccccaaaaatatatttttttggtccttaaacataatctataaagggacaatctaatagtttaaaagcccaggctttttaagtttttacaagctagcctttgcaatctcactggggattctaataaatttattaaaactggttaagttttgggcgcaccaaattttgatctaagggtattgaaaatttaaaagggggccttatttgagctcaaacttataagggaccggggacagggtcaaacataaagtgtcttaagagggtttggattatcggtgcttttt

SEQ ID NO: 73557 - DNA, 610 bp, Zea mays
  unsure (1)..(610): unsure at all n locations
  Clone ID: MRT4577_167082C.1
cctcaggcggcggccggattaacctgacgagcacaacatgctctgcactgactgactacctgctaattgctcgcacctatcgacactgatgccatcgcctcaaaaacgatgactatctccaccgagcatgctcttgcttaccctcaatcgcctacatacgatgccgcctaccatggacgccaacccatactgtctgctcgccattacggcaccttctcgcaagcagggcatgcccgaacgnccaatgcctccacacgacgtcacctggtcagctggcaacaaaaataggaacatacaggtctcaagctgccacgccaacggatatcgctcgcgccacaaacggactgcgccaacacgaagcaacgataacaggtgataaactgcatgtcggaccacctgagcttcctatgccactggaccagctgctcctccaacatcctcggtagccattccacgctgtcgctgatgcccgcaccgatcaaacacctctgagcagacgatgctgacgccactgacgaaagactattgcatgtctaggcatgtctccatgactccatctagtatgtagaagaacatgcaaggagaccacgaggaagatgaaccctgctgc

SEQ ID NO: 73558 - DNA, 420 bp, Zea mays
  Clone ID: MRT4577_167083C.1
cttcccatacgtgctccagcctcactggcgcggcctcctgtccatcctccacgtactgcatcaccctgtgccaccctgccgccgtcccaggactcctcatctccgtggtggtaccagcgccaaggttcccgtgctcattccagccactgctccacagcccgccctcgtcatcagcaaccagcgtatattccgacccacaccacacctctactggctgccgtcgctccggtagtggtgctagagggtggggtcttctggtgcctacagaggcagacccatcttcaaagctaccttcaccactagcactatcaccatcaccagacaccacagggtactgtcccatatccctccttccccaggcatagaacacaagctgtctgttgttaacatgcgcgctcagtccgcgcagcaccacgtgag

SEQ ID NO: 73559 - DNA, 375 bp, Zea mays
  unsure (1)..(375): unsure at all n locations
  Clone ID: MRT4577_167084C.1
tgttggtttgacgcattantanttcttcctttntaantantantaantataggtttacaaggtatataaagattgttctttctagtttgactctatccttctaatatagtattctatattgtttggcccaagttgattaagctatgagaaattataagattatataaatgtaaatctaataatagatcagtgacttagatataagtatattaagacacttagtactatatcttgctctagaagtgactgctaccttagagaatgtatatgctataagccgatcgatccgattgaactctaaatgaagggagcactgtgtctgagtgagtatgtatttctgagcagaattcaggaggcgtgtatggcaagtgtata

SEQ ID NO: 73560 - DNA, 2949 bp, Zea mays
  Clone ID: MRT4577_167085C.1
atgaagcattcgagagcaaggaccaacaatgtggctagttcatctgtagagcatgttgttatctgcaatagatgcaaagattttgatgcttgcaatgaacatgcttctaccattcttaagttaaacaatgatgttgcaagtcttaatgctcaacttaagacttgcaaggataattatgagaaactaaaatttgctagggatgcctacaccattggtagacacccatctattaaggatggacttggtttccaaaaggagaccaagaacttaacaatccaaaggacttccaatctcaacaaagagaaagggaaggctcccatggctagtagctctaaaaagaaccatgactatctttatgataagagaattactagtattgcacaccatgatagaagaagtgatggctcattagcttttaaggttgtattagacggaaagctctacttagttgatttctcaaaagagaatgccgatctagatgcatgcttaatcgctaagactaatatgggctggctctggcaccgccgtctagcacatgttgggatgaagaaccttcataaacttctaaagggagaacatatgttaggactaatcgacatttgtttggagaaagacagaccttttgcagcgtgccaagcagggaagcaggtgggaagtactcatcaaagcaagaacgtgatgacaacatcaagacgactagaacttctacatatggatctcttcgggcccgttgcttatctcagcatcgggggaaaaaggaagaacaggacactaattaacatggcgagtactatgcttggagaatacaagacgcctgagcggttttggtcggaaggtgtgaatacagcttgccatgccataaaccggctctatctatatcgcctccttaagaagacatcatacgaactcctaaccggtaacaaacccaatgtttcctattttcgtgtatttgggagaaaatgctacatcttggtgaagaaaggtaggcattcgaagtttgctcccaaagttgtagaagggattttactaggctatgactcaaatacaaaggcgtatagggtcttcaacaagtcatcaggactagttgaagtctctagcgatgttgtatttgatgaaactaatggctctccaagagagcaagttgatcttgatgatgtagatgaggatgaggtttcgacggccgcaatgcgaacaatggcgataggtaatgtgcggccacatgaaccacaagagcaagatcaaccttttttgtctacattggtgcatccctcaactcaagatgaggaacaagtagctcaagatgatgggttggatcaagagggagcacatgaagaacatgataaggaggaagatgtgttacaagttcctccaactcaagaagagctcaacaacttcaagagaaatgaagtctggagcttggtgccacgtccgaagcaaaatgttgcgggaaccaagtgggtgttacgcaacaagcaagatgaacacggtgtggtgacaagaaacaagtctcgacttgtggcaaaaggttatgcccaagtcgcaggtttggattttgaggaaaattttgctcctatagctaggctagaatcaattcgaatattattagcctatgctgcttaccattcttttaagctgttccaaatggacgaggaagtgtatgtggaacaaccccctggctttgaggatgataggtatcccaaccacgtctataagctctctaaggcgctctatggacttaagcaagccccaagagcatggtatgaatgccttagagatttccttatttctaacgctttcaaggttgggaaagctgatcctactctctttactaagacttgtaatggtgacctttttgtatgccaaatatatgtcgattacattatatttggttccactaatcaaaagtcttatgaggagtttagcagggtgatgatgcaaaaatttgaaatgtcaatgatgggcgagttaaactacttccttggatttcaagtgaagcaactcaaggaaggaatcttcatctcccaaacgaagtacactcaagatttgctcaagaggtttgggatgaaggaggcaaaacccgcgaagacactgatgggaacagacggacatctggacctcaataaaggaggtaagtccgttgatcaaaaggcataccggtctatgataggatctttactttatgtttgcgctagtagaccggatattatgctaattgtatgcatgtgtgctagatttcaatccgaccccaaggagtgtcaccttgtggtcgttaagcgaattcttagatatttggtctctacgccttgctttgggatctggtatccaaaggggtctacctttgacttaatcggatactcagattctcactatgccgggtgcaaggttgacaggaagatcacatcagggacttgtcagtttctgagaaggtccctggtgtcttggagctctaagaaacaaacttttgttgccctatccaccgctgaggccgagtatgttgacgcaggacagtgttgcgtgcaactactttggatgaggcgaaccctccgggactttggctataatctgagcaaagtcccactcctatgtgataatgagagtgcaatccgcttggcagataatcctgttgaacacagccgcagggtacccccaacactcctaaacacggctggtaaccaccctcagcacaaaccgcaaagactgatgggcacgattcaggtcaaggcttcgtctacccaagggacgcgatcttgcctcgcccgagcccagcctcgggtgggaactatagtcccggacgaagttatgtctcgcccgagggcctcctcaggcagtgggcgcaccctcagcacgcccgaggcccagctcgggcaggcttcgtcgagaagcaaccttggccaaatcgcctctccaatcgaccgtatcgcaggcgcattcaatgcgaggatcgtctga

SEQ ID NO: 73561 - DNA, 349 bp, Zea mays
  Clone ID: MRT4577_167086C.1
gcggttactaccggtgcagcagcgccaagggtggcgcgcgcgcggaagctcgtgtagcgcgccgccgacgacccggccgtgctcgtcgtcacctacgagggcgaccaccgccacgacggcgacggcgacggcgacggcggcgttggcgctggcgctgcccgctcccgcgcggcgtgaagatcgtttgcttcccgccgtagcagtcagtgtagcagcggtagtcaagtcaatcgatactagtagtagacctcttgtttcattgggggggcggattaatggtagatcgagctttgctcctgtaaaaggaattaaagtgcatttaaacttaatatcgtcatgaactttctcg

SEQ ID NO: 73562 - DNA, 313 bp, Zea mays
  Clone ID: MRT4577_167087C.1
aactgaaagaaacacatatggactcatgggatacacataccacagtgaaccctgtcgttttggttcagaaactaacatacaaggtatgactgtgtagattgcactgcaacatatagattcttgttttttggggtcattttcttaatgaaacaaaaactttagacttgcatggtgatgtcaacagttattcaaaagattcacatacaggtagtgatgaagtagccctcaagttctttggaacccaattgttcatgccgacctttcgtccattgtggcacctgagatttcgacaccgccgaaaacaacttacaaa

SEQ ID NO: 73563 - DNA, 3994 bp, Zea mays
  Clone ID: MRT4577_167088C.1
cctggccggctaaagtaggcacatttcatcctatccaaaatcaaatcaagatagcagcagcagctgttgattttacaacataattagagggcaaaatggtgatgaaggttggcttgaccaccaaccagatcatatatctccaagccagtatgttgaagtcccagagggagacaacaactatcccaatgatatggactcaagtgatggaagcaacctgagagatcagattgctctccaaatgtgggctgcctacaatagttaatttaggatctcttatatatattatatagtaataaagacttatgttttattatgtagtagtaaagtcttttgttttattatgtagtagtaaagccttttgtttactatgttttgttgaaaaatatagctatggcaaagaatgtttttagggcagcttggaacactgtgtatgagaaaggtctggttgatgtgctccttgaacataaggacaaccgaaaggtgaaaagtcaaaatgggagccttggactctggaacatccaaactattttagttttcagactgttttagttttcagactgtatacacagaaaaggttagctgttaaatctaaaacctttactaaactttactaaactatcatatgttttagttttcagattgttcaaatataacagctaacctttactaaacttcagccggcagactgtgcacaaatagaaagtgaacaagggtcggcagactgtgctctataatcctgagaagggaagatttgttcaaatagaaagtgaacaattgtttaatatagatcccgacaactttatccacaaattgcattgctaaatctaaaactgtaacctttactaaactgtaacctttgctgaactaaactgtaacctttgctgaatttataatcttgagtagccttggacatatgacatataaattcaaccagtacaagggtcgttaatacgcttcagccgggaaggcgtttgttattatctttgcgattgttattatctttacgatattttccattgcttatcatgccttttgctatgattatgtgttgcttacatgtttctcaatttctctagatatgggttcttgggaagagctagctaggcagtttttgttggaggaagaagaagacgatgagtttttctttattcttctccttgctatacttccattcctctctgaagagaaaaggctgttcggtgtgcaccggacagtgtgcggtgcacagggtgcttcagcatgaaactcactgctcgcaggaatccgccagggcactgtgcctaaaaactctcggactgcccttccttgtgtgcgtttctttccctcccttactcttgtggctttctttgtgatcaacgttggaaggggattgagtgcaatccttgaccgaaggaggtcaccacaacgtggagtaggcattggctcgagtaacaagaagagggatggaaagaagaagaggcgcataaagaagatcatctactacgacagcgacgcctcctcttcttcaacaagggatgacgacatcgtccgacgcatgctaaggtcattcaccgttattgatcctcatcttgtaaatcttatttgtgagaaccccaagtacaccaagatgacgcccgaagaaattcttggaaaattcgtgagcgggcgcatgatggtgaaggaaacgaggtatgtggacgatgccttaaacagaccgcttcttctacacgagtcgcaacccgttgctctcaaagcaaccggcagcaaggaggcactacctagcaaggtagcacaagtggaggctgtcgggctcaacgaggacgaaatgacgctcatcatcaagtgtttcaagactgccttgaagggacgcaaggagtaccctaacaagaacaaatcaaggagaaagtgctcctgcttcaaatgcggtaagtatggtcatttcatagcacaatgtcccgataataacaatgaccaggcacgagaaaagtatgggaagaaggaaaggaagaagaactacaggaaagcgaagggcgaggcgcacattggaaaagagtgggactccgactgttcttcatccgactccgatgatgaaggactagctgcctcggccttcaacaagtcttctctcttccccaacgaacgacacacatgcctcatggctaaggagaataagatagatctaaggtgtaaagattttaatattgatgcttgtaatgaacatgtctctactattctcaaattgaacaatgatgttgcaagtcttaatgctaaacttaagacttgcaaggatgactatgagaaactaaaatttacaagggatgcctacaccattggtagacacccctcaattaaggatggacttggtttccaaaaggagaccaagaactttacaagccataggacttccaatctcaacaaggagaaagggaaggctcctatggctaatagttctcaaaaaaatcatgcctatctgtataagaaaattcctaatgttactcatcatgataaatgtcataatcattctgttttcttgtgcgtcatgatgatgtatttagttctcatgccatgtttgcaaccagctcctcgtatgctcatggtttatgcattcgggggctcaagctggatcattgatagcggatgcacaaaccacatgatgggggagaagaaaatgttcacctcctacgtcaaaaatagggattcccaagacactaacatctttggagatgggaatcaaggcaaggttaaaggcttaggcaaaattgccatcacaaccgagcactcgatctcaaatgtgtttttcgtagaatcactcgggtacaatttattgtctgataaaactgaaactcaaggaaccctaaagcgcttcttaaggagagctcaaaatgaatttgagctaaaggtggaaaagataaggagcgataatggatctgaattcaagaaccttcaagtcaaagattatcttgaggatgaaggcatcaagcacgagttctccgctccctacacaccacaacaaaatggtgtagtagagaggaagaacaggacgctaattgacatggcgaggactatgcttggagaatacaagacgcctgagcggttttggtcggaagctgtgaatacagcctgccatgacataaaccggctctatctgcattgcctcctcgagaagacatcttacgaactcctaaccggtaacaaacccaaagtttcctattttcgtgtatttgggagcaaatgctacgtcttgataaagaaaggtaggcattcgaagtttgctcccaaagctgtagaagggtttttattagggtatgactcaaatacaaaagcgtatagagtcttcagcaaatcatcagaattagttgaagtctctagcgacgttgtatttgatgaaactaatggctctccaagagagcaagttgatcttgatgatgtagatgaagatgaggttccgacggccgcaatgcgaacaatggcgataggtgaggaagagctcaacaacttcaaaagaaatgaagtgtggagcctggtgccacgtccaaagcaaaatgttgtgggaaccaagtgggtgttccgcaataagcaagatgaacacggtgtggtgacaagaaacaaagctcgacttgtggcaaaaggttatgcccaagtcacaggtttggattttgaggagacttttgctcctgtagctaggctagaatcaattcgaattttattggcatgtgctgctcaccactcttttaagatttttcaaatggatgtgaagagcgccttcctcaatggaccaatcaaggagaaggtatacgtggaacaaccccctagctttgaggatgacaggtatcctgaccacgtctacaagctctctaaggcgctctatgggcttaagcaagccccaagagcatggtatgaatgtcttagagatttctttattactaatgctttcaaggttgggaaagctgatcctactctcttcactaagacttgcaatggtgatctttttgtatgccaaattgtaacgccctga

SEQ ID NO: 73564 - DNA, 310 bp, Zea mays
  Clone ID: MRT4577_167089C.1
cgaccgtagtcgtttcgctagaagcccatccggtagtttgtacaaacgccctcgtggtcgtgcgcagatgcttgctgatgatcatcatctgaatgctggtggtgagctcaagatgataacctctcccgctattttccgtattgccaaggctatgcttacactggggaacaccttcacgccaacacaactcgttgggtggcttaccactgctcagaacgaccgtgccacaagccctccacagtccgatccaaagaaaagccaaacgttggtcagcatacttgcacggaccattcccactgctacccctaac

SEQ ID NO: 73565 - DNA, 3615 bp, Zea mays
  Clone ID: MRT4577_16708C.1
atggccagagtgcgctctactgctagagttgagcgcgagggagacgaaaccgaaggtgcggaaactgttcctatctctgaagcaatgaagcgatctggattgatgacatcagaagacatccctgctgctgaagcagaacaagcagatattgaggaggctggtactgacgatgattacaatatcgcagtaccgagcaaacctagtcatctggacttcgggaagtcgactatctcgaaggctgatttcccaaagatggtcaaggaacttaaaaaggagaaggcgtccctccaagagagtctcgaaatagcagaaggtgaagaggccaacactcgtgaagcctaccgaaccctgaagatggattacgataagaagctaaagaagctcgcccccatgaagaaaatccgaaagaagaccaagagccaaggatgccagactgagcggaagaaagaagcccctctagcactacctccctccaggatagagaatttgtccgacgtcgaggatatgtccttagctagccttgacgaccttctcaaggaatttggggacactttagaaaaggagttcggaaatttagcccaagttctagccaaccaaacccgactcattgaagtcctcactagaagtctggagaatcagtgcccgaatggtggaagaccacatgacaggataacagattttctaaggctcaagcctcccacattcgctggatccagcaatcccctcgatgctgatgactggctgcgcacgataaagaggaagttagaagccatcggatgccctgagaatcagcgtgttcaattggctgctcatcaactttccgggatggccctaacctggtgggataccttcagcactgccgtaagagatgctacctgggcagaatttgaaattgctttccgagaacatcatgtgccccaagggatcgttcagctcaaggaagatgaatttcgggaactaactcaaggtggaagatctgtcaaagccaagaagatggcccgctttttgaaaggactaagaccagaactcaagaccatcctcgctagccaagatttcctcagcttctcgcacctctcaaacaaagccatacaagtggaaagggcaagggaagaagaaaaaggtcacctcagaggaaattccaagtcctccgagctcagcagcaagacaggcaccagtcacttcaagaataactgcccccagttgaaggcatcaggacctacttactccaactcggtgaatggccccaaaaatgccccaacgtctgcctccaaggcaccttcctccatcagccagcagagtaagaaccagtatcatggcagggcacgagtaaaccacgtcgatgctcaagaggcccagcaagctccgggagtagtgctcgtggaagaattcatagatgtattcccagaagaattgccaggaatgctgccagaaagagaagtggagttctacatagatctaatccccggcactgcacccaccgcaaagggaccataccgcatggctcccaccgaactagcagaattaaaactccagatcgcagagctccaacaaaaagggtacattcgtcccagctcgtctccttggggagcaccagtcctttttgtcaccaaaaaggatggaagtatgaggatgcgtattgattaccgatccttgaatgaagttacaatcaaaaacaagtatccactccctcggatcgacgacctcttcgaccagcttcaaggggccaagtatttatccaagatagacctaaggttaggatatcaccagctgagaatcaaggaagcagatattcataagactgcatttgtcacccgatacggacagtatgagttcacagtaatgcccttcggactaaccaacgcacccgcctttttcatgtacctcatgaataaggtatttatggaagagctggataattttgtcgtagtcttcattgacgacatccttatctactccaagagtcgagaaaatcatgagcatcacctccggattgtcctcgaaagactaagagcacatcaactctacgctaagctcagcaaatgtgaattctggttagaaaagatagccttccttgggcatatcttgactgcagaagaaatagaagtagaaccgtccaaggtagaagcagtatccaaatggaagcagccatccaacgttagtgaagttcgaagctttctgggaatggcaggatattaccatcgttttatcaaaggattctccagcatagcaagacctatgaccgagctcctcaagaaagacaataagtttgtgtggaccccgaagtgtgaagaaagcttccaaatcataaagaagaagctcacaaccgcacccgttttgacactgctagacatccatcatgatttcgtcgtcttctgtgatgcttcaaggcaaggcttaggatggctggaattgatcaaagattatgaccttgagatccactaccaccccgggaaggccaacgtggtagcagacgcccttagccgaaaacctttcgggaagaaaggaaccaacttcttggaagattggaagaaagaatcagctcaactgaatgcttatctgggagacaatggcagcctagaagtcaagccaatgttagaagacctcatatgcaaggctcaacgcctggacactgagacagcaggtcttacggaaaaagctcgcaaggaaccacttctagacttcaggaaagatgaggaaggagtcctttggctcaaaaaccgtctggaccacaagatgtacctagacctcaaaatcagatactcgtggagaggaatgaagaaagagatagcacagtatgtggcccggtgcgacacttgccaacgaactaaggccgagcatcagaagcctgcaggtctactgcaaccccttccagtgcccgaatggaagtgggaagaaatagacatggattttgtaactggactgccccggacccaaaaagggaacgactctatctgggtgataatagaccgtcttaccaaggtggcccacttcatcccagtgaaaactaccttcggaggagccacccttgcccggatatatcttaaagagatagtcagactccatggtatttcacgaaagatagtaaattgggagtccagtttgccgtatgcagagttctcgtataacaacagctacaaggccagtatcaagatgtcaccgttcgaagcattgtatggacggaagtgccagacccctctaatgtggtccaacgtagggggaaggacactagaaggacctgccttcgttaaagaggcagaagagaaggttgccctgatccgcaaaagattacttgaagctcagagtcggcagaagagttatgcggacaacaggcggagagaactcagatttgaggaaggagacttcgtctacctcaaggtctccccgatgcgcggtgtcaaaagacttcaagtgaaagggaagctagctccgcggttcgtcggcccctatcctatcattgacagagtaggacccgcagcataccgcctcgaattgccggaatccatgtcaaatatccacaatgtgtttcacgtgtcccagctccgcaaatgcctgcaagtaccagaaaatcacatcgaagaggagacaatcaagattcagaaggatcttcagtattga

SEQ ID NO: 73566 - DNA, 311 bp, Zea mays
  Clone ID: MRT4577_167090C.1
ctgcacccctacctaagctaggatcctctatagtcgacgaccttggtttgtttttttaccaaaagaggatattactccgatacttgtagctttctttcctcttcctaaaactagcactacccatgatctacccctagtcttcatttctagagcggtactcagcacagagatgactgatgcatacctctctctctctctacacggagtaggacatagccactctaggtacaacccccgaacaaagagtaaccccaagagactcccaagcttttagcagctacaacctcttgcaagacaaaaattgcaagtgt

SEQ ID NO: 73567 - DNA, 1563 bp, Zea mays
  Clone ID: MRT4577_167091C.1
atgggaaccaaggcaagcgtgtcaagcaaagaagcaggtgggaagtactcatcaaagcaagaatgtgatgacaacatcaagaccactggaactcctacatatggatctctttgggcccgttgcttatctcagcatcgggggaagggtaaatatgaaactcaaggaactctaaagcgctacttaaggagagctcaaaatgaatttgagctaaaggtgaaaaagatatggagcgataatggatctgagttcaagaaccttcaagtcgaagaatatcttgaggaggaaggcatcaagcacgagttatccgctccctacacaccacaacaaaatgatgaggatgaggttccgacggccgcagtgcgaacaatggcgataggtgatatacgaccgcaggaacaacaagagcaagatcaaccctcttcttctacattggtacatcccccaactcaagatgaggaacaagtagctcaagatgaagggttggatcaagggagagcacgtgaagaacatgataaggaggaagatgtgttacaagttcctccaactcaagtccggtcaacgattcaaagaaatcatctagtagatcagattttgggtgatatcagcaagggaataaccactcggtcacgtttagctaatttttgtgagcattcatcgtttgtttcttctattaagcctttcagcgtagaagaagccttgcaggatccagactgggtgttggccatgcaggaagagctcaacaacttaaagagaaatgaagtttggagcctggtgccacgttcgaagcaaaatgttgtgggaaccaagtggatgttctgcaacaagcaagaagaacacggtgtggtgacaagaaacaaggctcgacttgtggcaaaaggttatgctcaagtcgcaggtttggattttgaggagacttttgctcctgtagataggctagaatcaattcaaatattattggcctatgctgctcaccattcttttaagttgttccaaatggacgtgaagagcgccttcctaaatggactaatcaaggaggaagtgtatgtggaacaacccctggctttgaggatgacaggtatcccgaccatgtctacaagctctctaaggcgctctatggacttaagcaagcctcaagagcatggttgggaagctgatcctactctctttactaagacttgtaatggtgatctttttgtatgccaaatatatgtctatgacattatattcggttctactaatcaaaagtcttgtgaggagtttagaagggtgatgatgcaaaaatttgagatatcaatgatgggcgagttgaactacttccttggatttcaagtgaagcaactaaaggaaggaaccttcatctcccaagcaaagtatactcaagatttgctcaagaggtttgggatgaaggatgcaaagcccgcaaagacaccgatgggaacagacggacatctggacctcaataaaggaggtaagtctgttgatcaaaaggcataccggtctatgataggatcttttgaaagggaaatgtgcccttgggccatttctaagtattttggtgattga

SEQ ID NO: 73568 - DNA, 522 bp, Zea mays
  Clone ID: MRT4577_167092C.1
ccaagacttttttttttttcttttttcattctatgatctttctattttttgttttattttttgctacctgtgatcaaccaattatctttggcaaacctttctccctactctcagcaacaacaatttcttccattcaaccaacagtcgacactgaaccctgctgtttattggggggcccaactattaccacaaaaccagctagctgctgcctactctcaaaaacaacaacaaagggggcccccccaaatgggcgtactggaccccggggcttattttctgcaaaaaaaacttgtaccaagggaaacaattggctgaatgaaaacaagggctgcgggtttaaacaaaaacagttggtgaaaaggctaccaccattttggggttaaaaaggaaaccctgttacaactacaacaatggttgacctttgtccaacttgctttgacagacccagcggcctgctaccaacaacacatcattggtggtgccaaatattagattgcttataagttgcaattcaataataaa

SEQ ID NO: 73569 - DNA, 588 bp, Zea mays
  Clone ID: MRT4577_167093C.1
cattgggtacctcgaaaacggccggtcaaaaaatatagcctagaaaaaaaaatctccccacacccaggcggcgaacccaaacccaactccccatgtcctcgctgccgctgccggaatcacctatggccgccgagaacgaagcctgcgactggggtgagatgccgtctgacgcgctcgtgtccgtgtttgggaagttggacgtgatcgagatcctgaccggggccgggctggtctgccgcgcctggcaccgtctcgcggactcggccctcggaccccatgctgtggcgccgcgtcgacatgaggcacatgagctatggctacgagggggagcggctgcagaccgaaaaggtcgaggacatggcgcgcgccgcgatcgacccctccgcgggcaccatggagccgttctttgccgataccattgtcaacgacgacctcctgcgctgcctttctcaaaggtcggtgaagcgactgcagaccgacaaggtcgaggtcatggcgcgcgccgcaatcgaccgctccgcgggcaccatggaggcgttctttggcgatatcttcgtctacgacgatctcctgcgctacctttctcag

SEQ ID NO: 73570 - DNA, 274 bp, Zea mays
  Clone ID: MRT4577_167094C.1
caatgatgggttgctagagatgtttcgcaatgagtatataggtgatacaccatatatatcatgcacacctactctttgccatcataagctctccatcagggatcagtttcttgttctttcgtctgatggcttatatcagtacctaagcaatgaggaggtagtgctgcatgttgagaattttatggagcggtttcctgagggtgatcctgcacagagtttaattgaggagctactctctcgtgctgcaaagaaagctggcatgaacttctatgaa

SEQ ID NO: 73571 - DNA, 235 bp, Zea mays
  Clone ID: MRT4577_167095C.1
acccactcatactgcaataactcacatgataacaatccatatttaagcgaacaaggtcatcatcgacgaacagactctttttatactgatcaccaccgacaacacaatgatccttcgtcaactaaaatcactcctcacgccaatgaacacactaacgcttcctgatacactacataaaactactcataacatcacttaatttagcacaaggatccacaaaataatccatcaacaa

SEQ ID NO: 73572 - DNA, 271 bp, Zea mays
  Clone ID: MRT4577_167096C.1
cttagggcaggcgctcgaaaatagctggctgaaggcagagatggtcacttgggtgttaccaccatagtaatctttagaagcactgtgagcagtggtaacccaactctgctgtgttgatggttccaagaggcgcccaaccagagaaacctgttgctagctcaattcgagattcccgagaggtggatatacaaccggctttctggacctagaactgttagtattcgagtattgcaaagaattgaaagttacctcgatttcattaaaacgttta

SEQ ID NO: 73573 - DNA, 342 bp, Zea mays
  Clone ID: MRT4577_167097C.1
aaccctaagcctaagggaaaaatattttttgggggtcaagaaaaaaaacccaaaactttacccggggcaaaaaaagaaatggctcttggattttccattccctataaattctgggtttggcggacattacacacgggttaagagggggcttatgaacccggcttggaatttccatcctggttaagaaccgggccggacccccccttttttgggggcgcttaccggggggagggccccttggccccccaccttgtgccccacaagctgggttatgggcccttccacttttgggggcagggccggggcttttctttgcaagggggcccttggggggggggtcaa

SEQ ID NO: 73574 - DNA, 524 bp, Zea mays
  Clone ID: MRT4577_167098C.1
taatgagttgacatgccatcgcgtgtgactcattattaacaataaaacaagtttcctcttaaaaaaaaaaaaaaaaaaaaaaaaaaaaaaaaagaaagaaccaagacaggggggaacgatcgaaagggaaaaaaaaaaaaaaaaaacattagactgggcggcggccgcgcccctggaaggggcagggaccgggaaattcctataaaaagtgcgggccacatggggactggccgtggagggccaaagggggcccagggggagccctggggaaacccattgcaatcggttggccgacgattcacctgggaaaacctggggaaaccccgacgaggcccccttggatcgccttccccaacagccgcctggcctaaatgggaaaaggacccaaccgtgcgccctgcataaattgtggaaggtggggggggtatgggcggcgagtgggctccccttgttaaggccctagagggcgggggtttcgggtggttccctccctttattggcaatcacctgtaagccccctattt

SEQ ID NO: 73575 - DNA, 260 bp, Zea mays
  Clone ID: MRT4577_167099C.1
gttgttgctttttgggctttcttttcaggggaaggaccccgggatttcaacttgttaagaaaggggaaatccaattccccgtttagggggaccccccttaataggatgttattctgcttagccagcatgcaatttttttttgaccggcccgctctccaaggcggaatatttttgggaggggggctaaaaaattgtgcccccgcttctggattgcaccaaacaagattgttcccccaagattgtaaaaaaaaggtgcgggg

SEQ ID NO: 73576 - DNA, 246 bp, Zea mays
  Clone ID: MRT4577_16709C.1
gagacctatccctttattttgggcttcaagtatttggctaggttacaggatttggtcccccaagcaacgccgaacctgggagggggttttctggggggctacttttatttacccgggaaaactcttattcatgggggaactttttggtggttctcaaaaacaccattcccgggcacatttacctttttacaagaggctggggcttcccagcatgggtttttgggcttctaaaattttaacatgcct

SEQ ID NO: 73577 - DNA, 462 bp, Zea mays
  Clone ID: MRT4577_1670C.1
gaggagaaccagcagcctccaatattagtctttcagagaaactaataaaactctggccgccgccattcgagcgaacgagccaaccgatcccgttctcaaggcaatccgccgccgacgtaccaccaccaccgcatgatcgagatggaaatgaagaggatcctttttgccgatcttgttgttatcatcgcctttttcacctcaatgcttgccttcatctaagcctcccttactggtcccccaactttttttctatttgaatgatttgctttattttgtttttgcttttaattttatctttttttctttctcttttgttccttttcttttattagtgttaaatattttttattatttttttatagcatctatattttttttttattctatttttaaaattatggtctatcttttatattatatcttctttataatatttatatttttttagttttttctttttta

SEQ ID NO: 73578 - DNA, 332 bp, Zea mays
  Clone ID: MRT4577_167100C.1
agacagggtagaaagctgtattaataataaagttaaatgggtatatgcttattacaaagatattttacacacagtacattattaccccacacaatttatcttacacaactgatttattattattgtttatagtgacgggtccaatttttcactaaactatattggttttatacattatcttatcctttttaggcccacctttttgcgttcaaaaatataattcaagtgaccattataattgataaagaaggtgtaagcatctcttagcaatttgttcatgcagacttctttctgttgaaaatgagacttcaacttttcgtgttttttttttt

SEQ ID NO: 73579 - DNA, 165 bp, Zea mays
  Clone ID: MRT4577_167101C.1
tctgctcgccatgctgatgctggctgcgctattcgttgtttggttgtgcatcatcctgctcaccttccaggtcggcaatggatacaagtctggtcagctgatcgtcactccagtgttgtgacatatccgtcgtggcgtcaagagcacggtgtggtgacttctcct

SEQ ID NO: 73580 - DNA, 810 bp, Zea mays
  unsure (1)..(810): unsure at all n locations
  Clone ID: MRT4577_167102C.1
atcttccaggtcgcctcatttgtttatttagcattaacgaaactccgttcgttccccaccaccatctcgtccaaaacctagaaattcggagtgagattgtgttcgtccgtttgctttcgttttttggagatccgtgaggagggggagagacagatccgtcgcttgctcccagctcgaggtttgtgacgagcggattcgacgcgcgcctccgaagttcttcctggaactgttaagatttctctccatcagctcatgttgtttctattcgatagacatcttcgatccgcggtgaaattcgtttcctgtacctagggatcatactccttttcgccccggtgatgggctggataggaaaagtaaataaacgtcgtcgtctagattatctgtaatttcacagactttgtgaaatatatgcaacacagtcaggaattacccgtgttactgtacgaatatgctgttcggtacatcaatttgtggtagattttggctgacctgaatattgcttgatgtcaattcgtttctatttcatgatgctttcctccctttctgttatgcctggaatagtcatcttcaaatctggtcgaatatcatgtacactaataattcagtagagattagggaaaatccctttactttatgtacctggtgaaacggggaatcgcagaaggatattagtactgctttttacctcgncatatgttctgtacttccatcgtttctacccaaatcaacccactccagaatttgatgtgctatggaatccaagggtggtaanaagtccagcagtagtcgttcctccctcatgtacga

SEQ ID NO: 73581 - DNA, 484 bp, Zea mays
  Clone ID: MRT4577_167103C.1
cgcgatcggagaagatggtgcgcaaggcaaaggttgagttcgatgagcagccaccggataacttcgacccgaagaacccatatgcggacccggtggctatgctggagtaccgggaacacctggtgcgggagaagtggatccagatcgagaccgccaagatcatccgggagcgcctccgctggtgctaccgcatcgaggggatcaaccaccaccagaagtgccgccacctcgtggaccagtacctagaggctacacgcggcgtgggttggggcaaagatgcccgaccgcccgagttacacgagcccaagaagatcatcgaggcggagtagctgctgcctcggcttctcgtgctgctgttcctggattggaggggtgaggcctgctgaaactaagcacattctttcctttctatgtatgttgtgtggtaatcagtctgagtggtggaaaccgaaatgcattagaacaactccaatcatgagttctt

SEQ ID NO: 73582 - DNA, 846 bp, Zea mays
  Clone ID: MRT4577_167104C.1
aatccgaccgagcggaccacaccaatcccacacccccacccccacccccacccaatcggaagaccgtgcggccgccggccgcgatcggagaagatggtgcgcaaggcaaaggttgagttcgatgagcagccaccggataacttcgacccgaagaacccatatgcggacccggtggctatgctggagtaccgggaacacctggtgcgggagaagtggatccagatcgagaccgccaagatcatccgggagcgcctccgctggtgctaccgcatcgaggggatcaaccaccaccagaagtgccgccacctcgtggaccagtacctagaggctacacgcggcgtgggttggggcaaagatgcccgaccgcccgagttacacggtccgaatcccttcatgcctcgtcttaccctttgatcggcatgatcgataggtctatatggctgcttcttctctggttcgcagagcccaagaagatcatcgaggcggagtagctgctgcctcggcttctcgtgctgctgttcctggattggaggggtgaggcctgctgaaactaagcacattctttcctttctatgtatgttgtgtggtaatcagtctgagtggtggaaaccgaaatgcattagaacaactccaatcatgagttctataattgggccttatattttgatttagctactgctactcgagtcaatttgtttaggcccaaattgaaggatagactccaaacagagccttaaacctatgcaactgctgcagatttcggtcagacgccatccgtcgccgtcgtcgcaaaaaaaaaaaaaaaaaaaaaaaaaaaaaaaaaaaaaaaaaacctcgtgccgaatt

SEQ ID NO: 73583 - DNA, 837 bp, Zea mays
  Clone ID: MRT4577_167105C.1
ggtacacggcttggggtaagttgcgctcctctgcagagcgtaatctggtatactagccgagctcacggtcatgagcagctcaggactctctgatgtttaaattatggaacttaaattcaattttgtcatttgcatatgcatgggtttattattaatttgttcaattattttattatggtttggtatttacttacacttagtaactgctaataaaattttgaccaactacttaaaagcaatgctcagctttaacccctatcattgatcagccttacacttcacatgagctcccacctttggcgagttcatgtcacattattctccacaacttgttgagcgatgatcatgtgtgagctcacccttgctgtctcacacccccccacaggagaagagcaggtggttcaagaggagccgtctaacactgaggagttaaaactgttctataaactccaaactaattcacttcagcgcctaaaatcctgcaatcgtttctctatatcctattatctttgttttgtaatgcagccagtaaaaaattactctttcacttaatcctatttaaaacacatgaaacctttgaaaattcataactcaaatgctataactccaaaaattatgattcctgttcctaggattttattataatgtgtagaatattactgtgtgttttgtttacatgtttggtgtgatgttaatttccctatatacggtgtttgtttgtattgtggcgagtagaagaacccgtgaccgaggatcctggtgagcagcaggttgaagtagctgagcaggagctcataaaaggcaagttgtgcccttgaccactttttacccaataat

SEQ ID NO: 73584 - DNA, 1738 bp, Zea mays
  Clone ID: MRT4577_167106C.1
acaataacagagtgtatagagataaatgtcacaatataatcagagtatttattacatagcggaagtcttacaaaataaattataaatataaaacgaactaaggatcgtcggcgccaatgtcaactgagaaacaccacctagatcagatcatactcctcgccttgtggctcctcctgaaccacctgctcttctcctgtgggggggtgtgagacagcaagggtgagctcacatacgttcatcgctcaacaagttgtggggaataatgtgacatgaactcaccaaaggtgggagctcatggagtgtaaggcttatcaaagagaatggttaaagctgagcattgcttttaatgttggtcaaaattttattagcaattactaagtgtaagtaaataccaaaccttaataaataatagaacaaattaataaataaacccatgcatatgcaaatgacaaaattgagtttaagttccataatttaatcatcggagagtcctgagctgctcatgaccgtgagctcggctagtataccagttttacactctggagaggttgtaccctttacccacaagtcatgtttcccatgtcgccagggctagctagacccttagacactaccgaggtgaatggctagggatccactacgaggcctttacaaagttccactagcttccgaaaacccgctacagtttatgggaagagcacttgcaagaatccctcgtctgaccgccatcgcagcaaaatcaacccgagaacctccttgcatgcaactcccctactgcccttgcccctttcgggtaaggtagtcttccactagctttcctaattagttagccaaggggtcccattcctcccttgtggtggcacgtgtttctcaagttaagcttcatgttccaattaacaataatataatgatcttgacatgaacgtaaatagaataacaaaataactggaacatggatataatgaaatattaacccaaaaccatgtaaagcaatagcataactacccaagtgattcaggggtacacagggtaaataggataaacagactagggtgacctattggatcccatcaaaattaaacctatgcattgaataatgataataaataacatgagtgggtaacaaaagtggatcaagggcacaacttgtctggcacttgagattccaggtatcaggatgattcttcagatcctcgtgacctcacgactatcacgcagtagaatcggctgcccaaggaggagagcggtcggcagcgggtttggaacgccgatgagcaattccggccaaagccgaccgagccctcaccagacaacgccttcccaagctcccacacgcaatcacgaagcttcaacgttgattttcttgacccgaacggcggtggacacgaaactgggccggcggctcccagcggtcccgatggccaattaccgaacacctgaggggcgagcgtcccagagggatgggatgacatgcacaagagcttcggttgcacgcccacgaggtcctctgcaggtgacgaggagagggggcacgggtgaatcggtgcggggattgcgatctgtgcgccgccgccagcgaggtagggtagggcagagggggagagttcgggatttgggttccagaaaatcatcggtaacggggaaagggcatggtctcaaacttatacaccgcgacggaagcaacccgcagaatccgagcatgtgggcgcgctcctgaagtcacggtcgattccccaga

SEQ ID NO: 73585 - DNA, 1658 bp, Zea mays
  Clone ID: MRT4577_167107C.1
agcagtggtaacaacgcagagtacgcgggtttgcctctgataccacttctgtcacacccggctttaaggaacaaagctaggtgcatctcatacatgcgccaagaagacaacatatacaataacagagtgtatagagataaatgttataaaacatcagagtatttattacatagcggaagacttattacaaaataaaggaataaacataaaacgaattaaggatcgttggcgtcaatgtcaactgagaaacgccacctagatcagatcatactcctcgccttgtggctcctcctgaaccacctgctcttctcctgtggggggggtgtgagacagcaagggtgagcttacacatgttcatagctcaacaagttgtggggaaccagtggacataaactcacaaaggtgtgagttcatgtgatgtgtaaggctaatcaatgataggggttaaagctgagcgttgcttttaagtagttggtcaaaattttattagcagttactaagtgtaagtaaataccaaaccataagtaaagcaatagaacaaaattaataacaaacccatgcaatgcaaatgaccaaattgaatttaagttccataatttaaacatcagagagtcctgagctgctcatgaccgtgagctcggctagtataccagttttacactctgcagaggttgtaccctttacccacaagtcatgttacccatctgccaaggggtcgcgaatcccatacacctctacctaggaagcgcggcagggcaacactacgaggcctttacaaagttccactagcttccgaaaacccgctacagtttataggaagttccaatgcagggttcctggctgaccgccatcgcagcaaaatcaaccagggacctccctacactgaccactcccctactgcccttgcccctttcgggtaaggtagtcttccactagctttcctaattagtcagccaagggagtcccattaatcccttgtggtagcacatgttactcaagttaagctctatgttccaattaacattaatgatcttgacatgaacataaatagaataacaaaaagaattggaacatagatataataagcgattatcccaaagccacataaagcaatagcatgtactacccaaaaatttagtagtaaaaccaggggtgaaacaaggtaatgagatagtcaaaatctagggtaacctattgggtcccatcaaaattaacctatgtagatcattatgattaataagaacatgaatgggtaaaagaggtgatcaagggcacaacttgccttccacgagctcctgctcagcagtctcttccagctgaaccccggaatcctttgtagcttgctcgtcagcgacaaggttgagacgagatcggtccacgtcggggttgcggcaccgcggcgagatccgcaccggcaagggaacaccatggccgaggccatccatccctacatctcgcgcttgaggaagatccacatcggtcgatcttaatttctctcccagcattggcgttcccaaacccggccgcctggcagactccgaccgatggcgaagttgaggaacggcgtcggcggtctcaccctgaccccattggcgctgctagtttggtagcgataggaggtgttcggcggcttcattcccggcccggccggcctcgag

SEQ ID NO: 73586 - DNA, 383 bp, Zea mays
  Clone ID: MRT4577_167108C.1
gccggccgggtcgggattcaaacaagaacacaggtctacgtaactgatacactgctgcactggtgccatgaatctgtgtgacctgctgcactctcgccatctacatcaggacctagcaccaactgtcaagtgtctgacttagccggacctggtggctaggctagcgccattgaccagagggctaatgcctcctggtagagaggaacgaaccacatctacgtacatatatctaacgagggatgccccactcaagccttggtggatggccgaggatctgcaaaccgcatccatactcctcatgcgccaaatgattgacttgacccccagagcctttctctcccatggatgatgttacaatcttggtgctcttcaatgcatgtgca

SEQ ID NO: 73587 - DNA, 688 bp, Zea mays
  Clone ID: MRT4577_167109C.1
ctgtgcaggcgctcgatgccggccgtatctacatccttatctctgcgctctacatttcttctctctctgctcctcctgctccgcctgatccatcctagacaggaatcgccatgtctagactcggtaggagcaccacttacaaatcaaaggccgacgctggggcgtccaacacctacccgcagcacgctggcaccgtccgaaagaacggtttcatcgatatcaacaaccgaccctgcaaggtgtgtggaggtactctacctccacacactggtaagcatgaccacgccaaatgccactttgtcgccatacacatattcgatgggaaaaagcttgaagatattgatccttcatcacatcagactgtgacattcctctatgtgaaccgtactgagtatcaactgattgatatttctgaggatggatttgagaggcttcttacttcagatgacagcactaaggatgatcttatactcccaactgatgagactcttgtggtccatattaaggatacgtgttctatagccgataaggatcttgtctgtacatgtccattctgcgatgggggaggagcatatctgcacgttgaacgatgttggccccaacgaacttccttggctttatagactgaaccctactgtatctcaacttatatcagaacataactgtatcaccgaatgattgctaccga

SEQ ID NO: 73588 - DNA, 2829 bp, Zea mays
  Clone ID: MRT4577_16710C.1
atgggagattttctgaggctcaagcctcccacattcactggatccagcaatcccctcgatgctgatgattggctgcgcacgataaaaaggaagttagaagccatcggatgccctgagaatcagcgtgttcaattggcttctcatcaacttttcgggatggccctatcatgggaccaagctacaacaagccagctagacccactccttcacgtttcagtcagtagagtcagagctcctttcaggccccccccagtcgcaagcaaccaaccaccagcaaatgcctgttggcactgcggagaccccagtcacttcaagaataacttcccccagttgaaggcatcaggacctacttactccaactcggtgaatgcccccaagaatgccccagcgcccgcctccaaggcaccctcctccatcagccagcagagcaagaaccagtatcatggcagggcacgagtaaaccacgtcgatgctcaagaggctcagcaagctccgggagtagtgctcgacttaaccgtcttgccatcccaagggattgatgtgatattaggaatggattggttaaccaaacacaagggcatcataagttgcgcaagtaagaccgtctttctcactgaccaccaagggaagtcagtttcttgtcaggctcagccacccgccaaggatctaatggtgtttaatctaacaacagaaagcatatctgtagtggaagaattcatggatgtattcccagaagaattgccaggaatgctgccagaaagagaactggagttctacatagatctaatccctggcactgcgcccatcgcaaagagaccataccgcatggatcccactgaattagtagaactaaaactccagattgcagagcttcaacaaaaagggtacattcgtcccagctcttctccttggggagcaccagtccttttcgtcaccaaaaaggatggaagtatgaggatgtgtatcgattaccgatccttaaatgaggttacaatcaaaaacaagtatccactcccttggatcgacgacctcttcgaccagcttcaaggggccaagtatttctctaagatagacctaaggtcaggatatcaccagctgagaatcaaggaagcagatattcagaagactgcatttgtcacccgagtcgagaagatcatgagcatcacctccggattgtcctcgaaagactccgagcacaccaactctatgctaagctcagcaaatgtgaattctgggtattaccgacgttttatcaaaggattctccagcatagaaagaccaatgactgagctcctcaagaaagacaataagtttgtgtggaccccgaagtgtgaagaaagcttccaaatcataaagaagaagctcacaaccgcacccgttttgacactgccacacatccatcaggatttcgtcgtcttcggtgatgcttcaaggcaaggattagggcactacctaattgggaacaaatgtcacatcttcaccaatcacaagagtctaaagtatatcttcactcagccatacctcaacctccgtcagcgaagatggctagaatcgatcaaagattatgaccttgagatccactaccaccccgggaaggccaacgtggtagcagacacccttagccgaaaaccttttgggaagaaaggaaccaatttcttagaagattggaagaaagaatcagctcaactgaatgtatgtctgggagacaatggcagcctagaagtcaagccaatgctagaagacctcatatgcaaggctcaacgcctggacactgagacatcaggtcttatggaaaaagctcgcaaggaaccactcccggactttaggacagataaggaaggagtcctttggttcaagaaccgtctgtgtgtaccaaagggagaagcacgagaagttctgctcgacgaagctcataactcagcctactccatccacccaggaaccaccaagatgtacctagacctcaaaaccagatactggtggagaggaatgaagaaagagatagcacagtatgtggcctggtgtgacacttgccaacaaactaagtccgagcatcagaagcctgcaggtctactgcaaccccttccagtgtccaaatggaagtgggaagaaataggcatggattttgtaaccggactgccctggacccaaaaagagaacgactctatctgggtgataatagaccgtcttaccaaggtggcccacttcatcccagtgaaaactaccttcggaggagccacccttgcccggatatatcttaaagagataatcagactccatggtgttccacggaagatagtgttagacaggggaacacagttcacctcaaaattttggatgagccttcaacaagctatgggcaccaagctagatttcagcaccgcctatcacccccaagtcagatggtcagacagaaagggtcaacaagataacaggcagagagaactcagatttgaggaaggagacttcgtctacctcaaggtctccccgatgcgtggagtcaaaagatttcaaatgaaaggaaagctagcccctcggttcgtcggttcctatcccatcattggcagagtaggacccgcagcataccgccttgaattgccagaatctatgtcagacatccacaatgtgtttcacgtgtcccagctccgcaaatgcctgcaagtactagaaaaccacatcgaagaagagacaatccagattcagaaggatcttcagtaccgagaaaagccagtaaagattcttgactcggcagtccgaaagacccgcaactcagaagtgagactctgtaaagttcactggagcagagaaggagaagaggaagctacctag

SEQ ID NO: 73589 - DNA, 248 bp, Zea mays
  Clone ID: MRT4577_167110C.1
ggccccaaaagggcttaattttataaacgttggcaatatgggtttcccagagtcccaacacaaaactccccatgaaggggccccttatgggtttcaacttggagatgggagtcgtagtccaccaggattggggatgaacaccaagctgacaaattgccggaaccacttaacctagagttcattttttggggctggcaagcagtccttatcccaaaagtaggggaatttcagttttgcggacccgtggg

SEQ ID NO: 73590 - DNA, 195 bp, Zea mays
  Clone ID: MRT4577_167111C.1
ggggggattaaaaacaccccaccattttgattttatttttaaaaactaaacaggtatttacaaattttacgggggtttatagcttttagtatattagggtggggaaggaggtattttttacatccaacttatgcccaatccctaattaaaacttgcccctaatgaaaccccccaagccatttgtttttaaaaatt

SEQ ID NO: 73591 - DNA, 591 bp, Zea mays
  Clone ID: MRT4577_167112C.1
ccggccgggggatcaaactcccgtgcttcctctcccataacccatccgagtgccacgttcaaccaggtgtgggtgtgaagttcgccggtagccgagaggagggatgtgtccgtcgcacttgaattccggtgttgccagcagtcagtgaatgggaggggcctcgacgggtttgtcgtcgtgcgagaatcacgcacacccgactcctcgaacgaggaagactctggacgccggagaaattgtttgccggagcatcaaggtccgtcgcggtactcggactcccgcaggcagtactcggctctgcgtaaccctcggtacgcttcaggatatggttgatggtgtgacctggcctaccaccctgccaccgggttggacggtcgagtgggatgctgctccagcaggagatgagcaaggggagtagtgggctaggccttgcccaattcctcgctaccgacgacatcgattatccactgcgttttaccttattttatgaacttttaccagctacgtgaaaaactctgatctatgtaataattcagtactttaaattgaggttttcctgtttctaaaaaaaaaaaaaaaaaaggggcggcc

SEQ ID NO: 73592 - DNA, 144 bp, Zea mays
  Clone ID: MRT4577_167113C.1
ttcttattctactatgcaaaaaagatgggggggctaagatggggtgggtgggcatctaaacttgatttttttagatccattagtcgatgtaaaaaaaggggagcacagggtggtgaaagcaattagttttctgcataatctttt

SEQ ID NO: 73593 - DNA, 1011 bp, Zea mays
  Clone ID: MRT4577_167114C.1
ctcgaggccggccgggaattcggctccgcgagactacgacgccgatcctagctagctctcccgtttctgctcgcaagtcacacacagctccggtagatccgcccctcgcctctgggctccaggaagagattagcttcagacggcagggatcgatactagcaagcaagcatggcgcacgacttgtgcgaggacttggagctcgtcgccgacgacggcggcttcgatgactactactgggacgacgacttccatttccacgacgacgacggcttctccgcctcccctacgacccccgccagcgttggtgcgcccggccagcagcagcagcagcagcagatgggtgatatttcagcctcggactacaaagaaggcgaagacatgcaggggataccctgggaaaggctcaactacaccagggaccagtatcgtcggatgaggctcaaagagtacaagagctaccagaacctcacgaggtcgcacagcgggctacaacaacacgaacgcaaacaggtggagaggaaggacacattctacgatttccatctgaacacgagagccgtcaagtcaacgatagtgcatttccaggtcaacaacaagcagtggcaggacgtttgggtgtgcgctatctgcagttagtcttgagtgatactagctgcaatttaatcagatcgatcaggtggatgggcatcctcagcagccgggaggagtgactccagcagggggttggaaagcttgcaatatggtatggcaggacgtttcgagatggacgaatctgttgaaacgggtcaccttgagttcctcattttttttgcaggttcatttgctgcatgttcatttgtggcacgccttttcgtgttaatggaaattgtgctcaaaccaatgctgtccgttgaaagttttttatggggtttatattatcgtccaatgttgtgtcctttgtttgggtgaacattgtgtggctaaaaccgttctggatggcaatgttaacatggaccttcactttggacactg

SEQ ID NO: 73594 - DNA, 548 bp, Zea mays
  unsure (1)..(548): unsure at all n locations
  Clone ID: MRT4577_167115C.1
cgagttgggacgaatctggatgtggcttttcctcttaaatagaattcaacagctagggtcatcaaagcaactgactccttcgacaggcatatactgtagaaattaagccatgaagttttggcttatatagcgcagaggaatcccaggttgactacattcgacaagcacctcttcagaaggggaggaggctttcaggttctgcgcaacctcatgcagaatttctgttgttatagtccaacttttgggaaatattttgtaggatgaaaattatatgaagccagtcatcttgatgcaaagccgtgaattgtatatgttcatgttgtttgtattctttcttcttctttttggttcgcaggccaaaaggcaatatgtaggattttttttttaaaatcttatgtttagctacacattgtttcaggagttttagtaaaagcatgtcaccttatcttcagaaaaaaaaaaaaaaaaaggggggggggtaagaagtatagaagataagggaccgcgccagcggaggagnnggatggagggatagggtaaggaaagaa

SEQ ID NO: 73595 - DNA, 537 bp, Zea mays
  Clone ID: MRT4577_167116C.1
tcccgggcgacggccacggctgctccccgtagcgacgatgtgccagggcggcatgcgcgagggtgtcgcggacgagcacacgaaggctgcctctggcgaggagacggcgtggaagggcgtgatggagaggagcttctcgccgtcgttagccccagccacgtagtcgtcgccaacgccggcgactcgcgcgccgtcctctccggggggggcgtccccgttccgctctccgtcgaccacaaggtctgtataacactgctcccgtgcatcaggcttcacggggcgcgcaacttgtctgagcttgacgtgctcaatttcctggttcgttcagcctgaccgacctgacgagctggctcgcatcgaggcggcgggtggccgcgtcatttactgggatggtgcccgtgttctcggcgtcctcgccatgtctcgagccataggtgagctcaagtttgtgccaccggtgtcgttttggggggccagtccactcactggattttaactgaccggcttatgcgcgcgcaggggataggtacctaaagc

SEQ ID NO: 73596 - DNA, 257 bp, Zea mays
  Clone ID: MRT4577_167117C.1
tttcttctccgtagctaaggctgcgaaagaccccagatgcgccgccttgttttttcctacacggttccaggcactacactatgtgacacgcttcagaaccatcgagaggagcccactgacgctatgtaaaactcacagaacctgcacaccacccacgatagctgatgaaagagcacccccagatccacctctatgtttgaaaagaccaatagaaccgtctttggttactgctaaaacttctgaaagcgggatgttta

SEQ ID NO: 73597 - DNA, 310 bp, Zea mays
  Clone ID: MRT4577_167118C.1
cactacactacactacaccacacccacccgacgactatcacacacgcataagatcgaggtcgttcgatcgtgaccgggacgcaagatgctataatctagccaagacaggaataataatgtgcggagtcgactgtggacagcctctctgtccacgggactacgacataccttcgcagcaggcgggcggcggcgacatgctgatcgtcgtcccgaggagggcgggcgccaagcgcatcatctggttccccgcggcggatcgccacgacgttgtgcgggttggacgacatgcgtcccagctgcccggacacgc

SEQ ID NO: 73598 - DNA, 2046 bp, Zea mays
  Clone ID: MRT4577_167119C.1
agcagtgaggggtgggagagagcccggaatagctatcacgaggatttggtagattgtgtacggcattgtgtttggtaccgggccacccttttctcccagtggaagcaaagggaatgtacgcaacttgcatgtgggtcgtggagcttcttttggtccttagggactcaaatagcatgttccactatgttcctgagttctatgtggaatcactggtggattgtttccatgcactgcgaaggagcgatcctccttttgtttcccctgcattatttctcatgcaagggttggcctcgtttgtcactttggttgtcaagcacttcgatgatacgaggatagtgaaccctgacttgaaagatcttcttcttcaatcaatatcagttctcgtacagtataaagaattcatgcttgttttcgagaacaatcgggaggctataaataaaatgcctagatcacttttatcagcttttgacaacagatcatggattcctgttacaaacatactttcccggttctgcaaaggctcaggatttgcttcctataagaatggtgaatccccatcatctgcaacttttcaggttctactgagggagacatgtattcatgaacaagagctgttcttttcctttcttaatcgacttttcaatacactcagctggacaatgaccgagttctctatgtccatccgggagatgcaagataaaaaccaggttgctgatttgcagcagaggaagtgcagtgtaatttttgatatctcatgtagccttgcgagaatcttggaattctgtacccgagagattccttgtgcttttctcatgggaccagatatgaatttgcggaggttgactgaattggttgtctttattctcaaccacatcatatcagcagctgatgcagagttctttgacatgacactaagacggccagggcagcatcaagagaaaacaaatcgtactatgatcttggctcctcttgtgggcattatcctcagtcttatggaatgtagcagcacatcagaacgaagggagctaaatgatgtgattgcagtgttcgccagcatggattgccctgccacaatccattttgggctgcagtacctactgagctacaactggagcaatgttcttcgaggggattcatcccttgcaaagctagcgcagcttaaagagttctcccattacttccgacgcattacagcgtccgtggatggtgaagaagaagaccatagcctaaacacgggtgatgaagacgacgaccacacctgttgcatttgctacaactgtgattccgatgcaccattcccgcgatgccatcaccggtcctgctttggctgcataagcaggcatctcctgaacaaccagaggtgtttcttctgcaatgcagtggtaacatcggttactagatagccgattcgcgagcgatgcgctgctctactcattgcctctttcggtatcgtgatccgaaggaagatggtgccactgatttgtcttatctattttgcttgacctgagggctggggcgctggcgtcccagagatctttccattgcttttccaggaagaacgcgttacctttgtgcacgagggtcagaagcggttcttcgttttccttgctgtatatgtaaaggccaggtaatagtagaaaggattcaataacattgccgcagaaggaggtttctgtacacggtgggaagccagtaccaccgaaaggaatttcatggaatcgcaatttttgtagggtgtagggggagattccacgactgtaaatatgatgagatatgaaacagaaaagggggtggcagatcaacatcgaccttctgtaattagccagaataaaagaactagatgctttatattgagcagagctctcgtctttttgatcctccccccggtgtagtatcaagaatgaataaatcttctgtttcttgtctggttgtagcatgccagcatctgtaagttgtaacaattcagtgaatttatttaccttcagcaaaaaaaggtaaaaaggttgccttcttcaaaaaaaaaaaaaaaaaaccaccccccccccc

SEQ ID NO: 73599 - DNA, 1240 bp, Zea mays
  unsure (1)..(1240): unsure at all n locations
  Clone ID: MRT4577_16711C.1
acgcgnccgcccacgcgnccgcggaggggctcggttgcggcggcgccggcaggtgctactgcgtcgtcccagcagaaggccactctggcggcgggcagcgccgacaggagatgaaccgggtgggcaaggaggacttcgaggagcacatgcggcggctgggccggctcagccaccccaacctcctcgcgctcgtcggatactactaccgcaaggaggagagtcggctcatccacgtgcgagagcccaaccggagctcggtgggagctcaagatggccatcgagaggatcgaggagctcaaggcgaaggagcgccccgagcggcagcaagcgacggtgatcgacgaggactacagcgctcagctacctgtacgacgagctgtgcatgctcacggtgccgcacggccacctcaagtcgtccaacatcctgctcgacggccactacgagccgctgctgacggactacgcgctggtgcctgtgatgaaccagtcgcacgccgcgcagctcatggtggccttcaagtccccggagcggaagcagttcggccgctcgtccaagaagagcgatgtctggtgcctcggcctgctcatcctcgagatgctcaccgggaagccgccgacctacgacctgcccaaggcggcgggggcggtgccgtcggccgaatcgttgtcgtcaccgcagaagccgggtccggcggcgggcaacggcacggacctggtgaccgtcgtggggtcgacgccggagggcgagtggctggacaccgtggtggacccggacctgaggggcgaggaggaggaggacaaggaggagatggtgaagctgataagggtcggcatggcgtgctgcgagagtaacgtggacagccggtgggagctcaagaccgccatcgacaagatcgaggagctcaaggcgaaggagcgccccgcccccgacgaggagcaggccttctactcgacggtgaacaacgaggacttcaacgacgttgccatcaactgaactgacgatcgacatggactgggaatagatttcatcgcacaccaccgacgacgaatttccaaacaactcaacagaaatctattacaaattaattaattaatatgtgaatggataatggaggatctattttgtgcaaattatcaagtgtaggggcacacaaaacgttcgttctttgaaattttcatcacacgagtgaactttgttttaaaaaaccataaatatatatgtgttctattgttaggtgga

SEQ ID NO: 73600 - DNA, 561 bp, Zea mays
  unsure (1)..(561): unsure at all n locations
  Clone ID: MRT4577_167120C.1
cggacgcgtgggcggcggcggcggcggcggagggaagaaggcggggtctgccgcggcgcccgcgcttggactgcagaagcagaactcgtggtcgccggacatcgagcgcgatgaggcatgggagcgccggcgccggggcatgcgccgcggcggcacggcgctgcggcgcgtccggagtgtcacggacgacgatctcgacgagctccgcgggtgcatcgatctggggttcggatttgagccggcccctgccgtcgccgggtccgggtgcgcggcgtgcggctgtgccgggaggaaccgcctcctggagacgctgccggcgctcgacctctactacgccgtccacgccggcggtgccgagggaccgacgtgctcgtgcggcgccgcgtcggaggtctcctccgaagagtcgccgctcggcagcccgatgtccatattatctccaggcgatccaccggagacggtgaagatgcggctgaagcagtgggcgcaggtggttgcgctttccatgctgagccgccactgagctcttggctcttggtgacggnggcactatgaccgccg

SEQ ID NO: 73601 - DNA, 218 bp, Zea mays
  Clone ID: MRT4577_167121C.1
tcgtctcgggcgtcgtgtcaggtctcaggtatcgtggcgctttctcctctccggcacggtggccgcgtcatcccagctctcccgcgaagcagctcgcgtcgccgtccgtttcctctcctgcgctcctcctgacgaatacagccagataattgcagctgaagtttaattgaccataggcgacactttgcgagtccttcgtgttgacggagcaattgtag

SEQ ID NO: 73602 - DNA, 253 bp, Zea mays
  Clone ID: MRT4577_167122C.1
gggaggtgggatattcagacaacagaaaggttccttctctcccgaagttgagtttgatgtgctgaaggcatcagaaagtgatcgcaagtctgatgcacttaccgttcaaagggcttttatcaccagcacaaagggaaatgcgtcaatgaagcccaagaaacattcttattcaacagaggtcatagcatcttcccccagtatggagatagaacatacagtacaatcatctattgtcacacaattgcaatgctct

SEQ ID NO: 73603 - DNA, 401 bp, Zea mays
  Clone ID: MRT4577_167123C.1
caatcattatgctctggttacctttttttccaaccacaaaaaaagaatgttttggggccagaaaaaaaaagcgcacaaatcttgacaggaaaaggccaaaagggttgttcccggccttggcataaccaaccaaatccaggaggggcttgggcaaaaatggggcatcccaccatgattgattcaggggggatgaaggctttcaaaacaaaaaaaccgccctgttaacccgccgctaatccggggggaaaagaagggaaaaacaaaaagccccgcggggaggtttgggcctttcctctggggggggccagggggaacccccagctccctaagggggggctttttttttttttccatgggcgggccaaaagaataaaaaagaccctcaaggggggacacaggtg

SEQ ID NO: 73604 - DNA, 547 bp, Zea mays
  Clone ID: MRT4577_167124C.1
ggatgctcgtagagcggacagccgccgcccacgcctgaatgaccagtgtggcaccaggcaacattggaagcggtacttcgtcacgactatacagcaggactaccgcttctccggtgggccccacagcgaaagaaagacatcctactgcgcggcctccgtgggcacaggagtgtactgagaatttagcacactgtcgaatgcggagaccatacaacccgacgaggcgctagaatacgacctggactacaataacaagaatgtggacttagatatagcgcttcaccccctgatctaccaggtgcttgccaacaagatgtgcgtgctaagaatctttgatttcgtggacagcaatctggttggacagcagcttcgcacacgccatcacttagtagaattaacaaactagctgtttgatccatagctcgcttgaacacatatggaacagagctcatgagcttcttcaagcttcggtctccaaagcccttgcatctgcaaatgtggataaaaagtgcacatcacccggaggtttgaatcaaagcaccctttt

SEQ ID NO: 73605 - DNA, 513 bp, Zea mays
  Clone ID: MRT4577_167125C.1
aaccaaccagccgaagagcgagccgtcagctgagcatggcggaagcgccggaaccgcttatggagcggttgcatcgtatctttggcgcctccgtcatgggacagacgacgacggactcgacgctgctccaatcttacgaggaagctacatctcctccctcgcgcttctcaatatggtcgagcacgggagggacggtgagccaatgcaggccatgcgtctcatgctcggcgatgtcctggatgactacaccgtcaggggcccccacggcttcgccatgccgcatagcgtgactgatctcagagctcgaggccgtccatcacctcttccagacaaacatgcttgacatgctcaagcagaacggtagggcacatatggaagtagaatgacatcactcacatcctgtgtccggtcgatggctatcaggggatgatattgatactcagcgacactcttgaagctctgaaacccagagcacatgctgtagagatacaccacatccagaatgctaatgac

SEQ ID NO: 73606 - DNA, 759 bp, Zea mays
  unsure (1)..(759): unsure at all n locations
  Clone ID: MRT4577_167126C.1
ccggccgggggcattcagtgaactcgcctcggtctcgcctacggcactgcgatcttcttcgacgcctgcatcgcgacatgaagtgcgccgtcgtcgtcgcgtcgctggcggccgtgatgtccgtgctcgtgctacacgccggcgcgcatcggccgctcgtcgagccgtcccacgcaaacgcaacgacgccgcagatgacggacacatggccgcctaccccacaggccaaccgcgccaacctcaccgcgatcctggtcctcgacgggcccttccgcaccttcctcgggtacctgcagcagaccaacctcgtggaggtgttccagaaccaggcgtacctaacggaccagggcatcaccattttcgtccccgtcgacagggccttcgccgccgtcaagccgccggtgctgtcgcgtctctccacgcagcagctcaagaacctgatgatgtaccactcgctgcccaagcactacgagctcgcggacttcgagcggctgagccagaccaggccggtgacgacgctcgccggcagcctgtacacggtgaacatgacgtacgacgcgggcacagtccacgtgcactcttcatgggccgacgccaagatcgtcgggagcgtgtccgtggacgcccccatggcgatctacgagctcgaccgggtgctgctaccggactcgatcttccgcgcccagccgcccgtcgcggngctcccagacgtgcccgccgcgccgnctccagnaacggngacgccgctcagcccgtgac

SEQ ID NO: 73607 - DNA, 471 bp, Zea mays
  unsure (1)..(471): unsure at all n locations
  Clone ID: MRT4577_167127C.1
cccccccctcctcgccgctcgacgatgaagaggtaagcccaggggccggcgagaatggaggctgctaccatggcgtggacggcggcggtggtcggagcggggctggcgtactggatcatctgggtgatgggcgcggcttaggtgaagggcaagcggtcggaggatctcaagatgggatccatcacgcgggacacggtgcacgacaagtgcacgcgatactggtccttcttccgccgccccatggagacagccaccacggcggcgtcggcggagaaggtgccggcctttattgaaccttctacaatctcttgaccgacatctacaagtggtggtggggccagtccttacacttctatcagtacatattgagacgcttctaccgagacatcactcgcgtncacgaggagcgcgtcggcgacctactcggtaccaggctgggccagcgtctcctgtacataagctgcggagtct

SEQ ID NO: 73608 - DNA, 608 bp, Zea mays
  Clone ID: MRT4577_167128C.1
cctcgagggctcgtgccgggaaaaaaaaaaaaaaaaaaaaaaaaaaaaaaaaaaaaaaaaaaaaaaaaaaaaaaaaaaaaaaaaaaaaaaaaaaaaaaaaaaaaacccgggggggggggcaaatttccaaggaaaaagccttggaccctttaatttttcacagaaaattagtaaccagggggggcccgggggcagggcacccaccccgccggccgaatggggggcaggggggaaggggcacgggggttggggctcgccggcgttttgagaatcgccgggttcctggttggttttttccaacagcccacggggggggggggggggggggccgcccaaaggagcaatttcccgccgtggttctttttgggaagggccacctcttggaccaaaatgaaaggggcgtccctggggggcaaaaagagtttgagcaacggggatgttttaagccacgtcccaggaaaaatcgaaaacggaagccccggaaatgtcggggataacaactataatggttccggggatgacattgagttaatgcattttttgggaaccaacgcctacaaattttttatataaggggccaaattttttccgagggggagattcggggg

SEQ ID NO: 73609 - DNA, 180 bp, Zea mays
  Clone ID: MRT4577_167129C.1
ttccagttgttaaatcacctctatggccttgattcaagaggacatcttaaagttattctatcaacaaatcttatttacagtcttgatccatccttgcttctcccatctctaattgacagaaagattgaattccctttacctcatgtcaatactattccactcatcttccatatacacaca

SEQ ID NO: 73610 - DNA, 3963 bp, Zea mays
  Clone ID: MRT4577_16712C.1
atggaaggctctttggtcattaggacatcctactgctcagaggtggaaggattccctcatctcttgcggagttgcgcgctttgcatggggatccgcaagaagccggaatacgtctggaaagaataccgtgagaacggaactgagaagtgctctatggcagtctacctaggagaaagccgaagttacccaaaccccccggacactgcttcccagacacttaccaaaatgttgcccgaaaagccctccggaagctatgccaaaactacagcagagagcaacaaaaatacccctgcctggaggaaaagacttcaggccctctcaggaagagatcccactgaggatgaccccaccatcgtctacatggccggatatctccacaccctcgataaccattataatgacctttcctcccactgcacccacctaaactcccgggtggaaagcttagagcaacagatggcttcggataaaaccacgcctaccgcctccgggattggagcaggatttcccctaggagctgaaggagaagccgatggagaagggaaagtagccaaccaaacccgactcattgaagtcctcactagaagtctagagaatcagcgcccgaatggtggaagaccacaggataggatgggggattttctgaggctcaagcctcccactttcgctggatctagcaatcccctcgatgctgatgactggttgcgcacgataaaaaggaagttagaagccatcggatgccctaagaaccagcgtattcatttggctgctcatcaacttttcgggatggccctgtcctggtgggataccttcagcgctgccgtcagagatgctacctggacagaatttgaaactgatttccgagagcatcatgtgccccaagggatcgttcagctcaaggaagatgaatttcgggaactaactcaaggtggaagatctgtcaatgagtacgtgcacaaattcacagaattggctcgctactcgcctgacgacgtcagcacagaagccaagaagatggcctgctttttgaaagggctaagaccaaaactcaagaccatcctcgccagccaagatttcctcagcttctcgcacctctcaaacaaagccatacaagtggaaagggcaagggaagaagaaaaatgtcacctcaagaggaaattccaagtcctccgagctcagcagcaagaccgacaccagagaactcgatcctttgggtttccacccaagggaccaagctacaacaagccagctggacccactccatcacgtttcagtcagcagagtaagagctcttttcaggccccctcagtcgcaagcaaccaaccaccagcaaatgcatgttggcactacggagatcctagtcacttcaagaataactgcccccagttgaaggcattaggacctacttactccaactcggtgaatggagcatcccattcatttatagccactagttttgtggaaaagcatggcattccctctacctgcctagaaattcccttggtcacccgaaccccaaggtcggaccttttgtgccagctcaaatgctcccaagtcagaattcttttaagtggggtagtgttcttggcagacttaaccatcttgccatcccaagggattgatgtgatcttaggaatggattggttaaccaagaacaagggcatcataagttgcgcaagcaagaccatccttctcattgaccaccaaggaaagtcagtttcttgtcaggctcagccacccgccaaggatccaatggtgtttaatctagcagcagaaagcatatccatggtagaagaattcatggatgtattcccagaagaattgccagggatgccgctagaaagagaagtagagttctacatagatctgatccctagcactgcactcatcgcaaagagaccataccgcatggctcccaccgaattagcagaactaaaactccagatcgcagagcttcaacgaaaagggtacattcgtcccagctcgtctccttggggagcaccagtcctttttgtcaccaaaaaggatggaagtatgaggatgtgtattgattaccgatccttgaatgaggttacaatcaaaaacaagtatccactccctcggatcgacgacctcttcgaccagcttcaaggggccaaatatttctccaagatagacctaaggtgtggttatcaccagctgagaatcaaggaggcagatattcagaagactacatttgtcacccgatatggacagtatgagttcacaataatgcctttcggactaaccaacgcacccgcctttttcatgaacctcatgaataaggtatttatggaagagctggataagtttgtcgtagtcttcattgacgacatccttatctactccaagagtcgagaagatcatgagcatcacctctggattgtcctcgaaagactcagagcacatcaactctatgctaagctcagcaaatgcgaattctggttagaaaagatagccttcctggggcatatcttgactatagaaggaatagaagtagacccatccaaggtagaagcagtatcgaaatggaagcagccatccaacgttagtgaatttcgaagctttctgggaatggcaggatattaccgtcgttttatcaaaggattctccagcatagcaagacctatgaccaagctcctcaagaaagacaataagttcatgtggaccccgaagtgtgaagaaagcttccaaatcataaagaagaagctcacaaccgcacccgttttgacactgccagacatccatcaggattttgtcatcttctgttatgcttcaaggcaaggcttagggtgtgtacttatgcaaaacgagaaagtcatcgcatatgcatcgcgcttactcaagccacatgagcagaattatcccacccatgatttggaattggcagccatagtgcatgccctaaaaatatggaggcactacctaattgggaacaaatgtcacatcttcaccgatcacaagaatctgaagtatatcttcactcagcgagacctcaacctccgtcagcgaagatggctggaattgatcaaagattatgaccttgagatccactaccaccccgggaaggccaatgtggtagcagacgccctcagccgaaaacctttcgggaagaaagggaccaactttttagaagattggaagaaagaatcagctcagctgaatgcatgtctgggagacaacggctgcctagaagtcaagccaatgctagaagacctcatatgcaaggctcaacgcctggacactgagacaacaggtcttatggaaaaagcttgcaaggaaccacctccggactttaggatagatgaggaaggagtcctttggttcaaaaaccgtctaaattgggagtccagtttgccttatgtcgagttctcgtataacaacagctaccaggccagtatcaagatgtcatcgttcgaagccttgtatggacgaaagtgccagacccctctaatgtggtccaacgtaggggaaaagacactagaaggacctaccttcgttaaagaggcagaagagaaggttgccctgatccgcaaaagattacttgaagctcagagtcgacagaaaagttatgtagacaacaggcggagagaactcagatttgaggaaggagacttcatctacctcaaggtctccccgatgcacggagtcaagagatttcaagtgaaaggaaagctagctccgcggttcatcggtcccaatcccatcattggcagagtaggacccgcaacatatcgccttgaattgtcggaatctatgtcagatatccacaatgtgtttcacgtgtcccagcttcgcaaatgcttgcaagtactagaaaaccacatcgaagaagaggcaatccagattcagaaggaccttcagtaccgagaaaaaccagtaaagattcttgactcggtagtcagaaagacccgcaactcagaagtgagactctgtaaagtttag

SEQ ID NO: 73611 - DNA, 195 bp, Zea mays
  Clone ID: MRT4577_167130C.1
gagcacttatgtactcaattaattggacttggctttacattcgggacgggtaatcaacaactggaacagtagatagtctgagagtggccatccaggaggcagaagccaatcccgaccatgttggagacactgagcggagcacaccgagtcctgctgactaacggtctcgacttcgatgacaccgcgctcacgctc

SEQ ID NO: 73612 - DNA, 341 bp, Zea mays
  Clone ID: MRT4577_167131C.1
gcagcacgagttttatccctggagctaatatcgagcccgcgccgagtggagtttacgctcgatcgacaggagctcaataaagctaataaggtgaatctcaacttccgatgagtttcacacttccttagggacaactccataaagggctacatagacgacttgattggaaccatgcattctcgctgggatcgtatttgtcacacattcgctacgggcagagtgacaaatgctgactacactgaacccaacggctcttgtggagatctgcttcgcgcacacacttcctctgttcgggagcgtcttcggaggatagaacatctgaggctggaacctgaacccgg

SEQ ID NO: 73613 - DNA, 451 bp, Zea mays
  Clone ID: MRT4577_167132C.1
atgacttatatagctttgacctgatgaaagcaagtttgaaaaatgagggggagcgacgtgaatgccgatacatatcccaagcctgggccacaaccctggggcagatgtgaggaaggtacctctcagcgatggttactacttacaagaactgaaagaatcgcatgaacaggctgcagctacctctgttaagggacattacctccagaacgaccactatggaccaaactgcacaggctctatggacagcagataacgtgcatatgctgcttctctaggactaggtggtacccgcaagatccgtttgataagccacaataagaatgtctcgaacatagatataagaaggcattcatataaaacacacgaaactcatcctggaacatgatagctccatcactccaaagaacaacattgatttaactttgtgagtatgagatgaagacatccttta

SEQ ID NO: 73614 - DNA, 346 bp, Zea mays
  Clone ID: MRT4577_167133C.1
agggacttcagcctcagggctccagatcggttagctgcgtcgcatcttcttgccccggtcagtgtgtgtggatatcgactcctgcttcggcactaatggcagcagagcccccgactgaactggagtcagccattgaaacggtagtcactaccttctccacctttgcagggcgggaaggacggaaagtagcctgagcaccaacgaatgtaaggtaattgtcactcagcagttacctcatgtgctcaaggatgtgggttctctagacgataagatgaagagcttggacgtgaatcaggattcggagctgaagttcaatgagtactggagactgattggggaactggca

SEQ ID NO: 73615 - DNA, 288 bp, Zea mays
  Clone ID: MRT4577_167134C.1
atgcgtttgccatcgtgcaatgatgagaggaggctaaacggtcatgaggcgacgttgcatcaggcagcacgtgaagcggaggcaggaacgaccttcagaatgacgctagacatggatgggtgtcaacggcgcaagcaggagtggttagcgtgtgcagaggcggtggaggcacagaggagaggagaggagaggaaaggtctcgcggcggtgggggctgtctggaagcatcgtgtatcgcgtacggagaggccacagattgtaaggcgtaggaggttttcgcaccgttga

SEQ ID NO: 73616 - DNA, 1447 bp, Zea mays
  Clone ID: MRT4577_167135C.1
gcccacgcgtccgcccacgcgtcccgcgacaaccactgagccgagcgggggtggatatggcagcggtcgccgcccaccaccacctccacccctcctccgtcgctgcccgaactccaacacttggccgacgccaccgtttctcgtcgcttcctctcgccgcgcggccgtcctcccaaggccgtttcagcttccgagccgcgacccgcgtcctcacgcgcgccggaagcactggcgccagcagcgccgcctcgcccgccgcgacgacggcgtcgtcgttgtcgctggaggagctgcgcgggggctgcaccacctggacgtggcgagggatgcgcgtgaactacctcgccattcgacaggggccgcccgtactgctcgtccacggcttcggcgcctccgtcgcgcactggcgcaggaacattggggtgttgtctgaatcctataccgtctacgcgatcgatttgctggggtttggcgcgtcggacaagcctcctgggttttcttacacgatggagacatgggccgagctgatactggatttcttggaggaggtggtcaggaggcccacggtgcttgtcgggaactcggttggaagcctcgcgtgcgtcattgctgcatcagagtccagcagagaagccgtccgggggcttgtcctgctgaactgcgccggtggcatgaacaacaaggcgatcgtcgatgactggcggatcaagctgctcctgccactgctctggctgatcgacttcctgctgaaacagcggccgatagcatcagcgctctttaaccgcgtgaaaaacagggacaatctgaaggacatcttgctctctgtttatgggaacaaagatgctgtggacgatgaattggttgagatcatacgcggaccggctgacacggagggcgccctggacgcgttcgtgtcgacggtgaccggcccgccggggccaagcccgatagccctgatgccgcggctggccgacctgcccgtgctggtgctgtggggtgaccgggaccccttcaccccgatcgacgggcccgtggggaagttcttctcgaagctgccgtcggagctcccgaacgtgacgctctacatgctggagggcgtggggcactgcccgcacgacgaccggccggacctcgtccacgacaggctgctgccgtggcttgaagcgctcctgccgcccgccgccggcgcggtgactacgacgacgacgacggttgtctaaggctaataataatacgccttattgctgactggatctttgaagtctagttggactcttcatttttaactctctagttatctctttataaaaaataaattctataaatcttatagattttgtttagaaccaactcagtttttaaaaaattggcttttattttttagctagcagtggccaacttcttagtttctaagagcatctctaatctaacatagttcctatttcac

SEQ ID NO: 73617 - DNA, 420 bp, Zea mays
  Clone ID: MRT4577_167136C.1
tacgacggccgggcgggcgggctcacttatttctgtggcaaccacctacgttaattaaacatactttattatatgaactataactcatactaccattaaaacagggcacctacctatgatcgggttgctggtagaacactgctgggtttgtcaaagcaagaacgttgagtgggagcaacagttgcagctgctagagggtgccagcgttaggcgcaacgtgctggcctaacggctacaactgtcgttgtctcaagaaggcagcagtgctcacaccatctagctaactgtaatggccctcttacaacgtgtgctgtaaagaagccattgaacccactggttttagcagacccaatggaagaataccctcagcctaggcatcagggagctctctgtttgatatctgatgaggtatcaaataag

SEQ ID NO: 73618 - DNA, 744 bp, Zea mays
  unsure (1)..(744): unsure at all n locations
  Clone ID: MRT4577_167137C.1
gtgtctctgctggtgggcaaaatgggcaattcaaagctcttctctctctcctctaaagtagaaacaaatttttttgggcgaggtgtccaccttcaaattcgataagaagcaaagtgtcctccaacgaatgtcactatttttagtgtccaccagcaaagggaggtcattttcagtgtcttgtagccaattttgcctctatttaatgaatagatagtacttatagcttctatgccgtctagcaaactattgatctagtcaaatgcttggttcaagattttaattagcattttgattcacatgacttgtttaaataagaagtccattttacaatccccaacaatcaagtttgtctaccttactctttaagaaactcgcggaccattttactcatctaaactatttcaattggtacaatctacctcctaacgagattcatatttcttgtttctctgcttatgtttaaagttcaaattttctggagtgacaaatgagaagcaacgtctatcgtatactgaaaagtacattagaatttttaataataattcttcataggttaagaccatctaatactaaattaacatttgggataccaaatttcatgaaaagcaactatgaacatttttgtcctctatcaccccatggaatttgaatgtgaaaactcaacttgtatgcagagaaacaaaaggacaaatctcattangagatatattggatcattgaaatagcgtcatgagtaattgagcc

SEQ ID NO: 73619 - DNA, 575 bp, Zea mays
  unsure (1)..(575): unsure at all n locations
  Clone ID: MRT4577_167138C.1
ggcctggccgggaatcagacctgaccattagctaggttcttctagctctagctaggctcgtctgctgcaagaaggtaacagtaacagcagggatggaggggaaggaggaggacgtccgcctgggcgccaacaagtactcggagcgccagcccatcggaacggcggcgcagggcacggacgacaaggactacaaggaggccccgccggcgccgctcttccagcccggagagctcaagtcctggtccttctaccgcgccggcatcgccgaggtcgacgccaccttcctcttcctctatatctccatcctcaccgtcatgggcgtctccaagtccacctccgagtgcgccaccgtcggcatccagggcatcgcctggaccttcggcggaatgatcttcgccctcgtctactgcaacgacggcatctccggcgggcacatcaacccggaggagaccttcgggctgttccgggcngaggaagctgtgcctcacgcagggcggtgctttacatcatcatgcagtgtctgggcgccacctgcggcgcgcgcgtcagtaaggagatccagcaggggatggact

SEQ ID NO: 73620 - DNA, 366 bp, Zea mays
  Clone ID: MRT4577_167139C.1
ttttcttttttggcagagacccacctcgcttctctactttaattgaccaacacatcttggttttacaaaaaaaaaaattctgctttgattttccataaagaaaacctctcagcctctttcttctagctccatccaagctgtagtgctaatggccgcagccatggacatgtacaaagactacaataccagcgcacaccagatcccctaagtctattcctattatcaagaggtattgaaggcacttaagcctttaataacacacacatacttctcttcatcctccttcccctaccatgactacttggccctcgctgcaaggtcccttggcacattgaaggtggcatgcttttgtttgaattgaaccgc

SEQ ID NO: 73621 - DNA, 487 bp, Zea mays
  Clone ID: MRT4577_16713C.1
tcattatatatcttagcagtctatgtaccagatccaatctgcaacatgcatgctttaaatgcaataaccatgatattggggcttgtggttcttgctactattgctttagtatcaactgtttcttggacacagacagtgcggctgcagatgtggttaacatcagagccatgagcagtttcatcatccacaacaacatcatacaaagaaacaacagcatcgaccatcaccacatcatcaccagctgcatcaacaccgacaccaacactgtcacatgcaatcacaaaaacatcatgaacaacatgaagttcattgttgaacatcaactacaacaacgcgctacaccaacatcatcaacatcatctgcatcaacttcatcatcaatgtgaaggccatcaacaacatgatctacattcacaaggccatgtgcaacaacacgaacagagccatgagcaacaccaaggacagagccatgagcaacaacatggac

SEQ ID NO: 73622 - DNA, 381 bp, Zea mays
  Clone ID: MRT4577_167140C.1
gactctgtgcctgaaactgctgctgatgcagttgcagcgggagactatgagttcaacacggcactcactcgacgtgtgtgccttgctgacgatgccgacgactcccggacgtgcgatagaagggtccagtggctttgtacgtaaccaccactagctagctagctctctatcgctactccactgtaacgtacggccgggtgacccttgcttggtcgcttgcgcgcgatcagagagagtaacttcttgtctgttgttactatacttggtactcgtactagatttcgaaggggacgtcgttaattagtaagtcatactagtacgtgatgtggctattatgcttgatgttctgatactacaatgcagagaatactgtggagcatg

SEQ ID NO: 73623 - DNA, 233 bp, Zea mays
  Clone ID: MRT4577_167141C.1
aacctgccgccgcatccaagtagtgccccttgatttcaccagtgtcggctggggctttataaattgctttggcacaaaagacaaaacggcctctccagcgcataaatggttgagagttgacggtctcatgatctttggtaaaatcaataccacgcgcgtacactctcttaacactctctaccgtaattatttgcggatactcccaattttgggttaatagcacctcgcgcgga

SEQ ID NO: 73624 - DNA, 726 bp, Zea mays
  unsure (1)..(726): unsure at all n locations
  Clone ID: MRT4577_167142C.1
gccnggccggttctccgaccataccaattaactagcttcttctaactctagctagggtcgtttgttgcatcaaggtaacagcgcacgcatgtagggtaaggaggaggacgtccgcctgtgcgacaacaagttctcggagcgccagcccatcggcacggcggtgcaggtcacggacgacaaggactactaggagcccccgccggcgccgctcttccagcccggagagctcaagtcctggtccttctaccgcgccggaatctccgagttcgtcttcaccttcctcttcctctacatctccatcctcaccgtcatgggcgtctccaagtccacctccaagtgcgccaccgtctgcatccagggtatctgctggtccttcagcgatatgatcttcgccctcgtctactgcaccggcggcatctccggcgttcacatcaacccggcggaagaccttcatactggtcctggagaggaagttgtccctcaccagtgcggtgttttacatcatcatgcagtgtctgatcgccatctgcggagcggtcgtcgtcaaggtgttccagcaggggctgtagatggtgaacggcggcctggccaacgtcgtgacgcccggatacaccaaaggagacatgctcggcggctagatcgtctgcaccttcatcctcttctacaccgtcttctccgtcaccgatatcgataggaacgtcagggactcccatgtgccgatcctcg

SEQ ID NO: 73625 - DNA, 1240 bp, Zea mays
  Clone ID: MRT4577_167143C.1
ctcggccgggacagcaccgaccactagcttcttctagctagctctaggctcgtctgctgcaagaaggtaacagcgcaggcatggaggggaaggaggaggacgtccgcctgggcgccaacaagttctcggagcgccagcccatcggcacggcggcgcagggcacggacgacaaggactacaaggagcccccgccggcgccgctttttgagcccggggaggctaaggcctggtccttttaccgcgccggcatcggcgagttcgtcggcacctttctctttctttacattttcattcttaccggcatgggcggcttcaagtccaccttcaagtgcgccaccggcggcattcaaggcatcgcctggtccttcggcgggatgaacttcgccctcgtctactgcgaccgccggcatcttcggcgggcacataaccccggcggtgaccttcgggctgttcctgggaggaagttgtccctcacagggcggtgttttacatcatcatgcagtgcctgggcgccatctgcggcgcgggcgtcgtcaaggggttccagcaggggctgtacatgggcaacggcggcggcgccaacgtcgtcgcgcccggctacaccaagggcgacggcctcggcgccgagatcgtcggcaccttcatcctcgtctacaccgtcttctccgcccaccgacgccaagaggaacgccagggactcccatgtgccgatcctcgcccctcttccaatcgggtttgccgtgttcctcgtccacctggccaccatccctatcaccggcaccggcatcaaccccgcgcggagccttggcgccgccgtaatttacaaccagcaccatgcctgggctgaccactggatcttctgggtcggccccttcatcggcgctgcgctggctgccatctaccaccaggtgatcatcagggcgatcccgttcaagagtaggtcttaaaggagccgatgctgctgcttcgagatgctgccggtcttgaaaggatggattcgtggctgtttcaaatgatcccctactatgttacgtgcagttccattccattcctctttcaaagttcggagctgcttttatccgagcccagacttgtaattcatctgtaccaattgtgtaatatgccgcgcctctgttatgtgcaattcaaaaacaaaaaaaaaaaaaaaaaaaaaaaaaaaaaaaaaaaaaaaaaaaaaaaaaaaaaaaaaaaaagcaaaaaaaaaaaaaaaaaagcggcc

SEQ ID NO: 73626 - DNA, 1713 bp, Zea mays
  unsure (1)..(1713): unsure at all n locations
  Clone ID: MRT4577_167144C.1
tgtccgggagtcacacaccgctgcttcaagaaaccaccgagagcccaagcgcgcaaggcaggagagagagagagagagcagggagagaagcgtggggccggggagcaaagatggaggggaaggaggaggacgtgcgcctgggcgccaacaagttctcggagcggcagcccatcggcacggcggcgcagggcgccggggccggggacgacgacaaggactacaaggagcccccgccggcgccgctgttcgagcccggggagctcaagtcctggtccttctaccgcgcgggcatcgccgagttcgtcgccaccttcctcttcctctacatcaccgtcctcaccgtcatgggcgtctcccaagtccacctccaagtgcgccaccgtcggcatccagggcatcgccctggtccttcggagggatgatcttcgcgctcgtctactgcaccgccggcatctccggaggacacatcaacccagctgtgaccttcgggctgttcttggccaggaagctgtccttgactagggccatcttctacattatcatgcaatgcctgggtgccatctgtggagctggagtggtgaagggcttccagcaggggctttacatgggcaacggcggtggcgccaatgttgtcgcccccggatacaccaagggggatggccttggcgctgagatcgttggcaccttcatcctggtctacaccgtcttctcggccaccgatgccaagaggaacgccagggattcccatgtccccatccttgccccactgccaattgggttcgcggtgttcctggtccaccttgccaccatccccatcaccggcaccggcatcaacccggctaggagccttggcgccgccatcatctacaaccgggatcatgcgtggagcgaccattggatcttctgggtcggccccttcatcggcgccgccctggctgccatctaccaccaggtgatcatcagggccatcccgttcaagagcaggtcttaagctgccgcgggtgtgctgagacatgcatgccagttcggaaggacgagcgtcttcctgtggggagtgtcttgtctgcccacgcctagtttctctgctgaatctccatctctctttcccttcaagactgctcactgctgcactgctctgttatctgaacccagaactttgtgtactcctgtaccgagctgtgtgtatgttttttttttcttccatcgtgtttgttgcaagggttcccgtatccttttatgcgttgggatcgtggcaagaaagggcagatatcatgtggaaacgtgggtttatctatcagctggatttttcatccaaaaaaaaaaaaaaaaaaaaaaaaaaaaaaaaaaaaaaaaaaaaaaaaaaaaaaaaaaaaaaaaaaaaaaaaaaaaaaaaaaaaaaaaaaaaaaaaaaaaaaaaaacaaaaaaaaaannanannnaaaaaaaaaaaaaanannnnaaaaaaaaaaaaaaaaaagggggtgggctgctnggggggccccagttttcatctccgggttctgggccccttttttttttttttttggggcccttctattcaatcccgggcgcgggtttttcacactttcggctggggaaaccccgggggtccccccctttatacgccctgggggcaacccccctttttgccggggggggtttttgtctttggggccccccccccttgcccttttccccctgtggcccccccctt

SEQ ID NO: 73627 - DNA, 871 bp, Zea mays
  Clone ID: MRT4577_167146C.1
cgctgcttcaagaaaccaccgagagcccaagcgcgcaaggcaggagagagagagagagaggagggggagaagcgtggggccggggagcaaagatggaggggaaggaggaggacgtgcgcctgggcgccaacaagttctcggagcggcagcccatcggcacggcggctcaaggcgccagtgccggtgacgacgacaaggactacaaggagcccccgccggctccgatgttcgagcccggggagctcaagtcctggtccttctaccgcgcgggcatagccgagttcgtcgacaccttcctcttcctctacatcaccgtcctcaccgtcatgggcgtcttcaagtgcacctccaagtgcaccaccgtcggcatccagggcatcgcctggtccttcggcggcatgatcttcgccctcgtctactgcaccgccggcatctccggcgggcacatcaacccggcggtgaccttcgggctgttcctggcgaggaagctgtcgctgaccagggcggtgttctacatcatcatgcagtgcctgggcgccatctgcggcgctggcgtggtgaaggggttccagcagggcctgtacatgggcaacggcggcggcgccaacgtggtggcgcccggctacaccaagggctccggcctcggcgccgagatcatcggcacctttgtcctcgtctacaccgtcttctccgccaccgacgccaagaggaacgccagggactcccacgttcccatcctcgccccgctgcccatcgggttcgccgtgttcctggtccacctggccaccatccccatcaccggcaccggcatcaacccggcgaggagcctcggcgcggccatcatctacaacagggagcacgcctggtcaga

SEQ ID NO: 73628 - DNA, 810 bp, Zea mays
  Clone ID: MRT4577_167147C.1
agctgttcaacaccccatgcccagatccacgctactccggcgaccttgtgcccccacgcggcgagagcgctgccacccatgagcctccctgtatgatgccggcggtcctctccaactccctgcgtgacgtcggcagcgctcctccccacctcccctgcttcccccgccattgctaccaccaccacctcccctgcttccccccactccactgccgcaccaccaccgcaccaccaccttcccccgcgccactgcaccaccatcactgccacctcagaaccgccgccgccgaaaggggatagggccgtgcctcggcctcgctccccgtgacccatccccaccctctgctcccacccgcgcacagacccacccacgccgcatctccccgccaccggacccatcccggcctgggctcctcccgcacccgtgcgaggcgatgatggctggcggcgtcgactattgctagcgcgcaggggagatgccctttgtggcgggcgaccaaaatccccatcatcaccgcttcacgccaatactcagccccttgacctccgacgacctcctgctggtcgccgcggccggatccacacttccaaccttcggatcggtcgtggccctgccttgcctcgtcatcctgcgtgaatcccgctggatcttgcggcgggtggcctggaaattgaggcggattcaggcttgacgaaaagggacccatgcctccgaggcacgccggtgacgagtaacacaagcagggagggagcaccacacgacaagcgccagccatgggctctgcctccctccgcatccctaacctctgcg

SEQ ID NO: 73629 - DNA, 1528 bp, Zea mays
  Clone ID: MRT4577_167148C.1
acagtactccaccattaactatgcttcttctagctctagctaggctcgctggctgcaagaaggtaacacgcgcaggcatggaggggaaggaggaggacgtccgcctgggcgccaacaagttctcggagcgccagcccatcggtacggcggctcaggacacggacgacaaggactacaaggagcccccgccggagccgctcttcgagcccgagggagctcaagtcctgcgtccttctaccgcgccggaatcgccgagatcgacggcaccttcctcttcctctacatctccatcctcaccgacatgggcgtctccaagtcacacctccaagtgcgccaccgatcgggatccagggcatcgcctggaccttcagcggtatgatcttcgccctcgtctactgcaccgccggcatctccggcggacacatcaacccggcggtgaccttcgggctgttcctggcgaggaagttgtccctcaccagggcggtgttttacatcatcatgcagtgcctgggcgccatctgcggcgcgggcgtcgtcaaggggttccagcaggggctgtacatgggcaacggcggcggcgccaacgtcgtggcgcccggctacaccaagggcgacggcctaggcgccgagatcgtcggcaccttcatcctcgtctacaccgtcttctccgccaccgacgccaagaggaacgccagggactcccatgtgccgatcctcgcccctcttccaatcgggtttgccgtgttcctcgtccacctggccaccatccctatcaccggcaccggcatcaaccccgcgcggagccttggcgccgccgtaatttacaaccagcaccatgcgtgggctgaccacgtgagtggaaaacaactttcttctaccttcgtgttgttaactagtttcactgctttagcaaaaaaaaaaattgtttagctcactgttaacagtagtatgaaaagtctaaatttaaatagtgaaataaagcctacttagtttatataataaaactaaactagacagtaattacaaaatataaaagggaattcgatttgattatggaagcctgcccttatccgaagggtgacgcttgctttattgtagtgttgtagtggcagccacccgctaccttccacgacaaggacctgcaatcaataacgtctccctcgcatgctattgctgaccctctcaccgatttgtgccttggcagtggatcttctgggtcggccccttcatcggcgctgcgctggctgccatctaccaccaggtgatcatcagggcgatcccgttcaagagtaggtcttaaaaggagccgatgctgcctgctgcttcgagatgccgccggtcttaaaaggatggattggtggctgttttcaaatgcccccctactatgttacgtggagttccattcctctttcaaagttcggaagctgcttttatccgaacccagacttgtaattcatcagtgccaattgtgtaatatgccgcgcctctgttatgtgcaattcagagttatgagaaaaaaacccccccc

SEQ ID NO: 73630 - DNA, 1124 bp, Zea mays
  Clone ID: MRT4577_167149C.1
taactagcttcttctagctctagctaggctcgtctgctgcaagaaggtaacagtaacagcaggcatggaggggaaggaggaggacgtccgcctgggcgccaacaagttctcggagcgccagcccatcggcacggcggcgcagggcacggacgacaaggactacaaggagcccccgccggcgccgctcttcgagcccggggagctcaagtcctggtccttctaccgcgccggcatcgccgagttcgtcgccaccttcctcttcctctacatctccatcctcaccgtcatgggcgtctccaagtccacctccaagtgcgccaccgtcggcatccagggcatcgcctggtccttcggcggcatgatcttcgccctcgtctactgcaccgccggcatctccggcgggcacatcaacccggcggtgaccttcgggctgttcctggcgaggaagttgtccctcaccagggcggtgttttacatcatcatgcagtgcctgggcgccatctgcggcgcgggcgtcgtcaaggggttccagcaggggctgtacatgggcaacggcggcggcgccaacgtcgtggcgcccggctacaccaagggcgacggcctaggcgccgagatcgtcggcaccttcatcctcgtctacaccgtcttctccgccaccgacgccaagaggaacgccagggactcccatgtgccgatcctcgcccctcttccaatcgggtttgccgtgttcctcgtccacctggccaccatccctatcaccggcaccggcatcaaccccgcgcggagccttggcgccgccgtaatttacaaccagcaccatgcgtgggctgaccacgtgatcatcagggcgatcccgttcaagagtaggtcttaaaggagccgatgctgctgcttcgagatgctgccggtcttgaaaggatggattcgtggctgtttcaaatgatcccctactatgttacgtggagttccattcctctttcaaagttcggagctgcttttatccgaacccagacttgtaattcatctgtaccaattgtgtaatatgccgcgcctctgttatgtgcaattcaaaattatgagacagcgagtcaagcttcaaaaaaaaaaaaaaaaaaggggcggcc

SEQ ID NO: 73631 - DNA, 606 bp, Zea mays
  Clone ID: MRT4577_16714C.1
atggaaggctctttggtcattaggacatcctactgctcagaggtggaaggattccctcatctcttgtggagttgcatgcttcgcatggggatccacaagaagccagaatacgtctggaaagaataccacgagaatggaactgagaagtgctctatggcagtctacctgggagaaagccgaaactacctgaaccaccctcctttccaagtcaccttcaccggacaccgcttctcagaaacttgccaaaatgttgccagaaaagccctccgacagctatgccaaaactacaacagagagaggaaaagacttcaggccctgtcaggaagagatcctactgaggatgaccccaccatcgtctacatggccggatatctccacactctcgataaccactatgttgacctttcctcccactgcacccacctaaactcccgggtggaaagcttagagcaacaggtcaaggaacttaaaaaggagaaggtgtccctccaagaaagtctcgaaatagcagaaggtgaagaggccaacactcgtgaagcctaccgaaccctgaagatggattacgataagaagctaaagaagctcgcccccacgaagaaaatctga

SEQ ID NO: 73632 - DNA, 286 bp, Zea mays
  unsure (1)..(286): unsure at all n locations
  Clone ID: MRT4577_167150C.1
gaggggcgaaggcggcggcnggagnggagnaccgnngcnacgacggcgggcccgcccgggccaccagcaacgaggcgnnggagaaagccnncaccnncaacngggaggagccggggggggnagncancaccnaccgggagacggggaagganaaagagaaaaagaaaagagaccnncaacnncgagaacancaagcncgacgcganngagaacangaacgggaaggaacncgacgggcgnaacaaaaccggaaaccaggcccagacccnaagcggaggcggaggcg

SEQ ID NO: 73633 - DNA, 307 bp, Zea mays
  Clone ID: MRT4577_167151C.1
agacactcactctaaactatatggagacgggggcacttacacaggcacatgccgcacacaactggattttacgaccaggacggggctcacgcagaaaacttggacttaacggggcgttggatttgagggactcctaataaggggaccccaccatcccttaagcgcaaccggtccgggtatggtgttcattattgacactagaactaatcagagcacgtgtggttgaagggaacatgtggtgacggatcctctcacattcacattgttggacgcagcagttacataaagtgtccatgactcttgcgtt

SEQ ID NO: 73634 - DNA, 1157 bp, Zea mays
  Clone ID: MRT4577_167153C.1
gccgtgcatcgcacgagtctcgtgcgccacactttcctacttgcctctacagtctcacattcctcacgcgtcatttgggcgtcgtccaagctccacgctccagagtgcgccacctgtgcggcatcacaagggcatcgccatggtcgcttcgagcggcattgatcttacgcccttcgtctacctgcacaacgccggcattcttccggcgaggcacaatacaacccggacggtgacacttcgggctgttgcctggcgaggaagttgtccctcaccagggcggtgttttacatcatcatgcagtgcctgggcgccatctgcggcgcgggcgtcgtcaaggggttccagcaggggctgtacatgggcaacggcggcggcgccaacgtcgtcgcgcccggctacaccaagggcgacggcctcggcgccgagatcgtcggcaccttcatcctcgtctacaccgtcttctccgccgccgacgccaagaggaacgccagggactcccatgtgccgatcctcgcccctcttccaatcgggtttgccgtgttcctcgtccacctggccaccatccccattactggcactggcatcaacccagctaggagccttggcgctgccatcatctacaacggggatcacgcctggaacgaccattggatcttctgggtcggccccttcattggcgctgccctggctgccatctaccaccaggtgatcatcagagccatcccgttcaagagcaggtcttaagctgccgtggccgtgccgagacatgccagtccgaagaacgggcgtcttcctgtgatgtcttcttgtctgcccacgcctagtttctctgtcgattcctattcgtcgtctcttcagggctggtgctcactgctgcgccgttctgttaaccgaaacaagaactctctgtattcctgtaccgagctgtgcatgttttttttctttccatcgtggagaatttaagttattatatccgtttgctgcaaggtttgccgtctcattttatgcgttgggatgttggcaagaaagggcagatgtcatgtgagaatttaagttaagtgaaatcgattcagggtttaaaaaaaaaaaaaaaaaaaaaaaaaaaaaaaaaaaaaaaaaaaaaaaaaaaaaaagtactctgcgttgttaccactgct

SEQ ID NO: 73635 - DNA, 399 bp, Zea mays
  Clone ID: MRT4577_167154C.1
acactctgacgaacaacagactctgaaactcgtatggtgacctgttcaaagccagccagctctatgataactacgtgtagctgtctctggcactcgtcagcgttaatcatatctagatgactgagcgctggcagaacctgtagcagctgttgttgaggctggtttgcactacgatcgccagagtaagtggcttagacgacaagtaactgccgttgcaagtagtcgccatagttcaccatggttagggtgctcagtgccgataggaatctgcgtctgctgatgcgttgcgacggcttgaacttctagttgtgccaaggatctcctgtcgcaactgggactttgcctagctgtaagaacactcgccgcaattgctcgttgtagcctataggtttgcacagc

SEQ ID NO: 73636 - DNA, 277 bp, Zea mays
  unsure (1)..(277): unsure at all n locations
  Clone ID: MRT4577_167155C.1
naacaatgatatgacgaaatgcttcttttcttagttttctatatgccacataaaaaatctttcgtaaaccaaaagattaaaatgcaatcaaaaagatttgggatatttttttttatcgtgaaagcggctatttgttccccatttttttaacaaaagctctcatattaaccatctagggcatctaaatcctaaaaagggatcgccacaggttaatcaattccacacaaaactgcaatcaaatagtcatacaacatctgcaccaaacttgacatgcttt

SEQ ID NO: 73637 - DNA, 226 bp, Zea mays
  unsure (1)..(226): unsure at all n locations
  Clone ID: MRT4577_167156C.1
gggctaagtaaagatacaatgtcagnggggcgtcagcttcctggttattgggcgtacagaatgacatgtgnaatttttgtcgtcttgttttggttgagccatggttggtgcttgtaacaaaaggatggcttgttgtcagtactacctaccctaccaaaaataaaaaaaaatttatttttatataatataatataatataaatacattttttaatattaatttcaat

SEQ ID NO: 73638 - DNA, 1248 bp, Zea mays
  Clone ID: MRT4577_167157C.1
cattgggtacctcgaggccggccgggtcccagttcccattcggtcactcggaccggacatggcgatgagtttcttctcgcccactaccaccccttcatccgccgcatccctcctccccatccgccgccagtgtgccaccggcccctccgtgtccttccccctcaagccccaccgcttccgagttcatctcaaacctccgcgctcctcccgaatccacaccctctccacctcctccttgaagatccccaccgagagcattctctcttccgtggtctccacctcgaggacccttctttttgtgctcgtcgcaggcctcctctccctctccggcgttcgctcactccctgccctcgcctgcgctccggcgccgacgccgagcccagcgagttggagtggcgcctgatggtggcgcagctgcacgagctcaaaggggacctcgccgaggccgagcgtcacttcagggagctcctggcagaggagcccctcctcgttcgggctctccatggacttgcactgtgtatgcagaagaaacctgagggccctgctgtttttgaaatgcttgagaatgctttgcatgttgtcatgggtcagttagacgttgcgtctgagaaacttcagagagaagggtcccggaggagcgcaacataaagcttttgatcgcacaaatgcatgttgtcatgggtcagttagacgttgcgtctgagaaactacaaagtcttataaatgaggatcctcgggattttcggtctcatctttgccagggcattgtgtatgcacttttagacagaaaagaagacgcagatatgcagtttgatgtatacagaagccttgtgccggatgaattcccagataagagttttatcagtgatgttatactggcggctaggacggagtcacatgatcggctacaaaaggaatttgactctgagtttcaagcgaagaaatgatacattaagttttgtatagatgaggcccaaatactcctggtaggctaaatggttgcatggtaccaatcttacaaatgaaacataacacattaaaagcatagtgaaaagaggcgtctcttatcaggctatcaccaattttcctcatttcctctccctcttagtctctgcagacatttctcagtgaaatataatatagcgaagacaaaattctgcttgaagttaaaagctgtagtatccaaccagatggattgatttgttgatgttcaaatgtagaatttgtgaagcttatgttcaaaaaaaa

SEQ ID NO: 73639 - DNA, 683 bp, Zea mays
  unsure (1)..(683): unsure at all n locations
  Clone ID: MRT4577_167158C.1
ggtcaagactatccgggtcggcccacgcgtccacccaaggtgtcgggcttcgccaaggtggacctcgaggccggcaccgtcgacaagttcatctacggcgacggccggtacggcggcgagccctgcttcgtgccgcgccccgacgcccccgcgggcgccgcggaggacgacggctacgtgctgtgctacgtgcacgacgaggcccgcggcgcgtcggaaatgctcgtcgtcaacgcccgcgacatgcgagccgaggccgccgtcaagctgccgggccgcgtcccgtacgggttgcacggcacgttcatcgccggcaaggagctgcagcggcaggcctagtgtggtgccgttgccgtgtcgtgctgctgctacctcgtcgatcacgaactcgaccaactcacgtacatacactgatacacacaacagacactacagtagctagcttgatagtgacgtggcaactcgattatttaccgcgtacgtagtacagtaatttgttcattattagagcagtagaggccagggccgtgtgggactgatttttggggcagacgccggccctacatatacatgtatatatacaaaaacatataggaatcaaaattgttgaattttaatttttgtgcagaaaaaaaaaaagcggattttttgtcagcagactagtgctgnnnnncccgggaatt

SEQ ID NO: 73640 - DNA, 909 bp, Zea mays
  Clone ID: MRT4577_167159C.1
cattgggtacctcgaggccggccggggtcccagttcccattcggtcactcggaccggacatggcgatgagtttcttctcgcccactaccaccccttcatcctccgcatccctcctccccacccgccgccagtgtgccaccggcccctccgtgtccttccccctcaagccccaccgcttccgagttcatctcaaacctctgcgctcctcccgaatccgcaccctctccacctcctccttgaagatccccaccgagagcattctctcttccgtggtctccacctcgaggaccctcctttttgtgctcgtcgcaggcctcctctccctctccggcgtccgctcactccccgccctcgcctgcgctccggcgccgacccagcaaccgcaagaaaccgaagaacaagaatccaaagagaagaagcagcaagaagaggctggtgagaggaaagaggacgtgttgccgcagctggatgaagaggacgaggaggatgacgaggtgcggatgtattcggcgattctgagccgcaactctggcgacgtggacgcgctcaagtgcgctctatacgctaagatgaggcgcgcggattggggcggggcgctgcggtacgcgcgacggctgcgcgacgccgagcccagcgagttggagtggcgcctgatggtggcgcagctgcacgagctcaagggggacctcgccgaggctgagcgtcacttcagggagctcctggcagaggagcccctcctcgttcgggctctccatggacttgcactgtgtatgcagaagaaacctgagggccctgctgtttttgaaatgcttgagaatgctttgcagcttgcaacgcaacttcagagagaaagctcccggaggagcgcaacattaagcttttgatcgcacaaatgcatggtgtcatgga

SEQ ID NO: 73641 - DNA, 416 bp, Zea mays
  Clone ID: MRT4577_16715C.1
ggggggccgcgggggggcacgcgtccgcgcccatgacacgctcctggggtgacctctcctggctccaactcatacggggtcaacccggggtctggatccgggggccccccatttccatccggcgcttactcaggggcccgtgaactggaggttttggtgtgcggggagggtaatccagccagcgccttagatgaattcacgcctggctcgggcggggaaactggggtgagcgcacggcaacgggggcggggccctagacggggacctacctcaagaaaagggggacacgctgattagctcctcaggctgcaacaccatgtactggtcgatcaccaggggcccgagcgggatctaccagtacaagagcgagggggcgggcccggatggagggggcactggggggctctggcttgatc

SEQ ID NO: 73642 - DNA, 463 bp, Zea mays
  unsure (1)..(463): unsure at all n locations
  Clone ID: MRT4577_167160C.1
gtaccctccngggcctgccggggnactgactactataattttggcacaaaaaaaaaaaaaaaaaaaaaaaaaaaaaaacaaaaaaaaaaaaaaaaaaaaaaaaaaaaaaaaaaaaaaaaaaaaaaaagaaaaaaaaaaaaaaaaagaaaaaaaaaagaaaaaagaagaaaaaaggaaaaaaaaaaaaaaaagattacaaattaaaaacgcgttcttgcccccagtttttaggggcaattcctggggggggttatggggccgttgacttaacttgacttggttgggttttttggccgattttcaccccggaaaccttgtgcaccaatgtttatttctgaaacgcgtcggggggccggggggggggcccctacggaattggggtgtttttctgtttgtggggctgttgcatgggcgggatttctggggtgggctttttttgacgggattagacttaattaaaggg

SEQ ID NO: 73643 - DNA, 514 bp, Zea mays
  unsure (1)..(514): unsure at all n locations
  Clone ID: MRT4577_167161C.1
cccacgcgtccgctgacgcgtgggggcggcgacgaccacgacgacaatggcgcggtgctctacgtgcgatcgtttctcgaggttcatggagacggacgagttcgcggtgccgccatcacgtcccgcgctcgtgcacccggacgccgacggcgttcgaaccccgtcggccctcggcctgctctcccccgaggacccgccaccggcgttcatggagcgagattggcgacacggcggcgataacacggccgcgtatccagggtgctcgccgttccagccgtccgcggccgggcgcccggtctcgatcagcctgccggcgtcgccgacaggcgggttcgacatctccagcaggacggaggcggagctgcagcgggacgccgccgccgtcacggacgcgccgccgncgcggatgatgatgctgccgccgttcgccccggcgacggccatggctctcgagcagcctggcaggtggtgttccggtcccagccgatcccgctgcgccgcggtaggtgacgga

SEQ ID NO: 73644 - DNA, 297 bp, Zea mays
  Clone ID: MRT4577_167162C.1
tggacctcagcggcggaatccctcgatttgaaagtaaatactgatctcctgatccgatggtatggaaaggagggcgccgagggtctcggggccctggtgactctcgggctatcctcctctgcgctgcgccggccccgccgcaaactgcggctgccagccaaacgtctgctgcagcaagttcggctactgcggacgaccgacgagtactgcgggacgggtgccagcgggcccgtgccgctcgggcggcggcggcggtggtgcgaacgtggctagcgtcgtcaccggctccttcttcaa

SEQ ID NO: 73645 - DNA, 871 bp, Zea mays
  Clone ID: MRT4577_167163C.1
gccgggtcgcggatcacacctcgccccaattcggcaattcgctacacgtacacacactgccctccaccgacttcgtcgtgtcgtctcaacgacatccacatccacccgagtccgaccaccccaacagttcaccccctaatccccgcgccaccgcccgctactgcctcgccgccgatggactgcccgcagctgaattctcctttgccggtgaactgggacgcgcttgacgcccttgtcctcgacttcgcgagatccgaccgccttgtggcccctcccactgcatccgcctccccctcgccgccgtcttcaccctcctctactaccaccgtcacctcctcggcgccatcctcgtcttcgttgtcctcttcctcgtcctacaggtcgcgtctccttatccgctgcgcccgccgcgcgatcgagctgggagacgtcgacgcggccctcgcgctcctccgggcccgcgcgcccgcggcgctcgccgaccaccgcctcctcttccacctccacaagcagaggtttgtggagctggtgaggaggggcacggaggcggacagggacgcggcgctcgattgcctccgcacggcgctcgcgccctgtgcgctcgacgcctacccggaagcttacgaggagttcaagcatataatgcttgtgttgatatatgacaaagaggatcaatcttcccccgttgttaatgagtggtctataaagaggaggtttgaacttgctggtttactatcatctatactaagagctcatttagaagcttatgaccctgttctttcgctgacgctaagatacttaataagcattcacaaggcattttgcacgcgcccagggattcaatcacctatatctgatctcactgaacgac

SEQ ID NO: 73646 - DNA, 419 bp, Zea mays
  Clone ID: MRT4577_167164C.1
gggttgggccaatccaaggcaaccagcattgccattccctgccacttaacaaacacgggaaatccaacctttatttgtaaaaaaacaagggccttattttttttttttccagggccacaaaaaaggcaataatgtttacagctgcttccccttaaaaacaaaacaaacaggcccaaggcatttaaacccccattccgttctaacaaccaattcttggtggtattaatggccccccggacaaaaccttcctttgttgtataacccctcgaaaaaacatccgtaaatgcccccataaaattaaaggcctcttgcaaaacacctgacgaggtcatgttttaaaaccataaaagcaggtccttgaacagccccaccattttctttatgtggcccaacttttttttaattttggatctcccatt

SEQ ID NO: 73647 - DNA, 654 bp, Zea mays
  unsure (1)..(654): unsure at all n locations
  Clone ID: MRT4577_167165C.1
ccggccgggctcttccatatgccgatctcccggacacggtggcctcccgctgccggagcgccatcgccgccgcagcgagcggcgcagggtacggtttccgccgtggcgccgaagcgtcgacccgtcgtgggttcccgttctcggcccgcgaaggaggcggaggccacggctcgacttccgtctgcggactactactcgtaaaggccttctcacttgctccccctttctcgtgctctgtgtttatgcaaatgtccctcagggtcgtgctactgcatcgggaactgcctagctggttccgggttcacgaattaagcggtgctggtgactcctacgtgcgcttctttatatgcacgcgtgtgcccaattgtgggtgcttaattgatactggcaactgacgagggtagtctctaacgtacatgactactttgagatgttttaggtcttgcagtttcttgtttgcttttccttgtagctcgctcagagtttgggaaaccacattgcatgtgtccaggaccaatgtggcaatgtgtccaaggccaagacgtttctgccagatgtcttatgtgctttgtaaactaatgaggattagttttcgaattgttgacaatataatnttctgtttttcgggaaaaaaaaaaaaaaaaaggggcggcc

SEQ ID NO: 73648 - DNA, 933 bp, Zea mays
  Clone ID: MRT4577_167166C.1
ggggatccgaccggcggcttgagtttttgccgctcgatctcaatcctgcgctggctgccaccgcgcgagcgaacgaatcccttcctccattccagtccacagttccacacgagctagctagctagaacacccgcgccaccgtccgcgcgccgcgccgatatcgatggccggcagtaccactaccaccgccgtgtgctccatgtgcggcgatgtcgggttccccgacaagctcttccgctgcgcgcgctgccgccgccgcttccagcactcctactgcaccaactactacggcgacgcggccccggcccagctggcgggcgccggcgtgtgcaactggtgcctccgcgacgacgtcggcggcgggacgaagaagcggcagcactcttcggcgtcggcggcggcggcggcggcatgcggcggcaagcagccgcaccggcaggcggaagaagaagaagaagcagcagcagcagcaggctggaggaggagcgcgcagcatcagccagcgtcgtcgtcgtcgttcccgcccagcggcgggtgcagcaaggtcaccggcggcagcgagcacgccgagggcggccggaggccccgccggtacaagctcctcaaggacgtgctgtgctagcgagccgccggctagctagctagccagccgccagccagccaggtgctcgtacgtcgtcctcgtcgtactatatccacagagagggactaccggcctaaagggcgcttgattgatggaactggattgcattggctatgtgcccatatatccaagaaatgaactttgatgagtctcatgatccacgtatcttaatgcataataaactcggtttgtggaggtctttaatgttgtaatattagagaaataagtgacatgcttccttcatatttaaataaattaaatattctaattccgaaaaaaaaaaaaaaaaa

SEQ ID NO: 73649 - DNA, 230 bp, Zea mays
  unsure (1)..(230): unsure at all n locations
  Clone ID: MRT4577_167167C.1
atcagcaattactttcatataagagatgacagattattcaaaccttagatggtatgtgcaccagttgtgctcatgcactcacactcacacagctaacttattaagggcttatcatgtttggtggtataaggggggggggggggggctcccaaattanttcacacgggtcgcgaccgtctgtgtcccnacctccncccacctnngtncctccgccccgggggcctccccct

SEQ ID NO: 73650 - DNA, 264 bp, Zea mays
  Clone ID: MRT4577_167168C.1
tcttcctggccgccctttttttttttttttgggtttttttttttatatgaagcaaacccttttgatttcaattcatccaggacaacttttgttttggatattataatagtacatagatagtacccaacatgggtaactaatttcgccgcacgcctagcacttgatctccttaagaccattagagaaatttagttatgtcttattagaggcaccatccttttaatatgcgaataccacaaacacaattatctttttggtctttcc

SEQ ID NO: 73651 - DNA, 468 bp, Zea mays
  Clone ID: MRT4577_167169C.1
aggtaaaacaggccttttaaacgcaacacccttttaggcaggggaaaaaaaagggcccgaaaaaaccggggagcctggggggccgaaagcgctaaaaaacgggggggtttataaaaataaaacacacacggggcccggagcccaccagtttcgagggtgccgggcaaacaaaattcgctggggggtttttggaagccccgaataaaataattttatacacaggaattggggagggagccttgtttggaaaaaaaaacggggggatcctttgggaagggggcacaggggggtggtatccgttttgggggggaatttgggggattcggtcccaaaaaggcctttggggaaaggttccatgcgtaggggtttggaagggaaagaaggggccccattaagagggggtccaagggaaaaaaaatattcctcccgggccacagtgtacgctgggggaaagcccttggaataaaa

SEQ ID NO: 73652 - DNA, 269 bp, Zea mays
  Clone ID: MRT4577_16716C.1
ggcattagtgctagatactagaaattttcatttccctgttgctattgatcagagagacaggcgttaattaaaaacaaatgtaagaaaggaaagttctcaccctgttagtcggtatctgtgtcctctgttactgaatcctctttggtctccctgttctggctggcatctgctctgctgctccactcttctccgtgtgacatcctgacttataccgacattatcatcgtacaatcttctcttttctcgtcatcttatgtggtgcaggtctc

SEQ ID NO: 73653 - DNA, 504 bp, Zea mays
  Clone ID: MRT4577_167170C.1
tcgttgtgcggatttttgattttgaagctaagaccgaccaccgtcaagctatggaggagggtcttacacgtgagttccagactcacaaagctttgcttagaccatagccagcttgcaatacatccccgcgctttaagggtagaaattacgaaggtaccttgctgcacctggagcataaaccgactgttggacattgccttgtttatgcggctttatactcgtctgtggctccccttagagatggtggtggactgaccactgtggtgggtttacattgcctatcactcttactagacaatctttaagtgagttcttgttcaagctcccggtctctttgccggatagaaaaccaccagtcctattgagcatgcgggtgatctggctggatctgaactcggggcgcgcctagcgcttagggaggagctggactatctccgggttgtggcagaccacgtcctcttccatgtgttccgtagacgtggtccggatactccacaacgccct

SEQ ID NO: 73654 - DNA, 641 bp, Zea mays
  Clone ID: MRT4577_167171C.1
ccctccttttttttttttttttttttttttttttgggggtttttttgtttttttttggtgtttttctctctccctggcttgtcgaaaaaagggcccaacaatggacctcccccaacctagcagccttggaagggggggtcacccccccggaggaaaaggacccccccggacccaaggcccgcccggggaaccccgggggaaaccccccagttaagcccccaaaattcgaacaaggccaagaaaccagggaaccttttttcccgggggggacggcactgggacccaccccctctccaacccaaaaggcgggatcgccgcccccggcgggcccctatggaggcttattctcacccccccccggggggcccccccccaaagggggcgcaagggaaaaggccaaggggtttcccaccccccccccccccccggaggggggggggcggccacaatggccggcccccccgggtgggcgccggcgtgccaaaacacaccacatgggggaaggagcctggcccacccagcccttaaaaccagggggccagaggcccccccgggggaggccccgcgggggggggagaaaacaaaagggtgggtggcccccacaaggacccccaaggggtacggggcaaaacccccccccc

SEQ ID NO: 73655 - DNA, 1987 bp, Zea mays
  Clone ID: MRT4577_167172C.1
gggcactcggtccacactccgaccctcagtcctcactcaaccactgcccgccagctagctccagcagctagatcaggtcgaccgtcctcccgatccacccccgtgctccgatccaccacacgagctggctagctagccagagcggcggcacgcaggagatgatgagcgggaggctgaacgcggccacgcccgcctcgccgggggacgacttctcgttcgcgcccatgcagatgccgccgccgccgccctacgtcgggttcgagcacggcggaggcggccagcgcggcgccggagcgatgcaggcgcagcagcaccacctctacgacggcctggacttcgcgtcggcgctccagttccagcaggaggcgtcgtcccactcccaccaccaccagctgctcacgttgccgtccagcctgggcccgatggcgccgtcgatgccgatgccgatgccgatgccgctgccgatgcagatgcccgtgcccggtgaccacgtgtaccacccggcgctcgggacgatggtgaagcgcgagggcggcggcgcggacggcgggaggatcggcctcaacctcggccgccgcacctacttctcccccggggacatgctggccgtggaccgcctcctgatgcggtcccgcctcggtggcgtgttcgggctcggcttcggcggcgcgcaccagcaccaggtcccgcgctgccaggccgagggctgcaaggccgacctctccggcgccaagcactaccaccgccgccacaaggtctgcgagtaccacgccaaggcatccgtcgtcgccgccaacggcaagcagcagcgcttctgccagcaatgcagcaggtttcacgtgctgtcggagttcgacgaggtcaagaggagctgcaggaagcggctggccgagcacaaccgccgccgccggaagccggccaccaccgcctcatccaaggacgccgcgtcgccgcctgctgccaacaagaagaccaacggcggctccatcacatgctcttactccactgaaaacaagaacgacgacctgagctgcagggccaagtcgaccatgtcgtccaacacgagcagcgtgatcagctgccagctggaccagcccggcaacaagcaccagctggcgaggccgacgctgactctcggcgcctcgcaggacaacaaggaccaccagcaacagctgagcaccatgctccatgtccaagcggccggcggctaccaccaccaggagcagcagcacttcataacctctctgcaggttcacaacaacggcggtagcggcaacaacaacaacaacaacataatactgtcgtgctcctcggtgtgctccagcttgccgccgcccccgtcggcgcccaacggagaggtctcggaccagaacaccgccgccaacaatggcaacgggaacatgcataacctgttcgaggtggacttcatgtagaccgtggagatcgatccaaagcaagctaagcaagcacacaggagtacgttcttctggcaagctaggtgtccttggtgtgtaaaaggaataggagagagagagcaaaaaaggtatgaagtgggtggagaaacaaggagagaaagagagagagaagggtgcaagtgcaaggattccacccatccatcacactccatatcagtagcagcaagctgcagcctgcaggtctagcaaaggtagctacgtaccctcttgtttgcaaggttccatggctatagcaaagccatgcatccgggccggatggatggaaggcccccattacagtggctagctgcctctctcaaccagtctacctcgatctactgcgctgctgctgcagctgcatccatcgcaagcctttctacctttccatttcaagcgggggggaatagttaacagtggctgtgtttcacttgtttttctccactagtttttcttttcttgttgcaaggtgcacgagggtgcagtgtgtgtcgtactaataccaaactacctgttcaaaaaaaaaaaaaaaaaaa

SEQ ID NO: 73656 - DNA, 209 bp, Zea mays
  Clone ID: MRT4577_167173C.1
atcaaagcatgaacgctaatgtcatgctgtcaccgcacaaacactttaaggaggggttggttgtcttgtttgtctcatctacgcaactttaccagctgacgaattcatccatgaatagtcttgaccacttatgaatcatcataacatcctttaatagaaatttgataaccattctgatgttttgtatgccaaatttgaagtaaatagac

SEQ ID NO: 73657 - DNA, 1378 bp, Zea mays
  Clone ID: MRT4577_167174C.1
attgggtacctcgaggccggccgggctgtatatcacagtcgcagacacacaccgctgcttcaagaaaccaccgagagcccaaccgcacaggcaggagagagagcagggagccagggacagtagcgtggggccggggagcaaagatggaggggaaggaggaggacgtgcgcctgggcgccaacaagttctcggagcggcagcccatcggcacggcggcgcagggcgccggggccggggacgacgacaaggactacaaggagcccccgccggcgccgctgttcgagcccggggagctcaagtcctggtccttctaccgcgcgggcatcgccgagttcgtcgccaccttcctcttcctctacatcaccgtcctcaccgtcatgggcgtctccaagtccacctccaagtgcgccaccgtcggcatccagggcatcgcctggtccttcggagggatgatcttcgcgctcgtctactgcaccgccggcatctccggaggacacatcaacccagctgtgaccttcgggctgttcttggccaggaagctgtccctgactagggccatcttctacattatcatgcaatgcctgggtgccatctgtggagctggagtggtgaagggcttccagcaggggctttacatgggcaacggcggtggcgccaatgttgtcgcccccgggtacaccaagggggatggccttggcgctgagattgttggcaccttcatcctggtgtacaccgtcttctcggccaccgatgccaagaggaacgccagggactcccatgtccccatccttgccccactgccaattgggttcgcggtgttcctggtccaccttgccaccatccccatcaccggcaccggcatcaacccggctaggagccttggcgccgccatcatctacaaccgggatcatgcctggagcgaccattggatcttctgggtcggccccttcatcggcgccgccctggctgccatctaccaccaggtgatcatcagggccatcccgttcaagagcaggtcttaagctgccgcggcagtgccgagacatgcctgccagtccggaaggacgagcgtcttcctgtgggggggaatgccttgtctgcccacgcctagtttctctgctgaatcttccatctctcttcccttcaagactgctcactgctgcactgctctgttatctgaacccagaactttgtgtactcctgtaccgagctgtgtgtatgttttttttcttcttccatcgtgtttgttgcaagggttcccgtctccttttatgcgttgggatcgtggcaagaaagggcagatatcatgtggaaacgtgggtttataactatcagctggatttttcatccaagtggaatcgctcccgaattttctttt

SEQ ID NO: 73658 - DNA, 690 bp, Zea mays
  Clone ID: MRT4577_167175C.1
ggggctcggccgggagccttcgcagaatcgcagcgcagcgcacacgcacgaacggccccgagggtttagagcccaacttctctcttcacatcgccgcgaagccagctccccgatgcgatctggccgagggaagatggcgactccgccgccgccaatccgccccgccgccgcgctcctcctcctcgtcctcgctggcgtcctcgcctccgccgcgagcgccgatctcgtcatctccaaggcagatcggagggttgatctgacctcgcatatcgttcgcgtcctcgcttccctcaaggctgaaaatgttggaccagaccctgtctctcaagttttactggcttttcccaatattcaatccaagaacttggcagctattagagcattcggcagtgaaggaaaagtgaagggtcaaagtactgttctgccaattgaagttgttcaaccttctggagctcccccggagctgacattcttttcagcattgttgcccaaacctctggaaaagggaaagactctgtacttggatgttctgactgtgttcacacactctcttcaaccattcccagaagaaatcactcaagccgaagcacagcttggtgtctatcaggatagtgctcactatctgtcaccttaccctgttacggctcagacacttgctatctgattgccctgtggggagggttgaatcct

SEQ ID NO: 73659 - DNA, 1425 bp, Zea mays
  Clone ID: MRT4577_167176C.1
gccaacaaccatcccgctcctcctccctccgtcaggctgtcactgtccccctcaccgccgccgtcctcgtcaccacacctcacccgttgctcccactccttccagaaccacctcctcgccaccgtggctgcctgccctgcccgctataagactcttcactcccgctgcgacgcagtcctcacaagcaccagaccaattaactagcttcttctagctctagctaggctcgtctgctgcaagaaggtaacagtaacagcaggcatggaggggaaggaggaggacgtccgcctgggcgccaacaagttctcggagcgccagcccatcggcacggcggcgcagggcacggacgacaaggactacaaggagcccccgccggcgccgctcttcgagcccggggagctcaagtcctggtccttctaccgcgccggcatcgccgagttcgtcgccaccttcctcttcctctacatctccatcctcaccgtcatgggcgtctccaagtccacctccaagtgcgccaccgtcggcatccagggcatcgcctggtccttcggcggcatgatcttcgccctcgtctactgcaccgccggcatctccggcgggcacatcaacccggcggtgaccttcgggctgttcctggcgaggaagttgtccctcaccagggcggtgttttacatcatcatgcagtgcctgggcgccatctgcggcgcgggcgtcgtcaaggggttccagcaggggctgtacatgggcaacggcggccggcgccaacgtcgtggcgcccggctacaccaagggcgacggcctaggcgccgagatcgtcggcaccttcatcctcgtctacaccgtcttctccgccaccgacgccaagaggaacgccagggactcccatgtgccgatcctcgcccctcttccaatcgggtttgccgtgttcctcgtccacctggccaccatccctatcaccggcaccggcatcaaccccgcgcggagccttggcgccgccgtaatttacaaccagcaccatgcgtgggctgaccactggatcttctgggtcggccccttcatcggcgctgcgctggctgccatctaccaccaggtgatcatcagggcgatcccgttcaagagtaggtcttaaaggagccgatgctgctgcttcgagatgctgccggtcttgaaaggatggattcgtggctgtttcaaatgatcccctactatgttacgtggagttccattcctctttcaaagttcggagctgcttttatccgaacccagacttgtaattcatctgtaccaattgtgtaatatgccgcgcctctgttatgtgcaattcaaaattatgagacagcgagtcaagctttaagagttcatcccaaaaaaaaaaaaaaaaaaaaaaaaaaaaaaaaaaaactcgagggggggccgcgggtaccc

SEQ ID NO: 73660 - DNA, 2208 bp, Zea mays
  Clone ID: MRT4577_167177C.1
cattgggtacctcgaggccgctccctccctccctcccccctcttcttttcttcggctcttccgccgcctccacgcggcctacgccacctccccctcacctcccgccgtgcgccccgatccctcgccgcgacctcatctcgccgaggactggatcgccggagggacatcgtgggtgggtgggtgtgtccttcgcacccatgcggcgttagctgatgacgagctcgcctgagaggggagaagcaccacctgcgccgccacgcgattcaccgtgcgaggacgccgccccagctgccgccgtcgttgcctcttcctcctctggctccgagcgccaggaagacggcggctccaggcagcccaaggcctctgtcctgtccggcatcttcgcgccccctctcgccatattcgaggggcagcggcaggactcgtcgccgccgtgcgacgccagctcgacaaagccgccctcggggtcctatgcttggtccaggattctgaggaggttcgtgggcagcggctccatgtggcgtcttctgggctgcgccagggtcctgacctccggtgacgtgtggttccttggtaaatgctacagggtgtcgcccgaggaagaggagtctggcggctcggattctgacatcgagcatgcgggtgcgtttctggaagatttctcttcaggatatggaccacttacaatcgagcatcgaaacaaatgtataaacaggatgatggactgggttgttctggcagtagcatggccaatgacgacgaccttgatggctctggtgaagcagaagagtggcagatcctttagacgaggctaagacatgttgggctgaagaaaaaaaaacttgcattgaaaatgttgtctgaatgccctcgtctgcgtgtgaatagaggggattatttgtgtgatctcggggtggaaatgttcagaacatacactcgtagtcgtggatgataataattaaatgtatttattattccaaaaaaaaaattaagtcacagacacacaccgctgcttcaagaaaccaccgagagcccaaccgcacaggcaggagagagagcagggagccagggacagtagcgtggggccggggagcaacgatggaggggaaggaggaggacgtgcgcctgggcgccaacaagttctcggagcgtcagcccatcggcacggcggcgccgctgttcgagcccggggagctcaagtcctggtccttctaccgcgcgggcatcgccgagttcgtcgccaccttcctcttcctctacatcaccgtcctcaccgtcatgggcgtctccaagtccacctccaagtgcgccaccgtcggcatccagggcatcgcctggtccttcgggaggatgatcttcgcgctcgtctactgcaccgccggcatctccggaggacacatcaacccagctgtgaccttcgggctgttcttggccaggaagctgtccctgactagggccaccttctacattatcatgcaatgcctgggtgccatctgtggagctggagtggtgaagggcttccagcaggggctttacatgggcaacggcggtggcgccaatgttgtcgcccccgggtacaccaagggggatggccttggcgctgagatcgttggcaccttcatcctggtctacaccgtcttctcggccaccttgccaccatccccatcaccggcaccggcatcaacccggctaggagccttggcgccgccatcatctacaaccgggatcatgcgtggagcgaccattggatctttctgggtcggccccttcatcggcgccgccctggctgccatctaccaccaggtgatcatcagggccatcccgttcaagagcaggtcttaagctgccgcgggtgtgctgagacatgcatgccagtccggaaggacgagcgtcttcctgtgggggggaatgccttgtctgcccacgcctagtttctctgctgaatcttccatctctcttcccttcaagactgctcactgctgcactgctctgttatctgaacccagaactttgtgtactcctgtaccgagctgtgtgtatgtttttttttttcttccatcgtgtttgttgcaagggttcccgtatccttttatgcgttgggatcgtggcaaaaaagggcagatatcatgtggaaacgtgggtttatctatcagctggatttttcatccaagtggaaccgattcagaaaaaaaaaaaaaaaaaaaaaaa

SEQ ID NO: 73661 - DNA, 1647 bp, Zea mays
  Clone ID: MRT4577_167178C.1
ccttgctcactctcctcaccactaccctgacctgacctgctcccaagctccctctgcctgcctttataaatcaccggggcagagcgcctcactgacacacgccgctgctccaagaaaccaccgccgagcccaaccgcacaagcgcgcgaggcaggagagagagagagagagagagaggcggggagcaaaacaatggaggggaaagaggaggacgtgcgcctgggcgccaacaagttctcggagcgccagcccatcgggacggcggcgcagggcgccgctgacgacaaggactacaaggagcccccgccggcgccgctgttcgagcccggggagctcaagtcctggtccttctaccgcgcgggcatcgccgagttcgtcgccaccttcctcttcctctacatcaccatcctcaccgtcatgggcgtctccaagtccacctccaagtgcgccaccgtcggcatccagggcatcgcctggtccttcggaggaatgatcttcgcgctcgtctactgcaccgccggcatctccggaggacacatcaacccagctgtgactttcgggctgttcttagccaggaagctgtccctgactagggccctcttctacattatcatgcaatgcctgggtgccatctgtggagctggagtggtgaagggcttccagcagggactttacatgggcaacggtggtggcgccaatgttgtcgcacctggctacaccaagggtgatggccttggcgctgagattgttggcaccttcatcctagtctacaccgtcttctcagccaccgatgccaagaggaatgccagggactcccatgttcctatccttgccccactgccaattgggttcgcggtgttcctggtccaccttgccaccatccccattactggcactggcatcaacccagctaggagccttggcgctgccatcatctacaacagggatcacgcctggaacgaccattggatcttctgggtcggccccttcattggcgctgccctggctgccatctaccaccaggtgatcatcagagccatcccgttcaagagcaggtcttaagctgccgtggccgtgccgagacatgccagtccgaagaacgggcgtcttcctgtgatgtcttcttgtctgcccacgcctagtttctctgtcgattcctattcgtcgtctcttcagggctggtgctcactgctgcgccgttctgttaaccgaaacaagaactctgtgtattcctgtaccgagctgtgcatgttttttttttctttccatcgtggagaatttaagttattatccgtttgctgcaaggtttgccgtctcattttatgcgttgggatgttggcaagaaagggcagatgtcatgtgagaatttaagttaagtgaaatcgattcagggttttcttggtttcagtttctaaaaaaaaaaaaaaaaaaaaaaaaaaaaaaaaaaaaaaaaaaaaaaaaaaaataacaagaacaaaagcaaaaaaaaaaaataaaaaaaaaacgaaaaaagaaataaaaagggggggctcttttagaggttcaaagtttacttacgcttctatgcaatgtgaaaacttttatatgaggtaccttaaattcaattcatgggccccgttttaacaagctcggaattgggaaaaccct

SEQ ID NO: 73662 - DNA, 1779 bp, Zea mays
  Clone ID: MRT4577_167179C.1
ccatcccgctcctcctccctccgtcaggctgacactggcccccctcaccgccgccgtcctcggcaccacacctcacccgttgctcccactccttccagaaccaccacctctcctcgccaccgtggctgccctgcccgctataagactcttcactcccgctgcgacgcagtcctcacaagcaccagaccaactagcttcttctagctagctctaggctcgtctgctgcaagaaggtaacagcgcaggcatggaggggaaggaggaggacgtccgcctgggcgccaacaagttctcggagcgccagcccatcggcacggcggcgcagggcacggacgacaaggactacaaggagcccccgccggcgccgctcttcgagcccggggagctcaagtcctggtccttctaccgcgccggcatcgccgagttcgtcgccaccttcctcttcctctacatctccatcctcaccgtcatgggcgtctccaagtccacctccaagtgcgccaccgtcggcatccagggcatcgcctggtccttcggcggcatgatcttcgccctcgtctactgcaccgccggcatctccggcgggcacatcaacccggcggtgaccttcgggctgttcctggcgaggaagttgtccctcaccagggcggtgttttacatcatcatgcagtgcctgggcgccatctgcggcgcgggcgtcgtcaaggggttccagcaggggctgtacatgggcaaccggcggcggcgccaacgtcgtggcgcccggctacaccaagggcgacggcctcggcgcccgagatcgtcggcaccttcatcctcgtctacaccgtcttctccgccaccgacgccaagaggaacgccagggactcccatgtgccgatcctcgcccctcttccaatcgggtttgccgtgttcctcgtccacctggccaccatccctatcaccggcaccggcatcaaccccgcgcggagccttggcgccgccgtaatttacaaccagcaccatgcctgggctgaccactggatcttctgggtcggccccttcatcggcgctgcgctggctgccatctaccaccaggtgatcatcagggcgatcccgttcaagagtaggtcttaaaggagccgatgctgctgcttcgagatgccggtcttaaaaggatggattcgtggctgttttcaaatgatcccctactatgttacgtgcagttccattcctctttcaaagttcggagctgcttttatccgaacccagacttgtaattcatctgtaccaaatgtgtaatatgccgcgcctctgttatgtgcaattgaaaattatgagacaaaaaaaaaaaaaaaaaaaaatctactgacgagctcgccatggcctccctctcctctgccgccgtcaccgccccttccttcgccgcaccagcgccagcccgcgccgtggtcagaaggaggtccttcaccgtgcgcgcctctctccgcaaggccaccggcaccgccgccgtggcaatggctgccagcgccctgcttgccggcggtgccatggcccaggaggtgctgctgggcgcaggcgacggcgggctcgtcttcgagcccagccagttcaccgtcaaggccggcgacaccatcacattcaagaacaacgccggcttcccgcacaacgtcgtcttcgacgaagacgaggtgccgagcggcgtcgacgccaccaagatctcgcaggaggagtacctcaacgcgccaggcgagacctactccgtcaccctcaccgtgccgggaacctacggcttttact

SEQ ID NO: 73663 - DNA, 1017 bp, Zea mays
  Clone ID: MRT4577_16717C.1
cccacgcgtccgcccacgcgtccgagctacaagactggcttcgcgtcgggcgctgctgggaaaaaaaaaaaagctcctgcgcgccatactccctcttataaatgcatgcccccctcccttctcggcaccattaacattgatcgaccgaagcaattacaaactctactcagctctctcatcatcagctagtggtctcgaccgcggctcatcactgccgcgccggcgttactgaagaacttgcttgtgagttgtgacaaattaatataggggcgactagctagctatagccagctggtaactgaacgaagaagaagagagcagagcttcccgcgcgcgccatgggaggcaagtcgtccttcttctgccccatcttcagcttcctgcgcaagtcgaggcggtacgacgacgacatgagcgactgggacggcgggtacgcgcgcaaggtgcgctccagcgacgaggactacggcggctggtgggtcggcgagcccgacgtcgacagcaaggcctccgacttcatcaacaacttccaccagaagaattgaagggtcgcgttctcggctagctgcgactgctaccgcttccccacgccagcatagcatgcaatatgcatatatatcgtcgacgacgacgcgcgtgcacggccggcagcaccaccgcccgccgccgcgccggtccacgctatgcatgcatgcagctcctctccatatatatatacatatatgcagctctcgtcgttacatttattactaggttccttgatcgatgctcttatatgtcgttaatgtatgtttattatacatgtcgtgctcatttaatatatacagagagggtgatgaataattcgatcgatctgctggacagacctagctagctagatcgatcgtcgctagtttgttcgttccgtgtgcgcgcgctgtatgtacgtgtatgtgtgtgtaaagaggcatgcatgcatagggacgatggagacgcatgcatgtgttgtacgtacatcgcacattctcatgtacatct

SEQ ID NO: 73664 - DNA, 391 bp, Zea mays
  Clone ID: MRT4577_167180C.1
actggcttttttttttttttttttattgataactaattatttacttgacttagcactttataccaatccataaactagtaacttttgataatatacaatttcttataaactttcggtaaattatatatttatgaattgaaagaaaaattttcataaaaataaaaacaaatctaattaaaatactgaaatatttcatagaaaattcaaaatttggatggttaggcgggtggaatattagactagcctagcagctcttgattaatgtcgagttctccacgccggcggtttcattttttgtgcttaacttgccgttcaattgcagccctggttgacgggcccctccctatagcgggcgcgaatatcctcgctctctatcattcgcgccggcctt

SEQ ID NO: 73665 - DNA, 1321 bp, Zea mays
  Clone ID: MRT4577_167181C.1
actcccctcacgtcctcacccgtctgctcccactaccttccagaacctcctcctcgccaccgtggctgccctgcccgctataagactcttcactcccgctgcgacgcagtcctcacaagcaccagaccaattagctagcttcttctagctctagctaggctcgtctgctgcaagaaggtaacagtaacagcaggcatggaggggaaggaggaggacgtccgcctgggcgccaacaagttctcggagcgccagcccatcggcacggcggcgcagggcacggacgacaaggactacaaggagcccccgccggcgccgctcttcgagcccggggagctcaagtcctggtccttctaccgcgccggcatcgccgagttcgtcgccaccttcctcttcctctacatctccatcctcaccgtcatgggcgtctccaagtccacctccaagtgcgccaccgtcggcatccagggcatcgcctggtccttcggcggcatgatcttcgccctcgtctactgcaccgccggcatctccggcgggcacatcaacccggcggtgaccttcgggctgttcctggcgaggaagttgtccctcaccagggcggtgttttacatcatcatgcagtgcctgggcgccatcctgcggcgcgggcgtcgtcaaggggttccagcaggggctgtacatgggcaacgggcggcggcgccaacgtcgtcgcgcccggctacaccaagggcgacggcctcggcgccgagatcgtcggcaccttcatcctcgtctacaccgtcttctccgccaccgacgccaagaggaacgccagggactccccatgtgccgatcctcgcccctcttccaatcggggtttgccgtgttcctcgtccacctggccaccatccctatcaccggcaccggcatcaaccccgcgcggagccttggcgccgccgtgatttacaaccagcaccatgcctgggctgaccactggatcttctgggtcggccccttcatcggcgctgcgctggctgccatctaccaccaggtgatcatcagggcgatcccgttcaagagtaggtcttaaaaggagccgatgctgcctgctgcttcgagatgccgccggtcttaaaaggatggattcgtggctgttttcaaatgatcccctactatgttacgtggagttccattcctctttcaaagttcggaagctgcttttatccgaacccagacttgtaattcatcagtgccaattgtgtaatatgccgcgcctctgttatgtgcaattcagagttatgagaaaaaaaaaaaaaaaaaaaaaaaaaaaaaaaaaaaaaaaaaa

SEQ ID NO: 73666 - DNA, 1290 bp, Zea mays
  Clone ID: MRT4577_167182C.1
cctcgaggcggcgggactctttcagaacacctcctcgcaccgtgtctggcctgcccgctataagactcttcactcccgctgcgacgcagtcctcacaagcaccagaccaattaactagcttcttctagctctagctaggctcgtttgctgcaagaaggtaacagctagcaggcatggaggggaaggaggaggacgtccgcctgggcgccaacaagttctcggagcgccagcccatcggcacggcggcgcagggcacggacgacaaggactacaaggagcccccgccggcgccgctcttcgagcccggggagctcaagtcctggtccttctaccgcgccggcatcgccgagttcgtcgccaccttcctcttcctctacatctccatcctcaccgtcatgggcgtctccaagtccacctccaagtgcgccaccgtcggcatccagggcatcgcctggtccttcggcggcatgatcttcgccctcgtctactgcaccgccggcatctccggcgggcacatcaacccggcggtgaccttcgggctgttcctggcgaggaagttgtccctcaccagggcggtgttttacatcatcatgcagtgcctgggcgccatctgcggcgcgggcgtcgtcaaggggttccagcaggggctgtacatgggcaacggcggcggcgcccaacgtcgtcgcgcccggctacaccaagggcgacggcctccggcgccgagatcgtcggcaccttcatcctcgtctacaccgtcttctccgccaccgacgccaagaggaacgccagggactcccatgtgccgatcctcgcccctcttccaatcgggtttgccgtgttcctcgtccacctggccaccatccctatcaccggcaccggcatcaaccccgcgcggagccttggcgccgccgtaatttacaaccagcaccatgcctgggctgaccactggatcttctgggtcggccccttcatcggcgctgcgctggctgccatctaccaccaggtgatcatcagggcgatcccgttcaagagtaggtcttaaaggagccgatgctgctgcttcgagatgccggtcttaaaaggatggattcgtggctgttttcaaatgatcccctactatgttacgtgcagttccattcctctttcaaagttcggagctgcttttatccgaacccagacttgtaattcatctgtaccaaatgtgtaatatgccgcgcctctgttatgtgcaattgaaaattatgagacagccgagtcaagctttacaaaaaaaaaaaaaaaaaagcggcc

SEQ ID NO: 73667 - DNA, 640 bp, Zea mays
  Clone ID: MRT4577_167183C.1
gtgcggcgctcgaggcggccggttccgatcgacaatcgcaatgactacttctcctctgccgacagcccgtccattccttcgacgcacgagtcccatcccgaggcgtggccagaacgaggtccttcaccgtgcgcggctatctccgcaaggtcaccgccaccgccgccgtggccaatggctgcacagcgacctgctgtgtcggcaggtgccatgaacgctgaaggggctgctgcccacaagggacggatggctcgtcttcgacgccagccagataaccgaagaggccggacagaccatcacaatttagaacaacttctgcttcaccgaacaacctgcaccttcgacgaatacgaggagcctagcgatgtagactgcattcagatctcacaataggagaacctctacgcgacgagtgagaacaattccgtgaccctaacagagacataaaactacagatcctactgggaatagcatcgaggagcttgaatgaacggaaagatcaccgtgaactaaataaactaggtatccaccgacatgcactcatgtatgatctggctaatcctgccatacactccgccgatgagtccatctctacatgacttcgtcttcatataacaaggtactgctggactacgcatat

SEQ ID NO: 73668 - DNA, 990 bp, Zea mays
  Clone ID: MRT4577_167184C.1
gaaataaccaccggccgggccggaaatcgccaaactccggggttgccccctcccgtgcccctagctacctaataattgtgcgctcctattcctgtggcctcctaacgcaatcgctcgctcgctcgctcgatatttagccgtggagaggggccgagggagggagcctgctccgctctgcagcacgaacatgatgaagccatcgtgtgtactgcttctttccagccttcttgtagccactcttgcagctacttcttcgtcctctcctccgtattccgtcggcaagcacccagggtggctgctggttctaggtcgcaaaggcagagaactcggccagtcgtcagggtaccattattaccagcatcagagcaagcagcccgagctgcagggagtggctatggaggtaaagaaacccgaggaggaggcgacggcgaggcgaacggccgatcagagcggggacgccgagacagggctgatctacagcgcggactacagcagcgtggccatgcatgctgcctctccgccgacggcgaagcccaagcacaggcaccccaccagaccataggaagctgtccttatgtaagccagtcgtatgccgtccgtttcgtgtgtttcttatctcgctggattgtacgagcagaagcacccctgctgtctctgtaaaatataggccctcctgatgtgctgcttctttccttctgttgctcttgctctctgtccctgccattgctgatgagtgctatggcgatatgttgatccaaacacacaaaatgggatggcaacacaattgtacgtcgaatcgtcgttaaagtggccccaaaaaagcgtgaaagaaggtagctatgttaggtggcatgctgccgacacacttgcacaacgccgacaagtctactgacatattacattttaaactaaggacctgtttgacgagattataaatctatatgtagctatttggatgactagattatataaatggagattattgattac

SEQ ID NO: 73669 - DNA, 1697 bp, Zea mays
  Clone ID: MRT4577_167185C.1
cattgggtacctccgagccggccgggaagccgccggggttcagtggctggcggcgcatagatagatagccatggcgaagaagccagtggaggaagcgctcctcgcagcggcggacgagcacgaggaggagaacctgagcgtgcgcgaggagctgaagaagcagctatggctggctgggcccatgatcgccggcgcgctcctgcagaacgtgatccagatgatctccgtcatgtacgtgggacaccttggagagctgcccctcgctggcgcatccatggccaactccttcgccaccgtcaccggcctcagcctgctgctaggcatggcaagcgctctagacacactgtgcggccaagcgttcggcgcgaggcagtactatctcctgggcatctacaagcagcgcgccatgttcctgctgaccctgtgccacgtccggttcctccagacgcagaacatcgtggtgcccgtgatggcgagcgccggcgccgccgcggcctgccacgtcgtcgtctgctgggcgctggtgtacgcgctcgggatgggcagcaagggcgcggcgctcagcaacgccatctcctactgggtcaacgtggccgtgctgtccgtgtacgtgagggtgtccagcgcctgcaaggagacgtggacgggcttctccacggaggccttccgcgacgcgctcggcttcttcaggcttgcggtcccgtccgctctcatggtctgcttggagatgtggtcgtttgaactcattgtgctcctctcgggccttcttcccaacccaaaactggagacctccgtgctgtcgatcagccttaacactgctgcgttcgtgtggatgatcccctttgggcttagctcagctatcagcactcgcgtgtcgaatgagctgggtgccgggcgtcctcgagccgcccgccttgcggtgcgtgtcgttgtgttgctgtctgtcgccgaagggctaggcgtgggcctcatcctggtgtgcgtgcgctacgtctggggccatgcctacagcaacgtcgaggaggtggtgacgtacgtggccaacatgatgctggtcattgcagtgtccaacttcttcgatggtatccagtgcgtgctttcaggtgtggctagaggctgcggatggcagaagatcggtgcctgcatcaaccttggcgcctactacatcgtcggcatcccctctgcttacctcatagcgttcgtcctgcgtgtcggtgggacgggactctggttgggcatcatatgtgggctcatcgtacagctccttctgctcgcgatcatcactctctgcaccaactgggatagcgaggcaacgaaggcaaagaacagagtgttcaattcttcctctccagcatccggaacgtgaacgcattggcggtgaagtaaacggcgagcaaacacggaaactataggagttatgcctgtagttttggaaacttcagcacctctgatcctctccgattttctggctcccacattaactctaatggttagcattgacacttgcagtctggattttgaaacataaatgcgttccttgaacagagtagggaagggaccaatggaaaacttatacaatagcgttagatcgcatgcaacattgtcctccaaactccaaagtgacctcatcacacaacaaaacgtgggtaattccaagaccactttttcggtacaaaaaaaaaaaaaaaaaagcggcc

SEQ ID NO: 73670 - DNA, 565 bp, Zea mays
  Clone ID: MRT4577_167186C.1
ctcaaaatgaggatactgaggataccagtgctagttttggtaaaaacgacgctttccagagctgtttggatctgacatcacaaatagatgacggggattcaggaaacgaactattttcacctggatctgattctcagagggatgctgagcataatttgggtaactgttctgttgctgaaacagatttggaggaaggtgaaagtaaaactgcttactgtggtcagtatggtcctttacaggagggagtgaatgtttcattatttaccttagaagttgataagactcaaaacaaagagagttctcctgctggaggttctcatgatagggacaaggaaattgcctctgaaattgaggctgccgcatctgatggtttacagtcatccatggcgaccagtggtaaagacaaactggggagcattccagagcactcagaagttgaagatgaacagaataaagaagaacattctcagtcacagaatggtttgggtggttgagatttctctttgtgggaacatgttacgaccaggaatgggccgagaatctgctgagggaagtgtttcaacag

SEQ ID NO: 73671 - DNA, 929 bp, Zea mays
  Clone ID: MRT4577_167187C.1
aaaaaaaaaaaaaaaaaaaaaaaaaaaaaaaaaaaaaaaaaaaaaaaaaaaaaaaaaaagctgactggcggaaacacaatagggggggccaggcccgaggccgggaagacggttccgttcagtggctggcggcgcatagatagatagccatggcgaagaagctagtggaggaagcgctcctcgcagcggcggacgagcacgaggaggagaacctgagcgtgcgcgaggagctgaagaagcagctatggctggctgggcccatgatcgccggcgcgctcctgcagaacgtgatccagatgatctccgtcatgtacgtgggacaccttggagagctgcccctcgctggcgcatccatggccaactccttcgccaccgtcaccggcctcagcctgctgctaggcatggcaagcgctctagacacactgtgcggccaagcgttcggcgcgaggcagtactatctcctgggcatctacaagcagcgcgccatgttcctgctgaccctggtgagcgtccctctgtccgtggtgtggttctacaccggcgagatcctcctcctgttcggccaggacccggacatcgccgcagaggccggcacctacgcccggtggatgatcccgctgctgttcgcgtacggcctgctgcagtgccacgtccggttcctccagacgcagaacatcgtggtgcccgtgatggcgagcgccggcgccgccgcggcctgccacgtcgtcgtctgctgggcgctggtgtacgcgctcgggatgggcagcaagggcgcggcgctcagcaacgccatctcctactgggtcaacgtggccgtgctgtccgtgtacgtgagggtgtccagcgcctgcaaggagacgtggacgggcttctccacggaggccttccgcgacgcgctcggcttcttcagccttgcgggtcccgtccgc

SEQ ID NO: 73672 - DNA, 2912 bp, Zea mays
  Clone ID: MRT4577_167188C.1
gggaccctcgaggccggccgggattcctccacggaccacggccaagcggcagcagctgcagctctgagccccgggccctgcccctgcccctgccgcttcctcccctgtacggtcccctcctctttcacctccgactgcgcccacgcgcggccccgggcgcggacgacaggtgtccggcatgctgccgccacgtccaccccgaccgacgccccttccctcctcccgccccttccacttcctcgttgtcgtctccgtcctctgtttcgcagccatcctgacgccagcccccgccgctgtagcagcagcagcatcaggggacgcggacggaggaggaggaggagaaggcggcgtcatcaggatcaggactgccgctgtcgccaggtccgccatggcatggccatcaaaatgtaaatggttgcccttacagaacagtgggaggtgtctttcgtatactcatgtttgcaaataccacaagatttggaaggacacgaagccatttatttctgcaaaagatgccctgaagaaagaaccaattagcgatgtgattgctttaaaggattccatgaagtactttgatgctgagttcttcaatgattcaaaactacgtgagatggaagatggtgcaaaggaattcaatgtacccgcattcagagaaaatcggaaattggttgcgacggagaatggtgggttgcacaacccttctgttttactcttcaaatcatcatggagtagtggcagtatgacaagtgagactagaagtttcgagtaccctcgtgcgtcttctgtacatcgtccaactaatgatgaagatattgcatttatgtcggtaatcgagcttggagagcttattaggacaaagcaaataacatcacgtgaacttacagatatatttctgaggagattaaagaggtacaatcctgttctagaagctgttattacatatactgaagatttagcatacaaacaagccaaggaggcagatgacttgctggcacaaggaaaatatcttggtcctttgcatggcattccatatggcctcaaagatataattgcggtaccacactataagaccacttggggctcaaggacgtttaaaaaccaagtccttgatagtgaagcttatgtgtacagaagattgaagtccgctggagcagtcctggtagcaaagcttgtcacgggctcacttgcctatgatgacatatggtttgggggaaggacacgaaacccctggaacatcgaggaattctctactggctcatcggcaggtccagcggctagcacctctgcaggaatggttccatttgcaattggttcagaaactgcaggatccatagcatacccagccgctagatgtggagtaactgcattgcgcccaacatttggaacagttgcacgaaccgatgtcatgagcatttctgagagtttggataagcttggtcctttctgtagaagcgcagtagattgtgctgttgtattagacacaattcgcggaacggatgccggtgatccatcatcgcgtgaggttgctttgggtgatccatttcatgttgacatcaccaaactcactgtaggctacctcgatgacgctgagatggaggttgtcgatgttctttcctctaaaggtgtcaagctggtccccttcaagctgaactacactgtggaatcagtccagtccatcctgaacataacgatggacactgatatgcttgcgcacttcgataactggcagcgggaaggacatgatgatgactatgaggcgcaagaccagtggccggtagagcttcgtcgtgcacggttaatcccagcggtagattatatacaggcgcagcgagcacggggcaagttgatcagagaaatcaaagatagcttcactgttgatgcgtttgttggcaacgtgactgactgggagcgtgtctgtctcgggaaccttgttgggatgcctgtggtcgtggtgccgacaggcttgaagagcatcgagaacccgcctaaaggcggtacgaagagaagaacaacagtgacgacaggcatctacgctcctcctgaccacgaccatattgctctggcgctggcaatggcgtaccagtccgtcactgatcacaacaaacagcggccgccgatcgatgatctggggccgaatgatgtcatacaaagatagttcaacctgctcatggaccgcgatgatccggtgatggtagcacgagggtcgttatggttatggaagctgaagttgaagacgatcagtgagccagaatggctggccacctggcagaagacatcagctgtggaagtatcaagtaccaatccacatatgggcttcttcatcagctcaaataactcagcactttttttttctgaagcaggcagcattgtatcaccttaacatacgttacaaaggaggttctggatttcatctggggcctcatcagaccaaaccgagccaaagaactgatcagctagcctagtcattacatgagctgcaacttctctgggagggtatttggtttctatggactagtccatctattttattctaaaaatttttattctattttagttaataaattgtaaaatacagtgagttttcgtatttaataatttagggaccaaaaccgaataaataaaagaattaaaaattagtctctagaaaccaaacacaccctgaatttacatgaaagagacaaccttcgcgtgctaagttttttacgtcacccaatggctccagctccgacatgggatctactccattcgttctaaattgtaaggtattccaaatatcttggagctactccattcgttctaaattgtaaggtatttcaaatatcttggagcgttaagcatcttaggtcctattcaggatagctctaacttcaagaaatttgatggagttagtggagcaggttattatgtgctct

SEQ ID NO: 73673 - DNA, 301 bp, Zea mays
  Clone ID: MRT4577_167189C.1
tgaggaaacaacagacttttgctgtttttgttcaaaggtggtacccaaggatgagccccagcagtgaagtcagtcacgggaggatgttagcctcccactttaaaaacaatatacttttgtgcgggacggtgttttgcctcccgagtctgtaattataataatactttatgcactcatagtaccctggtattgtaataataatactctctctatattgaatgaatgtaaattaagttattgtaatttgcttccgcttattctttcctctgatgtgatgtaatatctgcatgacgggtgaaac

SEQ ID NO: 73674 - DNA, 301 bp, Zea mays
  Clone ID: MRT4577_16718C.1
gttctatatctctagcggcctttctattttttttttgatcgattcaaaaatagaatgggacaggccatacttagatagattcattcactgatgacaatacattgcacatgcgcttagtttacaaagaccgattaccgcaggcacccattgacatatattgatgagcacacattgatctgatcattcgctggatggtgcaactactacacgcctacgatctgtacaagtcaagtacacataagaccacactgttgactcgacggacggactaacgaatggatggatctgatggtattacaca

SEQ ID NO: 73675 - DNA, 377 bp, Zea mays
  Clone ID: MRT4577_167190C.1
aatagaaacacttggcgaaaccagactgctggtgagactgacaccacaccaaattatggcgtactaccagtaataatacaactctatacgtaattatttacaatgacatttaaaactgaccattcattgcataatgtcaaagaccagtacatatcggcgggaacgcggtaagacatcaacttgtaaaggaagctgatcgtttaacacagactctacccgaactaacgttggacactgggcacacacgtgtgattgactcgacatactcgatgccataagttgctggacgtataagacgacaccgactacgactggaagttgttaccggctactttgaacacgaagcagtagcctaaatgggtgatgtacaaacgcta

SEQ ID NO: 73676 - DNA, 1399 bp, Zea mays
  unsure (1)..(1399): unsure at all n locations
  Clone ID: MRT4577_167191C.1
cattgggtacctcgaggccggccgggagcagctgcagctctgagcccctggccctgcccctgccgcttcctcccctgtacggtcccctcctctttcacctccgactgcgcccacgcgcggccccgcgcgcggacgacaggtgtccggcatgctgccgccacgtccaccccgaccgacgccccttccctcctcccgccccttccacttcctcgttgtcgtctccgtcctctgtttcgcagccatcctgacgccagcccccgccgctgtagcagcagcagcatcaggggacgcggacggaggaggaggagaaggcggcgtcatcaggatcaggactgccgctgtcgccaggtccgccatggacacgaagccatttatttctgcaaaagatgccctgaagaaagaaccaattagcgatgtgattgctttaaaggattccatgaagtactttgatgctgagttcttcaatgattcaaaactacgtgagatggaagatggtgcaaaggaattcaatgtacccgcattcagagaaaatcggaaattggttgcgacggagaatggtgggttgcacaacccttctgttttactcttcaaatcatcatggagtagtggcagtatgacaagtgagactagaagtttcgagtaccctcgtgcgtcttctgtacatcgtccaactaatgatgaagatattgcatttatgtcggtaatcgagcttggagagcttattaggacaaagcaaataacatcacgtgaacttacagatatatttctgaggagattaaagaggtacaatcctgttctagaagctgttattacatatactgaagatttagcatacaaacaagccaaggaggcagatgacttgctggcacaaggaaaatatcttggtaaatatattgctagtcaggctgatcctctaaggcattatcgccactattggcagtacttgcaccttttccctcagcttcatttagaattatgtctggtatacatagcttctcattacaaactgattctcatttggggtgctatctgagttcaggtccacttgaagtttgtgctcatatgactaatatactgactgcctgagaattcttggtgtcaatgttgactagtgtattttttttctctttgagtaattatcttgtccctagccaaaattttgcacttaagctaaaaattcacactgacaaatcctgataccaggtcctttgcatggcattccatatggcctcaaagatataattgcggtaccacacttatagaccacttgnngctcaaggacgtttaaaaaccaagtccttgatagtgaagcttatgtgtacagaagattgaaagtcgctggagcagtcctggtagcaaagcttgtcacgggctcacttgcctatgatgacatatggtt

SEQ ID NO: 73677 - DNA, 602 bp, Zea mays
  Clone ID: MRT4577_167192C.1
tttcatacttaaattccctccgccctctctcatctccttgctcctccgcctccttcttagtccggtcaagacagggatctgccatgtccggactctcgaggagcaccaccttcgaactccaaggcacgacgccggagacgtccaatatctacccgcggcagggtggccccgtccgaaaaaacggcttcatcgtcttcaagaaccgcccctgccaggtagtgtgggtatctacctcagagactgatgagcatggccatgccaaatgccactttgttgccatagacatattcaaaggtgaaaagcttgaatatactgctgcttcatcacacaactgtgatattgcgcatgtgaaccgtactgaggaccacttgattgatatatcacatgatggatctgtgagccttctgtacttcagatgtgctcactaacgatgatcttatactcccagctgatgacactcttgtgggccagatctgggagaggaactcgcactgtgaaggatcttgttgtgactgtgcagtctgtctatgccgtaggagtgcatctgcgcgctgatagatgctggacccaagttacttacctgtcttgaaatactgtatctc

SEQ ID NO: 73678 - DNA, 2571 bp, Zea mays
  Clone ID: MRT4577_167193C.1
attgggacctcggtacccgcggaggcggccgggaaacggtgccgcctccctcccgcaccccggccttctctgcctcccactcactcgacgccgccgccgccgtcgccgggatgaagaaccccgacttcgctgcagacaaagcgctcgccaaggacttcctgtccaacttcaccggccctcacggcgaccccaagtacctgaacatcctgcaagatgtcgccaacaggaagatacgcgcggtccagatcgagctggacgacctgtttcatcacaaggacgtcgatgaggagttcctgcagcgtgtcactgagaacacgcggcgctacgtcggcatcttcgcggaggccatggacgagatcatgccggagcccactgaggcgtacaccgtcgacgaggaccgggacatcctgatgacgcagcgtgtggacgagggggcggacggcggcgcggacggcacggacccgctgcagagaatgccaccagatatcaaacggttctttgaggtttacatcaagacattctcaaaggcaactccactcaccattagacaagtaaaggcatccaacattgggcagcttgtgaaaatatctgggattgttactcgctgctcggatgtgaagcccttgatgcaggttgctgtttatacatgtgaagaatgtggctttgagatataccaggaagtgactgctagagtgtttatgcccctcattgaatgtccatctcaacgatgcaagctgaacaaagcaaaggggaatctaatccttcaactgcgtgcgtcaaagtttttgaaatttcaggaggtaaagcttcaagagttagcagagcacgtaccaaagggccacattcctcgtgctctgactgttcatctaagaggagagctgactagaaaggttgcacctggagatgtggttgagatgtcgggtatttttctccctatgccatactacgggtttagagcgatgcgcgcaggattagttgctgatacttacttggaagcaatgtctgtcacccacttcaagaaaaaatatgaggagtatgatctaaaaggtgatgaacaagaacaaattgaccgattggctgaggacggtgatatctacagtaagctggcaaggtccttggcacctgaaatatttggccatgaagatgtcaaaaaggcactgctgttactacttgttggtgcaccccatcggaagctcgcagatggcatgaagatcagaggagacctgcatatatgcatgatgggagatcctggtgttgcaaagagtcaacttctgaagcatattatcaatgttgcaccaagaggagtgtacaccactggacgtgggagcagtggtgttggacttaccgctgcagtccagaaggatccagtaacaaatgagtttgtcctcgagggtggagcactggtactggcagatatgggcatttgtgctatagatgagtttgacaagatggaagagtcagaccggacagcaatccatgaggtaatggagcagcaaacagttagcattgccaaggctggcatcaccacctctctcaatgcgagaactgcaattctggctgctgcaaatccagcatggggaaggtacgacatgaggaggactccagcagaaaatataaatctacctccggcgctcctgtcccgtttcgacctgctttggttgatcctggatcgcgcagacatggaaaccgatctcgaaatggcgaggcacattgttcatgttcatcaaaaccttgaatcgccggcgctggggttcacaccactcgagccatctgtgctcagggcatacatatctgcagctagaagagtgattccttccgttcctagagagctcgaggaatacattgcgactgcatattccagcatccgccaagaggaggcgaagtcgaacgcgccaacctcctacacaactatcaggacacttttgagcatactccgtatctctattgccttggcaagactgaggttctcagaaactgtggctcagagcgatgtcgacgaagcactgcgactgatgcaaatgtccaagtactcattatactcagatgaccgccagcggtctggccttgatgcaatatctgacatatattccatcctgagagacgaagctgctaggacgagcagcatggatgtgagatacgctcacgctcttaacttgatctccagaaagggatacagcgaggctcaattgaaggaatgcttggaggaatacgcttccctgaatgtgtggcagatccatccaagcacatttgacatccacttcattgatgcctgatgcagaagccgatgccgatcacctaacatttcatcatgatccaaggatttgaagaccttcgactgaagcctaacaagatttaaaagttttctagtgatagtgaacgacagcccatttcttgatggcaatgatgtaatgctgagaagcctatctcaattgcactagtagaaacaatctcaattgtactagtagaaccattcttgtatgacttgtgagtagcttgtttttatatttgctgacatttttcacacttgatagtgaagtagatgtaacaaaaaaaaaaaaaaaaaaaaaaaaa

SEQ ID NO: 73679 - DNA, 273 bp, Zea mays
  Clone ID: MRT4577_167194C.1
attgagctaaattagtgaccttataaggatagcttacaatgcttttccccatacgaatacgaatttttgtttagtctgacccctcatgaactatatacataagccactttttttacacgtcagattgttattcaatttatagctgggattgaaacacattgggtcggaagcttctaaaattgaacccgtgattccttaaacctgaagaaaatggtattattaagaaatgactgatgatattgccctgtttaatcatagggctttaattttttc

SEQ ID NO: 73680 - DNA, 226 bp, Zea mays
  Clone ID: MRT4577_167195C.1
atatcgcggatgcgccgccctttgcgacgccgtcattggatccggttgtttcgccgtatgtcactttgtccacatcggctctgttagatcagctgacagagtgctaacttctcattacaatcatactgatgctactctattacataacggcttatagaaagagggaatactttaccccgaccctagacgacatgtacactgaaatacagcgagatacctaggccag

SEQ ID NO: 73681 - DNA, 590 bp, Zea mays
  Clone ID: MRT4577_167196C.1
attgggacctcgagccggccgggaagactcaaatcctaacgtgggaagcggcgacgccgagttgctctacagcgacgtgggcttccggtgccgaaggatagtggcagtgcggtatactgatcacggctgaacgcgatacggatggatcggcacaaacgcagagctgtcataacacctgctgtcgtacatcttgttatgccgacgaaaagctggatccaagcgatgtgcaggcatcttatctccaagatagaagaaatggctgcgagaattgatgaattgagaagagagcctcaacgaccgcatgggtgagataggcgctgaaagcgtgcggacttcatctcagatgaaggaacagtaagaacttctgtatttccgcatgactgcggaagaagcagtaggactcgtctcagaggacggtgatgagtttagcgctgataaataacaaatactcctgcgctcttttacatgtgttgcggaggatttgaaaatgaactagcgagagacaaatactaaagaccggtgattagtacctgtgttaagggctcatgtgaggatacactgtaacctgtgctacttgcgtttcctgaaag

SEQ ID NO: 73682 - DNA, 146 bp, Zea mays
  Clone ID: MRT4577_167197C.1
gtggctttcaacaacgagaaaggaggcgtagttgagtatctcagggataaaaaattggtgacttggacttaaatcaaccaaatatttcattcaacactgggctagacaccaaggccatgggttcggcctggcttgctaatgctttg

SEQ ID NO: 73683 - DNA, 361 bp, Zea mays
  Clone ID: MRT4577_167198C.1
cacagctgctgctggttgaaaaagcagcttatctgataagctggtgaaaagcagcttatgcttgttggctgcttttagtgtattctgagaagcagctgaactaataagctgctggagaagctagctgtttggcaaaacttctgcttaaatttgtgaagaagctgaaaataagctgtgccaaacagggccttagtctggtgtgttttgccctcctatgaattgctagagaggatttagcgaatttgtgcttggttgacctgggaactgaccacatgatgctagtcgtgtcggcgcgggtgcttgatcatatgggttatataccttgttctgattggaatttggaactagcagctcgttggcg

SEQ ID NO: 73684 - DNA, 279 bp, Zea mays
  unsure (1)..(279): unsure at all n locations
  Clone ID: MRT4577_167199C.1
attgaaagatcttttgtntttcttggcccactttgtcacacatggtaagttgcttgttgtgccatggttacccaatttgcacatgggtatctttgtcatacgtttgtagggtgggtctttgaatttgatgcgcttgtacgttttcttttgtcgattgggggcgggggatgaatctgtcctcttgtcacatttttacttctaaagtgcatgttttgaaaaggctgttgtggggtgctctttgtttctgttttcgtttttttggtcttttggtttgttttt

SEQ ID NO: 73685 - DNA, 684 bp, Zea mays
  Clone ID: MRT4577_16719C.1
ggtaccctcggaccggccggggcattgtgtcgtagtagctacaagacaggcttagcttagagagctactagccagggtaactaataaattgacgaagaagaccgtgccagagcttcttccatcccgcgcgccaccgccgcgcgccatgggaggaggcaagtcgttcttctgccccagcatcttcagctttctgcgcaagtggaggcgctacgacgacgacatggccgactgggacggcgggtacgcgcgcaaggtgcgctccagcgacgaggactacggcggctggtgggtcggcgagcccgacgtcgaccgcaaggcctccgacttcatcaacaacttccaccagaagaattgaagggtcgcgttctctgctagctgcgactgctaccgcttccccacgccagcatagcatgcaatatgcatatatatggtcgtcgtcgacgacgacgatggcacacggccggcagcaccaccgcccgccgccgcgccggtccacgctatgcatgcatgcagctacgtttcatttattaccaggttctttgatattcttatatatatgttgacgactatacatattagctgatctcgtttgacaaaaaaaaaaaaaaaaaagcggccatcagagagtgagagagaggatgaataattcaatctgctcgacagacatatatcgctgtcattgga

SEQ ID NO: 73686 - DNA, 474 bp, Zea mays
  Clone ID: MRT4577_1671C.1
gcctgcaggtaccggtccggaatgaattcccgggtcgacgagctcactagtcggcggccgcccttttttttttttttttaaacaatgatgcaaattgcaatgaatcacatgctctcaagaaaaaacaaggatattcgacgcgttcacagctctacactctaatgaaaactaaacaacccctctggctatgcacacaactttcttcccgatggcactgccccatggccatgaaatgaacacaggcttctacaaatcctttttggatgattgcctgcctatctagagatacactcttgatgcagcatggaaaactggaggaagacactacctacctagcaggcgcgaacctcagtgaaccggcttgaagctggctcacagttgctgttactaagtttgagggagccaaagaggcaggacaatctcctcatgatgggactgcgagtggctacttccaacgacaccgcatctttcctg

SEQ ID NO: 73687 - DNA, 351 bp, Zea mays
  Clone ID: MRT4577_167200C.1
aacagccacaccaatcaccccaataaaattgaataagagtttttttttacaccaagggaataagaagaattctttcagacgggcgggagggctaccgtttcctgtgacttaccaccacccacccacattcgttccttcacttgttaagctcccggaggtcgccgtcaccttgaagcagtcgatgttgcacagccttaccgactttattatgccttcgaaccgggcgatgctttttcttgcctggtcgaccctggcccgcggtttgttggggtgggggtggttaacgtttctttttgccctgttccgtttccgccggtccgggcttttgccccgggggggtttcttccgccg

SEQ ID NO: 73688 - DNA, 714 bp, Zea mays
  Clone ID: MRT4577_167201C.1
aaactacgcctctgctcatgacaatgaaacactatttgatattattagtgtaaaggtatggaacttatcaggatatctaggaaatttactgcaatttatgtattttggtatcaattatcaatctgccaatcaatcattttcttttgctttcttcaataaacatttattggcaagacagattagcatgaatgttttgttacacttttttttactgcttgcagtattttctaccttttgaaattatgctttatagttataaactaaacatgtatttatgtaacaatttagttttccagaaacagttttccaatctatttcagaacatgatctggtactttgtgaagttttttgtttgtttgcttgtgcagactctgatgaacctctcaattgacgagcgatgcaggaaaaataatttgtccacaagcatgattgcattatcccaggtttgaacttagaagatggccctgcacactctgcctcgacgtcatcttcaccagagcagactactgatgttgatggaagtaccaccggtgatgtcaccttctaagtataacttgggtaaccttattacctcttctcttactccaaatgctggttcggtgttatccatgttctcatcattaacctcttaaagttctgaaaagacaaggatgaatgcacactgcacttcctactgcacttcttttgaaaaaaaaaaaaaaaaaaaaaaaaaaa

SEQ ID NO: 73689 - DNA, 595 bp, Zea mays
  Clone ID: MRT4577_167202C.1
gctgagcttaagttaatgatcaacgacctttaaggtcagatgttgctttatttacatcatgttattagtaatgctgagccattggttaataataggagcaacataaaagcaatgcactggaactctggtatagtttgctgtggttccagtgacataaaattccccctccgcccattaatgcaaggatattttggtaggataaaagtttttcaaagtatattttggatcttagtttctctcatgaccaatattatcttgaagctactttgaacacaaatatgtttatgcaatttttatacactatagacatgtatacaatttgtataattgttggtaaaaggttgtaaagtctaaattctccctattcaaaagatgccttacgttagtagacagggggaatattccttctcatcatttctgtttgacttttagttttgtttttgttggtacgtttttgaaatttgactgcatgaacaacataaacatttagtgaatatgaacttccataatgtagcctattgggcgagttctttgtcgtgggcttatcatatgactaactgtggcatttgatgtaatatgtgtaatatttcgtttc

SEQ ID NO: 73690 - DNA, 778 bp, Zea mays
  unsure (1)..(778): unsure at all n locations
  Clone ID: MRT4577_167203C.1
cctcgaggccggccgggaccgccgacgccaattaccgtaccaggaccgcttggattgctctctacagagcatctccgatagatcgacgtgattcatccgcccgcgcacaccttgccgccgccgcaatgccgacacccgagtccgaactctttctcgccaaaaagcctaaggttgcgccaacctttgatggcgtcgactacgaggacaacaaggcattgaaggctgcgcaggacgccattattagggagcagtgggtcaggagcatgatggcgaggttagttcgggaagagatgggcaaatgctaccggagggagggagtcaaccatttagagaagtgtggacatttgcgagagcgatactttgagctcctcaaggatgcaaaggtcaagggatacctcttcgcacaacaaaactacgtcgacgaggcgctcaagcgatagacaaatccggaacgaacaatgggtgtacacatgattacacgtatgccaggcgaaccatatgttaccgaacaacaacaggaaacagcacgaggacaatgcagaggtcgggtttctggcgattgatgggcattgtgaggagagatgcgacagtcttctttacaggcgaatctgtacataagcgtgccggatgagaggctgatgtagcacgaattacaggaacccaattcttaactgcaagggtacaatttacaattatttgaactgacgtgattctttgtaaatatatacatacattgtccaaaaaaaaaaaaaaaagcggnccctcgagctcagctttt

SEQ ID NO: 73691 - DNA, 369 bp, Zea mays
  Clone ID: MRT4577_167204C.1
ttgctgtcggtggaggctgggaaaggtggtggcgttggcggctgctgggcgtggttggagcgggtgggtgaggatcgacgagaccgtgataccaggttgtcaaggacgccaaatccccgactggccggaccccggctacgtaactcgtagccgctgtccgtcacgccggcgaggttatacccctcagccgtcggtttgtagagaagagagggagattaagactgaattattgcttatcccaaatgatgtctcgtacatgcttatatagccacagagggggcagctataaggaaataactaacaaggaaacaactagtaaggaaataactaacaaggaaacaactcacaaggaaataaccgacagcaacg

SEQ ID NO: 73692 - DNA, 400 bp, Zea mays
  Clone ID: MRT4577_167205C.1
gtgtcagtgtgagcaatgacctgaatgaacaattgaaatgaaaagaaaaaaaaaaaaaaaaaaaaaaaaaaaaaaaaaaaaaaaaaaaaaaaaaaaaaaaaaaaaaaaaaaaaacaaaaaaaaaaaaaaaaaaaaaaaaaaaaatttggggggggggggggggtcccttttaaaagggcaaattttttaaatttggagggaaacatgggggccttttagagcatgctttaaaagggccaaattggccttataaaagaggggtataaaaataaaatggccggggtttaaaaacgttgggattggaaaaaccctggggttccccaatttaatcgttttggaaaaaatccccttttcggcagttgtggtaatagggaaaaggccccttctggttgcttttccc

SEQ ID NO: 73693 - DNA, 424 bp, Zea mays
  Clone ID: MRT4577_167206C.1
tcggtcacaacctgtggacatgttttttgttggaatcgtgtaatggagaggggcaacgagaagcgtgagagcgatttatgcacaacttcgattacccaatcctgttagatttgcatatattattgggatttaatgtacatcttttagcatagcaagagtacatattatactgtattggtgttagagtatctataccatataacgaatggaaacttgcattcgtgaaacgtggtcatatacttaagttagccgttgaatacaagactatttcaagtggttactgatcaaatagtaatatacgattatttgtttgcatacgtaagattagattgattttggaatcacaggttgtaaaaattatttataggcagataggatagtagatatcttgatttggacaccgatgtgaattttattggataaa

SEQ ID NO: 73694 - DNA, 285 bp, Zea mays
  Clone ID: MRT4577_167207C.1
gttcccgtattctgtagtacaagaaatccaagactcatatattgctcttgggaatttagcacacggttcaaaacttgtgaatttggccgcgtgaggatgtgatgaatggcacttgcttcaggttgtaatcaattttccctattcagtcaatctttgctctggaggttttacaaaaaaaaaaaaaaaaaaaaaaaaaaaaaaaaaaaaagaaaaaaaaaaaaaaaaaaaaaaaaaacgcgcgcctgctaaaaaaaaaaaaaattctataggctaaacctaaaataa

SEQ ID NO: 73695 - DNA, 361 bp, Zea mays
  Clone ID: MRT4577_167208C.1
tgcttttactagaggatgtagagaggaggaacacgtcgtccgagaccatgaaaaggagcccacacactggggctgattctgtgcctaaagccgctctggtcatgggcgtgttaagcgctttaggtaaagaaaatgctctggctgagagcaagggcatttacatcaatccgtagcagatcaagtgctgcaccaactgcaacttttctttctcagggctctacaactgctacgacggctaaaaggactgtgactccgtgtgaaagaagtgtgggagttgccgcgcactcgtcgtactcggcgaagaacaagttgacgcgctgcgacaccttcatctagatgtgcggcccctagtgctagatca

SEQ ID NO: 73696 - DNA, 101 bp, Zea mays
  Clone ID: MRT4577_167209C.1
agaggacccaagataagaggcggccgccggcatgatgatagctctggcatggcagcccatacattaattaaactaagcgtagtgcgagcccggcgaggcga

SEQ ID NO: 73697 - DNA, 447 bp, Zea mays
  Clone ID: MRT4577_16720C.1
ggggcatggtcaacgcaagccccacttttctgttgacacccccctcaagggtacggggacatctcttacaacctttccctagagcccactgctcgcggccggctaccaccggctggctgctgccctccatcagtttccgccgacttctgccgaccaccgccgcgcctacttggatctactttcagcggcggatcttgggtcggagttcatccattcggcacctgctgggctctagccggagtagactgtcctaaccatgccatgggtggggcgacctccgcgccagcgttggactgcgaacggcatggtcctttcccttcggggcagacctttaaccccgctggtctcctggcgttccccctgtgaatccacatgccaaagcgggtgctccccgtcgcgagccgccacttccgggtacctcacgcgagttctcctacgacaagcgac

SEQ ID NO: 73698 - DNA, 254 bp, Zea mays
  Clone ID: MRT4577_167210C.1
ctttttctttttcatttaatctttttttgtgtggcaattacacgcaatgaatcaccctttcctccaccgaaaatttgtattggctaatgactgcacaactgaaatcatgggccttaatgattacatgggccatcaaactatagcatcttttaaccccaagcaatcccaggaggacacatgggaacttcactagtgtcatgggatttcactacattaccatagccacagatcggggtaaccaaccttaaattggg

SEQ ID NO: 73699 - DNA, 249 bp, Zea mays
  Clone ID: MRT4577_167211C.1
gggcgctcaccggctgcacgcctgcatgggccgggcagctccgctgcgccacgggcgactgcggcgggcggctccagtgcgggggcctcggcggcgcggtgcccgccacgctggctcaggtctccctccaccacggcggcgacgaccagtcgacgcacggggagagcgtggtggacggcgtaaacgtgggactgtaggttaccccgcacgagggccgcaacatctgtcccgtcctcgactgccggaagg

SEQ ID NO: 73700 - DNA, 219 bp, Zea mays
  Clone ID: MRT4577_167212C.1
acgagcacttccatcctgctgatcggtaagtgcttctctaattcttagtatctacgaccttatctggactgtggccgtctcactggaggctaacgataacatggattcatgcaccgacgatggtaatctgggcgtaaccttttgctctgtacttcctatgatgatgtcttctactggagcctgctttgacagatctgggcttagccttaaaaacaataa

SEQ ID NO: 73701 - DNA, 312 bp, Zea mays
  Clone ID: MRT4577_167213C.1
gggtaggaggggggggaagcggcggaagggggggggtgagagcaagggggggggcgcgaagacggcgaggggagcaatcgaagggacctacagggacaagaaaggccgcaggagtggaactgtttgtatcggaggcggagtgatcgcggggacatgcgacagcgggaagatgaagagaacgatcatggttggcaggaactaggtgcgcgctgtggagaggtaccagagggatgagaagaggcacaccaacattgctggtcacatcgcccaatgcttcggggtgaaggaaggtgagcatgtcatcattgggca

SEQ ID NO: 73702 - DNA, 390 bp, Zea mays
  Clone ID: MRT4577_167214C.1
atggtgggggtttttttttttttcttttaaaaatggaaagagattgcgtccgactaacaaaagttttaagtgtcacataggtcgatgacccgcccccacacatttattgaaaaaacaagccccaaaacccaaacccggcctattaactgataggcggattgtttaagatctttttttttcgctttgaccacccggttcaaaaccttatgtttgctgctcgactgaataaatttcttggagtggggcttccaagtattccccttttttggggaggaacaccaccgttaccgtttgacctcccacggttactattgtactcttccccttcaccttttgaatttccccgggcttcaacatttaaacgggcacgttcttcccttttttcacctt

SEQ ID NO: 73703 - DNA, 290 bp, Zea mays
  Clone ID: MRT4577_167215C.1
tgcggagcagtgttctcaggcgtctgcaggaggaggcccggaaggaggaggggcagcgactggcccggcgcttgcaggagctagagagggataagaacctcatgctggccaccttgcagcaggaaggtctcctctcccgttacaagcagcagcgactgttgacagttcttccttccctactggatttgaagaaatctgtggtgtccagccccaggcctccagagtgttcagcatctgcacctgtagcagcagcagtgcccaccagggagtccataaaaggggtcctctct

SEQ ID NO: 73704 - DNA, 352 bp, Zea mays
  Clone ID: MRT4577_167216C.1
ggagtctaattcatgttccaattgagctcgggaacgaccggttgatggccatggcatcggggaacgcgagagaaaggggcagagagagagagaagctccgccgctagggagcgtgatggccatcaccgtcgccctgtgccttggatgttgcccggcacccacggatgggtcaggaccactcgccggtgcgtgtgggtgctcattggggcttcggcgggctaggagcgctcgctgggggtggtggaattcctcgccggagagggagttgcgccgcgataccgtctgctaccgtggacatgataacctactccacaatccgcgactagcaaaccactgtctattctgaggttca

SEQ ID NO: 73705 - DNA, 291 bp, Zea mays
  Clone ID: MRT4577_167217C.1
cgccgaggccaagccgcccaagaaggggcccgccgccgccgccgccgacggtgacgacctgcacaacaccctccggctcacgcgcgacaacatcaaggccatcatcatggacgtgatgtttggcgggacggagaccgtggctgagctggatggacctgcagggcatcaaccgccgcctccgcgccgcccgatccgcgctggaccggttcatcgacaagatcatcgacgagcacgtgaggcgggggaagaaccccgacaacgccgacgccgacatggtcgacgacatgctcg

SEQ ID NO: 73706 - DNA, 742 bp, Zea mays
  Clone ID: MRT4577_167218C.1
ttctcgaacgtcctgctgagaggcagctccccaactgttagaatggacgacacgcaagccgccaataacacagacaccaccgtgcccactttcggctcccctctcttctctttctccaacctcggaggagcttacttcgaatctggctttgactgcaaaaccaccgatcctctgccgcctgacatcgaggtccaggtctgcgaggaatcacccgtctcgctacagctacgacagaaccctctcccgatcaatgactccttgacgatctacgagggccgagagagtacatctgacgagattggggtcaaagactctgagttggtccctggaaaatataaaggggacatgaagatgaggtaaggttcattacacttggtgaaagccctgaattctgatatactcagaagataaatttcatctgaaacgcaaactcctattgcaggttggatgtggacatggcctccctggcactttgtgcactcatcaagggtgctgacctgattcattgccaagatctcaatgccaaggcgcttacgagcttgactatacccaatgtataagtcaatctctttcaaggattcaccaaaaggaacatgtacatgcccgattgacggctactttgctggcgattgcagtgaaatggatcagatactactttgcggggatgctgatcgatagcaaacagccagtgctggtacaaaacgtacaatgtgtactgggtctgatatcatcctgatggctg

SEQ ID NO: 73707 - DNA, 270 bp, Zea mays
  Clone ID: MRT4577_167219C.1
ataatgcaatttggatttaacctcttagggcaacaaacgaagtgcttgtatggtaataagttaagaaccgaccattgaccacataatatcttacacgagaactacacgatgcaaagttactcccaaaatacttacaaccattatgacaacataaaacaaacactaatttagacaccaccaaacttaagcaataattaaaccaacaccttcttactttaaagcccacaggatttacctagggatctcctattccttcttaaaggtgaacac

SEQ ID NO: 73708 - DNA, 395 bp, Zea mays
  Clone ID: MRT4577_16721C.1
attaaacaccagattaaaaattaagacaagggtccaccagatcccaagttggaagaggcacacgataggacgaaaaccaaaaagaacgacgacgaatctagaaccacgacttcccacagtccgagcagacgaaacactacggtatgtgtccaccagatcgctatagaagtacataacatatatgcttgcaatagcacgcatacgtgcgctaacctttggcacgctgctcttaagcgttgtgccgatcattgctccaaagatgcttggtgcttgacaccttactgttctactaaacctgcattacaccaacgaggcattatgcacttgcaataacggcagccttgtaccggcccaaccataggccgtggcgcctggcgggatctgtgatctaccac

SEQ ID NO: 73709 - DNA, 954 bp, Zea mays
  Clone ID: MRT4577_167220C.1
aaaccgcaaatcctcaacttaaactgaagaatcattgccaagttacagacaagggaatattcacaaatcacatggaaattcctagggggagggggagtcgtccctcacatcccataaccccaggcaagcaagcacactagatttactcagcatctcttgcaaaatctccctttttggacagatttattaacctttcctcactctacatgctacacccaatcctcaaaaaaataaagcagaaaagaaagagagagcacaaaaagggagaaacgaagcaggaaagatctcgaaactgaccgccgctagtcctgctcctgcatgtagattgctgtgctgcgctagaaaccacttcctcgctagtaatacaaaaaggacatagaaaccagggagagcacaaggtcaccgaacgtgcgtgtccgtgtagtatactgtatatactcctgtaggcaggaggaaccggcgccggcgatggggtgccggcctgcctagcggagggcgcgcgctaggccggcgaggacgcgggagaagccgaggcggaagcgggcgacggcgccgtgggagtagggcccgcagtcgcggcagacggcctccatggcctccacgaagaggctgaggctgcgcaccggcggcacgtacagcgtcagcggcgccgccgagaaggccagcgccatcaacagctgcagcatcttggacgagaacgcacgcctcctggttcttcctccccttccccttccccttccccttccccttcgccctcgcgacgagagccaacccaatcagatccaggcggctcggtcttggcctcctgggcgtatggcgtgggatacgggagtgttatgaggcagtgagatgggatgggaggaacagacaccgtgatgcggcgagggaaaggcgagcgtctgatggcggggcgtgccgcgagcggtttcccggccggcctcgaggtacccaatg

SEQ ID NO: 73710 - DNA, 357 bp, Zea mays
  Clone ID: MRT4577_167221C.1
ggccggaattcccgggtcgacccacgcgtccgcgagagatatgcgagaggggcgagcaacagagcccgctacagcagagggcggatgcggtagacagtgcaggactcgcccgattgcaaaatgcatacaacctggcagcatgcacacgagcgcgatgtcatgatagagcacgtcctcccagtgtacgtccatcggcctctttaggcataatattccaaagcagtaggttggtggccatggctatgtattgcaacccgagggaaggcctcggtggtgctgagtaccgcagcacctcagcaagtgctccaacgtgctacctttgaatcactctttggagtaaggcctgtctcatgaatg

SEQ ID NO: 73711 - DNA, 342 bp, Zea mays
  Clone ID: MRT4577_167222C.1
agccgccactctcttcttccttctctcccacacgcacagccctctcctctcctgttcatggcgcagagaagctctccgccgagctgctcccatggcgccaaccttccctgcggcgagctccttcctccaggcacccatgccgccgagctctccttcacggcgcgggcgagctccctcctcggctgcttccagcccaactcggtgcccttgctgcaggcgagcagcaggctccctgctccacgcgcctccccagccatggcgtcctgcttcctcccatggcgcaggagatgccccagcgagctcccttcccttccccatggctcgagctcgagtttcctcatg

SEQ ID NO: 73712 - DNA, 669 bp, Zea mays
  Clone ID: MRT4577_167223C.1
cattgggtacctcgaggccggccggggtgtaccttcctgcgagcacgtgacttccccactagaaccctactaaaaacagaaggccaccgcgccggtgagccgaagcgagagcggacctacggatgcggcggaccaccgtgataaagagctccggttgctagccgctccgcgccctcaccaccgacatcctcggactcgtcaagatggtcgagggccacgttagggcggtgttggccttcaacgtcgatctagacgtggggcgagcctgacacttcgcgtgccatcgttgctggctccctcgtctatcgggtcgtcgagcccgtcttgcttgtgttgaggatgaaagctgtgatggatctgttgaatcccttgaatggaagtgctctggctggtgtcacgacctcgttgtcagccccgaatgacagagtcgctgaatgtgatgacctcgccatactgcattttttcacaagtcagacttcggactcaatcttaggcacatttcttgtctgcacacagaaagggaaagtttctatcactgccatcacgaaagaaaatgcagattcggtttcgaatgttgggccatcacccacatgagatgtgtgcaatgccgctaatgtgcaattttgctcagcagatcatggcaaaagctatgtgatatttggagggaaa

SEQ ID NO: 73713 - DNA, 1033 bp, Zea mays
  Clone ID: MRT4577_167224C.1
cccagagcttcagcatgctcttgaggtccagaaaatgtctgaacaagctgctacaaacagctttaaagaattaacttacattcgtcaagaattaaggaacccactcaatggcatacaatttacttataacttattgaagccttccgaattgacagaggatcagcggcaacttgtttcatctaatgttctgtgtcaggaccagctgaaaaagattttacatgacactgatcttgaaagcattgaacagtgctatatggagacgaacacagtagagttcaaccttgaggaagctctgaatacggtcctaatgcaaggcattcctttgggcaaggaaaaacgtatttctattgaacgtgattggcctgtggaagtatcacacatgtacatttacggggacaatataaggcttcagcaggtcctagcagattatctggcttgcgcccttcaattcacacaaccagctgaaggacatatcgtgctccaggtcattcccaagaaggaaaacattgggtctggcatgcagattgctcatttggaattcaggattgtccatccagctccaggcgttccagaggccctgatacaggagatgttccagcacaacccaggggtgtccagggagggtctcggcctgtacataagccagaagctggtgaaaacgatgagcggcacgttgcagtacctacgagaagccgacacctcttcgttcatcatcctgatagagttcccggtcgcccagctcagcagcaagcggtccaagccttcgccaagtaaattctgacactgatgctcctggaactgcagtgagggttcggccgtgtcaaattctcgggtgtaggctctggccaagtgactgatattctgaaaaacatacggacttctagtataggagaagaggaatcctaatcctagtaattatatcttagcagatatgtgcttagtctcttgttaaatttttgtcttgagaggactatatatactgataaagtgataatttattcagagaataaagaatgggctccatcctttgtct

SEQ ID NO: 73714 - DNA, 395 bp, Zea mays
  Clone ID: MRT4577_167225C.1
ctctggaaaaatcgggcagaggggtttatatgaaggtttatttgctgcaagcaagggcccaatatgcccgctggcccatgctgacccacacttgttttgggtggggggcaaaaggcaagcaaccagaggccatgcctgccactggggacgattttggtggaggataataaggcaccgaattgaaggaactatagttttgggggggagtccccggcgatgtcgatgaccaagcggtttcggacgtcgttgcgtgcgaggcgcccgaccccggcgtttcccccctccggggggaccaccccgttgtccccggggatgttggggcgggccccggggtcgaccatttcctgggtccccctggccccccccgtcgtgctcccgttggcgggccttttccc

SEQ ID NO: 73715 - DNA, 390 bp, Zea mays
  unsure (1)..(390): unsure at all n locations
  Clone ID: MRT4577_167227C.1
cattgggtacctcgnagccggccgggccgggacactctataccatgccaaaaggaatccagttcaaggtcaggccacgacaggccgcacatgtcgtcccccgctacggaactttcgtcccttctcgcctgcttcgcctctacagcggacatgaaagcggcggacacgtgcgctacggccgcgcagaacctgcatcactgcatggcgacgacgaaaaaggtcgtgaagccgcacaagccatcgatcaactacctgttacggaagatcaaatagagggcgatccgaacatcccttctcacccattgcatttcccctccacgcctgtacatccttgtatactatgtaacgcataatcatgggaaaaaaaaaaaaaaaaaaggcccctagggcc

SEQ ID NO: 73716 - DNA, 231 bp, Zea mays
  Clone ID: MRT4577_167228C.1
attcggctcgagccgcaacaaacacagttttatacaccgccaacaagggccgccaaaagccaagggctacacaggccaccggcggccggaagcaagggcagcgacagcagacggacaaggcaggaatgcaacgcaagcaccaagagcggcgaccctggccgcaacgcagacaccacaagcgtcgaacaagcgcgaaaacccaaagggtaaacacacaaagagccaacagga

SEQ ID NO: 73717 - DNA, 270 bp, Zea mays
  Clone ID: MRT4577_167229C.1
ctaacaccttcttttctctatcgctttaacattcacacatcaattcaaacatcagggtaggcttaacctgatggttagatatcatacaagatcaattacatcaacgagctctgtaagggcctcactaagcgtcaccataacgttctactcaacatcattcacgatatcatgaatcctaatatcattacgcttactaataggcatgacatgaaacacatctacaatctcatctactatcagacccactacttgctcaacatctttctcaag

SEQ ID NO: 73718 - DNA, 351 bp, Zea mays
  Clone ID: MRT4577_16722C.1
gagggacacggcctgtagtcccgtctttgagacgcaacttccatcggtgtgaagctatacattcaggggcgcaatgtccgccaacgtcaccgaggtaaacctcaaccccaaggtcttaaaacgtgagtatgcagaccgtggggagatggtgattcatgctcagagcctgcaacaacatctacagacacaaccaggggcggtaactttggatgagatgctgtcttgacatgttgtgcatgcccaacttcttgaacaataacctgtgacactggtgagggcggttcatgctcttagagatcatacgcgcccatcagagaacgagggaaccatatcagtgttcagtgcggaagc

SEQ ID NO: 73719 - DNA, 505 bp, Zea mays
  unsure (1)..(505): unsure at all n locations
  Clone ID: MRT4577_167230C.1
aggcacgagggtacaanngcttttttttttttttattttttttttttttttactttttttatttcttttttcttttttttttttttttttttttttttttttttttttttttttttttttttttttttttttttggtgttttggggggggggggtggttggtgggggtttttgtttttgggggggggttgtttttgggggccggggggggggccaaagggggggaatttcaggcccggaggggggggttaagggggatccgttgcggagcccacactgcccaatttacaagcgagaaacctggagggggaaaagggggggggaataagaaaacccccagaaaaaggcgggggggggattgggggggcggccggggggaggcgaaagggggcgttgcaaaagtaaatagggatggggcaaggggcgggagataagggaaaagaacccgttcccctttccacttaaataggcgacaaccccggaggggaagggggggggatggggag

SEQ ID NO: 73720 - DNA, 889 bp, Zea mays
  Clone ID: MRT4577_167231C.1
gcatacgccgccggccggggcaaacaaccaaccctgaaattctgaacatcgatcgagtggcccagccaattccccgaggcatggcacgccgtcgtcttcaccatggcctccaactcgtgtgcctcgtcgccgtcgtgttgacggccgccccagctgcccatgcaatcttccatttcgacatccgtttcgacgcaggcagcccgttcttcggcggcggccactccaggcatgacatgtggcgccgcgccgccctcgagagcaacgccaggctgtccaggaggctcgccagggccctcggcaacaagcagagcggggccgccgccgacgccatcgtggagcccgacgtgaccctctcccagtacacccagcagggccactccctgaccgtgggcgtgggcacgccgccgcagcccagcaaggtgatcctcgaccttggcagcgacctcctctggacgcagtgcagtctggtgggccccacggcgaagcagctggagcccgttttcgacgccgccaggtcgtcctccttctccgtcctgccctgcagcagcaagccgtgccaggagggcacgttcaccaacaagacctgcaccgacagcaggtgcgcgtacgagaacgactacggcatcatgacgtccaccggcgtgctcgcgaccgagacgttcaccttcggggcccaccaaaacttctccgccaacctcaccttcggctgcggcaagctcaccaacggcaccatagccggggcgtcgggcatcatgggcgtctctccgggacccctgtccgtgctgaagcagctgtccatcaccaagttctcctactgcctcaccccattcacggaccacaagaccagcccggtgatgttcggcgccatggtcgacctgggcaagtacaa

SEQ ID NO: 73721 - DNA, 170 bp, Zea mays
  Clone ID: MRT4577_167232C.1
ccggcataaatgttgttccaatcattaacttgggcttaaacaggtttacaaggtcctgaaaaagagtccttttttgtcacattgcacatttctgtttttaattggccttggtccaagttttccccagtttttggttggcattccccctttcttctttaaaaaaccgaaat

SEQ ID NO: 73722 - DNA, 554 bp, Zea mays
  unsure (1)..(554): unsure at all n locations
  Clone ID: MRT4577_167233C.1
aaaaaaaaaagaaaagnaaggaaaaaaaaaaaattaaaaaaaaaaaaaaaaaaaaaaaaaaaaaaaaaaaaaaaaaaaaaaaaaaaaaaaaaaaaaaaaaaaaaaaaaaagaaaaaaaaaaatccccgggcaacggggggaatcggggggcaacccggaaccggtggaccgggggaaaggcaagggggaaaaaaagaaggggaacccgcccaatggccttaatcaaaatggaacccgagggaaacccgaacaaggagggcccagggggtttgggccatgcgggcacggagaaaaaaatggaccggggcaggtccaacaaaagctggacgaaaatcccgggaaccagggccccagccaaaaaaatggaaaatggggcaaagcctttaaaattggcaacaaaaaaacgaacttacggaccgtacggaaggaacaagggccccccgtcccgggtaagggggaaaaaaaacggccacgtcgtgggttttttggcccgctcggaaaatggccggaacccaaccggcctttacgggacccccacctaaaacctaaaacga

SEQ ID NO: 73723 - DNA, 249 bp, Zea mays
  Clone ID: MRT4577_167234C.1
gcaaagtcatggaggaaaacaacatcgtacaccaggctcgcttcttcaggcggcagacagatagcagcgggaaagagtggtgggtgaccaacaatacctactggaggctgcgggccgagccaggctacgggaacatggatggggccgtgctctggtagccctggccccgggggcaggaggctctggttcctcactcctcctgcctccaccccttaccatggacacatgccttccagttccttggtccct

SEQ ID NO: 73724 - DNA, 527 bp, Zea mays
  Clone ID: MRT4577_167235C.1
gccacgcgtgcggagcatgtgtgggaacgggttttgcgcaatcttcttcatgtcgatcctactaacttggccttgctacatggtggaacctatgttgaaccctccagcgattcatgatgcaactgatgagctagtggtctaggagtttgtctatgactcactttatgctgcacttggtcctttccttgaccatctttatcaggctaggctacaaccaatgatgtgcagtgcccaatgcaaccgtggtgttgactgcagctattctttcactgatgcatacactgttcttcataactatactgttaattatggggacctgggtatggaccttgtcagaaacgatcttacagactatgtcaaagagctcgtcttataccgtatccttaatgctatggatgaaactcttctaattgatgatgcataggaaaagctatttgatgtctctgttgatgtacatggtgatctacaccttgccagggtttcatctaaggataacccttatagatgttctgatgttctaactgacg

SEQ ID NO: 73725 - DNA, 218 bp, Zea mays
  Clone ID: MRT4577_167236C.1
cctctccctttataccacaaatcttattttcaatctacttgtctatccatttccaattctccacttcttaatgcttacatccctcaacctacgctcactgcctcgcagcttaacaccatccaatcacacatcttccattacctacaacatcaccacacacacatttctcctactaccacacctgtaacccttccctacttcaacactcttcatcacca

SEQ ID NO: 73726 - DNA, 396 bp, Zea mays
  Clone ID: MRT4577_167237C.1
gatcgacaccatgagggtgttgctcgtagccctcgctctcctggatctcgctgcgagcgccacctgcacgcatacaagcggtggctgtggctgccatccatcgccgccggttcatctaccgtcgacggtgcatctgccacctccggctcacctgccaccttcggtgcatgtcccaccgacggtccacctgtcgccgtcagtccacctgccaccggcggttcatgtgccgtcgccggttgatctgtcgtcgccaccatgccactaccctacttaaccgccccggccttagtctgatccccagacacacccatgcccgtgccaacagccgcatgcaagcccgtgccagctgcagggaacctgcggcgttggcagcaccgcgatcctgcgccagcgcgt

SEQ ID NO: 73727 - DNA, 305 bp, Zea mays
  unsure (1)..(305): unsure at all n locations
  Clone ID: MRT4577_167238C.1
cactncccaagtcccaacaccaggcggcgtcgagcagcggcggcgatgacgacgagcctgaagaagaaccggaagaagcgcgggcacgtgtcggcggggcacggccgcatcggcaagcaccggaagcacccgggaggccgcggcaacgccggcggaatgcaccaccaccgcatgctcttcgacaagtaccacccgggctacttcggaaaggggggggtgcgctacttgctctattttccgcaacaagttccactgcccgtgggtcaacgaggagaggctatgaaagatgcccccccccgataagg

SEQ ID NO: 73728 - DNA, 597 bp, Zea mays
  unsure (1)..(597): unsure at all n locations
  Clone ID: MRT4577_167239C.1
cagnaaatatagaacacttaccaccctcattaatgaaaccatcgtaaatgatggttcatacaacatgtcgttatctaaggaagatgtgctttctgcaattgatggtggtaaatctgagggaggtccatctgggcgacattggatattagacccaatagatggcactaaaggtttcataaggggagatcagtatgcagttgcacttggactacttgatgagggcaaagttgttctgggtgtgttgggatgtccaaatcttccattaaaatcaacaaacaagaacaatagcagctcttttggggatcgaataggttccctcttttttgctacaattggttgtggagcgcaagttgaggccttagaaggatctgagccacaaaagcatcacactccaagcgtgatttaactagctccattgcagagaaacttggtgtccgagctcctcctgttagaatggatagccaagcaaaatatggtgccctagcacgtggtgatggtgccatttttctgcgcattccgcacaaaagttacatagaaaacatttggggatcatgcagctggatcaattattgtcacagaagctggtggcatggtaaa

SEQ ID NO: 73729 - DNA, 231 bp, Zea mays
  Clone ID: MRT4577_16723C.1
taggagacggtctttaaaaagcaaactatttgctcaattattttaaaactatttgccttcaatttttccatatacacaattttatttaaagtaagttcgatttcatcataatcaattggatatatatcaactagacagcaacaaaattattaatcctgtgctttttttttcacttaaatgcgaaactttaaaaatcaactataatttaaaatagttttcttatttatcatt

SEQ ID NO: 73730 - DNA, 667 bp, Zea mays
  Clone ID: MRT4577_167240C.1
cattgggtacctcgaggccggccgggaacgtttccctctcactctcgtttcatttcccgatctcccagatctacttccaagagttctccctcctctgtcgacttggcgctctctgcgcagaacacctccgctggacccaacgacaaggttcagaatatctcctacctttacttcaaccgcctcgacattaagctcgaccaggtgaaatgtccgcctccttgccgagacgagccgagatctcgccgactgagatcttccctggagctaggatcacctggcctctccacatgatcatccaaaccgacgtgctcatctacatcctcaccgagctcgctgccgactatcgctactgctcctgtgacctcttctccaagccagaccacttcgccgacgacatcgcctacgacttgatccgtgtgatactgctcatgctcggagaccctcgaggatgtacatgcccggagacctgaaagatgcctcgactgaactgaggccctgaggctgtatgtcatcagacaggagcgctgctactgcacgctgataatcctcaaatacttccgagacagaatccccatacaactggagcgggacgacatccgatacgtaatcctcgacaacgctgacgagtactaccggatcaccatcatactggaccttgtcgacgatg

SEQ ID NO: 73731 - DNA, 1386 bp, Zea mays
  Clone ID: MRT4577_167241C.1
ggccgcttttttttttttttttttaggaagcccaatcaggtaaattcatatccatttgttgagataaggaaatgtgagtatgtgagtggcatatgactcacacgatacactagcatatggtacaagtacaacaacttttccgcacatcgagattgtgcaaaactaatattaagattcaaacaggaaatgtcataacaaatattgcaactgctccatgaacacagcagcctactgttcctccttcatagcctcttgaaccgcctttagaactagtggcattaaatgcttgtttgttgcaataattcctctgtcacgatcaagatatctacctttgcaaaaatccaaatcgtttcctgcggcatcttttaccatgccaccagcttctgtgacaataattgatccagctgcatgatcccaaactgtttctatgtaacttttgtgcgggatgcgcagaaaaatggcaccatcaccacgtgctagggcaccatattttgcttggctatccattctaacaggaggagctcggacaccaagtttctctgcaatggagctagttaaatcacgcttggagtgtgatgcttcaaaggattcaaagaatgaggcgtcaactggattattggtggagcaaacactaatcttttgtggctcagatccttctaaggcctcaacttgcgctccacaaccaattgtagcaaaaaagagggaacctattcgatccccaaaagagctgctattgttcttgtttgttgattttaatggaagatttggacatcccaacacacccagaacaactttgccctcatcaagtagtccaagtgcaactgcatactgatctccccttatgaaacctttagtgccatctattgggtctaatatccaatgtcgcccagatggacctccctcagatttaccaccatcaattgcagaaagcacatcttccttagataacgacatgttgtatgaaccatcatttacgatggtttcattaatgagggtggtaatgtgttctataatttcttgggcaccatcttctctcaagtcttttgaatcctcttcagctatgattgagaaagagtgagaaggcaattccttcttcaggaccagacataccagtacctgtgatccataatccgcaactgtaacaggagtcttgtctgccttcgattgaatgtcagagtgcaaaatgctccgctgcactctctggcagaggcgggccgctagggcgacggccttcttggctgcagcgagctcggcggcgtacgggtttccgacgacctccgtagcctgcgacatggtggcgccgtggcgggcgtcgggcggggcgcgtgacaaaacaaatctggggaacaactattgccacgtcccggccggcttcgaggtacccaa

SEQ ID NO: 73732 - DNA, 322 bp, Zea mays
  Clone ID: MRT4577_167242C.1
ggagcctaaacaagcaatccaattttgggacaattttttctcaaacaaacccttttgagttcaattcagccaggacaactatagtttgggatttaaaaatagcccataaatagcccccaacatgggtaactaatttcgccgcacccctagcacttgatctccttaaaaccctgagaaaaatagaggaatgtcggattaggggccccatccttgtaataggggaataccacaaacccctttttctttttgggctccccaacaaaaaaatggggggcccttaacttggttaaggaaaaactgggttgcccccttacaccccttt

SEQ ID NO: 73733 - DNA, 275 bp, Zea mays
  Clone ID: MRT4577_167243C.1
ctccgagctgtccatcgagacttccaactgcttatgagaggaacgggagatatcagggctcaagtcgcaatgtatcttcggaacaaaaggatgagaacagagaggccagacctcggaccctgcgcttcacctggagcatgaaaaccactagttccatggatcccagtgacatgatgcgggacatccgcaaagtgctgcaggccacgacccgcgactatgagcagatggagcgcttcctgctcttctgtgtccatggcgacgggcacgctgagagc

SEQ ID NO: 73734 - DNA, 274 bp, Zea mays
  Clone ID: MRT4577_167244C.1
acgcttgcagtgccggtcctagattagcgggtccacgcccgcgtccgaaacgaagaactgaaaatatcaatatttccggcatctgccgttgccgtaaaaaagaatgaacattgaaaatccaagatcatcacatcactctagctcacctcactgagatgaataacacgtagctgacaaaacggcaacaatgctatagtacatacttccacaggttcaaattgatccacaaacaaatctgcaaaagggggggccccctcaaaaggtcccaatgttt

SEQ ID NO: 73735 - DNA, 638 bp, Zea mays
  Clone ID: MRT4577_167245C.1
tccgatggagcgtcgagggccgctttttcccctttttttttcttttttttggttatgtttttggtgattatgtggttcctatttttacccatctacgctggcaaaaaaaaaagaagaaaaaccaatgccgctgctgctgctctcgcgatgacaatgatactgaactggaccagacgcgggaacaggaggagaaaacgtcagcttcccctgcggatgagcctacgcggcggtggcccaaagccaacccgaggctgagctggtgctgctgccaattaccctccccccgcctcccccgggacagcaaaagaaataagaggagaagctgttttttttttccctacccccaaccaaaaacaaaaggaacggggctggtgttgggctcggtgccgttgcatttgcctgggctgccgcttcccctgcagctccacgggagaacaagagctacgccttctgcaaaaccttagcctccttctggaactgcttctacttctccttgagctccaaattcgaatccgaaatgagcagaagcctcccggggatgagacggatccgaggaagcgacaggtgctgctccagctccaggagctgttgctcaatcagatttaaaacaaccacacccaaggccgggacgtgacctt

SEQ ID NO: 73736 - DNA, 227 bp, Zea mays
  Clone ID: MRT4577_167246C.1
gcaatactacaaaccaatctttgctttaacatccaactcctaccctatcgattatgctcattcaaccttatcctggttcaaatccactagatattcttccaacaatgcctcacatcttcatttaaaatactggatcttcaccttaatttcaatatccaatatcatcactgccagctgatcactaacttcttccacctatatcatcttccattgcataatctaatcat

SEQ ID NO: 73737 - DNA, 288 bp, Zea mays
  Clone ID: MRT4577_167247C.1
gcggccgccctttttttttttttttcgacctaacttattccatttatttaccggaccccgagaggcattttcgcgggccaaattggtccatcaaaaaaaggtggcccctaccccaggaaccagaaaagtttttaattccttaacctgggccaattaattggccagaagtggcccattccttttttccaggaaggaaggaaggaaaaggaccgggggccttacattccctgccaagcaagggctaatgggattattcgatggggggctatatatacgggggggttgggg

SEQ ID NO: 73738 - DNA, 542 bp, Zea mays
  Clone ID: MRT4577_167248C.1
atgatccgcatgatcgccactgctcggatcgtgatgccaagggcaatggtgaggctttcagcgggccgagtacggttctccatgccagagcaagctctctgcttccttgctggggccaactccatctttgccggcgagaaacttctcacaaccgcgaacaacgactttgacgcggaccaggcgatgttcaatatccttggcttaatccccaaggccccaagctttggagaggaagaggcggcggcagcggcggtggcggctcctgtgtgcaccgagaggtctgagcaagctgcttctatgtagaatggcaaaactagaactactgttattatagtttgatttgatctggtccctctatgaggtgtgtgtgtgtgtgcagaagagaatagagcaaagtgtgtgtgtgcagaagagaattgagcaacagagacagataagattacgggagagaacgcaggactgtgagagaatattcttctaaaaaaaaagaaaaaaaaaaaaaaaaaaaaaaaaaaaaagtactctgcgttgttaccactgct

SEQ ID NO: 73739 - DNA, 477 bp, Zea mays
  Clone ID: MRT4577_167249C.1
tagcttatctttctttctttcttgttcataccatttttgttcatttagaagcaggaactggagctacctgttatcgggcggccacctccggcaaacctaaaataccttactattggaatccacattatattccattcaaacaagggtccccactgagccctgctgctgattggaggctgcagggtttgccaaagaaagtgggacaaagggccacaattgatgaacaacaaagagggtcgtggggctaaccggaaactgctggaagaaagggagcaactggtgctgggacaaaaaggaagcacggattcgggtagctggcgggcgaaatggttgctttttgacacagcaacaatagctgcctgtgtaccagcaggtcgcggctaaccccgcaacactcttacaactacaacaattggcgccctctgtccaacttgctggtgacagacccaggctgctaataccaacaacacatcattg

SEQ ID NO: 73740 - DNA, 139 bp, Zea mays
  Clone ID: MRT4577_16724C.1
gcaagatgcggccgtgcgccagcagccgcagcagcggctgcatccagcgcgcgtcgaagcggcgcttcctcgtgcccagccacggcggcgcgaggtggaattccagccgccagtcgccctcgtactgcgccttcaggct

SEQ ID NO: 73741 - DNA, 2579 bp, Zea mays
  Clone ID: MRT4577_167250C.1
gggcgggccggccgggggctctccctgtgtgcggtgtgcatcccgcttccgcccgcgtccacccacccgtcccgccccgcccccgaaccctaacctctggcggcgatgagcagcggcggcccgccgaggaagcgcaacttcaagatcgaggcgttcaagaaccgtgtggacctcgaccccaagtacgcggagcggacatggaaggtcctcgagcacgccatccacgagatctacaaccgtaacgccagtggtctctccttcgaggagctttacaggagtgcctacaacatggtgcttcacaagtacggagagaagctgtatgatggccttcagagcacaatgacttggcgcttgaaggaaatatcaaaatcaatagaggctgcacagggtggcttatttttggaggagctgaatgcaaagtggatggatcacaacaaggcactacagatgatacgagatattcttatggacatggacaggacatatgtccctacatctcataggacacctgttcatgagcttggtctgaatttgtggagggatcacataattcactcccccatgatccatagtcggctggttaacacccttttggatcttataaaaagggaaagaatgggtgaagtgattaacagaggcctgatgaggagcataacaaagatgctgatggacctgggtcctgctgtgtatcaagacgattttgagaaaccatttctggatgtttcagcccgcttctacagtgtggagtctcaagagttcattgtgtgctgtgactgtgggaactaccttaagaaggccgagagacgtctaaatgaggaaatggagcgtgtctcacactacttggatgctggcagtgaggcaaagataactagtgtagtggagaaagaaatgatagccaatcacatgcacagattggttcacatggaaaattcagggcttgttaacatgctagtagatgaccaatacaaagatttgggtcggatgtattccttgttccgaagggttcctgatgggttatcaacgattagagatgtcatgacttcttacttgagggaaacagggaagcagttagtgatagatccagaaagtttgaaagatccagtggaatttgttcaacgcttgttaaatgagaaggacaaacatgataagatcatcagtgttgccttcggcaatgacaaaaccttccagaatgctctgaattcgtctttcgagtatttcctcaacttaaacagccgatcacctgaattcatatcattatatgttgatgacaaactccgcaaaggacttaaaggagcaacggaagaagatgtggaagttatattggacaaagtcatgatgctgttccgatacctccaggagaaggatgtgtttgaaaagtactataagcagcatttggcgaaaaggctcctgtctagcaaaactgtttctgatgatgctgagagaagtatgatagttaaactcaagacagaatgtggataccagttcacttccaagctagagggcatgttcactgatatgaaaacctcccaggacaccatgcaagacttctatgccaagaagtctgaggaacttggggatggccctacgcttgatgtccacattttgacaactggttcttggcctacgcagcccagtcctccttgcaaccttccaactgaaatacttacagtatgtgagaaattccgggcatattatcttggaactcacaatggcaggagattgacatggcaaacaaacatgggtacagctgatataaaagccacatttggaaaaggccagaagcatgaactaaatgtatccacttatcagatgtgtgttctcatgctgtttaacaatgctgatggattgacctacaaagacattgaacgggatactgagatacctgcctcagacctaaagagatgtctgcagtcacttgcttgtgtcaaggggaaaaatgttctccgtaaggagcctatgagcaaggacatatctgaggatgacacattctacttcaatgataagttcacaagcaagcttgttaaagtgaagattgggacagtggtggcacagaaggaatctgaaccagagaaacaggagactcgccaacgggttgaggaggacaggaaacctcagatcgaagcagccattgtcaggatcatgaaatcacggagggtgttggatcataacagcattgtagctgaggtcaccaagcaattgcaagcccgtttcttgccaaatcctgttgtcataaagaaacgcattgaatctctgattgaacgagagttcttggaaagagacaaagtagatagaaaattatatcgttatcttgcatagaaaactgtcatgagataattcattagcagttggcatccttctgctcttgtaaaacggttttctttatgctcgagttctcttttatcagttgcattggccgctgggttcatagatgttcaaacattggttattggttgaccgcgaactgaagtggtgattgtattgaagtggttcatagatgttcaacacttactctttttgtttgatgggtctgcaactgcaagaactaagaagccatattatctgtttcctgtgttgcattc

SEQ ID NO: 73742 - DNA, 493 bp, Zea mays
  Clone ID: MRT4577_167252C.1
aaaagacacatttcatcatccaggactaaaaagagaaaaatcttatacctgggcataaaaaaaggctcaaggttcagaacgcaataacgggggggctcaggggcggcgatcaccatggggttacaagggcggggggggggcgatccccccactagggaaggggggttcaacaaaggctaaccgggctttttggtcatgcatcgacaagggagggggggggggctaaaataaagggacaacatcatgggggggtttccaggggatcgaagggccaagatattattggtcaggcatatcggggccatacgggggggccttatttttacttttgggacatggccctttactaccaaacataggggggctaaacaccttcatgacatccctttttggcttggacagggaatcgcgcaaaagcccaacgggggggtcgctcacgggggaacggccaaagtttttttttgggcacctcgggtacttttacgggattggg

SEQ ID NO: 73743 - DNA, 1617 bp, Zea mays
  Clone ID: MRT4577_167253C.1
cctcgccgccggccggaccgtgcagcggcaagggtgtcaaggtcccgtaaaatctggcttttctccctccccataccccgcagtcccgcacacacactcgctttcttcggttcttcctcctcgagcagccacttccgtctctaaccctacagcgacgacgagagcgaggccatgaaggggaagaagccggtcaaggagctcaagctcaccgtgccggcgcaggagaccccggtagacaagttcctgacggcaagtggcacgttcaaggatggtgagctgaggctcaatcagagcggcttgcggcttatctctgaggaaaacggggatgaagatgaatctacaaagctgaaggtggaagatgtgcagttatcaatggatgatcttgagatgattcaagtcattggcaaaggaagcggtggtgttgtccagctagtgaggcacaaatgggtgggcacattatttgccttaaagggtattcaaatgaacattcaggagtcagttcgtaaacaaatagtacaggagctcaaaataaaccaagcaacacagagccctcatatagttatgtgccatcaatctttttaccacaatggtgtaatatatcttgttcttgagtacatggaccgtggatcgcttgcagacattgttaagcaagtgaagactattctggagccataccttgcagtactttgtaagcaggtcttggagggtttattgtatcttcatcatcaaaggcacgtgattcacagggacataaaaccatctaacttgttggtcaaccgtaaaggtgaagtcaagattaccgacttcggagtgagtgctgtgctagcaagctcaataggtcagcgagatacatttgttggaacctacaactatatggcgcctgagcggattagtggtagcacttatgactacaaaagtgacatatggagtttgggcttagttatacttgagtgtgccattggccggttcccttatataccttcggaaggtgaaggttggttaagcttttatgaacttctggaggccattgtcgatcagccaccaccttctgcacctgcagatcagttctctccagaattctgctcatttatctcctcttgcatacagaaagatccggctcagaggatgtctgcttcagaactcttgaatcacccttttttgaagaagttcgaggataaggacttaaacctggggattcttgtggagaacctggaacctccaatgaatatacccgaatagcctgtcgtttttagtgatgaagcctttgttgtgccttcagggtttggcctcgaagcctcttggcatctgctcctcaactgcagcctccctacctgaatatgctataacatcattgtatgattcaagccccttgtggctatctgagcataagagtagagggaactatgctgcattccgtgtatggtcaccttattgtagctattgttgcgacgggccttgtgattttgagtcttgttttaacttttgcagtcttatcggctgtggattcaaaatgaacgaactgaatattcaaaacatgtttgccaacaaaaaaaaaaaaaaaaaaaaaaaaaaaaaaaaaaaaaaaaaaaaaaaaaaaaaaaaaaaaaaaaaaaaaaa

SEQ ID NO: 73744 - DNA, 317 bp, Zea mays
  Clone ID: MRT4577_167254C.1
acgcgttcgtttgtttattggacatttggtgactaaacctgagcttggttgatagaaaacaaagccgcaaccaaatcgtgatcagggcagacatattagccaccgttgatagggaaacatcacaggcccgtaggagccacatgctccaaatttgcacaccgctacattgtgcataattttgggatgtggcctccaacaacgggctaacttacacacgtcccggggtgtgatataaacgttaacgcaactttcatatatataacacaaatggggcccagccggtgtcgtatactcttgcggactgcgtacagccacaa

SEQ ID NO: 73745 - DNA, 271 bp, Zea mays
  Clone ID: MRT4577_167255C.1
gatattaatcccataattatccccccctcctctcaggccccttgaccgcgccttctgacgcctaaacgggtctgggtgcaggggaaaaccccctactttgttgggattttttattcctctttttaaaaacttttcggggccaaaattctgggggtggcgagaaaaaacaaaatctctttccttgggccccaaaaaggaaaccccccccccccccttttcaggggccagccccgggcctttttagccccgctcttatatccggtcccccccc

SEQ ID NO: 73746 - DNA, 739 bp, Zea mays
  Clone ID: MRT4577_167256C.1
gcgcgcctatcctctgcaagctctctcatcagccatggccgccgggcggcgtctggcagacacggcgccggcggaccgccctcgcccgcggcctaacattaggctcggggactatggtgcagccaaggatgacttgccgatcgacgtgacgcctcttgatctcgtcgtcgtcagatcgtcgccgatcatcggcaagttgttcttggctacaccgtggctcctgctcctgatgtaaggctccgtctacggcgacacttggccgtcagatgatcgacgacaagcaaggccaatcaagttcggagaggccagccagacggacaagacacgtccaaaggaaatctgccgccgatcacggacggatctgctacggattttacaccagcgccgaccgcgccggaccggaggagcaggaggacctggaccgctgcggcggcgcgcgcggtggccgccgaagaccgtcccttcttgtgcctcgcccgtgcggtgcggcctcggatgcgctcacgtgcgcacgtacgggtacggctcgggtgtcgacataccggctggcttgagcggttcttgttcatcctcgtctcgtcgcccttcggcgtacggctggcacgggagcacgggacacgtacgaccgattcgccgcaagctgtctatttctaaatattaaagccggagcttctcgcattgtatccacgtcaacattttgcatttcagccaatattaaagtcaggagcaaatctgctct

SEQ ID NO: 73747 - DNA, 802 bp, Zea mays
  unsure (1)..(802): unsure at all n locations
  Clone ID: MRT4577_167257C.1
cctcgagccggccgggaaacactgatccctcccctctcgcgcctgcgagcacttgtcacacccctcacctcaagccgtcacaagctgtcccgcacgcttgctgtgctgacctcgcctgattaaatcccgctgtgaataaatctccgcatccagcaacggacaatctgctcccctcctccagtccactgcccctccacacagctcccgcgcaaacttcacaaacatgcccgacgaacccacacggcttgtaaggcccgaggcctcggaaggacgccttctcctcgtctccaaccgtcttcccatcactatcaagcgctccgatgagggcaagtacgacatgtccatgtcctctggtggactggtcagcggtctgagcggcctggcaaagacgacgaccttccagtggtatggctggcccggactcgaggtgccagaggacgaggccaagggcctgaacgaccagctcaaggagaagtacaatgccgtccccgtcatgctcgacgacgagctcgcagaccgacactacaacggcttctcaaacgaaatcatgtggccgcttttccactaccaccccggtgagatcacctttgacgagtctgcctgggatgcatacaccgaagccaaccgtctgttcgcaaaggctgttgcgaaagacgtacaagataatgacatggtctgngtccacgactaccacctgatgctcatgccgtctatgctgcgagaagagcttggcgacacaaagaagaatggtcagattggcttcttcttgcacactccctttccccagctcgagatttaccga

SEQ ID NO: 73748 - DNA, 435 bp, Zea mays
  Clone ID: MRT4577_167258C.1
atgcgaggaactgggaaggaagacaaggctgggaaaattgagattagagctgattggaatgaaggaagaacatggttttttttgaaggatagagagcaaatgctaaaaaaggactataatgctgtgaagatcattgtgtcaaatagtggctttggttgggataatgatctgaaaatggctaccactgtgggtaaaatagcaaaagggaagaactgtaggcgatctttagaaaaagaatgcaaggttgccaacaaaactggacaagaagattatgtgcagataagtacacctagtccaactattaatggtatgcagagttcattttttgacttattagaagatggtgctgatttgaacaatgaaaatgggttcaatatggacataaacactagtcaatatagagctttggaggaagaacaatttggtacagagtaa

SEQ ID NO: 73749 - DNA, 716 bp, Zea mays
  Clone ID: MRT4577_167259C.1
cgggtgagatagagcggattggaatgaaggaagaacatggttttttgtgagcatcctcaaagagtacaactcaccaagatatcgtgcgcagaatggatggaccaaagaggcatggaacagtatgacacaacgtattaatgaatggtttacatcagcaaactttgtagtgtcgcagttgaaggatagagagcaaaggccaaaaaggactacaatgctgtgaagatcattgtgtcaaatagtggctttggtaggataattatctgaaaatggctaccactatgggtggggtatgggctgatctaccaaagaatttacagagatgggatggtagatcattccctttctacgatgatctgcatgagatttacaatggtatgagtctttacttatgtcttttaccttaaaatagattctactcgttgctgatttttttgtgcttatacaggtaaaatagcataagggaagaactgtaggcgatctttagaaaaagaatgcaaggttgccaacaaaactggacacgaagattatgtgcagataagtacacctagtccaactattaatggtatgcagagttcatttcttgacttattagaagatggtgctgatttgaacaatgaaaatgggttcaatatggacataaacactagtcaatatagagctttggaggaagaaaaatttggtacacagacacaagttgatattagtgagatgagtga

SEQ ID NO: 73750 - DNA, 473 bp, Zea mays
  Clone ID: MRT4577_16725C.1
ggccgcttttttttttttttttttgtttttttttttttttgtcgctacaacacaaactttattatttttagatgcggtcaaatcttaattattcatcgagaacaattcttggagttattactaactaccaggacacccaccaacacgttacaaacttccaagagcaataaaagcttctcctggaagaaggaactactacgataccgaggagatgcagccctcctcctgctgcctgatcgtgaaggactgaagggataagagcactatcttgaggcgctccctgattttagcatcatccacatttccatcgccgtcgaacttgtatggctgctggtgggattggacgcacacctctggcttgttgatgaagaggagatgcacgaaaaacaccacccgacggagaagatactgctacctccctcctcctaagacgacgcctgcagtcacgatcataacaggagggtttgcccaac

SEQ ID NO: 73751 - DNA, 369 bp, Zea mays
  Clone ID: MRT4577_167260C.1
agccctgcgcatagattccccaagcaaacaaacagtgcatagggagtggcgaggcacagtgcgcagcagaggtatagggtcctggctcaccttcgtatacagtgacactgcacatggcaggggatgtcgtggcacactacgagccgctcaacgagactggatgaggctggcttcgctacaatatcagcccttcaacttccacacctgcgatcactgaagctttctgcacctacaacaaaacctgccatatgaggatccacctgaagctgatgcggactaggacctactgaggccactagcgatcagcctgctcgctgctagcaggcacaaggcagcatctcctggcctaaggtgacctaatggaggcag

SEQ ID NO: 73752 - DNA, 104 bp, Zea mays
  Clone ID: MRT4577_167261C.1
gagctcactatgtcggcggcgcccttttattttctcgtgcatttgacgtttagctctgttaagtgcacctaacccaagtcactggccgataataacaacaaggg

SEQ ID NO: 73753 - DNA, 398 bp, Zea mays
  Clone ID: MRT4577_167262C.1
tctacgcgtccgattaccagggatgatatttatgggatccctggtgtgacggatggtcagtaccggccattggaagaccatgcctctagtgttataaggaatggtgaatttaacaattcatacagagtctcttagcaaactaacatgtatggtttgtcaaatgctgaatttggttgagagaggtctttatttgctcattggaccagattgacgtacagatggataattttcaagatcctatggcgagcaaccggtgttcactgcagaacgaagctaatggtattctgacagtaagccatgggagatgcattggaattacaacagaagcttgggtatggatacaacatatcattgattgaaagagggaaatattctgatacctaatacaggtatgctca

SEQ ID NO: 73754 - DNA, 602 bp, Zea mays
  unsure (1)..(602): unsure at all n locations
  Clone ID: MRT4577_167263C.1
cacattttcacggcatgaacttcagttaaacgtctcgactttacacaacccagcaagtgggccatcatcccagatatatatgtctgccgtagcttatacatgtatagcagatatagagagttggtcagttcctagcagctacctaatttccaaaatcatctcagcagccaccagcaacttaaaagacagccagctagcttctagccttctctacttatatacagctcgctttcgtcgtcatactgtatgctatgggtctccatccgcggggttctcctccagctcggtgctgcagggatgccctctgctgcggctcagtatcgattctctaatctgcttgtacctgttcagctcctgcagcgcgtccgccgctgtccttgacctcagaagagcagaaggcaccaccgcagagcttgatgctccgctgccatgttcctcagtcactaccctctggagtgaagaaggttcttgaggaactgtgccagcactggggactgtcagtagcctttccctgaggcctggggcgttctttaggacgcgcataagaataccgatcgctgcatctggagatctcgttaacgagcctnncagttcctggctcg

SEQ ID NO: 73755 - DNA, 261 bp, Zea mays
  unsure (1)..(261): unsure at all n locations
  Clone ID: MRT4577_167264C.1
gtgtttttttttttttttntttttttttatttaggcgagagttctccatgttattttattataggttctgagcacatatacttatggtttggaataagacgaccacaaattactaagtggtgaggggaggtagttgagattattattacgagcccgggcgcggggggggggggggctgcagcccttgcgcctgtgggggctggccttaaaggacaggaggacctccttgaggtggtccctgctgtggcgagtggatgaggt

SEQ ID NO: 73756 - DNA, 590 bp, Zea mays
  Clone ID: MRT4577_167265C.1
ctccaccatccaagctgctgctcgtcgctagatatagagaagatgctccgcgcggcggcttgctactacccagcgccaaaaccctaaccccgatccggtccaggagaactacttgttgacatggcggctaccattagccaggcaagacatcctgctaccagactcacctgagggatcttgcgaataaccccgttgatgggtctgtacccagggctttgtcaacgatagcaacaccttgcactggcaggtcatcatcatgggccagaccaacaccctatatgatggaggctacttcaatgcagtacatgaccttgcctcaaaactatcctaacagcccggcatcagtaacagttacttatgaacatgaggcgataccaatgtttatccggatgggcttgattacctcattattcttgatacacctggtgaagaatccacaggcttttatcttatgggctaacacgggacaccagagcacactggttaccgtatagctctcagcatgatgtgcatgctctctagtgcgaatgacgagtctgcagaccaatattgactctgtcaaggattgccaagagaagcgtgatgaggtc

SEQ ID NO: 73757 - DNA, 653 bp, Zea mays
  Clone ID: MRT4577_167266C.1
ccggccgggagatgttcaacgcaaccgatccccctatcttcccaggtcccccctcccgctcgactcacactgaggcctggatcgaacgtccacggccctgaagtgtctggcgctgggatacgagcagcgcgtagatgcgggcatgctgctgctgctgacactgtcggcactcgacggccggccgcgaaggatggccccccgaggagcggagtgcgctcaagcccatgacgaccataacgcccatcagcctcgtcctgctcatggacagctacaggaagtactagacgcggcccaccatgccacaacaagaacgcctgcaccccctcaaaacagctccgccaccacaagtgcggcatgaaaccaaacagctgcgcgctcctcatgaccgtcgcgctcctaatgtactggaaccacgactcccgcagccagatcataaggagggtcgaccacatgtacgagagcgccaaaaagctcaacaagcgcgacgaatgatggcactcccagtcgacgccttccctcgcgaccacacagtgggtatcaaacgtccctctgcctcgaactatactgctgttatatcttcatgctcggagcgcggatgaacaaaatctcgatatgaatgtgacggatgatgacccctgttgccctcaccgtca

SEQ ID NO: 73758 - DNA, 356 bp, Zea mays
  unsure (1)..(356): unsure at all n locations
  Clone ID: MRT4577_167267C.1
ctccgttccattttcgcaattcctncgngctccgcatccggtgaagggcgctccattttggagatttcgcaatctctgcctcgttctgccatttttttttcttgcctgcaccaacgtcatctaaccagtcattagttggtgaaatcctccactcccctgcagaccacgtcagccttcaccttgccgtctccgttacgcgccgcgagcccacgagcgtttggcgagttttggagcatactacgcatgggaggactgacaagtaagtttggttgtggaaatggatctgggggaatcctcgacgtcgtcgacgctcgatatcgactacggccgggtcttcggagtccatagacctcaac

SEQ ID NO: 73759 - DNA, 104 bp, Zea mays
  Clone ID: MRT4577_167268C.1
gcagtgattaagtgcagcgttcaacgtctagtgacatggctgacaacactcagggttagtactatgtaccttctcgtcggctcgtaaacacacagatgatacgt

SEQ ID NO: 73760 - DNA, 244 bp, Zea mays
  Clone ID: MRT4577_167269C.1
gacagtctctctgcatgtgtccgtgcgtgtcagagtgtgtgtcagaactatagcagtggcggttgcgtactgcgagtgacatgggctcaattaagagatcgtcatctggtctggtggctgtagtggtgctcgttgccccatgtgtgccgctgaagattgtgtctatgattggcttcatatactatgactatctactctcatgtatagcagaatgggtcctggtatatcaagcatgttacagtct

SEQ ID NO: 73761 - DNA, 162 bp, Zea mays
  Clone ID: MRT4577_16726C.1
cgtgcgtaccttcctgatcctgccttacaactgtcagtttaaaagacgggggaaaaccttgagctgggggtatactgaaatagagggctagactctcaattctcacttgcttcctcaagttctgtctgtatatacgatcatcttcacagtgtcaaaagactc

SEQ ID NO: 73762 - DNA, 1182 bp, Zea mays
  Clone ID: MRT4577_167270C.1
tcgtcctgtgtccggcgtccctgccccagcaacccggccgccacccgccagcagtaggcatcaagctgagcgaccctggtccctgcgtccctggctccctgcccctgcgtcactgcactccgatctaggagccggccaccgggcagttcccaggctgctactgccagcctcccagccaccggcgtccagcactccgactgccattctgccaagcacgtcgccgtccagcactccagccaccgacgtccagctaccggccagatcccaggcagggcacgtcatccggtcaccggcagccaagcccctgtccgcccgaccaccggcagccaagcacgtcgccgtgaagccgtcctccagcgccgtgttcgtcgaaggtttttcaacacacggaacacggaaaaagtggaaattttggtatccggcccaccaggccatagggtttgggggctgtcccttttgtccacccaaacgcactgccttcgccgcacctccctgttccagctcccgcacgagaaatttctcctctttactccagcactccgctgctcgcccgaccggagtgaggcggcgcggcgatggagcacgggtcgttgacagactcgacgtcgtcgactttctccatcatggacgaggaccacaccctcgccaactccgccagattcgtcctcaaccaggacccaagggtagcattttgtggatataccatccctcatccttctgagaagaaagtgaacataagacttcagacaacaggagatgcagcaaaggatgtactgaaagatgccttgcagaatctgatgattatgtgccagcatgtcagagggacaatggacaccgcggtggttaaccatagagcaaaaaatgctgcagaagaaatggatgttgatcagaactagaatgaacgcagtgtttgttgagaccaaacacaatatcattacagcttttagtactggtcagaagctcggagagctcagtcattgttccagttgtctgtaggagtaacggtcgtattcattggcttccacttctgcaatactgaaacttcttcagtttactgcataattgcttttagcaactatattattatgatgacccaaacaatattgaattatggtgaattaaatttttgaaaaagggtatatatagactaagcacatactggaatgggcatattgatgctcc

SEQ ID NO: 73763 - DNA, 348 bp, Zea mays
  Clone ID: MRT4577_167271C.1
aaaaagggcaagggagggcaccgcccaggagcgcaccaacaccacccggagaccggacccgacacgccaccggcgcggaaaaggagggcggaggcccgacggggggggagagaccggccgaaaagaaagaggaggaggaaccaagcacaggaccaccgccagaccaaaggaggagggacaagaacaacaccgagggccacagcaagcgccgcaacaacaagaagcgacacggccgcgcacgagcccaagaccgccaccgaaacaggaagcccgagaacgcgcgagagacgcggacagagatccccaagaccggcaaggggggagagaaggcgccgcccgcgaacaagg

SEQ ID NO: 73764 - DNA, 1243 bp, Zea mays
  Clone ID: MRT4577_167272C.1
atcgattccccccgcatctgatctcttcggtgctagagaaatataggccgccgccgcctcctccttgttcggtgaaaggtgggcagttagggttgggagatctcttgactcacgacacgagcagcagaattcgtcgagggccgctggttgctgcgagaggtccgggccttcgtgggatctgtaagaatctctgctccccacacctgttcttgttgtgcgatctgatccagtttgatgttcgtttttttgtctggtcttcgattatgctgggatttctaagaaaccctaatcccagtttgatggttagggaagtaataattacttgatttgtgaaaggggattaatttgtgaaagagaatggggtgcctatattccttcactaggagtctaggactcgatttttcgtttcgtggagaatcttggatagccctctggcgtctgggtttctagtttctttgatctgcatatgcggttttcgtatcgaattctttcttgagagtcgcctcatttgtttatcagttttagcacaaacgcaaactccgttcgttccccaccaccatctcgtcgaaaacctagaaattcggagtgagattgtgttcgtccgttcgctttcgtttcttcgagatctgtgaggaggggggagagacagatccgtcgcttgctccctgttcgaggtttgtgacgaggacgagcagcagattcgacgcgcgcctccgagaatttgatgtgctatggaatccaagggtggtaaaaagtccagcagtagtcgttcctccctcatgtacgaagctcccctcggctacagcatcgaggacgtccgccctgcaggaggcattgagaagttccgctccgctgcctactcaaactgctccaggaagccatcctgataatccctctcgcgcccccatcctaattgcttagaattcccttctgctttcaattcatcttcctaaaatttctctggctagctgcttttctctgaccagcaaagcctttcctcctctaccaaccttctcaaacaatggccgtctctgcgattgggtttgagggatatgagaagcgcctggagatcaccttctctgaagcgccagtcttcactgaccccaatggcaggggattgcgtgctctctctcgtgcccagatcgactcggttcttgatcttggcaagtgcaccattgtatctgagctctctaatgaccagattgactcgtatggcctctctgatcaagcctcttcatctacc

SEQ ID NO: 73765 - DNA, 613 bp, Zea mays
  Clone ID: MRT4577_167273C.1
gatacccacgagcatcgcctcgcatgactgatgaccacttcctgcactcctgctatctgctcacaccatagtagaaacagtacatcacccgagtgactacaaatggatcccaaggctacgctcttccttggcctctgcctcgtcttcggtggcgtcggccatgacatgataatcctactgttgtgttccaaacgatacaacgccgccagccatgccgaggccatctgcgcacagatgacgagacgactgaccgatatactcgctctaactcaaggtgcgcgacaacgagctcgacctcgaaaaagcccatctgccccgacaccagaaatgatggccactgctggaaaaatatgctggactctcaactctcgtatatatgactctgcagcaccatcaaaagaaacatcactctctatctacctacaactcgtcccatacccatcgccttatcctcaacaactgcacaaatgatgttcgcaaaatacttcagttgccgctactaatgttgctatctcttgtgtgctccatctcgagattatatttacaagcatggtgatctcttgcatattagagaataagtttgtcgcttcgaattctttcactgaacctatga

SEQ ID NO: 73766 - DNA, 240 bp, Zea mays
  Clone ID: MRT4577_167274C.1
cccttcctctcctccaaggtccaatcctcgcccaaccgcaacctccccaaccaaccaaggttttccaaaataacaacgccggaccccccaacttggcccctggccaagggcggcaccaacaaggggggaacccactccttcggcccctccaacaatttctcctcccacgacctcgcagtccaaaacttccctcaagccaaggtactctctcgctctctctcctacgtctctctacgatct

SEQ ID NO: 73767 - DNA, 658 bp, Zea mays
  Clone ID: MRT4577_167275C.1
ctcctcatttgtttagcacaatcgcaaactccggccgttccccacccaccatctcgtcgaaaacctagaaattcggagtgagattgtgttcgtccgtttactttcgtttcttcgagatccgtgaggagcgggagagacagatccgtcgcttgctacctgttcaaggtctgtgacgaggaggagcagattcggcgcgtgcctccgaggttcttcctggaacttcgtcttcaaatcagaatttgatgtgctatggaatccaagggtggtaaaaagtccagcagtagtcgttcctccctcatgtacgaagctcccctcggctacagcattgaggacgtccgccctgcaggcggcattgagaagttccgctccgctgcctactcaaactgctcgaggaagccatcctgataatccctctcgcgtcccatcctaattgcttagaattccctcccttttcaattcatcttcctaaaatttctctggctagctgcctttctctgaccagcaaagccttttctccctctaccaaccttctgaaacaatggccggctctgcgattgggttcgagggatatgagaagcgcctggagatcactttctctgcagcgccagtcttcactgaccccaatggcaggggattgggtgcttctctctcggggccc

SEQ ID NO: 73768 - DNA, 2049 bp, Zea mays
  unsure (1)..(2049): unsure at all n locations
  Clone ID: MRT4577_167276C.1
acctgccggcgtcttccaaacgccggctctcccccgctccgtctgcctcccacccaccatctcgtcgaaaacctagaaattcggagtgagattgtgttcgtccgtttactttcgtttcttcgagatccgtgaggagcgggagagacagatccgtcgcttgctacctgttcaaggtctgtgacgaggaggagcagattcggcgcgtgcctccgaggttcttcctggaactaatttgatgagctatggaatccaagggtggtaaaaagtccagcagtagtcgttcctccctcatgtacgaagctcccctcggctacagcattgaggacgtccgccctgcaggcggcattgagaagttccgctccgctgcctactcaaactgctcgaggaagccatcctgataatccctctcgcgtcccatcctaattgcttagaattccctcccttttcaattcatcttcctaaaatttctctggctagctgcctttctctgaccagcaaagcgcaagtcgcctcatttgtttatcagttttagcacaaacgcaaactccgttcgttccccaccaccatctcgtcgaaaacctagaaattcggagtgagattgtgttcgtccgttcgctttcgtttcttcgagatctgtgaggaggggggagagacagatccgtcgcttgctccctgttcgaggtttgtgacgaggacgagcagcagattcgacgcgcgcctccgaggttcttcctggaactaatttgatgtgctatggaatccaagggtggtaaaaagtccagcagtagtcgttcctccctcatgtacgaagctcccctcggctacagcatcgaggacgtccgccctgcaggaggcattgagaagttccgctccgctgcctactcaaactgctccaggaagccatcctgataatccctctcgcgcccccatcctaattgcttagaattcccttctgctttcaattcatcttcctaaaatttctctggctagctgcttttctctgaccagcaaagcctttcctcctctaccaaccttctcaaacaatggccgtctctgcgattgggtttgagggatatgagaagcgcctggagatcaccttctctgaagcgccagtcttcactgaccccaatggcaggggattgcgtgctctctctcgtgcccagatcgactcggttcttgatcttgccaagtgcaccattgtatctgagctctctaatgacaagattgactcgtatgtcctctctgaatcagcctcttcatctaccccgtacaggntgtgatcaagacctgcggttacacggcccctgcggcgaattcatgaatgctgtacattgccctgctttgtcgaccattcatgtgaccccagaggacggcttcagctatgcaagctacgaggtcatgggcttcaacccgggctctttcttttatggtgacctggttaagagggtgctgaggtgctttggtccaactgagttttctgtccccgtgaccattttcggtgatcgggacaatgcgaagacctgggggacgaaactggatgctgaggcctatgcttgcagcaacatggttgagcaggtgctgccgtttggtggcttgctcatctatcagagcttccctgttacggccgaaacgacccatgggtcgccgaggtcagtcctgcatgacttcgctggtgacattgtcaagaatcgctcaaaaagtgatgctccctgggaagctgatgctgtggatgagagcgaggaaaaagatgtaaagaagatgaaatgctgatgtggtcgacgatagatcagattcagagttgctgcccctggttatcttgtgaagcagccaagcctaattatttatgccccataaacctgtgctattgtaatgtgtcccatgcttatatttgcaataaacagctttaggtggtcagctttgtttgccgcaaaaaaaaaaaaaaaaaaaaaaaaaaaaaaaaaaaaaaaaaattaaaaaaaggggaatttcgatgcccaaaaaaaaaaaaaaaaaaaaaaaaaaaaaaaataaaaaaaggaggttttaaaa

SEQ ID NO: 73769 - DNA, 328 bp, Zea mays
  Clone ID: MRT4577_167277C.1
caaagtttcttaatgattgataatgcaattactcttggtcttttatttggcttcattattcctgcttatgcaatctttgtgtagccaaatgaacatttacatgtaaataaccattttttgttttctatatatataagtttcaacttccattgtattatctatcaatgatcatgttgagttcttctgtgatgttacaatccttgtcttgttattaaatttaaacttctattgtacctcagtgcctggagggaagtaggcctatctttcatataattgaaaattgatttttttttctgaggcactaggtattagccaactctcacctctt

SEQ ID NO: 73770 - DNA, 311 bp, Zea mays
  Clone ID: MRT4577_167278C.1
tttgttgggtttttttttttgttgtttctttttttgtgaggctaaagattatgccttatttttgcagatttttcccatgtgaaaattcttaggccgttaaaaaggtttcaacgcatgacgggtccactattataaaagggaaccagttccaatgtctaagcctttttggttccggccagtaatttagtttaccctggtttggtaaattggaaaaatttgaaagcctaaaaccaaccccctgggttttttcagactaaattgcacctttttttgattgtgcggatttaaaagaacatccaacgggtactttt

SEQ ID NO: 73771 - DNA, 381 bp, Zea mays
  Clone ID: MRT4577_167279C.1
gagctcatagtcggcggccgcccttctgtttcttgtggggattttgtagcaaatgctgccaaaaccacgagagagagaatgagaatgctaccaggaagactatcgaacgcataatgacgtaccggaaacccaacgctgttcttaaccccccaaccatgaggagaagcagagacaaggcgagcactaatttctaaaactggagaagggcgcaaaaaagcaaaaacagcccatcggaaagcaacgctcatgtttataaaccttgaaactaccataaaatctaagagacctcgtgatactatttgaaccattcgagaccagccatcgtcctaaaaaacaacaagttggaaggggtttaacaaaccttccgactgtagatgaacc

SEQ ID NO: 73772 - DNA, 227 bp, Zea mays
  Clone ID: MRT4577_16727C.1
ttttctttattttgctcgacggggggtgggtttgtgttgttgctgttccttttttggcacattgttcacgcgccccttttgcttattttttttctgggtgctgttgactaacagcgtcttcggtttttgagggaaaaaagtgcatctgttaaggaaacaaaggtgacacctgggggggttttaccctgacagcccacctgccggggggggcaacaaccctattacag

SEQ ID NO: 73773 - DNA, 348 bp, Zea mays
  Clone ID: MRT4577_167280C.1
ggcacgaggcgattcttggaatgtctgcaatctaatttcttttctgaacttcgttatctgactgcaatttaggtctgagaaaatttgctgctctccttggttattttgctgtagcgtggagttggcatttggtcagctctcttgctttcatccagggtgctgtagtagtatggcaacaggccaatctatatgtagtggcatgcatcagccaggcatacaggagtagttcgggctaagatcacccatgtactagtgtaccttatagttgttactagtattgtataaatactctaggcaatgcaatagagaaggcagttcattttcctgcaaaaaaaaaaaaaaaaaaaa

SEQ ID NO: 73774 - DNA, 203 bp, Zea mays
  Clone ID: MRT4577_167281C.1
atcgcacacacaccattttcaaataatcagaccgagctccgaacgcctcggggctaattcaaaggcgtcgtgcacgcaagccacacaacaacgcttcccccgcccgcagaagaatgacgatgtagcctaggcaccggcggctacggaagcgctgctgctcacggcaccctccttagatgccgtatccggccaggaacagccgc

SEQ ID NO: 73775 - DNA, 521 bp, Zea mays
  Clone ID: MRT4577_167282C.1
tacaattccgacttgaccttcataggatttcttatactttggatctgctattttggtactcaactctgttaacgaataggtttacatatttacggttcattgacattaccatctaattacttacttaacataataccttaccgttttttgctttttaatttgatttgacaaccactttcaaaagacgttcactagaatctcacaacctttagagagagcctaattagatcactgatacgagcgcccttgcgctgaatatgatcgactctaaacgatctgccgaacctgtgggatgtcaaaatgcatcggtaggggagcgttcctccttacagggaacacacgcgaaagcggctgtcgactaaccggaagcgagaatgccgtcttgagtaacgaaaacattgctgagaatccattgccccgaaaacccaaggtttccttcgcaaggttcgtccacggagggtgagtcagggcctaagatcaggccgaaaggcgtagtcgatggacaacaggtcaatattcct

SEQ ID NO: 73776 - DNA, 733 bp, Zea mays
  Clone ID: MRT4577_167283C.1
cggccggagactttctcccacacgtcctcatcctctagccattgtggagcctagcctagtgctcacttctccctggatccagccctcccagtcgatggtgctccttgtttggcttcaacgccggccgccgtgcccctgcgcgtttctctccatggtcgtccctctctcatccctccccatggccgacggcctcatctcccatggcggctccctttctctctctggactccactaccgcgtcgctagctcggtgctgctcgcccacttcccatggccgtgccctgggatttgccggagctctgcgcgcccagccgtagctcccttagctcgcctctctttctctctgtacgcgcgcagtcgaccttctagctcctgtggcgctcgcctagctcgcgaggttccctgcgcgtcctggatcgcctagccctgcgtgctctgctcgtccatggcgcccggctgctcggtttttcctgcaccccgcccagcttcctgttgccgctccccatggccgagctccatccctgctcatctccctgcgtcgcgcgcccatgcccaactcctttccgtgcggctccctctgcacatcaatggccccaactcggattccctgcgcgcgctattttaccagcacgccgcgcgcagctacttcgggctctgtccatgtcgcgtgttgtttcagctcctcgcgcgcagccgcgtttctctgaacggacaccctcgccatagctctctc

SEQ ID NO: 73777 - DNA, 385 bp, Zea mays
  Clone ID: MRT4577_167284C.1
ggggggtggggtggtcttttattttttttttttctttttaagaaaagcaaactacttcttccaaaccatgtttgccaccacatagcgtcaaattggtgccaacacggctaataatctttcaaaattgacgttttggcccttttttgacccactgcaccaccaatgacaacatcgggagggggtgggttctaccccaaggggtggctaatacccattcccatttcggacttaccatggccaaccttcctccaaaggagggagtcaggtcgaaggaacctgaccccaccctgccgcgtgtaaataggttttgaaaacccaaagtgtcccaacttacctttcaaccggtggtgtgcccccaaaaacccagggacctccagtttttttt

SEQ ID NO: 73778 - DNA, 251 bp, Zea mays
  Clone ID: MRT4577_167285C.1
cccacgcgtccgccacccccaatccccaagagccgatcagaccatttgtccgacccccgaaggcgaccaggcggttcgtagcgctgcgtcgttgtgctgctgtgccttgggtcgagcgatgtcaacgccctcacgtggaagcgggcgcccaggcgagggcggtgccgggactactgggatcaagccgcccgggcggtcaacaacatgaccagaacgggccttcacgccaccgtcgcgtttactacgacccc

SEQ ID NO: 73779 - DNA, 272 bp, Zea mays
  Clone ID: MRT4577_167286C.1
tcgaccttggcgttcgagaacactagcgccgacctgggcgtgccggaccccgtcagccagccgatgaagctctactccagcctgtggaacgccgacgactgggcgaccacgcgcgcgggcgtctagaagacggagtggtccaacgcgcccttcgaagactattaccgcgggttgcacgtggaccgctgggaggccttcgcggaggggcgcttcttttcctcccatggcgcgcgctcgtgggaccaacccgagttcaaggacctccaccccct

SEQ ID NO: 73780 - DNA, 156 bp, Zea mays
  Clone ID: MRT4577_167287C.1
cggtatcctagctgattggttcttcttcaggatttgtaagatacactgtgggtggtcaggtgacatatgaagtacgtcggcggccatacacagttgtgctctttgttgatattgagaaggcacaccctgatgtattcaacatgatgctttatattt

SEQ ID NO: 73781 - DNA, 531 bp, Zea mays
  unsure (1)..(531): unsure at all n locations
  Clone ID: MRT4577_167288C.1
ggggaaacccgcccccccctctcgagttttttttttcttttttttttttttttttttttttttttttttttttttttttttttttttttttttttttttttttttttccatctaggaaatggatggaaaatagatgggtggccgcccagggcctttttggggagttaaaaatcgttaaggttggattagaacccctttaatatttggaaacctccaaaggggcggttttgggtgaaaatcctttttccccccatttatttaccggtttaaacccaaggccgggaaaaaccccccccaannaaaaagcccttttggtttcttattccccaaatggcaaaccccaaaaaccccgggaagggggaattttttcatcaaccccaacccaaagggggaggggggaccgccctgggggccccccacattaaggggcagtgggccaaaaaatttaaaccaggggggggggagcttgcctgaaaaaccgtattttcaaaaaagaacatttggaaccccctgcctttgggttccgggagg

SEQ ID NO: 73782 - DNA, 298 bp, Zea mays
  Clone ID: MRT4577_167289C.1
agcgcaagcacacccaccctggttatttatgacataatcacgccaagccacgcagtgcacccacacacagacatatatatatgtatgtaaaactatatgtataggccaggggcaaaatcacggctacacttataaggcaacacgagctccaaattccttgaggaacttgaattcgctgaaccctgctttggtgaaaaactcgctccaatctttttgatcccgctgccgaccttttgtcatggcaatgatgccgatgtccattaggaggtgagtttccagcataggcccaaagggggca

SEQ ID NO: 73783 - DNA, 390 bp, Zea mays
  Clone ID: MRT4577_16728C.1
cggacgcgtgggctgttcacttcaagcggcccaagacattcaagcctcccaggaatcccaagtaccccaggaaatcggttcccaggcgaaacagaatggatgcttacaacatcatcaagtttcctctaaccactgaagctgccatgaagaagattgaggacaacaacactctggtattcatagtgcaccttggagccaacaagcaccacatccgtacagctgtcaagaagctctatgatattgatgttgccaaagtcaacactctcatcaggcctgatggtaagaagaaggcttatgttcggctagcacgagactacgatgcgctagatgttgccaacaagattggcataatataagctgagttttttacttacgtgactgttaatatat

SEQ ID NO: 73784 - DNA, 416 bp, Zea mays
  Clone ID: MRT4577_167290C.1
ggactccgactgctcagacgagtagacgttcgaggaagaacaccagggctgaggtctgcttctggtgcttcaggtggacatcacgtgctagaactataacgctctgtacgaaactgacgacgtcagagagatccgaagctgcgtaccctacaggaagacactctccgccgtcctccacgaggtctactgtgacgcgcagattcacagcgccgccaataactggacttgacctgcaaatgacctgtccatgatcgctaccatgacaggcgccactttcgtcgccgattactaggaacatgccctacccgatctccgacagctcgtgcgcgtctctcagctcgcccatcaacaactacttgttctgacacatgatcaagggatccgtgcaggagtcgggaaactacccggtgcctgag

SEQ ID NO: 73785 - DNA, 260 bp, Zea mays
  Clone ID: MRT4577_167291C.1
aaacaaaaaacgggggccaggttcctttttcgcatggaaaagttccaagttactaaaaaaaacaaaatagggggcggttgggcccccttttattaaccaccattttgggaaaaaccccctttttttcctcacggggaaaagggggggccgaatttccaatccgggaaaatacgaaaaacctaaagccaagggtcggggggaaaaaaaagacccccttttgggggttaaaccggggttctggaggccggttgttatgccct

SEQ ID NO: 73786 - DNA, 1325 bp, Zea mays
  Clone ID: MRT4577_167292C.1
ccgaatcgatttgtccatttgctgcacgcatgactcgacatgcatggaattggatgggtcctactaatgctgtggcgctgcagcctatataagaacactacacacatagctcttgacacgtcgcttcatctagtcccagcactactcactcacttccagtctctagagccatcgagatcgtagctgagcgagttagtattcatggcaggaggcacgctgcaggacagatcggaggccgaggacgtgcgcgtgggcgtggaccgtttcccggagcggcagcccatcggcacggcggcggacgacctgggccgcgactacagcgagcccccggcggcgccgctgttcgaggcgtcggagctctcctcgtggtccttctaccgcgccggcatcgccgagttcgtggccacgttcctcttcctctacgtgaccgtgctgacggtgatgggcgtgagcaagtccccctccaagtgcggcaccgtgggcatccagggcatcgcgtgggcgttcggcggcatgatcttcgcgctcgtgtactgcaccgcgggcgtgtcgggcggccacatcaacccggccgtcacgttcggcctcctcctcgcccggaagctgtcgctgacgcgggcggtctactacgtggtgatgcagtgcctgggcgccgtctgcggcgccggcgtcgtgaaggcgttcggcagcgcgctgtacgagtccgcgggcggcggcgccaacgccgtcagccccgggtacaccaagggcgacggcctcggcgccgaggtcgtgggcacgttcgtgctcgtgtacaccgtcttctccgccaccgacgccaagcgcaccgccagggactcccacgtccccgcgctggccccgctgcccatcggcttcgccgtattcctggtgcacctcgccaccatccccatcaccggcaccggcatcaaccccgccaggagcctcggcgccgccatcatctacgacaacccgcacgggtggcacggccactggatcttctgggtgggcccgttcgccggagcggcgcttgcggcggtgtaccaccaggtcgtcctcagggccatccccttcaagtccagcgctcactactagtgttgcttgccttgccgtcatacacggagttctgctgccacatcggccgctcaatgggccatcactccgcgaatgtatgatgtgtgtaactcgaatgtgtggttaattttcgttttcttacgtgtttgcatccacggaatgtgtcatcagtgtacaaatcaactgtatgtggctgtacgtgtcccaattatgataatgctaataaggccataatataccaaggcccatttact

SEQ ID NO: 73787 - DNA, 3804 bp, Zea mays
  unsure (1)..(3804): unsure at all n locations
  Clone ID: MRT4577_167293C.1
ctctgccactcctgctcacctccgccgaccattcggcacgaggccatatcctcctctacatccaccgccgctgccgtataggtcccgtcccctcgtcgccgcggctgcgctggtggggagcggagcggacggacggagatccgcccgcctcgggctccgctacgccggctgaagatgatagccatggtgtctgctgttgaagagcttagttggttaacctctaaagaacttggtgagatgctcagggagtcagacaactttgttttgcagtccaagatagaagacggaggtccaaagcaagtacttgtggacatggaaaaagttgtgccctcgcttcctcttcatctccttgctgtatgtttggagcttgggcaaggcccggacttgacctatgtgcttcgtggcatccgttttttgcatagtttgtctgatctagcatcccgccatactagagtggtagcacgtttctccttgatgatctcaaattatgtcagcaagtcttggacctgctagtatgcctacttgctattatcactgaagagtgatgaatttacttcaaggctgctaggaattcatgatatgatgatgtctataaataagaaagaggatttacacttatgcttgcaccggtctgactatttactgtattccgaaaccaattcactacttcaaattgagctcaacactatcccatcatcctttcctggccttggctcccttgtcagtgaacttcaaaggctgtacaaaatgatattccaccagaaagcatggatgccatgcgccctctgcatcaccacttgccaacacggacaagcctccagcctccaaaatgaattaccttccaaaggatgcacagaacatggaagtgtctacccagacccccgacagaacgtcacttcatctgtcaacagtgtgaagcatcattgcaatttctcttgttgttgtgccagcaaaagctatttcgagatcggattttaaaaaataaggaactctctagaaacggaggcatactgtcactttctcacactatactgaagttagttgtccctgaatgtttgaagcaatcaaccgaccttgttgcttctatttccaggctcaaggcaaagatactttctattctgttgcaactttgtgaggctgaaagtgtctcttaccttgatgaagttgccactaatccaaataacatgcggctagggcaaaccttggctctagaggttctaaatttgctgaagatttcatttggaagaaaaataaacattacttctgattctcatgacaagggtaagatttaccccatgggatctgtgcttatcagtgcattgcgtcttgttgatgtcttctctgatgattcgaacttcagatcattctttttgaccaacactgttccatttttaatccagattctagctgctcctcacgatgaatttgtttcgagttggtgcgctgtcaacttaccaacaattgaggaagatgcaagtctagattatgatccttttggtgcatctgaggtggcactattagcttctgataatatgttgactgaagctaaagctaactattcttgcccttttcgccctagcgtgccttcaatggcatatgcacagacaagaacatcatgcgtagtgaaaataatagcaaatttgcatgtttttattccaaacatatgtgaagagcaagaaagggatctttttcttcagaactttcaaaagtacttggcgtctgggagtcctaaactatcagcagatctgccagcttctagtgattttaaggccactaaagtctgtagaaacttaggatttttgtctgattatgctaaaacattggttcctaatttgttaaatggggaagacttggtgttattaagtgattttgctgataagctacaatcttggtgtaaatcacaagttgcagtaaaggttgtacaaaatgatattccaccagaaagcatggatgccatgtgcccggtgcagcagctcttgccaacacggacaagcactccagcctccaaaatgaataaccttccaaaggatgcacagaacatggaagtgtctacaccagtacccccaataaatccggaaggaaatgatgaggacgagactccaaagaacactgtctctagaaatggtggtttcctgcagaatgcagttggccaagacctagtccatcttggcgttgcaagaacaacaagtggtggcccttcggctgtcgcttccggtgttagcactggacaccagcacaacagaatggatcttgatccagcatccagcagcgtggataatttcaaaacaccagaacttacaaaagaaaacggtctcgaggaggatgggaaaggagagagtagtatgtatgatgagaggcaacctaagagaaggaagcggacccttatgaataatgagcaaatagatgaattagagaaggctctagtagatgagcctgagatgcacaaaaaccctgttctattgcagagttggtcagagaagttaagtctgcagggcccagagatcacagcatcacaacttaaaaactggttgaacaaccggaaagctaagcttgctcgcattgcaaaagaaagggcggagaatgctgataaaccatctacttcccatcccggcgagtcttcagaaagtgccggggaggacaactatctaccccctgcaggtgtgatgactgttctatccaaaggtggtagcctgttgagcccggactgcactgagcaaacgtcgcaggcagagctatccccgaacacgacgatgatggtccgtccattcacgagatccttctcgttggaacccggccgcctcgtttcattagtcgacagcgatgggaaggaggttggcaggggcaagatcttccaagcgccagggaagagcacaacggagagccgcgtttgcgtggttgatgtcactgagctcaggaccgagaagtggagggagctcccccacccttcggaggcatttgggtggacgttccaggaggcggaggcgaggaatggtggcatcatcagggtctcttgggacgccgtcaggttgttccctgtagcgtagcaaggccgattgtataacaagatgagtagagggaaactgtggcctaagtaacattatgttaaaagctgtggttaactgtgttgtattcatgaactaattgttttgagcaattcaggtggttactgattttacatttttaaaaaaaaaaaagtggaatcatgagggtctcttgggactccggcaggctgttgcctgtagtgtagcaaggcagaaacttttcgtcaggttgctgtataccgctaggcacaaggtgagcagagggagcctttggtttagggcgagagactggatcatgggattcttgggggcctaagtaacactgttaaaacctgtggttaactgtggtgtatccatcaactaattgtctcaagcaatgcaggtacgagtagttactaatttttgttgtatgcaaattctggcgagggtgatatataatcctataatcctaagtctggcagcctaaataacctggttctaagctcctgtttgatccttttttttctatgccttttatgcaaatctgaacagttgtttttacacaactgaacacctttttaatgtgagatattgagcattataattgttagtatattaggttagagtcaattagttaccaagctaggcagccccgctccggtatttatctccccggatgaaaaggggacgcagctatgtcattacattctatagatgctgaagcatttattttcatgattgaaaannaaaaaaaaaaagggcggccgctctagaggctcccagc

SEQ ID NO: 73788 - DNA, 708 bp, Zea mays
  Clone ID: MRT4577_167294C.1
ggcaaggccgaggccatataggcgttgcaagaacaacaagtggttgccctccgtctgtcccggccggtgttagccccagacgccagcaccacagaatggattttgatccagcatccagcagcgtggataatttcaaaaccccagaccttacaaacaaaaatccgctcgaggaggatgggaaaggagagagtagtatgtatgatgagaggcaacctaagagaaggaagcgtacccttatgaataatgagcaaatagatgaattagagaaggctctagtagatgagcctgagatgcacaaaaaccctgttctattgcagagttggtcagagaagttaagtctgcagggcccagagatcacaacatcacaacttaaaaactggttgaaaaaaagtgttgtatgcaaattctgacgagggtgatatataatactataatcctaagtctgacagcctaaataacctggttctaagctcctgtttgatctttttttttctataccttttatgcaaatctgaacagttgtttttacacaactgaacacctttttaatgtgagatattgagcattataattgttagtatattaggttagagtaaattagttaccaagctaggcagccccgctccggtatttatctccacggatgaaaaggggacgcagctatgtcattacattctatagatgctgaagcatttattttcatgattg

SEQ ID NO: 73789 - DNA, 3449 bp, Zea mays
  Clone ID: MRT4577_167295C.1
aattcggcacgagggccgaccgccatatcctcctctacatccaccgccgctgccgtataggtcccgtcccctcgtcgccgcggctgcgctggtggggagcggagcggacggacggagatccgcccgcctcgggctccgctacgccggctgaagatgatagccatggtgtctgctgttgaagagcttagttggttaacctctaaagaacttggtgagatgctcagggagtcagacaactttgttttgcagtccaagatagaagacggaggtccaaagcaagtacttgtggacatggaaaaagttgtgccctcgcttcctcttcatctccttgctgtatgtttggagcttgggcaaggcccggacttgacctatgtgcttcgtggcatccgttttttgcatagtttgtctgatctagcatcccgccatactagactggagcaggttctccttgatgatgtcaaattatccgaacaagtcatggacctgatattctttctactttctattcttgctgaacagaaggtctcaatgggttaaaccaaaatgtttttattcattgatgtgtggtccactttgaattatcatctgatactaattctggtaacagctgttgtttttaaattaggagaataacaatgttggtgcttctccgcttgtgcatgcgtcacttgtagcaggtagtcttcatctgttgacaaattacttctcttcccagtggcatgaacttgtccatattctgcttgcacatccaaaggttgatatctttatggacgtggcctttgatagtttgcatgaagatgtgaggctgttaagtatcagattatcatcaatgggcttcggtttctttcctgttggttctttggaatctcgtcttgctcacttcatctgtcaacagtgtgaagcatcattgcaatttctcttgttgttgtgccagcaaaagctatttcgagatcggattttaaaaaataaggaactctctagaaacggaggcatactgtcactttctcacactatactgaagttagttgtccctgaatgtttgaagcaatcaaccgaccttgttgcttctatttccaggctcaaggcaaagatactttctattctgttgcaactttgtgaggctgaaagtgtctcttaccttgatgaagttgccactaatccaaataacatgcggctagggcaaaccttggctctagaggttctaaatttgctgaagatttcatttggaagaaaaataaacattacttctgattctcatgacaagggtaagatttaccccatgggatctgtgcttatcagtgcattgcgtcttgttgatgtcttctctgatgattcgaacttcagatcattctttttgaccaacactgttccatttttaatccagattctagctgctcctcacgatgaatttgtttcgagttggtgcgctgtcaacttaccaacaattgaggaagatgcaagtctagattatgatccttttggtgcatctgaggtggcactattagcttctgataatatgttgactgaagctaaagctaactattcttgcccttttcgccctagcgtgccttcaatggcatatgcacagacaagaacatcatgcgtagtgaaaataatagcaaatttgcatgtttttattccaaacatatgtgaaggtagactatttctacatgttatgagtttaaatttattcacaacacattgttaaaataagttctgttctgacaacagagcaagaaagggatctttttcttcagaactttcaaaagcacttggcgtctgggagtcctaaactatcagcagatctgccagcttctagtgattttaaggccactaaagtctgtagaaacttaggtgaagttacctttgttgtttctagttatctgttggttaatatatccattatgtggcatgtctaactttttctgtgggttttgtaggatttttgtctgattatgctaaaacattggttcctaatttgttaaatggggaagacttggtgttattaagtgattttgctgataagctacaatcttggtgtaaatcacaagttgcagtaaaggttgtacaaaatgatattccaccagaaagcatggatgccatgtgcccggtgcagcagctcttgccaacacggacaagcactccagcctccaaaatgaataaccttccaaaggatgcacagaacattgggagtctcgaggccggccgggccaataaacccggaaggaaatgatgaggacgagactccaaagaacactgtctctagaaatggtggtttcctgcagaatgcagttgggcaagacctagtccatcttggcgttgcaagaacagcaagtggttgcccttcggctgtcgcttccggtgttagcaccagacaccagcacaacagaatggatcttgatccagcatccagcagcgtggataatttcaaaacaccagaacttacaaaagaaaacggtctcgaggaggatgggaaaggagagagtagtatgtatgatgagaggcaacctaagagaaggaagcgtacccttatgaataatgagcaaatagatgaattagagaaggctctagtagatgagcctgagatgcacaaaaaccctgttctattgcagagttggtcagagaagttaagtctgcagggcccagagatcacagcatcacaacttaaaaactggttgaacaaccggaaagctaagcttgctcgcattgcaaaagaaagggcggagaatgctgataaaccatctacttcccatcccggcgagtcttcagaaagtgccggggaggacaactatctaccccctgcaggtgtgatgactgttctatccaaaggtggtagcctgttgagcccggactgcactgagcaaacgtcgcaggcagagctatccccgaacacgacgatgatggtccgtccattcacgagatccttctcgttggaacccggccgcctcgtttcattagtcgacagcgatgggaaggaggttggcaggggcaagatcttccaagcgccagggaagagcacaacggagagccgcgtttgcgtggttgatgtcactgagctcaggaccgagaagtggagggagctcccccacccttcggaggcatttgggtggacgttccaggaggcggaggcgaggaatggtggcatcatcagggtctcttgggacgccgtcaggttgttccctgtagcgtagcaaggccgattgtataacaagatgagtagagggaaactgtggcctaagtaacattatgttaaaagctgtggttaactgtgttgtattcatgaactaattgttttgagcaattcaggtggttactgattttacatttttattatgttaaaagctgtggttaactgtgttgtattcatgaactaattgttttgagcaattccaggtggttactgattttactttttactactggtgttagtgtcaaaacccaacaaacac

SEQ ID NO: 73790 - DNA, 672 bp, Zea mays
  unsure (1)..(672): unsure at all n locations
  Clone ID: MRT4577_167296C.1
cattgggaccctcgaggccggccgggaccaccttaccagcacatacgaagccagccagtctctcacacattggcgaacgcagcgatgactaccatggagaggacaagcgccgtgatactctgttgctcgatctctgctcttcttctgctctgctgcttcctcctctccgtcgcctcgccgcaggacgtttctacgagcgcgacgtccgccgagactgcagaagaagaggatcgtgcaggacccgtgagagcatcgcgcaggatcaagatctcccggctgcgacgatagaggcggacacggttcatacgttgcaagatgagaggacgagaacctggacagcgacgacgtagaccctccactgatcacggctcatccaggctagctgcgactacgcgagcacgctcgccgcgaatgactggacatactgccccaaccgtcccgacgttagctacgcataccacgtccccaacaaggggaacgacgatacgctgtggtgccactcctacagctcctggatcagcgacacgcgtgtatggaagcgtctcatcatccaccccaggaggngcgtccccgactctttcccgaaactgcacgctaatgacgccggcgtcctaacgcatggtgggatcagggatcccatccgcgagctccgcgatccttgatcacggactc

SEQ ID NO: 73791 - DNA, 436 bp, Zea mays
  unsure (1)..(436): unsure at all n locations
  Clone ID: MRT4577_167297C.1
ttaaagagaagagggggggggggggaggggattagtatagggtggggataaaaagaggattgagaatttgatatgtaaaaaaatgtagagtgagggtanagaaggtatgtgtatttttttttttaggaagggattttttttgggggggggaggggaaaagagaaaagtgtgataaaaggaagagagggagaaagaatgnggaggagtttagtatagtatagggaggatgtttatgtgagaagtaagtaggagatgtattgttattgattttgggaaaggtggtggatgattgggaattgaaggtaaggggggggatgattagatattgttgtttagtgtgatgtggtggaggtggttatngtttgagagaggggaggaggtgtaagttattatgaatgggtgtttagggaaggtgtgaagatgtttttttaatgta

SEQ ID NO: 73792 - DNA, 683 bp, Zea mays
  Clone ID: MRT4577_167298C.1
cattgggtacctcgaggccggccgggaaggtgaattctttcatcattttttccaatctcaatccattccacttgtggtagtaataaccaaacaagccttaataatgagcataatcatagtcctttataattagggctggtttggtgaccaggggattagagttggtccatggaggcaattccttggtcaacaatgcgcatgacggatttaactttaccaaatcagtcctcagtgagatggatttaactttacttctatttcatgttatgcagtctttggaactttgggacataagggagaagaacaccatgaccttcaacaatgcgcatgacggtttggttgcagccctggcatcatccagtgctacagggaaggttgcctcagtaagccatgatagaactctcaagctctggaaatgactttataatagcgatcggtgtgaaaacgattttctaccaaaaatgaccacatgacgcacatgacgaaaaggtagctgacaagatactctggagccgcgtgggctcaagaactaacggtggtttgtgttgtggttcttgtatgctgttcaatatgctattgaagtttgtaactcctaatagaaacgttcagtcaagactccaagattgtacctcggacaagtagcaaatatttattccccaaaaaaatctgcattttgttttttt

SEQ ID NO: 73793 - DNA, 685 bp, Zea mays
  Clone ID: MRT4577_167299C.1
actgcgtagcgccgcgagcccaaccctagccccgcccgcccgtccattccttccgtccttctggtggaccagctgccgagcccctccggcaggcatgtctccccccgagaaccccagccccgcggcgccggccgagccgtcgcagccgccgccaccggcggccgcggccaaggggaaggggaagaaggacgagaagaaggatgacgatctgtcggaggaggatctggcgctcaaggagcagctggagctctacgtcgtgcgggcgcaggacgcggatcccggcgtgcagaagctcgcgctcgagagcatgaggcaggagattcgctctgccacgagctcgatgacttcggttccaaagccactgaaattcctccgcccacactttggaactctcaagtcctatttcgaaacaatgccagagtccgagctcaagaagtacatggctgacatactgtcagtgttagctttaacaatgtccgttgaaggagaaagagagagtctgaaataccgtttgctgggttctgaaggtgatattggttcatggggtcatgaatatgtgagaaatttggccggtgagattgcacaagaattccaaaagcgtcaggatgatgacttgcatgctctaatggggctagtccagcaaattgtttcatttcacatgaagcataatgctgagcctgaagct

SEQ ID NO: 73794 - DNA, 579 bp, Zea mays
  Clone ID: MRT4577_16729C.1
tcgagtttttttttttctttttttttttttttttttttttttttttttttttttttttttttttttttttttttttttaaccgaacggtttaatatcccaaccgggggggggcaagcccacaaaaaaataccaaggcgggggcccttaaaagggggggacattgcccgggacccttttacctaatcaaaacaaacttttttcttcccccccccccaccgggaaaaaaaaaccggggggatacccaccccggggggaaaaaaaaaaacccccagagaaaaccccggaaatttccccccgaaaaaaagcccccccccggatttttccccccacccccccctggggaaaaaaaaaaccgggccgggggatttgggggtttttcccttcccaaccctgggggggggggcccccccggggttaaaaaggcccaccctattttgcggggggtttgggtttgaaggcggccctgccccccccatagggggggaaaacccctcacccgggcccttgaggaaccccccccgaaaacccttttaaaaaaggtttatgggagggtccacccctggcgggggccccagggg

SEQ ID NO: 73795 - DNA, 379 bp, Zea mays
  unsure (1)..(379): unsure at all n locations
  Clone ID: MRT4577_1672C.1
nnnnnnnnnnncnncgtttctaacgcatcacccatgcgggttttgtataagcccaaagaaaaaaaaagggggggaccaaaaccccgcggaaggaacacagaaagcccnncaggccgaatncagaagnaaacgcccgaccacaaaaagaaaaggaaaagggcgggcggcaccacaaaaaacgggcacagcaacagccccggctgcccccggagggagaacgacatgaacgcccgtggggaggcacagaacgccgaaccgccccctttagagagggcaatatagccacaatcgctgcaaagggggggccaagagcaggaactttctgccaggaactcgggagaagcccagcgagcatgggaagaggatcaacagccaaagg

SEQ ID NO: 73796 - DNA, 487 bp, Zea mays
  unsure (1)..(487): unsure at all n locations
  Clone ID: MRT4577_167300C.1
gccaagaagaaacacaccaagcgaaagcgcccaagcagcgggcgagcagcaagggcaaccagagaaccagcccgccaggcgcaacccgcccaagaagagagcgcaacaaaggcgaccaggagaccacaaagcacacagggacccaaggccacaagcccacagagccgcccaccaaccacagcaagggcaccggaagagcgagccgggcaagcccanaggcgacaacaagcgaaggcggggaggcggaaacaacaaccaaaggcccaagcggaacaacaaccacgaggcagagcgaacaacacaaaccaaggcaacgcaaccggaacaacacggccgaccagcacgagaacaccaagccagggggaacccagaagccgacaggcaacagcagagagcgagcagccaaaccaccagcaccagcaaacgaaccagcaaaccaacaacaacaacaaccgcaacagcagaggacagcgccgagcaaacaagc

SEQ ID NO: 73797 - DNA, 646 bp, Zea mays
  Clone ID: MRT4577_167301C.1
tttacatttccgatttaccatcaccatcggctgattatcctctcgcccctggctctccaggcgtcaggtgatcccaacaccatacccgtgctgtgttctgatgactcacctaacacactgactcacctcagagagaggatactcacctctgtggccagaacgtccgcaagtgctcgtacatggcatggatatccatacagtgcataccctgccagaagaatacgacgtaggtcctccgacgccacgcgcaccggcagacaaatccgcgcatgacttcttccgtagtccgtgaaaggcgccgcctttttcgccgattccacaggtcgatacccgcacgagaaagacagacaatcagaccgctaatatgagcgcatcctgagcccggacccgtgtggggcgtgacgagctcggccggaccctctgcgaaggtaccttcacctaggtcaagttcgccaataacgtcgagaccgcagagaatgtcgccatcaagatcctcaacaaggagaactgcctcatagcacaagatgatcgcccagatcaagcgagagatctcgatcatgaagctcatcaagaaccccaacgtcatcctgatgtatgaggtgatggccagcacagacaagatatacatcgtgcatgcatctcgtca

SEQ ID NO: 73798 - DNA, 375 bp, Zea mays
  Clone ID: MRT4577_167302C.1
cccacgcgtccgcccacgcgtccgcccacgcgtccgcggacgcgtgggcggacgcgtgggcttatacatcgccagacgcgtggctttatttgtttatttttgtaccgttactagaaggcgtaccagttataaatatagtgagtcaaataaaacatattatcattatgtatgatatattttttgagtgttagcaaaatatttctttaaactacaatataaatggtcggacgccgagttgtagataaaaagcttgactgttatatgcatgaaagatgatattttttaaggaaactataaaaccatgaaagatgtgctgaataagcaaagtgatggaaaattttgtctcatttataatatgagtgctatggagtttat

SEQ ID NO: 73799 - DNA, 326 bp, Zea mays
  unsure (1)..(326): unsure at all n locations
  Clone ID: MRT4577_167303C.1
gattgttctcctactaccccgcgtccgctgtgtgctctctcgctctctcggtggaagttggcgacgactgcagcatatgacgnagccgttcgccangtcatcaggtctccgtcagactcttcgacaggtcttcttcggcggcgatcatcgccaggtgtgcacccaatcttcttcactgggtcctccgctcttctagtcacgcatctagatccggagttgccagcattcgcctgctgtgctcggacacagcacaccatcatgcaggctagcgataggttcaacataaactctcagcttgagcatcttcaagccacatatgttggtac

SEQ ID NO: 73800 - DNA, 297 bp, Zea mays
  Clone ID: MRT4577_167304C.1
caatatcatttttcccacaaggtcatttgttgcagaatctttttgtctaatacaaaaaaagaaaaacactagggcccacgcggcacgccatgcagaaaacataatgcccggtttaaaaaccaagcaaacaaattgccggtagcccgccaaccggggaaccgaaacccaaaggaccggggggcaaaaggcctaaaactactcctaacttaggtgaagaaccacacaaggtattcccggggttaggcaaccaaatttgtcttcaccagctacttcaccgcattccagcagccaatacac

SEQ ID NO: 73801 - DNA, 566 bp, Zea mays
  Clone ID: MRT4577_167307C.1
cctcgaggccggccggggcagattttcgtatcatctgtggaaggggagtgaactctcgaggagagggaagaatggccgcgacgtctgtgatctgccggccgagatgctgttgtagcggagctggtacgagaggtatgtgctcctcgctgacccctgcgacgtgtacggtgtaaggaacctgtccttcgccatcgccgacttttccgtcaccggccacctccgcccttccgccgagctggtcatccatccgcatccgcaccaggacctgggccacttcccctctctccctcaactcgagagccggttgcaaagcgatggatattatgcaggggtccgcgtgatgatgcttatgtgtatagtattctacaattagtgagccccaaataacatcaccataaaggctgacgatttcaccgtatcatacgatactaatattcctcaccagtttgggctgtctgcatcaagcgcgattgtgtgagctgctctgaactgacttcttgacttctataatgtgcagacatctaatagaagttgaaatgagacctaatctgatgctcaatgctgag

SEQ ID NO: 73802 - DNA, 202 bp, Zea mays
  Clone ID: MRT4577_167308C.1
tttcacgccgccgtctctctgactaaccaactgcctcgggatgggggggacttttttagcgggtgtggccgcttacaaccaaggactgtcagtgtacgcacacgctggccgagtctctcaccgaggagtcacccgaggctgacacggccataggtctcgaaaggcgccctagtgaaaagactcttgcctacctaacgagatc

SEQ ID NO: 73803 - DNA, 265 bp, Zea mays
  unsure (1)..(265): unsure at all n locations
  Clone ID: MRT4577_167309C.1
cggtcggcgtcgcgacggcgatgagggtgagagcgtgcgggagagtgcggngctgcggaggacgggctgcggagggtggctgaggatgcgcgagggcagccgccggagctagtggaggctgcgtgcggagcccgngggaatgtgagattgccgggagcacggtgagccttggcgagggcgtgagcgcaggctgttgcgcgctgatgagtgggagtgcgtcatgtgaggaggcttgggcgtgagatgcatgngtgcatgaggctgg

SEQ ID NO: 73804 - DNA, 380 bp, Zea mays
  Clone ID: MRT4577_16730C.1
ataaatacatgcattgaatacattcaacgtaggctgatatatacctataatatttcgacactatggctcagcgtaagcgtaacgctcagcctaaacgcggtcaaggaggacctaaaactacaactggaggatttgataaaacaactgctgtcagagttgtcgagacgccggtagcatccggcggggtgttctcgctccccgaggatgtgactcgtgctgaaagagtatgggtggaatggattccgtctgctgtactggaagggaaaaagaggcgaatgtttctttccaagcaaggggttaacgacccacagttaatcctaacggacagtggtgtgcaagtgcctcgacgaggtatgagcgtgtgtctcgaaagtcggctc

SEQ ID NO: 73805 - DNA, 2103 bp, Zea mays
  Clone ID: MRT4577_167310C.1
tttttgtatgtattatgctgtttgcttcagattaaagtcagctgtaaactatagatacaaaatcctgtaaaaacaataaaattcgttacaaattaaagccaaaccaaacgaacatgttgcttgcttgtgatccggtctccggagtctcttgtcctccagtctcgggagtcgggcgggattccaggatccatccgtcgagaacaaatggaccggcagcggctgacggcttgacgccgatgaacctcaaaaacgacctggacctgcggaagtgcggagcatgtgctgtgtcagtgctcagtgtgcgcgcgtttgtctccttgggtttggaacggaacttgataacctcggtgaggctcgtccaggaaattgaagcgagcgagcagaaaggcattagttgttcggtgctcacgcagtcacgcgcgcgataaatttcacatctcgattcttgagtaaaagaacttgaaatcctaccattattcagaacttgaactctctgccattaacgtgtgctcagaggcagaggagggaagttaagcagatcaaatattaaaatatagatacctggcgcggggaggccgggagggagtgcttggaatcaagtgacagcagcacgcgcgcataagttcagtttgattcattcatggaccaccaacatatacaatttcacacagaacaaagctggatcagacctactccctcggtcctaaaatataattcattctacactatttatacgtttattaatatggatcggaaaaaaataggctagaaagaactatattttgggacggagatagtatgttttttcaacagacaaaaagaaacagggagatggcattcaccagttcacgagacatcaccgtgaaactgcaaacgaatcaacaaatgtaggcttagctcgccagcagccaaaaaatggggccttcctgaggagctcaagcgcgtgatggtattcatgagccgtatccttaagtgcccggtaagatagctcctcgcattttagttgcctcaccaaaggatgctcaagggacaaaaatgcttctagtagtcttctcttgcagaccagtgactcggtggagggtaagtgtgctgcctttgatgaggttccttgtttcctaccagttgtgcctaagacaacttcatgcaaaccggatttattccaacaaatcgagtaccatatactacccgcatgtcaagaggcgtacgtctccaggaatctgttgaaactctgttggtgggacaggcgcctcaaaaacctttggcttctgcattttgaaaggaggcggcaattcggtgggtagagaggacagacgagcatccagggccttcttgatattatttttaatagagaaccgttcaggagtaccatcaggtaattgtccaatagtaatggtggacaaatacaagggttccagtatatgtgacagcaatgcaccttgaattcctacaacgctccagcgggtgattttgtcaaagcagctcatggacgatgttgtatcaccacgccctggtttcctttgaacaaagccaatttcgacattcatactgttcagctgttttcttggcaaatcagactgcgatggtggtactggcatgactccacatgggagttgtgtgatgtaaagatgaaggcagtgcccatccctcagcctccatctcccagcatccccggaagcaaccagccaatcaggcggggcgccacggccgatctcggagtagacgaggcggagcagcgcgcggcgagcgatgacctcagcgtgcgcgtcgtgaacgaggtccccacgtgcgctgagcatcgaggcaccgaggcacttggtgccggtgcccatggagagcacagtgaggctgtgcgagtcctgcggggcagagaggaggatggcggcgaggaccgtggactcgcgcccctgcggcttccctttcttggccagtgagcggtagtgccggagcgccgccgaggacgcagcttccgcccaggaggagggaacggcggcgccctcttgtgacggcgccggagaggaggacagcatggacggcgtcgatgagttctcgggagcagggtcagagaatctaaacgagtgcagcagctttgtgctcgagccgaat

SEQ ID NO: 73806 - DNA, 439 bp, Zea mays
  Clone ID: MRT4577_167311C.1
cacaacgctcaaaaaaaccttaagctcaatgcttagctctatgactagagctctgacatgagcaccggcctcagcaactgccacggactatgcccaaacctatggcctaactccaggattatgaccgggatcatgacacggtacataaaaacacttataaacaaactgaggcactatgctgtgcactggcctcatgacagcgcatattacggatcatttgaaggatagatagacgctaaaataaaccctacacttgcaacataccatgtgacatacgctaccgtccatcagaccggcaattcttagtacattgataataaggcctacaatattgactacttaaaatactaatcagaatcacaacctgaaggtctggctgaaaaaaacgacgaaaaaaccaacaataccttgatagctacataccgatgcctattccgat

SEQ ID NO: 73807 - DNA, 623 bp, Zea mays
  unsure (1)..(623): unsure at all n locations
  Clone ID: MRT4577_167312C.1
ggtacacctccnagtctcggccgggnagcatcaccaccacgccggcggtgtgcagactgaactgactccactactcacacaaagcagcataccacacgggggcgcctcctatctcgcgcgcgcgccatctcccccatgcggagcgccttcaactcctggcccatgcccaaccatatggaaacacgcagtgctaggggagggctcccacgacgactcacagcgcccggtcctggagctcacgggcataggacgaactgcttcatgatttacaggatatactagaataacaacatggggggggggggcacaaccagaaatccctcagctccgtacgataacttacggcggcaggctacgcaccaaatagtgcaccgacgccatcttttactacaacttcaccaccgacgagaactggcagaacagcaaaatcctcttgagcggctgttctactgacacgtaccgcgtgacgagcaagacgatctacatgccctccaaggagagggacaaggccgagctgaacgggcttcacgaggatctgcacgccaacgacttctactaggggggccttcaggtgatgcaccaccacgcaatctaatgatgctcacagatgaactgcccatgcc

SEQ ID NO: 73808 - DNA, 272 bp, Zea mays
  Clone ID: MRT4577_167313C.1
ttctgcggttctgccgtttactcctccactttagcctcctcacttgcaagtttaatcttcgcctccagccatgcgtaaggagcagtctcacatcaacattgtggttattggccacatcgactctggcaagtcgttaaccaccggccacttgatttacaagcttgtgaggcattgacaatcgtgtgatcgagacgtttgataatgacgccgctgtaatggacaatcggtcctttaagtatgcttcggtgattgacaagctcaaggctgagcgt

SEQ ID NO: 73809 - DNA, 459 bp, Zea mays
  Clone ID: MRT4577_167314C.1
ccggccgggctcactacacctcggctcgctggagccgataaggctgccgcgccctccctctctcctgcggtgctcccatggaatcggcggcgattgggtcgcagtccccgctctccttcccctccaacctctggtatctgctcatgtcatatttatggggtaaaaaaaatccagtacccagctgtcagtaatgcgcgggttgcacgggaggaacacgacagtggacaagagtgtgtcggaccagctacacgccagatgggctgcgacgttcgacaaggcccagctgtagcaatgggatggttaccgggccggcgtagatcaacttcttaaaagcattgcgtgaagcttaagtagatgagaaaggagttggaaggagtcatcttgtaacagaattatattccaccgcattctactgaaaacttctctagccaaaaaaaaaaaaaaaaaaaatttgcggcc

SEQ ID NO: 73810 - DNA, 256 bp, Zea mays
  Clone ID: MRT4577_167315C.1
cccttctcttcttcctgggttttggtgaaacttaaaagacggcaaatgctttaaaatcaaaattttttaataaaaaccaaatccttccccataaatgcaatccataaaaaaaaacacatttttacattcataagctggactccattaaaaatttcttccggccctgaggaccataatgtccactacacgcaatttaatttattaatctacaaaaaataaaatcagtggtcttatcccaaaaagcatctttctttaa

SEQ ID NO: 73811 - DNA, 1056 bp, Zea mays
  Clone ID: MRT4577_167316C.1
agctctcgtcccttcgcgttgccctccgtggtcgccggctagctccacatcgccgccatggagttcgccggggctggacgaggaccaccggccgcccctctgtagcagacaccgccgccgcgccggacaaggacgtggaccactgaagcaggtcatcgaccacgtttcccagctgcagcaggacgcctccgaccggatctgcaccgccaccggctctcaggcctcgtctacaccggcagcaaccaatttcgaccaacagtgactgagagtgaggatgtcgcaggcaagcttctctggtttcggagatcaaaagcagcaggtgttgcttacagagcacgatatttctaaggcggaattgaggaatcttccgctggtcaactgcccattctgcatagaccacccacagcttgcggcgcacgtctcagggcaacctaaaagcatgggggcacattttgtcgcatgtcggagatgtgataagatggttgagaagaagatgagatgcccctttttcaagtggctgtctgtttatgcggagttcctgctggagaaagacacttatgatgacaatagtcttcttcgtaagattcaagcacttcagagggagaaagaaaatgccaaattactcgagaaccaggtgacaagtccatggaacgtgaactaccaacaggggagcaaggtgccaacgatgaacagtgcctctgaggttatgatcggtgcctctgaactgagagaagttaaggaggtacttctcaaggtgcttaaggtgctgcgacagcttcgagtcatgtttgcacttgccctagcggctctcgttctcatcgctcttaagtaataactagggaagttaaggagctacttcttaaggtgcttaaggtgctgggacagctttgagtcctcatgtttgcacttgtcctagtggctctcgttctcatcataactaggaatcgctaggacattggatgacactggtagaattagatggcaagtcctaaacccaagtatatccctatgtaatatcactcagtcccatcttatattatgatcttatattattcc

SEQ ID NO: 73812 - DNA, 513 bp, Zea mays
  Clone ID: MRT4577_167317C.1
tctagtagatccagcgccatctgttgagtgaacttgtgagctcgatggatggttttttctgcagttagaggactttagtgttaagtttgaaggataatgcagtagacaacgttggtggtgtgtggtggtgaggctccacgtaagagggagcatcacactacgtaacaggaatgatctttggtggattggggcgtcttaattcaaattggtgccttccatctcatcgattcagtaaatttgaatctccatatatggacgtgactgggtttaactgccgacataggtttcctctgtgtgctccactgtggcctagaaagaattaaaaagtgcagtgcggttcatagcaatacatatacttgacattgcagaagtaaaaacgtgttccgggcacttggtgaatggagaaccttgtcactgtaaattggttcttaaaccttgttgcgatgtaataatcatgtaaacactgtaaaacatgcgaattttccaaggcagcaataagcttcagagttgaag

SEQ ID NO: 73813 - DNA, 505 bp, Zea mays
  Clone ID: MRT4577_167318C.1
aaaaaaaaaaaaaaaaaaaaaaaaaaaaaaaaaaaaaaaaaaaaaaaaaaaaaaaaaaaaaaaaaaaaaaaaaaaaaaaaaaaaaaattaaaaaaaaaaaaaaaaaaaaaaaaaggttggtccctgggccgggccccccctaggggggatttcggggatttcccctcccccggggggccgttcgggcttccttttagggggcccatttccccctttgggggggggttttccattccccgggccggggttttccaccggggggccggggaaaccccgggggttccccaccttaatcccctgggggcccatccccttttggccggggggggtaataccaaaggggccccccccgttcccccttcccaacggtggcccaccctgatggggaaagggcccccccctgtgccggccctttaagccgggggggggggggggttccccccggggggcccgttccttttgccagccccctaccccccgcccttttggttttttccccttcctt

SEQ ID NO: 73814 - DNA, 321 bp, Zea mays
  Clone ID: MRT4577_167319C.1
cctcctgttttgtttggggaagttttttaccttgtgcacgctgaaagggacagaacactggacggcgacactcatgataacggttgtctatgatgcacgatccgagtcagaagcagagtttcaccatggacgtgaccccctgatatggcagccgatggacgaggggaggcccacgcacaaggatgactattccatggcggcacacgctcttcctgacacatataaacctatcaacgagcagaaaggcacgctaggtagcgtatccagtaaagagggagaacacctttggaaatagtgaggatccccactagtttgcaggcc

SEQ ID NO: 73815 - DNA, 587 bp, Zea mays
  Clone ID: MRT4577_16731C.1
aattcgggcacgaggccccccccctgttttttttttttttgactctttttttttttctttttttcttgatacaaaacgcgccggattgaaaaatcggcggagaaaaagctctggactttgggcccgcttgcgtacaagcatcaggacattgttgccatccatgaccatgggcacagcaaaaaggaccggggcacgatcggagagaagataaacgcaaagcatctatgtaaaggcaacgactgcgggacacgaacatgccggtggggctaaacgaacgaaaccctgaatgactgcatggagggaagggcaggaccaaacccgctggatctgacccaaatataatccagctccgggggggcgggaggaacggcaccattgtaggtcatacctacaaccccgtgtcagtgctttctcgctaggaggacgaaaacggctgataatatgcccggaatgacccccaggaaggggagcatcgggcagatccaaaactgaaccccactacccaatggaaagactaccccgaccggcggaagcaggatggccagcaggatctccacgaacgggtccgaccccattgccaacccccc

SEQ ID NO: 73816 - DNA, 264 bp, Zea mays
  unsure (1)..(264): unsure at all n locations
  Clone ID: MRT4577_167320C.1
aggccacccaagaagggnacagcnngnncngcgcccncgcaccaggacncngacggcaggcacganggcagcgnggaggaggngncnacccagcngaganngnggggaagcgngnncagaaccgncngganggnnccaagannancaagaaaancnnggacccaaaggagaggaacaacacngaanacaagcgggagaccggcacngcggncnaccgcaggcngngngggaaagangaggncnnngagnacccnangaccgaaa

SEQ ID NO: 73817 - DNA, 497 bp, Zea mays
  Clone ID: MRT4577_167321C.1
gtgtctctgttcggggaccaaacctggttcaatagtgttgagagtaaaactacgaaatcaagcgagtgctagtgttaaacacatgactcagaaagcgggcaccgtcgctccaaaaataaaggcggagcgaaaagatctaaggtctagactggataccaaagcattgagctcaatctacatgtattgaggcattgtacggagtaactaaaactaatttacaccagggcacacctaactacacgtggtcttaatatcaattctagtgaaccgatacaagagccggaacagggagtcccctagggggctgattttttggcataggatatagccatggcgctctccggcgagatcttagaagccttggagagcctgcatagcgaccatggactggccgtcgttcacaaactccacaaaagcgataactgtgttagctcccatcatacttactttgcagaagatacggttctggtggatcaggatctggagcatcatgctcg

SEQ ID NO: 73818 - DNA, 405 bp, Zea mays
  Clone ID: MRT4577_167322C.1
ccattgcctcgttgacgtattagcgccatagccctagactcaagccgccatcgtcgaccagagaggaaaagagaggatccgccgccgacaagcacgtgaatcacggtcgctcaggcatccgtggggcattccagagctgcgccatggttcctgggagctccgtcagccatcaattccaccgtcggtatctctgtgcttgggcaattgctcgccgggtcgggcaatttgcagttgcgccgtgcctcaccgtggacgactgtcttgggggccaccatcacttcggtgaggccacgaggatctgaagaatcatcctggtacctggaatctcaagtcccaggtcaagaacaggtaccacaggatgaggcgcttggaggatgctgtgacgagttcgtgagtggtctaggc

SEQ ID NO: 73819 - DNA, 304 bp, Zea mays
  Clone ID: MRT4577_167323C.1
attcagaaacacaccaagcgtagttacctatcaacgactcaacaacaatggctgccaatatattagcccttcttgcgcttcttgccctttttgtgagcgcaacaaatgcgttcattattccacattgctcacttgctactagtgccattataccacagttcctccgaccagttactacaatgggctttgaacacctagctgtgcaagcctacatgctacaacaagcgcttgcggtgagcgtttgacgcatccaataaccaattgcaacatcaaacacatggttcttttaaccattcaatactat

SEQ ID NO: 73820 - DNA, 234 bp, Zea mays
  Clone ID: MRT4577_167324C.1
agctcggaattcggctcgaggggaagatcaacactgattccaaacaagaccacatccatgaggaggaggcatttttgaagtatggcggggttccaacatagctacataggacgcaccaatgggccggaacctacaagatcaatactgcaaacaagtttgtcttgaacgagccactcaacatgttacatctgacaagagagcactctatcgagcaactcaaaaaacatattgatg

SEQ ID NO: 73821 - DNA, 224 bp, Zea mays
  Clone ID: MRT4577_167325C.1
cctcgattgggtacctcgagcccggcggggatctttcctatcctgccacacccacctcgcctgctatcttcgtagcctccgtcgcgtcgagcatcgatcatgtcggcctactgcgtaacgtacaaggcatgagcccatcaagaatgctacctactttggtaccccctgcaaggagtatccttgctgctgatgagcccactgtccccactgcgaagcgcctttcc

SEQ ID NO: 73822 - DNA, 273 bp, Zea mays
  Clone ID: MRT4577_167326C.1
gtcctttttcattttatggactccaaagactacggctttaggctgatgctacagggactgctacaacgacatgaagctccacgtcacaaaaaagcatactcatcctcctcctcctagtcaactccgagatctggctccttgtaaaaaaactctgacaaaaacaacgacgactgttcctccctgtaggagggaggcaagaagtcctatgtcgagaccagagacgcgccctcaccgtcagtccttgttgacacgcccatggctaccggcttcgac

SEQ ID NO: 73823 - DNA, 627 bp, Zea mays
  Clone ID: MRT4577_167327C.1
ggccacttcggcctcgacgccaaggagtacatcctggacgagcactccaagttcctcaatggcgagctcatgaaccaactcctggacctgctccccctcgatccttacatcgaagctgctctatccccgatttcttctatcgtacagttggtggtgttggcagaggaggaggttatcaccaactcgcccaacaggtgtttgatgatttgcttcaacctcttacaaagatgtttcagctgggatgcagcaccacatcgtcagctttggccaccacctcatattcatgttgagttttggtgtggcagtgctgctctacgttcaattccatggccaccacccacttccttggatagtttgtatactaaagaattctattgtagagtgcaatttcctggatttggtagaacctttgtgttcaatgcagagattctaaaaagagttggacgtacatctgaagccaaagattcatctcgcgtggctctgaaatcatcatgggggacacttggctgcagtcatgaagaggctgctgaattagcttctttggtggatggatatcagttaatgcgtgcagcgtcagcatctgatcgggtgtcttcgctgaagaatatcacccacactggggttatg

SEQ ID NO: 73824 - DNA, 346 bp, Zea mays
  Clone ID: MRT4577_167328C.1
ctcgagccgattcggctcgagggccggcttccaccccctgctcactcaagttcggcagccggcgttttcttgctcggcaccagggtacgcacgccgcctttgtctccctgactggtggtcgcgcgtcgggcgttctacctgcttggcccgatgtatataggtcggccagtagacgttgcgtctattctctggtggccagagctcgcacaggacgcaccctcatcttctccatcgctggacctctacctcaccatgtgctgaccgcgcgatgtgctgctcgcatccctgcaccgcactctggaggtcatgcgtgctcatgtcactggtaccagccagtcgagcgcct

SEQ ID NO: 73825 - DNA, 1248 bp, Zea mays
  Clone ID: MRT4577_167329C.1
ctggccgggaacgcgtcgctggcgaaaccgcgttcacgccaacgaacccaacttcagaaaaagctcgttctgcccccttggccgggatcgaaacaaaccctccgtctccaaaagagagcccaatcctcaattcccaatccccgaatcgcagtcgccgcccggatccgaggaaacaagtcgtcgtcttgctccaccgtccgcccgccgccatgagcttcatcttcggcaagaagaagactcctgctgagctgctgcgggagaataagcggatgctggacaagtccatccgggagattgagagggagaggcagggcctgcaggcccaggagaagaagctcatcaacgagatcaagaaggtggccaagcagggtcagatgggagctgtaaaaattatggcaaaggatcttatccgcacaagacaccaaatcacaaaattctatgcactcaagtctcagctacaaggtgtatctctacgtattcagactctgaaatcaacacaagccatgggtgaagccatgaagggtgtgacaaaagccatggggcagatgaaccgacagatgaatctgcctgccctgcagaagatcatgcgggagtttgagatgcaaaacgagaagatggagatggttagtgaagtgatgaacgacgccatcgatgatgccttggagggcgacgaggaggaggaagagacagaggagctggtcagccaagtccttgacgaaattggcatcgatatcaactcagagcttgtcaaggctcctgcaactgcagttgcgaagcccgtcgcagcgaggaaagttcctgctcaggctgaagccgcgggtgggccagatggcggcatagatgatgacctgcaggcgcggctcgataacctcaggatgatgtgatcactggctggagcctaacaaaacatatcccacgctttgtttgtagttttgtaccataaaaatatagccatttattatggcaatcttctgtttcgtatctgagttgcagagtgtttggcattctgtccattgtacatataataatatatttaacaccatgcactaggccgtgcgttctgttcataaaaaaaaaaaaaaaaaaaaaaaaaaaaaaaaaaaaaaaaaaaaaaaaaaaaaaaaaaaaaaaaaaaaaaaaaaaaaaaaaaaaaaaaaagaacctaggaataaaataaatagaaaaaggtggccgggggaattaatttttttctccttataaggaggaaaaatggcccccgggggaaaa

SEQ ID NO: 73826 - DNA, 314 bp, Zea mays
  Clone ID: MRT4577_16732C.1
ctcttgtttaggcgcacgcatgggaaaaggggctggggcccatgctggagtccgatgtcgcaacagcataaggcacacaggaacctgaatggtagatgacaccggaaggcgcgaccggtgcggttccaacggccgtcctcaaggacaggacagggtacggcaacgggcgcatcttcgagctcgaccgtgttggccgacactaagttgtaggtgcccgggccggaggagttcgccgtccactagatcatgtcgatctcacacaacctcctgagcgcgctctagggatcattcgttcgatatctatgtagtagccg

SEQ ID NO: 73827 - DNA, 1439 bp, Zea mays
  Clone ID: MRT4577_167330C.1
gggtacctcgaggccggccgggaacgcgtctcggctgtcgctggcgaaaccgcgttcacggttcacgccaacgaacccaacttcagaaaaagctcgttctgcccccttccttcgcatcgaaacaaaccctccgtctccaaaagagagcccaatcctaaattcccaatccctcaaaggaaggaggattcttcagcgtctcgcttgccggccccgaatcgcagtcgccgcccggatccgaggaaacaagtcgtcgtcttgctccaccgtccgcccgccgccatgagcttcatcttcggcaagaagaagactcctgctgagctgctgcgggagaataagcggatgctggacaagtccatccgggagattgagagggagaggcagggcctgcaggcccaggagaagaagctcatcaacgagatcaagaaggtggccaagcagggtcagatgggagctgtaaaaattatggcaaaggatcttatccgcacaagacaccaaatcacaaaattctatgcactcaagtcccagctacaaggtgtatctctacgtattcagactctgaaatcaacacaagccatgggtgaagccatgaagggtgtgacaaaagccatggggcagatgaaccgacagatgaatctgcctgccctgcagaagatcatgcgggagtttgagatgcaaaacgagaagatggagatggttagtgaagtgatgaacgacgccatcgatgatgccttggagggcgatgaggaggaggaagagacagaggagctggttagtcaagtccttgacgaaattggcatcgatatcaactcagagcttgtcaaggctcctgcaactgcagttgcgaagcccgtcgcagcggggaaagttcctgctcaggctgaagccgcaggtgggccagatggcggcatagatgatgacctgcaggcgcggctcgataacctcaggaagatgtgatcactggctggagcctaacaaaacatatccacacgctttgtttgtagttttgtaccataaaaatatagccatttattatggcaatcttctttttcgtatctgagttgcagagtgtttggcattctgtccattgtacatataataatatatttaacaccatgcactaggccgtgcgttctgttcccaagttccaaaaaaatggagtgcattctggtcgtgtttcagtcgctgttgtgagggtgtgatctacagatagtactgacagatgacaatgctgtgctcgacgtacacgggaagggaacgatgaatttggactggattttgcaaattcatcgccaaagcttacagatgtgcagaatacttttatccatgaaaaggtctagaagttgaatatcaatcatgtcttgattatgtctataagctagacaggcactgaaacaagcaaacaatcttctcgtgcatggtatgccgggttgagtaagaaa

SEQ ID NO: 73828 - DNA, 839 bp, Zea mays
  Clone ID: MRT4577_167331C.1
ctcccaacgagacccaaagaccatcacatcaccatgggcaccaagccgcagcaagaagagcaacaagcgccccaaaccacaccaccatctctacaacagcagcagccacacaagaagcaggtgaggaggaggctgcacacaagcaggccataccaggagaggctactcaacatggccgaggccaggcgagagatcgtcacggctctcaagatccacagagcctccatgagggaagccaaggagcagcagcaacatcaacaactggtgcaagaatttcaacatcagcaggaggtccaggtagtgcaagatcataggctagcttgtagtgcacccagcatgagctcatatggttccttctcagattatccatttgcacactccacagcaaacaacagtagttgctcattttattcatacccactcctgccttaccacacaccaccagctgcacccatggttcccatggttgatgctctagatcacttgctgccgctgcctacgcagccacttgggcttaacctgagcttccatggcttcgtcgggggcgttgctggcgaagatgccaagaacaacgctgattcctttgatcctcctccgttgctccaacaaccctcgcctgcatcctcctactcggtctactcctctccgccggcgacgacgatggcgagccaggacgtggcgtccgccaccgccgagaacacttcaccgtcgctacaccgtgtgctggatgaggaggagatggcggcgatctactcggttggggagcggcatgatatcgagtggagcgacacgctgaacctggccacgtcggcatggtggagcacgctcctcgacgacgg

SEQ ID NO: 73829 - DNA, 198 bp, Zea mays
  Clone ID: MRT4577_167332C.1
ttcccataaataatcattaatctttttatcttacccaccaacacatatatctaaagacaagtgtctatctacaaaaaccacttatcttgcccttattgatcctcctatcattactttaccctcaagtctactttcaacaccaactacttgcatccaacccaattcactaactcaataccattactcatttaccatcat

SEQ ID NO: 73830 - DNA, 335 bp, Zea mays
  Clone ID: MRT4577_167333C.1
cctattgggggggggccaactccgcaaacccgggggaaaatttttaaaaaaatttgaaaacaagatttaaaacatttgttcgggcccggaaaaaccggggggccccttttggccgggcgggcccttcgggaatccaaaggcctttccacggggggaaaaaaaggtggggggcgaatttaaacagattttttttgtgggggcccccacaaacaggaattttttgggaatgggcgcccaatggacagctttgacgttgggagaaacacttcggggggacaaccggcccaaatggggggggtgaattatttggcggtttggggttccccgggggggct

SEQ ID NO: 73831 - DNA, 816 bp, Zea mays
  unsure (1)..(816): unsure at all n locations
  Clone ID: MRT4577_167334C.1
ttccatacccctccatgttcccttaggaaggaagagaatctatctcaccatctagaaagagagaaacaaagagatgaggaaccagaggctagctcctatcacttgctcctcttcaaagaccaacaacaccaagcgagaggagccacacctctccggggcttacattaggagccttgtgaagcatcttagctcctcatctacggcgagatccaaagaccaccatcacatcaccatgggctccaaatcacaccaagaagagcaacaagccccacaaaccacaccatcatctctacagcaacagcagccacacaagaagcaggtgaggaggaggctccacacgagcaggccatatcaggagaggctactcaacatggcggaggccaggcgagagatcgtcaccgctctcaagatccacagagcctccatgagagaagccaaggagcagcagcagcatcaacaacttgtgcaacaattgcagcatcagcaagaagtccaggtagtgcaagatcatagggtagcttttagtgcacccaacatgagctcatatggttccttctcagattacttgcacaatagttacccattcgaacactccacagncaccaagcaacagtggttgctcatattattcatctcctccactcctcccttaccacacaccagtcgttgcacccatggttcccatggtagatgctttagatcagttgctgtcgctgcctacgcagccactagggctcaacctgacattcgatggctttcaatgggtggtgttgctgccgaagatgccaagaactgcactgctactagcccctttga

SEQ ID NO: 73832 - DNA, 470 bp, Zea mays
  Clone ID: MRT4577_167335C.1
tttctcttttttttttttttttcttttttggttttgttttttttttttttttttttttttttttttttttatttttattttttttttttcttttttccgggggggatgggttctatccctttataaccattcttttggggacccggttccttttccttttaaagaccggggccgggaacgacccgccccctttttaaaaaaaaaaaaaacccccccccccaccctttgaagccaaaaaccggagctggggcccattaccccggggaaaaggggttacaaaaaaaaaaggggttctttcagccccccaactggggagggcccccccttttctttgaataacccgatattttccttgccgctggtttgttagacccctaaaaggatcccctgaaaaaaaaaaagagcccagccccccgggggggggccaaaaaaaaataccctgatctggggggggggcccccccccccccc

SEQ ID NO: 73833 - DNA, 908 bp, Zea mays
  unsure (1)..(908): unsure at all n locations
  Clone ID: MRT4577_167336C.1
cattgggtacctcgaggccggccgggaatggaatctgctctgctcgcgacagggaggcaaaaacgcgaaacgtttcgaggaagacggctatctgtcttctgtcccatcccattccaaagcgaatagaggggaaggtgggggcgggaggcaatcggagggcgagggccgaggaggagtcaaaaggcttctccagttgagcggcgggatgccggtaacgcgtaggcgcgccgccgtggcggcggtggcgcaggaggaggggcgcgatgcggcgatctacatatcctctgattccgatgcggggtcagacccggaggattcagaatccgaggaagaggaggatactagcgatgaggacttcatcgacgtcagcgacagcgaggccgatgatggggaaagcagcgacgaggaaggcgaggaggattcggagtcggaggctgaggctgaggctgagcaattgggcgcggatcggagcgaggttgcctgcaacaaaattgctggtcttctaagcagtgggaggagtctggagggtttaaagttggcggagtacaaggtgtatttaaagaagaatggtcttagccaaactgggggcatggacacttgtgtagacagaatagtactccattggaggttcaaagatgcggatccaaggagaatttatcctcggtcatccttttgtatcaactgtaaaggtgatgtttgtaggggcgatgccgttctattcaaacagagggtgtacgagaagaggtaatcgtatagtagcaagcaatgtcatcaaggatagtaatgggtcacagaaacagcaacacactttcacgattcaagtgttttggagcaaaggacctggggaattacccaccttgcatctgntgcttgtcaangggcgcaacctatacagaatgatgactttt

SEQ ID NO: 73834 - DNA, 287 bp, Zea mays
  Clone ID: MRT4577_167337C.1
ctgtaatgttttttcccatgaacacagttgttatgttgtgtacacctgtacctttccttgttggagttggggttcccttttcagaaaatgttcaattctagatgtttctcctatatctatataaagctttgcatgaacctgtccagacacagttaactaaaaaatgaggcagcagactggtaagcgtccccgccaacacagggaatatgaaagagaagaaaagaaggatcaacgcaagaggccatttcccaatgctcatgaaagctctaataatgatgggttggttc

SEQ ID NO: 73835 - DNA, 509 bp, Zea mays
  Clone ID: MRT4577_167338C.1
cagagagatggattcaagggaggaaagagaaatatgtctatgaatacgtagccgggagacctgaaaagatgcatttcttgtgtacagcaaaatccatcagttcaccctcacagaacagaacaggaaatattcccccggtacaatttgatagcagcaacaagcttttctgcacaaaaaaaatttataacttacccacgggctttgaagatgacatatccgctatttataccggaaaacattttgccctgagaagattttttttacaaaccgacgagaacataggatgaaatgcggcttctcttaaggggcacgccccacaattttattgggccattacatcaaaaaaccggttggttattaccccttgcacccggttattcactggttgaaaaaaaaaggacgggatggtgttactgcacttgtggtctgccaacaggctaacaaacatgtcctaattggaaccggatgggacatcacaaggggcggaggccttgttagcgttggtaccc

SEQ ID NO: 73836 - DNA, 529 bp, Zea mays
  Clone ID: MRT4577_167339C.1
ggcggggcgagcgaaggcaagctggccatggagcaggagctgaggcaacggagagaggaggagaacgggaagcgccgccgcatggccagtgaagctccaaagcctgtaaccgggcctcggagcgctgcagagatcgcgggtagagtcgacatgacgttgacgtgcacgggcaaaggagatagtagctgtcccgccgcgtcggtccatccggtgtcggacgcgtccgggaccgggaccgggaggagcagccccagcgatgcggccctgccagtgccagtgccagcgaagacgaagaaggcaaagaagctgccgttcttcactcgcgtcgtcatgttcctggggggcaggaggaggaggaggctcagagctgccaggtgattttccgtttccttgtgttccttatctgtgtgcccgtgtcgcgtgtggtgtttgtcagtgctgggagcgtgtaaacttcactggtttttactcgattgcacgttgttcgtgctggatgtgttcgaagattgtgtgagattgcatggggtgt

SEQ ID NO: 73837 - DNA, 248 bp, Zea mays
  Clone ID: MRT4577_16733C.1
cggatttttctttcccggagaagctccattacggggggacattttttccttttttgacaaaaacttggatataccctcattctgggtgacatcgttgtcccacacacgggacaccccctccggggattaaccacacctgacttaagtctgcaacccataaagagagaggtacttcccattgagggggtacaccacactgatagcttttcaaaaggtgaaactggcgtgccaaatgtttttaacaaacc

SEQ ID NO: 73838 - DNA, 290 bp, Zea mays
  Clone ID: MRT4577_167340C.1
gcgcacaaggtcttagaacctaatattgaagatgtgcgcaccatcgtctgctaggctacttgaaggtggtagttacataaattgcgtggctttaccagatggccatgctaagaaaactactattggaaagggattcgtacggattttggattctatctctgctcaccaagcttttgcaggagatttccctgcttaccaccgcaaatccttggctcgtatttctgaaccgcgccccaatacactacatgtttatgctgaagtgattcatataacaagcctagctgttcctt

SEQ ID NO: 73839 - DNA, 268 bp, Zea mays
  Clone ID: MRT4577_167341C.1
ctgcatcgcccccccgcctgctccttcttccactcccgaccggcttccgccatgcgctatcggcaacccagacgccaccttttcctccccttcttcccttccgggcctggaaggttcaccttggcttgggacgctcggcgtgccgggccaccggtttggttttcggcgacgaccaagatgaaatggcgcgtgcgtgcaaggctgctggtggtggtcggtcctgcgcctttttccccgcgacgacgcgcttttgttccccttcggctgg

SEQ ID NO: 73840 - DNA, 213 bp, Zea mays
  Clone ID: MRT4577_167342C.1
cgacccacagccttccgcacattaatcttttcatcttaacccttttcgaagttgaaccaccccaagacccccttgaggtctttaaccccttgacccttgaccattttcaagttaaccatatttcgcttaaccacttccctgcttttaattccgccaaacaccccaaaattcttgcccaattccccgggcgcttcttccaaaaaccgtttccca

SEQ ID NO: 73841 - DNA, 1926 bp, Zea mays
  unsure (1)..(1926): unsure at all n locations
  Clone ID: MRT4577_167343C.1
acaaatggctgggcgagctggtcggagaggacttgataacattggtactgtgatcattatgtgtcgtgatgaaattcctgaagaaagcgatttgaaaaatttgatcgttggaaaaccaacatcgtttggaatctcaatttcgattaacatacnaccatgatactacatcttccgcgtgtggagggggtgaaggtcgaggacatgctcaagagaagttttgccgaattccacgcacaaaagaatttgcctgagaaggaaaagcttcttctgcaaatgcttcgtcaacctacaaggacaatagagtgcataaaaggagagccttctattgaggaatactacgagatgactttagatgctgaggcacacagggaatatataacagaagcaattatgcagctgcctaattctcaacagtttcttacgcctgggagattggtggttgttaaatctgattctgatgatgatcacttgcttggtgttatactgaaaaatccatctgcattgctaaagaaatatgttgttctggtattgactggtgattgcagttcatctgcactagcccctgagttcaataaaaatgaaaagggtcctgtggattttcaaggaggacaatttattgtcctgaaaggaaaacgtggcatggacgatgaatatttctcttctgttagttcacgaaaagcttcaccacgcttccgtatcaatctaccatacaagggggatgcatctggaatgggctttgaagtaagagcaattgagaataaagaaatcattagtatatgcagcagcaaaatacagattgatcaagtcagacttcttgaggagcctaacaaaactgcatactctagaactgtccaacagcttataaaggagcaaccagatggaaccaagtatcctcctgctttagatgcaatacaagatctaaaaatgaaagacatgtatcttgctgaaagttaccgtgcatatcacatactactgcaaaaaatgtctgaaaacaagtgccatggttgtataaaactgaaggagcatatatcattgatgagggagcaaaagatgtacaaggatcagttgaatgaattgaaattccaaatgtccgacgaggcacttcaacaaatgccagagtttcaaggcagaattgatgtactaaaggtaatccactacattgattctgatctagttgtgcaacttaagggtcgggtagcatgtgaaatgaactccggtgaggagttaatatcaacagaatgtctgtttgaaaatcaattggatgacctagaacccgaagaagctgtggctattatgtctgcattcgtcttccaacaacgcaatgcttcagaaccatctcttactccaaaactggctgaagcgaagaagaggctctatgatacagccataaaattagggaagctccaatccgagttcaaggtgcctgtggaccctgaagagtatgcacgtgataatctcaagtttggccttgttgaggtcgtctacgagtgggcaaaggggacgcctttcgcagacatatgcgagctgactgatgtatccgaagggatcattgtaagaacaatcgtccgtctggacgaaacatgtagggaattcaggaatgcagcttccatcatggggaactctgcgctgttcaagaagatggaggtcgcgtctaacgctattaagcgtgacattgtgtttgcagcaagtttgtatgtcacaggaatctgatgcatgtaacctcgtagtctcccttgcttcttttgttagagaaatcgttgtgctggtggaatgctactaacctaaccttagctagaacaaatgttgtggtatttttttttcagttctggattattgcttttgctagttttgcgacgcgtcctgaagcggcgaccagcagagtaaaggaaaatcgaaagcaggtgggattctcgttttttcactgag

SEQ ID NO: 73842 - DNA, 335 bp, Zea mays
  Clone ID: MRT4577_167344C.1
gacattagcttcctccaaaaatttttaacaacaaaggggggggggaaaatatacgggggggccgggaactatttccgaaaggcccctttaaaggggggccagggggggaagaaaaatttccaaccatttttgggggatcgcctgggggggagaccttgggacgaaggggggggcaaaggcttggatggcaccaccgggggttcctgggcggccaagtaaattccccagggggggggccactggaaaaaccgaaggggatgttcttttttgcctccaaccgaaaccggaaagtctgacatggctagcttttgaaacccaggggcgccggtctggtt

SEQ ID NO: 73843 - DNA, 441 bp, Zea mays
  unsure (1)..(441): unsure at all n locations
  Clone ID: MRT4577_167345C.1
ctctttccttcctcttcaattaaactttttgtgtggaaaaccaatacaacacaccagccgaataataaaagacgggcgttgtcaagtccagttcacacctcagtactttctatccttctatccttcccaacaactcgctcaactgcagcgatctaacaatacatgtctgtggcaccagagaagcagacgactttaaccagcaaattcactcacttaagctcttcaactataactatttctatgatgcattgaacatatactatcangtacagtgctaataaatctatagttaccattcctctaacataacaaatctctatcctacttggctgtttgcttagaggcatccatcagggttatatatggttgtcaaaaagtactgcacttaattcacatctttcacattcttcactaccaatagcatccccaaattgcttacct

SEQ ID NO: 73844 - DNA, 443 bp, Zea mays
  Clone ID: MRT4577_167346C.1
cgctcgagcagactgacactgccatcctctagtccctttttgccgctctatctcggccggaagcaagggctgtaatggcgcgaccctgctgctcccaacccagggcggacgtggcagtcagcggccgtgtactatgtgggcggtaccattgggtggaccgtcatgggcaacccctactacgccgcctgggccagctacaagcacatcgtcttcgacgacactgttgcgttcacatataacaagcacttccacaacgtgctagcggtgaacaaggcggactacaataatctgatcgtcaccaagccgactgccacctggtacactgggaacgattccgtcgtccttaacaccactgaccaacactacttccttttgaggctacccgggccactgcgctgtcggccagaatgtggacattcgcattgcctcctctgctgaccctt

SEQ ID NO: 73845 - DNA, 338 bp, Zea mays
  Clone ID: MRT4577_167347C.1
tggcggatcgacggccctatttttatgcgagtttgtatacatatttatgccaacgtcaataggtttttatgatacattgtgagtttatggttctccttccatcttttgtatgtttatgatatttctattcacattttatgtaaaagtttgttgattttaaaaaaaaaaaaaaaaaaaaaaaaaaaaaaaaaaaaaataaaaaaaaaaaaataaaaaaaaaaaaaaaaaattataaaaaaaaaaaacaaacaaaaaaaaaaagggggggccccttttgggggtccaagtttttcttcccgttgcttccaagttattattttttttttggggcccccaaa

SEQ ID NO: 73846 - DNA, 296 bp, Zea mays
  Clone ID: MRT4577_167348C.1
cccacgcgtccgggcgggcaaggccagtcttaagctcacgccgccgccgtcatcgtggacggcgacagctccgacctgacgacgaccaagctcgacgagctccgagcctatctgcagcacctgcagctggaaaaggaaagtcgcaccaagaaggtggcggaactcgtggctcagctgcactcgtcatccttggctctcggcatggatcccacagaggcgaacagtgtcatccatgttagcgccgaacgctcgcatgtgcagcccggcgacatataccaccgctccatatcagtgct

SEQ ID NO: 73847 - DNA, 523 bp, Zea mays
  Clone ID: MRT4577_167349C.1
aaggcaataacaggagccaaattccggactacccctttaattttggtccctgcaaaccgtatcctcgatgaaaagcaggcttcttatatgctgtgccacactttctcaaaccttaatgagctgacctgcacagatcattacctatacgcactataactatttcctaaacacgaggagagcataataacacctcgctgccatcaacctaccttacttgacaaccgatcatacttacaacaccctgcttggcctccccaacgagctctggacgtacacccctctgacattctggcaggcattcttcaaagagctatcagcgaacctgccgctgatctggctgtcccggtggaaccgctcctcccatctcgacaattagcccccggcaacacccatgcacaggaccttcctgaaattgaacttgacagctgccttaatctcgctcccttggactccaggattactgctgagtaaccagtgtccacgaactagcctgccttgttgagaccattaccacggaaacggc

SEQ ID NO: 73848 - DNA, 744 bp, Zea mays
  Clone ID: MRT4577_16734C.1
aattacatataacatcagcagtctaaataatcaaatttagatgtgcaaataatgatacactcagtaatatataagaacacgtagttcttgttacggaaaactgcagaaaataaatttagataaaaataacagggcgctcctggcccaattatggccgaaatcggcccatgaaccggcctggtagccgccaccgtataaagtcgacggtttaaggtaaaccctaaccgtccatctcccatgccgccgccatggggctcccgcacggcggtgcagccgtggtcaggcgcggccggctctagcctcggcacggaggcccggccttggtcggctccccggtagcgcgcatgggcgcggcacgctgccccggcggccacagccgttggcgcggcaagaggccaggctcggtggtgcacggccccgcgtccagcacgggcgcgcagccccgacggccagcccaacgcgacttcgacgtctcccacgcccagccttgcggcctcagcggcgcgggtgcgtggcctcgacggcgcgcgggcactgcccggtagcgcgagcgcgtggcacctcgggcgcgaggatgctaccccgtcgcctgggcaggcggccccgacgcacaagtgcgagcgcggtccccagcagcgtgctggctcgtggccatggcgcgagtgcgctgacacgactgggcgaccaggcatcggggcgagcacatcccatcctgactcgggttgcgccatggcaggggctgcg

SEQ ID NO: 73849 - DNA, 144 bp, Zea mays
  Clone ID: MRT4577_167350C.1
attctttcttttatctttgccacgcaactggaagggtgcgacgggactatatacacacacaagaccttttgacaacggggcttaactctatctgcatgagaaatgagcaattacgtggcgcggataagactaagatactacagt

SEQ ID NO: 73850 - DNA, 715 bp, Zea mays
  Clone ID: MRT4577_167351C.1
gggtacctcgaggccggccgggatccgcaaaactgtcgccgccggacggagacctcgactggccaccaccgcaccgaacgctgccgtggaggagcaggccccgtgcccaacgtcgtccgccaggcacgcccccgccacgccgtccaccaggctcgtcctcgccgcgccggccgcggggctggccgaggccgcgtcgttcaccgggctccgcgaggaggggatggccgaggacgcaccgaacgccggtctagccaaggtctcgtccgtcgggcttgcctccgccgcgccgtatgccgggctcgcccccacggcgccattggctgggttggacaccgccgaggccgcgccgaccgccacggtcgacgaggaggtggtagctgaggtcgcgccgaacgccgtctgtgtccgaggcgtcgtccgccgcgctcgcccccgtcgtgtcgtacgtcgggctcgcccccgccgcgctgttgcctggactggccaccgcggggctggctgaggacgcgctggccagggccacgccgaccgccgcgctcccgcgaggaggtgctggccgaggcgtcgtccgccgcaatcgcccccgccgcttatgctggtgctccatttcgtcggtgagctgcttacagtagcactttgtatgcgtatgacgtatgatacagtatgggcaataacattattgtctcaagtccaaaaaaaaaaaaaaaaagcgggc

SEQ ID NO: 73851 - DNA, 392 bp, Zea mays
  Clone ID: MRT4577_167352C.1
ccgggccgaccgacgccaacgctcggaccacccaaccctaaagggtcagcatgccttgaagcacgtcgctacatcaaacatggcccatttatacagggagcagagccacccctacaacaaccaaagccacaacaccctcaccaactcaaccaacatccagtacactcaggctatcatgaaccactagctaacgaccaacccatgacaacataaccaactaaaccttgaacgatgcagcagcacctactaacagtctcgctaaaactacatccacatctaaacctaccaatccgccaactaaaacaggatgcccatccaaacagcttaacggaactaactttcaataaggacacaataaaattcgccaaaaaactccaaataaatcctcccaa

SEQ ID NO: 73852 - DNA, 322 bp, Zea mays
  Clone ID: MRT4577_167353C.1
gcctttttgtatgaagagtaatcagagggaacaaactggtagcactgtgctgtgtttcatccagtgttgctaattactctgtgttgttattcggtcaattgaatatatatgtgcttaatgtgctacaatgcttcggacgcgtgggtgagaaccatattattgttggagagcttcttgaacaaaaatcaacatctgaggttgataatgtaaacacacctcatattgcaaatggggatgcaagctggaatccagactctgaatctttccaagctactggtggtttcagtgttgcattctctctatcagtcgtgcagagtgagtg

SEQ ID NO: 73853 - DNA, 741 bp, Zea mays
  unsure (1)..(741): unsure at all n locations
  Clone ID: MRT4577_167354C.1
tggtggcccgttctcctgctcctcccggccgtcgcgctcctcctcttcgaggcgtcgcggctccgcgcctcatccccgggcccctccccaccggtctccagcctcggacggctcgacccgacccacgtctcgtccatggcgtgcgcgagccttgcttgaagctccttagccccaaaagtttggcaaatgtggtgttcccggagggtacaagactcgattctgtggtgagcagaatcacgtacaaaactgatgacgatgactatgacatataccactccgaagcaaactctacatatttactgcaacatgcggaagcaacaaggttcgacctgtttacaggatttcagacacttgctgaaagagaagatagcttcaaggtgaatgagactgttagtgtgcactgtggtttctacagcgacaatggtggcttcaaaatttctgaggaggacaggagatacatgagagcctgtaaagttgttgtgtctacctgtgcatttggtggtgggggatgatctatatcaacctattggaatggccaattcttctattggcagggtttgctatgttgctttctgggatgaagtgacactagcagctcaggaagctgaaggaaaggtattggtgatgatagcatgataggaaggtggcggatcatttgttgtcaggagcctnccttttgtagatcaacgatttaatgggaagatacaaaagatgttgactcatcgccttttcacagaggca

SEQ ID NO: 73854 - DNA, 569 bp, Zea mays
  Clone ID: MRT4577_167355C.1
tccaccgcggtggcggccgccctttttttttttttttttttttttttttttttttttttttttttttttttttttttttttttttttttttttttttttttttttttttttttaaccctatcgggcccagggccggataaaccggtttaaaagaaaaaaggatacgggccggaaaaaactatatacgggattaaaagaaaaaaggggtactggaaacgggccgaaataaaaaaaggggtttaaaaggaaaaaaatttgggggggggaaaccaaaaatggacaaagtccgacaacagataaattatccctatggaacaactaaattccttttggaaaaatgaaacttcattatttaaaaccggtagggggtaggaataaaaaacctgtttcgcatttggagggggggaaaaaaaaaaattgttttgacgaatttttaaagcttttttacgcggtgggagatcgggtatttcccgattggtataaaaaacaaggtccctgaaaaagggaaggggaacgggggacccaatttaagccgcccggggaaattggttttggtgaaacccctgggg

SEQ ID NO: 73855 - DNA, 506 bp, Zea mays
  Clone ID: MRT4577_167356C.1
taccgggccccctctcggttttttttttttttttttttttttttttttttttttttttttttttttttttttttttttttttttttgattttatcaaagttttaccaaacacccaccccaggcaacgtcactggaaacttaccccgaaaccaatgatcggggactggccaagcgcaaagtaaaaacgaaacgaaacccaagactgcttgcgcaggggggttcccgcacacccggggggccgaataacaacacaaccgtctgacttggccccgttgataaagcaacaactacagccgggacccgacacggttggtggggggaagcacaaccctggggggctaaggggagaaacaaaagccccaacctgacaggaatttttaacgacccttcatcgccggacacattgtggctggtggggtcaccccagccatgaaccagtgggagggggggggaccagatccaccctaaacgcaagtgctccccctgggggggaaagaaaaggccaa

SEQ ID NO: 73856 - DNA, 303 bp, Zea mays
  Clone ID: MRT4577_167357C.1
atggactactaggaaacaccgggataattgtcgttgtttgggagatcaacaaacaaaaacggaacatgaacaaaaatcgattatgcgacatgcatggaccacgccgaaatggtggtgacggctacagaataaccacaaccacgtgcccccataacacggcacgtacggactggcgttgtttcgttttattattattaattattacacacagggaaagtgaactaatgaatcggtgcctggttcagtcatctgaagcagctgcggcgatgccgaccgggttccggcagaagcaggtactgcgga

SEQ ID NO: 73857 - DNA, 482 bp, Zea mays
  Clone ID: MRT4577_167358C.1
atgctttcgttcattctttcgttcacgcttttcggtgcgttatgcgcaacattttgctgaggccacgccacaatgttctcttggcggcaatatttttggatgaccaaattaccagacacattttgataatttaaaacctcgagaaaactgagatgctcttaatggatggaactgccacaaatctttcttatggaagctgtaccaggagaaacgcacacaagatcttgtgatacgaactctctatgttgtcatactactgacccgccatggattgtttcatacggaaactggaagaaggtcacgacatgaaccatattgcttacgcctgcttgtacttctcattaaacaccgcatctggggggggcagggagtacattgcggggactaaaaatccctgtgtgtaaatgggaattgcatcatctacaggcagctccaagtacaaggtatggtgacaggacagcatggactggtgttaactttac

SEQ ID NO: 73858 - DNA, 464 bp, Zea mays
  unsure (1)..(464): unsure at all n locations
  Clone ID: MRT4577_167359C.1
gatcccccgagcagcaggaattcggcacgaggcagcactgagtcttgaccgccaaccccgcaaaaaagaaaaaactgaaaaactgatactagatgaaatctgtatcgattcagctttttttttgcactgaaaactgagtaaattgaaaaaaagttgaaccctgttttttagagaagtggtggatgatgtctaatgagaggcacgcttcttccaatcctacatctcctcaagaaaatgatgctatgttccttgatatacttcatgaagctccattatttggtcaccggaaaccaaggagtatagttgggggtgttnttttaattggtttcaataactggccggggttttttaaaacgcaatcttggctgcagcagctccttggatatttcagcctcttgggcatttagtcttaccattgctttgcagttgtgatgttgttcttttaatagtcacatgcatttttc

SEQ ID NO: 73859 - DNA, 2284 bp, Zea mays
  Clone ID: MRT4577_16735C.1
accgtcctaatcacaaaaatctcgcaccttcccggacggccatggcggcatccgaggcttcgagcccgtcggcccctatcaaaatctccgatacctgtttcagaaaaataaacccaaaaggccaaaaccccgtgcccggacctgtcatcgttctcccccccagcctattgcctcgtttccatggcggccaccgcctccaacccgttcccgttcccctcccgtcgctcgccggaagatagcctcttctacgccgtctacccgatactactccccagccaccttcccgcgcccgcactccacgcctcgctccagtccctccacctctccctcctctcgcaccacgcccccttcctatcctcccatctcttccaccgggatcccttcacgctcaccctcccggcggacccggccgccccctgcgcgctttgcgcctcgccgcccgtgccccacctccacggcgcgctccgtttcggcgactccctccccgacgaatggatcgccgtttccctcctcttcgcgctcacccgcgccttccccgacattgcggcccgcgcctgggactccgacggggagttcctcctcatcgaggccgccttcgcgctcccacggtggctcgacccggaatccgcccccaatcgcgtcttcatcttccgcggggagctccacatcctgccgccctccctcttccccgagacgccgtccctggaagccgcccttgccgccgtctacgacgactccatcgacacccgcgctgccggcgccatccaggcagccatacagcgccgtatcgctgggctgcccgagagggcggcggagaacctacacacagcacgcgttatcgtcccggcgcccgtggcaaaactcctccgggaggagccatgcctgatcgcgcgtgccatcgagggtttctacgaccgggacattgacaccatgaaacatgcggcgaggatggaaaaattcctcaaagggcctggtggggaagggattgagatagtgagaaccacagtacgcatgacgcgggcaatgtacgcacagcttgtgcagcagaactttcaggctcccagggggtacccgatgcctaggagggaggaggggccagagaaatggatggaggcagagctggggatgaagattgcctgtgggttcgagatgatgtatcaggagaggaaacggcagggcgacaagcgtccatgtcgcacgtgggatgtttacaggaagagtttggaggcaactgggtgctttgacgggctgtatcctgggtcaattgagtataagagggtcattgaagatgcaatgcaatattacaagagctctaatctgtattcccgaacaagggagatactgagtgaaccagtgcggcgaattgatgaaatcctatcaatgctgtactcaactgatgaatttaaaggcactgatcttcctcctagtgataatgactcttggttgtatggtggggatgatgagttaaatgcggaactctgtgaaaggcagaaggaactggaagagcatgaagctgcgaagaagcaaagaagtcaaaagcaaagtgtccctagcagttcaaaatcccagacagacaagtttaagcttggagagattacagagtccatgcaagaattcattcgcaaaatgtccagctttgagggagccgagattcctgcagacaggagagatactgaatcagtggacctagatgtcaaccagttcttcaaggccataaaatcagttttaggtggaggttcacaagagcaagctgacagtgatgatggatttgatagaaaatcctcattgtcggacatggactttgatgattctgatgaagacgacgattttgctgaagaattaggtgacaaggatgcagatgattcttttatggaatcatattcagatgctttaaataaagagctaagcagtaccactcttgagaaaagctttgctcatgcaccacgaccggaaactaacaatgagggtccatcagatgatgcagctactgatgcagagatgactccagttgatgtagatctgaaccttgtcgagagtattctgaactcgtactcctcgcaacaaggtcttcccggtccggcttccagtctgctaggactcatgggcataaaggtccctccagatgttaaaaagatgtgatttttgtattctagtgtacacgtgacatcttgtgaagctgggatatataggaaaaacttatcttccgttccatacctgggcggtatttgttgtgatagtacatgattgttttcttgcttttaagttggcaaaggttttgactgtc

SEQ ID NO: 73860 - DNA, 395 bp, Zea mays
  unsure (1)..(395): unsure at all n locations
  Clone ID: MRT4577_167360C.1
caaggaaacnnagccaaggngacacagggcagcagcnncaggacgaaaacaccggncagaagcacagnnnaaagagcggggggggggggggagcgcgcgagccccaagccccagcgccacggccgnagcggcccccagccagagaacagccgccgccancanacaagccgggcaaacccaccccaggagncgacaacgaggccccacacggnccacggcngcggaaacgagcaggcgngnngncncnncgcgaaagcagcccgcagcggcnccgccgccggagccagagccacaagagccngcnccaaagccngaaccngcgcaggcagcnccggcgncgccgnncgcgcaaacgcaagggncgccccagccnnggagcaggcnggacacagcgc

SEQ ID NO: 73861 - DNA, 221 bp, Zea mays
  Clone ID: MRT4577_167361C.1
cactactacgtcattgtaatataatccttggcattctaaaaaatgccatgcctggtctaaaaaaaaaaaaaaaaatatcagctaatagataacaatgttcataaaattgacatgcttttcgcctgtacaacactgaatacccgaggacgtgggggggtcaaaggtcaaaaaggtcaagtgtacaaaaatgcctatcaccagaaggcaagttggaaggtttg

SEQ ID NO: 73862 - DNA, 272 bp, Zea mays
  Clone ID: MRT4577_167362C.1
aggtagtaaaatatatttgggaaaattttgctggagacagttttattttcaatctttgaaataaaccgtgtaaaatacccaaatatacagttttattctcctaccttccaaacaaaacatacattttccgatagaggcaaaacattttagtttgacagcaacctactattataaaattttaaatacctaaaccttcattttaaactttcaccctttccatccttgcctggaatcctaatcacaccaaatttttctaaaccgattatgcaaaa

SEQ ID NO: 73863 - DNA, 383 bp, Zea mays
  Clone ID: MRT4577_167363C.1
aactggctcttactcacccactccttcgttttcaattagctgagactatcgcgtaatagaggcaaggggggacacccaactcgatcatccttcaacattctgaatatccatgtaacccaaatattcactatcagactactcgacctcaaatcttgaacgctacaatcacgaaaaaatgctgactcttctatcatctataacgtacagagacgtaccatcaccttgtactcggcgatacctcagatagctaaatcctaatatcaagctctattgtatggacccagtatagagcgctctttacaatggtccataacctcaaccatacaccattcactgaatagcaactcgttttatcccttgagacttggacttgagatctcctt

SEQ ID NO: 73864 - DNA, 302 bp, Zea mays
  Clone ID: MRT4577_167364C.1
agggtaaaaaattattctttatgggcttcaaaaggttggtggttaccggtggaagcgtaccgggttacaacaaataccgggtggaggggtgtgcttcaaacattaaatatgtgggaaattggttcttttttaaaacagcttttaaaacaatttaccatgttttaaccttcattagattggcttggtgaaccaaagacatttccttgatctttggttgtgaagaaaataaatcttgacatttgtgaagatacttccaaaattttgcccaaaaaaaggcggttccaaaatataaggataagttg

SEQ ID NO: 73865 - DNA, 1122 bp, Zea mays
  Clone ID: MRT4577_167365C.1
cctcgaggccggccgggaaacgcaggatcgcgactccgggaaaaaaaaaacgccgggcgcaatcgggaacggggaaccctagggcagccggcagcgtcgctccgccccggccgtcgtcgtcgcgcgtcgccgtccactcgcttcctgctcgggccttcgcccctcggccacgtctctgccctcgccccttggtcgggaccgacgtcctcgctccatctagcaagctgatcagctcgactgcttgagctcgtcctcgccatcgccgctttgatttcttcctttcagcccgacccggctcaaagcagccagatcacggcactccgtccgaccctcgaagcgatcaccttcaccgcctctcctcctcgtcacaggtgaagatgattccgcagagccagagcagctccctgcagcgccttcaacacgtcgagaagcggatagtgcgggtgctggagcttgcgggagcggtgatggaggagctgggaaactcccatggccctcgcaccgatgcagtcagcgcgcactgccgtgagttcatgatcgctatgaaggaaattcaaacgacgttgcgtgaggaaatcaaaagtgcttgtgaatatcgtccatttgaaaagtgtgattacagtgcaaggattgctaatgagatatgctgcaagaagctggagtatgtaattgagaagttggataccatgcaacagagccttgaacatatcactgatgatgtttagcgagctagctacatattaggtactatactctttttgtgcaataaagtgtaatctacttagtgaataagaggatactttatgatgatagtatccactcaatcaggtgattttgtcaatactttgctgcagtggtagagttggtgaattagatattttcagtttcctggtacttgcaaaatgcaaccattattatatactacatgacttccattgcattatacgttacatgtctacagggacttttattttgatttgtgaatttgcttgcagaagttctttcaatttgtatcttgatgttagccttcatcttctcatcctcgatgtgtgattctgttgtttgtgagggtaatgtttaaccagacatttgtatgcaaatactatgctgatatcatctggt

SEQ ID NO: 73866 - DNA, 373 bp, Zea mays
  Clone ID: MRT4577_167366C.1
tttggaattcaaatttctttaccggaccggtttgggccattttaatggtagggaacaatgatgggcatcaaagcacttcccccagaccagggtattaattggctttttacaagttatttggtcaggttacgggcaaaaacattaggttggtggccttggaaattggaaccttagcaatggtagggggattttggtgtttttaggagggatttcccctttttacatgccaaaaaacttggaaacgatggggccagtacaagggcgatgttgaccatttggatttacctagctccatttttttttttgggggccttttgtccgcggttttttaaccgggggatgattcccgggaaagggaacacaccttcccctt

SEQ ID NO: 73867 - DNA, 114 bp, Zea mays
  Clone ID: MRT4577_167367C.1
aagcgagaatctggagagtacacaggctttcctatacttggcgttgaatggcagacaatggagtccgcaaagcaatgggaatgacaccagatcataagggtgttcgtgttaaaa

SEQ ID NO: 73868 - DNA, 357 bp, Zea mays
  unsure (1)..(357): unsure at all n locations
  Clone ID: MRT4577_167368C.1
agagcaagagaacacgccgcggacgaagcggggagcccccagagcggccgcccccttcncccnnnnanaaaaaannnnnncannggaccaaaaaggggagaacccaccgggcccccacaaagaaggaagccaacgaaggccgagggagccccgaagaacaagaaccgacccgacggcaacaagcacacacgcagggagggggccacacgggccacgcgcaaaaggagaacgcgcaggcggcgcaccaggcccgcgcggagcacacagccagaaagagacgccccaccccagananaaacaaaagccgccccgcaagcaggggaggaccgccaaggacccggcgagcgcccagaaacc

SEQ ID NO: 73869 - DNA, 321 bp, Zea mays
  Clone ID: MRT4577_167369C.1
aacgggcccaagctttttttttttcttttttcctttttttttttttctttttttagctttgtgcatcatacacatcaagcgggccctagaaccgttaaaaccaaaactttgaaatgaccatgcttcatttattggtcataccacacatgataatgggggtcgaccacaccgcattttttcctttggtatgaccaaaaagatgggcatgggcaaattcccattttggttttaaagaatctagggggcattggatgggtatcaccgccagggttggtgcggaaaaatgggcaaatggtaccttggacgggaacgctcttaggg

SEQ ID NO: 73870 - DNA, 278 bp, Zea mays
  Clone ID: MRT4577_16736C.1
gcgaccattaaaagagcagtactacggcttcgcccgcagggttttatgagtataaatatgtagctttaagcctcagcatgtaataagtaaaaatagaaaattacgataaaatgcttattcccaattattttctgatcctttgtttatcagtagtatatggatttgctcaactgacacggcaacaacacaatgtagccatggtgacaggaccaaccatacaaggtgttaataatatgggattgtgcttgtatagaacctcttttacctatctgttgggt

SEQ ID NO: 73871 - DNA, 628 bp, Zea mays
  Clone ID: MRT4577_167370C.1
cggtacgcttgggtcgacccacgcgtccagttttgtttcttcttatagggcatattaggacttggaaaagtctataaaaacgtagttcgatcaccagtttttcataaagtatactggtctacataaatttagaattatccaattttgagccttgttaaagaggcaccaaatgatccccgataaactaatataatgctgaattctgtttttctcgccctttgtttcatattgttagcctctgtccatctaatctaattacacaggctcgtcgttaaatttaagtctatgatggtaatcatggaagttaatttggcaatggaatatacaagccaatggagtgacggatagcatactctggagacagtggtgggtctagaaattatttagagcctgggtgatcgtcactgctctaggtaattatctagaaaaatactatgcttacccttttcgacaaataaagtcctctacgctttgccggtggacaaataattcccattttattttgaactgtaaatgtgggattatgagcattgtgatgttatccaatgatgcctgattttacgttattatgtgaaacaataacgattcacatacttgattacgttggaataagagatgttatctaaat

SEQ ID NO: 73872 - DNA, 518 bp, Zea mays
  Clone ID: MRT4577_167371C.1
caacacctcatcatcacaaacacagccagccagccatcactgatcatagcatcagcagcttagtataccgtaccgctccacatccccgagctggaccacggcgtcgcggcggtcggctacggggtcaccgcggacggcaccaagtactggctggtcaagaactcgtggggccccgagtggggcgagaaggggtacatccgcatggcgcgcgacgtggccgccaaggagggacactgcggcatcgccatggaggcatcctaccccgtcaagacctcgcccaaccccaaggtccacgccgtcgtcgacgaggacggctccagccacgacgagctctgaattgcgcactacactactacgtactagctatagcctatatagctatactatgattgatccatgtatgctcggacaggaacatcgccgactgtgaatgtctgaatggcatacgcacatcgtacacctgcattcatgtaataccagtcgagagttgatcgaaaaaaaaaaaaaaaaaagcggcc

SEQ ID NO: 73873 - DNA, 422 bp, Zea mays
  Clone ID: MRT4577_167372C.1
ggaagaaccgggacgacccacgcgggcttcctgacgaacggacaacccaccggcacagggggggggtggaagaaaacacccccccacaccccccggcgcgagagcacaaaaaccaccagaagggagggcagggggaccacggagaggagcacagcaagggcaagcggccacaacacggaaggaagaaaaaaccacacagggcacaaacccgagagggaccagcacaacccagagcaccaagcggggcacacaggagccccgcagagaagcgagggcgccgaaccagacgcaggcccacaaggaggacccaggacaggacaccaaagaagaccggaggggaagcccgacaccctagacgggggcacagaagggaaccacaaaaaccgaccacgagggcaagcaggcagcagaagggaggggca

SEQ ID NO: 73874 - DNA, 1565 bp, Zea mays
  Clone ID: MRT4577_167373C.1
cggccgctcccgaggccggccggccgcggcgggccgggccgggaacacctcatcatcacaaccacaaagacagccagccagccagccatcactgatcatagcatcagcagcttagtataccgtaccgctccacatccccgagctagaagaagaagcccggccagtacctatagctgcctagcggcgcgagcgaaggaagcagagatggcgagagcgctgccgctggtgctcgcggcgtccgtcctgctggcggccgccgcgctgctgctggccgcggcgccggcgccggcggccgcggtcgacttcggcgcggaggacctggcgtcggaggaggcgctgtgggcgctgtacgagcgctggcgcggccgccacgcgctggcgcgggacctgggcgacaaggcgcgccgcttcaacgtcttcaaggccaacgtgcgcctcatccacgagttcaaccgccgggacgagccctacaagctccgcctcaaccgcttcggcgacatgaccgccgacgagttccgacgccactacgcgggctccagggtcgcgcaccaccgcatgttccgcggcgacaggcagggctcctcggcgtcggcgtcgtcgttcatgtacgccgacgcgcgcgacgtcccggcctccgtcgactggaggcagaagggcgctgtcaccgacgtcaaggaccagggccaatgcggtagctgctgggcgttctcgacgatcgccgccgtggagggcatcaacgcgatcaagaccaagaacctgacgtcgctgtcggagcagcagctggtggactgcgacaccaaggccaacgccggctgcaacgggggcctcatggactacgcgttccagtacatcgccaagcacggcggggtggcggcggaggacgcgtacccgtacagagcgcgccaggcgtcctgcaagaagtcgccggccccggtcgtcaccatcgacggctacgaggacgtgccggccaacgacgagtcggcgctcaagaaggcggtggcgcaccagcccgtgtccgtcgccatcgaggccagcggctcgcacttccagttctactccgagggggtcttctccggcaggtgcgggacggagctggaccacggcgtcgcggcggtcggctacggggtcaccgcggacggcaccaagtactggctggtcaagaactcgtggggccccgagtggggcgagaaggggtacatccgcatggcgcgcgacgtggccgccaaggagggacactgcggcatcgccatggaggcatcctaccccgtcaagacctcgcccaaccccaaggtccacgccgtcgtcgacgaggacggctccagccacgacgagctctgaattgcgcactacactactacgtactagctatagcctatatagctatactatgattgatccatgtatgctcggacaggaacatcgccgactgtgaatgtctgaatggcatacgcacatcgtacacctgcattcatgtaataccagtcgagagttgatctaccagcaactttcatttcattcggttattattatattatttaactaaaaaaaaaaaaaaaaaagcggcc

SEQ ID NO: 73875 - DNA, 1568 bp, Zea mays
  Clone ID: MRT4577_167374C.1
aaaaaaaaaaaaaaaaaaaaaaaaaaaaaaaaaaaaaaaaaaaaaaaaaaaaaaaaaaaccaccccttcggcacctcatcacaaacacaaagacagtcagccagccatcagcagcttagtatactgtaccgctccacatccgagctagaagaagaagcccagcccggcccggccagtaccctatatagctgcctagcggcgcgaacgaagcagagagatggcgagagcgctgccgctggtgctcgcggcgtcagtcctgctggcggccgcgctgctgctggccgcggcgccggcgccggcggccgcggtcgacttcggcgcggaggacctggcgtcggaggaggcgctgtgggcgctgtacgagcgctggcgcggccgccacgcgctggcgcgggacctgggcgacaaggcgcgccgcttcaacgtcttcaaggccaacgtgcgcctcatccacgagttcaaccgccgggacgagccctacaagctccgcctcaaccgcttcggcgacatgaccgccgacgagttccgacgccactacgcgggctccagggtcgcgcaccaccgcatgttccgcggcgacaggcagggctcctcggcgtcggcgtcgtcgttcatgtacgccgacgcgcgcgacgtcccggcctccgtcgactggaggcagaagggcgctgtcaccgacgtcaaggaccagggccaatgcggtagctgctgggcgttctcgacgatcgccgccgtggagggcatcaacgcgatcaagaccaagaacctgacgtcgctgtcggagcagcagctggtggactgcgacaccaaggccaacgccggctgcaacggggggctcatggactacgcggcgttccagtacatcgccaagcacggcggggtggcggcggaggacgcgtacccgtacagggcgcgccaggcgtcctgcaagaagtcgccggccccggtcgtcaccatcgacggctacgaggacgtgccggccaacgacgagtcggcgctcaagaaggcggtggcgcaccagcccgtgtccgtcgccatcgaggccagcggctcgcacttccagttctactccgagggggtcttctccggcaggtgcgggacggagctggaccacggcgtcgcggcggtcggctacggggtcaccgcggacggcaccaagtactggctggtcaagaactcgtggggccccgagtggggcgagaaggggtacatccgcatggcgcgcgacgtgcccgccaaggagggacactgcggcatcgccatggaggcatcctaccccgtcaagacctcgcccaaccccaaggtccacgccgtcgtcgacgaggacggctccagccacgacgagctctgaattgcaaactacactactacgtactatactatgattgatccatgcatgtatgctcggacaggaacatcgccgactgtgaatgtctgaatggcatacgcacatcatatatacacctgcgttcatgtaataccagtcgagagttgatctaccagcaactttcatttcattcggttattattgtattatacaaaaaaaaaaaaaaaaaaggcccctaggg

SEQ ID NO: 73876 - DNA, 585 bp, Zea mays
  Clone ID: MRT4577_167375C.1
ggccgcttttttttttttttttccttttttttttttttttttttttttttttttttttttttttttttttttttttttttaataaggaaaaatactttttttttttcatgtaaagggctgattcagggaatttgataaaactgacactggcacccaaggagacgggcgacacaagatcactgaatgatacgccggtaaatgacttaacaagctagctagcccggggttatactacaccacataggtttttaaggggggaacacccccgagaggaggataggggcaaggatgccgttggtgtaggacgcaaataggcgctagatgttgagatatttgaaccgccaacagaccaggaaccgggccacatttggggttgatgctctaagaaggactggaggaccaagccgaaaatcgcctgtgcccgagagctggggacccacctgcctgagctggtggaaacactggtgccgtaaccactggaccttaggcaagaatttgggtaacaccgcggggctcaccatgatgcctcaggaactacagcaagggccccaagaagggggtgctgccaacacccaaagttccctg

SEQ ID NO: 73877 - DNA, 1815 bp, Zea mays
  unsure (1)..(1815): unsure at all n locations
  Clone ID: MRT4577_167376C.1
cggcgctcgaggcggccgggctgcatacagacctcatcacaaacacaaagacagtcagccagccatcagcagcttagtatactgtaccgctccacatccgagctagaagaagaagcccagcccggcccggccagtaccctatatagctgcctagcggcgcgaacgaagcagagagatggcgagagcgctgccgctggtgctcgcggcgtcagtcctgctggcggccgcgctgctgctggccgcggcgccggcgccggcggccgcggtcgacttcggcgcggaggacctggcgtcggaggaggcgctgtgggcgctgtacgagcgctggcgcggccgccacgcgctggcgcgggacctgggcgacaaggcgcgccgcttcaacgtcttcaaggccaacgtgcgcctcatccacgagttcaaccgccgggacgagccctacaagctccgcctcaaccgcttcggcgacatgaccgccgacgagttccgacgccactacgcgggctccagggtcgcgcaccaccgcatgttccgcggcgacaggcagggctcctcggcgtcggcgtcgttcatgtacgccgacgcgcgcgacgtcccggcctccgtcgactggaggcagaagggcgccgtcaccgacgtcaaggaccagggccagtgcggtatgtgtatatatatatgtatgcatgtacatatatactacatatagagatgcttgtggacaagaatatataatgccaacaccaatgtcgtccacgcaggtagctgctgggcgttctcgacgatcgccgccgtggagggcatcaacgcgatcaagaccaagaacctgacgtcgctgtcggagcagcagctggtggactgcgacaccaaggccaacgccggctgcaacgggggcctcatggactacgcgttccagtacatcgccaagcacggcggggtggcggcggaggacgcgtacccgtacagagcgcgccaggcgtcctgcaagaagtcgccggccccggtcgtcaccatcgacggctacgaggacgtgccggccaacgacgagtcggcgctcaagaaggcggtggcgcaccagcccgtgtccgtcgccatcgaggccagtggctcgcacttccagttctactccgagggggtcttctccggcaggtgcgggacggagctggaccacggcgtcgcggcggtcggctacggggtcaccgcggacggcaccaagtactggctggtcaagaactcgtggggccccgagtggggcgagaaggggtacatccgcatggcgcgcgacgtggccgccaaggagggacactgcggcatcgccatggaggcatcctaccccgtcaagacctcgcccaaccccaaggtccacgccgtcgtcgacgaggacggctccagccacgacgagctctgaattgcgcactacactactacgtactagctatagcctatatagctatactatgattgatccatgtatgctcggacaggaacatcgccgactgtgaatgtctgaatggcatacgaaaggaaagatgttatgtcgaaaaatgtttcaatctacaaatcccaagcatctgcccttgaagcccatgcagctcccaactgcaaggnttctggtggttgccaacccagcaaacaccaatgctcttatcttgaaagaatttgctccatctattccagagaagaacgttacttgcctgacccgtctggacacaacagggctcttggncagatttctgagagacttaatggtcaagntagtgatgtgaagaatggtatcatctgggngtaccactcgtcctctcagtacccctgatgtaacat

SEQ ID NO: 73878 - DNA, 497 bp, Zea mays
  Clone ID: MRT4577_167377C.1
cccaacgggcgactagaacgggaacaaaagcaggctcaaaggctgactcttggggtcaacctttttgagatcggcggcttctccatcgatttctgcgggtaatatctattggtaaatggaatgtttagtgaaatatatggttaaatatcttgctacatcttgtactacctatttgctcgaatatatgtcattggctaactaatccttaacctaaaccgcgacacataagaaaggaacggagggagtatgttagggatgatacagccccaagatccgcacctacatacctgatcacatctatgctcactgctagtatgggtaagcatcaagcaaagcatgcatcattttttgcatcatagctacacgtagatctattccatttttctctccatactatagcggctgctatatatactggagcttatactcaaccggtgtcacatatgggattgggtctaagattttggataatcctcgttggtgcgcagtattgtatt

SEQ ID NO: 73879 - DNA, 754 bp, Zea mays
  Clone ID: MRT4577_167378C.1
gcgcctgcctctctctctctctctctctctagtgcaaacaaaccttcccctcccactctatccccctctcaaacacgcgctttcgtctgcccaggccccagcagctagctgctcctcaccggccgccgggacatgaaggaggccgccaacaatgccaccgccgacgcgccgtcccaccaggccccgtctgcccggagaggcccgccgccgccgctccggtgacccctgtagctagcttctcctttctcgccttctaattaagtcgccgttcttcttctcggagcaagcaaattaagccatcgtctatggagctcgccgtcgtcagcagcgggctaggagagccagccgcagccgggctggcgaagaaggatcggagcaaatacgtgtccccggcgatacgtgcggattgttagtatttggcatgcgggaaagccaggcatcttttcttttttcttcttttctcgatgattattgtgactcgttttcgctacccttggtgattgttgttgatttagcctttttccttttcttctctctctttctttcttcggtttggttcccctccatcgatgcatagtttgacgccgattacactttctaatgataagaacacgtcgattgtcggagatggaaatgttcatgtggcttgtgtgcttctctgtctgtttaccattatgtacgtactacgtagcaatatgaaatctactccttcaaggatcatgcatgctttcctgagcataaaaaaaaaaaaaaa

SEQ ID NO: 73880 - DNA, 1603 bp, Zea mays
  Clone ID: MRT4577_167379C.1
gctgaatgggctatcgttcaggcaatgtttgggaataggggccttttttttttttttttttaaggcaaattctgttcaacatccatttccctttgttgtatcgccgtaagagatctcttcgacgcaacgtaacccttccacatcctccttttgtatcgccattacactagtattacatgtgttttacaacagcacggggcagcaacaaagttatgtgacggcttctggagccgagttacagtaaggagtgtgcagacagatgaatctagtcgacatcaagcacacggaggcgaaggcaacacctaccagcaggccaacgacgctcttccgcacgtccaaccgcagtgagcgcctgaagacgcggccaaagctggggatcagagccccgcacgctatgaccatccagtagtcaagcccatcatagtcgatcttcgcaaggattgcactgatggcggcgctcggcgctgcgagccctgtcaaagcggcagcggcaagggctccacgccagctatctgtggcaccatacacgcagctcgccgcggcagcgccacgtggaagaccgtggagggaggctgggagaaccatgtagcggccgaggccataggccttgcgagccgcgacaccgagcgcaagcccttcagcatatgcgtgaaggaatacggcgccacaggcaagaagggactgcactgtgagggcactgagagagaggccggaggatgacgcgatcacgttcacggaagaccttttgcgattgaacaaccggaggatgcttgatgtggcggcgtggtaggccagggaacctccgatgaggaggaagagggtggtgaagagacccatttttgaggtcattaggagctgcacaggtctccatgccgcgagacggaaagctatgccggatgcgacaccggtgagaagagggtgcggcatgctgaacccaagagagaatgtgacgagtataattccaccgataagtggaccgagtccaaacacaagtgatactaagaagcctgatgcgtcttccacattgttgccatctgtaaatcccagaagcaccgtacttaatgtttccatgaaagcaacagcgagtgttccagcagaagctacttgagatggagttgcttccttaaaagcgtcaggaagaacctccgctataacaatccatatcatgcaccctgctgcgaaaccagtacaaaagggaagcaccttctggaatgcatcggcacagaggaatgcaggaacagcaacaattggctgtggtaaagatgtaatgatactccacatcattgccttttggggggacacccctctagacgcgagaaccatgcttactgctaagccttctggtatgttgtgcactgctatagctatagtaactagaagaccctgagagaacccttttgagccagcaaaggaaacacccacaccagagccttctccaaaagaatgaagagtcattattccaacaacaagaataactttacttgcatctgccccttttatatctaacatgcttacttctccatattgctcaagaaaacttcttacaaagctccatataaagcaccaaactgcgaaaccagtacaaaagggaagcaccttctcg

SEQ ID NO: 73881 - DNA, 556 bp, Zea mays
  Clone ID: MRT4577_16737C.1
accggggggaaaacgggccttatacctaaaaaaagttttaaaaaaaaaaacagggccctatcctgccccaaagcagaaccccggccctgatggccctaaaaaaataaatcctggcttgcgggatttttttgttttatccaaaaaggcaaaacccttctaatgtaaaagccagtcctttaccaaatttacaaacctcccattaaccgggttttttggcctcagcattccaaaaacccaactttttttttttaccaaaaaaaaaaaaacccccggcccttgatttaaaaaatagaaaggggcccttttggaccaacgtttccaagaaaaaccccttttgatgccttcccctatggaccacggcctgggctggttaacgttggaattttttctcattaaccataattggggaaaacccccctcgggcttaggggaacaaaaccaaaatggttccagctttgtggccaaatccactaaactcaccctgaagcggcctttttggggacaattttttttaaaggaggctaaaacaacgttgtttaaggcccaccctgtttga

SEQ ID NO: 73882 - DNA, 312 bp, Zea mays
  unsure (1)..(312): unsure at all n locations
  Clone ID: MRT4577_167380C.1
tagccctccgtgccgtgcccactccccgcagcttcgggcccctgccatgccgtgctcgccgtcgctgatcgaaggcatctccatctccgtctccgacgacgacgaggccaccggcgaggtgcgcgtccgcggccgccggaagngttctcgcggccccgtatccgcttcggcgcgccgccgcctgttcctcttccgagttgcgcgggtgggcgggccgaatgctcctcgtcgccctcgccgtgtgcctccccctcgacgagtactaccgcctcgcgccttgccgtacctcctttctgcctccgccgtccttct

SEQ ID NO: 73883 - DNA, 240 bp, Zea mays
  unsure (1)..(240): unsure at all n locations
  Clone ID: MRT4577_167381C.1
caaagggcgaattgctgttattgatcctatgaaaaagcgggctgcaagatctggtcagggtgtcncacttggtggtattggtgcaggaagtattggaagaagctacaaaggtgatttccaacgttggcaattgtttccaggatcttgtgaagataatgctgtattggctaatcaattgtctgccttcatttcccgccaagatggtagaaaatattcgacagtgttgcatcctgggaaaca

SEQ ID NO: 73884 - DNA, 690 bp, Zea mays
  Clone ID: MRT4577_167382C.1
aaagagcatttacttttatttccaccctcattaatacaaagagaagataacacttgctatgcttatacacatagatagataaaggctactacactcaagccagccccttaaggaatgggataaacaacgaccttccctgtggcatggttcgtttctaagtatgaaaaagcatcagcaacgcgtgagaatgggaacggtcctttgggatcaaccacaggcttcaccttcccactctcaatatatgggttaagtttcttcaaaacatcgccattagatgtaacaacgaatcgaaaaccaggaggcgtgacagctccagtcaatgccacaactttccctccttccttaatcaccttcactgccttatcacacatcccaatggcgtcaaagacaacatcgtacttgtcaggcaagtcttctatattctcctttgtgtaatcaatagctaaatcagcacctaagcttctcactagctctagcttttctgtactcgcagttgcagctacttttgaagctccatacacgtgcttcgccaactgaatcacaagactccctactcctccggcaccattaagaacaagaattgactttccggctgagaattcagtcctaactaaaccttcatcagcggtttctatcgccaacggaagccctgcagcttgcgcaaaatcgatgtttttaggttttaaagct

SEQ ID NO: 73885 - DNA, 487 bp, Zea mays
  Clone ID: MRT4577_167383C.1
cccagcgtccgcaaagagataaaaacctttaaacccaaaaatgatcctggaatacagtacataacaatttggatcccagtctggaataaaaagggcaatttttttttctgttagaaataaaagccaggggaaattggtttgctttgtgtgctaggaggtgaatcagaacagattataatgaaatgctctttttaaaacattgtttattaagtgatcttattttatttattaaaccaaaacttatttgtgttttcatttgagagtgttgaacaatcccttcttcttctcaaactcagaaaaaagtaatctgataaaagaagaaagttaaaagtcttactgatatcacctccgcatttacttcctcataggcctcaggattatgtagcttttattttttatgttttataaagttttctcctatttctaatagtccatcgatcttctgcatttataggtttgaataaaggcttaagaattgctatttgtc

SEQ ID NO: 73886 - DNA, 276 bp, Zea mays
  Clone ID: MRT4577_167384C.1
atggggaagaaatgtcccctgcaagtgttcgtggggatccccgcggggaagttttttcgtcgcggggacggggatggggagccaaaacccgacggagaattccccgttgccatctctgatcctggcaagagcgacggattgccggggcagcaggcaaagccgtggacgtggagaagctacccggccgtaaatagcaagcgcggctactggggcgacatgattgatcggcagatggacgcgccgccgcccggcaagcgagcgaggctgaggatgtag

SEQ ID NO: 73887 - DNA, 523 bp, Zea mays
  Clone ID: MRT4577_167385C.1
ccagtttctagccgggggccgccctttttttttttgttttagccaacacaactcatcagctaatggattaaatgctaactttatcccttgttttataaattatactacatctttataagtgattaaaatattttaacctcacacatgcctaccaaaattctactcggtccactaatttagctaagtaactagaatagcgaaataattcgccatagctgaatctggctcgataatcacaagaactgcgaagtcggcgaaaggttcgtgacttacacaatttatcgagcaccttaatgtgcctcgtactagcacatcagtttatgcaacgatcgaactcttttggataatttattagcttaccgtttcaatagccgactcgaatccgcgagatcggtagtgattttccgatccaggcaattgtcgagcgcttggggaatatcgcgctgctagcttcgttttcacccgattcttgggattcttgatgacgcgcgggacgataacaagattgtatctggagcgagct

SEQ ID NO: 73888 - DNA, 306 bp, Zea mays
  Clone ID: MRT4577_167386C.1
acggcagaatttcagaatgtaaaccttgtgtggacttctcctgcacccagttgtgtacacaccttttctcgctgtttgccacaaatgatcgcgtatgtggttcagacgatactacagcacaatggctgctatcatgcagcttttgatctgggcctatgattctgcctgcgagaagctgacatatgcctagtacttgcgtgctattatatacatatagataatagacagggtcttttaacatgtacttgcaaagggaactgttgctgggaagatggttatttgaatatctattgtaagaagccactt

SEQ ID NO: 73889 - DNA, 177 bp, Zea mays
  Clone ID: MRT4577_167387C.1
acattactgtttatttgtttacccagccaaaggaaacgatccaaagtagaatctgcatgcttatatatcgccacatataaacataaatatctgatgatcaggaatcaagcatttgaactgaccccagcttgttaagagcacacagaagaacaacagcaacagccagcataaaaagaa

SEQ ID NO: 73890 - DNA, 433 bp, Zea mays
  Clone ID: MRT4577_167388C.1
tcgtctacttgtacggaatcgttattgtctaaaggcttgaattggttattatgatcttcctataggccttaggcgagtcagaataattattcggtatactttagtttcattatagtcttttttataattgtatttttattatttatctactctttttgtattaaacttaatttaatatcacttttatctttatttttatgatatttaaatttttttattttttattatattatattttatttttttttataattatttcttttatttttatttatattatttttttatttattaatttttttttttattaatattttctatatattatttttttttttacattaatatttatttttttatttttattatttatttatattttatttatatatttttaatattaattgtaatttaatatttttttacattttta

SEQ ID NO: 73891 - DNA, 1206 bp, Zea mays
  Clone ID: MRT4577_167389C.1
agaaagacacggccgagtcgtctttcccgacgcaaaagtcgacgacgcgtgcgccttgctcgctcgctcgccgtctgccgtcgttctaggtttagagccaggtcaccagcgctaggagggcgcgaagtcgagtagacggtcgggcctctcccgttctccacggacggctagcgctactggaggcgacgcctggacggcgaccccgcacactcacagccacaccctccacctgtgtgactattcaagggcttaggccgagccgcccggccaatcgccgtccgccggaccgctgagagatataaaggatccagagcacccgtactcactggaacagctgaatgtggtgactgaagattcaattgaactcaatgatgaaagtaattatgtcagattcatatttgctttgcatcagggttacattcaccccaacagtggagcactgcagtatggcaactattattggcctttgcatacgcgtgaaacttgtacggagtctccctcctcgttacaaggtggacataagggttgcccctggatcacatgcaactgaagctgctgtgaataagcaactgaacgacaaagaacgtgttgcggctgcattggagaacccaaacctactggacatggtcgaagagtgcttatcaccaacatttgattgagccctgaatatcaatatatcgctgtgacatgataagggttgcccaggaatcacacgcacctgaagctgctgtgaataagcaactgaatgacaaagaacgtgttgcggctgcattggaaaacccaaacctactggacatggttgaagagtgcttatcaccaacattcgattgaggtctcagttgttgcacatctgggagccatggtgtttcatgttcagaagccacacaagcttattgccataggaattcactcctgaatattatatctgagggccatggtgtttcatgtgcatgattttttttttttgtcctccgtccctttgagttaatacaattgttatctttttggacatttgttggtgcttgtgacctccctgggcaaagggacctgtaatcagatcttgtgtagtagctttcagagcgtttccagtgccacgccattttgtggctgtgtacccccagtcaactgaacttggtaggcgaatcctagaatcctcaaaaaaaaaaaaaaaaaaaaaaaaaaaagggcggccgccaccgcggtgga

SEQ ID NO: 73892 - DNA, 436 bp, Zea mays
  Clone ID: MRT4577_16738C.1
aaaaaaaaaaaaaaaaaaaaaattaaaaattttaaaaaaaaaaaaaaaaaaaaagaaaaatggaaaaaattaaaaaaattaaaaaaaaaacaaaattaattactcaaacattataaataattgacttctattattccagtctcttaatttcttttcttttgcctaattttttttaattcttgttctgttaaaccccatgtattttcccatattattctgcttttcaacactttcccctttttccatttgacgtattttccataagtcccttacggttcgcccttcctttcagttatgctttctaactgctaattggcaccctcatttttccttatcattaatcccaatgctttttttggctatcggtattctataccctttcctctttaaaccccctatttcctaattttttccctttttttctttcttttctttt

SEQ ID NO: 73893 - DNA, 424 bp, Zea mays
  Clone ID: MRT4577_167390C.1
cggacgcgtgggaaaaaaaaaaaaaaaaaaaaaaaaaaaaaaaaaaaaaaaaaaaaaaaaaaaaaaaaaaaaaagggagaaagaaaaaaaaaaaaaaaaaaaaaaaaaaaaaataaaaaaaaaaaaaaaaaaaaaaaaaaaaaaaaaggggggggccgttttaagggaccaaagtttacttcccctgccttggaagaaataacttttttttttggggccccaaaattaaattaccgggcccctttttaaaaacgtaggaatgggaaaaaccttgggtgtaccaaatttaatccctttagagaaaatcccctttttccaagtggggtaaataaaaaaaaggccccccccaatctcctttccaaaaatatgcccaccctaattggtaattggaccccccctttaagggggattttaagccgggggg

SEQ ID NO: 73894 - DNA, 491 bp, Zea mays
  unsure (1)..(491): unsure at all n locations
  Clone ID: MRT4577_167391C.1
agcacccatactcactggaacagctgaatgtggtaactngaaaactcaattgaactcaatgatgaaagtaatcatgtcagggttactttcaccccaacagtggagcactgcagtatggcaactattattggcctttgcatacgtgtgaaacttgtacggagtctccctcctcgttacaaggtggacataagagttgcccctggatcacacgcaactgaagctgccgtgaataagcaactgaatgacaaagaacgtgttgcagctgcattggaaaacccaaacctactggacatggttgaagaatgcttatcaccaacatttgattgaggccatatctgggcgccatggcgttttatgttcagaagccacacaagcttattgcctatggagttcactcctgtctttcaagtactgaaatgttttggctgttaaaggacgtgtgcatgatttttttccatccgtccacttttggacgttttntttgtgctcgt

SEQ ID NO: 73895 - DNA, 234 bp, Zea mays
  Clone ID: MRT4577_167392C.1
actagtacagcggccgcccgccgatttttattttgaaaaggaaccaccacgcggggggatggccagtggggcttgcgtatcgcccaaaccaaagcaaccccatccacaacgcccacgacgaagccaaagcacaatgcgcctggaccacggaaccactacctcagagacagaaccaaagctcccagcagaacccgcggtcccggccaccatccaagtccagcaagcgcccgaggg

SEQ ID NO: 73896 - DNA, 390 bp, Zea mays
  unsure (1)..(390): unsure at all n locations
  Clone ID: MRT4577_167393C.1
ctaatcctataatccatgagaaaaagagaggtttgccagacaggcaccagagaccacagatgaaaatgcagcagagcccatagatcagctggaaatatttgatatccttcttaatgatttcttcaaatgtagtgaagattgctgttctatttatctgagttctctatcctagccatttaattgtggtccttattgttcttacatcacattagagatataaaggatccagagcacccgtactcactggaacagctngaatgtggtgactgaagattcaattgaactcaatgatgaaagtaattatgtcagattcatatttgctttgcatcagggttacattcaccccaacaggggagcacttgagtatggcaacctatttattggcccttt

SEQ ID NO: 73897 - DNA, 1357 bp, Zea mays
  unsure (1)..(1357): unsure at all n locations
  Clone ID: MRT4577_167394C.1
ggttttcgctgtctcgctgccgtcctaggtttggagccaggtcaccggcgctaggagggcgtgaaatcgagtcgacggtcggcactcggcactcacgcgttctccacctactgctggcgctcctgtgaggcgacgccggaccggccaccccgcatgcgaacagcgcacggaccggccaccggtgtgacccctccatccaaggcttcagctccagaccgagccgccccgccaatcgccgtccgccgaaccgcctaggtccttgctggagacaggcacgagcgtggcctaggaggtgaggaccgagaggtgtcaaacctacaagtgctggcacaacagcacacatggttgtctcctcctttcaaagaaacggaatttgttttcctcatctaaagttactgcattgtattccatagaaatggctatggggttgattaatgctaatcctataatccatgagaaaaaagaaagacgcatccgacaggcaccagagaccacagatgaaaatgcggcagagtccatagaccagctggaaatatttgatcacattagagatataaaggatccagagcacccatactcactggaacagcttaatgtggtgactgaagactcaattgaactcaatgatgaaagcaatcatgtcagggttattttcaccccaacagtggagcactgcagtatggcaactattattggcctttgcatacgggtgaaacttgtacggagtctccctccttattacaaggtggacataagggttgcccctggatcacacgcaactgaagctgctgtgaataagcaactgaatgacaaagaacgtgttgcggctgcattggaaaacccaaacctactggacatggttgaagagtgcttatcaccaacattcgattgaggtctcagttgttgcacatctgggagccatggtgtttcatgttcagaagccacacaagcttattgccataggaattcactcctgaatattatatctgagggccatggtgtttcatgtgcatgattttttttttgtcctccgtccctttgagttaatacaattgttatctttttggacatttgttggtgcttgtgacctccctgggcaaagggacctgtaatcagatcttgtgtagtagctttcagagcgtttccagtgccacgccattttgtggctgtgtacccccagtcaactgaacttggtaggcgaatcctagaatcctcaagcacgagttgtttatgtctctataggcaggaaatgttttatcttctcagctccactgatcatgctaattatttggcttgattgcctcctgtttttcccccggaagtgttttattcccanngaaaaaaaaaaaaaaaaaag

SEQ ID NO: 73898 - DNA, 458 bp, Zea mays
  Clone ID: MRT4577_167395C.1
aaaaagaatatccctcgccgaaaaagctagaacgagtactccgcgtagaagacctccccacatcgccctccatgacgccgcagttctacacctgctccgtcgtccccatcggcgcgctctacgcgatgtcgctctgggtctgcaactgcgcctacatctacctgtccgtgacattcatacacatgctcaaggcgctgaagcccggggccgcctactgcataagcgtactcttcaaaaaggagaccttcaggtcctcctccatgctaaacatgctctccatctgattcggcgaggacatagtcggctacggcgaggcgagcagtcgacgcgcgcggtgtctcgctgtagctctccgtcgtcaccttactaggccgacgcggctcgtgctgattcagatcctggtgacgtccaaaggcatatgcgctcaaccctgtcacctacactatactatggacgcg

SEQ ID NO: 73899 - DNA, 1368 bp, Zea mays
  Clone ID: MRT4577_167396C.1
gccgagtcgtctttcccgacgcaaaagtcgacgacgcgtgcgccttgctcgctcgctcgccgtctgccgtcgttctaggtttagagccaggtcaccagcgctaggagggcgcgaagtcgagtagacggccgggcctctcccgttctccacggacggctagcgctactggaggcgacgcctggacggcgaccccgcacactcacagccacaccctccacctgtgtgactattcaagggcttaggccgagccgcccggccaatcgccgtccgccggaccgctgaggaatttttctttctcgtcaaaagttactgcattcattttacagtaatggctatggggttgattaatgctaatcctataatccatgagaaaaaagagaggcgtgccagacaggcaccagagaccacagatgaaaatgcagcagagcccatagatcagctggaaatatttgatatccttcttaatgatttcttcaaatgtagtgaagattgctgttctatttatctgagttctctatcctagccatttaattgtggtccttattgttcttacatcacattagagatataaaggatccagagcacccgtactcactggaacagctgaatgtggtgactgaagattcaattgaactcaatgatgaaagtaattatgtcagggttacattcaccccaacagtggagcactgcagtatggcaactattattggcctttgcatacgcgtgaaacttgtacggagtctccctcctcgttacaaggtggacataagggttgcccctggatcacatgcaactgaagctgctgtgaataagcaactgaacgacaaagaacgtgttgcggctgcattggagaacccaaacctactggacatggtcgaagagtgcttatcaccaacatttgattgaggcctgaatatcaatatatcggtgtgacatggtgttgatgttcaggagccacacatgctcattgccaatggagttcactcctgtctttcgagaaccaaaatgccttgggtgttaagtgacgtgttgcatgatttttttcctccgccccgttcagttattatatatgctactatggcgctacccttttttggacgtttttggtgcttgtgacctcactgatcaatgcgagatgtaatcagctcttgtgctgtagctttcagagtgctgtcgctgtcactgtcagtgccacgccattttgtggctgtgtacccccacacgatcaacttggtaggagaatcctagaatcctctagcacgggttgtttctgttaccataccggaagtgttttattctgagtttctagcatgtttttttatcgtataacaggcccttagtttgcataagaaaatcgttatttctatt

SEQ ID NO: 73900 - DNA, 605 bp, Zea mays
  unsure (1)..(605): unsure at all n locations
  Clone ID: MRT4577_167397C.1
gggcgattgggaccctcgaggccggncgggagaacatcacccgcctgggaacgaccgaccttgaagagacgagccgcagccatgtcgtcgaccaagaagccctccggcaagactcagcgctccgccattgcggatgtcgtcgcccgcgagtacaccatccacatgcacaagcgactccatggtgtcaccttcaagaagagggctcccaaggccatcaaggagatcaaggcctttgccaccaagtctatgggtacctccgatgttcgcatcgaccctcagctcaacaagaaggtctgggagcagggtatcaagggtgtcgactaccgaatccgcgtgcgaatttcccgacgacgaaacgacgaggagggtgccaaggagaagctgtacagctacgtccaggccgtgaacgtcaaggaccccaagggcctccccacggttgttgttgaggaataaatataaaaatttctcttgggacaaggttctagggtggcatggcatttggagttgtactcggcattctggctttcgacgctgaaaaatacacagagggaaaatgtgattaaagcttgaagtcaacgcaaaaaaaaaaaaaaaaacccgcggcc

SEQ ID NO: 73901 - DNA, 470 bp, Zea mays
  Clone ID: MRT4577_167398C.1
tcgatacaacactctagcgcgggcgcgtgggtggccgcgaacgtggcgccgtactacccctccacggacatctcactcgtgtccgtcgggaacgagatcatggacacggccgacaaggccctcatctccaacctggtgcccgccatgcgcgcgctcaaggcagcgctggtggcggcggggtacccgaagatccgcgtctcgacgccgcactccctgggcatcctgtccgtctccgagccgccgtccgccagccggttccgcgacggcttcgaccgcgccgtgttcgcgccgatgctggcgttccaccggcagagcaggtcgccgttcatggtgaacccgtacccgtactttgggtacaacggcgtgacgctcccctacgcgctggcgcggcccaacccgggcgtgccggaccccggcacgggcatcacgtacaccagcatgttcgaggcgcagctggactcggtgtactc

SEQ ID NO: 73902 - DNA, 1817 bp, Zea mays
  Clone ID: MRT4577_167399C.1
aaggatactttgatgatgtatgacagagcttgtggaaatctcgcccatgctagtaaaaagattcagttattttctagtgactgctgtgaagatgtgaataaggtgcaagacgcactgaagagagaggaagtattgaaacagacggttccagatgagaaaaacaaacatttagaagcaattggagcagttgagatggcaaaaaatgcatttacacacgagacctattccaagcaccaggctgagaatgctaaggctgtggatgcccttttatcaacaggcaaaagttgcaggcggtactcgaaacatgaaatagagctcgccactgattacttttctgatgcaaagaagattggtgagggtggctatgggaatgtatacaggtgtacccttgaccacaccgaagtagctgttaaagttgttgaacaagattcgatcaacaagattgatgagttcttgagagaggtggagattctcggccaacttcaccatcccaacttggttttactgcttggcttttgtcctgaaattggatgccttgtgtatgaatacatggagaacgggagtttagaagatctacttatcaacgataaagggcagccactccattggtttcttcggttccaaattatctttgatgtggcttgtgggcttgctttcttgcatgggacgaaaccagagcccattgtccatcgtgacctaaagcctgggaacatcttgctggacaagaactacgtaagcaaaattggtgatgttggttttgcaaagcccatatcagatcttgtgccagaagggctcacagagtacagagacactgtcatcgctggcacactgtattacatggatcctgagtaccaattaactgggactgttcgaccaaaatcagatctttatgctttgggtattatcattcttcaactcctaactggcaaacgtccacctgggctggtaaatagtgtagaagaagggattaaaagggggatattatcagacatcctcgacaagtctcaacctgattggccaattgctgaggctgagatgttggcaaaacttgggttgtggtgtactgccttaaaatgcagggacagacctaaccttgagtcagtggtgcttccagagctcgaaaatatcctgagcagggttactgtttctctcaaactcgaaaatatccttgcaccaagccacttcttctgtccgatattgcaggaggtaatggaaaatccttacgttgctgcagatgggcacacctatgaacacagggcaatcaaagcttggctcgaaaaacacaagatatccccaatgacaaatcagaggcttccacatctatccataattcccaaccattccttgcatgcagcaatacagcaatggaagttacgagcatcttaaggcccgttcgttttaatcttaatccatatggattgaacgggattgagtgggtttaaatccataacgagtcaaaattctttctaatttcttccaatctcatcttatcaacatggaatgagaataaccgaataaggcctaataaaggcatgaggtgactggtttattcgttgtatatagtttgattcattactgtctgtttgagttaagatgtaaataaagagcaatagttctataatgtagcagtgaaagaagatagtattgtaggaataagttgtattactagtctagatttgttagagctggtttaggctacccagacaatttaagttacaacggaattaagttttgcaatgctgtatggttttgtagttatagccaacaaggcattatcttggagggtctgattacaattttcagtgtgttttctctcc

SEQ ID NO: 73903 - DNA, 316 bp, Zea mays
  Clone ID: MRT4577_16739C.1
atagggcaaaattggggttgtaatttaaaaacttcaccccccatttctttttatataaccaaagccccccaaccccaccaaaaaagagaaacaccctcttcaaaccttaaaaaacggccacttaacgccctaccccaccaaaaacaatgaggcttacctaacccccttgaacaagaggtaggacccaaataatttcaaacaaaagaccctgtttgattttgaaaaaaaaaaccatggatcaaccaaatctgacttcttttgcgctgaccaacctgatgccacacaaacttgggggcggaaaccaactttgcaaagg

SEQ ID NO: 73904 - DNA, 584 bp, Zea mays
  Clone ID: MRT4577_1673C.1
cccaaaaaacccacaccacccccccccctcccccctctttaataagaagaaaagttttttataaatttaaaaacttgggccccttttttgtttgggttttaattaaataaacccccccttaaaaaaaaaattttccgggcaaccggagggccgtggaggaactaaaaccttttttttttaataaaaaattaaattcttttatttactggcccagcccttgggtttatttgttgttcccaagggttgaagttaaagggttttcgggaaaagggacccttaattggggaggttaaaactttaaattttatgggcccaacaacaacggaaaaggggggaaaaccccaaggaaaaagggttcccggttggggggaaaaagtatttgtttggcccccccgggaaacaattttttttccccccccaccccattggccttggggcaaaaagccccttgaaggtcgccccctttaacaaccttgggaaactgggtttccctttccaagttccgggggcgccaaataacttgggcttattttgattgggggggaacccccggggccccaaccctaaaaggccaacccccccgg

SEQ ID NO: 73905 - DNA, 346 bp, Zea mays
  Clone ID: MRT4577_167400C.1
ctctctctctccttcctgccttctgcctgctggcttcccatgtccgcggcgcccctactgggctgggagctgcttctccagcgaaaaggttgctgcgccttgacgcaccaccgatccaccgtcgcccaacccgagcgttctgtccggcagctaggtagcgagctgctcggtggctgcgaccggaagcacggaggcgcacaggacaccaaacgccagtcgattgccttgcttgcctgtgtgctccgcccggcacgagttggtcggtcgtgccatgcatggatgacaaggaacttatcttacagtctgacctgcactcattctaccatcagcatcagcagcaccaccg

SEQ ID NO: 73906 - DNA, 266 bp, Zea mays
  Clone ID: MRT4577_167401C.1
tgtgaagcgagagcccactgtctccaagatccaagcttagtcgcgcatgtaccagaccgagaagcaactgtatggactaggggacatggacccaactgacctcaaggtgacagcctcgtcgcagctgcaagagctcacggttcctaatgctatcggctccacgcacacgattaatgacgccatttgcgttgtaccagaaagtcatgcacatatcgcccttcctataaagtccgcagtgtgtttgaagaacgggacccgccccatat

SEQ ID NO: 73907 - DNA, 243 bp, Zea mays
  Clone ID: MRT4577_167402C.1
aaaactgggaggctcccttcaccaagatcagaccttggatccgtagcttcttcacggagcaagccgccagcgcctccgttgctcaaagcctgtgtgtccttgcatagtcagagtcagacgtcgcaacttgcgtgcacctctaggatttcgaggacgcgcttgcaggtgctatccgtctcgctggtgctccttcggtcgaagagctgagctgatcgatggatcacgatcaccggcaccagcggg

SEQ ID NO: 73908 - DNA, 260 bp, Zea mays
  Clone ID: MRT4577_167403C.1
cgtggttcctgatggggagatgcaccgtggccagaatgggatccagctcctcaatgggcatgcacctgctgctggcccaaaccttgctgggctcccacaggccagcaggcatcatggactcctgggcggcgctttggcgaacttgtttgttatagtcgggtttgcggcctttgcctacgcggtcaaatacgtgctgagaagcatagcacaggagtgaggttcacaagccacaacctgcagttgctgctcatggacacagg

SEQ ID NO: 73909 - DNA, 423 bp, Zea mays
  Clone ID: MRT4577_167404C.1
tgattcggcacgaggcgcaggtacacacacaccatccgctgttctttgtcgcgccgtcgaccccgcacagcatcttctcccttctagagcacggaaggctcccataaggatcactcacctctcagccatctgtggcacgtgcgaccttcctataggtcgggccctccccttctccactgttatcggattggtgtattgaatggagatacaaacgagctcgcaattcctttcgttctgaaggaaccttaatatgcccacaagctaagaaccacttcaacaaattcccagaggtcgatcgatctcagttgacacgagggattcaatgactaacttgcggttgcacataattttctacgaagagcggtggctctgttccaactcccatgctcaaatctacagacgaccctggcgaaagatgatcag

SEQ ID NO: 73910 - DNA, 415 bp, Zea mays
  Clone ID: MRT4577_167405C.1
cccacgcgtccgcccacgcgtccgcccacgcgtccgatggcccaagtatactcaacgatattgggttactcttttttccttaaaaattgtgttccctgtttctcagttatcatgaaaatagagtattatttcattccatagtgccggcttttcgcaacgtcattgatgtgcctcttgtggttagaggattacgcaaatctagatctgaggtgaggaaggaactaggaattgaggagaatgctaaggtgctcgtttttaattttgggggtcagccagcaggatggaaactgaagcaagaatgtctccctgatggttggatttgtttggtctgtggtgcctctgattctcaagatgttccaccgaacttcattaagcttgcgaaagatgcttacacacctgatgttatggcagcatc

SEQ ID NO: 73911 - DNA, 474 bp, Zea mays
  unsure (1)..(474): unsure at all n locations
  Clone ID: MRT4577_167406C.1
gccactcgtgagcccacgcaatcgctcacacagcggagccagtctcacagagcctactatgctgggttacctactactagttcttctaaggtgcaaactgtgaagctagcaatggagatactcttttacaagcacgccaacaggagggggggggtaaagcacaacgggggggggatgccctattacatcacaaaaccatctcaagtggcagcatctcgagctggcggagcagaaggtcctgagcgaggcggaagagccatcactgagcacaactgnggaagagtacggtaatggatgagtgaaacgtggccgccatggaggtggctggaaatggcatgggggtcgaccgcgactacgactacgacagcatggaggtctcttacatatgtagcgagcaggagcagatccagtacgagtgtatgggcgagtgactggagaggtactactgatcaccatacactgcgctgctattgt

SEQ ID NO: 73912 - DNA, 1077 bp, Zea mays
  Clone ID: MRT4577_167407C.1
cggggcgcccccgcgccccttttttttaatctaacaaccattcgccgtcctccccctgtcctctctctctcgtctcaacgactcaacggacgccgcgacttcacttcctctctccccgcgcgcggcctcgccgtacgtgcgccaagccgccgaagcacagagacagcgcccggcggttcggcacttcggccatgcggcggtcagagtgggaggaccggtgcaatcggcacccggaccaccgcacgtccaaaggcgtctgcccgtactgcctccgcgaccgcctcgcgcacctctccgcctccgcctccgcctcggcggcccccaccaccaggcgcgcctcctcctcctcttcctcggcgaccacatccgcgtgctcctccggcggctcgtccccgccgcgccaccgcgccgcgctctccgcggacgtcagctcggtccacgttgtcgccggctcctccttcgccgacgccgccgcctccttctcgcagccgctgatgccgacctctgtcagtaagaaggtgccgacgaccgcggcggcggcagggaggcgagacgaggcggcgcaaccggcgaggggggaggcggaggtgaggaggaagaagatcgggaggttcctgtccaggctcgtcggggcggagaagcggcggcacaccggggacggcggcggcgagctcgtccactccaaaaccatgaaggagaagacggcgttcaagtgggtgttcttctgaattccaccatctcagaccagatgccaacaccatgcacacacgctcgaggcccagtttcctcgatcggtcggtatatagttcccccctcacgtacttttgtgcttaaattaatctgcagttttagcacggtttcttttctattgtgtacacgagaactctaagccaaaaccattgaccattctgtactatttgggatttttttgggggaaaaaggttatatgagaaatcgtgtgtgtctgcttattttgtaaaattagaaggaaagtacaacagctacgaagtgtaaagtatattacgtggatcttaaatctatgttccagtatccgatagtgttttagtttaaaaagta

SEQ ID NO: 73913 - DNA, 1011 bp, Zea mays
  Clone ID: MRT4577_167408C.1
ttgggtacctcgaggccggccgggaacaccattcccagtcctccctctcccctctctctcgtctcaacggacgccgcgacttcacttcctcgccgtactagaccgaagcacagagacagcgcccggcggttcggcacttcggccatgcggcgatcagagtgggaggaccggtgcaatcggcacccggaccaccgcacgttcaaaggcgtctgcccgtactgcctccgcgaccacctcgcgcgcctctccgcctccgcctcggcggcccccaccaccaggcgcgcctcctcatcctcttcctcggcgaccacatccgcgtgctcctccggcggatcgtccccgccgcgccaccgcgccgcgctctccgcggacgtcagctcggtccacgttgtcgccggctcctccttcgccgacgccgcctcctcctccttcgccgacgccgccgccttctcgcagccgctgatgccgacctctgctagtaagaagccgccgccaacggcggcggcggcagcggcagggaggcgagacgaggcggcgcaaccggcgagggggagggcggaggtgaggaggaagaaaatcgggaggttcctgtccaggctcgtcggggcggagaagcggcggcacaccggggacggcggcggcgagctcgtccactccaaaaccatgaaggagaagacggcgttcaagtgggtgttcttctgaattccaccatctcagaccaggtgccagtatgccaccagcccaccactatgcacacacgctcgaggcccggtttcctcgatcggtcggtatatagttccccctcacgtacttttgtgcttaaattaatctgcagttttagcacggtttcttttctattgtgtacacgagaactctaagccaaaaccattgaccattctgtactatttgggattttttttggaaaaaggttatatgagaaatcgtgtatgcttattttgtacaattagaaggaaagtacaacagctacgaagtgtaaagtatattacgtgt

SEQ ID NO: 73914 - DNA, 272 bp, Zea mays
  Clone ID: MRT4577_167409C.1
cggacgcgtgggcggacgcgtgggcggacgcgtgggcggacgcgtgggcaggtctgggattgccttttcctagttcaacatggagggcgctcttgttcagtctgctattgttccagccgtttacagaagcagctcaggtcggttccgtgtgcgtgcaagggccagaacaaatgctacaatggtgcggaatacgccaacaaggactcttactcttggtggcttccaagggctgcgtcagacaaactttttggatacgaggtctgtaattaagc

SEQ ID NO: 73915 - DNA, 1333 bp, Zea mays
  Clone ID: MRT4577_16740C.1
cgggcccaggtcggaaacgcagacgcgcaatagcgcgcccatcttctcctcttcttctgtatgtatataaacattgggcctccctcgaggccggcggccctgatcccaaatgtgcccggcccggtccctctgcactgcgcccatccatccttaaaccctcctgcgcgcgtaggcctctcgctcgtctcgtccttccccagcacaccacaacctctcctcctccttcgccaggtgcctcttcgttctcctctccgttccctgcgtggcgcgcgcggcgctccaggctatcaggacgaaataactggccgcgctgcacgccggccgccgcgagaagaagcgctcgccccgcgcgctctgccgctggttcggccgtagtccgtcgccgctgattgatcctgcaggaaaaacagggcaaggagctactttgagcccgagactgaactgaagaagatgatgatggccgaggtggccaaccacagcaagaggaaccacacggacagctacttcagtggcaagcccgtcgccgtccccgccgccgcggccaccagctcggaggagttcggcagcatgtcgtcgaagaagccgaggaatgccagcccgagactcgcgcccgtatcaccaaaggagaagaaggacaagatcggcgagagggtcgcagcgctccagcagctcgtgtcaccgttcggaaagaccgacacggcttctgtcctgcaggaggcgtcggggtacatcaagttcctgcaccagcagctggaggtcctgagctccccttacatgcgcgctcctccggccgctggcgctgcgcctgaggacccccagcgctacagcctccggagccgcgggctgtgcctggtgccggtggacctgacgctgcagctgacccagagcaacggggccgacctgtgggcgccggcgcacacggccaggcgaaggtgaggactgaggagacgcccctatcggcctcgccaggaggagccggtctgtctgtccggagggaaccgcgcaagtgctgccgcgtctgcgtgcgcgccgtggagtcgacctactcctagcaagaaactaaagcaagcgtgcgtggccgtatcagccgccttgtattatactcctagtagcactctagtgacctgcctggtctggtctggtctctccttgttgtccgccgtatatgtgttgagtggcatgtggattagaagcctgtgtggctggctgctgtcagcaagcagagcggcagtttgatgcctgttccttgagatggatagtgttatcgagttcagaagaaaaaaaaaaaaaaaaaagcggccatgcgcgtgtgcctgatggaaagttattaagg

SEQ ID NO: 73916 - DNA, 2493 bp, Zea mays
  Clone ID: MRT4577_167410C.1
atggggagctgcgcgggagaggagtggcccggcggcgtgacggggccggacgccgaggtcggagcgctcgtctgggtgcgccgccgtaacggatcctggtggcctggccggatcctcggcatgggcgagcttcccgagaacatcgtcatcccgccgcgctctgccggcacacctatcaagctcctcggccgcccacacggcagcattgactggtataatcttgagaaatctaaacgtgtgaagtcatttcgttgtggagaatatgatgaatgtatagaaaaagccaaggctctagttcgccggcaaaagaagacacatactgaagggagatatgttcgcagagaggatgccattatgcatgcccttgaaatcgaaaggtctcattttccaaataactgtgatgatcttgaagaggacgcggacaatgatatatgtgcatcccagaatatatgttctgcaaagtctataaatataaatgggctcagcaaaaaatctcgtggtgcaaggagtttgtatgatatagaaataaattcagctcaagagttgtctcaaacattgacactgtataaacagccacaaaatttatcctcttcaagcactaggtatgcatcgtcaaaaaggaagaagtggaagggacataaagatcatgaggatgattcagttcatggattccagcgtatgagagatcttagggagattggaacaaaaaatgttttcaagcagaagtctggttcaggaattgtttcagatgtacctcttcttgaaagtggatcaagctttggctatgatttgtccagtgccgatgggataaaattgggtgagcagtcccagtcatccataaaaaagaaacggtccaatattgggcaatcctatgatagtttgagtaagaaagataagcatcaccctctatcactgttatgtgaagattcagaagtgtctggaacttattatcattgggacccttcaggccagtcttgtagtcaatacccaggaggccagatacccaatttggttgaatcaagtaggagggcaaaaactatttttccaactgatgtaaataactgttcctacagctcaggcacttcaagtttggatacattattagatacatcacacatcaaacataaacgttcggtaaatgctgttactctcaagaatgctgacccatgcacgactagaattctcaatgatgactgccctgattgtgatgagtttcttgatgctgatactttggaggaggatgttctggaggaaggtaaaggccatttggatacttatggatcttgtgcatccataaaggatcaaatttcaaaactgggtaatcaaagtactggctgtgccataggtggcacaccctcaacttggcataatagaaattcgagaagaaaagcataacggctgtcaattttttgatacctaaaggaagccacaagagggatacaaattcgctgctgcaacatgaagggattataaaatcggaaggtactgtctttaggcctgctgaacttgaggataatgcacatgtgactcctgagcatgacgagtcctctgaaactataagcaatctttcaaactatgagaagaacacaacatcattccccaattatgttccacttcaattactaccaccgcctggacagcggcctgatcctaaacctccaggatgccctgtaacgaatccaaccaggagagcacgtgcagattatagactatatgatgttgaggtgactgtccaaagaagctacaagggtcatcatgcgccccttatttccctcatgagtaaatggacaggtaaaccaattgtggggtaccctgtcaccctggaggttttgaaggatagccgtcacacaacaagtagagatgagcaccgcccggtgatgggcagtctggactccttactaaagagcagagtttcagagccacggcaagcaagatcttcacatgcatcacgatcaaaatttaaatccagtggacgtaaaaaggccacagagcatgatttggacaggtcttggtggccccataccaagaaaccagcatcttcgccgaggaaaatgcggaggctatcatctttcgccggcagccggagagagagtgcagaccaaaagcccgtagttgcaaaaactggcggaccagcagtcgcgtgcgtcccgcttcgtctcgttttcagtaggatcaatgaagcactaagctttcccttgagacaagaaaagcccacctgaggctgttggcagttttgcattgctgagatagaatgtgggcaggcatatacatttgctaggttttctttgtacattagttaccatattatctgaaagcgtattgcctggcatatttatatcagtatattatgatgtaatctatggccccactaggcaattacgacttaccccccgtgagatatgggccgaacatccaatggtgggaggaaataaaggggcatcagttgctgtgggctgtggcttccaaaaaaaaaaaaaaaaaaaaaaaaagaaa

SEQ ID NO: 73917 - DNA, 321 bp, Zea mays
  Clone ID: MRT4577_167411C.1
tacccccgatggtaagcattctctgagatataacataagcattaagactacaccacaacctctcaagatccacgctcatatagagatgaaatgcttacagtttaatagattgctccatattaagcaagctatgaacaaagctgaagctcctgacaatgataactgtcctgtgaagattaagctacttgcttctacactttatgtttataccacacatacccttgacaatgatcaaggcatttcactcctcactactgcactcaatgcttgtacagcatagattgaaaagtacaaaggaaagttagtactgaatgaaccacc

SEQ ID NO: 73918 - DNA, 3552 bp, Zea mays
  Clone ID: MRT4577_167412C.1
tcatccagccctatacgccgtgttgtatgtgtactctgcccaaggcagccacttgagccactcacgtggccgatctcccgtgaaacatcgaaggtacatggcgatgactttattggccgcctccgtctgtccatctgactgtgggtggaatgctgatgacatattaagcttggcgcccatgagcctcattagttcttgccagaacatggaggtgaacacggcatcgcgatcggagacgatcgattgcggcataccatggagacgtacaatgtcggagaagaacgcctgtgccacagtctcggcggagtacgggtgagccaggggaataaagtgtgcgtacttactgaagcgatccaccactgtcaagatgacggacttgccgcgaacacgcggtagagcttcgatgaaatcgaggccgatgtccgaccatacgtccgtcgggatcggcaggggtagcagcaacccagccggccggaggtgttccgacttattgcgctggcaggtcgagcatgcccggacgaagtcttgcaccacacggcgcatgtcggggaagtgaaaatcccgacggaggcgatggagagtgcgctgtatgccctcgtggccgtccccatggacagcgaccaatatctcctggaggagtggtgatgccgatggaatgaagatgcggccgtcgtatgtgaggagcccgtcgacaatggcccacggcgcgccgcgtaagcctgctgtcagctcctccttgagcgccactaccgccgggtggctggcctgttcgtgccgcagctgggcaatgtagtcgaagcgtggcgcggacaccgctaggacggcaccctctggcgtgtcgcggcgagacagggcgtctgccaccccgttctgagcgccaggcttgtactcgacactgaagtcaaagcccagcagcttgcccacccagtgatgttggggaatggtagctagccgctggtcgaggagaaacttcaagctgtagtggtcggtgcgtacgatgaatcgacgcccccataggtatggtcgccagtgccggacagcatggacgagtccgatgagttccctctcgtatgcagcgagagagcggtgccggggcgccactggcctgctgaagaaggcgatggggtggctgtcctggatgagcaccgccccaaacccatgggacgacgcgtcgcactcgacgatgaatggcttggtgaagtctggtagcgcgaggactggtgccgaagtggctgctgtcttcagtgccgtaaatgctgtcgtggcctcctctgtccaggagaagccctccttcttgagcagcgctgtcaggggtgccgctatgacaccgtaatcgtggacgaatttgcggtagtagcctgcaaggcctaaaaaacccctgaccgcccttgccgaacgaggttgtggccagtccctgacagcttccaccttggcgggatccatggccacgccggaagcggagatgacgtggcccaggtaagccaccgacggtacagcgaacgcgcacttggactgcttgacgaagagctgatgctgctgtagcatggtcaacaccgcccggatatgacgcaggtggtcggcccaggaggagctgtagatcaagatgtcgtcaaaaaacaccagaacaaatcgacgtaggaatggcctgagcacgtcgttcatgagagcttggaatgtcgccggtgcgttgcacaggccgaatggcatgaccaggaactcgtagaggccgtcgtgggtacgaaaagccgtcttgtgaatatccgccgtccgcatgcgtacctgatggtaccctgatcgcaggtctaattttgtgaagaagcgggcgccgttgagctcgtccaatagctcgtcgaccactggaatcgggaaggcgtccttgatggtgagcgcgttcagcgctctgtagtcgacgcagaaccgccaggagccgtcgggcttcttgatgaggatgaccggcgatgagaaatctgagttactcctgcggacgatgccttggcccatcatctcctcgcattgtcgctccaactcatccttgtgcgccgccgggtaccggtagggacgcacagccaccggtgttgcgtccggcttgaggacgatagcgtggtcgcgagcacgtactggtggcagtcctgtcggtgcagcgaagacatcggcgaacgttccgagcagcccctcgatgagggaatcgcccgccgcggtcgctgcgagacgcggtgcgcggacagtcgccacgtcagtccagcagacctcccgcccgtgtcgtgtgaacgacatggtgcgcgccgtgaagtcccacatgatccggcccaaggtgacaagccactgtgtccctaggaccagatcatagccagcgagaggcattacgaagagatccaccaggaacctttcggtggcgatgacgataggggcctgcctaatgactccggggcagaggatgcgctccccgttcgccactgtggccgtcagacgcgggcgaggctggatgaccaagcccgtgcggcgcgcagcttcctctccgatgaagttgtgggtggatcccgtgtccaagagagccaccagcgtcgctgtccccagatccacccggacttgcatggtgttgcatatgggaactcctgccactgcctgcaaagaaaagactggagccgctgtttcatcgttaggttctgcagcggctgtgtcctcctcgtcggtgatgatcacgccgtcgacgaagaagaggcagcggcagacccggttatggccccgggagtacttctcgttgcagttgtagcatagtccgagacgacgccgttccgcttgctcttccgtcgacagccgcctgattggttgggtctccaaccgcgccggggctgccccaatagggggagctgggagcgcaggccgcgctggagggacaggaagcgctggcggcggcagagctccacttcccgcgccaagctcatagccattgctagggtttgggggttgtggaggcggacttggttgctgatcggagggagcagcccccccggtgaatagttgaacccgttgggcctcccccaacggacccgcgcggggcaagagcgcctggaagcgatcctggtattcttctaccgtgcccgtgcgccgacattcggcgagctcgaacagcggtgctgatcgcagcggtggcccgtagcggaggttgaggagatccttgaagcgccgccaagtcgggatgccttcgtcctgctggacctgcatgtaccagagttgggccttgtcctccaaattataggaggccatccacaccttttcttcctccatgatccgctgttgatggaagtacgactcgcagcgattgatgaagacgagcgggtcggacttgccgtcgtaacgcgggaagtccagcttctggaaacgcggtggccgatcggtgtggtgttgcccgtcgaagccgccgctcggcacctgggcgcctgaggacgacgtcttgtccttcttcatcgtgtcgatgtcggtttgaagggtattgatcttgccggtgagcccctcgatcaacttggcgaggtcggcgatggtgggttcggacat

SEQ ID NO: 73919 - DNA, 406 bp, Zea mays
  unsure (1)..(406): unsure at all n locations
  Clone ID: MRT4577_167413C.1
tggggggttcggatgctgcagcggcggcgttaacaccggtgacgccgacagaggggacttttttttttttttttacctgnnagatnacacattctgggggggggggggggcancnccaanaanctnntnntnattgacttnactggacgaggtgtcctccgtgccgggcctggctccaatttttgctgatatggccaagaagtccccaaatgttgtttttctgaaagttgatgtggatgaaatgaagaccattgntgagcaattcattgtagaggccatgccaacattnctgtttatgagggagggcgacgtcaaggacaggttcgttggtgcagtaaaggaagagctagctaggaagtttgaactatacatgggcttgtagatcagtgatgcccgaatgtagtat

SEQ ID NO: 73920 - DNA, 368 bp, Zea mays
  Clone ID: MRT4577_167414C.1
ccacccgtccggaaggacaccaactcgtaaaaagcatagtttatcagtttagaaacaacatggcccccgtggcggccgtgaaccttgccctgccagcccccatcgccttttcaatacacactccctcgcccctccgcgatgccacaatgctcacaccagtactctctctctttctgacaaccatgatagtcgcatacccaactatacaaccctacatgctacctgaggcaatcgcaacacgcatctcacgctgcattagcactaacactccaacaaccatttgacctattccatgaaccattcttatcgcattaaaatcttccaacaacttatgcagatcatctacatcaactcttgctaccaacaat

SEQ ID NO: 73921 - DNA, 1256 bp, Zea mays
  Clone ID: MRT4577_167415C.1
gcgtccgcgctggagctaggaggtgcagctataggcctatagcagacgtagagcaatggaggccaccgaggctcctaactatgacagtattgtcaacagggatgagatcaccgaagttgcagctgcagcgttcgccaacccggagcaggtcccggagaagtacgtccggacggagaaggtccttgacggcgtcgtcgtcggcgcggatgagagctacgaccggtcgttgacatggccaggctcctcgacccggagctggcgccatcggatgtcgccaagctcggcgacgcctgccgaaactggggtttctttcagctgacaaaccatggagtggacgaagcggtggtgtagcggatgaaagacaccacgatgcagttttcagctccccactggacaataaggccaaggtggcggtccgagggaacggctttgaaggattcgggcatcactacagcagagcgtccaacggcaagctggactgggcagagagcatgatcctcatcacgcagccagtcaaggacaggaacatggagatgtggcctacaaatccacccacgtttagggacgcgctcgacgtctactcgatagagatgaccggcctcgcaatgcggctcctggggttcatggcggccgacctcggggtggagccggaggcgctgcaggacgcctacacggggaagcggcagagcatggcggtccactacttacccgccctgccgccagcgggagaaggtgaatgggcatcaacgccgcacacggacgggctgggcctgacgctgctgctgcacgtggacgacacgcccggcctgcagatccgcaggggcggcaggtggttccccgtgcgcccgctgccgggcgccttcgtcgtcaacgtcgccgacatcctggacgtgctcaccaacggcgcctacgccagcgtcgagcaccgggtgctcccggacgccgagagggctcggaccaccgtcgtcgtgttccaggaggcgtccgtcgggggcctggtggcgccgctgccggggctcctcgagcagcagggcgcgcgcgcgcgctacaggtccattgagatcgaggagtacatcaagggcaacttcaacgcgctggagcaagggacacggttcatacagagcctcaggatatagccatctagttgctccttccatccaaaaataattgcctaacatatcgatcaatcaatcaatctcaatcttgaccaatcatatccatatcttccgtatctaatattaaagatcgagagtgtt

SEQ ID NO: 73922 - DNA, 1631 bp, Zea mays
  Clone ID: MRT4577_167416C.1
cccacgcgtccgcacacgcgtacgcacacgcgtccgcacacgcgtccgcggacgcgtgggcgctggagctaggaggtgcagctatagcagacgcagagcaatggaggccgccgaggctcttaactatgacagtattgtcaacagggatgagatcaccgacgctgcagctgcagcgttcgccaacccggagcaggtcccggagaagtacgtccggacggaggaggtccttgacggcgtcgtcgtcggcgcggacgagagctacgagctgccggtcgtcgacatggccaggctcctcgacccggagctggcgccgtcggaggtcgccaagctcggcgacgcctgccgaaactggggtttctttcagctgacaaaccatggagtggacgaagcggtggtgcagcggatgaaagacgccacggtgcagttcttcagctccccgctggacagcaaggccaaggtggcggtccgagggaacggcttcgaaggattcgggcaccactacagcagagcgtccagcggcaagctggactgggcagagagcatgattctcatcacgcagccagtcaaggacaggaacatggagatgtggcctacaaatccacccacgttcagggacgcgctcgacgtctactcggtagagatgatcggcctcgcaatgcggctcctggggttcatggcggccgacctcggggtggagccggaggcgctgcaggacgccttcacggggaagcggcagagcatggcggtccaccactacccgccctgccgccagcgggagaaggtgatgggcatcacgccgcacacggacgggctgggcctcacgctgctgctgcacgtggacgacacgcccggcctgcagatccgcaggggcggcaggtggttccccgtgcgcccgctgccgggcgccttcgtcgtcaacgtcgccgacatcctggacgtgctcaccaacggcgcctacgccagcgtcgagcaccgagtgctcccggacgccgagagggctcggaccaccgtcgtcgtgttccaggaggcgtccgtcgggggcctggtggcgccgctgccggggctcctcgaccagcagggcgcgcgcgcgcgctacaggtccattgagatcgaggagtacatcaagggcaacttcaacgcgctggagcaagggacacggttcatccagagcctcaggatatagctatctagttgctccttccatccaaaaataattgcccaccatatcgataaatcaatcaatctcaatcttcaccaatcatatccatatcttccgtatctaatattaaagagagtgttaatttcttcctccaatgtcttgcggttgcagcttcgtccatcaactccatccactcactcccctatccattggacatggcatgttccacattctcatttaactattcgaagctacaaaatctttattaacacgctataggctataccgctcaagtcagttcatattacgatggcaaaattatgttagtttcgataaatttatcatgctgacataaagataatatactattttagcatcttaatattgatgaggtatgcggtttcaaatattttatattttagcgattcaaatggtcatgtccattataatgttagtgagaattgatattcga

SEQ ID NO: 73923 - DNA, 307 bp, Zea mays
  Clone ID: MRT4577_167417C.1
atggaaaattcccgcgcactggcggccgctacgggggaatcccacctcggggccaagcttggcttggggatggccacccctgccggctgtgggaaagggcaatgcgctcacagttccacagcgcaaactaggcccccagcttaaagtgcaaaccctggggggcccaaagagtgaaaaaactcacattggtggcgctgagcccactgcccacttaccaggggggaaacccggccagccacctgttttaaagaatggaccaacccgcggcgagaggctttttgccaaccgcccccctctgcggggggcg

SEQ ID NO: 73924 - DNA, 540 bp, Zea mays
  Clone ID: MRT4577_167418C.1
gggaaacaaaactttttcccccgggcccccccccgggggggcctaaggggcaaatcccaccccccggggggccgttcctaggggaccccgccccggccccaacctgggggaaaacagggccaaagcggttcccggggggaaatgggttcccccccccatttccccccaaattccgacccggaaccaaaaagggaaaacccggggggccccaagggggggcccaccccccattaatggggggggccccccggccccttttccagggggaaaaccggggggccccgttgttttaatgaaccgccccccccccggggaaagggggttggcgtatggggcccttttccccttcccggttaatggaccccttggcccggggcgttcgggggggggggggggtttcaccccccccaagggggggaatccggtttcccccaaaatcgggggataccccaggaaaaaacaggggagcaaagggcccccaaagggcccaaaccccaaaaaaggcccgggggggggggtttttccttaggcccccccccc

SEQ ID NO: 73925 - DNA, 358 bp, Zea mays
  Clone ID: MRT4577_167419C.1
gcgacccaaaccctaacccccaggcgcacgcggtcactttgcacctaccgagcaccccacttcacagggcttgggtcctaatctacacagtcaatcctccttaacaggttcattaatttacttgtttccagcctccgcttcttcacatattttgcttagctacactcctgaccggcactcctttgatgcttgctcttaccttctccaagtaaaagagtactctctttcgcctgatctacctacacaccttttcttgcatcaccgacttctattttggttcattaacaccccccgcccccctgctctcttgagtgacatgcccgaatccaagaacgtcccttgggcggggctaaagctg

SEQ ID NO: 73926 - DNA, 1290 bp, Zea mays
  Clone ID: MRT4577_16741C.1
aatccaaatgtgcccggcccggtccctctgcactgcgctgcgcccatccatccttaaaccctcctgcgcgcgtaggcctcgtctcgtgcttccccagcacaacctttcctcctccttcgccaggtgcctcttcgttctcctctccgtttccctgcgtggcgcgcgcggcgctccgggctatcaggacgaaataactggccgcgctgcacaccggccgccgcgagaagaagcgctcgccccgcgcgctctgccgctggttcggccgtgccatccccggccggtgcttcttccccccctgtgcccgcttgatctccttccgcgcgcacgcacacgcagtggtccgtcgcccgccgctgattgatcctgcaggaaaaacagggcaaggagctactttgagcccgagactagactgaagaagatgatgatggccgaggtggccaaccacagcaagaggaaccacacggacagctacttcagtggcaaggccgtcgccgccaccagttcggaggagttcggcagcatgtcgtcgaagaagccgaggaatgccagcccgagactcgcgcccgtatcaccaaaggagaagaaggacaagatcggcgagagggtcgcagcgctccagcagctcgtgtcaccgttcgggaagaccgacacggcttctgtcctgcacggccgggcggggtacatcaagttcctgcaccagcagctggaggtcctgagctccccttacatgcgcgctcctccggccgctggcgctgcgcctgaggacccccagcgctatagcctccggagccgcgggctgtgcctggtgccggtggacctgacgctgcagctgacccagagcaacggggccgacctgtgggcgccggcgcacacggccaggcgaaggtgaggactgaggagacgcccctgtcgacctctcgccaggaggagccggcctgtctgtccggagggaaccgcgcaagtgctgccgcgtctgcgtgcgcgccgtggagtagagtttccaggcccctgactgacccgattcgacctcctagcaagcaagcgtgcgtgtccgtatcagccgccttgtattatactcctagtagtagtactctagtgacctgcctggtggtctggtctctccttgttgtccgccgtatatgtgttgagcggcatgtggattagaagcctgtgtggctggctgtcagcaagcagagcggcagtttgatgcctgttccttgagatggatagtgttatcgagttcagaagaataccatgcgcgtgtgccaaaaaaaaaaaaaaaaagcggcc

SEQ ID NO: 73927 - DNA, 2331 bp, Zea mays
  Clone ID: MRT4577_167420C.1
aaaaaaaaaaaaaaaaaaaaaaaaaaaaaaaaaaaaaaaaaaaaaaaaaaaaaaaaaaaaaaaaaaaaaaaaaaaaaaaaaaaaaaggaaaaaaattcggcacgaggctccgctctgccgtcgctcgccaccggaattcggggatcggtgggaagacggcccagaagaaaagaaatcgccgatcgatttctcccgaaataaacccccccaccttttttctacctccttccgtctgtttccggagggcgactgatgtcttttctcggggctggggcggccgtccagcgaccacggagctgctgcgcctgcgcggaggcagttggggaggagtagtcgctctacccctaccactcccgctccaatctagcgacgacgacgacgacgacgacccgcccgccccatggaagaccaatcgcctgaccatatatcagtcggttcagcacaaaagaagtctagtacttcctcacgaggccggcaccgtaatttctcatcatcaacatgcaaagattttctccggaagtttgtggacagtgaacttttaacttcaagcctagaggattggttctctggtcacagtgaagattgtggtttcaggaagccatcttttgatgttcctttcgaccttacagaattacagagttttgattacgctctggagagtgttacttttcagcagctagtacggatgccaaatgccctatatgcatcgacatcagatgtttttgaagctactgcatatcttgctttagaggatttccttcatgcaagcattaaaggactgtggcaaactttctggggtcctgatgaatcaatgccattttcagttgcctgtatacacagcacaagctccaaattttatcctgctgagaaggctattagcagtggaaaactcgatggtgtttgtgcaaccgctatactactcaagaatttgaagcattcacaaggaagatgggaccatattgtcgtcttggctttgttgagacctgatattggaatggtttctgcacatggtgaccaggagccgtctcctgctgttttaggggaggcactgttctttgctttgcgtgtcctactatctcgaagccttggcagatcctccactgttcttcgcaattcggactgtgtttacgtgcttctttttgattcacagtttggcggagtggtaaaagtgcaaggtgatttgaacaagctggattttgacctcaacaatgtttatgactgtgctgctgaatggataaagaaacatgccaacatttcagtttcttccatagatcgagtatggaacaaacttgggaatgctaactggggagacatcgggacccttcaggttctcattgcaatgtttcactcaatgatccaattttatggagagcctaagtattctcttgatgagctggcaacggaacatagttcaaggctacaaagtcgaagatcagaaagacatttggttgacagacaagctaatggtaatggtttatttcgattccaacagcggagtcgttctcctgaaattgttgaagtacaggaggaagcagctgtcgatgtgaaaccacatgaaaccttaaggattgaaataggatctgttgtgttgatggatgatgcttacatgcagaaaggttttcagatcaatgacatcctaacagacagtgatcctcctatttatacttctactcctgtagaagaacctaccagaacctatttgctgtatgtgggctccagcccttctcatttggaaccggcatgggaggatatgaactcctggtaccaagtacagaggcagacaaaagtactgactgtgatgaagcaaagatgcatttctagcagatatataccacagatggtatcttctggacggctcgtccatccaggcccatgtaacaagcctaactcaaatggaagttgtggccatccatggtgcagtactccaatgcttgtcacctcaccagtcggtgagaccatttcaaatctgataaggaatggactgtttggtgttgaggaggctctgagatgttgccatgactgtttatctgctctcgccgccgccgcagcagcaggaatccgccatggtgatatccggccagagaatgtgatccgtgtcaataacggctcaaggcatccatatttcgtgcttattggatggggccatgctatcctagaagatagagaccggcctgtgatgaatctattcttctcatccacgtttgcgctccaggaaggaaaactatgtggagcatctgacgcagaaagtttaatctatcttctatatttctcttggggtggagtttgccctgagcttgactctgttgaaagggcacttaaggggaggaagac

SEQ ID NO: 73928 - DNA, 1539 bp, Zea mays
  Clone ID: MRT4577_167421C.1
ttttatttgtttctgagattcaaaaacagtagtaggataagactctgagcagctcagtagaacatttacataattacatggaacctcgcaccccacaaataacttagtcaagctcaaatgctactatgtaacctctattctagagcgcttggcaaaagattgataccacacagttagaggtacacattcaccaactgattaacaagttctgacactgatcacaagaaaaacaaatcaccctgaagcctaccagaaccggataaaacgggaccagaatctctcaaggcaaccagagcggaggctcaccaatttacccaagattcacaaaatacatcatgttgctgatatcctcaaggatcacctgtgcgaaggaagggcttagggcaagcacacgggatagtaaacactggcagtgatcccattgaggatagcagcagcagattgcaactttcagaatacccttatatccaagcaacggtatatcaaaacgatggacagactatgacctatggacctttcacaaataaattatctacaacaacaaaaacaggtaacaggccaatcacttgatcttccgaatctcggatttgcgagaaaatggcgctgtgttattaactcgaggatgtgtcgacctccttcccatgatcttcgttcattgttcttcgaagccgtttcaaccagatctcatagtccatcgggtacggggttccacaaaggctgtcaacataatccgcaaaagctttcagcaccgcagagatgtcgcccaacttctgctgtatgactctcctcgaccacgacgtctccctccactgaagtgcactttcaacagagtcaagctcagggcaaactccaccacaagagaaatatagaagatagattaaactttctgcgtcagatgctccacatagttttccttcctggagcgcaaacgtggatgagaagaatagattcatcacaggccggtctctatcttctaggatagcatggccccatccaataagcacgaaatatggatgccttgagccgttattgacacggatcacattctccggccggatatcaccgtgacggattcctgctgctgcggcggcagcaagagcagataaacagtcatggcaacatctcagagcctcctcggcaccaaacaatccattccgtatcagattcgaaatggtctcaccaactggtgaggtgacaagcattggagtactgcaccatggatgaccacaacttgcatttgagttagggttgttacatgggcctggatggatgacccgtccggacgattccatgtgtggtatatatctgctggaaatgcatctttgcttcatcacggtcagtacttttgtctgcctctgtacttggtaccaggagtccatatcctcccatgccggatccagatgagaagggctggagcctacatacagcaaacaagttttggtaggttcttccacaggagcagaagtataaataggaggatcactgcctgttaggatgtcactgatttgaaaacctttctgtgtgtaagcatcatccatc

SEQ ID NO: 73929 - DNA, 385 bp, Zea mays
  Clone ID: MRT4577_167422C.1
ggggcctggaaagaacgagtttgtttggttccgtttggttggcacgggatgcaagcacacccgttgattctcactgaacaagtttgcccaccggtgattacagcccacttaaaccccaacggcttacctacgggaggtgaacgtgcatgccgccacgttacgcaagctacacagccatgcaccacaagccaggctggcgcgcggggggggcgtgctattttgctcgggtggccgccgccgccgtaaacccccgccgccggcggtacttctttcgggttgacgacgggttcgtcacgttgggcgggaagcgcacctttttgtttttttttgtgcggcgccggccctgggccgcggcttccgtgcctttgccgagtattatgaccct

SEQ ID NO: 73930 - DNA, 364 bp, Zea mays
  Clone ID: MRT4577_167423C.1
tctttcaagcaagtcggccaggaagggataaagacctaataccgagccgtgcgggggctccggacggtaacaggacatgaccccaaaatttcagatccttcctacccgcccacccgtgcccatcgacacatcattattgcctgtcgcaccccacctacgacctcttctgctgcagggtgatctgatacgccacatgctgcgcgatagaactgtgggtattccactacagctccctcatctagaaccccaagttctacttctacgacaaaatgctcggctacatcaatggctacatacgcacctttaatctcgcttgcattgaccacagaggcacaccataacatccggctaggacctgcacgct

SEQ ID NO: 73931 - DNA, 320 bp, Zea mays
  Clone ID: MRT4577_167424C.1
tttgaaaatggtgatctttttttaggattggttggttttcaccccaaaggcgagctcccatcccagcaaaaaaacatttttgttgtttgaaaagaaaaaaaattcatcacggcatcgcttggggaagtcatccgcaaatcatttatttcttgccagccttctgggcggccttggtgaccttaccggcaccaccggcagacttgtcgacggacttgataacaccgacggcaacggtttggcgcatgtcacggacggcgaaacggccgagaggggggtagtcggtgaaagcctcaacacacatgggcttggagggaatcatc

SEQ ID NO: 73932 - DNA, 600 bp, Zea mays
  Clone ID: MRT4577_167425C.1
aacccataaaaaaagaaaattttttaaataaaaagggtccccaaaacaaaagggttaaaaaattccaaaaacccccaaattccccattccaaagtaaaaaggggggaccccaaaaaccccaggtcccaaaaaaaacgggggggcccaaaggaccccaggtcccaaatttaccaaggggcccccccttagggccaattaaaggggaaaaaaaataaggggccccaatttaaacctttttttggccccagttaccaaattttgggggcaacccggggttttccccgggggggggccagggggggcccaaaggggttaaggccccccccccccgccctttttgggggaaacagccggccccttaaaatttagtttaaaaccccgggaaaaaccctttaaacctaattggcccccgggggccaaaaaaattaaaacctggaaattataaccaagcgggcttttggggcccccccccttgggaagggggggggggggcaacccacttttggggggccccccaagggacaaaaccccaaaacccccccctcgggggggggggggggggcccctttttttataaccaagaaatcggggggcgggggg

SEQ ID NO: 73933 - DNA, 273 bp, Zea mays
  Clone ID: MRT4577_167426C.1
gtacactcccggcggcgtcgcatgatcagggttacgggcacccgaagatggtgaaattcctcaagcccaggtaagagccgtgatcctactgcaaggccggctcgccggcaagaaggccgtgatcagacacgtgttctaagatggcacccacgaccgcccctactgccactgtctttgtaacggactctccaattaccccaataaagtagtccgcaaggactctggcaagaatacagcgtataaatcacgcgtcaagtgcttcatcaaactcgt

SEQ ID NO: 73934 - DNA, 589 bp, Zea mays
  unsure (1)..(589): unsure at all n locations
  Clone ID: MRT4577_167428C.1
agcagtggtaacaacggananagcgggtttttttttttttttttttttttgcttttttttttttttttttttttttttttttttttttttttttttttttattaattccaaaaataaggaaagaaagggaacaaacaaaacaaaaaaacctaaaaacaaaaacaaaaggggggggggggcaacccattcccctaattcccccttaaacaaaccaacacttggagaaatctgccaaacaatgaaaggaaaagcccacaacgaaggaaaaaaaagcaacggcgcaaaaaacccctggcagccacaaaccaaaaaaccccggggaaaccttcgaaacccccctaaccccaaacccccaaaggcaaaaggaaccaaaggcccccctttcacgggccgaacccgtcccggaaaacaaaaaaaaacgagccttaacccttttgacccacacgagaattctggtctcgcggggccaatttaaagacacctggggaatcttttaacaaaagggcccccccagccaaaccccccacctgacaaagtcttccccccggatccgcccgggggggcccggcctgggagcccaaaggggggg

SEQ ID NO: 73935 - DNA, 396 bp, Zea mays
  Clone ID: MRT4577_167429C.1
ccaaaccagacctatttttattccgatggccttaaaggttgggctttggaacaaccgcccaacaacacaaaaacccggttgacagtctgcaaaaaacccccccccatggttggatggaaataaaaacaacttaaacccctccaatatccacagcatttccctccctacaggagcccacatccaccccccctcagaaaacccccaaatcgagcatatgtccattcttcacataaaattcctatcctaaaacaagcccaaagggttcaccggggaaccattgaaacccatcaaaaaccccacccaaatgtaatgccaagggaacaaaatttcttcaagtcttccgcggaagccgacaatgtccccagctaaataaacggaactctggagggggccccc

SEQ ID NO: 73936 - DNA, 1550 bp, Zea mays
  unsure (1)..(1550): unsure at all n locations
  Clone ID: MRT4577_16742C.1
acacacctggaccaggttgggaacgcagactcgcaatagctagcaactattctcctcttcttctgatataaacggcgagcccccgcgccggcccggccctgatcccaaatgtgcccggcccggtccctctccactgcactgcgctgcgcccatccatccttaaaccctcctgcgcgcgtaggcctcgtcttgtccttccccagcacaacctctcctcctccttcgccaggtgcctcttcgttctcctctccgggctatcaggacgaaataactggccgcgctgcacgccggccgcctcgagaagaagcgctcgccccgcgcgcgcggctccgggctaccaggacgaaataactggccgcgctgcacgccggccgccgcgagaagaagcgctcgccccgcgcgctctgccgctggttcggccgtgccatcccgacgaggttcccccagctgtgcccgctcgatctccttccgcgcgcacgcgcacgcagtggtccgtcgccgctgattgatcctgcaggaaaaacagggcaaggagctactttgagcccgagactgaactgaagaagatgatgatggccgaggtggccaaccacagcaagaggaaccacacggacagctacttcagtggcaaggccgtcgccgtccccgccgccgcggccaccagcttcggaggagttcggcagcatgtcgtcgaagaagccgaggaatgccagccccagactcgcgcccgtatcaccaaaggtacgtacgcacgcacgcaccgtacgatgccagtgtccactgtcccccgtacgtacgtacgtacgtctccggtctccatggctatctgtttggctcaagttttttttcttggtggtgctgctgctgctgctgcgacgacggagcaggagaagaaggacaagatcggcgagagggtcgcagcgctccagcagctcgtgtcaccgttcggaaagaccgacacggcttctgtcctgcaggaggcgtcggggtacatcaagttcctgcaccagcagctggaggtctctactattttcggcgaccaccgcaccgcaacgcttatccttcgtttttttcccgctagctgatgatgtccatgggaatccttttgctgcaggtcctgagctccccttacatgcgcgctcctccggccgctggcgctgcgcctgaggtatgagctttcgccgtccctcgtcttcgtctccactgatgagttcttgacgcaagcctgtagaaccctaaacctcgtctccatacatatatacatacaccatctactacttggtgcaagaaagaaacctactagcagcacgagatcgttgtgtaacacatgcatgtgatccaggacccccagcgctacagcctccggagccgcgggctgtgcctggtgccggtggacctgacgctgcagctgacccagagcaacggggccgacctgtgggcgccggcgcacacggncaggcgaaggtgaggaggcgcccgtgtcggcctcgccaggaggagccggcctgtctgtccggaggaaaccgcgcaagtgctgccgcgtctgcgtg

SEQ ID NO: 73937 - DNA, 2151 bp, Zea mays
  Clone ID: MRT4577_167430C.1
aattaaccacggacaacagattagcttaaacacgcgctcgcgtacagcgaagaaatggcgatggcgatggctatggcgatgcagccatcttagtccccttccctgatcccctctccctctccttctccatggccgcccctcctctggtgtttgtcgccgctgccatagccgcgctcgccatcttcgtcctcgtcctcgtcgtcttcgccttccggcgatggtggtggcggcggcggcagcgccgcccgctccaggccgcggcggcggcctcgaccccggtcgctgtccaggaggaggatatagataggcctcttctttccgaaaatcgggacgatcactctagacaaagtaattattttcttggaagttctgtaggagaaccttcaaagattcaaacaaataggagtaacacttcgcctagaagtcatgcaattgctgatacagggaggatttatccagatgaatgttgtgctacacaaggagaaactcatgtaatcaatattgaaaatgatacttctgaagagttccaattaggaagcacactaagacgtacaccgccaccaaaatggccaacacctgaccagaagcacagaagaagggtttctggagatgacaatcataatggaagtgttcctttgaaggataatacatatcatagccgcctggatttagaggtcatagctggtccatctcatggaataagctgttctcggcagtcaagtagaccttctatgctcccaataactcttggaagggttcccccaagtgatttagtgttgaaggactctgaagtatcagggaaacatgctcagataaactggaatggaaagacattaaaatgggaacttgtggacatgggcagcttgaatggaactttcttgaactcccaggcggttcaccatccaaatgctgggtctaggcattggggtgaacctgctgaacttgcacatggtgatattataactctagggacttcatctaaactgtctgtaagttcataatattcttccaacatctctagtttcttccaaatctggcaaaatattttatgaaccttttagtagttcaactatacagtctactaatcttacattgtatgtctcatagaagtttgaatcccttggaattgatcatagttgaagttgatatgtttctataattgtttgtatttgctcatatcaaatcctatatcttgatccttatgcttgatatcttcacaagtcctaatctgaaacacttcatcttttgtaggcttagatggccattataatcccatacatttagtccaaactgaatataaaaaattacagtgtcctactcatttttggggatcctgattgataagagcctcaaggatggagtggtggatgtcaaaaggtagggagataggattatcctagtcaaactagttttggggatgtagttttgaacattataagtgtatatgaccctcaggttggtctcagtgagagcgaggagaggaagttctgggaagacttagatagcatggttagagcagtacccaccaatgagaagcttttcataggagatctcaatggtcatgtaggttcaacacatacaggttatgagatggctcatagaggtttcgagtatggtagtagaaatcaatgagagaatattttggactttgctgtagcatacaacctagtgatagccaacaccttcagaaagagagtctcatttggtgacttttagcaatgcccatcgtttgagccatagttgttaaagtggtaagatgaggtaaggcgactgacctccttttgccttttaagtggtaaaacgtaaggcgaggcgacacattaaatatttaaaatagattaaatactgatatttgagaaaatgtttaggacaaaaatgctaattcccagttttagtccacccattcagttttttttagtgagatgtgataaatatactcgcatgagcggccctgaaatcacctgtagattggcataggagcagagtccatcccatgtaatctggggcatgcttttagactctagtgcgtgcgccctgcctgcgtgtgggtgtgtgtgtaaggggggttgtcaataaaaaggtcttcatggagaaacttcctggtcaattttcaatagggtccccaccttggaccaaaaaaaccccccacag

SEQ ID NO: 73938 - DNA, 447 bp, Zea mays
  Clone ID: MRT4577_167431C.1
gacaagcttttttttttttttttttttttttttgtttttttttttttttttttttttttttttttttttcttttcgggtttgcccaatatagggggcggttgcacaaggggggggggccggcgtacgggggccgagaaccaagggggggggggggggaccaggggaaagggcgattcccaaaagggaaaccagtcccgccaaaagcacaaacaaaaaacaaaacgcaaaaagaaaaagggaaggcgggaaagcaaaaaaaaggagtaaaaggaaaagaaaggggggccccaaaaaggcccgaaaccaaaaagcaaaaccggcgggcccaaagcggaaaaaaaaggggcaaaaggagggggggagagcgcaggaaaaagcgcgacagcaaaagggcacgggaacggactaactgggaaaaggccgccgggctgggggaaggcgataag

SEQ ID NO: 73939 - DNA, 237 bp, Zea mays
  Clone ID: MRT4577_167432C.1
attgcactggcagacgggttaatacagggattgccaggaacccagaacaggcttggagacgccatacatggttgttatgacaaagttcacgctcatccaatgctatgcagcgacacaaaaacacggttggttgcgaccggccaagctggccagcccactgtacataggggagatcttgtgtggcgcgcccaagcttcaccagcgcacatacgcgctcagaaaagctgcagcttttac

SEQ ID NO: 73940 - DNA, 392 bp, Zea mays
  Clone ID: MRT4577_167433C.1
tattttttttttactttattattttttccttttttcccaaaagaaagccactcccaagggctgtatttatttacgtccttttaggaaggaaaactttgtttaaacaggtcacggccccagttcccttttttcacggacaagttccccccacaaatacaggaaactgtccctctccctggaacatgataaaggggggggacccctttttctgggtttttttttttttttagggaacactgaactttacgggtttgacccccccacacaccccctgtttttttggggcctccatctgtgccgggcagtttttttttatttttgtgcataaaggctttttttttccccgggccctccgggccgggggggaaagccccccccggggttcccttttt

SEQ ID NO: 73941 - DNA, 442 bp, Zea mays
  Clone ID: MRT4577_167434C.1
gggcccaaaaaaaaacttttttttggtagcccaaaccaaaaacttggccctccggggctgttgaaacaacaaataaaaaaaggccccccgactagggctccttttacatgaccccctttttttatccccccctggaaaaaaagtggtttctactaaaaccggcgacaacaaacaaaacgaggcccggtttttactttccaccactagggatcgggcttggttttgatgccccacgggcgtcccaaaaaaccttgttcccttaccggagcttgcactcggggggccccccctggggaaaacccttggggtcggcccaaaaattgaaaaaaaaaaacttgggctgcacccaaggcatggggggggagctaatgtccctgaactgttggttccaccaaccgggggcggagcccgcccccgcaacggggggggcctccatggggcc

SEQ ID NO: 73942 - DNA, 596 bp, Zea mays
  unsure (1)..(596): unsure at all n locations
  Clone ID: MRT4577_167435C.1
ataaactaacttaaatgataaaataaatacaaaaaaataataacttattctttttattaaaatgagtggttaaagtttaaaaaacaacggtgccatatatttatcaacatagtgagtagtagaaaaaagtctaaaccaggtcacccatgtttttgattcagatgcaaacgaacgcctcttggtgaggcagcccaattccaaaccgattgatttcttttcccccggaaccaggcttggaatgggccaaaccggccaaaatgaacgggggaggggggctaagggatattgccagcaggatggcacgtttgaccacatcacaggagaaagcggttttgagccatttcgagtctatataaatacatatagcggtgtgggatactgtagaataatgtgtatacattactagagagagccaaaagagtaatttcggttacctagttgtagtctgtgaagtatacgaactaaacatatcagaagtttgaaagagatactcaggtcgttcgtgcactgaactagacagttaattaataaacccccgaccncatgagagcatctncaacaatacctcaaactaatgcctcaaatcgaaatatagg

SEQ ID NO: 73943 - DNA, 362 bp, Zea mays
  Clone ID: MRT4577_167436C.1
acgcaactagcaacatagaaagcacaatagtgtaccaacaatggcagccaaaatattttgcctactgaggctggttggtctttctgcaagtgctgctaccgcgaccattttcccgcattgctcgcaagctcctatagcttcccttcttcccccgtacctgtaaccagcggtgtcttcggtatgtggaaaacccaatttttaaaccttccagaacccaacaggcattaccagctggcatttaaccttaataaccctggttcctccaccattattcacccttttaccttaattacccttagcgcctttaatggcaccaaacattaaggcacaaccacctccacaacctgggctatcaaaacttg

SEQ ID NO: 73944 - DNA, 590 bp, Zea mays
  Clone ID: MRT4577_167437C.1
cttgctcgtcgtttcctccgcctctctctcctctcctcacgcgctctcccctcccctctgaagccgcgactcttctgaaccctaaaccgtagatccccgcgcagcaggagcgagatttactcccgcaagcatgagtcgccacccgagcactaagtgggcgcagaggctggacaaggtttacttgacgattgagctgcccgacgcaaaggatgtcaagctcaacctgaggcctgatggccatttcaacttctcagcaaaggcccctgctgatgacatgcagtatgagcttgaccttgagctctttgatgctgtcagtgttgaggagagccaagcggctgttgccccgagggctatatgctaccttgtcaagaaagctgagggcaagtggtggcctaggctgctcaagaaggaaggtaggccgcctgtgttcctgaaggttgactgggataaatggcaagatgaggatgatgaagatgccggatttggtgactttggtgatatggacttctcgaagctggacatgggaggtggtgatgacgatgatgatgagattgaggaggaggatgaagacaatgtggttgacagtgcta

SEQ ID NO: 73945 - DNA, 408 bp, Zea mays
  Clone ID: MRT4577_167438C.1
ctagttctagatcgcgagcgcccgccctttttttttttttttttttttttttggacacggggactcaaagggtaggggcattttatgaggaccacccgtgccgggtcagcatccataccatcaccacaaccaggccaccacgagacaagcacgccctgctgacctcacattatcagataagactagcctaaacttacacatatgagtattacttggtacatccaaaggacacactaaccctactactacccaacacaagggaaacagaaaccagccgaacacaaactgaagcctaaactacggggaaggcgccaacgtgagtcgtgacacatctacattagaaactaggaaactcctacaagagaccacggagccacccatatcatcaacctatcagggggggccctc

SEQ ID NO: 73946 - DNA, 352 bp, Zea mays
  Clone ID: MRT4577_167439C.1
aaccaatcccgctccctccagtattcttctgcctgctcccaagctcgccatgagccgctgctatcacgctggtgatcgctctcctcgccaccaactcggagaacctcccacatcagactcttcgcctgaccctcacgtaccaccaaattagatttcacatacttaacacctagctcatccacccttcctactggcagctcgtctcctacctccatcactacagcttcatactactagatcctcatcataagcactaaccagcttcactagcccatccgcttgtaaaaccaactcattttcaacatgtcgaactatataaccctaacactcaagaaacattctctcgtcatct

SEQ ID NO: 73947 - DNA, 269 bp, Zea mays
  Clone ID: MRT4577_16743C.1
ctggctcgtggacagacttgttcagcactgacaacactgtaactagcattgtggttctctaaagggatcttgctttatagaaattatagtgctgcaaatcaggccaagcacacaggatacattagcatgtcatggcatcatctgattccgatgatatagtgaatggctttggaatgtgtgttatgattaatagggacctatattatccacagcttttcataattagaggatataaacttggttttatgaaagactaacaacagctaaag

SEQ ID NO: 73948 - DNA, 452 bp, Zea mays
  Clone ID: MRT4577_167440C.1
atattgccgggtcgaccagctcttttgtcggcgggcgccctttttatttttttcgggaacataaacatgtagtatacttgaaacctatgtatgcacataagtgatatgtacaaaatgtgtcttatattgatatcgtaagatgcccgtgcttacgatactacaaacctattatcctgcctatgatggagactaattgcattcattattcaatcgatctgaagcaagggctagagattttcgatgatccaactgaaagcctttaagcaaagaagcatttcgtcgacagaaggctatgtttaacagatgcaggctgctgcgtggctcccgtccaactaaatgattatttaaaagatattgcagggactggttggccaaaagatgtacattattttggtcgctttacaccccatttatctttgacagctaacgcttaagtacagcgtgaaagctac

SEQ ID NO: 73949 - DNA, 954 bp, Zea mays
  unsure (1)..(954): unsure at all n locations
  Clone ID: MRT4577_167441C.1
atcggtgctgggcggtagtgccaatttgatgttgtcaatcaccctccgcattgtctcaggtgcggctgaggttgttaatttcctgtcacaactgatggtgttcttgtgggtgctgtattaccttattactgtggagggaggtggagctacagagcaaatcattgatcttttgccagtgtcaaaacaagtaaaggaccgctgtgttgaggtcatggatcatgccatcagtagtgtattgttggccactgccaagattgccatattccagggggggctgacatggctattgttcaagttcttcaaagtgcattttgtgtacacatcaactgtgcttggattcataagtgcacttgtgccaatacttccattttggctgtcctcgatatttgccacagggcagcttctcatggaagggagatatgttcttgcactggtggtaactgtgatacacctcatgctcatggattatggcacaactaccattctggaggatatacctgggtacaatgggtatctcaccggcctcagcataattggtggcatgacactgtttcccaatgcactggagggtgcaatattaggtccccttataatgacggttgttatagcgttgaagaacttgtacacagagtttgtacttgctgatggagaggagacgagcagctagcatcagatgcaaggctaaaatgcttgtgttgccaaagaaatacttgtgtagggcttctacatgcaatgttgcatgatggttttgctcttgtaccatgccttatatgcacagctattgcagcagttgtgagctttccttgttaatatctattggatcgttccatagacttggttttgatatcaaacaataatgattgacctctctgtccaattgaaaaggaagttgtgcagtntaataaaaaatattaatttattttataaataaatataaatataaaataattaatt

SEQ ID NO: 73950 - DNA, 1142 bp, Zea mays
  Clone ID: MRT4577_167442C.1
gggggatgcgatcataccagcactaaagcaccggatcctcatcagaactccgaagttaagcgtgcttgggcgagagtagtactaggatgggtgacctcctgggaagtcctcgtgttgcattccccgggatcgatcgtcaatgcaagtttgtccattcgcattggtctgaatactgtagctactagcgcgagtgccactgtgccgcagctgcctgctcgccattactgcaagctgtgttcaatcaaagcttaattaggctccctctacatctgatccagctaagtagctagccagcactacagaagggcgtggcaagaatcaggagagagatagcaggggggctagctagctgagctcgtgcgacgaagaatggccggaattggcaggaacatggtggcgccgctcctggtgctcaacctcatcatgtacatcatcgtcatcggcttcgcgagctggaacctgaaccacttcatcaacgggcagaccaactaccccggcgtggccggcaacggcgcgacgttctacttcctggtgttcgccatcctggccggcgtggtgggcgcggcgtccaagctggcgggcgtgcaccacgtgcgcgcctggcgccacgacagcctggccaccaacgccgcgtcgtcgctcatcgccttcacgcagctcctctacgtgctcatgctccacacgggcctcttcggcggcagcggtggctaccgggaccacgactacggcgtcggcggcgcggccggcgagcccaagggggtcaccagggtctgaggattctgatcgatgcagctcgtacatgtgtcatcatatcaggcgctgctggagtgtgatgacgtaataagtagtacccatatatatatatggtgtgtgttgacgtaccacgtacactacgtacgtgtgtacctagtagctagctagtcagtccatcgtctgctcatctcgtcaggtcatcagatctctcggttctggtttgtacatcagtacgtgcatgcatgtatcccgtgtcaaatgtatttcgtcacccgtcagtttcagccggtcagtgaccaagtttatttcgtcaaaaaaaaaaaaaaagggcggccgccgactagtgagctcgtcgacccgggaattaattccggaccggtaccgcaggc

SEQ ID NO: 73951 - DNA, 294 bp, Zea mays
  Clone ID: MRT4577_167443C.1
gcccacgcgtccgacctgatcatggtgacgacgacgactctgttgctgatcgcggggcggttcgggcttgcgcgggtcgcgaaccgcaaggcgacggcggcgctcaaactggaggcgcgcgaactccggcctgcagacgggtgacccctgccggttcaccctcgccgacacgctggccttcgggggccgtgggcacattcttagccgtcggatcctgctttggcttaaaaaccaccgcccccttgaccaaaacattggttagaaccctacgtcgcccgtggttagaataaactt

SEQ ID NO: 73952 - DNA, 821 bp, Zea mays
  Clone ID: MRT4577_167444C.1
atcgatctgtcatgcaagtttgtccattcgcattggtctgaatactgtagctactagcgcgagtgccactgtgccgcagctgcctgctcgccattactgcaagctgtgttcaatcaaagcttaattaggctccctctacatctgatccagctaagtagctagccagcactacagaagggcgtggcaagaatcaggagagagatagcaggggggctagctagctgagctcgtgcgacgaagaatggccggaattggcaggaacatggtggcgccgctcctggtgctcaacctcatcatgtacatcatcgtcatcggcttcgcgagctggaacctgaaccacttcatcaacgggcagaccaactaccccggtacgtaagaaaggccagtagtaatcacgcatcatgcatatactcatgcatcgatatgcatggcgcgcctctgatgcgcattgcgttgcattgcacgcaggcgtggccggcaacggcgcgacgttctacttcctggtgttcgccatcctggccggcgtggtgggcgcggcgtccaagctggcgggcgtgcaccacgtgcgcgcctggcgccacgacagcctggccaccaacgccgcgtcgtcgctcatcgcctgggccatcacggcgctcgccttcgggctggcctgcaaggagatccacatcggcggacaccgcggctggcgcctgcgcgtgctggaggccttcgtcatcatcctcgccttcacgcagctcctctacgtgctcatgctccacacgggcctcttcggcggcagcggtggctaccgggaccacgactacggcgtcgggcggcgc

SEQ ID NO: 73953 - DNA, 594 bp, Zea mays
  Clone ID: MRT4577_167445C.1
tgaagccgaagctcagcagaattcagatttgagaaaactactgacaaatcttcaagaaaaatgcctggaatttagcaacaagtgcattcaacgattaagaaagattttttactcggttggagctagcagcgaaaaatttaccccctcagctgaagatctaccgaaaacctttgaacacattgagggggagattgacgagctcgacgaagtcatagctgggcatggtgacttctgtgcctgggtggcttctcgagggaccgctgctgcatttctgaaggccggctgcgaacacggaaaaattgtcaacaggcccaacttcaccttatctccatcaatcttggacgatatgcctgacctcgcccgaagcatctctaatagatttataaaaatgatatggacaaaaggcgggcgggagaaagctggagacgaagcacgaagtcatcttgaaccagtaagaaatgatacttcggagttaccttttcctttgctcttgatttttactcataaactcttaatttatgtaggatgacgaaggtgaagatgatgcctaaattatgccgtcgaagctgagacttaatgaagatcagtagaagt

SEQ ID NO: 73954 - DNA, 219 bp, Zea mays
  Clone ID: MRT4577_167446C.1
ccgggtcgaccacgcgtccgtgacaatagatacaatggatatggctagtcaaatatttgaaattttatgaaagccagggtgcacatatctgactcaggatgagcttcaagcctgtcctgaaagaactagcttgcaacataccctgacttaaagttgttacaagggacccccgagttataggagagatgtgcggagactgtaatgtacggaatgttttac

SEQ ID NO: 73955 - DNA, 261 bp, Zea mays
  Clone ID: MRT4577_167447C.1
accacgcgtccgtaaaaaaaaaaaaaaaaaaagataaaaaaaataataatataaaagagaaataacgaataaaaaaatggggggcggcctcttcgagggtgtcccctttctttagcttgcctggccgttatctttctggggggggcgtttttaaaaccctaaagtttcgcccccggtgttccccaggaaaatattttttttaacggggctaaaaaaatattataggggggctgaatttaaaaccctttttcgggagaaccc

SEQ ID NO: 73956 - DNA, 692 bp, Zea mays
  Clone ID: MRT4577_167448C.1
tggatatcccttggtgtatgcttttgctgatgatgtagtgttagttgatgaaagtcgggttaggagtaaataggaaactagatgtgtgacaggagactcaccaagaatctagcgttctatatgacaagagggtaccataaaagttagaagacaagtttaataggatgatgactagacttgctatgtgtatagtgcagaatgctagcctataaaaagatgacatgtttagcagataagtgttgcgggaatatgtatgtgcgttggatttatggccatacaagggattgagtctcgaacaatgatgtatgtgctaggctagggtagcaccaattgaagaaaagcttgttcaacactaattgcgatggtttggacatgttcaacggagacctctagaggcaccagtgcctagtgaaattctaatgtgtgatagtaatagagagatagggaaagaccgaagttgacaatggaaagatgcagtagaaggagacttggaaggaatgaaatatacccaaagatttgtggcttctgttgtttttcaactctagcccacccaacttgtttgggaccaaaaaaaactttgtttgttgttgttgtattatgtatgctggtgcatccatacaatgatctgccaaatccttgatcatatgcatacaatgataagcgtatatatgatccaggtctctagttgtatt

SEQ ID NO: 73957 - DNA, 430 bp, Zea mays
  Clone ID: MRT4577_167449C.1
gacccacccggacccactgatcctaactgccactctcaccgacttctcagcttgtgcgctcgcaatggcactcgtgtaacactgctccatcttcaccaccgacgtggcggcgctccccaggaatgggcatcagcagacgtcgtcgtcgttgttctcctactcctactcttcctccttcctcgtcggcaagacgctgctgaggcacgccgaggcagcccggacgtcgttcgccgtgcgcgcctctgcggattccgacaggccgatctggttcccctgcaacacccctacgacgaggctcgactgcagcctctctcacaacttccgctttgatccctgtggcctccgatctgacccggagagcctgcggtggaacgtgcatgcggatctggtgcactgccggtgggcgatgctctgcgcagcgggtatcttc

SEQ ID NO: 73958 - DNA, 2356 bp, Zea mays
  Clone ID: MRT4577_16744C.1
ccggccgggatcagctgaagaaactcttgaatctgaactatataaaaaaactgagaaatgcttctatattcggtaatcggtattgtgtttgacccgttgcaattgtttccaggtaatctcgcatcagcaaacagcaccgggctccgttcaccgccttgccttctcttctccggttcctcccccgcgcgttcgctcgctctcgtggcgcaactcgtagaccgccgccgcctccgctctacgccaggtgcctaggtctagcttcgtcggtcccttcgccaacgacgagcacccacccgattgcgagatctgacgccagaagttcagctaggagtgcatcttgtttacctgttgcttaatcatggacaactctcagaatcaaccaccaccacctggtgttggaacatggccgcaggcacctcctagtcacccgccacaatgccatgctgatccacagtcttatcatccacaatttgctgctagacctgacaatgctagtgccaataatagtggtagttcagcaaacattgagtcagctgtccaggaggctgttcttcacgcgcaggacattgagactcagcaagtcatacagaatcaaagacatgcaaacacaacaagtgaacctacaaaatatggggaagacttactttcgaaccgccgtgaccctaatgcattgaaggagcatttactaaagatgacagctgatcatcgtgcagagatggcaagcaaaagggggaagccacttcatccaaacaatggcaactgtgaaattggcaatggctatggtgtacctggaggcggtgcttattatgctgcaaacttgccaagtcctcaaatgaataaacctagagatgaaactgataaagctaaatgtgcaaacgatctccctgattttttaaagcagaggttaagggcaaggggaattctcaaagatgagactacaaataagaattacacgagtacgcagactgtggattctcaagaaatcgagaacaaatctgcacaagagttgcctcctggttggattgaagtgaaggacccgacaactggagcgccatacttctacaatcaaagcactggagtgagtcaatgggatcgccctgacagtgttgtgaatatcatgcaacatcaagtttctccatccttgccagagaactgggaggaggcaattgacaaatcaacaggccacaaatactattataacacgaagacacagaccacacaatgggaacctcctacttctgtgaacaccagtgttacacctccagcttccaccaacactgcagttgagccagtcgctcaagctgcagatatttggaactctcaaatgcagagatgtttgggctgtggtggatggggagttggtcttgtccagccttggggatactgcaatcactgcacaagggttcaaaatcgtccttttcaacagtacccatcttacacaaataatacgatgcacgccagtggtaacaatgctcccaaaactcagggaaatgtttcagctaagaacagatcaagctcaaagccacctttagggaaaccaaacagaaaagaccaccgcaaaagaaatcgccccgaggatgatgaacttgacccaatggacccgagttcttactcagatgctccacgcggtggctgggttgttggtttgaagggtgttcaaccacgagcagcagatactaccgcagctggacctttgttccaacaaagaccatatccctcaccgggtgctgtgttgagaaaaaatgcagaggtagcaacccatggcaagaaacgtggtggtatggctccgataacaaaaagaggagatggcagcgacggacttggggaggcagattagtcttttggtgaactgaaatgttgtgctatccgaatctccttggtggttgtctctggagctgctaaactatcattgcacgcctgaagaaaatcgaaaaaatattggctgccagatctggaatgaggaaactcactacagttcgcgagtttttgcagcgattaacgctagtgtactcgctggacctcgaggctagagcaatgcgagctcaccccggcttgctgatgacacattcactgagttcactgcggtttgccgatgacattcaatgtgcccttggtgtgaattttatatgaaaatgaactataatctgtaattggaaagagtgatttcaatgtaaggaattaacttttgtggggtgatgaaccatactagcgatgcacttagccaaacaagagaaatttggatttgtaccattaaaagattacaactttagatatctcactaacatgtgtagtccacatgagacatgagtcaataacatgtggagccaatgttatatattttaagttgcaatctttt

SEQ ID NO: 73959 - DNA, 246 bp, Zea mays
  Clone ID: MRT4577_167450C.1
tttacgcgtgcgcagacgtacctgagtaagagagtgctagcaagaaaagcaagcgccttgcgaagttggaatccaacgtcaatacttggcgctcacttaaccaggacaacgaccatatgaccgagtcaataccgcgcctagacgcccctccacgcacagcgcaactgctcgttagtaaggtccataaacagcattccgtctgctacggggaagcagcgaacatgatctcgccagaccaagaatcat

SEQ ID NO: 73960 - DNA, 1151 bp, Zea mays
  Clone ID: MRT4577_167451C.1
cattgggaacctcgaggccggccggggggatggttttcggatacttgaaagcccatcttactctccttccggtcgccgcagtaaacccctaggaagaaaccccaccgcttctggccgccgccggctcaccggtgacggcatccaaatccatggcctcccgccaggcgctccacatcttcacgccctcccggcgggcgatgcacatcctcacgtcgtcccgcggcatcgcctcgaccccgcacctctcgtccttcggctggtttgataagatcaagtccaccatcactggcaagaagcccgaggaggcctccgaggcatcctccttcaccctcatccagttcgcagacacgatggagaaagcgaggaagctggggacgttcaagaacttcgttgccgggcgggccagcgaggccaccgtcgtgaacgtcttcgagaagcactccgctgtgctgcgctacctcggtgccatcgaccccaccggcgagaacctccgaaacactgacaaaattaacgcgaccaagcactgcaactgcacaattgctgacgtggagcacattctggccaagtacacatgggctaaagaggctcagaagaagattgcaaagctcaaggaagaagggaagccattaccaaagtcatttaacgaggtccaaaatctaatgggttctacaccagtggatgtcggcagaagtaatctggcaaagagtggtcagataagtaggaatgctttctgcccatgtggttctaagaaacgatataaaaggtgctgtggagcttcatgagatgaacaacaatcctctcgttcactagcacatgcaggccaggtgcagcgtttgtaagctcttttctttgccaaactctaccaagctctttcgtggacaacacctgaatttgaagcttgcaatttgtaaagcactatgagcgagccctatgtttcagaaggctttctcttaaactctgatttcttgattggagttgttgtttaacattgattcagttcaaccatgcatgaatctaggtaatatatatccacctagctcgttttctgcaacaagatttgttatagattcatttttactcagcattttatgttctactcggcagcttcattttttatggatgtgtttgaataaagccttctgttattctag

SEQ ID NO: 73961 - DNA, 399 bp, Zea mays
  Clone ID: MRT4577_167452C.1
ttggctcctgctacccctgcggttcggcttcgtgttcgcgaggctctgcgcgctgcggtttcgtgagtgagcgaatcgagatggcgctcataagatgttgagtaccgatgcttcataggcggactcgtctgggccacggacgaccactgcctccacaacaccttgagtacctacggcgaggtactagagtccaagatcatactcgatcgggagactacatacgtgcctgcactccagcttcgtcaccttctccaaggacgacgccatgctgaacgccatcgagggcattaacggcaaggagccggacagacggcacatcacagtcaacgaggccaattctcgcggcggccgtgtaagcggatgcggtggatacggtggtggacttggaagcagtagata

SEQ ID NO: 73962 - DNA, 382 bp, Zea mays
  unsure (1)..(382): unsure at all n locations
  Clone ID: MRT4577_167453C.1
atgtccttttcgtcgttcgcacttccggcaaggcataggcgggcatggtatccacacctctcgtgagacttcctatcctccatgatggtgtggcagacggttgcacggtacggaaggcagacggcggtgatgctcccctctcctctgcaccacctcatccactatgatggggaagcagactgcttcatccggcatacgacgagctctcttgcacccccactcgctagtgcagcgtctctactcacgccaccagaatgtagggcatctacctcagccatatatccaccctctacatactctncttgatactggcggcacgataatcacctcctcacgatctataggatgtccctcctccatatctccaccgagctcataatat

SEQ ID NO: 73963 - DNA, 459 bp, Zea mays
  Clone ID: MRT4577_167454C.1
gaaccaaacatgccgatatcttcatgattggggcaaatcctataggagcaaaactccgcagatgggcatagcccattagcttggttctacttagcaaggaggccaaggcaacgtcactccgacttcgcaaatatccaatgctgcaagcagatcatgtaattcgaactaggacttgtcgacgctacaaagacaagcataagtataggctctcaacttctggcactatcgtcacctggtaggcttaaagcccgtgcatggtggtgctcttctggagtgcccaaccctcgtgcttgagctggaataagtgccaaactattgtatacacattgttcttctagcgatttggcaaaccatagccatacccaccgggtcctgaagtacttcaaggacctggactaggtaatgtctgaacattaactgcgctgccaccgcttctagctaactaaccggctggggtcg

SEQ ID NO: 73964 - DNA, 467 bp, Zea mays
  Clone ID: MRT4577_167455C.1
gtacgcctgcaggatccggtccggaattcccgggtcgacccacgcgtccgcgccgcgcagggccgagtggagccgagcagccgccgcgtcgcgtcgccggtttaagcgcagtgcggggccttggccgggggcggcggtagtgaggccagagccgcgctccagcccccttttccctccatggtttctctccgctcccgcgagtaacttggctccgggggctccgctcgcccgcacgcccgcacgccgcccggggaccacgccgccgcctcctccagccgcctccctccgacggccctcgccgcgcaggccgggtcgcctctcccccctccgcccccgccgcggaaagttacctttggagaggcgggacgagacacaacatggatatgaacatgaggatacagctaggagctgaggaacctgaccccgacatgcgtccgacgaccttgcctcgctcagtgtgagaccca

SEQ ID NO: 73965 - DNA, 164 bp, Zea mays
  Clone ID: MRT4577_167456C.1
tctatagtaagtcgtattagggaaggggagaagcaagcgagacgtcacgggagcagagcatagccttgcctggaacctccattgccggccatcgcctagccgccgcccggcttccgggaagaaaaatcagtcagccccgattcccaatccgtccgcccccaaaa

SEQ ID NO: 73966 - DNA, 765 bp, Zea mays
  Clone ID: MRT4577_167457C.1
atctcctagaagctcttccttcttcctctcttcgaccacaatacagagcaaatcttcaagctcagacatggctttccaccaaagatcgacaagtttgccttctaggcctcacgtcagtgagaccgaagtcgagcaagaactccacagcctagaagcaagcatctcttcctccaattccatcagcacgatgtgcgatggtctcaggagtcttgcaaacatctacgatgctcttgaagacattatttgcctaccaagcaaccaagtttgttcctctcagcagaggaacatattggatggagaaatggaaggttctctcgagctcctagatctctgcggtgccatgcaagagatcttcgtcgagatgaaggccatcatccaagagctgcaagtggctctaaggaaaggggatgttgcagctgctcaagccaagatccagtcttacacccacttggcgaagaaggccaggaaccatttcaagaaggccacgaagaaggctcctgcagattgcaggatggtcatgctattggccaaggccagggaggtctctgcctctctcctggagtccacactccatcttgtgtcgaagcaaatcgaaatgcctaaacagtctcttgtttccaaggcatttcacaagaagaaggcggttgtttgtaaggaggaacaattgtcgcagttagagtgcagtatcggagatcttgagagtggagctggacatctgttcaggagattagtccagagcagagtttctctactcaacatccttag

SEQ ID NO: 73967 - DNA, 267 bp, Zea mays
  unsure (1)..(267): unsure at all n locations
  Clone ID: MRT4577_167458C.1
ggtgttgcgattcgaggactgcgtnctccatttctgtttatntaacccaagcacacacccccctatctttaagagattcacacactccaaacttagaacacggacttgnaactccgnntttccnccnncaccagtgagggtgggcgctatcgccttggcncnggagcnnggacccagagtattgggggcgtatgaccctgctggcttttgtgttcggcagaccatgggtctacccnatctgactcatttcgcgctggcgagctgggc

SEQ ID NO: 73968 - DNA, 633 bp, Zea mays
  unsure (1)..(633): unsure at all n locations
  Clone ID: MRT4577_167459C.1
gaattnnnnnnnnnnnnnaannnaaaaaaaaaaaaaaaaaaaaaaaaaaaaaaaaaaaaaaaaaaaaaaaaaaaaaaaaaaaaaaaaaaaaaaaaacgggaagttggtccccgggcacctgttcaacgccagaaagggggggccgaagcgccccccgcggaagaagaaggggcgcggccccttcaaaagggggccccgccccccccccggggggaaggccctgaacatgagggagttcctgcactctttcgtaaaaaacctcgtttgccgggccgtttcgggaaagttctccagggagaaaggcccaaacaggttgttcaggaagttcaccgacttcaacgggggcctcctcggagggtcccacatccagaattatttccctacccggggccgaatcaagttcgtcagaaagggggggggcgccaaaaccaggggcgtaagaaagcgttggaacaacctcctcaaaaagttcatcaacaaccatggggccaggatggcaccccttcgggacgaggacgacgataagcccttcatatacgtattgttgtctcttcaaaaggagtatggcctcaccaaaaaccatatcagggttatcttgataaacttgttcaaggccgaaaccaacccctcgaa

SEQ ID NO: 73969 - DNA, 282 bp, Zea mays
  Clone ID: MRT4577_16745C.1
cggctcgaggaaccgtgcatttgtgaatgccccccttagagcattcatccaagttcagtgtgtagtgtgatggttattatagatatttaaagtatagtaagtggctgtgtaacaggagagactgctgtttacctacgtactgaagggtaactgctgcccgcgtagttaaatcagtattgtcctttcctgtcggtttgatcaattgcggtaccggtagcttcctgcttgtgactgttacctaactgtgtcaatgtacatctgtagtatgtacatgtgaaagtg

SEQ ID NO: 73970 - DNA, 481 bp, Zea mays
  Clone ID: MRT4577_167460C.1
gcgattgggtctcccgaggccggccgggagttttcgtcgaaccgccattagtgaggggggaatggatccagtccgccgccattaccacccacccacagcaccgattggtgattgaataagcgccttggtagttcacctgtgagtatgggttctcccaaacgagtcaattggaaacaggaaacttctgggcgcgtggaattcgtcgacagatcctcaccattcgctcgggccgcacttgccggggtcctacaccactaccacaaccaaacaaccggtcaagaataggtaccgcaggatgaggcgcatggaggatgctgtgacacgttcgtgagtggtctaggtcgtcgtctcctagtcaactttgggttgctggatcattgtcgccttacgatgtaattatttatttattttgtacagaactcctattctatagtaaggatgtgacagttgtttcaaaaaaaaaaaaaaaaaattcgcggcc

SEQ ID NO: 73971 - DNA, 441 bp, Zea mays
  Clone ID: MRT4577_167461C.1
agggaaaggggccccagggcccctccaatttttattaagggggcacccccccccccagaaaaaaaggggggcccccccccggggggcacacaccccacccccaccaaggttccctttaaaccggcgcaccgcaaactacaaacggcccatcagactacaaaaaaagcgccccccggacaaaggggggaacaaaaccttgccagggggggaaaattaaactttggaagcaaaaagcagaaacaacccccccccgccaaaaaaaagcaaactttttttttcccccccgggaagggaaaaaaaaaaaaaaagggcaggggaaaaaaaccccaccctcccggggcgctccctttccctacaaaaaccggaaaggttttggggcccccccccccccataattggggggagggctttccctccacggccaggggaacggggctcccc

SEQ ID NO: 73972 - DNA, 368 bp, Zea mays
  Clone ID: MRT4577_167462C.1
cccccggccccaacctatctagatcgagcggggtggccatcgacagcggcagcacctctcgtcgcttcacttatgtgtacgagcagcacccatatagctctgctagaaacacacatgcagcggccgttaagactgtctccaacaacgctttctttgatcctcaccaaaatggaggaagaggtgcggcaactagccctactgcatgaggaacaagaaaggacacgtacatgacaacggacctaatttatcatggcaatagcaggaatggtgacgaggaaacgatgattgattgaaggacagggggactgcaaaggcatttgtctgctttcaattatcttatatcacacgcacacactcatatatacatt

SEQ ID NO: 73973 - DNA, 386 bp, Zea mays
  Clone ID: MRT4577_167463C.1
ggtatgggggcctctacattaccatctttaccctgctgagcgccgggatcacggtgacactgtctacgctctttctgcacgaacaggttcatgttggaagcgtcctaggtgcggttaccatcatcgaggtgctgtacgtcgcgctatggggtaaagcggacgatgcgaacggtggacaggtcggatccaagcagacggcagatgcagatggcatcactgtgacagtagacactcacaccaatttttcagaaccgttgctaccgacagtggctgagccagcgctcagaactagcgtttcgctattcgggaatactaacgctgatagggaaaattttttccctaatgcatatcactataggatctgttattcgtgtttggagttcaaa

SEQ ID NO: 73974 - DNA, 605 bp, Zea mays
  Clone ID: MRT4577_167464C.1
tttatcgttcattattccaaaatgggcacgtgggcctggggccattataccacagcacctccctccagttactccaatgggcttcaaacacccagctgtgcaagcctacaagctacaacaagcgctcgcggctagcgtgttacaacaaccacattgcccaattacaacaacaatcctgggcgcaggtaaccatacaaactatcgcaacgcaacaacaacaacaatttgtaccagcactgagccaactagctactacgaaccctgtcgcctacttacaacaatagttgattgcatccaacccacttgctctgacaaacatagtagcataccaacaacaacaacaattgcaacagattctaccatcactaagccaactaagcatggcgaaccctgccgcctacctacaacagaaacaactgatttcatctagccctatcactgggggtaatgcacctacatacctgcaacaaccattgctgcaacacatagcaccacctctaactcagctagctacgagaaaccctgctgcatacttgcaacaactgctttcattcaaccaactgactgtgtcgaactctgctgagtacctacaacagcgacaacag

SEQ ID NO: 73975 - DNA, 1569 bp, Zea mays
  Clone ID: MRT4577_167465C.1
gatcatcacatgcgccaccactgctcgtcacggctaagccgccgccgccgcgcgtttatctgcttcacctgctgcaggcagcgcgggacgatgagctggagaagagccgccgcaagcccggcggcggcggcaaggcggcggcggtccggtgccacccggtcctggcggaggagcgcaaggcgtccatcaggggcgtggtgggcgacctgctggccatggcgggcggcggccggaggagcctcatctcgctcggcgtcggcgacgcgtcctcccacgcatgcttccgccgcggcggggagttcgccgccgaggccgtcgcccacgccgccttgtccggcgccttcgactgctatgcgccgtccttcggcttccccgacgcccgccgcgcggtcgccgcccacctgtcgaccggcgcggtgcaccgcacgcacgaggccgacgtgttcatgacggcgggcggcacgggcgcgatcaccgccatcgccacggtgctcggcggcgcgccgggggccaacgtcctgctgccgcgcccgggcttcgcgccgtacgaggccgcctgcgaggtggccggcgccgagccccggttctacgacctgctgccgcggcgcggctgggaggccgacctcgccggcgtgcgcgcgctggccgacgccgccacggccgccctcgtcgtcatcaaccccaacaacccgtgcggcgccgtctactccgctcaccacctccgccagcttgctgaaaccgcaagagagttggggattcccatcgtagcagacgaggtgtacgcacacatggtcttcggcggcagcaggttcgtgcccatggcctccttggcgcacatcgcgccggtcgtcagcatcggagctctgtccaagaggttcatgctgccaggatggcgtctcggttggctggccttctgtgatcccaacggcgcgctcaagcatgtcagggctgcgaccgagatgctgctcaacgtgacttctggccctgcctccatagtccaggcggcggttcccaagatcctttcagctgaacaccatgagttccataggaatgttgttcacctgctcgagtctgcagctgatgctctgtacagaagagtgaaccaaatcgaagccctgcggtgctactccaagcctgaaggctcaatgtttatgatggttgagatcaacacttcaattctacatggcgtcgccaacgacatggactttgctcgtgagttgatcaaagaagaatgtgtcctggttctacctggttctgtcattgggttgaagaactgggttaggatatttttcggagcacctgttagtttaatactagaagcttgcgacaggattgagatgttctgccgaaggaggacgctcaagcaaaacaactgaagagctgaaaatgttttgaaaccaggaagtagggtttttgttagcccagtaacatatatatacagcttcgatttattttccaatgcacattctgaggtttgcatatagaaaactgagaacagatgcttgtctatagttaaaatatatgttatacataattccaagaaatggtgtaaacatttatcatttcttt

SEQ ID NO: 73976 - DNA, 249 bp, Zea mays
  Clone ID: MRT4577_167466C.1
tctgtactatgcaatgcacaaaatacaacagagactattgatctactggatagggggcctgaaaaggggattactacagatgttggaatgtataatatgatattttttgctcttgggaagctgaagcagttgtctttcatgagcagcctttatgatacgatgagagacaatgaggatgtttctgattttttcatatacatttttatgattctaagttttggtaggttttgtttttatttatgtgtaggg

SEQ ID NO: 73977 - DNA, 794 bp, Zea mays
  Clone ID: MRT4577_167467C.1
caaaaattcagtatttgaaactttgttacttcccaacaaggtgttggtattcacaaaaccctgcaggttgagatcaacacttcaattctacatggcgtcgccaacgacatggactttgctcgtgagttgatcaaagaagaatgtgtcctggttctacctggtacagctcactcactccatttgttgcgatattattttatccaacctttaacaggtgcattggtttctctggctgctgagaactgaatgttagtaataggttgacttgacattccagtacaagattcttcatgctggcatgcttaatctactctaaaattgatctgtagtaacagatccaatatcttttctgtttcttgttattttacaggttctgtcattgggttgaagaactgggttaggatatttttcggagcacctgttagtttaatactagaagcttgcgacaggattgagatgttctgccgaaggaggacgctcaagcaaaacaactgaagagctgaaaatgttttgaaaccaggaagtagggtttttgttagcccagtaacatatatatacagcttcgatttattttccaatgcacattctgaggtttgcatatagaaaactgagaacagatgcttgtctatagttaaaatatatgttatacataattccaggaaatggtgtaaacatttatcatttctttacttgtgccttctacttcacagatgcattaaggttattgtctttttattgaacagacagcaagcaaaaaaaaaaaaaaaaaaaaaaaaaggaagaaggggggggag

SEQ ID NO: 73978 - DNA, 817 bp, Zea mays
  unsure (1)..(817): unsure at all n locations
  Clone ID: MRT4577_167468C.1
ccggcccggcacggcccaattcccagcactagtctgccgtgccgaaccaaccgaccaaacaaacagcgcggtcgccgcccacctgtcgaccggcgcggtgcaccgcacgcacgaggccgacgtgttcatgacggcgggcggcacgggcgcgatcaccgccatcgccacggtgctcggcggcgcgccgggggccaacgtcctgctgccgcgcccgggcttcgcgccgtacgaggccgcctgcgaggtggccggcgccgagccccggttctacgacctgctgccgcggcgcggctgggaggccgacctcgccggcgtgcgcgcgctggccgacgccgccacggccgccctcgtcgtcatcaaccccaacaacccgtgcggcgccgtctactccgctcaccacctccgccagcttgctgaaaccgcaagagagttggggattcccatcgtagcagacgaggtgtacgcacacatggtcttcggcggcagcaggttcgtgcccatggcctccttggcgcacatcgcgccggtcgtcagcatcggagctctgtccaagaggttcatgctgccaggatggcgtctcggttggctggccttctgtgatcccaacggcgcgctcaagcatggctgcgaccgagatgctgctcaacgtgacttctggccctgcctccatagtcccaggcggcggttcccaagatcctttcagctgaacaccatgagttcccatagggaatggttgttcaccctgctcgagtctgcagctgatgctctgtacagaagagtgaacanatcgaagccctgcggtgctactccaagctga

SEQ ID NO: 73979 - DNA, 314 bp, Zea mays
  Clone ID: MRT4577_167469C.1
ctccagtattgcacatccttaccaatacaatctgttgaatgattcagttattaattatgcgatgttaaattataaaaattattgattgcttctctcttctaggttacccattgtcattgcttccactttgcttatctctgaactctgatggatagtttgctatgctgtttttcctctaatataatgatcaggctcctgtgttgaaaaagtaatgctgttttttgtacttcgtgggggagatatggaattttcaccatatggagaaactgatctgtaaatgtctgagtcacaatctttgcctgttagctgctaat

SEQ ID NO: 73980 - DNA, 285 bp, Zea mays
  unsure (1)..(285): unsure at all n locations
  Clone ID: MRT4577_16746C.1
tctctgaattttctccaaaaataccaatccggcttccaggttctcgtcgatggctccgtgtgaccnctcaaaacttccttcagtttcgatctaaacccgccgaaaccctaatccccatggctgccgccatgggcaaccccattcttacccttcccgcgccctttcgcgtggggccgccgcccaaggtgcttgtgccacccaaaggcttagctgtacaccgtgcggctgcccgagggtatcacaagggaggagctggacattattaaacttaccccccaatttgtg

SEQ ID NO: 73981 - DNA, 295 bp, Zea mays
  unsure (1)..(295): unsure at all n locations
  Clone ID: MRT4577_167470C.1
ttgttcgagcgtttttaaagcccccgcgcccnaaaagcccgcacacataaaaaggtatcgggcacaacaacaaacacncaaacaaangatctcatcagtcgacatcgcgtactgcaccttcgggcacaaccacagacgcttcatctgcctataccaacaaaagcaatatgagcaatagcaccactagctacacgaaaccaatcaaagcaatataaacttccccgcatatgcacaaacgcatcgaagccactaaacagtagcaccctgccgagaaagagaagcaaccaatcaagtt

SEQ ID NO: 73982 - DNA, 222 bp, Zea mays
  Clone ID: MRT4577_167471C.1
agctcggaattcggctcgagggacattcttaccccccctttcttctgcctcgcaccgaggatccaaaaccgcgggttcatttgccacagagcagcgtatctatgcaggtgcccaacttgcgacccctactgaagcctgaccaaacaaccggtgttctgaggagacatgatcagctcattgtgcgtgcaccacttgagtgatgctgatctgcacatatgccat

SEQ ID NO: 73983 - DNA, 281 bp, Zea mays
  unsure (1)..(281): unsure at all n locations
  Clone ID: MRT4577_167472C.1
cccgtcccaaccacacccttccgcccacccttccagttgccttttcctccccttttaacaaagtccccctcagtttagagagaagctaacttttttgagaagggggaacacccccncctaatgtgaaatcccgttcctctttcaacaggccttgcctaacccaccaccaccaagtcgctgaaaaatccctctccctccacacggaaaaccctcaactccaagattaacttcaacctcccaagaaaaatcccacgacctatttgtcccgacaagacaaaacc

SEQ ID NO: 73984 - DNA, 843 bp, Zea mays
  Clone ID: MRT4577_167473C.1
atgggtaccctaccgagcgctttggcctccgtcattccatcacttcccggccggctccagctttgcttcctccgctcgcctgtcagaggattcctcgctttttacgcttctcgacttctcgctgcgctgcgccgcgcagacgtgatctgagtcgagtccgtgacggtcgacgctgaggccggtaaagatcgaacggagatggcggcgggcactggtggtggtggctcgctgctgctgcgcggcttcctgtccctcttcttcctcctgttcctccacattggccacggcggcagctgctgcttctcgcccggcgctgccgcgcgggcgcagcaggaggaggacgaagcagcggaagccgacggcaaggtagtaggaggcggcggtgggagcaacaagaggaggaagatatcgccgttgatcttctccccggcagcgtcgtccactgccgttacagccagcgacgatagcgccggagccccgcgcaggcacgtgtcgtctctcgccgccagcctccgtctctacctccaccgcatcttccgctccgggtcgaccgggaccaagaatggcggcaccgtcgtcgcgggaagggacggagaggaggaggcggtggccaccaccgtgtcttcgccgattgcccagtcgctgccgcatcagccttcgtcgacgtccgttgtgctgtccacgccgtcgtcgccgtgcgcgtggtcgtcgccgttgatgatgtcgccgctctcggtgcgctccctcagcgccaccccgttcccgtcctcgccgcagcagaagctgctgcaggcgagcaggcagtcgttccggtcgttcgccgcccgcggcgacgtgttccct

SEQ ID NO: 73985 - DNA, 267 bp, Zea mays
  unsure (1)..(267): unsure at all n locations
  Clone ID: MRT4577_167474C.1
taaaagtttagatacagacgggattcgcataagttcaagagctatataatcaagtcctccgctcatccacnttgtccaggatggctactctaccgctgcagaatccactttgactacatgggggatgggaggacccggttactttacccttcaaagaaaaaaactctttccacttgtgggtaaggcccactctcatcgtgcgggtgttatcatcagactcggtctttttgacaggtcaaaaattgcttgggaaaatgccaattttgc

SEQ ID NO: 73986 - DNA, 375 bp, Zea mays
  Clone ID: MRT4577_167475C.1
gtcttggaaggttgtggagaatgcagggggtcatggccgcaacctaatggcatcctcgaccttctgtgaagggaacgcttccctagacttgttgagtacgccggagtgatgggcccagcctacatcttcgaccactatgtcgtcacccccgatgcagtagatcgagacgatagagaattcaacaacaaggtagagcgggtgaaacaagagtgggatttcttcagatgcgaggcttgatacgaggccaaggcggatgtggtgtttaccacgagctgtaaaaagctcatcatggacatacactacgagatgcgcatccaggccatcgccacttaccacggctatgtccttggggagaaggtgagcaagcaggatgct

SEQ ID NO: 73987 - DNA, 498 bp, Zea mays
  Clone ID: MRT4577_167476C.1
gacggaatatgtttttgaataagcattggagacccccagtctgttttccttattcgttacagtaagcatgccatttttacaggtccttattagtttttcctttacaatggtaaaaatgttttttttccaaaaaaattacactgaacaccgtgtggagagagagagaagggaaaaggcttctgggttatgggtacttgctggatgaaacagccaaccagctgcttttatgttttcattcagcccatgagtttgtacctttttttttccacacccgggacgcccatttgtatttcgattatgggggggaggggcatttttatttttggaacttttttaaaaggacgggccgcgaaatatgcatacagggctcgcaatacaacctgatgagatatgacaaccactggggcacgctggggttttaactcgatgatgacgggttccaacctttgtatcaaatcgagggaagattttccacgggggtaggggttttttaacttg

SEQ ID NO: 73988 - DNA, 438 bp, Zea mays
  Clone ID: MRT4577_167477C.1
gttggatttgcacgtgccccttgcgagtaaccaccctcaggatcatttgcagtgtcataaaacaacccacggaaatagacaaagattgaccttgttcccccgtggcgacctgaagccatggtaggtgtagtggcatggcatggcaccgtcagcatggatgctgttcttgtgtacacggcacagcacaaccagatgcgaggctgatcgacaacgacgattatgagtactcccatgcaactgatgtaaatgtaaagcccagcaggacctttgcttctttttgaggcgatgtgttgtctgctttgcctgtgtctctgtgacagtgtctgttttgactttatgttagtgttagcctattatagattgcagatcatgtaatgtatggctgttgtattatattaagttatacagttgatgggggagaaaataaggttaacagtt

SEQ ID NO: 73989 - DNA, 1767 bp, Zea mays
  Clone ID: MRT4577_167478C.1
tgattgagcaagacagagcaactcggcacgagcaaagggaaggttttggaatcattgatgatgattggattgcaaaaactattgcaagaaatgctgctgcagcagcttccaaagaggcaggttcttcggaagctaccatgacaaaggaacagaagctgaaagctgataggcttcgccgtgcgaagatgtttgctgcaatcattaagagtggagacaacaagatgaatgatttaggtgcggcatcgaacccaaacaaagacatcaattatagcatggaatccagtgcttctgatagaagctcatctgggccatcagagaagcagctgtatgacaaacaagggaagggtatattccatcctgtttgtggggtcaagactcggaaagtcactgcagatgaagctgctgctatagtaatggcagctactcgaggactgggtgctgcaaatgactcacttaacaccatgaaaggaaccaaggacaatgttcgcacccatgttagtaaggatccttcagaccagagcaaggatgttcactctcataagaacaagagtgcacccaaggacagggaatccagacatcatagacacccttgtagctcttcggaagatgagcatgaaagggaaggttttggaatcattgacgatgattggattgcaaacactattgcaaaagctgctgctgcagcagcttccaaagatgcagattcttcggaagcttcccggagggagcatcactccagttctaaaaggaagctcgaggaagactgattccaggttcgccggaagtgtcttggtctagatcaggtgccaagtttgaatcagacaagctacccaactagtgaagctgccaaggccattcctgatatgaatgcctctggacttgatctgcaatctgtggctaaggaacgtgaaggcagtagctctgttctgtttgaccatgaggggccaaacttgacaaagcatagtaaagactctgatgatgaacagaacagagtgcggaagtatagaaagaaacaccaagaatccgacgaggaaaaatatgaatctgaggatagctataagcactcgaggaagaagcatcgcctagagcattcaagagaccagagcaaggatgttcacaaacataagaacaagagtcactccaaggacagggaatccagacatcatagacaccattgtagctcttcggaagatgagcatgagcatgaacgttggagttccaaatcaaggcataggcatagagatgatcaccgctactctgacgaggaacactctgatgaggaacacaggaggtcacacaagcatcggagggagcatcactccagttctaaaaggaagcacgaggaagactgataccaggttcgccggaagtgtctgtctagatcaggtgccaagtttgaatcagacaagctgtctgatgacactgcacaaatcaactcagggaacaactgaagcgccgagtaaactgagagcaaaaatcagagcaacatactgtaatattttgtatcacagcagtaacattatgtccttaggcctctgttttgtagccaattgctctttcgatttctgtatttgtttcgaacgttctaactaggtgtctgtccatcttatttgaaatcagtgacctgctcgccaagttctaactacatgctggcgtttctgatgcatgcatagctttattatttcaagtggtctacgtgtagcgtcatactacctccgtcccaaatcaaaattttgttttagttaattaatggttgatgtatgtgtt

SEQ ID NO: 73990 - DNA, 377 bp, Zea mays
  Clone ID: MRT4577_167479C.1
taatcctggtgagcgcgccgacagaagctcctgtgagcgctctgacagaagctctcgtgaacgcgccgacagaaggtgctcaatggagcgcaaagacatcaattatagcatggaatccagtgcttctgatagaagctcatctgggccatcagagaagcagctgtatgacaaacaagggaagggtatattccatcctgtttgtggggtcaagactcgtacagtcactgcagatgaagctgctgctatagtaatggcagctactcgaggactgtgtgctgcaaatgactcacttaacaccatgaaaggaaccaaggacaatgttcgcacccatgttagtaatgatccctctttcagtttggaagtttctcatctttaca

SEQ ID NO: 73991 - DNA, 2447 bp, Zea mays
  Clone ID: MRT4577_16747C.1
gggtgggggagggagtggaatgggtgggttcccggaagccacgggtaaccttctcgatgccgcagctcaggagttccaccctacggtctgtgccccctatcctctacagccgcttccgcaacagctatactgcccccacccatatccagccatgccggtgcctccgccgccgcaaatagccatgttacagccagtgcctccgatggcgatggccatggcgccgcagccggggtacaccttgccaacgacgacgccggtggtcaatggcccgtcgagccgcgtcgtggtgctgggccttgtcccgccgcacgcgcaggaggccgacgtggcgcaggcgatggcgccattcggcgcgatccgctcggtcgacgcgtgcgcggtggcgtccgagggcgtggccaccgtccatttcttcgacatccgcgccgccgagctcgccttgacctgtgtccgcgagcagcacatgcgccagcagagccgcctcgggcagctctacgcggcggccgccgtagccccggcgtgggctcctgcaccgacgccccaggcctgggactggccccaccccaacgacgacggccgcggcctcgtcctcgggcacgccgtgtgggcccacttcgccaccggcgccgacgacggcgacaaccgcggctccctggtggtcctgagccccctgcccggcgtctcggtcgctgacctccgccaagtcttccaggccttcggggacttgaaggatgtgagggagtcggcgcagcggcccagccacaagttcgtggacttcttcgacacgcgcgacgccgcgcgcgcgctcgccgagctcaacggccaggagcttttcggccgccgcctcgtcgtcgagttcacgcgcccttccggccccgggccccgcaggcgcgggtacgcaccccaccagcaccggcccaccgcgccgactccgccgaggcttcaagcgacgtggcgaccgtcccaaccgacgtcgtctcagccgccggcatcctcgtcgtcgtccggttccgtaagggcgagggaaggagtggtgcttctgaggaggagctcctgtaagtctagcgcgggcagcgaccagtcgtccaagggaggcaatgccggaacgagccatgagcgcaagaccaagggcggcaagatcgtggtggcggcggcggcggcatcctcgtcgaccccgacagcgtccgggaagcaaacccagaaaggcgtcgggagcagcggcggcgggagctggaaaggacgaaagagcgggtgggaggcgcgcttcctgttcaaggagcccgaggccggcggcggcgccgacacgcaagcaacgccggcttcggagatggatacgaggaccaccgtcatgatcaggaacataccgaacaagtacagccagaagctgctgctcaacatgctggacaaccactgcatccaatccaacgagtggatcgtggcgagcggcgaggagcagcccttctccgcctacgatttcgtctacctccccatagatttcaacaacaagtgtaatgtgggctacggcttcgtcaacctgacatcgccggaggctcgcgtgcggctgtacaaggcgttccacaagcagccatgggaggtgtacaactcgcgcaagatctgccaagtgacatacgcgcgcgtacaaggcctggaagcgctgaaggagcacttcaagaactccaagttcccgtgcgacagcgacgagtacctgcccgtggcgttctcgccggcgcgcgacggcaaggagcttacggatccagtgcccatcgtgggccgctcgcccgcggcgtcgtccgcgtcgtcgcctcccaagagccgggcggctagcgtggaccggcttgggcaggagctgatgccggcgccgtcgtcatccgcggacggcgcgtcgtcgaccactacgtccacccacgcgccgtccgaacacgacgaggaggaggaggagggagacatcaggctcgcaggcgagctgcggcggcttggctacgacgactagctggctccgatcctagctgcagctaggcgggcgacgcctagctcagcaacgatcggcatggcgtggcgtcgcttcgagaagcgcggaggcagtagtgacttcggccaagcttttcacagatccgtagcgctcgctcctgcacgcgcaggcgaagcaagtgaagtggactgggacttgactttggagaagcaaaagtgagctgatgttcgttggttcgtagacgctgcgcacagcaggtgtggagtcgtgttcttttggattttggtttgaagtttcctactacttgtttctttgaaacttggagctatagctagcttaggcttagctaggactgctgggaggggaaagggcatgcaggggactatcaattcgtggttcgtcatgcgctcgttctttacattaaaataagattgttattagtacagctttacaataaaaaaaaaaaaaaaaaactcga

SEQ ID NO: 73992 - DNA, 1125 bp, Zea mays
  unsure (1)..(1125): unsure at all n locations
  Clone ID: MRT4577_167480C.1
cccggaccccggggnnnnngattcggcacgagcaaagggaaggttttggaatcattgatgatgattggattgcaaacactattgcaaaannnnnnnnnnnnnnnnnntccaaagaggcaggttcttcggaagctaccatgacaaaggaacagaagctgaaagctgataggcttcgccgtgcgaagatgtttgctgcaatcattaagagtggagacaacaagatgaatgatttagctgcagcatcgaacccaactagtgaagctgccaaggccattcctgatatgaatgcctctggacttgatctgcaatctgtggctaaggaacgtgaaggtagtagctctgttctgtttgaccatgaggggccaaacttgacaaagcatagtaaagactctgatgatgaacagaacagagtgcggaagtatagaaagaaacaccaagaatccgacgaggaaaaagatgaatctgaggatagctataagcactcaaggaagaagcatcgcccagagcattcaagagaccagagcaaggatgttcacaaacataagaacaagagtcactccaaggacagggaatccagacatcatagacaccattgtagctcttcggaagatgagcatgagcatgaccgttggagttccaaatcaaggcataggcatagagatgatcaccgctactctgacgaggaacactctgatgaggaacacaggaggtcacacaagcatcggagggagcatcactccagttctaaaaggaagcacgaggaagactgataccaggttcgccggaagtgtctctgtctagatcaggtgccaagtttgaatcagacaagctgtctgatgacactgcacaaatcaactcagggaacaactgaagcgccgagtaaactgagagcnnnnntcagagcaacatactgtaatattttgtatcacagcagtaacattatgtccttaggcctctgttttgtagccaattgctctttcgatttctgtatttgtttcgaacgttctaactaggtgtctgtccatcttatttgaaatcagtgacctgctcgccaagttctaacnnnnnnnnnnnnnnnnnnnnnnnnnnnnagctttattatttcaagtggtctacatgtagcgt

SEQ ID NO: 73993 - DNA, 1580 bp, Zea mays
  Clone ID: MRT4577_167481C.1
cattgggtacctcgaggccggccgggaccgcctccggcttcagttccccgaggcttagaattcggatccctcccaccacatccatccccttcccttcccttccctcgtgccccgccggctctccagcgcgccgtctctgcccagatccaggagatatgcctcgctatgatgatcgctatggaggcacgcgcttgtatgttggcagattggccccccgtactcgttctcgtgatttagaatatctcttcggcaaatatggaagaatacgagaagtggagttgaagcgcgactatgcatttattgagttcagtgaacatcgtgatgccgatgaagctcggtaccaactagatggcagggatgtcgatggaagtcgcattgttgttgagtttgctaaaggggtcccacgtggtccaggtggctcacgtgaatatatgggaagaggccctccaccaggcacaggtcgttgtttcaactgtggaatggatggtcactgggcaagagattgtaaggctggtgactggaaaaataaatgctaccgttgtggagaaagagggcatatagaaagaaattgccagaacagtcctaggagcgtcaggcgtgaaagaagttactcacgctccccatctccacgccgtggaagaggtcgcagtccaagctatagcaggagcaggagccggagccggagccggagctatagccgatcgaggtccctatctggatctcctaggggaggccgccgtgaccgtgatgataggagatcgaggagtcttagctacagcaggagccccatgcggtcgccacctgcaaaggaaaaggagcgcagtcccacacctggcggaagcaggagcccaaggagccgcagcccacaggatcaggtgatgagcccaccacctaaggataacggcgacaggaatggttcagaccgtggcgacagccccagagggagggaaaacagcaggagccgcagccgcagccgcagcccatccggtggtaaccgcagccctgcagctaatgggcgtagcccgaggagccccagaggtgaccgtaccccgagccccatggctgaccgtagcccgagcccaaagggcaatggtaacaacgatggtggtgatgatgatactggccgtggtggttcccccacaggaagcaagtcaccctgaacgctgcaccgtctcagttcttaggtgcttcgtgatgcagtgggcaaacataccaaagacgtgatagctgtatcgtttccctatctgagacgtggacttatttagcttgctttgatattggtgtcttatttctcttatgaataatgtggacacgcatgttgtgtcgccctatgttggtatttacctgcaatgctatagcgtcagtcttgttgaggcctgagcaaaaacaaccagataccccctttgaaaggtactgctttgttgtgggtgaatcggggactcggggtggcataggttcacggcagagtcgttttccgcgactcgtgctgccggttagccgagtcctgctcgctagtcttcagcctgttttgctttaaatcgtaccggcttttactacttataaagtgtttgttttatctc

SEQ ID NO: 73994 - DNA, 772 bp, Zea mays
  unsure (1)..(772): unsure at all n locations
  Clone ID: MRT4577_167482C.1
gccnggccgggttcgggattatccgcatcactcatccatctactcacatacctagcctcttctactacacgacaacgaacatgcggaagcctgcaaatatcggagtagtggggtgtatacatcggcgatcggctccagctgaggtctactccgtaccgggtgatcgagaagaaggtcacgggggacaacagaagctgcatccgctccctctccttcagtctacttcggagctctgatggccaacccgtaccacgagggggcatgaggacttcagccatgctgacacggatgacaagatggatctgagtagggacgactacagcttgacggagatctccgctaccgcggacccagcctacgagattgacatatctggacacgtctctcatattcctcgccgacaaacacgcttacagaccgtacgacagggacgaggggaccccgttgcgagccaaggtgatcgaacaacggccacgtcactgccttctttgtgcggtctggagattgactgaacacgatcgtgctctatccgacacaccaactagtaactaacactatggatcggtatcatctgtacctctgcagatgcaaaatgcatgctggttgcctgcctgtaacgaatatgaatgcatagaagaacgccactgctgctcccatgcatcagcagagagtaccactatgctatatatatatatactgnaatgtcgctaccggagtaaaacatgaaccaaagatccagtgtcttctgaaaaananaaaaaaaagaccctan

SEQ ID NO: 73995 - DNA, 137 bp, Zea mays
  Clone ID: MRT4577_167483C.1
tcttccttggaccaaccatgacttggaacgtgcggcgtcttaattcgccagcagagaggatcataaaaggaagggaaccaaacaaatatgggcttcttcatcttgatgctctactcgctctacgacgcgaacacttt

SEQ ID NO: 73996 - DNA, 1474 bp, Zea mays
  Clone ID: MRT4577_167484C.1
ccggccgggacaccgcctccggcttcagttccccgaggcttagaattcggatccctcccacggtcccaccacatccatccccttcccttcccttccttcgtgccccgccggctctccagcgcgccgtctctgcccagatccaggagatatgcctcgctatgatgatcgctatggaggcacgcgcttgtatgttggcagattggccccccgtactcgttctcgtgatttagaatatctcttcggcaaatatggaagaatacgagaagtggagttgaagcgcgactatgcatttattgagttcagtgaacatcgtgatgccgatgaagctcggtaccaactagatggcagggatgtcgatggaagtcgcattgttgttgagtttgctaaaggggtcccacgtggtccaggtggctcacgtgaatatatgggaagaggccctccaccaggcacaggtcgttgtttcaactgtggaatggatggtcactgggcaagagactgtaaggctggtgactggaaaaataaatgctaccgttgtggagaaagagggcatatagaaagaaattgccagaacagtcctaggagcgtcaggcgtgaaagaagttactcacgctccccatctccacgccgtggaagaggtcgcagtccaagctatagcaggagcaggagtcgtagccggagccggagctatagccgatcgaggtccctatctggatctcctaggggaggccgccgtgaccgtgatgataggagatcgaggagtcttagctacagcaggagccccgtgcggtcgccacctgcaaaggaaaaggagcgcagtcccacacctggcggaagcaggagcccaaggagccgcagcccacaggatcaggtgatgagcccaccacctaaggataacggcgataggaatggttcagaccgtggcgacagccccagagggagggaagacagcaggagccgcagccgcagcccatccggtggtaaccgcagccctgcagctaatgggcgtagcccgagcccagagggggccccagaggtgaccgtaccccgagccccatggctgaccgtggcccgagccccatggctgaccgtagcccgagcccaaagggcaatggtaacaacgatggtggtgatgatgatactggccgtggtggttcccccacaggaagcaagtcaccctgaacgctgcaccgtctcagttcttaggtgcttcgtgatgcagtgggcaaacataccaaagacgtgatagctgtatcgtttccctatctgagacgtggacttatttagcttgctttgatcttggactcttatttttttctcttatggatatatgatatgatgccttcgggctggcttggatctgaataagtgaatgtggtcaaacgcatgttgtgtcgccctatgttggtatttacctgcaatgctatagcgtcagtcttgttgaggcctgaccaaaaaaaaaaaaaaaaaagcggcc

SEQ ID NO: 73997 - DNA, 514 bp, Zea mays
  Clone ID: MRT4577_167485C.1
aaagcccaatatgttttaaaaacaaaaaaaacatttttaaatgccctgcttttacatgaaacagcatgaaaataagggggggctaaccccacactaataaaattcatttatgcatatctcatgcattaaggaaacatttagttcacagatacatacatggcctcctttctccaaaaaaaaaattattccccgccactacatattctactaagcaaagtttactttgtttttcccacccaggtatataaagggttttgggggcccattctgcaaacgttggggtggaggctcttttttgcatcgggaaacctttgagggctgggctctgaatcttgaactttgttaaagaaggtgatgctttttttcccatggcacatttaacccatttggaaaaaggttgaatcgggaagtcgcaataggcgatttataaggcttttcccaaacgggcaaaaaatacactagagttcctaacaaaaaaaaaagcagaaagggggatgcgggatatacaaaggcc

SEQ ID NO: 73998 - DNA, 1419 bp, Zea mays
  Clone ID: MRT4577_167486C.1
ctcgaggccggccggggaggcttagaattcggatccctcccagcacatccatccccttcccttccctcgtgccccgccggctctccagcgcgccgtctctgcccagatccaggagatatgcctcgctatgatgatcgctatggaggcacgcgcttgtatgttggcagattggccccccgtactcgttctcgtgatttagaatatctcttcggcaaatatggaaggcttactgtttgtggcaaccctttccgcagaatacgagaagtggagttgaagcgcgactatgcatttattgagttcagtgaacatcgtgatgccgatgaagctcggtaccaactagatggcagggatgtcgatggaagtcgcattgttgttgagtttgctaaaggggtcccacgtggtccaggtggctcacgtgaatatatgggaagaggccctccaccaggcacaggtcgttgtttcaactgtggaatggatggtcactgggcaagagattgtaaggctggtgactggaaaaataaatgctaccgttgtggagaaagagggcatatagaaagaaattgccagaacagtcctaggagcgtcaggcgtgaaagaagttactcacgctccccatctccacgccgtggaagaggtcgcagtccaagctatagcaggagcaggagtcgtagccggagctatagccgatcgaggtccctatctggatctcctaggggaggccgccgtgaccgtgatgataggagatcgaggagtcttagctacagcaggagccccgtgcggtcgccacctgcaaaggaaaaggagcgcagtcccacacctggcggaagcaggagcccaaggagtcgcagcccacaggatcaggtgatgagcccaccacctaaggataacggcgacaggaatggttcagaccgtggcgacagccccagagggagggaagacagcaggagccgcagccgcagcccatccggtggtaaccgcagccctgcagctaatgggcgtagcccgagccccagaggtgaccgtggcccgagccccatggctgaccgtagcccgagcccaaagggcaatggtaacaacgatggtggtgatgatgatactggccgtggtggttcccccacaggaagcaagtcaccctgaacgctgcaccgtctcagttcttaggtgcttcgtgatgcagtgggcaaacataccaaagacgtgatagctgtatcgtttccctatctgagacgtggacttatttagcttgctttgatcttggactcttattttttctcttatggatatatgatatgatgccttcgggctggcttggatctgaataagtgaatgtggacacgcatgttgtgtcgccctatgttggtatttacctgcaatgctatagcgtcagtcttgttgaaaaaaaaaaaaaaaaaagcggcc

SEQ ID NO: 73999 - DNA, 760 bp, Zea mays
  unsure (1)..(760): unsure at all n locations
  Clone ID: MRT4577_167487C.1
tttataccaattgtaggcttccaatgcaaccacttgtgaacttctgaaatcatcactggcttaaatgtgcaacctgtggagatggttgcttctaagttatttgtgcagtgctctaggcaaaaggaccttctgaaaatctacaagcacttgcttaatcagcacagtaatgttcttatcttctgccatgatatttatgaaaaaacaatttctatattggtgcatttccgagcaaaactgtgttacccaggtctttcacgcttgattttttttgccatcctttagttcatgatttctactgcaatcacctaaaaatgaccatactcatacataaaagttgaatgtacttagccgtgcattatatgactttgtcttgctcttgccagatttgttgccagttttattacatctatatgccaaacatgacctactttatcattcttcagaacttctgaatcagcattcactaatatagtacaaatgtaccatagaacatatttctacgtatgcaaattgttctgatattcccatgtttctgtacttttgtcattctacatttctgctttgctggncgttgntaaatttcatcagcagcactgtgattactttaggcagggtccgggcggggggcatgtgcgaaccggtgcacatgaacagggccccctccctccaatggccccctaaataatagttagcggatagtttaatcaatacaaattttagtaatgattaaaatggtctagctaagtcagctcgacaagaa

SEQ ID NO: 74000 - DNA, 782 bp, Zea mays
  Clone ID: MRT4577_167488C.1
tgggacctcgaggggcagcaaaccggggtaatatagctcgctagacgagttgcagagagcaagtatattgctatatatcagcaatataatgtcgatgcattacttggccgctctgtcggctgtggctctgggagctatcttgcttctccgttcggccttcaaatggatgaacggcgcccggacgggtaaagacgaagggcggatgctgccgccggggtcgaggggcctgccgctcctcggcgagacgctcgagttcttcgcggcgtcgccgacccttgagctagtgcccttcttcaagcggcggctggagaggttcgggcccatcttccggacgaacatagttggcgaggacctgatcgtgtcgctggacccggagctgaacgcgcgcgtgctgcagcaggaggagcgcggcttccagatctggtacccctcctctttcatgcgcgtgttcggcgacgacaacatcatctccgcgctcggcccgctccaccgccacatcaggaacctcgtgctccgcctcttcggccccgaggccctccgcctggtgctgctccgtgacgtgcagcggagcgcgcgcgacgagctgcgctcatggctcgaccacccggacgtcgaggtcaggacggccacctccaggatgatattcgccgtcacggcgaagaagctgatcagccacgacgacgcggcgtcgggaggaagcctgtggaaatgcttcgacgcctggaccaaggggctgctgtcgttcccgctctgcgttccggggacagccttctaccagtgca

SEQ ID NO: 74001 - DNA, 1718 bp, Zea mays
  Clone ID: MRT4577_167489C.1
ctcgtggttccgcgcacggcaccgaatccttcgtattggtcggcccggcgagcatgggaggaagttgtggccgcggatccgtcggcttgcttcgtggagcggccaccccgccgatccgtgcgaaggcgccgccgccggtcgtctctatccgccggtgctgcgtctgctgggaggaggtcaacgggagttcgtcgattcgccgagagatctacgctcacccgatctgcgtcatttgagcttcaaggtccaaggcgattacgactccacacggtccacggcgtcgtctccggcgaaccttcgcgagccctcggctcccctctaccaccgctgccgcgaccccgcctacggagcatcctcgggtagcgctctggcttcccgtgccggcggacgtcctgcaggaggcggcggcctccgtggcatgttgatgagggccccagttggaagtgaacgccgatcgtctcggccctcggagccggggtcctcctccacccgggcagacagccaccatttacagttgcgtgatgtcaaggtgcaaaacatcgagacaggcaaggttcattctgtactccatatagaatatcctgattggcccgaccatggagtggcaactaatacagatgctgtacgggaaatctggaaacgactgcatcacattccaacggaacatcctatagttatccattgcagtgcaggaatcggaaggactggtacttacatcacaatccatactacaattgagcgaattcttcttggagataaaagctcttacgatcttgccaaaactgtaaagaattttagatcccaacgacctgggatggtccaaacagaggaacaatacaagttctgctacagggcaattgctgacgagctgaaagacctgctaaattcagatcattgaggtgggtcacatgagacggacagcaacgctgttagcatttattacgtttttttagacatttctatgtgaaggaacacttacattaagtgtgataaatatcttccactgggaagtgaacggcgaacatatggggattatgatatcaagattacaaagacaagaacagacagccaccatttacagttgcgtgatgtcaaggtgcaaaacatcgagacaggcaaggttcattctgtactccatatagaatatcctgattggcccgaccatggagtggcaactaatacagatgctgtacgggaaatctggaaacgactgcatcacattccaacggaacatcctatagttatccattgcagtgcaggaatcggaaggactggtacttacatcacaatccatactacaattgagcgaattcttcttggagataaaagctcttacgatcttgccaaaactgtaaagaattttagatcccaacgacctgggatggtccaaacagaggaacaatacaagttctgctacagggcaattgctgacgagctgaaagacctgctaaattcagatcattgaggtgggtcacatgagacggacagcaacgctgttagcatttattacgtttttttagacatttctatgtgaaggaacacttaccctttagaggagtgaattagtcaatctcatttctctttaaactatgtttgttctagtcaaaatctatgtaataaaaaatctatcatatgtgaagctatgctatgtttttgactaatcgttgctattactaccgtaaaggagtacgatatgaaggcggaagcttaaaataaaa

SEQ ID NO: 74002 - DNA, 941 bp, Zea mays
  Clone ID: MRT4577_16748C.1
gcacgagagctcgaaaaaaagggtacgaataggaaccccaatccagggccggagggcgaacgaactcaaaagcaagccgttccagtccaatccgccccagtccaaatctaatcgccgggtttaggcacaaggggcgggacgcggcgaggtttagtcggggtttgttttgtcccttccgtgcgattctgctctccgcgcgggaggcaagtactgacggaagcgaagaccaaggcggaggaggggggtccccggcggtggaagtggaacgcgccgatgcgcaagtttcaggactccatcaaggccctccaggccgacatcgatcacgccaatgcgatggcgtcggaattcctgagggactacgacggctgggtcatccagatgcgggtggcgtacagcgccgtcgcgcatttcctcctgcagtggaccgactgcaagctcgccggcgcgctcggcctcctcaaggttatgctatacaaggcgtcattttcccgtcgctgttgcagcttccgagtggcattaccgagctggacgacaggaagcagaggaagctctgcctgaagaaattcaggagcagggatgagcagctctcggaggtggacacggagagggagctcgagtgcgggatctgcctcgaggttagccccaaggtcgtgctgcccgactgtgcccacatgctctgcatgcggtgctttgaggattggaacgagaaatcgaagtcctgccccttctgtcgcgcctgcctggaggaggtgaagccgggcagcctgtggatatacaccgacgacagcgacgtggtggacacggataccttgactagggagaacatcaggcggctgttcatgtacataaataagctgccacttgtagtcctacatgtagttgaccttgacgtttacaagtaccgcatcaagtaaaatgcaactgattcttggtgaaaaaaa

SEQ ID NO: 74003 - DNA, 338 bp, Zea mays
  Clone ID: MRT4577_167490C.1
atgcgcatcgactggggcgacagtcgctgccgccctacttacaatcatctctgatcttgcccagccagtgggatgcctacaagtaacaactgcgaaacaagatactgtagctacttaccaagggtaccctgaagaactatcatgtgctatcaccatatgccgactgaactgacccatcctatgcacgaggaaggtgtacatgactactacatgcactgttttgaggcatatgatattaagccactgagggacagctccatgggccaatgtattacatcaaagatggtcaaccggaagaaggtaactatggccaacctcagaattcataacatgcacct

SEQ ID NO: 74004 - DNA, 145 bp, Zea mays
  Clone ID: MRT4577_167491C.1
gtgcccgaagtgccccgatcgtctggggccgacagctgcgcccggcgctcctcctacccgcggcgctgctcccttcgttgcagcccgccaggaggcacacgctgcaaccgaccgccgcagacagagagtccaaaggggaggccaa

SEQ ID NO: 74005 - DNA, 570 bp, Zea mays
  unsure (1)..(570): unsure at all n locations
  Clone ID: MRT4577_167492C.1
ggcttcctatcagctctcatggtcgtctgggtccctttcttgccgcaagcagtgtaatattaagcatgctggtcacnccttgtataagaagcatcgtatcaaagaaagtgggnccttttgaacagggaatggtccaagggtgcatgnctggaataagctcgaccgcaagtgtcgtatctcctctaatctttactcctctcacagcctggtgtctatcagaagctacgcctttctacttaaaaggtttcagcgttgcctgtgctgggtttgcaacgctggtagcgttggcgacgagcataagtatgaggccagctgaagtgcagccagataggaaatagatgagctattgacctctgtttttatgggtaaaagaaggtagatacatgcctgtaaatagtatttacatcctacacttagtcttctactaccatttactattcaatgtcaaatgtagtagtattatgtaatttccttgccgggccacattattagttgatcaacactggtcctaacattttggaggtctgagtgaaaactaatatagagacctctctcatctctttctctctc

SEQ ID NO: 74006 - DNA, 275 bp, Zea mays
  Clone ID: MRT4577_167493C.1
tcccttctctacccactcttcctacaacccaaaactgacttctctcccattcatttcccaccaacacgtcatccacgtctagctggtcttctcttactcctcctccctttccttccccttccatcacctacttcaattccaccacttctttccattctttctccatcctatcttgaccatctgcctctatctccctcgatctcttcattatccattctcaaattaccaattcctttatcatcactccaatcattctacttcatcctatcctcccc

SEQ ID NO: 74007 - DNA, 233 bp, Zea mays
  Clone ID: MRT4577_167494C.1
acgacagctagctcgaaaaatcgttcatgaattataagcatcaggcagacttaaaaacatggtactcttagaacattgatctatgtcccttgagagcatctaaaaaaaactctcaacacaggacattcagaggatttatgctttagcccccgcctgggcaggggcatcccggttcctttgatcttatatgaagctcaatttgattccctctgccctgggcaggctcacccacc

SEQ ID NO: 74008 - DNA, 2703 bp, Zea mays
  Clone ID: MRT4577_167495C.1
cgtagctcggattcggctttggtggtagctgcttttccttccttccgcgcgcgcgcacaccctccctctctctctctctctctctctctctctctctgctgtgcccgcggctattaagcccgttctggatgagtcggtgagggaggacgacgaggagagccggggtcatcggatcgctgccgagggttctccgtttgtgcgacagagaggtggtggtggtgacggtgtcagtgcgtgcgtgcgtgcgtgccaatggcgccgtcgtggtgggggcgggacgcgagggccaacggcgtcgttggcggcggcacgcccgtggtggtcaggatggagaaccccaactggtgcatctccgaggtcgccgccgcggcgtcggaggtggacgcgccgccgccggcggcggccgggggcggcaaggccgggcggcggggcaagaacgcgcgccagatcacgtgggtgctgctcctcagggcgcaccgcgccgcgggccgcctcacgggggcggcctccgccgcgctctccgtggccgccgccgcgcgccgcagggtggcggcgggccggaccgactccgacgccgacgccgacgccgccccgggcgagagcgcggcgctccgggcgcgctcctacggctgcatccgcctcttcctcgccctctcgctgctgctgctcgccgtcgaggtcgcggcctacctccggggctggcacctcgaggtggacgtgggcgccgggatcctcgccgtcgacggcctcttcgccgccgcctacgcggcctggatgcgcgcccgcctcgactacctcgcgccgccgctgcagttcctaaccaacgcctgcgtcctcctcttcctggtccagagcgtcgaccgcctcgtgctctgcctcggctgcttctggatcaagctcaagggcgtcaggcccgtgccgccgctgcccgccgacaaggaggacgtcgaggccggtcccgacggcgtccccatggtgctcgtgcagatgcccatgtgcaatgagagagaggtgtaccagcaatccatcggtgcggtttgcagcctggactggccaaggtcaaatttcctggtccaggtgttggatgactctgatgatgctaccacttcggcacttatcaaggaggaggtggagaaatggcagcgagagggtgtgcgcatagtataccggcaccgggtgatccgggatggctacaaggctggaaacctgaaatcagccatgaactgcagttacgtgaaagactatgagttcgttgtcatcttcgatgctgatttccaaccacaggcggacttcctgaagcgcaccgtgccccatttcaagggaaaggatgacgtcgggttggttcaggcgagatggtcgttcgtaaacaaggatgagaacttgctgaccaggcttcagaacataaatctttgcttccacttcgaggtggagcagcaggtgaacggggcgtttctcaacttcttcgggttcaatggcaccgcgggagtctggagaatcaaggcgcttgaggagtctggaggatggatggagaggacgacggtggaggacatggacatagctgttcgagcgcacctcaaagggtggaagtttctctttctaaacgatgtcgagtgtcagtgtgaattgccagaatcgtatgaagcgtacagaaagcagcagcaccggtggcactcaggtcccatgcaattgtttaggctctgctttgtggatataatcaaatctaagatcggtttctggaagaagttcaacctcatattcctcttcttcctgctccggaagctgatactacccttctactccttcaccctcttctgcgtgatcctccccatgacgatgttcgtccccgaagccgagctccccgcgtgggtggtgtgctacatcccggcgacgatgtccatcctcaacatcctcccgtccccgaaatcgttcccgttcatcgtcccgtacctgctgttcgagaacaccatgtcggtgaccaagttcaacgccatggtctccggcctgttccagctggggagcgcctacgagtgggtcgtcaccaagaagtcggggcgctcctccgagggcgacctcgtggccctcgtggagaagcactccaagcagcagagggtaggctcggcgcccaacctcgacgcgctgaccaaggagtcgaagggcaccgaggaggagaagaataagaagaagaggaagaagaagcacaacaggatctacaggaaggagctcgcgctgtccttcctcctgctgaccgccgctgctcggagcctgctatcggtgcaagggatacatttctacttccttctgttccaagggtgtcgttcttggttgttgggctcgatctaatcggtgagcaagtcgagtgatggggtacaagggagagtaattgggtatctattttgctgcgagtgggggggggcaatgcgaccaaaaaaggcacttcaggtaaaggcaagcgcggtacatgatccaaaaaagatttgattccgggttaagaagggttatatagtttcatcggggatacttgaaacggtgaaaatgtggaattgtggattgtagatataatatggcttgggactgtgggctgtaaaaggcttgggggttctaattcttttgtaagaaaaatcatcagtggttagatgggttattttgcttacttgacaatttaccttcaaagggggatactgttgggatccatgtgatttgggc

SEQ ID NO: 74009 - DNA, 246 bp, Zea mays
  unsure (1)..(246): unsure at all n locations
  Clone ID: MRT4577_167496C.1
gcgaccgtcgccaccgtccgcctgncttggcccgccactactccgtggtactgttaattccggcgctctcccactgtgaccggccgctagcgacgacagagctgctctattcttaaacaaatggcaccgtccagtacccaaaccttttgaacaacctgcacgaaagccgtattgtcaaactcagtgggtatgagtcaagggttatcttgcttctgggactcatatataatctacacttgccaacac

SEQ ID NO: 74010 - DNA, 243 bp, Zea mays
  unsure (1)..(243): unsure at all n locations
  Clone ID: MRT4577_167497C.1
gcacgagcaacaagcaagatttacctgcccatcgatcatatcgtcaactggtccggcagttcgcngacaccatgagctccacggnagtgcggcggcggcggcggnncggcgccaagacgtnncgtggccctgaggctggtcnnnggctgagcgctggagngacgcnncaagaaggctgaatcctnncaaggacaagccggnanncgccgacantnncgtggtgccctgcccgntnncggctcc

SEQ ID NO: 74011 - DNA, 761 bp, Zea mays
  Clone ID: MRT4577_167498C.1
agtcttatactgaaattcagaattttaaaatgataatcaggccatatagacaaatctggtttgagacggcccaggcgccaccaggccgaggcgacccatgctgccagtctccaggccagggcggcccaggcgcgccaatctccaagccagagcgcctatgcaggtcggcccatcaggccgaggccgcccatgcaaccagccacggcccacacgccggtatatagggagccggttagggttttaccctaaccactgctgttccagcagccgccgccactaggggcggttccagccaccgtcgccatggcgtatccttcggccaattcctggcggcatttcgcggcggcgcacggatccggcctgcgcggctccgcggcggtgccaggacgcgaccccgcggcggcgggcgggcacggccttggcgcgtgccccccaggcagcgtggcgcccccgacggccagggcgcggcccactggcgcgtggccggccatggcggcccctggcggcgcggtcccgcgcgggtgcgtcccccgacggcctgggcgcggccgtccctcggctcagacggccctcggccagggcgggcgggcacgaccagcgcgtgcgggcggcctcctccggccaaggcggcgcgtgtgtggcccaggcttgggcgcgcaggcacgccggccgggcaggtgtgtccactgccagcgcgggcgcgcagccccggcacggctccccagcggcgtggcctgtggattatgcttgggcgcaggggc

SEQ ID NO: 74012 - DNA, 207 bp, Zea mays
  Clone ID: MRT4577_167499C.1
atggatcctaaaggcaaggggaaggtgatcgacaagaaggagaaggagatcccctccaacgaaatacccaagggagagattgttgactccgggtctagcaagaagaagaaggacatggatgaatataacaaagttagtgtcttggacaacgccaaaagaatatggaacgccctcaagatctctcatgagggtcatgagggtatgtag

SEQ ID NO: 74013 - DNA, 609 bp, Zea mays
  unsure (1)..(609): unsure at all n locations
  Clone ID: MRT4577_16749C.1
cccacgcgtccggattttggctgacaaagagcgctgtctgaggtgcgtggtcaagtcgaggcgaagatgagcaaggaggatgtgctcaaggtgcagatctctgaagccaattacgtacacattttcctaccacgacttttattctgctttccgtttctcaacgtcttggacattgccggcgagcgcggtctcctcgacaacttctactgctaactcgggtgcaagatgcccagcaaacttcccaatccagctgccggcaaggagatgaggttcccgacggcgacaattttccactacacaaccggattcttcagcagcatatggatccgttgaagcgccgtgtgacaatgccaccaaagagcagcaacaaacaagctcaaagtctccgctaaccactaatctcataaagcttgaattttctcattgctatgtttccttctcctagcaaagttaagatgtttgcacatttctagcttattaggtccttgtgtggaatgtgtttgaacaatgatctcatttaaacaatatcaacatgtgtgatatataaaaaccgtagcaacgcacgggcnnntnaataaaaaaaaaaaataaatatttattataataaat

SEQ ID NO: 74014 - DNA, 340 bp, Zea mays
  Clone ID: MRT4577_1674C.1
agtgagacttttcactagttgttgcccatatctgatgaaccaaccgagggccacttgggatcaacaagaacggcacccacaatgttattataacgggcgcctcacagggccgccattcataacgaaaagtcccacattagacactaatgctcgaacggtggtggacacggactaatggaatgcggctctgacaactgtgatgccaggccaagggtctcatgccttccagtctgtcaagaaggcggaacgagcaaccctggttactcttaaggtgaaggaccccatgttaaagtcgtaatccctagacttgcacatggccgacatgtgccggaacacactg

SEQ ID NO: 74015 - DNA, 820 bp, Zea mays
  Clone ID: MRT4577_167500C.1
ccgtgtcaccctacccttaccctcctccccctcctcttcgccgccgccatcgccggcgtgcgttgcgcgccggtgtataggccggagtacctggtggacgggaaccagctggtagacatgcagtaccacatgggccccgtcgtgtcaggcgcgccgaccaacctgttcctcatctggtacggccggtgggaggccccggcgcaggctgtgctccgcgacttcctcgcctccctctccgctccggcgccgttccccgccgtctccgactggtgggcccgcacgccgcggctctacacggaccaatccggcgccaatgtcaccgccacattcgccatcgccggggagcactccgacgccgggtactcccacggcgcctcgctccggcggatcgacatgcagtccgtgatccggtccgccgtggtcgcgtacccggacccgctgccgctggacccgtacagcggcgtgtacctggtgctctcctcccccgacgtgcaggtggacgagttctgccgcgccgtgtgcggcttccactacttcaccttcgcgtccgtggtcggggtcacggtgccctacgcctgggtcgggaacagcgccacgcagtgcccgggcaagtgcgcgtacccgttcgccgccgccgccgagtacggcgccgggggagcccagccccaggcggtgctgcggccgcccaacggcgacgctggggtggacgggatggtgatcgtgctggggcacgagctggcggagatgtccacgaacccgctggtgaacgcgtggtacgccggggacacgcccacggcgccgaccgagatcgcggacctgt

SEQ ID NO: 74016 - DNA, 810 bp, Zea mays
  unsure (1)..(810): unsure at all n locations
  Clone ID: MRT4577_167501C.1
attgggtacctcgaggccggccggagttggcttttggggcttttaggggaaaagccaaagctaaaagtcaaaccaaacataccctaagctcgacgaaagcgactgtggtctacggaaagcacaatccacatcgtcggcctcctccggcactaagtagcatctctggatgaacaacggtcatactttcatgctcgtgccaccacggatcctatggcaccaaggtgctccagatatctcactctaactctattcatgtgcctagttctaaggatccaaaaacacaaggctggggatagcatttgaagaactacactacagtgactttatggtcatcttccatgttgttacacagtgtgagatatcgggcctttgacaatttcttttggccaatctgctttcagtaccatgcgggctgcagtagcatcgcacaagatcaagcgctctgagaaggcaaataatcattatctatcattcagccatgcatcgcttgatgaagggcaagctgatatgttcagtcattgtttggaagcatcgcaaactcctttgcacatgatgcatgttttatcagatcagggttagttgttgccttctccttaacgtttgctgctgcttcttgctgatgtatcaaccactaaagccctggagcgatcagccgtttgctgatggaagggctttcagatccgtgcagcaaaaggatgcagttatgtatgattctggtgttttcaacctctctctctgatagcgtactaaaccttactaggaattcaatttcatcctcatcttgaagataaattttcgaggtntgtactg

SEQ ID NO: 74017 - DNA, 584 bp, Zea mays
  unsure (1)..(584): unsure at all n locations
  Clone ID: MRT4577_167502C.1
taaaaaaaaaaaaaaaaaaaaaaaaaaaaaaaaaaaaaaaaaaaaaaaaaaaaaaaaaaaaaaaaaaaaaaaaaaaaaaaaaaaaaaaaaaaaaaaaaaaaaaaaaaaaaaaaaaaaaaaaaaaaaaaaaaaaaaaagggggggggggttttggggtttcccaggttttccttttccgttccttgcgaactttcttagttttttttttttttttccctaaaattaatttaattggcccgggtttttccattttccgagtttgggaaaacccttgacctttccccaattttatttttttttggagttaattccctttttcccttttttgcggtttttacttaaaagggccgaggcccattcccttttcccattatttcccctccctaattgggaatgggaacgccccttttccttgtcctttaacctcggggggtggggggtttacgttcacggaaccctttacttttccctgtcccttaccccccgccccttnccttttttttcttttttttttcgcaccgcccgcggtttttcccttccccttttaatttgggagctccttttagntttcggttttagttttt

SEQ ID NO: 74018 - DNA, 364 bp, Zea mays
  Clone ID: MRT4577_167503C.1
gggagggcctgggaggcctccatggagtgggctacagtgtgggaaggggcagcgaccataagggtgccttcccagtgagccttgccaaaccgccctgtttaaaagttcaccattccacactccctatccccctctgtgcctcagtttccctgtggaacgtataccatggaacatactattaacctgtcactcaccttccttattgtttgttccccacgtggaggaatggtgtctgacgttagctcgcttgcttgtttgtttgtctgtctgtacctctgctgggccctgtgcttggagcattgcctgcctcagaggtgcatacaatgatgaatgcctgaacagctgaaggctctcgatggacgat

SEQ ID NO: 74019 - DNA, 727 bp, Zea mays
  unsure (1)..(727): unsure at all n locations
  Clone ID: MRT4577_167504C.1
ccccttcccgctctccgcctctcgccaaggaggcgaagacgataaccaccgacatgccctagcgatgttcccatttgcagacccaatccaagccccaagcaatcaccaaacctggccgatgagacttccatcctcgcatggaggaaaaatccaatcttcgcatgtgacctctttttaaatcgccacaagaatcgatcaatcaatccaaaagggaagagaaaaacagagcaaccccattgcttagtgttttcgccttgccgttggttctcttctccgttcctcggcacgcgtaggcctatttaaacctccgctaaagctcctttgtcgcgcccaattcggcagccatttcccagattccccattggcgagggttccccgcgctgagatccgatcttttcagttgttcggtttcaatcggtgtaaattcatcaggaaagtaacatagaaccgcccccggagttgtaaaaggtttccatttctgatcggttgtcgagcctggccacgttttgccgaagaaaggcaggacgcccgttcggttacggttcttgatccggtgagggaccgccgccgaaggcaatgcagccggacccgcaaggttcgggcagggggaaggcgggcggcgccaatgcgcacgcgcggctgccgccgccggtgacggcggcgtcggctggcggnccggcgtcggtgctgccgcacaagacggacaacgtgcgcgaccactaccgca

SEQ ID NO: 74020 - DNA, 410 bp, Zea mays
  Clone ID: MRT4577_167505C.1
cacaataatagccttatatatagtactattgtatcacatggcgatccgttaattaatacgatactcatatatggctcgtgcattggccatttatcgtcattattagcaatcacagtcatgctgcaggatcaggtgttgtgaagtagtcgcgttcaaacaagagactgcaacaaacctcaagagggataatctatatcacagtcgttcccgacatccaatggagagatggcttgctgtttctaaagtctggacatgtgtccatgaacgaacaactgaacatgcgtgcaaaacgaacgattgaataagcaaaacaaatcagaagagaagagattacagattcatcggcgaagccttgaaagcatgccatatggtcttgtcgggaaagttctcctacaagtagacttacacct

SEQ ID NO: 74021 - DNA, 682 bp, Zea mays
  Clone ID: MRT4577_167506C.1
ggccgcttttttttttttttttttctttgtttttttttttttttttttttttttttttttttttttttttttttttttttttttttttttttggaacaaacaggggttagctttgttcgctagccgtttttatttatttatgggggccgtcctacgtcctaacaagtagcggacccgccctccttggggggatttattaaacaaggagctggccggagctaatggctttaacggacccagggggggcccttgggaccagaatagccggggaaaacgtttaggcatcggggggggggggggtcccactccacaagcttgccccctttgcagttgggggggcacgactccaccacgtccccccactggcagaaggggatgtagccccttgggcaaacgggaaagtccaaaaagccccacggcctgggggggcaaaccgggggctcgagcaggttgaaaacccaatcacggaaaaaaaagccgtcgccggccgggaattccttgaacttttgggagggggggggacacttgcccaccacgtggttgcagcccccccggggcggcctgaaaaacggctccttggggacaaaggaacagaactcccacgggcgaccaacagcaccaaaactgttggggagacaaaaggcccccccggtgccggggtcgggggggggggcccccaaac

SEQ ID NO: 74022 - DNA, 567 bp, Zea mays
  Clone ID: MRT4577_167507C.1
aaagggaacccaaaggaccttcttttttggggaacggaaaaaagccttattacaacagcccccacggaacgacttttggaagggggacttggttttttgcccaaaccccggcaagggaaaaccccccttcacggaaggggggggggaaacccaaacaattagggggaaaaccggccctcctcagttaaaacaaacaaaacccaaagggaaatgctgtttgaaaagcccttgggggggaacccgggggggcccccctttgggggggaggggggggggaaaaacaccgggtaggggaacccggccggcccgttggggtttttgaggggagggcccccgttcatggggacaacccgttttttgatcttgggcaacccccccccaaaccggttgaaccccccctgggccttggggtccaaagtccactccttgggggccccccggcccaggaacccctcgggggggggggggggggacaggatccccaacaacaaaatgcccaccagggcccggaactggctggggaaggggcccacaaacaccttctccggtttgggccccaactccggg

SEQ ID NO: 74023 - DNA, 321 bp, Zea mays
  Clone ID: MRT4577_167508C.1
cgaattctagggttaggttgctgttcatgcttgttcttgttgtttgtttgtaggcgatggttacagctgtggcatctactttagtactttcgaaagatgaagctcattttgcctgtatgtcttaaatatagtgctctgtattaagcttatctgcatcttttttttttttgcatatgacatctggtagtattaccgtcgagcctatgatttgttattgttatggaataacaaactgaaatctcccgtcagatgacattatattgcttgtgtccttgttcgacttactcttgcatcgtgcataacagtatttttttttctttt

SEQ ID NO: 74024 - DNA, 151 bp, Zea mays
  Clone ID: MRT4577_167509C.1
actctgcgcgagctcctcagaagtcaacatttacatctacttctgtctctgaaaggcatgtacaatttatctatgacattatctaactctaccacccaaatactgtacacacataatctctcatacataatctaccggctctacatctcat

SEQ ID NO: 74025 - DNA, 274 bp, Zea mays
  Clone ID: MRT4577_167510C.1
acaaaattttttttttttcccacaaacacaagaaccggaacgaatcatttatcaaatagaaaactcccctcccccattttatttttacaaaaaaaaatacatcaaatctaataattccctgattccaaagggggccacctatatatattttgacggttacctttaacaacattacatttaaggaaagatgggggaacacacatatttttcaaatcaacatctacccttcactcatttcatgttatttcccgatcaatcactttccaaccacatt

SEQ ID NO: 74026 - DNA, 405 bp, Zea mays
  unsure (1)..(405): unsure at all n locations
  Clone ID: MRT4577_167511C.1
ccaccaactgggcgctcgttaccaagnatctcggnacagctggcggggtgggggtggggggcatttttnaagnatgttcaagcgttatgctccatgcttctctgtccgggtgactaagatggtggtgnttgnttgggtaagntacaacaactcgggctgcttgttggnctgagtcacgctgatgacgtgtgactgctgttntgggattgtgcttgggggtcgggtgagtggtgggctattcatgtaggactatgtgctgcgtttgtctgttgttttgtgattgtagttgttttatggtgaggagntttgtttgtattgggagaattttgtggtgggggggttaaggttggtgttggagagtgagaaatgtagtgngagatagaggggttgtggaggagtatgttt

SEQ ID NO: 74027 - DNA, 809 bp, Zea mays
  Clone ID: MRT4577_167512C.1
ctcgaggccggccgggagcaagacagcagtgaagagaccaccacacggctgtcgccatctccactcatctcaattcgtagccatgatgctgtcacgagctgcgcgcccggctctgaaggccggcatggccgccgccgtcgcccggcccgccgcccttaccgccaccaatgccgccggctatgccacccttcgtgaaattgagggccgtctcaagtcgatccgcaacatcgagaagatcaccaagaccatgaaggtcgtcgcctccaccaagcttacccgcgcccaaaaggccatgtttgagtcccgcaagtacggtcagacctccaacgaggttttcgagaatgccgagaccaagccaattgagagtgagggcaagaagaacctcatcatcgtctgcagctcggacaagggtctctgcggtggtattcactctggaatgtcgaggaaggtcaggaggatgctcgctgagacgccggatgcggatttggccgtcattggtgagaagtgcaaggctcagttgggtcgttccaacggaaagaacatggttctttctttcgctggtgccggaaaggacgtgcctacctttgccgactctctgtgcattgccgaccagatttccctgctgcccaccgactacgcctccgtcaagattgtctacaacaagttcatcaacgcctcgagctacgagcccatcatccaggaagcttactctgaggaggctattgctcagtccgccaacttctccgctttcgagattgaggacgaggttcttccccaactccgcgagtacgctcttgccaactcgctct

SEQ ID NO: 74028 - DNA, 576 bp, Zea mays
  Clone ID: MRT4577_167513C.1
ggggaaaacccatttttgggtttttaacagccctgaccaaactttgggcgcccaaaagggttcattttccaaaaggcgaaacaatgatcaagttcacaggttttccagcacaggccccaaatttgaacccggactttccaccccccggttattttatttgaactatccctgggctgacaagctttgggattttttgcataactccggggtttttggggggcccctgcccaccccgagggttttcctgcaaaaccggaaaaacctggtggatgatcggatcaatcaggatgttttggatcccaggggcttgcaggggtttgttctggctttttttcaggccccccccactgagttcccctttgctccccttggtgatctgttaaacacacctccttacaccataaagaaaccccgggtttttcgggccatgctttaggccaccttgaaaagtttccaccgctttgtcatattttttcatgaaaaacgggatagcccctttccttggggatcccttggaaaaggggggatctaactcaagggccttttcagcatttttcaaacctttaggaagggccc

SEQ ID NO: 74029 - DNA, 307 bp, Zea mays
  Clone ID: MRT4577_167514C.1
ggtgatacctttcatttaatagtttaggaccacgcatcattgtttatatatatacgtggcaacagacaggaggaaccacagccagatcaactagtatggctggggaactgctgaaactcacactctccatatactagattggtaatgaacacgggacagctacatatataatgaagaaaccttacacgaggaggtcaccataagtaagctctgaaacacaccagggctgtaccagatgggcacagacaggatattatttacggacatctactaagatagcacacgaccgttactgatcgttattgtc

SEQ ID NO: 74030 - DNA, 822 bp, Zea mays
  Clone ID: MRT4577_167515C.1
aggacgaagtagcgttggctgttgcaaaagcaaccgtttcaagtttcctccctagtgcacccaggaaatcgccagcacctcccctgttccctctctgtctctggctctctctcctctccgcccctttttatcgcccgatctcacacattttggaaagaggagagagagggagggagagattagagggagcgccctgcgcccctgcccaagcaaagagaaaccgcggcgcgagaagagggaggaagggcagacgggcgagcaggatgagagagatcatcagcatccacatcggccaggccgggatccaggtcggcaacgcctgctgggagctctactgcctcgagcacggcatcgagcccgatggcaccatgcccagtgataccacggttggcgtcgcacatgatgccttcaacacgttcttcagcgagaccggttctggcaagcatgtgccgagggccatcttcgtcgaccttgagcccactgtcattgatgaggttcgcactggctcgtaccgccaactcttccacccagagcagctcatctcgggcaaggaagacgcagctaacaactttgcccgtggccactacactgttgggaaggagattgtcgatctatgcctggaccgtgtgcgcaagcttgcagacaactgcactgggctgcagggattcttggtgttcaatgctgttggtggtgggactggctctggacttgggtcacttttattggagcgcctttcagttgattatggcaagaaatccaagcttggtttcaccatttatccttccccacaggtgtcaacagctgttgtagagccatacaaca

SEQ ID NO: 74031 - DNA, 280 bp, Zea mays
  Clone ID: MRT4577_167516C.1
tagactcctctcccagactgtgaccttagaccatacctctcaccccccaatgcctcgactcacccaaaatcacacagaagaccctagatctataatttgtcttcaggtagtaaattcccaataggtctgctggagtgggcgctgaaggctccatgctgctcagacctgagccctctaggcagcagggtcccacttacaccctccctatcctgttcctcataggtggcacagaggggattcctcagcccttggcagggttttcacagcactcgcctgtaag

SEQ ID NO: 74032 - DNA, 1839 bp, Zea mays
  Clone ID: MRT4577_167517C.1
gcacgagttcaagtttcctccctagtgcacccaggaaatcgccagcacctcccctgttccctctctgtctctggctctctctcctctccgcccctttttatcgcccgatctcacacattttggaaagaggagagagagagggagagattagagggagcgccctgcccaagcaaagagaaaccgcggcgcgagaagagggaggaagggcagacgggcgagcaggatgagagagatcatcagcatccacatcggccaggccgggatccaggtcggcaacgcctgctgggagctctactgcctcgagcacggcatcgagcccgatggcaccatgcccagtgatacctcggttggcgtcgcacatgatgccttcaacacgttcttcagcgagaccggttctggcaagcatgtgccgagggccatcttcgtcgaccttgaacccactgtcattgatgaggttcgcactggctcgtaccgccaactcttccacccagagcagctcatctcgggcaaggaagacgcagctaacaactttgcccgtggccactacactgttgggaaggagattgtcgatctatgcctggaccgtgtgcgcaagcttgcagacaactgcactgggctgcagggattcttggtgttcaatgctgttggtggtggtactggctctggacttgggtcactgctgttggagcgcctttcagttgattatggcaagaagtctaagcttggtttcaccatttatccttccccacaggtgtcaacagctgttgtagagccatacaacagtgtcctctcgacccactccttgctcgagcacactgatgttgcagtcctcctggacaacgaggctatctatgacatatgcaggaggtcccttgacatcgaaaggccaacctataccaacttgaacaggctgatctcacagatcatatcatctctaaccacctccctgaggtttgatggtgctatcaatgtggatgtcaccgagttccagaccaaccttgttccatacccacgtattcatttcatgctttcctcatatgcccctgtaatatctgctgagaaggcctaccatgagcagctctctgtgcctgaaatcaccaatgctgtatttgagccctcaagcatgatggccaagtgtgacccaaggcacggaaagtacatggcttgctgcttgatgtaccgcggtgatgttgttcctaaggatgtcaacgctgcagttgcaaccatcaagaccaagagaactgtccagtttgtggactggtgccccactggattcaagtgtggcatcaactatcagccaccctctgttgtccctggaggtgacctggcaaaggtccagcgtgccgtgtgcatgatcagcaacaacaccgccgttgccgaggtgttctcacgcatcgaccacaagtttgaccttatgtacgccaagcgtgcattcgttcactggtatgtcggtgagggtatggaagagggtgagttctcagaagcccgtgaggacttggctgctcttgagaaggactatgaggaagtcggtgcagagggtgccgatgatgagggtgacgagggagacgactattgagtagctggctaataagtagttctctggtggttaatggttgggttattttgagtatatactctatggttccactccattggatactgctgctgtgtgtttccattttgtactatgtagtaaattgttcgtagccccctattggccatgattgttcatatcatccttctttggtttgcaacgctattcgtccaatttcggtgtatatgctataatgctattatgttgcaaaaaaaaaaaaaaaaaaaaaactcgagacctcgtgc

SEQ ID NO: 74033 - DNA, 233 bp, Zea mays
  Clone ID: MRT4577_167518C.1
tccggacgtagaattacgcgagggccagccctttcaattgcttcgcgagaggggtggcaagacatgatgattatgaattcctttattagttaccacacgcggttccaacagtaatgactctagaagcagttgcattgtgaggtgcactgcaatgataaataagttgttaatgagataccgcatacgcaaggacccttgcataacacatgacgggggcgtggaacacgttgttg

SEQ ID NO: 74034 - DNA, 1914 bp, Zea mays
  Clone ID: MRT4577_167519C.1
cggctcacgtgaacaacgcccacgaaacagcgctggctgttgcaaaagcaaccgtttccagtttcctccccagtgcaccccctcccctctcccctccctctctctcctccggcccccttttttatcgcccgatctcacacattttggaaggagagagagagaggcagagggagagattggagggaggcccctgcccaaggcaagagaaaccgcggcgcgcggagagggaggaagggcagacgcagacgcagacgggcgaacaagatgagggagatcatcagcatccacatcggccaggccgggatccaggtcggcaacgcctgctgggagctctactgcctcgagcacggcatcgagcacgatggcaccatgcccagtgattcctcggttggcgtcgcacatgatgccttcaacacgttcttcagcgagactggttccggcaagcatgtgcccagggccatcttcgtcgaccttgagcccactgtcatcgacgaggttcgcactggctcgtaccgccagctcttccacccagagcagctcatctcggggaaggaggatgcagctaacaactttgcccgtggccactacacggttgggaaggagattgtcgatctatgcctggaccgtgtgcgcaagcttgcagacaactgcactgggctgcagggattcttggtgttcaatgctgttggtggtggtactggctctggacttggttcactgctgttggagcgcctttcagttgattatggcaagaagtctaagcttggtttcaccatttatccttccccacaggtgtcaacagctgttgtagagccatacaacagtgtcctctcgacccactccttgctcgagcacactgatgttgcagtcctcctggacaacgaggctatctatgacatatgcaggaggtcccttgacatcgaaaggccaacctataccaacttgaacaggctgatctcacagatcatatcatcacttaccacctccctgaggtttgatggggctatcaatgtggatgttactgagttccagaccaaccttgttccatacccacgtattcatttcatgctttcctcatatgcccctgtaatatctgctgagaaggcctaccatgagcagctctctgtgcctgaaatcaccaatgctgtatttgagccctcaagcatgatggccaagtgtgacccaaggcacggaaagtacatggcttgctgcttgatgtaccgcggtgatgttgttcctaaggatgtcaacgctgcagttgcaaccatcaagaccaagagaactgtccagtttgtggactggtgccccactggattcaagtgtggcatcaactatcagccaccctctgttgtccctggaggtgacctggcaaaggtccagcgtgccgtgtgcatgatcagcaacaacaccgccgttgccgaggtgttctcacgcatcgaccacaagtttgaccttatgtacgccaagcgcgcattcgttcactggtatgtcggtgagggtatggaagagggtgagttctcagaagcccgtgaggacttggctgctcttgagaaggactatgaggaagtcggtgcagagggtgccgatgatgagggtgacgagggagacgactattgagtagctggctaataagtagttctctggtggttaatggttgggttattttgagtatatactctatggttccactccattggatactgctgctgtgtgtgtttccattttgtactatgtagtaaattgttcgtagccccctattggccatgattgttcatatcatccttctttggtttgcaacgctattcgtccaatttcggtgtatatgctataatgctattatgttgcaagtgtgctgtgctcaaccattgggttttatttatatttagaaacagaaggcattattactcttcgctg

SEQ ID NO: 74035 - DNA, 215 bp, Zea mays
  unsure (1)..(215): unsure at all n locations
  Clone ID: MRT4577_16751C.1
gaaatggaaccccccttgtaggggggctttaagcgcggggggtgggtggtttacccacagcgtgaccgttacatttgcaaggtccttagcgcccgtttttttcgtttttttccttttttttctggcaaggtttgaaggttttccccgttaaggtttaaatggggggctccttttggggccccgatttagggttttagggcccctngaccccaaaa

SEQ ID NO: 74036 - DNA, 1921 bp, Zea mays
  Clone ID: MRT4577_167520C.1
agcccacgaagtagcgttggctgttgcaaaagcaaccgtttcaagtttcctccctagtgcacccaggaaatcgccagcacctcccctgttccctctctgtctctggctctctctcctctccgcccctttttatcgcccgatctcacacattttggaaagaggagagagagagggagagattagagggagcgccctgcccaagcaaagagaaaccgcggcgcgagaagagggaggaagggcagacgggcgagcaggatgagagagatcatcagcatccacatcggccaggccgggatccaggtcggcaacgcctgctgggagctctactgcctcgagcacggcatcgagcccgatggcaccatgcccagtgatacctcggttggcgtcgcacatgatgccttcaacacgttcttcagcgagaccggttctggcaagcatgtgccgagggccatcttcgtcgaccttgagcccactgtcattgatgaggttcgcactggctcgtaccgccaactcttccacccagagcagctcatctcgggcaaggaagacgcagctaacaactttgcccgtggccactacactggtaattcaccatgtttgggaaggagattgtcgatctatgcctggaccgtgtgcgcaagcttgcagacaactgcactgggctgcagggattcttggtgttcaatgctgttggtggtgggactggctctggacttgggtcacttttattggagcgcctttcagttgattatggcaagaaatccaagcttggtttcaccatttatccttccccacaggtgtcaacagctgttgtagagccatacaacagtgtcctctccacccactccttgcttgagcacactgatgttgcagtcctcctggacaacgaggctatctatgacatatgcaggaggtcccttgacatcgaaaggccaacctacaccaacttgaacaggctgatctcacagatcatatcatctctaaccacctccctgaggtttgatggtgctatcaatgtggatgtcaccgagttccagaccaaccttgttccatacccacgtatacatttcatgctttcctcatatgcccctgtaatctctgctgagaaggcttaccatgagcagctctctgttcctgaaatcaccaatgccgtctttgagccctcaagcatgatggccaagtgtgacccaaggcatgggaagtacatggcttgctgcttgatgtaccgtggtgatgttgttcccaaggatgtcaatgctgcagtcgcaaccatcaagaccaagagaactgtccagtttgtggactggtgccccaccggattcaagtgtggcatcaactaccagccaccgtctgttgtccctggaggcgacctggcaaaggtccagcgtgccgtgtgtatgatcagcaacaacactgccgttgctgaggtgttctcgcgcatcgatcacaagttcgaccttatgtacgccaagcgggcgttcgttcactggtacgtcggtgagggtatggaagagggtgagttctcagaggcccgtgaggacttggctgctcttgagaaggactatgaggaagtcggcgcagagggtgcagatgacgagggtgacgagggcgatgactattgagtagccggttaataattagttcgctggtgcttaatggttgagttattttgagtatactctgtatgggtccactccattgcgtgctgctgctgtgtgtttccattttgtattttgtgataaattgttcgtagccccctattggccatgattgttgttcatatcatcctgttttgatttgcaatgctattcatcgaagttcgatgtagtatatttcaaaaaaaaaaaaaaaaaaaaaaaaaaaaaaaaaaaaaaaaaaaaaaaaaaaaaaaaaaaaagaaaaaaaaaaaaaaaaagcggcc

SEQ ID NO: 74037 - DNA, 2221 bp, Zea mays
  Clone ID: MRT4577_167521C.1
tttgtacatatgaggctgaatacatatcacgactctaaaccatccatttggttatgatctttttttaagaaagagcatatagttttttgaccaagaaaataagcatgtagttatgactaccaattgttcgttttagattaaagatgattgtttgaattgctgcagttgtaatctacatagacaaaaaacaatgtaaaagcaataaaatccggtacaaacattgcaatggtccacctagcattcttaattctttgatcctttcataccgcgttcacgttaacggacggcagcagcgggcgggccggccggccggctcacgtgaacaacgcccacgaaacagcgctggctgttgcaaaagcaaccgtttccagtttcctcgccagtgcacccccctcccctgtcccctccctggctccctctctcctccgcccccttttttatcgcccgatctcacacattttggaaggagagagagagagagacagagggagagattggagggaggcccctgcccaaggcaagagaaaccgcggcgcgcggagagggaggaagggcagacgcagacgggcgaacaagatgagggagatcatcagcatccacatcggccaggccgggatccaggtcggcaacgcctgctgggagctctactgcctcgagcacggcatcgagcacgatggcaccatgcccagtgattcctcggttggcgtcgcacatgatgccttcaacacgttcttcagcgagactggttccggcaagcatgtgcccagggccatcttcgtcgaccttgagcccactgtcatcgacgaggttcgcactggctcgtaccgccagctcttccacccagagcagctcatctcggggaaggaggacgcagctaacaactttgcccgtggccactacacggttgggaaggagattgtcgatctatgcctggaccgtgtgcgcaagcttgcagacaactgcactgggctgcagggattcttggtgttcaatgctgttggtggtggtactggctctggacttggttcactgctgttggagcgcctttcagttgattatggcaagaagtctaagcttggtttcaccatttatccttccccacaggtgtcaacagctgttgtagagccatacaacagtgtcctctcgacccactccttgctcgagcacactgatgttgcagtcctcctggacaacgaggctatctatgacatatgcaggaggtcccttgacatcgaaaggccaacctataccaacttgaacaggctgatctcacagatcatatcatcacttaccacctccctgaggtttgatggggctatcaatgtggatgttactgagttccagaccaaccttgttccatacccacgtattcatttcatgctttcctcatatgcccctgtaatatctgctgagaaggcctaccatgagcagctctctgtgcctgaaatcaccaatgctgtatttgagccctcaagcatgatggccaagtgtgacccaaggcacggaaagtacatggcttgctgcttgatgtaccgcggtgatgttgttcctaaggatgtcaacgctgcagttgcaaccatcaagaccaagagaactgtccagtttgtggactggtgccccactggattcaagtgtggcatcaactatcagccaccctctgttgtccctggaggtgacctggcaaaggtccagcgtgccgtgtgcatgatcagcaacaacaccgccgttgccgaggtgttctcacgcatcgaccacaagtttgaccttatgtacgccaagcgcgcattcgttcactggtatgtcggtgagggtatggaagagggtgagttctcagaagcccgtgaggacttggctgctcttgagaaggactatgaggaagtcggtgcagagggtgccgatgatgagggtgacgagggagacgactattgagtagctggctaataagtagttctctggtggttaatggttgggttattttgagtatatactctatggttccactccattggatactgctgctgtgtgtgtttccattttgtactatgtagtaaattgttcgtagccccctattggccatgattgttcatatcatccttctttggtttgcaacgctattcgtccaatttcggtgtatatgctataatgctattatgttgcaagtgttctgtgctcaaccattgggttttatttatatttagaaacagaaggcattattactctg

SEQ ID NO: 74038 - DNA, 272 bp, Zea mays
  Clone ID: MRT4577_167522C.1
caataattcatacaacggcaaccttctgaggccttgccatataacagcaagcgctttgcaacaaatgatgacgaaatggatgatggaactagaaagacactaatctagcgcgagattactctaggtgaggggagatctatactaattgacaggaaagcattgacgccgatgagacgcatcagcattcagtttacgattgtgagagcagaatattcatggacatatagctagcagactagcttgctgcatggggctacacatggaagaaaatg

SEQ ID NO: 74039 - DNA, 415 bp, Zea mays
  Clone ID: MRT4577_167523C.1
accacgcgtccggtcttccctatagagccaatcgcaagccttgctgccatggaagttgggaggggagcacgtgcccaggtgcccgtccaggatccaccacaaccgccagtgccttttacaggtcatgccgcggacggcactgcttcgccttgctgcagcttcgacgcgcgcgtcctcggctcccgcggcgcggcggctgtactcgtcctcacactcacacggacacggcagcgaggagcacgcgatcactcgggaggatgagcagcttccaccgccgccccacgggccggaccccggcgtgcggcggctgcctcgtcgccgtggagagcatcggtgagcatggatagatagtaagcttgcattcgagcacttctgcagttctgctcatgcgaatacccagtgtttcttttctgca

SEQ ID NO: 74040 - DNA, 1764 bp, Zea mays
  Clone ID: MRT4577_167524C.1
tggattgacgaagtctgtgacgcctaacgatctacctacttcctcattgggtacctcgaggccggccgggggccactcgtagtcgtaggcactttcatctgtgccctctgcgttcgagatcgatctcagctggcaccgtcccagttcgccatggcggaggaccggagccccaagcccatccactgcaaagcggcggtgtgccgagccgccggcgagccactcaccatcgaggagatcgtcgtcgacccgccgaaagcgtacgagatccgcatccgggtcatctgcacctcactctgccacaccgatatcaccttctggaaagctaaggtggcaccggtgtttccaagaatactagggcatgaggcgtacggggtagtggagagcgtgggggagcacgtggagggcttcgcggcgggggacaccgtggtgccgacgttcctggggcagtgcgagcgctgcgccagctgcgcgtcggagcacagcaacgtgtgcgacgcggtgccgttcgtcatcggccccgggatgcggcgcgacggcaccacccggttccgggacgcgcgggggagcccgctgcacgacctcctcgccgtctccagcttcagcgagtaccaccgtcgtggacgtgaaccaggtggtcaaggtcgaccccgccgtgccgcccaagctcgcctgcctcctcagctgcggcgccggcaccggggtaggagcagcgtggaggtctgccaaggtggagccaggatccactgttgcaatctttggcctcggatctgtcggtttggcggtggtccaaggcgcgaaaatgtgtggcgcatccaagatcatcggcgttgatctcaaccctgacaaggaggaagtagggagatcgttcggcgtcacagacttcgtcaatccatcgcagctggacaagcgttccgtcgtagaggtgatcgttgagatgaccggcggcggcgtggactacagcttcgagtgcatcggcgtgccgtcggtgatgaccgacgccttcagatgcaccaagatggggaagggcaagacgatcgtgctggggctggggagggacagcgacgaggtgtgcctgccgtcgctggagctgctgttcgggaggtgcgtcatggggtcgctcttcggcgggctgaagcccaagacccacatccccgtcctcgccaagaaatgcatggacaaggagctgcagctggacgcgctggtcacgcatgagcttggactgcaggacatcaacaaggccttcgacctgctcctgcaggggaaaagtctgcgctgcatcctctggatggacaaggacaagtaacggaaggagaggggcggccggaccaatccttcctgtctctgaataaatttgccctgttttttcagcgaggcgttgctgaaagctggtgttagcggcgaccaagactatctgttcctgaaaccctgtgtatcagtatcgtttcgttgtctgaactgattaaatcctaatatcgatagattagactctccccagcaaccgctttgtcccctgaataaagtgattcatcatctcttttttacgtctagcaaaaaaaaataaaaggtccctacaagacagcgaaggttaccgtctgtccccttgtgtcgtggtttcggaaatctgacacacgggattatattgattcatgcccggattatagtacagtgtagtactgatcgtaaaaaaaaaaaaaaaagcggtataaattgtgtgctcgtgtgtagaaaaaataaagagtttcccttttatactttaagggatta

SEQ ID NO: 74041 - DNA, 188 bp, Zea mays
  Clone ID: MRT4577_167525C.1
ggcgagggaggacggcgccgttgcgcacgctgccaccaccggtaccctactaacatggcggctctcactgtccccttttgttccacccttctaacatctgactcgacgtctgatctgccccgcgatcagacgtagcccgacgttcctgtcatgcttttcgtgtcactctctctcctctaacgggacgc

SEQ ID NO: 74042 - DNA, 261 bp, Zea mays
  unsure (1)..(261): unsure at all n locations
  Clone ID: MRT4577_167526C.1
gttggggacaaacatgatacacctcataatgcgatgcagtggcataggttctgagttgggaaagatctccctgaatagcacctcagtgatctcaggttcctatgttgagctgagggcatgatgggacgtctgcaggtaaccatggaaatcatcgatgagctgaggaagtctgtagatcagaatatgccagtactgcattacctttcaccttgctagctagcatggcaataaaatgagatcatcnacagcggcgcggttaag

SEQ ID NO: 74043 - DNA, 555 bp, Zea mays
  unsure (1)..(555): unsure at all n locations
  Clone ID: MRT4577_167527C.1
gccggatcgccatanatttagaccactagaacatagaaagcacaatagtgtgccgacaatggcagccaaaatatggtgccttcttatgctcattaggatcactgcaagtgctgctaccgggacacttttgccgaaaagctcacaagcacctatagcttgcatttttgccccgtacctataaccagcgccgacattcaggtatgtgaaaacgcgggaggttcaaccctacaggatccaacaagcaatcgcaggtggcatcctacctttatcacccttggtgctacaacaatcatcagacctattacagcagttacctttgctgcatttattggaacaaaacatcaaggcacaacaactacaacaacttgtgctagcaaaccttggtggctactctcagcaacagcaagatgtttcattcaaccaactagctgcatcgaactctgcatattatttggaacaacaacaaccacccatacacccgctacctggacacctaccccccagaatttcatccattacaaccaactggccacattgaactctactgcttattta

SEQ ID NO: 74044 - DNA, 291 bp, Zea mays
  Clone ID: MRT4577_167528C.1
cctcctttttttttttttttttttttgtatgtttcattcatttttctcatcacgcaacgacgacgacgccctcctattactgtgtacacatgcgcgcttcaatcctatccacctgcagaggcaaggactcgcgcgcggccacacactactggtagctgagctaatcaaaagcttgctagctagcttgctaatgaagaatagctaactaaccaattctcacaaaccacaccgcctgcaaggtctggacacatgttagtctgacagacctcgttcatgccaatcggtgcaggc

SEQ ID NO: 74045 - DNA, 337 bp, Zea mays
  Clone ID: MRT4577_167529C.1
aaaaggtggacagaacatggctttacaattttacagaagcttgagctcttaacccttgagggaccctcccctaactctctagacactacttttatcatcacaacattgttttgacactacttagccgtgaccacctactatattattcacatagccttcatcaataccaacaacttcttattctattacatccaatctatcgcttccctaatccatgaaccaaagaatataccctctccttgatgaaaatcatcacttcattatattgcacaacttataatcccttttaattatcttttcccactactttaatagatttattttttacctctaccta

SEQ ID NO: 74046 - DNA, 2800 bp, Zea mays
  unsure (1)..(2800): unsure at all n locations
  Clone ID: MRT4577_16752C.1
cgcccacggacgcaacctccctccctccccgtccccgttcatgtcgcccccgtccgtgatcccctccccgccctcctctccgcgaccccatccatcctgtcgccgtccacgcccagcagcgctcaaaagcaaaaaagggtacgaatacgaatcccaatccagggccggagggcgagcgaactcaaaagcaagctgttccagtccaatccgccccagtccaaatctaatcgccgggtttaggcagaaggggtgggacgcggcgaggtttaggcggggtttgttttgtccctttcgtgcgattctgctctccgcgcgggaggcaagtactgacggaagcgaagaccaaggcggaggagggggtccccggcggtggaagtggaacgcgccgatgcgcaagtttcaggactccatcaaggccctccaggccgacatcgatcatgccaatgcgatagcagggtgtcggaattcttgagggactacgatggctcggtcatccagatgcgggtggcgtacagcgccgtcgcgcatttcctcctgcagtggaccgactgcaagctcgccggcgcgctcggcctcctcaaggttatgctatacaaggtgtgcgcggacggctcgtcggcgcttcctgattgggacatggaggccagcatcagggagttttacggcgtcattttcccgttgttgctgcagcttccgagtggcatcaccgagctggacgacaggaagcagaggaagctctgcctcaagaaattcaggagcagggatgagcagctctgggaggtggacacggagagggagcttgagtgtgggatctgcctcgaggaaatgacacctactctactccgcagcttaaaacctcaagatatgtcggtaatcaaacaagtacaagtttcaaggaaatgggaatttcatggaaatacagacattgggtccatattacacattgatatgattttggctgacaaagagcgctgtctgaggtgcgtggtcaagtcgaggcgaagatgagcaaggaggatgtgctcaaggtgcaggtgagttcgctccactcttcttcttcttcttcttgccgatcgacccaaccaccgcactccacctacacacaggcacatgttcattgtttttgctgatttcaacatagtactgctcagtggcggatccaggatgagatgcaaggaggggctactagcctactaaaataaagctaaaaatatttagatataactaaatgatctaattaatatagaccaaataagtatgaaaataactaataagttgtgttaaaaagtacaatactcaaaacatacccctaatgagttgtgttaaaagtatctttgttccggttcttgatgagaaatttatccattctatccctataaactaaaaaataattttatcaattaacctagcaaataattgaccaatccaaaataccaaagtataaaacctaatctcttggtgaaaggcaatctatgtttagcaagttaagaattatatagagtaaagtctagattctagagggaagataaatgacgtcgattgaaaataaaaagggcaaggcacagtcttgaaatgacactacacactacaccgatcctccagcccttgccacgctttttcttttgtatctcgtgggtcatggcttgcagtgcagcctatagcttgcactgcaggacagtgtgtctggcgtcttgacctgcttacaccaacacgtgactctctgttggctgctgcatactcgccttgttgccggcaccgcgaccggggctgcagcccaggcagtcccaggttcaaatccgcccctggtactgcttgtttagtagtgaagacagagactgcagtgaaaacagaccaccacctgtattctttcaggtgttagaaatgtaaaattttgctttctggttatgtgtgttcctcttgctgcatggttattaccccacccccatccatctcgcctgtgcagaaataataaacatcactagtgtgcgttaactattttcttgatactgttgtttctattgttctcaaggtcttggattcaacatagtactagcagtttggaatcacccgacggggatgctttccatgtaataaatatttttggaacgtttcggatttaacttatgttgtttctattgcaatcaacatggtgtcactatttggattcaccagtaagaatatttgccatttgggcttgttaattagggtgaaattttatataaaacatgcctcgttcacttgctttccagttcttgatttcagatctctgaagccaattacgtacacattttcctaccacgacttttattctgctttccgtttctcaacgtcttggacattgccggcgagcgcggtctcctcgacaacttctactgctaactcgggtgcaagatgcccagcaaacttcccaatccagctgccggcaaggagatgaggttcccgacggcgacaattttccactacacaaccggattcttcagcagcatatggatccgttgaagcgccgtgtgacaatgccaccaaagagcagcaacaaacaagctcaaagtctccgctaaccactaatctcataaagcttgaattttctcattgctatgtttccttctcctagcaaagttaagatgtttgcacatttctagcttattaggtccttgtgtggaatgtgtttgaacaatgatctcatttaaacaaaaaaaaaaaaaaaaaaaaaaaaaaaaaaaaaaaaaaaaaaaaaaaaaaaaaaaaaaagggggggtacnnnnnnnnnnnnnnnnnnnnnnnnnnaaaaaaaaaaaaaaaa

SEQ ID NO: 74047 - DNA, 396 bp, Zea mays
  Clone ID: MRT4577_167530C.1
caaaggtggaaagatacaggaagcaaagattatatttaatgaaatgaaagaaaaagaagtcaaatctgttatccagctacatcccataccagatttgacttctttttctttcatttcattaaatataaagaagtcaaatctggtatgggatgtagctggataacagattaaactatctctcttttctagatgtagttgaagtggacctattgtatttgtttatagataagaggtgagacccccatatttgaatgaactgctgtgggctgtaaaaaagcaggggaagacaggctcacaggtgccatccgtggatctcaaccaagtgcagatttcgaagacatgagctgcgagatgatatactgccaggtgccgccttcattggaagaggacccagcg

SEQ ID NO: 74048 - DNA, 570 bp, Zea mays
  unsure (1)..(570): unsure at all n locations
  Clone ID: MRT4577_167531C.1
cggccgggnacccccagccggcgtcaccctcatgagccagccgccagccccaggcttctagcctctgtccaagccggcagcccgccacccgcgaggccgcgaccggcgaccgcccgcccctgacgtggtgactgcgtcctcctccgctctccgtgcgccaccctgaagcggtgaggcgaggacctccaggcaccgccctccctggttcggcggctccctcgaggccttcctccccaccggttcagcagctcccgatccgcacggccaaaggccgattcgcgctcctccagccttcctccgcgtccaacagcaagtgaaaaacttcaacccaagaatggcgatgtctgggacaagagggttaaagcatggtgttgttccaagagctcaagagtacaacagtgttcggggcaaacatcttcaaggagggttctgatccgaaaatccaaccagactctgagtatcctgactggctgtggcacttgctcgacaagcgtcctgtactaagtgagctgcggaggaaagatcccaagacactctcttatgaagacctgaagcggtttgtcaaggtgg

SEQ ID NO: 74049 - DNA, 214 bp, Zea mays
  Clone ID: MRT4577_167532C.1
cttggaggacataagcttgtcactgttcaacatattcgtccgccagcactgggccacatacggtcgccactactacacacgctaccgccacgagaacgctgatgcacgggctgctaaggaccttacgcgcaaacctagtaaccgtgcagtcatcactttctgatgctaacaagctggtcaaggagatccggtctgatgtcttctgaagtacctg

SEQ ID NO: 74050 - DNA, 321 bp, Zea mays
  Clone ID: MRT4577_167533C.1
tcacgatcccaacacgaacgagcacacaatctcgaatactcgtttaggaaaaaccacagtgcgtcgggccacgcatgcatcatggactacggtcaacataggcatatcggccactgttccacggtccatgttgaccagtacggtaacccactcggcggcgtatagcactgaacacgagttattacacacaacactgaatccaccatcagaatgggccacttgagtgagcactgcggagctgtcataggtgtcatgcaactccagccttcgaggaatgatcacaagatcggctgcatactgcatcgttccggcagctacagc

SEQ ID NO: 74051 - DNA, 1179 bp, Zea mays
  Clone ID: MRT4577_167534C.1
cattgggtacctcgaggccggccggggttgttttagtttggagaagggatatctaaacacgtctcggcgccggcagcgagggtttcccacccccagccggcgtcaccctcatgagccagccgccagccccaggcttctagcctctgtccaagccggcagcccgccacccgcgaggccgcgaccggcgaccgcccgcccctgacgtggtgactgcgtcctcctccgctctccgtgcgccaccctgaagcggtgaggcgaggacctccaggcaccgccctcccccggttcggcggctccctcgaggccttcctccccaccggttcagcagctcccgatccacacggccaaaggccgattcgcgctcctccagccttcctccgcgtccaacagcaagtgaaaaacttcaacccaggaatggcgatgtcttggacaagagggttaaagcatggtgttgttccgaggcatgccgctcaattggtagagagcagaagccttgcaattgcaagcaaggcgaagaagggtggaaagggtgatgctggcaaaactcctgctctcagccaagagctcaagagtacaacagtgttcggggcaaacatcttcaaggagggttctgatccgaaaatccaaccagactctgagtatcctgactggctgtggcacttgctcgacaagcgtcctgtactaagtgagctgcggaggaaagatcccaagacactctcttatgaagacctgaagcgttttgtcaagttggacaaccgatccaggatcaagataaggaatgacctcaatgctaagaactgacctggagtcttggacgaaacaggacctgctctactgttctttttattattaatataatactagacgatatgaataattttttctggagtttttggcaaaacatagcgacttgggatgttaaaatgttaagatgtgcttggtttgttactcttttaggcagcttacgacactggcatgctttttgttcttccatcttgggaaagatgcagctttgtgcccagtacttagcaaattatcaagttccatggttctgcagcattatctgaggtcccagcatacgattcagtcccggtttatgtatctcccagttcatctgaatcctttttggggtattgtaagtttggattttcattgcctgtgttaattgggttttcctgc

SEQ ID NO: 74052 - DNA, 531 bp, Zea mays
  unsure (1)..(531): unsure at all n locations
  Clone ID: MRT4577_167535C.1
ttggcccaaggtttggcttctggcagaggacgctggttaactttgggacactccccggacaggtggcttctcaatggggcggccactcggttactcccttcccacattggaagttacataaggggacgcataaagggggttttggttggttccaaaccacatggggaacccggtggccccaactttctttcacatccgggaggaggggccttaaccccactaaaaccaatgacatttggaaaagttttggaaaccttcaaaaccaaaggacatccctggccgttttggggaaaatccccttcaaaggctttcttttttggcttttcccccaaccttttcccccccccttcaatttaaaataaggtntncccaaaaatgtcccaaaagggtcttttcttacccttcaaagacagaaaaggggtgaatttactaaccaggaatatttgctttttggaagaggaagtnntggcccccccttttaatcccttacattaaggctttttnggcttggatgcctttaaacccttcttc

SEQ ID NO: 74053 - DNA, 439 bp, Zea mays
  Clone ID: MRT4577_167536C.1
cccacgcgtccgcacttgagtaggtaagaaattctggaacctctttcacttgcagcctatgcgtgatcagaagggtgatgttcaatacttcattggggttcaattggatggaactgagcgtgttcgagaggctgctgcaaaagatggtgccatactggtttgtttctaccttaatggcgactagcatatatgtgctattgtgcttgctatcacaagtacctagaaaaatgagaataaaatgccagataactttgtcatggctgctatattataaatgcaagccatccatagtgtagtgattgcaatgtttattaacatgtagtaccatctagtattctagtgtttattaacgatttatatctcttaagccctggtgattaacattggcttaatttgtgttttagtttgcataaggtgatttttgcaactaattttgcgt

SEQ ID NO: 74054 - DNA, 317 bp, Zea mays
  Clone ID: MRT4577_167537C.1
ggggaactaaaaatcatgcttccacacttattatttcactccttgcaatataacaaacaattacaaacatacctttggttttacacaagggatagcttaaaggttctttgaaggctgagctaaatgaaactttgaactttcgaaaggggaatttatgcatgacactggtactttatttataggcgaaagggacaacttcgtatgaaattacaaggccccccacaaagtttacacatatgatttacatgtttcacatgggaaaaaaacgaattcctccttcctttttgctgaacaaaacttcggggacaacctctttt

SEQ ID NO: 74055 - DNA, 1148 bp, Zea mays
  Clone ID: MRT4577_167538C.1
cggacgcgtggcgggcccagcaagagaagagaggtaaccataaacctgcggctccatcgaactctgcagcaagctgccagcctgcgtgcgccgccctagcttccgtcgtcgtcatcttctgcgcgggacgatacgcggggcccctgcgcttcgccaccatctcaacgaagttcctctcgcagcgggcagaccccgtacggcggtgcgtaccccaccggcacggggccgcgtttgcagggtgccgccgtactaccacacaaggcgccttttttccccttgtgtgcgcccgcaatgcgctcttgagatccccagctcctcctcctcggtctgcttctcctgctccggctgctggccctggccgcctacccggagcgggaagagcggcgggagccctgcattttgttccggttctccgcgtgcctcatccgcccgcccgcgatccccgggaggactcttgggaagccctccctgtacgtgactactgggacctccaccaagctcttcaagttccaggatcagttcctctgtattgggcaatctctagacctctgtagattatcagcctgattcacaacttgttgcaggtgcaagaattcgactgcagattttaatcgtgattgacggcagattcctggtttgagggcatctgttggtgtttcgagctaacaggctcctttctccctgctcgaagtttcacttacttcaacatgtggtttctatggatccagacttccaaagttggaatctgatcactcgcgtcagtgcttctcagctcccttgtttgccgttatggaggagcagaactcgtggctcaggaccaagttctccaatactgtctatgctagggtggatccccggagagtacctgttgctccgcttagcaaggatgttgagcggaaactgcacaaattcttcaagatgaagaagactgtatcgatgcctgttgatcgggatgatggagacacagggactgcattcaagcactgcgctagcttgccgctagttcgatcccagcctcagcttgacagggacaaggtcaacaagcccgagagggcgagcctggagattccttcagctcccagatgaactcagagagttgcaagactccaaaagcagggagccctggtcaagacccccagttcgatgat

SEQ ID NO: 74056 - DNA, 379 bp, Zea mays
  Clone ID: MRT4577_167539C.1
cgggtgagtggtaccctccctttgctctacctgtcttctctgctttgcggtttctcccctggtcggcagccacccccttcgcgttctctttattcttccctttgcgtcggagccctgtgcttcggcttcccccatgaaccgcgccaaattcattgcgcaattcccaaacgggagccgctctttttgcttcattcaaccgaaggatgaaagagagggcctaacttactaccggactgggaggaccctccgaattccatcctagaatctttttgtgtgcacaacaaaggaccgcgctacaatgggggaaggcttcgtgcccttgcgggacaaggagaacgacctacgcagggggctgctgtgctacgtaggggactggccc

SEQ ID NO: 74057 - DNA, 659 bp, Zea mays
  unsure (1)..(659): unsure at all n locations
  Clone ID: MRT4577_16753C.1
gntgacatatctgatgaagcggtaactggaaaacttaccgaactgattactttgacaagatcgggcggagtatccttgtcatgagacctggatgccagaataccaagaatgccaatgggcaagtcaagtacttggtgtactgtatggagaatgcaattctaaatctgccacatgatgacggcagatgtcctacaaggccattatcctgaaggttgggtgtggcaattctttttaacgctccaaagttttttgagcctttctggaagatggcaagcccccttcttgagaagaagaccagaaacaaggtcaaatttgtatactcagatagacctgacaccatgaagatcatggaagaccttttcaacatggatgagttagaatgtgcgtttggtggcaagaacccagctactttcaatataaatgattatgctgcgaggatgagagaagatgacaagaagatgccatcattttggagccctgagaattcagctcttgcttctgagccatatcagatgagcagccaaaaagccctagnaagcgtttcaggtgcgaagactgaagatgctggatctggaaagatggacgacatggagactgctcctngaaagagtgaagaatcgggtactgaatctggagaaggagtacaaacacggactgaa

SEQ ID NO: 74058 - DNA, 385 bp, Zea mays
  Clone ID: MRT4577_167540C.1
tatatgtcagcgaatcgcctgcatctcacgctgccagaccatcctctccgctctcatagcggcagcctccagatcttcgtggctcgaagcgatcctctgctgtgagcaatctctatcaagtaccgactaacgagtgccaggcgcctatccttccgtacgcggaacaccaccatgcaatatgacgccattaaggtagctaaggtctgggactctggaggagacgagaccggcgaccatatgatctctgatatctctcagagaacgttctctctggtcggttgcctccagctacgtcctcacactaacggaatctcccagaatcagatcaccttcttttataacagcctcacatactgcttaaatctggaggattagctaggtccct

SEQ ID NO: 74059 - DNA, 171 bp, Zea mays
  unsure (1)..(171): unsure at all n locations
  Clone ID: MRT4577_167541C.1
ggggggggggcgttcccataatctcatgttataagataccctatgcctgatcaattgcggcccaggctatcctcttcatccggaagctgcttggcccctcattgcaagcaggcgcctctacatcatcancaactaaaccccccggggggggggggggcaattccanacctc

SEQ ID NO: 74060 - DNA, 199 bp, Zea mays
  Clone ID: MRT4577_167542C.1
gtgcttgagcgaaagattgaatatgcttgcaggacgcatgcaataatctgcatggttgctggtcaacatgtccacggtgatgagcaggtggcatagtggctactaagaagtcattgggttccctgtaccctaaaactgcgcttaactgctccgcaagaacggtgcgtgctgtggcacttgttaagaaccgtgagcatca

SEQ ID NO: 74061 - DNA, 397 bp, Zea mays
  unsure (1)..(397): unsure at all n locations
  Clone ID: MRT4577_167543C.1
acgagccagnnnnaanccgccggtgtaccggatatctggcatcccaccgagctcagcttccccttcctggcgtcctatctcctgcagttggtgatccgtgaggaggagggtgaggttcccagcaccttgcccacccagtgtttgatgaattggttcagctgcagctgtgcctcagtgttgtatgacgtcaccaaactcattaagcccctaccaactctggcgatgggtgtttcaagcatacctccaccagctccattgggtattcagctagtgctcgatgctatgcctcgtgggccactacttgggagatgtgcatgacaaaggggccttggccaccaactattcagttcggggatgcatgccactcaacgcaggccaattccctgggcatccttct

SEQ ID NO: 74062 - DNA, 463 bp, Zea mays
  Clone ID: MRT4577_167544C.1
aaaaaggaaaggggccccccaaaacaataagccaccccaaaaaaatgaaccggccggtaaggcaacccaggttaaaccaacccacaaaaaggggaaaaattaaggaagggaaaaccaaaacagaaaagaaaccttggccgggcccaaaggggggcaaaccccaaaaaaacccaggggggaaaaacttggaacttccgaaagggcctaaaaaaaaaagaaggggggtttttaaaaaacctttttggggaatttgcccttggcttaaccctcttaaaagggggcgggggtaagggacccgggtggacccccctttttaaggggcctccccttggaagaaccgaaggggggaaccccaaacactggggggggaaaagaatgggagggccccaaacaaaaatattttttaatgagaaactacctttttaacaccttttttttcaatttggggaaaaaaaaacctttg

SEQ ID NO: 74063 - DNA, 242 bp, Zea mays
  Clone ID: MRT4577_167545C.1
ccccccacccaaaaatggggccctggcttttttccagcagtggaaaccccctcgggtttaactgttttttgggccccccttaaaaaaaacccccctgggcttttaatcccgggccctttaaaccaaaattcctgggccgtttttggggtcccctgtccacccagggggccccaaatggcctaaaaatgtttttttttaacccgcaaaacaatttttttttttatggaaaaggggtttttttt

SEQ ID NO: 74064 - DNA, 379 bp, Zea mays
  Clone ID: MRT4577_167546C.1
aatcccccatccattttttttccatttgaaaataaaaacccccgttttttttgcccaaaaatcccgggaccctggaaaacatttaacatttttttttacacgaagttccaaacccttcccaccctggagggaagggtttttggaagggcccccccaaacaagaggttgcttcccctccggggatcgctttggcatccagggaagcccaaacctctttggtggagccgggggccccaatttcctttgttggggttttggcggggaccacccaaaattaatcgggccctgccccggggggttttattggccccccccggggaacccccatgccccttattttggtttttgggaggggagccccttgggccaaattcctggg

SEQ ID NO: 74065 - DNA, 390 bp, Zea mays
  unsure (1)..(390): unsure at all n locations
  Clone ID: MRT4577_167547C.1
cccacgcgtccggggggggggtagggagggcttcacgagcacagctttctcggtgaaggtaaagctgtttcggagacccgtttggcaaaacagctttgcatgtatttttagaacatgatctcacagaatcccagagagccgacaagtgtgaggggaagctgtgaaacgttaatattttcagctaatcccaccttattcccatgtgaaggcacagtttaaggagcttcatgggtgaagctgtttccaaaagacctgcttggcaaaaaaacagctcacaacatctcatgaaactgttggtgaagctgtgccaaatagacccttagttacacaataatacaccttgatcattatcagtaacagttatgttgntattggattcacagctgatgc

SEQ ID NO: 74066 - DNA, 295 bp, Zea mays
  Clone ID: MRT4577_167548C.1
cactttgtttgtcccagcaccaccagacgcgggaatatggacgtatagcctcagcatgaagcaagatagcaacgaagcagtccgcaggcaatgggttgctgcatcagcacagaagtgcgcacgagccgccgggcacggcggctggggaagtttcccggcgtccgtcggcaggcagccgacccgccgccgccccctcctgagggggcggggggggaccaggtgctactactgcaccagactgccaagcacgtgcccatccacgtgaggcttacgatcgtggacatgctgcggacgg

SEQ ID NO: 74067 - DNA, 735 bp, Zea mays
  Clone ID: MRT4577_167549C.1
aattacaccagccgcgaccgccgccgccgacgactccccctccggcacccgaaatggcgtgatccctgcccccgattcccctcgccccccgccgttcaatacctcccgtccaccgcgacccctccctcctcatccccgaatcgcggagatcccggcgcccccgaaccctaaccctagccaccaccaccacccaccatgaaggcctccatcaagttccgcgacgacgaccggccgctgctgcgcgccaaggtgcccatcggcgtgctcgggctgccgttcctctcgggcgtctcggccggcggcgacgccgaggacctccgcttcgatctctccaccgccttcccctccggcccggggctccgcctctcgtaccgccccaacgacccgctccagcccttcgcgctctccatccgcacgggcctcggcgcgctcggctctcccgtccgcgcccccttggcgctctccgccgagttcaacctcctctcctccaacccgcccgccttctcgctcctcttcaagccccggctcggcgacttctccctcgccaactccgtccgctcgccgcccttccccgacacccccgcgctgccgccgccccacaagctgggcgacctcgccaacggcgacgaccacgaccatgagggccacaaggagttctccctcaacgggaacgggttcgcggcggacgtcacggccgccgggaccaccggaggaggggtgggcatgctgctgtcc

SEQ ID NO: 74068 - DNA, 377 bp, Zea mays
  unsure (1)..(377): unsure at all n locations
  Clone ID: MRT4577_16754C.1
cactcaaacgaaggctcttaaaacaactcaaaaacgttgttccccccgcacaaaaaacaagggttgaaaaaaaaaaattgtgggggcctcacacacaccnncaaaaaacanaccactcanataacgatgataaaccacaaagtctcaagatcaactcatccataatgtcttccaacacaaaaaataaacctgttctgcagaaaactgcaccaaaggtcaaacagcccgcacaacatccagatgatgacaaaccataaccaagcacgttgcccagcaatgcccgtccaaaaagaggaagacatacctctgacgattcaaaacatgagaacccactgactaccaaaaaatcaaaagctgccgcaagaggaaacccaaaa

SEQ ID NO: 74069 - DNA, 312 bp, Zea mays
  Clone ID: MRT4577_167550C.1
ccgatcgtgcgtcccgccagctagccattcactttcctctctttcacttacgcttctaaggcttctctggcgctttaccaaaccttaaccggatcggttcccatgccgagcttaaacgaatgactggactgactacaactccatatccaattgcacttgaacggtcgctactagtactccagctaagccactgcttctctgctaacctctaacctccatccctattatacttccacaatctactaccgaaccctataactgtataccaggatactaatggcctctaccagatcgtgcgactacagcatacac

SEQ ID NO: 74070 - DNA, 494 bp, Zea mays
  Clone ID: MRT4577_167551C.1
tcctctagagcggtcgtcctttttttttttttttttttttttcttttttttttttttttttttttgggtttttttttttttctggccagctgaggttacattcccatcatttaaaagaaaacaaagctgcctttttttacataaaaaacatgactatcaaaaccttacccccctttatggcactttacaaaacgtcagtataatgagtaacataagtaacactacttgcttttggttcccctctggttcttttttttttacactggacttgatggggcaggcaatgacaaaagatcattttttaccaccaccacctttttttttttttgggtaacccttttaggctttggaacatttggggggggcgcctttgaatcatatactgggtcattacatggccccatttggggaccaaactgaccacattttttgcatttgggcctctttttccccgaccctcattttactccaatgaacctttttgcccttggttt

SEQ ID NO: 74071 - DNA, 254 bp, Zea mays
  unsure (1)..(254): unsure at all n locations
  Clone ID: MRT4577_167552C.1
ngnnggggtttgttttttaatttttgggtggggttatatnattattaccaaatactctttacaacgcccgcacccaaaaaagcaaaagggaaaaaaacatccataggttcacccttaatactatatatatttatatccttgggtatttttgggcccctcacacttgcggttgccagccatttgattttgacaccggggagcttccccctttcaagaacttcgtgttgtgcctttggtggggctcgtcgtcgtcg

SEQ ID NO: 74072 - DNA, 888 bp, Zea mays
  Clone ID: MRT4577_167553C.1
gggtggtggaggaggaaggggaaccggtggggttgtcaggcggaccgtcgcggcgtcgacgaccatggctccgcggggtacccaagggtttgctcatgtggacaagcaacagcgtcatgttcatggagtattatcagatttcagatgcaacagtggatcaacagatcatctttctttgtatgtcgaggaatttaagcataagagctcacacagatcatctgttagatgtcttcctcggcaacagggaaatgtaacagaaatcagtcgcatgcaacctgttgcaaggaaagttcaggtagatatgaccttcaatgataaaggattgtgtcgtgctagcagaactgtttcaggaatgcgaattcaacctaaatattatatcagcagtcccaacaacaatttgaagaattctcctactgtgaagagttatagtgggatgagtgatttcaattatcaactggtcagaagtgctaaaaggtcagctttgccaaagatgggtttaaccagcacaaactgttccctttctgagaaaatgtcttttctgcgtcgaccacggcatggtgataatcatcagaaccaaagccgtatcagtgctttgaatcgaagaaacaaaattgtgaatcctaggggagcagctcacctgctaagtaaagataaggttcatgaacaccttaattcctcattggaaagacattcacaggctttgttaagtaatgcattgattcgagaaagcaactgtgctgttcagatatactcaatcaaaaagaacctgaacagctatggagctctgcttacagtgaatctgagaagatgttatgcttttcctccagtgacagcatttgatgatctgcagtatcgtcttcaagtgacactagtgatagcttcaactta

SEQ ID NO: 74073 - DNA, 480 bp, Zea mays
  Clone ID: MRT4577_167554C.1
gtgtgtgtgggggtttttttttttttttttttttttttttttttttttttttttttttttttttttttttttttttatttgttaaaaaaatgtcctataaaaattaaaaaaaaaataaaaaaaaaagtacaaaaaaaaaaaaaaaaaagggggtgtggggggtccatttaaaacctttcccacgggttgccccaaaggggacggaaacaaaaacccccaaccccaaccaaaccccccaaaaaccctcccccgcaaaaccattatttgcctaacccccatttaatgccaaaatgttgcaccccaaaaaaggcccaaaaaatcaaaaaaaaaaacccctccaaaaaattctggccaatcccataactcaccaaattaaaccctgcacccctttggagccttttcaacaaactaaaaaaaccccctgtggaaaaagcacaaccactccccaaaaaacccaattaaaaaatgggaaacctttat

SEQ ID NO: 74074 - DNA, 365 bp, Zea mays
  Clone ID: MRT4577_167555C.1
ggaaagaactgtctgtggggatgtatatatctcactggagatcggggccatcgccatgtattctgagaatggagcctgaacgccatacggtgctgaaattccgttgaccaaaacaagaagaagaagctccaagatagccatggtctatgacctgtgccgcctaccactactggccaaaattagacgacaacgggcaccaacatggacaccatgccggtgcgcagaaagtagtgcttgacgaactcgatgtacatgcctacccggctgaaaaaaaacatgggcccgaaccccatgctcaccaggcggaacacgagcccggtatcactgatcgaaagacgtgaacttggacagcgcggaggggaaaa

SEQ ID NO: 74075 - DNA, 1762 bp, Zea mays
  Clone ID: MRT4577_167556C.1
ggccgctttttttttttttttttaccaaacaagttgacgtacttgttttatttcttgaaagaatcagaaattcaagaggaaaagaaaaacaccaccaaaccaaaagtgccatggcaaaaaatatcattgccaacttgcacgagaaatactcaaattctaaatgcatgcaaaatgattacctgttgacccgagatcactgtatgccaccattaaatagtgttccaatcttccatgaaaccacttaatcccatttatcctcaattgacaccacctggttagggatttctgcatgctacctgctagtactttcaaatcattgaacagaatgcaagttagcatatttcatttttcgtagaacatctccacttttttgtagttcttacacatcaaaatgaagaaatacagcattgacattttcaatctcagtgtagcctcagaaaccacatcttctgatgcatctggtaaagaaagggtgttgtagagcttcatgtgctttcaggcgctcattaggatcataccgaagaagtccttgaagaagatcaattagatctccagcagaatgatcaacatgttgcatcacaaggttctgcagacgaggcaatttccagactgcattcatgcctcctcgtgacgcatggatagttccaccctagacccttactaacctctggtggtacttaatgtcttgtcgacaccacataattgtgtatgctgctctcgaaagttgtactcccaaaatcaatcagcttgatagcactagattttggaaggttcttaaagaaagaaccatcctttggtggtcgtatagaaaccttataatcaggcaccctgatagactctgatgaaacaaggagaatgttttctggcttcagatccgtgtgaataagtcgcaagtcatgcataaatgcaacagactctaatatttgtctggcaaattctcggacaaggtcaataggaaatgaacggtagctattctttcgcagaaagtcatataggcttggcccaagcttctcaaatactatacaaatatgattacgatagtcaaaccagttccgtatttgcacacaacggctgccagtaaagtcatgcttcccaagtctctggagcacatcaatttctatcatagcagcctctcggtatttctgaagggagcgtacaatcttgatagccactgcttcttggttttccaagtcccagcactccaaaacttgtccaaatgtcccttcacccatcttgttaagtatcctatatcttggtgtgagattctctccaaccgcaaaaacatagtgtccatccttgccatctggtctccaaggaggcgaaatattccgtggcggcccggtgtaataaattgatggtggtggaagaaatgcagtcgtgaaattaccattaattagttcctgcccacaatatagcatcggaattgccttggggggctggaacagcgtgggcgcgacatcccaggcgagccgggcccgtttgcgcggccgcttgtcggccccctggtgcggatactccgcgagccactgcgcctccattgccggcttcggaaccctagctgggtcactccatcggccgggccagtccggcggcgaattttggggggagggggatttgggaactggagagcggttcggcaagggccgtcgactcggagctcgatttggggttggggggggatttgggaggaggaaacgaaagcggttgtagcaggagggggatgggaagggacgcaggattttcccggcctgccggctcgagg

SEQ ID NO: 74076 - DNA, 2160 bp, Zea mays
  Clone ID: MRT4577_167557C.1
gccggccgggtctcgtttcctcccctcccaaatcccccccaaccccaaatcgagctccgagtcgacggcccttgccgaaccgctctccagttcccaaatccccctcccccaaaattcgccgccggactggcccggccgatggagtgacccagctagggttccgaagccggcaatggaggcgcagtggctcgcggagtatccgcaccagggggccgacaagcggccgcgcaaacgggcccggctcgcctgggatgtcgcgcccacgctgttccagccctccaagcacaactctggagttgataaaagcttttttttctcggctagaatatgcaattccgatgctatattgtgggcaggaactaattaatggtaatttcacgactgcatttcttccaccaccatcaatttattacaccgggccgccacggaatatttcgcctccttggagaccagatgacaaggatggacactatgtttttgcggttggagagaatctcacaccaagatataggatacttaacaagatgggtgaagggacatttggtcaagttttggagtgctgggacttggaaaaccaagaagcagtggctatcaagattgtacgctcccttcagaaataccgagaggctgctatgatagaaattgatgtgctccagagacttgggaagcatgactttactggcagccgttgtgtgcaaatacggaactggtttgactatcgtaatcatatttgtatagtatttgagaagcttgggccaagcctatatgactttctgcgaaagaatagctaccgttcatttcctattgaccttgtccgagaatttgccagacaaatattagagtctgttgcatttatgcatgacttgcgacttattcacacggatctgaagccagaaaacattctccttgtttcatcagagtctatcagggtgcctgattataaggttgttactggattcctaaacttttacacacttctgtattgtatttactgattaaggttctttttaggacatatacacattattaatgttctttagcaatcctttatttgccattaacgtggcactgtcatgtggggaccacctgtgcgacagtgacaaataggggattatggaaaactgcaacggcaggcattcctctgattcttatgtggacaggaatttgattacttaatttaataacagattatgcagaattgcaactgcataaatgcacctttttctctaaactttattttaatttgcaatgaaggtttctatacgaccaccaaaggatggttctttctttaagaaccttccaaaatctagtgctatcaagctgattgattttgggagtacaactttcgagagccaagaccacaattatgtggtgtcgacaagacattatcgtgcaccagaagttatccttggtataattgacatccgctgacccacacacaaagtggccaatttacctttattttctatttttttcttaatgacaccagtttctttgttttgtatttgttttttaaatctttgataaatgacaattcttgtttaggtcttgggtggaactatccatgcgacttgtggagtgtgggttgcattttagttgagctttgttcgggggaagctctctttcaaacacatgaaaacttggagcatttggctatgatggagaaggtcttagggcctctcccaaagcatatgattgtcagagctgatcggcgtgctgaaaagtacttcaagcgcggagtaaggttggactggccagagggagcggcctcacgagagagcatgaaggcagtctggaaattgcctcgtctgcagaaccttgtgatgcaacatgttgatcattctgctggagatctaattgatcttcttcaaggacttcttcggtatgatcctaatgagcgcctgaaagcacatgaagctctacaacaccctttctttaccagatgcatcagagatgtggtttctgaggctacactgagattgaaaatgtcaatgctgtatttcttacacatcaaaatgaagaaatacagcattgacattttgatgtgtaagaactacaaaaaagtggagatgttctacgaaaaatgaaatatgctaacttgcattctgttcaatgatttgaaaggtaattggtgtatataagcagagttctctgacagac

SEQ ID NO: 74077 - DNA, 275 bp, Zea mays
  Clone ID: MRT4577_167558C.1
gacccctcatgaggttttcttctaatttcgagagccacaatttggaacctttaacccgcctggcgttcctactacaactccggggacggggaatccgccgacgacaaggaacaatccagtgacccccaccaccaaggtggaccagcccaaggcagccaggatacccaggatgaggaacgcggggacaaccccggcacagacagaggcacgagacgacgacaaggatgaaaaggactacaacgatggcgacggtagcgacaaacacgaccccccgc

SEQ ID NO: 74078 - DNA, 382 bp, Zea mays
  Clone ID: MRT4577_167559C.1
ttagcaggggaagggcctcgtctcactttattacatgccctcctctgggctctcccttccctcttgggatttttggatcccttctggtagaagccctcaatttgctgctcaaaaccgtccgttcctagatattgccaaggcccccttgggtgtgcgttttatttgctgttgtaccccaaccttttctctccaaagggcacaggggtcaactgaatctgtggtacgggtggaccttggttcttcctccctcatggtaacccctttaggctaaccttttttttcttattttccgggtccgcctatcaaggaacccaactccccaagaggacctcaccctgggttaaaccccacaacgccacctggctgtccggatgccaacccg

SEQ ID NO: 74079 - DNA, 1675 bp, Zea mays
  Clone ID: MRT4577_16755C.1
cctcgaggccggccggggggcgagcagtcccccccttccacccgcgttcgcttcttccccagcatccagcaaggaaggaggaagaagaagagggaggagaggggacggtccgcgaatcctgcctagccttcgccgccttcctccgctcgagcggctcgccgaggaaatagcgaaagggcgctatgagttcagcgaatggtacaaccaatgtccatgggaaagaagcagcaccgtatgaggagcagctgttcaagattggtaaagttagaactgacctaggacaactatctggaaaatcagctctatattgctcagatgcttcaattgcaaggtacctgatagcaaggaactgggacataaggaaggctactaaaatgctgaagaaaaccttaaaatggcgttcagaatataagccagatgaaatccgttgggatgacatatctgatgaagcggtaactggaaaaacttaccgaactgattactttgacaagatcgggcggagtatccttgtcatgagacctggatgccagaataccaagaatgccaatgggcaagtcaagtacttggtgtactgtatggagaatgcaattctaaatctgccacatggtcaggatcagatggtttggctcattgattttgctggtttcaatttaggcaacttgtcaattcaggtgacaaagatgacggcagatgtcctacaaggccattatcctgaaaggttgggtgtggcaattctttttaacgctccaaagttttttgagcctttctggaagatggcaagcccccttcttgagaagaagaccagtaaacaaggtcaaatttgtatactcagatagacctgacaccatgaagatcatggaagaccttttcaacatggatgagttagaatgtgcgtttggtggcaagaacccagctactttcaatataaatgattatgctgcgaggatgagagaagatgacaagaagatgccatcattttggagccctgagaattcagctcttgcttctgagccatatcagatgagcagccaaaaagccctaggaagcgtttcaggtgcgaagactgaagatgctggatctggaaagatggacgacatggagactgctcctgaaaagagtgaagaatcgggtactgaatctggagaggaggtacaaacacggactgaatcaagcacagttgagcagaaaaacttgcctggagaagataatgccccagcagataaaagtggcctttaatctgatctccgggtatcaccatgaaacataaatgtgaaacattgataggagctctaccacatttcactaaggtttgaacatgaaaggcgacgagaaactcttttaacacggcaaatcggcatgcctgacttgttttgtagtcggcacctatttctctgtcctcaagatcttatttggggaaccttttcatgacagaatgagatctaccagatggtaaagaactaataccatactgttaccctcagttttcatgacagaatatggtctggtgttcagtttctgatatgcccttgtattttcgctggaaaagaaaaatactattgtatctggagctgttgggttaataatatatcattgttcaaaaaaaaaaaaaaaaaaaaaaaaaaaaaaaaaaaatcaaaaaaagaaaagaaaaggaaaaaaaggaagggggaagatg

SEQ ID NO: 74080 - DNA, 620 bp, Zea mays
  Clone ID: MRT4577_167560C.1
ccgccatgatggagcagctcttttgcggctcggcgtcagcgtcccgtcgccgccgtcatcgcggtacgtgtcgtgccacagtacgccggtggcgccgtgcgtgctcgccggggacgcggagcgcgccgaatgactgtcgtgcttcccggcctccggtaggaagctctcgcttttttccagcagccagtcgcttctccgcgaacaggctccggcgctttttcccgcgccctcgcctggcgctgctgctaaacagcacgcgggcgatggggcgtgcgatggcccctgccgcaagcggaaggcgtcgggcacgagcagcaagcagtccaaggccaaggaagcggtcaccacggctccacccgagtcccgggagactgcagagacgagggccaagaaacgcaagctctccacggacgaggagcggaagccggcggccggagagggatggcgtggcagtggcaagggtaaggagctggtggcggcggatgcggagccacccaaggactacatccacgtccgcgcgcgccggggccaagccaccgacagccacagcctcgccgagcgggtgaggagggagaagatcggcgagcgcatgaagctactgcaggacctcgtgccgggct

SEQ ID NO: 74081 - DNA, 697 bp, Zea mays
  unsure (1)..(697): unsure at all n locations
  Clone ID: MRT4577_167561C.1
ccacgcgtccgaactttgtttcggtttaacagaaaacatatcgctcaaagaaacacaaaacatactcgtcctctcgcaatagttcattgcatatagcatcaagtcctggcaagagttcagcttttgaatgggacattatacaagcgaccgattgatcacatttctagaacaagaaaaaattgagcaagcccaccttttttacatctcagggttaaacacactgagtgccaagatattgcgttaaacaactatctagaaggacaactttgtccaggcttttcactggtcttcctccggttatctcataagacaaagttatccttggccttgactttttttcagatttcaaggtacgtacacttaattcagaagaaaagggatttattcatgacaaaaacaggctttggatctcactatcttgtgccagctcacatgctcatcagaaaagctctgtatcctcaatgcttctgagtggatattaaaagcggaacttttagataattttttgtccagaanaaaggctacaaaacgacaccattttcatggacctgatatatanaaacttgacaacgacaacaaaataacatttgattgggtgtttttgcagaggcagaaatgctttaaagagctgcagtgatttttgtggacatgtttcagtctgatattgattcaagattctgncatgggactgctaggg

SEQ ID NO: 74082 - DNA, 134 bp, Zea mays
  Clone ID: MRT4577_167562C.1
cccacgcgtccgtgaaagatcagcagcaatgtcaagcactcgcctccatgaaataagttgtctgaccaaagaacgtatttgcattatgtattgtgccagtgcagcgggtgtattaaaaaaatgtgcattttaat

SEQ ID NO: 74083 - DNA, 223 bp, Zea mays
  Clone ID: MRT4577_167563C.1
acggggcccccgcggagggactcctaatactctttcttcctctttgactgaagctacgaacaaccctccccgctttgggtcggctcgacacagacgcatgttagttgattagcttgggcgatacttgtagtttgcacatatcgacatacgatcagtacaggttatagggcacatgtcaatatataatatgaggcatgggtgaaatgaatgagtgtcctatatt

SEQ ID NO: 74084 - DNA, 607 bp, Zea mays
  unsure (1)..(607): unsure at all n locations
  Clone ID: MRT4577_167564C.1
cccaaatctcgcgtgctgcctccgtcctgcccccagcgcgtgcgctccgatccgccgggtttcagcgctgcaattcggcacgagggcgatttgtctggcagaatacagttcagagcctcgagcgctgcggatcgaggacctggtcgccggattcgggcgccgcgggtgagacctaggcgccggagtttttgtgacggagctttggcgtggttggagggggggaggaaggagcggtctcatatgcgcgtgacggtcacgcccaaggacgaggaaaggctggttgacttgatggcgcgcgagcagccgcggtcggcggtggttgcggcgggcggagatttggtcactgctgccgggggcgggggcgaggggtcggatagggactcttcggggtccatagaggagattacggctgacgacttcaagaaggactcgtcgtcggcgttgggcggcgcggcggcggcggcggngccgatatctatgtcttgggtggccccgcccgccgtgggttacatgggccggaactttcgctatgccttcaatagctttgcgtggtcgcaggccgtgcggataagccggtggggctacaaccgcctgccccatacgacga

SEQ ID NO: 74085 - DNA, 374 bp, Zea mays
  unsure (1)..(374): unsure at all n locations
  Clone ID: MRT4577_167565C.1
cggccggaaaccgggncgaccagcgccgcgcaanaataaagaataaagacgcaccgggcgccgccacagaccggccagcgggggaccaaggcaacgaccacgaggggaaacngccggggagggagggcggggcccgccggnncgccgcacggggcggcgccacacacggcgcaaggaaagncgagaggacgacacggncgacgcgccggcgccaaccaccaccaccaccaggcaccacggcggccacgnnncggggcgcgagaccagggcgaggaggaacaacaccgcaccgggaggccacgagcgcaggagagcncccgccaggggaacggacagcccggcgggcggacaacgcccgaacggccgccgcggcc

SEQ ID NO: 74086 - DNA, 1190 bp, Zea mays
  Clone ID: MRT4577_167566C.1
gaaccactcaagcaagctgagctgaaagcagttagaaacgagataaaaccagatcctatgtccacgatgagggcaccccaagttccttccatgctaccttttaacaatcttgcttttggcgcaacatttggtggtccagctagtctgaagcccatgacaatggctccaatgccaatggccatgcctatgtcaccagctcctctcacaaagaagccaactccagcagcagcaactcctctttgtggtaaaagtgataccgataacttgaagatggctaaacaggtgctgaatgaagatatctcaaagttgcaatctcaggttaataaactgaaacaaaaatgtgatgcccaagaagagcaactgcagaaagcggaaaggagagctgaacattctgcctctacagctgcagaagagtcttcaaggcgtaatggtgtcttggagttcattaggttccttgacaatgagctcaagagcatcgcagatagggtgcccagcgacgctgccgacggcttaaaagccttgcaaaaccattcggagaggtttctcacagaacaaggtgttcgtccactggaagccacaggtatgcatcgtaagtgcgcaagcataggcaacctcgtaatgtctcaggacggcagtgctggaaacgcgagcagctcggctgcttccttggcgagcgagtctccatgccaccgtatcatggagaacagctcgagagctaacggtgacttagcaccgaagctcggtgtacccatggagaagtgcagctgattgagcagtttgaaccgggggtgtatgtgacgctcatccagcttagagatggcactaaggtgttcaagcgtgtccggttcagcaagaggaggtttgcggagcagcaggccgaggaatggtggagggagaaccaggagagagtgttcaggaaatacaaccacccggccaactaaccagcctcaccagacttaaccattggacacttcaagaagaaggcaaagttttcttcatgttgcttggggcattgctcctgcggctgtgtgccgtgggcctgtggcgatgtagaattaggttgtggatggggaagatgctgatgtagattctcattctgttgttgtttacctcccacagtttaccctttctctagctcacctcctacagtttactgtttcgcagttttgatatctcaaattattcattcc

SEQ ID NO: 74087 - DNA, 794 bp, Zea mays
  Clone ID: MRT4577_167567C.1
ttgggtacctcgaggccggccgggatctcaatttgctcagactcttctcaagaaaccttcccacagctaccaaatctatcacgtccacaatacgaacaaatcaattcatcccaaggactacgtaccaaatcatcagaagtatgggtaacggcaaggccaacaccgaggacctcaagggctccaagctcttcgatgtttcccacgtcaccgctctcgttactggtggaggaactggtatcggtctgatgatcacacaagcgctggtcgcaaacggtgcgaaagtatacatcacatcaagacgcgatgaagttttgaagaagacggaggagctgtatggaggtggcggtccaggccagattattcctctccaagcagatgtcagcgaaaaggatgatgtcaagcgtctttacgacgagatgtgtcaaaaagagccaaagggaatccaaattctggtcaacaacgctggtatcgctcgtgatgacaacaccaagttttccgcaaacggccagccaaacatggaggacgcccaagccatctctgaccattttctcaagtcccagcccgagaactgggccgacaccatgaagactaacgtcggaagcatcttctggatgtcaatgaccttcttgcctctcttggccaagggtggccaggtgactcctggatacacctcacaggtcatcaacgttagcagtatctcagggtacatgaagggtagcagcaacggccagttttcttacgcgtctagcaaggcagccgccacacatctgagccgcatgctttgcacaaccttt

SEQ ID NO: 74088 - DNA, 215 bp, Zea mays
  Clone ID: MRT4577_167568C.1
agcgagttgacttgtcctgcacgtgcggttcggaatcggttccgtgaggacttccactgttcgaggtcgtagtcgagcgtatcgagatggatgcctcatgatagtgagtaccaatgcttcttcatcggtattttctgggacactgactatcactttttctacatagccttgaccaaaaacgaattagatacccatcgtcctgtgatctttaattt

SEQ ID NO: 74089 - DNA, 465 bp, Zea mays
  Clone ID: MRT4577_167569C.1
aatgtcggttaccggggaccaaggaaaccagcgggaaaaagggggaaaaacccgggacccgccccgggaagccccccatgcccccccccaggggcccaggccccgggggccgggggcgggggagaacaaaggagccccgggaagccaggccaggaaaccatgcattttatcccgtagtgggccccgcacgggacgggacagacagagcgcagggggggcagggggggggcgcggggggggggccaggaacccgaggcaccctagccaggccaactcaacagagcaccacaacaagaaagctaacccaggggaatccgggcgaatcaaggcggcacaacaaggccattaagagaagacgcgggtggcggtggtccccctctttgggcggccaactcagggggccacgacctcgacaaccttgaacccaataaaaaaccccccgaacaacggccgccacatgggccc

SEQ ID NO: 74090 - DNA, 699 bp, Zea mays
  Clone ID: MRT4577_16756C.1
gggccggggcacgctgcctcattctcacccccaccatctcctcctcctccgccgcgctccggctcccccggatcgcccgccgccgcccgctctcctgctcggcctcgccgctcgccgtgttcgccaccatggactcgccgcccgagggctaccgcaccaacgtcggcatctgcctcgccgacccctccctcaccaagattttctccgcgtccaggatcgacatccccaccgcgtggcagatgcctcagggtggaatagacccaggggaagagccgcgagcagctgccgttagggaattgagggaagaaactggtgttagatccgccgagatcgtcgccgaggcccccaattggttgacatatgatttccccgcggatgtcaaagacaagctgaatgctaggtggggaacaaactggaagggccaggctcagaagtggtttctatttaggcttaccgggggtgacgaggagatcaacctgatgggcgatggatccgagaagccggagttctccgaatgggcatggatgacccctcagcaagtgattgagaaggctgttgatttcaagaaacctgtctacgaggagacactgaagcacttcgccccatatctacagtcagatccaacagcttcgtcgtagatttgcgcagcctcccacaagatccatattctatagctgtgccatcaataatatgtcgaaa

SEQ ID NO: 74091 - DNA, 956 bp, Zea mays
  Clone ID: MRT4577_167570C.1
gtctctttttctccgccccgcccgaagccgaggaggagaggggagcagcgagatcgtgcgcacctccgagatctccacgaagttgtggtaacatggggctcaccttcacgaagctcttcagccggctcttctccaagaaagagatgaggatccttatggttggtctcgatgcagctggtaagaccaccatcctctacaagctcaagctcggagaaatcgtgaccaccatccctacaatcgggtttaatgtggagactgttgaatacaagaacattagcttcactgtctgggatgttggaggtcaggacaagatcaggccattgtggaggcactatttccagaacacccaaggccttatctttgttgttgatagcaatgacagagatcgtgttgttgaagcaaaggatgagctccacaggatgctgaacgaggatgaattgagggatgctgtcttgctcgttttcgcgaacaagcaagatctaccaaatgcaatgaacgctgctgagatcaccgataagcttggtctccattccctgcgccaacgccactggtatatccaaagcacttgtgctaccacaggagaaggtttgtacgagggtcttgattggctctccaacaacattgcaaacaaggcctgaatggacaattctgctgtttcacggagcacatctgcacatggcgaggcatggtcattttgattggaaagtatcgtatttctatgctaggcttttcagagagattactctctaagaaactgatcttggcattggtactagtagatcgtttactgagtaatgcagtttattttaatgtatcccagttgtgttgtaagatacaactatgcgtccgaattacccattcaatttgaatctagatacgtagtttttgttatatacttatacttggatatatattgtttaatacatggtaaaagtaatatatcaagaaaaatattt

SEQ ID NO: 74092 - DNA, 1169 bp, Zea mays
  Clone ID: MRT4577_167571C.1
gggagcttcagacgaggagcgcacacccacatctcctggtcccgtcccacctgcaccgcaacctaccggcacgccaccattcccacgggctcacgtagaccgggcccagcctccgccccaccaacccttgcctccccacacctcagcatcaaccacgcgtctctttttctccgccccgcccgaagccgaggaggagaggggagcagcgagatcgtgcgcacctccgagatctccacgaagttgtggtaacatggggctcaccttcacgaagctcttcagccggctcttctccaagaaagagatgaggatccttatggttggtctcgatgcagctggtaagaccaccatcctctacaagctcaagctcggagaaatcgtgaccaccatccctacaatcgggtttaatgtggagactgttgaatacaagaacattagcttcactgtctgggatgttggaggtcaggacaagatcaggccattgtggaggcactatttccagaacacccaaggccttatctttgttgttgatagcaatgacagagatcgtgttgttgaagcaaaggatgagctccacaggatgctgaacgaggatgaattgagggatgctgtcttgctcgttttcgcaaacaagcaagatctaccaaatgcaatgaacgctgctgagatcaccgataagcttggtctccattccctgcgccaacgccactggtatatccagagcacttgtgctaccacaggagaaggtttgtacgagggtcttgattggctctccaacaacattgcaaacaaggcctgaatggacaattctgctgtttcacggagcacatctgcacatggcgaggcatggtcattttgaccctcagacgatcattgtttcattggaaagtatcgtatttctatgctaggcttttcagagagattactctctaagaaactgatccgatattaagacactataattggcattggcactagtagatcgtttactgagtaatgcagtttattttaatgtatcccaattgtgttgtaagatacaactatgcgtcggaattacccattcaatttgaatctagatacgtagtttttgttatatacttatacttggatatatattgtttaatacatggtaaaagtaacatatcaagaaaaatattttataatttgaagat

SEQ ID NO: 74093 - DNA, 615 bp, Zea mays
  Clone ID: MRT4577_167572C.1
gctttcctcctcttcttcatctcctagtacttgttgttcctagctagctctagttgagtgagcttacttttgggagcatcgagcccacaaggcatggctcgcatggcggtgtcggtgctggcgatcctgctcgcctcttgtgccgtggcggcggcgagcttcgacaaggagttcgacgtcacctggggctcgataagatttccggctccgggttccagtccaagcacgagtacctctacggcaagatcgacatgcagctcaagctcgtccctggcaactcagccggcaccgtcaccgcatactacctgtcgtcgcaggggccgacgcacgacgagatcgacttcgagttcctgggcaatgtcaccggcgagccgtacactctgcacaccaacgtgttcacgcaggggcaggggcagcgggagcagcagttccacctctggttcgatcccaccaacgacttccacacctactccatcctctggaacccaaagcacatcatcttcatggtggacgacatgccgatcagagacttcaagaacctggagggaaaggggatcgccttccccaagaaccagcccatgcggctctactccagcctctggaacgccgacgact

SEQ ID NO: 74094 - DNA, 333 bp, Zea mays
  Clone ID: MRT4577_167573C.1
ccttttgtttttttttttttttaactggtttctgtagacagaccaactaattctcgatgattcatatcagaggacatttgctgcccaacctgccctgactgggaaccagatgtaacatttacatccacggctgttcaatctctgacagggaaaacacatccaaggactgaaaaaggtttttggctggaattctactgctaatgctgttcagggaatccagactggataacgagggtgcaacagatatcatgaagctacttgagctttaaaatgcccgcataaacatatacaatctcgtggagcaacaatcttatgccatccaagaacgaaata

SEQ ID NO: 74095 - DNA, 436 bp, Zea mays
  Clone ID: MRT4577_167574C.1
acccagtgtaccctccccctgataaaacaggattcgccctccgacatggaagcctcccctacctcctactcgactcttgtggcgcactcggaagacacccaaccctatgacggtgctcataattttgatctataagagatgttgcagcatttccagctattggttgaaatgcgacctgatgtcgacaatgatcaccgcatctctctctcaaataataccgcttacaactccccttaggcctacgagctgaacgactagtttggaaggccatacagatgcgcatgctcatctctattactgcagatgactacaagtacaagacctcccagatgagtaacctgcttaactccagggttgtatcactcaagatcctgcaaaactacatgcaatgccgaagccaatacacctcactagtggggttgaacctgatacatca

SEQ ID NO: 74096 - DNA, 448 bp, Zea mays
  Clone ID: MRT4577_167575C.1
ggccggggaggaccaacgaaataaaaaacccactctttaccccaccaggcaggcaaacacttttttccttaaaaacgggaaaaccatggctggaaattcaccattacaggctaacaaaaggggggcccaaaaaaaaaaacggcccgattcttttttcttcttggggacccaggattcaaaaacgggcgaccgaacggggggggaaaaacaaacgtttaattccaaaaccaccaactgatctggccggggtccccgtcctcttccccggggggggggggggcgtgtcccgcaaaaaacccgggggggggggggggggcttcgtcggggtaaaaactgcaccccttgtggttgccggccccctcgtcgccccacgggatgccccccccggccccatgaataacggggcccatcgcccccaaatcgggggaggggcccccccccccgggga

SEQ ID NO: 74097 - DNA, 333 bp, Zea mays
  Clone ID: MRT4577_167576C.1
agagaggggcgttgtggcgctggctagctatagctcgatccatcggaagaagttgaaccacacatcaactaacctctctgtcgtctcgcggcgatgtgtgaatctccatcatcctcgagaggccggtggcgccatagatatgatcagaagacaccgtcgactcagaaacgcggtgatgtgtgaatcgtcaatgttcctgatgtcgccgtctccgtcaccgtcaccgccgcagccgtctaggccgccaccggagtacaagcacttctgtcgagtatgcaacaagggattcacgtgcggcagtgcgctcggtggacatatgagagctcatggcgc

SEQ ID NO: 74098 - DNA, 387 bp, Zea mays
  Clone ID: MRT4577_167577C.1
tatagtgagtcgtattacaagcggcgacactgtagcccagctccagcagcactacagcagtagcgccaccgaacctgaaaactcctagccccacgaaatcgctgaacctacccatgagccgagcgatgattagccgactcgccgcggcgaggcgacagctactgcaatcgacggacgtcgcgtaacgctcctcctcggcagcggctacagcgtcagctgtccaagatagagcagggcccgcgtcgggcactgtgctcacggacagcttcgatcggggctccgacgcgtaccagcgcaaaactgacgccgtctgcgggttgctctccaaactgcactccggcgtcacacaagtgctgagcttcggacgcgccaacgcagtaacgccga

SEQ ID NO: 74099 - DNA, 251 bp, Zea mays
  Clone ID: MRT4577_167578C.1
aaggcaaaccccggcgagagcgccacatcccatgctgctataaaaacatcatatgaataatatactgtattaggaggtatgcagtgaatgggtgaacctttgctgcataacttgcttgaattagtgattatcatacctgataccagatttgaaaagctatatatgcttatactgcttatagacaacgaacaaaatatttcgatgtatgaataatgtgtctacaaataaaaaggagctggaatgatgaaagt

SEQ ID NO: 74100 - DNA, 403 bp, Zea mays
  unsure (1)..(403): unsure at all n locations
  Clone ID: MRT4577_167579C.1
accttggctgataagtgaccactactcgggcaacccctcactgctattgccgcacataggagagtagtgttgcccctcttggatccacgcgcccctcccggatctgtagcaccggttgggggggaggctggtgtccgctggcagaggggtgctaggctcaccacggaggggccctcatgtggagggaggcgggggagcacccgtgtggcacgccggccgaggaagggggagaagacacacaactcgccggcggaggagagggaagggcggtgctgacagagaagcgaggggacaagatgaggatgaatgcacgattacatagcggtgcttacagagaggcgaggagacgggatgaggacnaatgcatgattccagtgaatatcgctcggtattggaggcatgt

SEQ ID NO: 74101 - DNA, 399 bp, Zea mays
  Clone ID: MRT4577_16757C.1
gagaaatccaggcaggtttcatgactggcagtgcaaaggcgaaggaaggtgacgttttctttgtgccggctcacaccaagggctggaaacgagccgagctcagtttggcttggtgcggtagcttggatcggctcggcttgtctactcaacaagctacaaaaggaggctcggcttgttatcagctcaccttgtctactgaacaagctataaaaggaggctcggctcgttattagctcacgaggaggctcggctcgttattagctcacgagccaccttgtctactgaacaagctataaaaggaggctcggctcgttattagctcacgagccaaacaaactcgcgagctgcaatttgataaataatattatattatataatgaattaatagtttatcgatgt

SEQ ID NO: 74102 - DNA, 352 bp, Zea mays
  Clone ID: MRT4577_167580C.1
cctatccttgcgataagggctctagccgtagccggggcgatattagtgagctagttggcgcacaccggtatggcggccacagtgtactccgtggcgctactcgggagcgcgcgccttgccggcgctccaggctcagagctcttccctaagtgcaacgtgtgccagcttggcttccaagacggacctaggcggttcctgctccgtgcgaaggccgatattcgaggacacatcggactccggcgacgagttgatcgatgacctcaaatggaagtgggacgccgatgatgacaagcctaccgttcttttgaacggtggcggcgccgccgttgtactttggctgacatccgtggcc

SEQ ID NO: 74103 - DNA, 358 bp, Zea mays
  Clone ID: MRT4577_167581C.1
tcggcccgtacgccggcgaggagcaccaccaggattttgtcccatttctccagttccaatggaacatagctctgcagaagattcagacattagcgattcagatattgctgagcacaaggaggagatttgtgcccaactccgagcagggaaattgaacgtgaagcgtggtgaggccttccgctgccctttctgccctggcaagaagaggcaggactacaacctaaaggatctactgcagcatgccacaggaataggggctgcttctaagcgcagcgccaaggtgaaggcatcacacctggggcttgctatgttcttggagaaggatatagccagcacgttggagcaaccattgcaaatt

SEQ ID NO: 74104 - DNA, 746 bp, Zea mays
  unsure (1)..(746): unsure at all n locations
  Clone ID: MRT4577_167582C.1
ctcgaggccggccngggatgtcctagggattcaggcacttgcatgcgccgcagaggtacgactcgcgaagacgcagaagccggcgtatccatcgctctctcgatctcaaccaagatgtaaggtgtgaacatgaacatgacaccccaaatgtcttcaaccgctggaccttcgatgatgtccaggtgaacgacatctccctgaacgactacctcactgagaacgccaacaagcaccccatgtacctgccgcacaccgtgggacggtactccaagaagcggctgctgaaggagcagtggccgatcgtcgagcgcctcacaaactcgctcatgatgcacagcagcaacaacggcaacaacgtcatggctgtccgcatcatcaagcataccctggagatcatccacctgctcaccgatgacaaccccatccaggacgccgtcaacgccataatcaacagcggaccccgtgaggatgacacccggattggatccactgatgatgtgaggaggcaggacgtgcatatctacacccctgaggagggagaaccacgccatctcacctcctcaccactggtgccaaccagagagctgtccaaaacatcaaaaccattgccgagtgtcttgcagatgagctgatcaacactgccaagggctcatccaacagatacgccatcaagaagaacgacgagattgagcgtggtgccaaggacaaacgttgaactgagcttgtatcctgatgcactctgcact

SEQ ID NO: 74105 - DNA, 295 bp, Zea mays
  Clone ID: MRT4577_167583C.1
ccggaaaaggggggggcaattttccttccaaatttttccccccccaaagcgggcaaaaaaaaaacggggcttttttccattgggaagggggggaaccaggtgtcttttttacttagggggggttaccccctttaacccagtaccttgaaaaaaaatagataaagggggggggggaccagttccaagtggcccccaaacatttgcccgacccatgcggggctttgtacaactggttccagaaccccccaatttttccgactgggaaaacatcttttgttgggggggccggggtttt

SEQ ID NO: 74106 - DNA, 565 bp, Zea mays
  Clone ID: MRT4577_167584C.1
gggtgccaattctttctaccctacaggattccaacagggagtcgcagcaggcatcttacctttggtcacccttgtgtcctcgaacaatcatcagtccctattacagcatatacctttggtgcatttattggcacaaaacatcagggcacaacaactacaacaactcgtgctagcaaaccttgctgtctactctcatcagcatcaggtacctttagagcatttgttggctcataacatcagggcacatcatctactacaactcgtgctagcaaaccttgctggctactttcagcaacatcagattgctgccaatcaaccaactagatgttttgaactctgctgcttatttgcagcaacatcaactactactattcagccagctagctgttgcctacccccagcaatatcattccattcaaccaactggcagcattgaactctcatgcttatgtgcaacaacaacaactactaccattcagccaactagatgatgagagccttgatggcttgttgaccagtctcatttgtatgctgtttttacctagcacactgggccttaacgttg

SEQ ID NO: 74107 - DNA, 399 bp, Zea mays
  Clone ID: MRT4577_167585C.1
aatataaatataactttattttttttttttttttttttttttttttgggcaactagcaatggtaactattatgagccccaccttatttaaaaaggcgcctaaaatgtgcctgtttttgggctctaaagtttagtaaacctgaaaaaccaatttaagcacacacttacattttttaccacacaaaacaaaagaaaatcatttgaattgccatttgagcaagtcactcaccagctaaatctttgccttttaatcttcagggcgggaacgggggcttactaaccaggggttgaaacttacactttatttgagtaggcaccatgttcaccggctgcgttcttgtttacgctggaatgcgtttttccttgcagtttggcgcacacgaacttgttaaaaaagagc

SEQ ID NO: 74108 - DNA, 613 bp, Zea mays
  Clone ID: MRT4577_167586C.1
agctagaaaggtttggaattctctgaatgttaaaacagaacatccggagtttcagaacattcagaattttcacaacattgtaaatttatacattatagacacgcacttcagggcactgctcatcagatcctctggaaagcctatctcaaccaacttcagcaccttctcttcaataccagtggacgcactctttgtgaatgcctgtgtccattagcttgacgaatgtcagatagtcacacatgtactcagaaacagatcgacacaaataagtttttcagggtagtctttaatagtgattgagttaactatctcataagttcatccattgctctatggggttgcagttcctttcacttggagagatttcagatcttatacattctgcatcactggacacagtatacactccaaaagggaactactaaggcccgtcctgtagcccatataatgtggggtccgggtcagccctatcaacattttccttgtctctcgtgattgatgcttgcaaaattgttgaatctgtcataaaaatattgtccgagtaattacatacaacaaatgacagtaaagttgatcaaggaagaacattgcctcttaccctaaacaaactatc

SEQ ID NO: 74109 - DNA, 348 bp, Zea mays
  Clone ID: MRT4577_167587C.1
atcttttattttttttttttcctttttatttttatttttttggggggttttatttaaatttttctgggggtaacaaaggaaaaccccccaactccactgaatatattagcgaccgagccatcagtccatacagaccaataataagcctccctatgtccccggcccggaccgaacaacccccacccaaatgggaaacaaaaccctaccttggcccggtagggtgcggacccaatgttggggttcttcttgggcgaaaagctatcgaggaccaacccccaatgcacctttacttaaatctgggggagggtgacggaacccacctgcaactccacggggacccttacaaaa

SEQ ID NO: 74110 - DNA, 599 bp, Zea mays
  Clone ID: MRT4577_167588C.1
atcgtttaaatattaatagagctcctgcagagatctgggggggggggggggggggggcagagcacccagagaggcgttgcacggactgtctccctcgactcacgcacgcgcaaactgtgggttacgagcgagacataacactctagcataggcactttcggccccgtaatatcccgctagctagtaattggccgccgcaatccttgcaattgcagtaggtggcagcagacagcacttagttctagttttcgttttagtttgcacgcccgcgggcacgatacccttactctcttttctacccgactacccgccaccgccgcagctaccgccccaggtagcaaccactatctaggattctcctactcattctcactgctgggagcatggaaaccagccccaaacccattcatttttcgttttagtaccattcacctacccctcgagacttctgggggcaggaaagtttcaaatttagttacaacaagaagtacaccttccatttggacgacatacgtacgacgatgattaggaagaacacatcaagctgacgagccccagtaggtagtactgtacttactcacgaagcagatggtattatt

SEQ ID NO: 74111 - DNA, 473 bp, Zea mays
  Clone ID: MRT4577_167589C.1
cggctgcgagaagacgacagaagggatcaaagacacatgtcaaaaatggaacttcatgtgaaataaactatggaactggatcaatatctggtttcttcagtcaagataatgttaaagttggcagtgctgttgtcaagcatcaggatttcattgaggctacccactaaggaagtcttacctttctgtcagcaaagttcgatggaatactgggacttggatttcaggagatctcagttgaaaatgctgagcccgtatggttcaaaatggtggagcaaaaacttatcaatgagaaggtgttctctttttgacttaatggggatccgaatgcgaaaaaaggtggtgaattagcttttggtggtgttgacccagagcacttaaaaggaaaccacacttatgatccaattactgaaaaacgttactgacatattgaaatgggagattttctcgctggaggcgtttcaacaggtgtttgt

SEQ ID NO: 74112 - DNA, 443 bp, Zea mays
  Clone ID: MRT4577_16758C.1
ccccctaggcgggcgggcggccgagaccccacaagtgaataagccgggcctcgcctttcgtcaccatcagatccaggcagccaacaaaaatggcgcgcgccagatctgcggagctgttttaggtcctcgccgttgctgccctcagcgcgggcgaggccccggcagagccaccggaatcaatggagcgctgcgaatgcaccagaggctgccaagagaactgctgcccccgctgaaggacccggagccgcgtccacccccgtcgccgacgctgccccagcagcgtcgtctaggaagtccggcccaggtaccgcgacagcctccacctctacacccccttcttccacggatgaagagttgaggccttcccccccaagatacaccgacagcggtggcccctgcgcactgcaggaaccggctgctgatgactccgccggtgctgctac

SEQ ID NO: 74113 - DNA, 303 bp, Zea mays
  Clone ID: MRT4577_167590C.1
gttcatctattcttttttttttttttttttttgtcattttttcaggccttcgacctaatgaccaaaccactggagctacctctcctactttattgaaagcgggccggggacaaaaacaaccccaaaactggatagttttttttaaaaaaaaacctgaagagcgcacattgcgccaaacggaaacccttttatccccaaatcaatgaaaaggggctgcccggcaacagacagggcgtttactgctccttgcgccaggcgactctccagagcgacgttccttgagcattcctgaagccgttcggt

SEQ ID NO: 74114 - DNA, 298 bp, Zea mays
  unsure (1)..(298): unsure at all n locations
  Clone ID: MRT4577_167591C.1
attccctgggaaagataaactccaaaacgttncttaaccatacaaaatcactgatacaagtgtcaatacgcatttcttacttaggtgaactatctaaactggtacagtttaatcataactattttttatacctaacttttttaaagtaatcaattctaataaacataaatttatctataaatacttccatccaaacaatgataatacaactttaactatctaataacaaaagacttagacggattctatctttaagtcataaattcattaaccttttttaatccattaaccactctaa

SEQ ID NO: 74115 - DNA, 177 bp, Zea mays
  Clone ID: MRT4577_167592C.1
cagacacgcaggtgagagacagactagaagacctcctagcacatctcataagcgatgacgacgcagtagagacgtcctgggaggccgacaaccaatcactacaagggggccacaagtccgggcaatgcgagcggcggtgagaggaccggacctggaacctgcgccccaggtgccagg

SEQ ID NO: 74116 - DNA, 270 bp, Zea mays
  Clone ID: MRT4577_167593C.1
aaacaggcttactacatgtttacaattacaacattgatgggcagtaccacagcagctggggttcatttaaaatttacttttttaaacttatttcaccctcagctttttagctagctatgtacattaattaattattacataagctagcaaattaataaatttttacgcgtgaacaggcggcattttcttgtataggtggatatccttctgctaaactgctacggggggctttttccattggcttgctgaaaaaaattctttggatccatg

SEQ ID NO: 74117 - DNA, 186 bp, Zea mays
  Clone ID: MRT4577_167594C.1
acgaatatggcatgccgatacaggacaagataccagtaacttcatttggatacatcatttgcacagaactttattggaagaacagatgaagacagacgatgaatacaacacataaagctcagcatgctaccgggctaagatctgtctcataaagacatagagcgaggactaaatttaaatgaacaa

SEQ ID NO: 74118 - DNA, 335 bp, Zea mays
  Clone ID: MRT4577_167595C.1
ttcgcccctacaaggcccgccgcctcggcttcaaggccaagcaggggtatgttgtttaccgcgttcgtgtgaggcgtggtggcaggaagaggcctgtgccgaagggtattgtctatggcaagcccaagcaccagggtatcacccagctcaagttccagaggaacaagagatctgttgctgaggaacagtctggacgaaagcttggtggactcagggttgtcaactactactgcgcgaatgaggatggcacattcgctgactctgagatcattctgtgtgacgagggcgacactgagattattgacgacccaacactgaccggcgcttgcaatgct

SEQ ID NO: 74119 - DNA, 465 bp, Zea mays
  unsure (1)..(465): unsure at all n locations
  Clone ID: MRT4577_167596C.1
gggtacctcgaggccggccgggnaaacgtgctgtcttcccgtctcttcccatgcggcgtctcgctctcctcttcctcctgcctctcctcctcgccaccggcgtcaccacggcgtcagcggagcccgcgacccctcccgcctctcctcctcctcctcctccaccaccaccaccgccgacgcctgcagagcatcagaagaagcacgaggagctgctgacgaagtacggcatgaccacgggcatcttctccacgaccgacaacggcatcaggatcgacaacaacgggaggcgcagcgacgaacacgaggagcactgctacgaatactacgagaatatcacgaaggtggagcgccacatcaagggggagcaccgctacgactaccacgacgacctccagggcatccagatcagccgcatcatcatcaaggacaacgtcatccgaatgaaggacgaccaacacgaggatg

SEQ ID NO: 74120 - DNA, 2470 bp, Zea mays
  Clone ID: MRT4577_167597C.1
attgctgacaggtgcgataaaaaaggtgtcagtgttgatgaacgcttaatcagagttgcggaaatgctagaaaagatggtagaatcttattcaccgaaagacctgccaaatgctgcagtcagcccagatgttgcaaaagtttcaagttcaagcatcaatgaagaatctgatggtccctctcctaaactctctgattggtctagaagaggatctgctgatatgcttgactatctccaagagactgataacactatttcattggatgacattaaaaatcttccttcaatgacatgtaagactcgttttggaccaaaatctgatcatggaatggccacatcatccgctggaagtatgactcctaggtctccattaactccaagatcaaatcatatagacatgcttttagctggtaaaaatgcaattaatgagagtggtgatcttccgcagattgtcgaacttgctgatattgcacgatgcatcgcaaatacccctctggatgaagaaagcgcattatcccaaatggttacctgcatagaagatcttcaagaaattgtcaaccgcaggaagcatgaggccctcacagtccagacatttggaacacgcatagaaaaactacacagggagaagtatctgcagctctgtgactcagttgatatggacaaggttgattcagcaagcaccataatggatgaagaagatgatgttgttcgtagcttgcgcgcaagtcctgtccatccagtcaaggatcgcacttcaattgatgactttgaaatcatgaaacctattagccgtggagcatttggacgtgttttcttggccaagaaaagaactacaggagatctttttgctataaaggttcttaggaaggcagacatgattcggaaaaatgctgtcgagagtatattggctgaacgtgatatcttgattacagtcaggaacccttttgtggtacggtttttctattcgtttacctcacgggagaatttgtatctggtcatggagtacctgaatggaggggacctttactcattactgaggaatttagggtgcctggatgaagacgttgctcgtgtatatcttgcagaagttgtactagctttggaatatttgcactctatgcacatagtccatagggatctaaagcctgacaacttgttgatagcccatgatggacatattaagttgacagattttgggttgtccaaggttggtttgatcaacagcacagatctgtctggtcctgctgttagtggggcttcactgtatggagatgatgagcctcagatgaatgagctcgaacaaatggatcaccgagcacggagacaaaatcgttctgctgttggaactcctgattatttagcaccagaaatccttttggggacaggacatggttgcagtgcagattggtggtctgttggtgtcattctgtttgagctcattgttggcatacctccattcaatgcagaacaccccgaggcaatttttgaaaatattatgaatcgcaaaataccttggccacatgtcccagaagagatgagttttgatgcacaagatttaattgacagattattgacagaagatcctcatcaacgactaggagcaaatggtgcctcagagggggaggacagcactggcctcaatgagtttgaatctagtgcaaatgtcaattattctttcagcaacttctcgttcaagaatctatcacaacttgcttccatcaactacgatctgctcaccaaaggattgaaggatgatccaccgccaagaacagaaatgtagcagttaatctaaatttggatggactcatttgagtactcagacagtctacaaggtgctcgtgggatgtaggtcttgtacatatcaaagtgtgaggcatggtctgttcctattgaggctgttcctacatctcgcggatccgagtacagttttggtgttgccttgttttcatgactattgccatgccttcatcagtgaaatcacccttgaccaaatttggcattcgacctaggagcgctgtctttttggttcgtctttcctttttttagtcctattatgagccttgggtttacggagattggtcaaggttactgtattcagaatacagctcctgaagacgtaggcgggtttcagagaattgccattctggcatacagttgactctggttcgttaagctggtagcccgctggacttcctgcggccagaactgtccacaacattttgatggccgtggaatatagcattttgcttaatgtgtccagtgaaacagaatcagggacattttaagaagaatattaaccgattgacattataaggatatcaaatggaagcggcgttttatgcaattcaaaattcgatgggcatcgcccagcagtcatattgtgtaacggtttgtccgatgtcatgtcgcttgcaaaatgctgtagtagcactacctgctgtttattaaactcagaactcgaactcttttat

SEQ ID NO: 74121 - DNA, 705 bp, Zea mays
  Clone ID: MRT4577_167598C.1
atggctgaaaagcttagcataatcctccagatccttgtggttgagctgattcctgcctggaccattattaatagcgttcatcaccattttcttggccctggggatctgcggaatatgctcagcgcccagaccggccacccgtcgacttctgcggagctcctgcgaaggattagcagattattgacagaagatcctcatcaacgactaggagcaaatggtgcctcagaggttaaacaacatccatttttcaaagacattagctgggatacccttgctaggcagaaggctgcctttgttccttcctccgatagtgcatttgatactagctacttcaccagtcgctattcttggaatcaatcagatgaaaacatatatgaagcatatgagttagaggactccagtgataatggaagccttagtggaagcagtagttgtgtgagtaaccaagatgacatgggggaggacagcactggcctcaatgagtttgaatctagtgcaaatgtcaattattctttcagcaacttctcgttcaagaatctatcacaacttgcttccatcaactacgatctgctcaccaaaggattgaaggatgatccaccgccaagaacagaaatatcaaagtgtgaggcatggtctgttcctattgaggctgttcctacatctcgcggatccgagtacagttttggtgttgccttgttttcatga

SEQ ID NO: 74122 - DNA, 4120 bp, Zea mays
  Clone ID: MRT4577_167599C.1
atggagtattcggcaaagacatcgcttccactctacaccttcggtattatctttccttgccggtgccaaaggttcaacacaaaccaacaaaaagaacaagttaggcttcaaaagaaaggagcaaaaaggaaaccgaagtgttccctggtctggtgcacccgactgtccagtgtgccaccggacagtgtccggtgcaccaccagacagtgtccggtgcaccagggtgaatcagctcaaactcctcagcttcgggtttctgaggcgcagctccgctataattcaccggactgtccggtgtgccactggactgtccggtgcaccagcggagcaacgactatctacgcgcaacggtcgactctgacggatgaacagtgcagcacagtgtcgcgacagaagtcagagcagcagaggatgattgagatggcggcagatgtagggcttctggggcgggttctgccaaataaggctaaacaacgctattctctttatgcagatgatgtaggtgtgtttattagagcagataaagaggatctgaaggttttgaaaaagattctggaagtttttgaagggttttcaaggctgaagattaattttgataaaactgaaattttcccgattcgatatccccaaactctttggccagatctgatggatgtgttccctggcaaatactcaaaatttccgagggagtatcttggtctacctctacatttcagaaacgttaggagaattgatgtccaaccactaattggcaaaattaataaaaggctagcaggatggaaaggcagactactctcaaaggcagatctctttaacgcatcaacaattgtgactattggtaatgggaagatggcagatttctggggatctagttggattgaaggacatgctccaaagaatattgcacctaagctatataagaaagcaagaagaaagaacatctcggttttcaaggctcttaggaacaattactggatgcagttctgtgcgcctttctctcgggaggaggaacctgctagtctctccttgggtgattgggtccttcagtccttgcaatttcctcccgcactcccggttctcccgcacgctcccctctgcctgtccgtgtcgcttgcttcgcttctgcaaacccctgcccggcggccggggcgagggggcgtgatggtgttcaaggggcgcttcttctcgtcgcgacacaagtcatcggagtcatcttccagcccagacggcagcaacagcccacgcacgcctacctcggccccggcctcggcatccgcggcgtcgccggcgtcgtcgtcgtcgtctagatccgacaagaagaagactaaatcggagactcctaagaagcgcgacaagctcttcggttccgcggccaccgcacccaagagcgccgcatcgtcggcctcgtcaagcccggcgggtgatgggaggaaggggtccgtgccgcatcatagggatgcgggcgtcgggggcgggggtggcgcgtcggcggccgcgctgtcgccgatcctggcgtcctcgctggggctcaaccggatcaagacgagatccgggccgctgccgcaggagggccaacgcatggctgccgtgatcgggagcagcaacctctcgcgcgggcagggccaagcggaaccgtcggctgcctcagccggcgtcggcggtagaaagggcgtcacctcctgggcggatactagtagtagcagccgcggaaaagggaagacgaccgagctgccgatgcgaagtacagctgggacgagcttgggaccagtagggaagagcgctgtaaaagctaaacctagtgcacagcggaaccattctggagatttgaggacacctactcacatacctgaggctgcgtgtgcatatgatccgtgtgagacaccaaaggaatccgagtccccacgctttaaagccattatgcaggctactagtgcaccgaggaagagactccctgcagatataaaaagtttttcacacgagctgaactccaaaggggtgcgcccatttccttttttgaaacctcggggcatttacaacttaaaggaggtaataaaagttatccatgtgagatttgagaaggcaaaggaagaggtaaattcagatttggcagtttttgcaggagacttggttagcgtaatggaaaagtatgcagactctcatcctgagtggaaagatgccctggaggacttgctaatacttgcacgtacctgctgtgtcatgacacctggggaattctggcttcagtgtgaaggtatagtgcaagatttggatgaccatcgtcaggaactctcaatgggtgtgctgaagaaactatacacccggatgctttttatccttacaagatgcacaaggctgctccagttccacaaagaaagtggttttgctgaggatgaagttgttattgatcagcgtgataagattatacaatctgcagataggcagattttaactcaatcaggtgtgggtgacacaacatccagagccagtaaaagtgaggcaagaaaatcatacagtcaggagcagcataatttgaaatggaagcgtagccaggagataaagcctgttaaccttcttccaccacttgatacggatgttaagaaagtggctgattctccaaccaaagaacgaatatcttcctggaaaccttttccatctcctgttacgaaggtcccaaaagaatctactcctactaaattggaatcacctaataagaaaacagatgcacactctacagttagtagccatgttgaattaagcagtccagttgaatctttaccacaacaacagcttcctgtcaagcatcaacataaaacttcatggggccactggtctgaccagccaaatatttctgaagagggttcaataatgtgtcgcatatgtgaagagtatgttccaacacagtatgtagaagaccattcaagggtctgtgcaattgctgacaggtgcgataaaaaaggtgttagtgttgatgaacgcttaatcagagttgcggaaatgctagaaaagatggtagaatcttattcaccgaaagacctgccaaatgctgcagtcagcccagatgttgcaaaagtttcaagttcaagcatcaatgaagaatctgatggtccctctcctaaactctctgattggtctagaagaggatctgctgatatgcttgactatctccaagagactgataacactatttcattggatgacattaaaaatcttccttcaatgacatgtaagactcgttttggaccaaaatctgatcatggaatggccacatcatccgctggaagtatgactcctaggtctccattaactccaagatcaaatcatatagacatgcttttagctggtaaaaatgcaattaatgagagtggtgatcttccgcagcagagatttggtattgtgctaagctcttgctgtccatctattgtgttgtagctcattgttggcatacctccgttcaatgcagaacacccccagccaatttttgccaatattctgaatttcataatactttggccgcctgttccggaagagataagttttgatgcacaagatttatttgacaaattattgctcgaagatcctcatcaccgactaggagccaatggcgcctcataggttaaaccacatccatttttcaaagacattagctgggatacccttgctaggcagaaggctgcctttgttccctcctcagataatgcatttgatactagctacttcaccagtcgctattcctggaatccatcagatggaaacatatatgaagcatacgagtttgaggattccagtgataatggaagccttagtggaagcagtagttgtctgagcaaccgccaagatgacatgacggaggtcagcgatggcctcaatgagtttgaatctagtgcaaatgtcaattattctttcagcaacttctcgttcaagcgtgcagcggttggatcaccgtctaaaagttcagaatgcttgcttgcacgcttgcacctaagacctgcttgcacaatattcgttccctatttgtaaatatcaacatttgcaattgcaatgttatcgcaatagcaattgtagtactgctgtacctgtgagccagatcttgaatgctacaaaggcagtatcctttcttttt

SEQ ID NO: 74123 - DNA, 336 bp, Zea mays
  Clone ID: MRT4577_16759C.1
aaaatatatagcaatatagcaatataagaatcaataccaatataccaaacatagcaaatataaaagaggggaactgtaaacagactcacggttcaaaattacagaacatgaactgaacatccaaacactactcactacctcactacttcatatgatgcatacttgccgacttactacatactatgtcgttgccaagtaggcaagtcacatacttgctattgacctaatgtatcatattctcattcaattgaaaagcagcaacactagtgggcctcatttaactcaaaaccctatgggataacccttatgtgccctattaccaccctctcagtccac

SEQ ID NO: 74124 - DNA, 250 bp, Zea mays
  Clone ID: MRT4577_1675C.1
gcaagaagatcgaagaggtttgatcaaagagatgcatagtgtagactgtatagctctctttggttaagcaagcatttagtatgctttttgtttggaaatgtaagctgcaactcatgaatagcaccttgtagggccatttgataatatcattatagcaggtgaatggtggttatccatgcttatactgtctgaggcaacgtaagtttcaaatgtgctgcaatcatgttcatattatttaattggttgcatg

SEQ ID NO: 74125 - DNA, 2194 bp, Zea mays
  Clone ID: MRT4577_167600C.1
ccacgcgtccggctttggaatatttgcactctatgcacatagtccatagggatctaaagcctgacaacttgttgatagcccatgatggacatattaagttgacaggttttgggttgtccaaggttggtttgattaacaacacatatgatctgtctcgccctgttgttagtggggcttcactgtatggagatgatgagcctcagatgaatgaattcgagcaaatggatcaccgagcacggagacaaaatcgttctgctgttggaactcctgattatttagcaccagaaatcattttggggacaggacatggttgcagtgcagattggtggtccgttggtgtcattctatttgagctcattgttggcatacctccgttcaatgcagaacacccccagacaatttttgacaatattctgaattacaaaataccttggccacatgtcccggaagagatgagttttgatgcacaagatttaattgacaaattattgaccgaagatcctcatcaacgactaggagcaaatggcgcctcagaggttaaacaacatccatttttcaaagacattagctgggatacccttgctaggcagaaggctgcctttgttccctcctcagataatgcatttgatactagctacttcaccagtcgctattcttggaatccatcagatggaaacatatatgaagcatacgagtttgaggattccagtgataatggaagccttagtggaagcagtagttgtgtgagcaaccgccaagatgacatgggggaggacagcgatggcctcaatgagtttgaatctagtgcaaatgtcaattattctttcagcaacttctcgttcaagaatctatcacaacttgcttccatcaattatgatatgctcaccaaaggattgaaggatgatccaccgccaagaactgaaacgtagcaatcaatctaaatttggactctcatccgagtaatcaaacagtctacaaggtgttcgcgggatgtaggtcttgtacatatcaaagtgtgaggcatggtctgttccaattgaggctgttcctacatctcccggagccgagtacagttttgttgttaccttgttttcatgaccaattgacatgccatcatcagtgaatcacccttgaccgaattgggcagagcgctgtctttttgttcccctttgcttttttttttaaaaaaatcagtccattatgagccttgggtttgcggagattggcccaggttactgtattcagaatacaacccctgaagatgtaggtgggttttaggaaattgccattctggcatttatagttgacgatggtttgttaagctggtagcccgctggatttcctgcggccagaaatgttcacagcattttttatggccatgggatacatcattttgctaaatgtgtccagtgtcccacagaatctgggacattataagaataggaaccgattgaggctggtgctgtttgtttcaacagagagtacgggaacggtaaatgcaactagcaaacggtgataattgttgcaaaggaataaaaacgctctctgtttggttcaaaaaacttggttccatcaaatacgatttgctccccaaaggatttaaggatgatccccccccaaaaacaaaaatgtagcagttaatttaaatttggatgggctcatttgagtactcaaacagtttacaaggtgctcgtgggatgtaggttttgtacaaatcaaagtgtgaggcatggtttgttcctattaaggctgttcctacatctcccggatccaagaacagttttggggttgccttgtttttatgactattgccacgccctcatcagtgaaatcccccttggccaaatttggcatttgacctaggagggcggtctttttgggtcgtctttccctttttttttagtcccattaaaaaccctgggttttcggaaattggtcaaggtttctgtatttaaaaaacagctccttaaaacgtaggggggtttcaaaaaattgcccttttggcaaacagttgactctggtttgttaaactgggagccccctggacttccttcggccaaaactggccccaacatttttatggccgtggaaaaaaaccttttgcttaaaaaaaaaaaaaaaaaaaaaaaaaaaaaaaaaaaaaaaaaaaaaaaaaaaaaaaaaaaaaaaaaaaaaaaaaaaaaactcgagaaga

SEQ ID NO: 74126 - DNA, 1282 bp, Zea mays
  Clone ID: MRT4577_167601C.1
ctcgaggccggccgggctactgagcaatgatgcatgccgtgccgcgcgacttcttggcttcctctccgtttcttcttccttgtccgaggccgacacagcagccgtcgtcctgctagctaatcaatctagcgactgttttgccccccttttttttcttctcagttccacttgcttgccactgtgctcggttgcttagacagccagcattgccgggaaagcaacggaggccacggcgacctgcatcagccaggcagcttgtgcgtgctataaatggcgtgaggcgaggaagagaaggaagagagaatagctaggccgcgccgacgccgaaccgcagcagacacgcgcgcggacagcgtacgagggagggaagctgcctgaggtagaggaggaggagaacatgcagggcggcggcggcgtggaccagccgccgatgcagatggtgctgcgggtgaggcacccgtcgtcgctgggcggcagcggggcggacgaggacgacggcgaggggtcctctaggtcggcgctctcggtgttcaaggccaaggaggagcagatcgagcggcgcaagatggaggtccgggagaaggtgttcgcccacctcggacgcgtcgaggaggagtccaagcgactcgccttcatcaggcaggagcttgaagggatggccgaccctacaaggaaggaggtggagtcgataaggaagcggatcgacacggtgaaccgtcagctcaagcctctcagcaagagctgcgtcaagaaggagaaggagtacaaggaggtcctggaggcgtacaacgagaagagcaaagagaaggctctgctagtgaacaggctaatcgagcttgtgagcgaaagcgagaggatgcggatgaagaagctcgaggagctcaacaagacggtcgactcgctctactagacgccagtcggtgctccgtgctctgctcacccacctctccatccactcatccatccagagcttgcacgctcgccctctgtaatctgatccccgtgtgccgtggattcgtgacctgttcaaggtggtgcttgtagtaactgatgtttttcgttgggtgatccttttctcttctttttttcttcttctctctttggtctcttttatttcaccagttcgtacgagtctcgttgcactgtcattgtcgagtaaaactgacgtactgtatttataagcaacaaacaaaaaaaaaaagctgtctaaccacattttgatggttcattcatgacgcttggacccgtagtcttttgttcagggcaccgcaccctttccctc

SEQ ID NO: 74127 - DNA, 351 bp, Zea mays
  Clone ID: MRT4577_167602C.1
gggggggggggtttatgttttttactctttctatttataggaacccttttattggggcgccagaagaccaaaaaaaatccccccctcttttggcccgggaccagggcacggaaaaaaaaccccccgcgtaccgggtccccaaggcgggcatggaagccgggggggatcgaatactttaaacaaaagctgaggagaggggagaacgggcttctggcgaaggaggcaagaaagagagtgggggttcggggaggcgcccaagcaagaagagagagtgggttgtggcagaggcgcaccctaagaggggaggagcaagcgggggggaagcaccccatgtattgggaggggcccccc

SEQ ID NO: 74128 - DNA, 496 bp, Zea mays
  Clone ID: MRT4577_167603C.1
tctacctgcccggctggcgggtgcgcgcgctataaatgttgagtaccctcaaatccccaaacctcctgccacacatcgatccctggatcatctcgtctcctccctccggcggattgcttggtaaatagtacctgcgcgacagagtggtagagccagcggcaaaaataaatggggggaccatggattcatggtcacctctcaggacgggaacgaaggggacccggacaagctgtgctatcagggggctgacgcggagctgaacgcctgcctggtccacgaccccgacagcaaggagtactgtgagacctgcagcaagaccaacatggtgatggtgactcgggggagatcaccaccaaggcgagggtggagtaccagaagatcgtgcgcgacagctggcgatggatcgatgtcgcctcctaccagggggggttccacgccgaccgctggaaggcgctgattgacatcgagcagtagtcgcccaacatcgagaaagtgg

SEQ ID NO: 74129 - DNA, 850 bp, Zea mays
  unsure (1)..(850): unsure at all n locations
  Clone ID: MRT4577_167604C.1
gtaatatatcactatttgtcttaacagttgcactatgtggctgtgatgcagttttgttgatatatgcgcagtcggaaactgcctgattgtcactacatgaactgtgaatgaaatttctttaagtaatggaacacattgcatgcatatggttctgtgttgtcatttctcatgttctatacagatataaagagtatcgtcttcaggactacagttcttggttcgtcaaacagctcaatgacactgataaatggactcatctgagaagttgccttgtgaagtcggatgattgcaatagcttgtcaaaaagatataagactctaaaacaatacaagctcgctgagctgactcccattgagtctggctgttgccgcccaccagcggagtgtggatatccagctttgaatgcttccaattttgatctgagctaccatccggtgagcacaaacgtcgactgcaaactgtacaaaaatgatcggttcctcaggtgctatgactgtaattcttgcaaagctggtgttgcgcaatacatgaagacagagtggcgagtggttgccatcttcaatgtgatattgtttatcattttgtcattcgtgtactttgttggctgctgcgcacgtcgacatgctggaggtagtgattctaaagttcctcgaagatgactcttactttgaagtgaatcctctctatgattcacgtgtcacagcgagagttagctttaccgtcccttgtaaaacattgttcattcaagttcagcttgatgaatggagtgtcaaggcttctgntctgtgggcgatttctttgtgccagtagcattttggacantctatgaaatgaacgtccccacatcttc

SEQ ID NO: 74130 - DNA, 974 bp, Zea mays
  Clone ID: MRT4577_167605C.1
gaagttgtactagctttggaatatttgcactctatgcacatagtccatagggatctaaagcctgacaacttgttgatagcccatgatggacatattaagtggggcttcactgtatggagatgatgagcctcagatgaatgaattcgagcaaatggatcaccgagcacggagacaaaatcgttctgctgttggaactcctgattatttagcaccagaaatcattttggggacaggacatggttgcagtgcagattggtggtccgttggtgtcattctatttgagctcattgttggcatacctccgttcaatgcagaacacccccagacaatttttgacaatattctgaattacaaaataccttggccgcatgtcccggaagagatgagttttgatgcacaagatttaattgacaaattattgaccgaagatcctcatcaacgactaggagccaattgccgctccgaaggttaaccaacatccatttttcaaagacattagctgggatacccttgctaggcagaaggctggctttgttcctcctcagataatgcatttgatactagctacttcaccagtcgctattcctggaatccatcagattggaacatatatgaagcatacgagtttgaggaatccagtgataatggaagccttagtggaagcagtagttgtctgagcaaccgccaagatgacatgacggaggacagcgatggcctcaatgagtttgaatctagtgcaaatgtcaattattctttcagcaacttctcgttcaagcgtgcagcggttggatcaccgtctaaaagttcagaatgcttgcttgcacgcttgcacctaagacctgcttgcacaatattcgttccctatttgtaaatatcaacatttgcaattgcaatgttatcgcaatagcaattgtagtactgctgtacctgtgagccagatcttgaatgctacaaaggcagtatcctttcttttt

SEQ ID NO: 74131 - DNA, 6188 bp, Zea mays
  Clone ID: MRT4577_167606C.1
atggagtattcggcgaagacatcttttccgctctacacgttcggtatgatctttcctagctggtgccaatggtcgaactcaaaccaatagaacgaaccagttaggatacaaaagaaaggagaaaaaaggaatccgacgaattgcttaccctggtggaagagactgtccagtgtgccaccggacagtgtccggtgcaccaccagacagtgtccggtgcaccagggtgaatcagctcaaactcctcagcttcgggtttctgaggcgcagctccgctataattcaccggactgtccggtgtgccactggactgtccggtgcaccagcggagcaacgactatctacgcgcaacggtcgactctgacggatgaacagtgcagcacagtgtcgcgacagaagtcagagcagcagaggatgattgagatggcggcagatgtagggcttctggggcgggttctgccaaataaggctaaacaacgctattctctttatgcagatgatgtaggtgtgtttattagagcagataaagaggatctgaaggttttgaaaaagattctggaagtttttgaagggttttcaaggctgaagattaattttgataaaactgaaattttcccgattcgatatccccaaactctttggccagatctgatggatgtgttccctggcaaatactcaaaatttccgagggagtatcttggtctacctctacatttcagaaacgttaggagaattgatgtccaaccactaattggcaaaattaataaaaggctagcaggatggaaaggcagactactctcaaaggcagatctctttaacgcatcaacaattgtgactattggtaatgggaagatggcagatttctggggatctagttggattgaaggacatgctccaaagaatattgcacctaagctatataagaaagcaagaagaaagaacatctcggttttcaaggctcttaggaacaattactggatgcagttctgtgcgcctttctctcgggaggaggaacctgctagtctctccttgggtgattgggtccttcagtccttgcaatttcctcccgcactcccggttctcccgcacaattccctctgccggtccgtgtcgcttgcttcgcttctgcaaacccctgcccggcggccggggcgagggggcgtgatggtgttcaaggggcgcttcttctcgtcgcgacacaagtcatcggagtcatcttccagcccagacggcagcaacagcccacgcacgcctacctcggccccggcctcggcatccgcggcgtcgccggcgtcgtcgtcgtcgtctagatccgacaagaagaagactaaatcggagactcctaagaagcgcgacaagctcttcggttccgcggccaccgcacccaagagcgccgcatcgtcggcctcgtcaagcccgactggtgatgggaggaaggggtccgggccggattatagggatgcgggcatctggtgcggggggtcacgcgtccggccatcatcagtgaatcaccctcgaccgtcttgggtagagcgctgtctttttgttccgagatgctttcttttttagcaaaatcagtccattatgagcgctgggatcgcggggagtagcctcggtcgctgtaatcagaaaacaaccccgtaagatgtaggtgggtttgacgaaattgccaatctggccattttagtggacgatggtttgttaagctggtagcccgctggatttacctgcggccagacatgtccaagtaaagctgggacgagattgggaccagtagggaagagcgctgtaaaagctaaacctagtgcacagcggaaccattctggagatttgaggacacctactcacatacctgaggctgcgtgtgcatatgatccgtgtgagacaccaaaggaatccgagtccccacgctttaaagccattatgcaggctactagtgcaccgaggaagagactccctgcagatataaaaagtttttcacacgagctgaactccaaaggggtgcgcccatttccttttttgaaacctcggggcatttacaacttaaaggaggtaataaaagttatccatgtgagatttgagaaggcaaaggaagaggtaaattcagatttggcagtttttgcaggagacttggttagcgtaatggaaaagtatgcagactctcatcctgagtggaaagatgccctggaggacttgctaatacttgcacgtacctgctgtgtcatgacacctggggaattctggcttcagtgtgaaggtatagtgcaagatttggatgaccatcgtcaggaactctcaatgggtgtgctgaagaaactatacacccggatgctttttatccttacaagatgcacaaggctgctccagttccacaaagaaagtggttttgctgaggatgaagttgttattgatcagcgtgataagattatacaatctgcagataggcagattttaactcaatcaggtgtgggtgacacaacatccagagccagtaaaagtgaggcaagaaaatcatacagtcaggagcagcataatttgaaatggaagcgtagccaggagataaagcctgttaaccttcttccaccacttgatacggatgttaagaaagtggctgattctccaaccaaagaacgaatatcttcctggaaaccttttccatctcctgttacgaaggtcccaaaagaatctactcctactaaattggaatcacctaataagaaaacagatgcacactctacagttagtagccatgttgaattaagcagtccagttgaatctttaccacaacaacagcttcctgtcaagcatcaacataaaacttcatggggccactggtctgaccagccaaatatttctgaagagggttcaataatgtgtcgcatatgtgaagagtatgttccaacacagtatgtagaagaccattcaagggtctgtgcaattgctgacaggtgcgataaaaaaggtgttagtgttgatgaacgcttaatcagagttgcggaaatgctagaaaagatggtagaatcttattcaccgaaagacctgccaaatgctgcagtcagcccagatgttgcaaaagtttcaagttcaagcatcaatgaagaatctgatggtccctctcctaaactctctgattggtctagaagaggatctgctgatatgcttgactatctccaagagactgataacactatttcattggatgacattaaaaatcttccttcaatgacatgtaagactcgttttggaccaaaatctgatcatggaatggccacatcatccgctggaagtatgactcctaggtctccattaactccaagatcaaatcatatagacatgcttttagctggtaaaaatgcaattaatgagagtggtgatcttccgcaggaggctaggttgccaacaagtggtattagagccatggtgatcgtcggcgatgtcccaagacgcgagcggttcaggcggagtgcttctacacacatgacattcttgaacgcgcagggatgcgacggtgctcatgcggatctactccagggactcacgcgcttgagtgtccaggaagcagaggggcagggggcggcggccggggcaaggggaagggccggcgtcggctggagggaggaaagggctgggctagcggcgccggagaggaagattgtcgaacttgctgatattgcacgatgcatagcaaatacccctctggatgaagaaagcgcattatcccaaatggttacctgcatagaagatcttcaagaaattgtcaaccgcaggaagcatgaggccctcacagtccagacatttggaacacgcatagaaaaactacacagggagaagtatctgcagctctgtgactcagttgatatggacaaggttgattcagcaagcaccataatggatgaagaagatgatgttgttcgtagcttgcgcgcaagtcctgtccatccagtcaaggatcgcacttcaattgatgactttgaaatcatgaaacctattagccgtggagcatttggacgtgttttcttggccaagaaaagaactacaggagatctttttgctataaagttttatgtccttgtgtcaccttcggatccacaatatgtctactctaagcaggttcttaggaaggcagatatgattcggaaaaatgctgtcgagagtatattggctgaacgtgatatcttgattacagtcaggaacccttttgtggtacgctttttctattcgtttacctcacgggagaatttgtatctggtcatggagtacctgaatggaggggacctttactcattactgaggaatttagggtgcctggatgaagacgttgctcgtgtatatcttgcagaagttgtactagctttggaatatttgcactctatgcacatagtccatagggatctaaagcctgacaacttgttgatagcccatgatggacatattaagttgacagattttgggttgtccaaggttggtttgatcaacagcacagatctgtctggtcctgctgttagtggggcttcactgtatggagatgatgagcctcagatgaatgagctcgaacaaatggatcaccgagcacggagacaaaatcgttctgctgttggaactcctgattatttagcaccagaaatccttttggggacaggacatggttgcagtgcagattggtggtctgttggtgtcattctgtttgagctcattgttggcatacctccattcaatgcagaacaccccgaggcaatttttgaaaatattatgaatcgcaaaataccttggccacatgtcccagaagagatgagttttgatgcacaagatttaattgacagattattgacagaagatcctcatcaacgactaggagcaaatggtgcctcagaggttaaacaacatccatttttcaaagacattagctgggatacccttgctaggcagaaggctgcctttgttccttcctccgatagtgcatttgatactagctacttcaccagtcgctattcttggaatcaatcagatgaaaacatatatgaagcatatgagttagaggactccagtgataatggaagccttagtggaagcagtagttgtgtgagtaaccaagatgacatgggggaggacagcactggcctcaatgagtttgaatctagtgcaaatgtcaattattctttcagcaacttctcgttcaagaatctatcacaacttgcttccatcaactacgatctgctcaccaaaggattgaaggatgatccaccgccaagaacagaaatgtagcagttaatctaaatttggatggactcatttgagtactcagacagtctacaaggtgctcgtgggatgtaggtcttgtacatatcaaagtgtgaggcatggtctgttcctattgaggctgttcctacatctcgcggatccgagtacagttttggtgttgccttgttttcatgactattgccatgccatcatcagtgaaatcacccttgaccaaatttggcattcgacctaggagcgctgtctttttggttcgtctttcctttttttttagtcctattatgagccttgggtttacggagattggtcaaggttactgtattcagaatacagctcctgaagacgtaggcgggtttcagagaattgccattctggcatacagttgactctggttcgttaagctggtagcccgctggacttcctgcggccagaactgtccacaacattttgatggccgtggaatataacattttgcttaatgtgtccagtgtccaacagaatcagggacattttaagaagaatattaaccgattgacattataaggatatcaaatggaagcggcgttttatgcaattcaaaattcgatgggcatcgcccagtagtcatattgtgagtatctgtaggctagtcggaatgtgtaacggtttgtccgatgtcatgtcgcttgcaaaatgctgtagtagcactacctgctgtttattaaactcagaactcgtttaatagccctcgtagactcgcgcagtggttggatcatagaatctaagttggaaatgcttgcttgcacgcttgttcctaagacctgcttgcacaatattcgttccctatttgtaaatatcaacatttgcaattgcaatgttatcgcaatagcaattgtagtactgctgtacctgtgagccagatcttgaatgctacaaaggcagtatcctttcttttt

SEQ ID NO: 74132 - DNA, 252 bp, Zea mays
  Clone ID: MRT4577_167608C.1
gctggcgatcgcgaccccgatcgacaactggccgttcatcgtctcctcctcccgggacaagtccatgctggtgtgggacctgaccaacccggtccactccaccccggaatccggcgtcaccgccgactacggcgtccccttccgccgcctcaccggccactcccacttcgtacaggacgtcgtccttagtattcgactgccaattctgactctgtggctcctaggacggcgagcttaccctctgggacctct

SEQ ID NO: 74133 - DNA, 779 bp, Zea mays
  Clone ID: MRT4577_167609C.1
ccggccgggaatgtcctaattcttggtaggccgcatgagttgcgtcctgctgtaaatatggacaaacaatgaagttgatgaaatttaggtgagtgctatgtgagtcataggtgctcataaaggatcatcacacatttagggtcgctataagcatggtgcatggatacaatagaattttttagttgtgtttcatcatctatactaattagtttgttagcgatcttgttcgggtgcatagccaatgctctaagagcatctccaatagattagttaaatggctcagcaagccaaattttagctattcaacagcaaaataactttcaaacagactagccatccaactcgccaagctatccggctcttcaaattggctccatctctagccaaatttggctagccgctgactagccaaactaaatagataatctgttggaacgagatgctatatatagaatgtaatctatatggagaggtaattagagtgtcatatagagagtcgaaaatagagtgtctcttggagatgctctaatatttttttttgtccacatattttaatacctaatccatggtgctccgtgctctgcatgaattttattcaatctaaatgttcacagataacaaactgatggaaattatgtgtattggtctcttggttttgatcgttaatgcaatgtcctaatttttggtggtccgcattgtagataactcctgcacatcattttcagttagccggagactttccaatcagagtctagcttactgtgagatctgtctgtttc

SEQ ID NO: 74134 - DNA, 400 bp, Zea mays
  Clone ID: MRT4577_16760C.1
gcccagcgagcgatttctcttccattctcagcctataactactatcatatgctcagacgccatgttgctaggaccactttttcgatgagcgacgaaatgatccacgcgccatgcatggacatcaaaaagggactctgttcctacctggggggcagcagctggtgcacctacagtgctgggctggggcgcatccgaggcgccctccgaggcgcccacctaaactgcctgtgttgcaggctaggcctagcagatagctgcagaagctccacgcgccctgcaagacgtccaggtgcatttgagatagttactcgtttaattacttcactgagagacgacgcacgtggtgtgcacgctgctgatgaatcaggtcgggagacatcataccataaatttgctggac

SEQ ID NO: 74135 - DNA, 256 bp, Zea mays
  Clone ID: MRT4577_167610C.1
gtggtttttttaaaaaaatggtgttgtgtaaaccttacggataccagtggagtgggttttacaatactgacgttatggataactaaatgatgttgcacaggggaggtatacggattctatccaatgtcgtaagaaacccataagggtggccaaaatcaacggtgcatggaacatgtcacatcaaagagctgacgttgaattccagtggtttgagaatgtctgaaccctttatagcctgttgctgcatgaaagcaca

SEQ ID NO: 74136 - DNA, 348 bp, Zea mays
  Clone ID: MRT4577_167611C.1
aacaaaaaattaatttactggggaaaaggagtttaacaatgggttgcctggggagaaggatgatccaaattagccccccccttttgggacaagcttaccctacaaaagtacaattgaaggttcggttttttttgccaattccaagcctttggaaaaagggcataaaaggggggggggcgagagccctaacaaagggatggccgctcctctatataaccggaaaagggtgaaacttgggcatgggttggcacaattggtttttttgaggattggagacattttttgccctgaccaagggcaatgaggacctcaaggttcgcatagggctttgggattcccctggtattt

SEQ ID NO: 74137 - DNA, 301 bp, Zea mays
  Clone ID: MRT4577_167612C.1
gggggatgcgaggtcgtgcgtagccatatttcacacaacggggcatcgaggatcgagctaccatctcgagatattaagatagagccaagcaagtggcgggtcaacgttagacacgttgatcgttgttgtgggaattaaaatacattgctcgaggatggcattgcctatcacgagagccgcttgtagaggaacagctaaccttgggaaggtggagaggccattgaacgtgtgaggtctagtcaaggcggaagaccccagaagcacattggccattcctgcagtgcgagctatgatgctggta

SEQ ID NO: 74138 - DNA, 398 bp, Zea mays
  Clone ID: MRT4577_167613C.1
ggtggatgggtattgttttcttttttttttcttttcatcctaaaccagtgatcgacacttttttggccaaaagaacgttccggcgccccacggatgtatcctgcctggggggcccccttgggttctccagccatattgcggggccccctttttttggtttccaaaaccggggaataaaatggcgggcgggggctttttttatgggagagccgccgggaccccccggacaaaaaaaacatggggggcccccgaccccttgggggggggggaccccccggggggggcatttggggcgatttcttttggggccgctccggggggggtaaaccgcagttttccaacgtggggggcgaggggcaccccccctttatctttgcaccaagcgccgtgttcggggt

SEQ ID NO: 74139 - DNA, 349 bp, Zea mays
  Clone ID: MRT4577_167614C.1
atttcggcacgagggtcatggggtaccctgaaccttctctcctccattcgacagaaacggactgacctctaggatacctcccagccttttgatgtactaacagtgtggcaacagattcttatgcaaagtgtccacaccttgtgctgaaaatgtaccgtctgatctacacatgactttgcacagaaggcgtgggggacaacaatttatctaaccacacgacggactccatatctatatcagttagtggcacccgaactggagtttaccaaacatagccagaccgggcgatactattcaagggatacactacccacctgtggtgacacactcacactataatacatgaatg

SEQ ID NO: 74140 - DNA, 719 bp, Zea mays
  unsure (1)..(719): unsure at all n locations
  Clone ID: MRT4577_167615C.1
cccgcattggccgcaggtttggttgcttagcatcagggggaaacatcgcaggttgttgttttgtttgaacactatcgagaggaagaggaggaggaggcggagttttgggttgagagctgcagaatagataatcggacttccggctggataagtgatcctttttttttgaatcgccagacgcggagagcaggagggtttatagctagcaacaggtgaaatggcaattggacagggcgacgagaagaagggctcccttgccaggagcttgagctgctcaaactgcgggagcggcgcaataatttttgggcggaagagagtcgccgtctcgccgactccgggctctcggagcccgcactcgccgacgcgcaccctgcgcaagcagcgcagcgtccggttccacatggaggacgacggcgtcaacctcttcaaccagctgtcgctagatgtactggttatgatcttttgcaaggtgaaccacagtgatctgaggaacctcctcctgatatcgaaatcggtcaacgaagcgaccatcgttgctagggagcagcatttcaagttctcgacgccgccggcgaagtccggttttagagacgaggaaaccgccggcggcgatgacgacgacgaggccccccggcgcgcccaagcacacaggggtgcgaggtcgcgcctgggggacacgaacctgtcgagcatcgncgtcaaacctgtcggcgtcgttc

SEQ ID NO: 74141 - DNA, 221 bp, Zea mays
  Clone ID: MRT4577_167616C.1
ctaacatctgcatccaaaggttggcaaggagccacttctgtttcagagattcgatctatggtgcaaatgctttcccgagaccagttgtcattgttaaaaaacaggggtgttatccagttagcactagctgctgaaatgtctctgcagatgtcacacttaatattctctcggcacttgctaagtcctcccagagagaactatgttgcacccgcacatggatg

SEQ ID NO: 74142 - DNA, 849 bp, Zea mays
  Clone ID: MRT4577_167617C.1
atctctctctctctttggagcgccgagccgtgccgatccagctcggctgaccctttctttccaaagccgagcagcgaccagcgagggtgccactgccaccgcccgccccccagtcccccactcactcactagctagcttgctagctgcgcactacgggctacgccgagctagagtccggcgatcacagcccggcaggccggccatggccaccgcgcccgtcgtcgtcctagtcctgcacgttctgctaggcgctgcagcggccgcctgcgccgcggcggcagggagtagcagcaaggtgccggcgatgtacgtgttcggcgactccacggcggacgtgggcaccaacaactacttgccgggcggcgccgaagtgccgcgtgccaacttcccccacaacggcgtcgacttccccacggcgcgccccaccggcaggttcagcaacgggttcaacggcgtcgacttcttggccgtgaacatgggcttcaagcgcagccccccgccgttcctcgccgtggccaacaagaccaacaggcaggtcttccgaggtctcctgggagtcaacttcgcctctgcaggatcaggcatcctcgacacgacggggagctccatcatcccgctgagcaagcaggtggagcagttcgcctccgtgcggcgcaacatctcgtcgcgcgtcggcaacgggtctgctgctgctgccgacgccctgctgtcgcggtccctgttcctcgtcagcaccggcggcaacgacctgttcgccttcttcgcgcggaacagcacgccgtcggagccgacaagcggcggttcgtcgccaacctcgtcgcgctgacagaaccatgtgaaggctctgt

SEQ ID NO: 74143 - DNA, 1084 bp, Zea mays
  Clone ID: MRT4577_167618C.1
ccggccgggctctgttataatatcattattaacctcgaagcaggccgggacaaagcacgcaagcacacacaacaaccacactcttgcaccgagctagcagccaagatggcgaccaaacacctggctctttgcctccttgttctctttagcataggcatgggcatggccaccgctgctgcaaaccgcaaactgggttatggccccgggggaggaggtggcggtggtggtagcggtggcggtggaggcggtggttacggaggaccaggctatgggtccggatcagggtatggtgagggcggtggcagcggaggtgctgctggagggtatggacatggtggtggcggcggcggcggtggtggtgagggtgcgggagctggtggctctgggtatgggtccgggcaaggatctggctacggagctggcagcggtgctgccggtggatatgggagtggcggaggtggtggaggtggcggtggccagggtggtggttccggatatggccatggaggtggtgaaggatacggctctgggtctggctttggtggtggtgctgccggcggcggcggtggacatggtggcggtggtggtggtggccaaggtgggtctggctatggctctggttcaggatatggatcaggtgaaggatacggacaaggtggtgctcatggaggaggctatggaagcggtggtggcggtggtggcggcggtggtcaaggtggtggtggctctggctatggatctggatccggctccggttatggaggcggcaacgacaacggacattattaggctctttttaagagctagatacatgttatacaaatatgtcaccagacatgagtctgtcttgttgcatgggatgctagctgtgtccatcgtgtgtgtaacaccgcaaggcttgtgatttgtcctgtaaactgcttgccgctttacattactggcaacaactaagtgataaataaaaatcatctatggaattatagtatgaacacttgagataaaaaaaaaaaaaaaaaaaaagagcggccgccaaaaaaaaaaaaaaaaaaaaaaaaaaaaagacgcggccggtcgacgcggccgc

SEQ ID NO: 74144 - DNA, 295 bp, Zea mays
  Clone ID: MRT4577_167619C.1
ggcacaccaggtaagaaacataagaaaccctatcaccgccggatctgaagacgtgggtatagaactcgatggcgatgaaaggaacaagaagaccaagagcacagcgtcttaaaacgacgatgaatatttgaagctccttgttaagatataccgattgttggacaagaggaccaaaaacaacttgaatgctgtcattcttaagaggctcttcatgagcaaaatgaataacctatcaatcttcatgcgccgacttgtctagttcatggaaggcaaagagaagaacatggatcggatt

SEQ ID NO: 74145 - DNA, 233 bp, Zea mays
  Clone ID: MRT4577_16761C.1
aatctcatgacgacactgttgtcattgcagcagcaccagctacaatacttggttcatatataagccaactggctacagaatctgcacacaactggtctatacgctgagaatgcacatgatactcgatggattctaagaagaattcggtctggaggctttagcatagtatactatggctagttggctgataggagagcgcttgcagtcaaacttcacacgaatgactcgtatca

SEQ ID NO: 74146 - DNA, 1614 bp, Zea mays
  Clone ID: MRT4577_167620C.1
ccggccgggccggggctgaccctttctttccaaagccgagcagcgaccagcgagagggtgccactcaccgcccgccccccagtaccccactcactcactagctagctagctagctgcgcactacgagtccggcgatcacagcccggcaggccggccatggccaccgtgcccgtcctagtcgtcctgcatgttctgctactcgctgctgcggccgcctgcgccgcggcgggggggagtagcagcaaggtgccggcgctctacgtgttcggcgactccacggcggacgtgggcacgaacaactacttgccgggcggcgccgaagtgccgcgtgccaacttcccccacaacggcgtcgacttccccacggcgcgccccaccggcaggttcagcaacgggtacaacggcgtcgacttcttggccgtgaacatgggcttcaagcgcagccccccgccgttcctcgccgtggccaacaagaccaacaggcaggtcttccgaggtctcctgggagtgaacttcgcctctgcaggatcaggcatcctcgacacgacggggagctccatcatcccgctgagcaagcaggtggagcagttcgcctccgtgcggcgcaacatctcgtcgcgcgtcggcaacgggtctgctgctgccgacgccctgctgtcgcggtccctgttcctcgtcagcaccggcggcaacgacctgttcgccttcttcgcgcggaacagcacgccgtcggacgccgacaagcggcggttcgtcgccaacctcgtcgcgctgtaccagaaccatgtgaaggctctgtacgtgctcggggctcggaagttcgccgtgatcgacgtcccgccggtcgggtgctgcccctacccgaggagcctgcacccgctgggcgcctgcatcgacgtgctcaacgagctggcgcgcgggttcaacgagggcgtcagggcggccatgcacggcctcggcgtgagcttccaggggctcaggtactccgtcgggagctcccacgccgtcgtgcagagcatcatgaagcaccctcaaaggctggggttcaaggacgtgacgaacgcgtgctgcgggtcgggccggttcaacggcaagtccgggtgcacgcccaacgcgacgctgtgcgacaaccgacacgggtcgggccggttcaacggcaagtccgggtgcacgcccaacgcgacgctgtgcgacaaccggcaccagtacctgttctgggacctgcccgcgccgatgaacgccaggcagctggccgaagacgaccggtgctagctagctagcacagctagagctagcacgaggacgtagggacgtgtctctgttctctgctgcggactgtggtgaatatggtcgttggtgtgtagaggacgacggatgcgtgcatggctgctgtgttcgctgtatgtttctcgaccgtggtttggtttagatgatgatgaccgacgccgccggcgtagtttggactgtgaacgaatttacatcatgctgctgcagaggtacgggtgtaccgtgtacgtgacatcgtctacacctctcctggacaactttaactgaatctttttttctgcgtcctcgactaaaaagctgctgcaaaaagggcggccgctcgcgatc

SEQ ID NO: 74147 - DNA, 264 bp, Zea mays
  unsure (1)..(264): unsure at all n locations
  Clone ID: MRT4577_167621C.1
ctgacggtgggccggataggcggacacccatcgcaactaacccccacccccaaacctccaatccacccataccctcctcatccactccggtctgccatggcctgctccttcgccgccgcgaccgtcgtctcttccgcccccaccccggccgccagcccctcgccgctgccccgcagtccgtctctgtttcccgctccgctgtcgtcaccgccgccagtccgctccgnctcgtcgcctccagatccgcgcgggtcatcagactcg

SEQ ID NO: 74148 - DNA, 227 bp, Zea mays
  Clone ID: MRT4577_167622C.1
gctacaacagcacctagattggccgcgcatctatcatcagcgtgcggagcgtctaatgcggatccagggaaccattgctcatccaggatgctgagtgttgctaataaagctaacgttaactctactgtcaggagtaactgcatcttgatgcataactacagtttacagacgttactcacttcattgtggagagcgatctgatccatagatcgtgcaggctgtgcttg

SEQ ID NO: 74149 - DNA, 295 bp, Zea mays
  unsure (1)..(295): unsure at all n locations
  Clone ID: MRT4577_167623C.1
tcaaaaacccangaaaaccgcgggggggcaagaaaatatttgggggcacacaacaancataacacgtatcatatttcttatttactgggtatgtctagttacatttcactgtatacatgtttactcaaagccccgcccaagaactatacagctcaccactgcatctgcattgtgcaaacatttttttagatgggaacatatcgaatgcaaaccacgttctggtgtcaaaaaaaaaaaacaaaatgctagagtagaacatataaaaaaagtattgtactcgcaatttctttttctt

SEQ ID NO: 74150 - DNA, 244 bp, Zea mays
  unsure (1)..(244): unsure at all n locations
  Clone ID: MRT4577_167624C.1
acgcgcacgcgtgcagccagctgatggggtttctcttatacgcagaacgagttcaaggggtgggcccggcgggcatgggggcgaacccaacgctcccgtcccaagggaaacacggcggcggcgccgcccagccccgnangcacgtgtacgacatgtagtcgacgaccgtgaaccctctggtggtcgacgacccgagccgcctcctgttgcaggacttcacgcagggcccctacatggacgcggc

SEQ ID NO: 74151 - DNA, 240 bp, Zea mays
  Clone ID: MRT4577_167625C.1
accacgcgtacgccctttcgtgcgaccatttgtccttttacacgatgcaaagaagatgggtgtaccttctatggccacatctctgatgtcactcataagagtatggcccttagatgctgacgaactttagctctataatccataaaacatggcctaacaccctaaacgaatcagcctgacgaaccacaagcatctgacctgctacgtatccgatccaggcccctaagtgcaactcactgt

SEQ ID NO: 74152 - DNA, 526 bp, Zea mays
  Clone ID: MRT4577_167626C.1
ggcaatgcgcatacttgcatatgggttaccttctgatgcggtagacgagtacgttcaaatcggggagtctacagctagggaaagtcttcatcatttttgtcgcgcaatcatagcatattttagtgcctggtatctacggactcctaatgaagctgacataacatgtatcatgcacagtagcgagtcaaggggttttcctggaatgttgagttccatagattgcatgcattgggagtggcagaactgtcctatatcctggcatggtcagttttgtggtagaaatggtagagcgtccatgatactagaggtggtagcaacttatgatctatggatttggcatgcattttttggcatgccagggacaaacaatgacgttaacgtgctgcaccgatcaccagtattcgaccctttgacaactggtcgaatgccaccagtgaattacacagtaaatggtcatgcttacaacttcagatattacttagctgatggtatttacccgaactggcctacttttgtgaaagctatc

SEQ ID NO: 74153 - DNA, 334 bp, Zea mays
  unsure (1)..(334): unsure at all n locations
  Clone ID: MRT4577_167627C.1
agctagcgtaggctataaacatcagaagtccgccggngcgcgggacatccatgtgccagccgccaagactagtagaccgtcggcctgggaccaacgatcacttggagcaccggacaatctggttttctagtaccacccaccggacggtgtggtgcccctcagaacgaggtcaccacaacgtggagtaggcattggccgaaccacgggataaaatcattgtgtaacttgtgtatttctttattgtgattgttttcttcaaaaaaaaaaaaaaaaaaaaaaaaaaaaaaaaaaaaaaaaaaaaaaaaaaaaaaaaaaaaaaggggcggnccgtttt

SEQ ID NO: 74154 - DNA, 221 bp, Zea mays
  Clone ID: MRT4577_167628C.1
atcatcacgcggtgcagtaacacgaacacctagcgatcacgactactacggctccgaagacgtagctcgctcctgctcttgccccgtgctacgtgaacactgtggagtagcacctgctgagtcgctccgataaggtctcctccatagacttgctggtccacagtgctccctatggtcttcatcactatctactcattcgtggagccacgggatgtgacgtg

SEQ ID NO: 74155 - DNA, 518 bp, Zea mays
  Clone ID: MRT4577_167629C.1
caccggtttgttgcttgctgtaattgtaaaaggtgtaagaccttgtttgacgaaaaacagcatccaccatcgcattttctagccaggccggtcttacaccattttgcaaatacagtactcgacaaaccttagggggcctgcggtcttaaggatccaagctcgctttctctttcctgccacttctggcttcttttataggggcaccttagtgcaattgctgaccgaacattttacacctcaagaactggcaaaacactgccgttgcctatgctactggcctttcctgcccttctcatttgcctcactgtactgataatgattatgccgttacggttcatctttataaacaccggcacgcacagattggtgactgtgacaacaccctggttctgcacatctatcacaaattcatgaggtggttaccaccatagcgacttttactcttgccaaggtgcttgactgccaatacttttcagtataatatcctcaatttgtcccaacctgactcgatttccccc

SEQ ID NO: 74156 - DNA, 450 bp, Zea mays
  Clone ID: MRT4577_16762C.1
ggcttggaacctttgggctgatttatgtgcttggcctcctcctttctaacttaccgtaagtaataggaggagaaaaaataaggagtgagagtggcgtatcgatgtgtataaggtaaaatttaactggagttgcggattgggttggagacagggtctgaggttacggtaagtggaggtgagggtgtagggagtggtgagcttttatttgtcgttctagcggaggtggtagtgggggaggtgatgtcgtatacttggcgtgtgaatggtctcaagcctatggcgtagatggattcgggtgttatggcgggtgggcctaaggaggctgcagttgggagtcgtgatgcgttggtgttgtagtagtgctcgactcataagggttgtacttctaaggatgagtaaatttcagaaagtcatggtgccgagatagactatataacctatccggcgtgc

SEQ ID NO: 74157 - DNA, 246 bp, Zea mays
  unsure (1)..(246): unsure at all n locations
  Clone ID: MRT4577_167630C.1
tttattttcaccnaaanactgaccccactccacggggaaatttttcacaattttaggcgcagttaaaaaaacgacttttcttgcgctttattgtggccacaaaaaaccatggggaaactttctccccgccgggaatggaatttggtataaaaccaaaccaccgaaaggtccatccccatccgaggaagaaaaggacaaaggctttcaaagggtcccacccacccgatgggggaatttttacaaccc

SEQ ID NO: 74158 - DNA, 543 bp, Zea mays
  Clone ID: MRT4577_167631C.1
atggtcattctaaagctagattttgaaaaggcttttgacaaatgggaacatgcaactattattaaggttttgaggcacaaggggttcggtgacaaatggattcactgggtttctatgattcttgactccggcactttagaagctcttttgaatggcgtccctgggaaacgatttcactgcaaacgcggagtcagacaaggagatcctttgtccccacttctttttgttcttgcaactgatcttctgcagtcaattgtcaacaaggcttgtgactgtggcatcttacggctccccctgccgagcaattgtggtcctgatttccctattattcaatatgcagatgatactattctcataatggaagcttgtcctagacaacttttctttctaaaggcgatgctcaattcttttgctgaatccacagggctacatgtcaactaccacaaatctaatatttttcccatcaatgtcacagaccaaaaatggaaatccttgcaaatacattccgctgcaaaattggatcaatgtcgttcacttacttag

SEQ ID NO: 74159 - DNA, 304 bp, Zea mays
  Clone ID: MRT4577_167632C.1
acagcacggcacatcccaaaagatcttacaacacggcctcccagagtgagtactgattactcaagaacaagactgcgactgccgacgacgactgcaaggtcggaaaggctgtcgtcaagggcaatggaaagcctctttgcctcatccagcccgagggacgtcgatacgaggtatacattcccatcctgagacagggtgtgcccacgaccgcaggtgctgaattgcgagcacgaaggtatggaggaggttacacctcggcagtctaagccaaccgccaaggcattgccagaagcatcagcgtcga

SEQ ID NO: 74160 - DNA, 545 bp, Zea mays
  unsure (1)..(545): unsure at all n locations
  Clone ID: MRT4577_167633C.1
ttttatggaaaaaagtggggtgttttttngttggaaatttggtntgtatatggaactgttgntggacgcggnggaaagcaaaacatatgccggaaactcactatggctggaggaagaatatgcctacctggggggggggggggggggcattaatgcttttnnaacccnaagcacactanacacaaaagccagatgagcaggtaggtccctngnaagggtgatgccaacaattaaaccgacgacccttgacaacaaaattacgattgtttnttntgatncacgtgcagttgaggttgcttttttggaggctnttnaaatgtgtgtttttggacaaggtcagggacgtggtgatgatgctgtgcaggtgtttgaggaccaggtacctgactgtggaaaatttgagttagttttttaaggttgtgcaggttatcagggacccagtttggttgataatttgatgggaagaaggtgtttggagaattttttgagtgggggtacttttattaaccacccaatgtatttagaggaattggatgctttgtatt

SEQ ID NO: 74161 - DNA, 291 bp, Zea mays
  Clone ID: MRT4577_167634C.1
ccacgcgtccggtccgcttttccttccgcatctctagccgagtctatctggggctccgccggcggagctatgctaatggctcgcttcgccgtggtcgccggcatcgtcgccctcctcgccgtcgtcgcggcggcgcaggccccgaccacagctcccaaggccgcgcccaggatggccccgctgtcgccaccgtttgtgctggccccatctacctacgcgcccgcatcggatacacatacattctggccaatagtgtatgtgccactttccagtttgggcccgttccgttca

SEQ ID NO: 74162 - DNA, 613 bp, Zea mays
  Clone ID: MRT4577_167635C.1
gagctctttttctcccccctcccctccctccccgtcgcagcacacgcctcctcattttcctcatctcctctcctctcctctcctctcctgctctgctctcctttggagcgagaagcaacaacaaagattaggagctgctgatttcgcctctgttcttcgtcgtggtcgtcgcagcgagatttggctttgccggcgctttgatcttgaaggatctgcagagagatatggcgcgttttcaggaaaccaagccggatctgctgaattccggcagcgatacgcggatgatggccgaggcccgagcccccaaggcgcggaagccgtacatgataaccaagcagcgcgagaaatggaccgaggaggagcacaagctcttcctggaggccatgcagctccatggccgcgcctggcgccgaattcaagagcacataggcaccaagacggccgtgcagatcaggagccatgcgcagaagttcttctccaaggtcacccgggactcgtccggcgacagcggcggcagcagctccggcggtgctgggccgccgatccagatcccgccgccgcggcccaagaaggaagtcggtgcacccgtacccgtggcaccagaggagcgcgc

SEQ ID NO: 74163 - DNA, 122 bp, Zea mays
  Clone ID: MRT4577_167636C.1
agacgcagaacgaggtgtctcgaggcatatgcacagaactcacacacgcacacgggtcctgaattcaccgttacaagcagatcaccctcacggtaaccagtgttggtccaaggaaactaacg

SEQ ID NO: 74164 - DNA, 212 bp, Zea mays
  Clone ID: MRT4577_167637C.1
tgatagaagccatttgctgatgtattctcagcttcatgaatggatgttaaaatgccactctaagggcaatgctttgatgaatgatttggttgacacattggatctgtatagttctatgtttgctcgtttactctagacatgtatttctactggagtgtttacacttgatctaggaacattccattctggccttccaactgataccataccat

SEQ ID NO: 74165 - DNA, 759 bp, Zea mays
  unsure (1)..(759): unsure at all n locations
  Clone ID: MRT4577_167638C.1
agcggacacgcggtgactgttgcggtgttgccgcatccacgccctagtcgaccacgccgcccccagcagcccgctgctgccgcggctcgcgccctcaggagcccccgccgtcgcggctcgcgcctcgtatccgtaacagctacaccgcgccgcctacccccgcttcctgctggctgcatcgtcctcaggtcttccgaagatgactacaaaacttgaccaatcttctgcggagcatcgcccagcaaaattcgcagcaccatcgtctttgacccccaagatctcaatgtttggggcaaaagctggattcatcatacctaagaacaagctggccggctcactcgtaatccggagcaccagtgacaagaatgaaacaccaactgcatccaacgaagatagcagcaggcatgttcacagaaagacaaagtgggggcctgacctcgctttggaccctgtcgtgtgcaaaggaagggctttggcctaccagactcgagtggagcaaatttccaagcagctgaagtctggagctttggacacgtccgaaattgatggttcagtgtctgctggaaatgaattgaattctattggtcctgacatcttgaaagagaacgagctgngaaatgttgaactattggaacttgaaagacgagagcttatcggtgaaatactccgtttgaatccgggatataagacacctgagaactacaaaccagtacttagggagacanaaatccctgttccggcagaacacacccaggaaat

SEQ ID NO: 74166 - DNA, 302 bp, Zea mays
  Clone ID: MRT4577_167639C.1
gctgagcagggaccaccaccaccaccaccacccagactctcatcatgggtgttgcaccatccaagggcggggtcgaggcggccgccggagctgagaacggcgggtgcaagtgcggcgccaactgcacctgcgacccctgcacctgcaagtgagacgacggcggcggcgatgactctgcagggtctagtatataatgttctagcagtgtcgtttgttgtgttttgttcgagtcagtcagacagtcagccgcgtgccatgggccatggcatagcatagcatgccttgctctatctgatccatct

SEQ ID NO: 74167 - DNA, 506 bp, Zea mays
  Clone ID: MRT4577_16763C.1
aaaaaaaaaatttaaaaaaaaaaaaggggggaaaaaaaaaaaaaaaaaaaaaaaaaaaaggggaggggcggaaaaaaaggagcggggccttcttttacgaggccccttccttccctcccctttcttttcgccttactttaatcttttttgcatggccccgtgttattaaaacactccccccttgttttaggggggggggggggggggaaacaaccttgctttccccccaattttccttttccttgcggttgcccccttttttgcaccggcgctgggccacttaccgatttgcccccacccatgcgccgtccttaaacagcaattgcggcacgcctccttgcactggggccatccccccctgtcgcggcttttttattccccccagtggtggtgttctccttaccctgggccactaccccccttgtcctttctttttacccccctttcttttctttttatcgtcccttttttttgcccccgcccggcgccggtttcccgccctccct

SEQ ID NO: 74168 - DNA, 258 bp, Zea mays
  unsure (1)..(258): unsure at all n locations
  Clone ID: MRT4577_167640C.1
nacttctaccnatagcccccctccccccctcctccttgacccgccgccgcttctcccaccccgaaagaaaaacacacacacagtagagagcttcagcttcccctgagagcgagagatggcggcgaagggcgacgggccggcgatcggcatcgacctcggcacgacctactcgtgcgtcggtgtgtgtgtatcactaccggttcgagatttcttcattgaccagagcaagtggatcgcgccgtccgacgcccccttccc

SEQ ID NO: 74169 - DNA, 848 bp, Zea mays
  Clone ID: MRT4577_167641C.1
ccggccgggacggagcagggcaggggcaggttgcatttgcatctgagttcctgattgttgtattccagtttcttctgtgagttttgtgggatcgcgaggaggaaggatgtcgtgctgcggaggcaactgcgggtgcggcgccggctgcaagtgcggcagcggctgcggagggtccaagatgtacccggatatggctgagcaggtgaacaccaccaccaccacccagactctcatcatgggtgttgcaccatccaagggcgggttcgaggcggccgccggagctgagaacggcgggtgcaagtgcggcgccaactgcacctgcgacccctggcacctgcaagtgagacgacgacggcgatgctgctgcagggtctgcagggcgtgatggggtcctcggaaggactctttatctctagctaattattctagcagtgctaataagctctagtatataatattctagcagtgtcgtttgttgtgttttgttcgagtcagtcagacagtcagccgcgtgtgccatgggccatggcatagcatgcctcgctctatctgctccatcgccttgttctagtggtggtactgatgggggaacgaataattgtaccgagatgttggcgccgtgtcgtgtcgtgtcctgtcctgtccttcctggggctcatatagcagtcagactgtgttgtgttgtgctgtgtgggccgagtgtgcagtacagcatcaggccatgccccctgttccatctcatctgtgtgcgacttttgtttgtgctgtgtcatctatctatctaatccatctatgctatcctctaaaaaaaaaaaaaggaggagggcgacagcaacggaattcgagct

SEQ ID NO: 74170 - DNA, 710 bp, Zea mays
  unsure (1)..(710): unsure at all n locations
  Clone ID: MRT4577_167642C.1
gagctgagaacggcgggtgcaagtgcggcgccaactgcacctgcgacccctgcacctgcaagtgagacgacggcggcgatgacgctgcagggcgtgatggggtcctcggaaggactctttatctctagctaattaataagctctagtatataatattgtagcagtgtcgttttttgtgttttgttcgagtcagtcagacagtcagccgcgcgtgccatgggccatggcatagcatgcctcgctctatctgctccatcgccttgttctagtggtggtactgatgggggaacgaataattgtaccgagatgttggccccgtgtcgtgtcgtgtcgtgtcctgtcctgtccttcctggggctcatatagcagtcagactgtgttgtgttgtgctgtgtgggccgagtgtgcagtacagcatcaggccatgccccctgttccatcaaaaaaaaaaaaaaaaaaaaaaaaaaagggtcctgtcctgtccttcctggggctaatatagcagacagactgtgttgtgttgtgctgtgggggccgagtgtgcagaacagaatcaggccatgccccctgttccattaaaaaaaaaaaaaaataaaangnnaaggccctggcctgttcttcgtggggctaaaaaaacaaaaaaactgtgttgttatgggctgggtggcccgtgtgtacactacagtatcaggccctcccctttgttccat

SEQ ID NO: 74171 - DNA, 2115 bp, Zea mays
  Clone ID: MRT4577_167643C.1
ccggccggggtccgacccggcgttgtgattgggggagtatgaagtgctcacaccatctcctctccattcacatcagcgctccacgcctgcgcccctgaattcccaaatcctgcgcgcctctgccccaaccccgctcgtcgactcctctctgccaaacacgtcggaggaatccttctccggaactcgtcttcgtcctgtctgtcgggctggcgtggagtggagatccatcaccacgtggataggtctcttcttctgctggttcaacgctgaatctgtccttcaatgccttcacaggctctacccctgaagaagttgcagagttagaagctattgccgcattttttgttgaagggaacattttttttgggtcatatccagattgaatacgaaacatgctcgtccttttgggactttaagagaataagaggcaaaaggaacataaggatagaggagagaaataaacaatggggaagggagatgtggctaccaggtcaaaatctcaaaaatcaccagcaatacagaatgagcagagtacacctgctaacccgcccacagcatatcctgattggtctcagttccaggcatactataatgctgctgggacagctccagtgaccccacctttttttcatccatctgtagctccaagccatcaggggcacccatatatgtggggtccacagatgatgtctccttatgggacaccaccaccatatgcagcaatgtatgcacaaggtacaccatatcagcaggcaccaatgccaccgggttcacacccatacagtccttatcctatgcagttaccaaacgggacagttcaaactccaacatctggtgctggtggtacagcgacagataaatcaaataaaaataagcggaaggcttccctcaagagatcaaaaggaagcttaggtagtctggatgttgttgcagtaaaaaataacaagtcaccggcaaagccttcaacttcttcctccaatgaaggttcttcacaaaggtaatttctttattttttttgttatactaacagataaattattgaatccactatctattatacagtgagagtggaagcgggagttcttctgaaggaagcagtacaaattcaaaaagtggttcaagggtgaaggataattctgagcaaggacagggtaatgatgctaggagtaaatgtactcaaagctctgtcgttgagcccacacaaccatcttcagggtctgttgtgcttaaccctatgatgccattttggcctgtgccccctcccatggctggcccagcaactactctgaatatgggagtggattactggggtactcctgcttctgtacccatgcatggtaaagttattgcagcaccgacatcagctccttcgtcaaattcacgtgatattgttctcagtgatccgactatacaggatgggagagaactgaagagacaaaaacggaagcaatcaaatagggaatcagctcgacgctcaagattgcgcaagcaggctgaatgggaggaagtagccaatcgtgcagttttgctaaagcaggaaaatagttcacttaaagaagaattgaaacaacttcaggagaagtgtgatggcttgacctcagaaaatacatctttacatgagaagcttaaagcgctcgaggatgagaaatcaaatggaaattggtacaaggattaaaggctgaaacttctctctctttctgactgctgatataatttggtggtaacctgataggacgacaactaaagaggtattcatatacggtattagacttttgtccgagggggtaaaattgtatcataggatttgacatggttgacggctacagattcttcttccagttgtgctgctgtgctgtgttgtctttcttccctcttcgtgctagatcctacagaagtacaactatgtagaaacccccaggtggtgtttgaagcctggggggattagcgtgtggtattggtatagctgttgtagagctgctcattgagcttcttgacagaaactgaagcgtgctaaagcagtcgtgtgatttacgattcagacggactaattttacggatagtactgtaactgcactaatgaatacaaatagcctttttactggtttcgccttgtat

SEQ ID NO: 74172 - DNA, 845 bp, Zea mays
  Clone ID: MRT4577_167644C.1
ttccgaccgacggcatttgcatctgagttcctgattgttgtattccagtttcttctgtgagttttgtgggatcgcgaggaagaactagaaggatgtcgtgctgcggaggcaactgcgggtgcggcgccggctgcaagtgcggcagcggctgcggagggtgcaagatgtacccggacatggctgagcaggtggccaccacccagactctcatcatgggtgttgcaccatccaagggcgggttcgaggcggccgccggagctgagaacggcgggtgcaagtgcggcgccaactgcacctgcgacccctgcacctgcaagtgagacgacggcggcgatgacgctgcagggtctgcagcctgcagggcgtgatggggtcctcggaaggactctttatctctagctaattaataagctgatctagtatataatattctagcagtgtcgtttgttgtgttttgttcgagtcagtcagacagtcagccgcgtgccatgggccatggcatagcatgccttgctctatctgctccatcttcttctacgcatgccttgttctagtggtggtactggtgggggaacgaataattgtaccgagatgttggcgccgtgtcgtgtcgtgtcgtgtcctgtcctgtccttcctggggctcatatagcagtcagactgtgttgtgttgtgctgtgtgggccgagtgtgcagtacagcatcaggccatgccccctgttccatctcatctgtgtgcgacttttgtttgtgctgtgtcatctatctatctaatccatctatgctatcctcaaaaaaaaaaaaaaaaaaaaaaaaaaaaaagtactctgcgttgttaccactgct

SEQ ID NO: 74173 - DNA, 461 bp, Zea mays
  Clone ID: MRT4577_167645C.1
atcagctcgacgctcaagattgcgcaagcaggctgaatgggaggaagtagccaatcgtgcagatttgctaaagcaggaaaatagttcacttaaagaagaattgaaacaacttcaggagaagtgtgatggcttgacctcagaaaatacatctttacatgagaagcttaaagcgctcgaggatgagaaatcaaatggaaattggtacaaggattaaaggctgaaacttctctctctttctgactgctgatgtaaggttacttgtgagctgccgttaggcttacagaataccaactctgattgccggtgtaatgttctccatattttttttccagataatttggtggtaacctgataggacgacaactaaagaggtattcatatacggtattagacttttgtccgagggggtaaaattgtatcataggatttgacatggttgacggctacagattcttcttccc

SEQ ID NO: 74174 - DNA, 811 bp, Zea mays
  Clone ID: MRT4577_167646C.1
tagggtcgcatttttttttatttaaggtggcaaagcccaaacaaaattaaacttggcttgagatggaacagggggcatggcctgatgctgtactgcacactcggcccacacagcacaacacaacacagtctgactgctagatgagccccaggaaggacaggacaggacacgacacgacacgacacggcgccaacatctcggtacaattattcgttcccccaccagtaccaccactagaacaaggcatgcgtagaagaagatggagcagatagagcaaggcatgctatgccatggcccatggcacgcggctgactgtctgactgactcgaacaaaacacaacaaacgacactgctagaatattatatactagatcagcttattaattagctagagataaagagtccttccgaggaccccatcacgccctgcaggctgcagaccctgcagcgtcatcgccgccgtcgtctcacttgcaggtgcaggggtcgcaggtgcagttggcgccgcacttgcacccgccgttctcagctccggcggccgcctcgaacccgcccttggatggtgcaacacccatgatgagagtctgggtggtggtcacctgctcagccatgtccgggtacatcttgcaccctccgcagccgctgccgcacttgcagccggcgccgcacccgcagttgcctccgcagcacgacatccttctttcttcctcgcgatcccacaaaactcacagaagaaactggaatacaacaatcaggaactcagatgcaaatgcaacctgccccccggccgcccgccatcgagcgccgcaca

SEQ ID NO: 74175 - DNA, 271 bp, Zea mays
  unsure (1)..(271): unsure at all n locations
  Clone ID: MRT4577_167647C.1
gcggccggcccttnnnnnnnnttttttttttttttttttttttaacccgaaaaaaaacaaattttattcataaacaaaatggggtcacagatattttttcatacctacatgcttaatgggggggaccccacttgccacctaaaggtggatacttacttatttagaccnncccaacatgtgggaacattgggaggttacatggttacaaaccacaaaatttcataacaatagcccgggttgggtggtttacagaataacccaacccccaccc

SEQ ID NO: 74176 - DNA, 773 bp, Zea mays
  Clone ID: MRT4577_167648C.1
aattcggcacgaggctgagttcctgattgttgtattccagtttcttctgtgagttttgtgggatcgcgaggaagaattaaaaggatgtcgtgctgcggaggcaacttcgggtgcggcgccggctccaagtgcggcaacggcttcggagggtgcaaaatgtacccggacatggctgagcaggtggccccccctacccagactttcatcatgggtgttgccccgtccaagggcgggtttaaggcggcccccggagctgataacggcgggtgcaagtgcggcgccaactgcacctgcgacccctgcacctgcaagtgagacgacggcgatgacgctgcagggcgtcatgggatcggaaggactcttttatcttaagctctagtataatattctagcagtgtcgtttgtgttttgttcgagtcagtcagacagtcagccgcgtgccatgggccatggcatagcatgccattgcctcgctctatctgctccatcgcctttttctagtggtggtactgatgggggaacgaataattgtaccgagatgttggcgccgtgtcgtgtcgtgtcctgtcctgtccttcctgggactcatctagctagcagtcagactgtgttgtgttgtgttgtgctgtgtgggccgagtgtgcagtacagcatcaggccatgccccctgttccatctgtgtgcgactttgtttgtgctgtgtcatctatctatctaactaatccatctatgctaaaaaaaataaaaaaaaaaaaaaaaaaaaaaaaaataaa

SEQ ID NO: 74177 - DNA, 1104 bp, Zea mays
  Clone ID: MRT4577_167649C.1
gggtacctcgaggtcggccggggaagctcttgaggagatgctgcaatgaaacatggctcctctgtctcctagactggtagtgcccgtagacgtgaagaagctgccgcgggagcaaaaggtccctctccacaaccgctggcacccggatatccctcctgtcgctgatgtaaccgaaggggaattgttccgcgttgagatggtcgattggagtggagggcgggttagggatgataactctgcagatgatctgaaattcatggatttcacaattgctcattatcttagtgggcccctaagaatagttgattctgaaggggttccagcttcaccaggtgatcttctcgcggtagaaatctgcaaccttggcccacttcctggcgacgagtggggttacaccgcaatacttgaaagggagaatggaggtggattcttaactgaccacttccctagcgcaagaaaagccatctggtatttcgaaggaatctacgcatgctccccgcagataccaggtgttcgttttccaggattgactcatcctggtgttgtgggaactgcaccgtcacttgagctcctaaatatatggaatgaaagagagaaaagtttgtctgagacaagcccggagactattaaactgtgtgaagttctacaccagaggccccttgctcatttaccgacccctgaaaattgcttacttgggaaggtccaagaagggactgctgaatggcacataattgcaaacgaagcggccagaactattgctggaagggaaaatggcgggaattgcgacataaagaacctaagcagaggctccagaatttatctaccagtgtttgtcgaaggagcaaacctcagcactggtgacatgcacttctcccagggggacggcgagatttcgctgtgtggagcaattgaaatgagcgggttccttgagctcaagtaattctgttcttatttacacttcagcactacatgatagtatgacatctcgcattcatcgagcagacctaagtgcttggttcgaggaatgagctagtccatcatcttatcacatctcacttttttgtttcgtttgtggagtgaaatgagatcataaccttatttctc

SEQ ID NO: 74178 - DNA, 565 bp, Zea mays
  Clone ID: MRT4577_16764C.1
cccgggcggcggcggcgtctttgcggcggccgggttgatggccaagggggggggggcgcccaggctgcgggtcatcgaccagtgcctgcggcagcaccgggcgtaccagaccggcgtcgtcctcgagagccagccgtggagaccgcagcgcggcctgccggagcgcgccgtctccatcctccgggcgtggatgttcgagcgctgggggggcccgtatccaagcgacgtggacaagcacatcctggcgcgccagaccggcctgtcacgcagccaagtctccaactggttcatcaacgcgagggttaggctgtggaagccgatggtggaggagatgtactcggaggagatgaaggaccccaaggagggcgcctgcagtaacgcgaacagcagcgtgaacactggcgccggctacgcctccgaggagctagggcagccgctggggcacgggggcgcctgtggtggcgtggacgagcagaagccgacgcgggcgcagctggtccacgacgccgggtcgctagcatcagtcgtcagcatcggcagcagcagggaccagcagcagatcagc

SEQ ID NO: 74179 - DNA, 275 bp, Zea mays
  Clone ID: MRT4577_167650C.1
gcctccgcgtgtattgtgaactgtccatgctgcagatctagctttcactacactcagctgccaaatccgttgcaagcatacactagcacatatcagctaagacggctgctgcgtctcataatagtgtcaaagcaatggctgtggccgcaaccgctgtgtcaatgctgctcgctgattctgcggcggatgccgctcatcaccacaacttcttcgaccttcactagttcttcatcttcttcgatgagcagctctccttgatgctccagccggaccag

SEQ ID NO: 74180 - DNA, 1027 bp, Zea mays
  Clone ID: MRT4577_167651C.1
gacaggctgcatttgcatctgagttcctgattgctgatcccagtctcttctgtgagtggaatcgcgaggaagaaggatgtcgtgctgcggaggcaactgcgggtgcggcgccggctgcaagtgcggcagcggctgcggagggtgcaagatgtacccggacatggcagagcaggtgaccaccacccagactgtcatcatgggtgttgcaccatccaagggcgggttcgaggcggccgccggagctgagaatggcgggtgcaagtgcggcgccaactgcacctgcgacccctgcacctgcaagtgagacgacggcggcggcgatgacgctgcagggtctgcaggccctgatggggtcggaaggactctttatctctctagctaattaataagctctagctagtatataatattctagcagtgtcgtttgctgtgttttgttcgagtcagttagacagtcagccgcgtgccatgggccatgcccatggcatagcatgccttgctctatctgctccatcgccttgttctagtggtggtactgatgggggaacgaataattgtaccgagatgttggcgccgtgtcgtgtcgtgccctgtcctgtcctgtcctgtccttcctggggctcatctagcagtcagactgtgttgtgttgtgttgtgctgtgtgggccgagtgtgcactacagcatcgggccatgcccctgttcgatctgtctgcgactttaatttgtttgtgctgtgtcaaaaaaaaaaaaaaaaaaaaaaaaaaaaaaaaaaaaaaaaaaaaaaaaaaaaaaaaaaaaaaaaaaaaaaaaaaaaaaaaaaaaaaaaaaaaaaaaaaaaaaaaaaaaaaaaaaaggggggggcgctttttaagggacccaagtttacttccccgtgcttgcaaggtaaaagtttttttttggggcaaccaaaattaaattaatgggccgggttttaaaaacgttcggaattggaaaaaaccttgggggtaaccaaattaaatcgctttgaagaaaatccccttttc

SEQ ID NO: 74181 - DNA, 1276 bp, Zea mays
  Clone ID: MRT4577_167652C.1
ccggctgcaagtgcggcagcggctgcggagggtgcaagatgtacccggacatggctgagcaggtgaccaccaccaccaccacccagactctcatcatgggtgttgcaccatccaagggcggggtcgaggcggccgccggagctgagaacggcgggtgcaagtgcggcgccaactgcacctgcgacccctgcacctgcaagtgagactacgacggtggcggcgatgacgctgcagggtctgcaggccctgatggggtcggaaggactctttatctctctagctaattaataagctctagctagtatataatattctagcagtgtcgtttgctgtgttttgttcgagtcagttagacagtcagccgcgtgccatgggccatggcatagcatgcctcgctctatctgctccatcgccttgctctagtggtggtactgatgggggaacgaataattgtaccgagatgttggcgccgtgtcgtgtcgtgtcctgtcctgtcatgtccttcctggggctcatctagcagtcagactgtgttgtgttgtgttgtgctgtgtgggccgagtgtgcagtacagcatcgggccatgcccctgttcgatctgtctgcgactttaatttgtttgtgctgtgtcatctatctatctaatccatctatgcgaaaaaaaaaaaaaaaaaaaaaaaaaaaatcaaatcaagaacgatgaacctaaagggctccagagggaatacttcctttactttgtacctcgccgcactgttgcttgtgagaagatcctggaggaagagaaagttcatcagaaactgacattcggagaatattccttatatctagttccattggatgatgatgtcttgtctcttgaacttgaccattctttgcaggaatgccttattgaaggagatacaagttctatctggcatgttgctaaagcgatccataaattagagtttgcctttggagttatcccgaatgttagggccaagggtgtggcgtcaaccaaagctgcagagttgttgaatagtatgcaactagaggatccagtcaacatggatgatatggggattccagagataaacactgttattctgttagacagagaggtggacatggtaacaccaatgtgctctcagttgacgtatgaaggcttgttggatgagatgctacaaattaataatggttcagtgggaagttgatgcaagcatcattggagctcaacaagatgggaaaaaggttaaggttccactgaattcaagcgataagttgtacaaggagattc

SEQ ID NO: 74182 - DNA, 482 bp, Zea mays
  unsure (1)..(482): unsure at all n locations
  Clone ID: MRT4577_167653C.1
gggattgtaaccaatatcacgataccttccaacatgttctaagtactatcactatgactcgagctgaacatgtgattattgtgaaataagtcaacctatgtgtcgtcgcctcgttggagagttgtaaaagaacttgtatttgattattgcggagttcgctggttgntttgttgcattgagaacttagnaggttttgggggggggggggtntttttgggggggggnnnnnnttttnnnaaaatggttatgggttgggaatggggnttattttttttgggggggggaaaaaccacaaaaaggggccccgggggggtgggaattcccaaaattttaaaaattattttttcaccccggggggccccaaaggggggggaaatattggggggggtaaacccccccccccaaaaaaaaanattttttttttttttttttttcaaaaaaaaaaaaaatnccaccctctttttttttttcgggggggttgg

SEQ ID NO: 74183 - DNA, 205 bp, Zea mays
  Clone ID: MRT4577_167654C.1
aaaaagaactgaggccacttttaaaccacataaattttgacccccgtttttgggattttaaaattacataacccttggtttattttatttacaaaagggggtacgtagttatgccttatgccaatttaaaaattttaccctcgattggggatcaacaaaaaaaaatgcttttttcaaatattaaaaatggcaccctggttttttt

SEQ ID NO: 74184 - DNA, 234 bp, Zea mays
  Clone ID: MRT4577_167655C.1
gccaaccatctgaaggtccacatcaagaacacaacgtacatactctttaccctacagaaggtcactgtcaccatggtttaccaatacctgaacgacgtcatcggctactacgcgaaacttaccctccagcaattctaggatctcaacgagcaaccaggtgttatccaagttgtgccaatccaaacttaccagctacatggccctcaaatctgcactcaccatggcacgacacac

SEQ ID NO: 74185 - DNA, 780 bp, Zea mays
  unsure (1)..(780): unsure at all n locations
  Clone ID: MRT4577_167656C.1
ctggccgggcttanatccttggtccatcgcgtcagtactcagtagacaccagacaccatttcttggcgagccgtagttgatgtcatctgtcttccatggttcagcctcccggaagaaggtccctacctgactggagatccggcctgccagaggatctcctcgagtccatcgggaagcgtctcgcgtcaggccacgacgcagcggccttccgatccgcttgctccccatggcgcgccgccgtcccgttcgcgatcttcgggccgctcctgctactcccgttcgacgccgactcggaccgcgttggcttctattgcgtctcggagaaaaaggtcttctccaagacgctgcccgacgtgcgcggcaaggtcccgtgcggctcgtcgtgtgggtggctggcgctcatggacgaggctgcggccgtcacgctgctgaatccattcgctggtgctggtgccggtgccggcgcgggtgcccgccgcattgagctcccgccagcaggtgaacatgtcgcggcggcgtcctcatcggaacccgtgtataaggtccacggccggtgggtcctccgttccaccgacgactacggaggagacatagatgcaggcagagtcatcgagctacaagacatgagggacgtgtttttccgtgagatcgtgctctccgcgccgnctgacgccggcagcgagtgcgtggccatggccatgctcgggtgctcaacggaggtcgcgttctgccgggttgggagtcgacaacgcatggacgctgctcgacaccaaactggac

SEQ ID NO: 74186 - DNA, 523 bp, Zea mays
  Clone ID: MRT4577_167657C.1
ggttggtcttgttaattttggaccggggcggggggggggcccacctttccatatagggagccgaatcagggcggggccaaaccatggaaaaaggggtttcctgtgagaaaggggaatccggtaacaattccacacaccagaggagacaaggaagcctaaagggcaaagcctggggggccaaaggagggagcaacctaagataaatggcggggggcgcaaggcgcgctttcacagaaaaaaaccgggcgggccccctggataaatgaaccgaccaaaacgcggggagagggggtttgaaaatagaacgccaggggggtttttatatacaccattgaaacgggcaacacggggattgccttttacccccgggcccgaagagaatagaagaggcggcccacccgggttggcccgagaaggaaaaaatccggggggaggggggttaacggccaaaaaagaacaaagacctgttttgggggtggtcaaatcccaataaaaaaaaatcggaaccaaggcgcagcccgga

SEQ ID NO: 74187 - DNA, 370 bp, Zea mays
  unsure (1)..(370): unsure at all n locations
  Clone ID: MRT4577_167658C.1
cgtccgaaccaagncgccttcacgccaccctcaccaatgtaaagttacagggaattaccgacattcacaaggaggaaaatgaactcaactggcagtgaactctagtccagcgaatgactatcgcagtaaacggggcggctcccctacagtttcaaagctgagatcaccgtcaaggcaactcaagaccccttcaataagcatcacaaacatcaattcatcgccttgcatttaaaaaatcctgaccagggaaacacccttgcgtctcccactttaacgtgctgtcagaaaacccccctttcgcaaccggggataactcatacatggcccaccaggtttcccctcccaaaagcttgtacaccgtaaaggtcaa

SEQ ID NO: 74188 - DNA, 601 bp, Zea mays
  Clone ID: MRT4577_167659C.1
atttcattctaataaccgtacatagcttcatgctctctggataaaactgtgcgagtatgggaaatctctaaaggcacatgcatcagggtcgtgtatggagtttcttcccagctatgtatctgttttcatcctgtgaacaataatttgcttttagttggtaatgcaaacaaggaaatcaatgcaataaattttagcactgggagagtaatcagcaaacttaactttgatgacgcggttacagctttggatattgatcacaccgggcagtttattttcgctggtgatgcacagggttacatatatactgttagtgtgaactcacatacagggtcattatctagaactcacaagaacaaaagtagtaagagcaaatctcctattacaaccatccagtatcggaccttctctctgatggcacgctgtccagtacttctttcttgtgctcaggatggaaacctttcttttttcagcatcacgacagatgctaagggatacttgactcttatatgctccctaaaattggcctcacgggtgcagactatccgtgcttcgttctgtccacttctttcccttgagaaggagagttcatagtaactggaag

SEQ ID NO: 74189 - DNA, 441 bp, Zea mays
  Clone ID: MRT4577_16765C.1
ggtaccggtaccggcagtggtccgggccaggccgtacccgtagcaatactgagattgcaaagcacttgtgccttccaccaggcatgctgcatcgcgggaggcttgcggaggatgccattaaagctggtgggaaagactacgaagccgagacggcgacaatggggcaagggcagcgttgtccagctcatctagcgaaagctgctgtggcgtgaaagctactgacgttcttacggggtggtgtgctggtacggtgctcaggacaagcattctggctgcccaaacaaagttcttcttgaagggaggcacgccaactagccgcctgaatgctcacaaagttagttagggcgtctagacccttaactgttttacggatgccgctagccactttaaatagaaatatatgcgggactcacttttatagctggaacacagctgatgctc

SEQ ID NO: 74190 - DNA, 414 bp, Zea mays
  Clone ID: MRT4577_167660C.1
acccacgcgtccgcccacgcgtccgcggagaccaacggccgtgcgtcctcgctccttgtgcgctgcgttcgcctccatagcttctgcaggttcatccaacaccttatgaccattttttcttcctcagtagcgcaaaccagtatctacgattttccagtctatcgatcttcgcggccgtcaatgtcgccctcgtcctcgctcttctccctaacccagatgatagggagtcagcccgtgcctgaagctggttcatccaacaccttattattgccttttcttcttcctcagtagtgtgtaccggtatctatggttttccaaagtctcgaatatttgccgccgtgaatgtcgccttcgccctcgctcttctccttaacccggacgagaagaagtcagtccatgtcggatctgaatgat

SEQ ID NO: 74191 - DNA, 1309 bp, Zea mays
  Clone ID: MRT4577_167661C.1
ccggccggggtacgacgcccgaagtggccgattccctgagatcccaagcacccgcccggcctcgtccctgatctccccggggcgcgcgcgggcgacacgccacgcggccggcgagacggaggagatggctgccgccgactcggccacggcctcttcctcctcccccccggagtgccccgctgccccttccattccgacggaccctgacttcctcagctgcgtcctgcagccaccgacctcctcctcgtcccgccccgacgccgattacgctgccctccgccgcctccttctccgccgcaagcccccctccgcccttcagcaccgaatggagtggcggtgcaatgacaacggctatgtcgcctaccgcaactttctcctccggcgcatcgacggcggcagcgcccagagcacgcccagcaacagtggaaggtgggctccctctccggtacatgctatactctccgaggcagacagctggaattatatgcgggacttgagaagtaacagcggagtgttaaaccaggccataagtattggctcaaagcagagtgatactgagcggcatgtcagatttgccgagcctgcatactcatttgttggaatgcactgcatctttgacaactgcaaagcctcagttactatactgaaatttggccgcgcaaattctgatctgcttgcatatggtgcggcagatggcagcttgatggtctgccaggtttctgagccaccatctgttcttcaaaaaatgatagggcattctaaaaatatcacagattttgatttttcatctaataaccagtacatagcttcatgctctctggataaaactgtgcgagtatgggaaatctctatgtgcacatgcatcagggtcgtgtatggagtttcttccctcctatgtatctgcaacgtcacagtggccatgacggaccatgcgctgcacctgattccgctcccattctccacgagctagccttcttcatcttgcgcacccggagcctctccaccacgatgtcgatccagtacctaggcctcctcaccctccccgctcgcgccgtggcctcctgctgccccggcttgctggtgggctgcgactctgtgctcacctacggggtcggcgtcttcaacccccatcacctcagcttcgacgtgcacagcccctattacaaccatccagtatcggaccttctctctgatggcacgctgtccagtacttctttcttgtgctcaagatggaaacctttcttttttcagcatcacgacagatgctaagggatacttgactcttatatgctccctaaaattggcctca

SEQ ID NO: 74192 - DNA, 122 bp, Zea mays
  Clone ID: MRT4577_167662C.1
tctggtggccaaatcctccatcctcttggatgttaaaccttgggatgatgagacagacatggcccagctagagacttgtgtgcgttccatccaattggacggactggtttggggggcctcaa

SEQ ID NO: 74193 - DNA, 572 bp, Zea mays
  Clone ID: MRT4577_167663C.1
ataatcagttgaagatgaaagctggagcgccgctgtagagagtgatcttgacctcaaactgagcatcggccccagctcacattcaccagaaacaccgcgctggctattctcaggaagcagggaaagaaacccttctggccagcatcgatgagagcaagctagtaaatatctgatcattcagtttgggggcaggagaagcaaaacacagcacactagagtttcatatgctgagaaagctgaagcctccattaaaaatggcatgtggatttgtggaaatacaggtctcaagaaaaatacacttctagctcctatggcgggcgccttggccaaaaacagaaacaaagcccagaaaggcttccaccagatttcaatcagaattctttagtatgccaaaaatgtagaacctcaaaggtcccaatgcttgctatgggtaggataggactgcactaatgttatggcaagcaaaggattggtgacaattcagttcttgcttgccttgtgcataattttgagtttcagagcaaaagtcataagaaaacattaggtaagtattgaatttgaaagaaccaaaa

SEQ ID NO: 74194 - DNA, 576 bp, Zea mays
  Clone ID: MRT4577_167664C.1
aaagaagaacaactcatataatgaccaaatgtatagagataaatgtcacaaaaattattacattgcgaaaatgtcttacatgaataaatgataacaataaagcgaactaataattattccttgacgccataacgctgactaggagacgccacctagattagctcgtactcgttgtagacctcctcctgggctacctgctcttcaccttcaacgagctcctgctcagtattatccatctgctgagtactgggtccgcagttgcttgctcgtcagggattgtgcagcgagtgggcctggccgtggcggctggattccacaaaggcgagagcaagtcccgcgagcgattccccatgctctagccaccctcgatactaggttctgttttgcggacgcgcagcctagaccaatactccctcagttctcttcgctggagcgctacgccatcgagcaccggattctgtggatgcgcctcctcccgcactcttggtttctctcgaaggcaaggttgttcggtggtttggtgggatgggtgcggccgaagtggatcccctgattcatatgggagcggaggcgggg

SEQ ID NO: 74195 - DNA, 234 bp, Zea mays
  Clone ID: MRT4577_167665C.1
atgaacagtgtcatgctgcttaatactgttgagagggtactggaactaaacccacacaagacacacaaagctgaaggcgcaggagacatgaaagcccgctggaactgtacccggtgctaagcatgttactacacctggacactctttatttatccaacctaaatctaaatcacgaaacaaagacaatcatacgagacacactgataactacgtacatcgttacgtacgagtcat

SEQ ID NO: 74196 - DNA, 355 bp, Zea mays
  Clone ID: MRT4577_167666C.1
acccaagcgtccgccccaacttgacaggactcaagaggctcccctcctcccttgccgcggaacacgcgggccctgggcgcctgcccgtgtccattcctccgttccttggtgcggaggttgccgcgcgctccggccttggcgtcatttccgggcctaaccgcagtgtcgagactgcgatcacacatggcccatgatgccacctcactgtggggattcaggtacctgcagacgcatatcacctgctatctctatgttcaattccaggtactggaattgattccaggtcatctggactcgttaatagaagctcaagtctgatcatgtaatgacccaatttggttacattaccgaagat

SEQ ID NO: 74197 - DNA, 203 bp, Zea mays
  Clone ID: MRT4577_167667C.1
atcacgcatcgtccgtcgaagctcgaattcgctcgagctcgagccgctctggtagagatcctgggatagtgcctcgcaacattctttgatcgtgcagaccggaagtgttgtggcgtctgaccatttgcagcatcattgttcatatcaatagcttcaggttcaggaggatgggggttacgaagcactataccaggatctttacc

SEQ ID NO: 74198 - DNA, 154 bp, Zea mays
  Clone ID: MRT4577_167668C.1
atgaaaggctgtgattatagctgacagttacacccctttggttgtcatgccttgtaactactcgccgtctcttgattgttgttgtattgtcccattgaaaagacgtgtgtattataagagatgggcaattatagctagtgaactctttatgctg

SEQ ID NO: 74199 - DNA, 594 bp, Zea mays
  unsure (1)..(594): unsure at all n locations
  Clone ID: MRT4577_167669C.1
aaaaaaaacttaccccaaaactttaaattctcacagctgctgtagaatcttacatcttacaagtgataatggagtacagcaccatcaaaaacagaagaaaagcgcccaatgtaagataccatgttacccagtaggcttctcaagttaataacagatataccactgcaggtttaacctggctacctgctactacagaaataattcagtgaacaacgcacaaggctgatcagatacagagtacaaatggtgacatatggagtacacagagctctcttggctaatgctaacctgggcctcattttgatttccgttttctgagaagattaaagtcaagcttttcatgcttgttcgacttgccagacccacgaccattgctctgcgaagacggctggccatccacgttctggccagtcgtctttggcagcttacgcgatggtggtgtttccatctccagcccaggctcttttctcttcaactcattcagagatatgctttctgaactatcaacattgaagcttctaaatcttgatgctgatatatcatccactctgctgngtattgcactgtcttggtgagaatactaggggaagctga

SEQ ID NO: 74200 - DNA, 278 bp, Zea mays
  unsure (1)..(278): unsure at all n locations
  Clone ID: MRT4577_16766C.1
tggtcttcctttncattaatanattcccgctcatcaaacaagttattattgcagactgtaaactgtattaagcagtaatctgcatgacatcagtcttgcggccagaacgcatgcatcctacaatccatcattctacagagtacagacagtctacacaggccatactgacacatacactacgggaacactatcacagtccataggtcctcagatttttagtacacactagataacacacgcaccttaaatcctactacctttacttaattcacttgttg

SEQ ID NO: 74201 - DNA, 243 bp, Zea mays
  Clone ID: MRT4577_167670C.1
cacgcgtccggagagttcttggtccggttgccccgctggtcccgttcacgacgcagcactaggcagcccatctggccaacgatatcgagcacaggcccaggggcatacatgctggccatctgcatacctggggcaggggcccggtatggagtctcttgagtacggcttagttgggggatagatggggactatctcaacaggggcggctccgtttggcggagcaaggtagcctggcctagggag

SEQ ID NO: 74202 - DNA, 362 bp, Zea mays
  unsure (1)..(362): unsure at all n locations
  Clone ID: MRT4577_167671C.1
aaaagccattgataactttgacattagggaaacaccagaaccacggagggacattttantctataaactactgccaggtttcaagccatcaaatataaaaccttttttgaattaccttgacccaaaaagcaattatgttacatcatctaatcattagcccacatataacactcaagttgcaatatcactccaaaacaaaagtggcacctacagaaatatcaccctaggttttcagatccatgatgtcacttacaatttccccattaaaaacctttaagtactttacaatcttgttcctttaaacacattcctggtttattacctacttaatgtccttgttcttaacactaattttgttaacc

SEQ ID NO: 74203 - DNA, 414 bp, Zea mays
  unsure (1)..(414): unsure at all n locations
  Clone ID: MRT4577_167672C.1
gtgaatgtaggccgcggccaaggggatgctgtccgtggccggatcgcccaggttccgcgtctacgacctcgactttggattcggccggccggagaaggtggacatggtgtcggtggccaagaccggcgccatctccgtggcggacgcgcgtgttggaggtggaggcgtggaggtgggtatctctctgccggtggcgtcgggtgacatggaccgcttccgacagagcgttgcagacgggatggagtggctccggttgctgtgattgcatcatttgcatgatgtgtgcgtgttaataatgttgatttctacaacaganatacgtcaataaaaggacgaaacatgcactttgcatttagaaaaagaaatccaaaaaagaattggattcaaatgtttttcatatatatgtaaggatct

SEQ ID NO: 74204 - DNA, 464 bp, Zea mays
  Clone ID: MRT4577_167673C.1
atctactaataccagcaaggccttggaattggatgcacttatgggatagcctacatgtcatggaccttggtattttggtatgcttttttttttatcaggaatgggtagattgatggtggaggggggaaagatgatattattaaactacttgtggccttgctgatcataatacctttctgttagcctgcaaccatgctacaaccacatggagcatctgctggcctgcaaatgctctgatcatgcttgttggaactgcacatctgacccatttgcatgcatatgtattgacctgagcaccagatcataagctagcagttggtcctgctaaattaaacaatgcatccaataagtgaggcctcttttgtgtcaagataattttataggaaaaatgtaggattctgattttcatagggatcattgtcgtagcatcctctggttcataggactgaacctcaataaatttg

SEQ ID NO: 74205 - DNA, 380 bp, Zea mays
  Clone ID: MRT4577_167674C.1
cgcgtccggggcaagcgcttaaccttaacctgatggtcgatcctgtcctggtggcaatagaccccgggtgtccttcaagacggtcttttgtttcttgattactcctcattctcccaatccgtttttccacgccgtgattaccttctactggaggcccttcttcaccgaccgctccttgttgaggctcctcggattcgttctgaccactaacatcatcaacggcggtctaaagtgcgtctagtacctctccaccttcttctccatatccttcattgaccgtgtcttcttctacaataggtactgctttttgctcaaattgttgtactttgacaactttgtatgcatgatccataatccttttggatgatgattactctatt

SEQ ID NO: 74206 - DNA, 716 bp, Zea mays
  Clone ID: MRT4577_167675C.1
cctcgaggccggccgggatcttggtcctgacctctggtccgtggtcatgacgtcgtacatgctctccgctaccaccgtgccagtccagcaggagggcggcctgctcgtacatctccggtctcaggagctccgcggcactgcccatgcgccggaatgtcacctccgaccacttcatgtccgccgtctacttcaggacccacgcggtcggcacgagcggcgggccgcgccgggcgccgacccaagcgaaggtgaaagcggccatcaatgggctcggacgcatcgagcgaaacttcctgcgatgctgcgacggacgaggcgacgcctcgcccctcgacgtcatcgccatcaacgacaccgcaggcgtaaagcaggcgtgccagctgttcaagcacgactccacgctcgggatcttctatgccgacgtctagcccgtctgcgacaacgccatctccgtcaacggcaaggacatcaaggtcgtgtgcgagcgtaaccccagtaacctgacgtggggcgagatcagcatcgacctcgtaatctagggcaccggcgtattcttctagcgatatggcgcggcgaagcacatccagtgggcggccaagaaggtgatcatcacggcggccggcaaggccgacatccccacctacgtcgtcagcgctaatgccgaccagtacaacctcggacgtagccatcatcagcaacgccttctgcaacatcaa

SEQ ID NO: 74207 - DNA, 470 bp, Zea mays
  Clone ID: MRT4577_167676C.1
ctcccacacgcacgcgaaagagggaacaactgccgagatttcgtccgcagattccgctccaaatcacacggtggcgatgggacggggcctgcccgggtctaggccaccaacgcggcaacgccgccgctgccacctcgagtcctcgacctcgagggcgcggaacctggccgcagcaccggccaccatccggcaaggcagagctcggtggtgcgagcgcaggcaagacccgtgctcggccggccgccgccgccgccgcctcgggcctgcacgctgctacatcacccggtgcacaagtctgggacttggacctcttgcgccattcgccgccccagccccctgcactgcctctctcgcgctgacgacaacgctcctgcaacgcaacgcaccgcccctgccctcgccgacgctgacgtcctgctgcgccgcccggtccagctctatgcgacggactgcggcgctggcaggcccac

SEQ ID NO: 74208 - DNA, 812 bp, Zea mays
  unsure (1)..(812): unsure at all n locations
  Clone ID: MRT4577_167677C.1
tttgccgggacactgcgccgggagatccagaacggcagggtatgctgcgccttacggcaattctgcgtcaacatatactggaatgtatggncaatcctgatgcaacatataccgcgcaggcttatcctgacacttatagcactaatcaggtctgtttacttgatttatgactgttatcttatttgcttttaatgtaactacaacaattgttcttggatgcatctaaaagctgtagtctattgagtcacactaggggcatgtacagtgagtgtcttgagccgtgtcttcagctgtgtctaaggaggtaaatgtaaaaaacttaaaacatgtctcttaacgaagacacttgtcttggctctttgctcgaggtagaggtcagttgattggtccattgaatttattgaatactctgaatgggtgcaataaatatagtaatatacaggttttagacacatccaccgtatcctaccgtgttttagctgtatcttatacctggagtaccgtggttgtgcatgccctaatgaaaataaaaaataccgttccagaattaatttctcatttctgtttgaatctcaattatttattttgcatgattaatgatcaacccttctcatcttatttcttttctacgttgtttcccattctgaataatttgtttacttttttagttgccttatgcaagtcatctttaaaataagtaccacacaatgcaacaagcagctcagcctgaatctaatgttgacatctctgtgttctaaattacaggctcacatgcacaccgtcgncaatccgcattacatgagtcaacctgt

SEQ ID NO: 74209 - DNA, 541 bp, Zea mays
  Clone ID: MRT4577_167678C.1
ggcaattgggttcctcgaggccggccgggccttgcgcgtccctgccgtactcgtccactgctctgggcgcgtcgtcgatccgccgtggatctccaataccgccaatggcgcttctcacctttgcgggcacccagcaagcggatgggagggaggaagcggtgctgccactgcgtcccgtgcggaatcgttctctgggggccgctgggtgtgtgcatggctaccgggggggcggcgttcgctgttgcgcgctgtgagagtgccgtgcgagcgcggccgattctccaccaggcaggagcttccccaccgtcgttcggccgccagaaacgcgaattggtgaaacgctggtggtagtggaaagtgtccgctgtatcccgggtcggggattggcgctgtgccggtgcgaatcgatcgccggggctggaaatttcgccgtggccgtgcttcctcgtcgatagaactctgttgggcgccatcacatatgagaactctccccgcgcgttcgccgttgaccctcaaaaaaaaaaaaaaaaaatttgcggcc

SEQ ID NO: 74210 - DNA, 457 bp, Zea mays
  Clone ID: MRT4577_167679C.1
aaaaaaaaaggattcgggcgggggcccttgttttagcccccttaacccccccaaaagggggggaaaaaggggaaaagttgaaagtttttacaaaaaaactacggggggggccgtttaaccgacctaaacctaaaagttttggcccaagagttaaaagggcctccgggcccataaaaaaaaaaaatccttaaggttccacggaaaaaggccggtttttaagggggggggggtttaaaaacaagggggcattttttccctacgggggttccggggcgggaaaaaaaatttttgtccaggaaaatttggcccaccggccccaagggggggggggggccctttgattaggccctttttttaaggggttaccccgggggcaacgggggggggaaaacaacataaacttttggcccattaaggcgccttttttaggaagttaccccggggggacagggggggg

SEQ ID NO: 74211 - DNA, 129 bp, Zea mays
  Clone ID: MRT4577_16767C.1
gggagcaaaggttcctagttactgccaccactaaggtaattgttaaatggccacaagccatttttttttagtggagatccacatgggtaatttacggttaccaactagacacactccaccgtcgattta

SEQ ID NO: 74212 - DNA, 526 bp, Zea mays
  unsure (1)..(526): unsure at all n locations
  Clone ID: MRT4577_167680C.1
aggaaggagatggaactcaaagacgacgcggcacgctacacagggaatggttggcgggccacggcgtttgctgggctcggaggacgtacgaaaggaggctggaaggcttcgccnnnnnnatttctacagaaatcagcctctcgaggcttctagcagctgcatcattgaggcttgagcttggcacatctgcaccaagggagactgctgcagaggcaagtagttttcgcggaactagtgtttgtttatcctccgaagtgcagtcaagcgatgagaaacccatattgctggttgaagacatccttgaagaatttgaagatgatgagaaaagggactaagccagagaagaaaggatttgatccgaagtggctaggtttagcagactgcatcgacagggcaggaagggacattgagagaatggtaaaagatgacctgttggaagagctggttggaagatcacttcttgttgtatttactccaatttacgatatttcttgatgcattttatgacaacctcgtgcgcagagag

SEQ ID NO: 74213 - DNA, 209 bp, Zea mays
  Clone ID: MRT4577_167681C.1
gcgcacggaactcagatccggatcggcataagtgcatcggcgcgagcgggcacgccggcgacgccatcacgtcaacgctttcgaaaccgtcgccgtcgcaccatccgtttccatctccatggctccaggtcctccacggttcgctcaccttcccctccaaacccaaccaagccaagccaagtctcgtccttcgcgatcccgcgccgtcc

SEQ ID NO: 74214 - DNA, 2215 bp, Zea mays
  Clone ID: MRT4577_167682C.1
atggtcaggtttactgataaccaaagacaaaaggaaaagttttctatacggtcaccgagggcgagtcagcaagcgcgtgtgcagttaacacggggggccacgggcctgaaaaggcgggtgcggggcgccacccaaccgctgccgcgcgagcgccgccaccgaacgcgccccgccggcctgcgtccgccccgccccgggccaagcgtcgcgacgctcctccgggaatccagcccttcctatcttctcgcggcgcttcctcctcaaataggccgcgcggggtcacgatccgtgcgtactgagaccgtgcagcagcgtcgagggaggttcgtcggtcgggttgacttgggcgcggatgggcgggaccggcgcgagcagccggcggaggtgggcgcggcggtccttccggacaccgggtggtggaggaggaaggggaaccggtggggttgtcaggcggaccgtcgcggcgtcgacgaccatggctccgcggggtacccaagggcggcaaccgccgtagcatgtctgaatggtactcatggaatacgaggctgtcctcatgtggagaagcaagagcgacgtggcgatggtgggtcaacagaacccagatgcaagagtgggccatgagatgctgtttctttgtatgtcgaagactttaaggagatgagtccacaaagagcatcagttaggcgtcttcctagtgcacagggaaatgtagaggcagttgcagaggtgcaacctgttgcagggactgttgaggctttattaagtgatgtattgactcgagaaaaagaacggtacagtcctgatttacgccatcaaaaagaacttgaacagctatgaagatctgcattcagtgagactagaaaggatttgtgttgtacctccgatgtctaccttgctgatctgaaagtatcgtctggaagtgacactaattataaaaagatgtcctgttctctgggtgtaatagatggtcatttatggatgacgatcttcaaaagggtgtactaccctcatgctgcatgcctagactctacatctgtcatatacgctaaagaaatagatcaggctagcccaatatctgttcttcagcctctatctgaagattgctctgattctgaaaacatcagacgagagcctgcagatccatatgatctccagctgagacttgagcttggcacatctgcaccaagggagactgctgcagaggcaagtagttttcgcggaactagtgtctgtttatcctccgaagtgcagtcaagcgatgagaaacccatacagctggttgaagacatccttgaagaatttgaagatgatgaggaaagggacttctcttacttgctggatatactgattgcttctggaattcatggaactgccgaggatcaaatgtacaaggtgtgtcagtctctcgaccaccctgctggtgatgacgtatttgagaagctggaaaagaagtacaacaaagttgttcagtggtcaagatcagacaggaagcttttattcgacatggtgaacacaatactatcacagatccttgccccatgcttgaacatgcaaccttgggtctataccactaggaacttggccccactttggggcgcagatggtctcctggagaaagtcttgcagatgctagttcagagacgggaacaccttgcacccagtgagactaagccagagaagaaaggatttgatccgaagtggccaggtttagcagactgcatcgacagggcaggaagggacattgagagaatggtaaaagatgacctgttggaagagctggtcgttgagctactgtccagttaggtttccacaattccacggccgtagtaggttttatcatagcagtacagattctttgttcttttgtttagtttttttagtcagttgtagttgttcctttggtccctgtccctgctatcactgctattttttttctcttcgttgttaaagcagtgggggagagttttttttttggtctagtcgccgtgcttccggtggtattatgacgtgaattccattggattagaggatctctgtagggaaaagttcttttctacctctccataaagagtaccttttgaagtgaggtttgtaagaatataaaaatttcctgtcgagctttgtcggctgtgagccctcaaatctgtatatgaggtaaaattataacttaaaaaaaaaaaaaaaaaaaaaaaactcgaggttttatgggatgtct

SEQ ID NO: 74215 - DNA, 2544 bp, Zea mays
  Clone ID: MRT4577_167683C.1
ctttgcataggacgcatccgccagaccgccactttcttccgcatttcctcaaacaattcgcgcgccgccgccgccgctctccggcgtctgctactcggctccgtgcccccaccaggcagcaggccaccaccccaatccctctcttccttcagagatgcagaaggtgcggctcaaatgggttgcctgctgctcgaccacctctcgcgcctccctggtacctcccccgtgccggcgcgctccctcgcacgcctccaaaagccgcttggcctgacggtgcctgtgcttcgcttccttcgccgccatcccacgctcttctccgagcaaccgcaccctcggttccccacgctgctctccttttccctcacggctgcgtcacacaccctcctgtcccgccttgccgatgcctatgcgcacgacgcgcacctccgcctcgcgcgcctcctcctcctcacccgctccaggtcgctcccgctcgcctccgtgctcccgctccgcttcgacctcggactgccgttcaacttcgccgccgcgttcccggcctcccaccccggtgtcttcgccgtcgccaacaaccgcatctccctacggtccacctccggcctccccgaggacatcgccgtctcctctctccaacgccgccacgccgcggccatcgactccgcgacctaccgcgcgctgtcccggccgccgtcctcgtcgagcgccccgctcgcgttcccgatgcgattcccgcgggggtacggcgggatgaagaaggtcaaggcctggatggatgagttccaccgccttccctacatctcgccgtacgacgacgcgtcagggatcgaccctgagagcgacatttacgagaagaggaacatcggcttgctacatgagctacttgggctaacggtgcacaagatggtgcggaggaacgccatccggcttcttcgggaagagctgggcctgccacacaagttcactaggctgttcacgcggtaccctggagtgttctacctgtcgttgaagtgcaagacaacgactgtggtgcttcgtgaggggtacgagagaggtaagctcgtggagcagcatcccctggctgctgtgagggacaaggtgcattatgtgatgcgcactggagtgctgtaccgtggaaaaggtttgtccaagcttgttctggatgaggatgtcactgaggaagagggtgcactgaatggggaggaatttgaaggggagggaatggatggggatgctgatgtcgagtgcttcagaatggagattgtggatgacgatgggtctgctgatgatgtggatgatgaaggttatagtgatggttgacatggactgatgactcttgccttcttgatttatgttttgcatttgtggcttcagtcgtgaattacagtgactgttttttattcaacttattagtggcttcaattgagaagttcagcaagttattgtagattactgtacacaaaatagaatgggaaatatgtcagccttttttattagctaaagtgcagtctcttcgtataataagacgtctcgttttcgaattcatactggtgcggactcggagcagatgaactgatgaagtaccgggttggacgaaagcccttcatatttttagtgtaaaaagctgtacctgaacgtgccagtgtttaagcctgctggcatgaacttcgaaggatatagcaatcttcaatttgatggattacattggcaaaaaaaaaaattcaagctctgctttcctgcatagtcacatgcaaaccaggaggtatcatgcgtctggtctggtcatgggctcatgaaactgaaggtgcgcagggggtgcatggaaactgccacttgaagtctggttgcagaattgggcagtgtggaagcatgactgcatatatgagtatgatgactgctaattgggttgttactcaggatggcaggattccaggttcagtgattcgtgtctggtcgtcttgcatgtttcatctcccttctttttccctccctgctcttgtttttgactagtctccgtcggcaatgcgtcagatccagttcaaatcaggtcactggtcaccctagagttagacctctaaaagcagtgcaaactatttacgattctgcgtggctgcacactcggcgtctggaagcagttctcgttggctatttgcacaggcgtctggaagcagttctcgttggctcactgaccaaaaaaaaaaaaatctgcaaactggagccgactcttctctctgcaaacaacttgattacggttttttctctctgtcagaagagtgtctcaaatcttatatatatcaaggatccaatcgctttggacttacataaatcaactgaaacaaaaatacaagccatccagtcatcccggaaaacaggaaggctgccggcggcggccagagagtgaatataaagtcttagaggcaataagtggtttcagctgacgagttatcgtgccacttttgatgtactttattaaccgataatcgtctcataatcttggattgaactttcgactctcgtggttgttaattctatcacattgctccgtcc

SEQ ID NO: 74216 - DNA, 545 bp, Zea mays
  unsure (1)..(545): unsure at all n locations
  Clone ID: MRT4577_167684C.1
tgtttgatccgagtggccaggtttagcagnctgcatcgacagggtaggaagggacattgaaaggatggtaaaaaatgacctgttggaagagctggtcgttgagctactgttcagttaggtttccacaattccacggccgtagtaggttttatcatagcagtacagattccttgttcttttgtttagtttttttagtcagttgtagttgttcctttggtccctgtccctgctagtgctatcactgttattttttttctcttcgttgttaaagcagtgggtgacagtttttttggtctagtcgccgtgcttccggtggcattatagacgtgaattccattggattagaggatctctgtagggaaaagttcttttctacctctccaaaaaaggtaccttttgaagtgaggtttgtaagaatataaaagatcttgtcgagctttgtcggctgtgagccctcaaatctgtaaatgagggaaaattgtaatcccaattgtgttaagctttaaaggaaaaggaagatagtggcgtaaaaaacccaacaaccc

SEQ ID NO: 74217 - DNA, 831 bp, Zea mays
  unsure (1)..(831): unsure at all n locations
  Clone ID: MRT4577_167685C.1
ctttgcataggacgcatccgccagaccgccactttcttccgcatttcctcaaacaattcgcgcgccgccgccgccgctctccggcgtctgctactcggctccgtgcccccaccaggcagcaggccaccaccccaatccctctcttccttcagagatgcagaaggtgcggctcaaatgggtgaagaaccggggcctggatcacctgatcgagcgcaccacctcaatccgcgcgtcctgcctgctgctcgaccacctctcgcgcctccctggtacctcccccgtgccggcgcgctccctcgcacgcctccaaaagccgcttggcctgacggtgcctgtgcttcgcttccttcgccgccatcccacgctcttctccgagcaaccgcaccctcggttccccacgctgctctccttttccctcacggctgcgtcacacaccctcctgtcccgccttgccgatgcctatgcgcacgacgcgcacctccgcctcgcgcgcctcctcctcctcacccgctccaggtcgctcccgctcgcctccgtgctcccgctccgcttcgacctcggactgccgttcaacttcgccgccgcgttcccggcctcccaccccggtgtcttcgccgtcgccaacaaccgcatctccctacggtccacctccggcctccccgaggacatcggcgtcttctccctccaacgccgccacgcccggggccatcgactccgcgacctaccgcgcgctgtcccgggcgccgtcctcgtcgagcaccccgctcgcgttcccgatgcgaatcccgcgnggggtacggcgggatgaagaagggcaaggcctggatggga

SEQ ID NO: 74218 - DNA, 273 bp, Zea mays
  Clone ID: MRT4577_167686C.1
tctaacgaaagctcccgacaccctgcctgatccctcccaataagctccccagctccacgccggacgcagcagcagcagcagtagagatggcgagttgggcagtcgtcgtacgtgggaaacatggcttttggtgtaggaggaaggaatggaagtggtctgttgtacttaaagaaactagatgaagaagtcttgtataactgaaacttcacccctctcttgtgtatgatgtattcaccttcgtcttgaaaattcttgagaacggtttcatcttgc

SEQ ID NO: 74219 - DNA, 832 bp, Zea mays
  unsure (1)..(832): unsure at all n locations
  Clone ID: MRT4577_167687C.1
gtgcggcgctcgaggcggccgtttcaaaaaagtcccgacaccctgcctgttccctcccaataagctccccagctccacgccggacgcagcagcagcagcggcactggggcgagttcgtcaccccgggcctgctcttcctctacatcgccgggtggatcgggtgggtcggcaggagctacctcatcgcctcctccacggccgccttcgccgccaagccgcgcctcccacgcgcgcgcctcaccgtggcctgctccgccaccggcggcgacggcaacggcagcagcagcagtgtgtcgctcgcatcctccgtgaagacgttctcggccgcgctggctctgtcgtcggtgcttctctcctcggccgccacctcccctccccccgcggccgctgacatcgcggggctgaccccgtgcaaggagtccaaggcgttcgccaagcgcgagaagaactcgatcaagaagctcaccgcgtcgctcaagaagtacgcgcccgacagcgccccggccctcgccatcaacgccaccatcgagaagaccaagcggcggttcgagaactacggcaagttcggcctgctctgcggcgccgacggcctgccgcacctcatcgtcagcggcgaccagcggcactggggcgagttcgtcaccgccatgagggagatcatcatcgacgtcgagctcgccacccgcctcctccccagggggttcatctggcccgtcgcggcctaccgcgagctcatcaacggagacctcgtcgtcgacgacaaggacatcggctactactagctgctgcacctgtgcttgcacatcgctgctggcgagntgngcagtcgtcg

SEQ ID NO: 74220 - DNA, 970 bp, Zea mays
  Clone ID: MRT4577_167688C.1
ccgggctggggtctgatccctcccaataagctcccgcacaccctgtctgatccctcccaataagctccccagctccacgccggacgcagcagcagcgtgtcgctcgcatcctccgtgaagacgttctcggccgcgctggctctgtcgtcggtgcttctctcctcggccgccacctcccctccccccgcggccgccgatatcgcggggctgaccccgtgcaaggagtccaaggcgttcgccaagcgcgagaagaactcgatcaagaagctcaccgcgtcgctcaagaagtacgcgcccgacagcgccccggccctcgccatcaacgccaccatcgagaagacaaagcggcggttcgagaactacggcaagttcggcctgctctgcggcgccgacggcctgccgcacctcatcgtcagcggcgaccagcggcactggggcgagttcgtcaccccgggtctgctcttcctctacatcgccgggtggatcgggtgggtcggcaggagctacctcatcgccatcagcggcgagaagaagcccgccatgagggagatcatcatcgacgtcgagctcgccacccgcctcctccccagggggttcatctggcccgtcgcggcctaccgcgagctcatcaacggagacctcgtcgtcgacgacaaggacatcggctactactagctgctgcacctgtgcttgcacatcgctgctggcgagttgggcagtcgtcgtacgtgggaaacatggcttttggtgtaggaggaaggaatggaagtggtctgttgtacttaaagaaactagatgaagaagtcttgtataactgaaacttcacccctctcttgtgtatgatgtattcaccttcgtcttgaaaattcttgagaacggtttcatcttgcatacattttgctagtgaagggtcgaatcagctgaccagatgagataaataagagacaataataattctttgctttcagtc

SEQ ID NO: 74221 - DNA, 844 bp, Zea mays
  unsure (1)..(844): unsure at all n locations
  Clone ID: MRT4577_167689C.1
gnatacgaaaagttttcgccgtcggtctcctcccccagatccacatccacccatcgccatggcgatctccccccgcctcctcctcccgctcctcctcgcggcggcggccgcctccgccttcgccggcgccaacgacctggtcggcgagctccagtccctccgctcccgctcccccgccggcgtgatccacctcaccgacacctccgtcacccgcttcctctcctcgccggccccgcgcccctactccgtcctcgtcttcttcgacgccacctcgctccactccaagaccgacctccacctcccccagctccgccgcgagttcgcgctcctctccgcctccttccacgccaacaaccccgactcctccgacctcttcttcgccgacatcgagttctccgagtcgcagcactccttctcccagttcggcgtcaactccctcccccacgtccgcctcatccgcccggagcactcccgcctcgccgactcggagcagatggaccagtcccacttctcccgcctcgccgactccatggtcgagttcgtggaggcccgcaccggcctcgaggtcggccccatcgtccgcccgcctctcgtctcccgcaaccagatgatcctgctcggcctcttgttcctgatctccatcccgttcgggatcaagaggatcatggaaggggacaccctgcttcatgaccgcaagctttggatggccggggcgctgttcgtctacttcttcagcgtctcagggggcatgtacgggatcatcaggcatacgcccatgttcatcacggaccgggaggatccaaacaagctcgtcttcttctaccagggttcggggatgcagctc

SEQ ID NO: 74222 - DNA, 465 bp, Zea mays
  unsure (1)..(465): unsure at all n locations
  Clone ID: MRT4577_16768C.1
tcgaggcnncggccgggcccgggatctccaatatatccccactcttcgccgccttcctgtagcctgtactcactgcgctatcgtgccgatccgccgagtgaacaccaccttctccccactaccgattcaatacgatggccgtcttaccttgacaagaacctgatgatcctcgccagctccgatggctgggagcccgagtggtcagaggcagtggtgacgaagccgccgaccatgccccatatgatcgaggatgactgcgccgactacgcgatccctcttcttaacgtcaactccgagatcctatgcgaggtaacccagcactgcaacactaacgcacatggagccaggctgcccgtcgctgcctcgaatggcggatctcgacacctgattgtcgctctgcgccagcatcaccgccgactccgtcgaggaccacctcaactgggatgttaacttcgactaggtcca

SEQ ID NO: 74223 - DNA, 328 bp, Zea mays
  Clone ID: MRT4577_167690C.1
cccacaccaacccctcgcccaatgcgtagttgtatttgcatctccaacaccaccaggggagggtggaggtagccttttttagattagaaaaatcgagtccaacagactcgccgcactgcgcgggaccgacctcgtcgcaactcccgagacctgatccactggcgccacctcccgctggccatggtgcccgaccagtggtacgacaccaacggggggggggcggggtccgccaccacgctccccgacggccgcctcgccatgctctacacgggctccaccaacgcctccgtccaggtgcagtgcctggccgtgcccgccgacgacgccg

SEQ ID NO: 74224 - DNA, 1873 bp, Zea mays
  unsure (1)..(1873): unsure at all n locations
  Clone ID: MRT4577_167691C.1
caaagacatcggctactactagctgctgcacctgtgcttgcacatcgctgctggcgagttgggcagtcgtacggcgcgagcctggccttgggtgtgcgggggcgggcgccatctggtctcctgtacctactgggacgcggggtggaaccgccctcgcccccgccgctgcggccgccgccggccgggccgggaaagctcccgcacaccctgcctgatccctcccaataagctccccagctccacgccggacgcagcagcagcagcagtagagatggccgccctcgccgcctcctccacggccgccttcgccgccaagccgcgcctcccacgcgcgcgcctcaccgtggcctgctccgccaccggcggcgacggcaacggcagcagcagcagtgtgtcgctcgcatcctccgtgaagacgttctcggccgcgctggctctgtcgtcggtgcttctctcctcggccgcctcctcccctccccccgcggccgctgacatcgcggggctgaccccgtgcaaggagtccaaggcgttcgccaagcgcgagaagaactcgatcaagaagctcaccgcgtcgctcaagaagtacgcgcccgacagcgccccggccctcgccatcaacgccaccatcgagaagaccaagcggcggttcgagaactacggcaagttcggcctgctctgcggcgccgacggcctgccgcacctcatcgtcagcggcgaccagcggcactggggcgagttcgtcaccccgggcctgctcttcctctacatcgccgggtggatcgggtgggtcggcaggagctacctcatcgccatcagcggcgagaagaagcccgccatgagggagatcatcatcgacgtcgagctcgccacccgcctcctccccagggggttcatctggcccgtcgcggcctaccgcgagctcatcaacggagacctcgtcgtcgacgacaaggacatcggctactactagctgctgcacctgtgcttgcacatcgctgctggcgagttgggcagtcgtcgtacgtgggaaacatggcttttggtgtaggaggaaggaatggaagtggtctgttgtacttaaagaaactagatgaagaagtcttgtataactgaaacttcacccctctcttgtgtatgatgtattcaccttcgtcttgaaaattcttgagaacggtttcatcttgcaaaaaaaaaaaaaaaaaaaggaggaatcagctgacccgatgagataaaaaaaaaaaaaagaaggccggcggctcccgatctagaacctgaatgcctcccgtgcgccgtccgccgaactttctccacctctcccggacccgatgaccgatcacttgtgactccctccccgagccacggccgctgcttactctctctcggggcctgaatccccancgatgcgccggcccaggctctatttccggcccctcgaggcgtccgcctcgcactccggaacagctcacagtatgttgggcctattcggcccccgcgtctttttgcccctttttcttcccccctcctttgtctgaataatcaatcctcccnattcgtaccaccgcgcccccacttttccgctncttcgccctttccctggagcgctcaacctttcttanaggccccagaaatccccctaatccttttccccagnggccntttagatgtgctgtcgttgtcccttcttgctccgcgcgcgccgaagtgttagtagagtgtccgatcacccccgccccctccctcactccaccgcacacccataaagggtggatagggattgggaggcagatccttcatgttgcgcgaaaagcgcagaacaccccttttcactgtacgatctggatataataagaaaatcatcatggagattatgatt

SEQ ID NO: 74225 - DNA, 584 bp, Zea mays
  unsure (1)..(584): unsure at all n locations
  Clone ID: MRT4577_167693C.1
ccggccggngacaagctctaccaccaacccatatcgctcgttccagactgatcaggacaagcacctataagcaacctgctcgatcatcaatgtagagtgtcggaaggtgtctgtctctcttggaggctggatgcaacggacatggagacgtcgtctcgtctggtgcccttgctgctgctgtgcctgcatgtgctggtgtcctgctccttcgcggcgcacatgttgcaccaccagctggacatcacgaggcgagacgggcggggcaaggtacttgacaaccggcgactgatgacgctgtccctggaccacacgtccggctccggaatccatccccggcaagagtacctgttcggcaagatccacatgcagctgcggctggtgacaggaaactccgtcgggaccgtcaccgactactacctgtagccacatgggggcgcacactacgagatcgacttagagctcctgcttaaagcgtacggcgagccctacacgctgcacaccaaagtgctcacacggcgacaaggtcagaaacagcagcagcttagaatctgagttacactccaccggcgagttacagaaatact

SEQ ID NO: 74226 - DNA, 205 bp, Zea mays
  Clone ID: MRT4577_167694C.1
aaccagcagccgccaaaaaaaaccgggggagataaaaaaaaccgagcggggtcaccccacaggcaagcagaccgacgacgaaccaccgagccaacccgacagaaagaccgagaagaccaacaggagccagagcaccgcccaccgcgacggcgccggccgggacaccgaagagggggacaccaacgaggacgacaccgccggcacg

SEQ ID NO: 74227 - DNA, 424 bp, Zea mays
  Clone ID: MRT4577_167695C.1
tgtttatggtcgcaaacgtattgtcaagtatggtggcgatgctgccggtttccgggcttccatttcaaccaacgaaccaggaactgaatctaaagcaccagccgatgtgtacatgtctgctccggctgctccggcttatgctccagctccagcaccagcatatgctccagcgcctgctcctgcttatgccccagcaccagctccagcatatgcaccagcccgatcttatgcaccagctcaatcgtatggaccagctccaccaatgccgccaatgccaccaatgccaaaattatctgctccagcttatgctccagcagctccggcttatgctccagctcctgctcgatcatatgctccggctgcatcatatgctccagctccatcatatgctccaggtcgatcatatgcttcagcaccatcttat

SEQ ID NO: 74228 - DNA, 596 bp, Zea mays
  Clone ID: MRT4577_167696C.1
accggccggagtcgcgagcgccgacgggcaccggccacgagagcagagcgcaatgaacatggggccgacacacggtgagtaccgctgattcgaccgacgtgctagcctggcccacccaggaccactccctccacaacggcttccgttacctaccggagaggagctcgagtacaagatcatcctctatcggcagacacagaggacccaaggcttcgggttcggcaccttctccacggaggaccaactgctccacgacatcgaggtcatgaatcacaaggagctcgaccgacgtttgttttttttgaactacgccccgctaagtttgggtcgaggaggggatactcctgccaacgattgtcggccgtggaggattccggctacggcgctgctgttggcccaaatcccaccagagtttaccatgcagctatacgtctaacagcgctcgagtcgtataagacggcgtggtggcttgctaaggcgtccaggcctgttaaagagcttgactctgctgccacagatgacctggtggatcctacatgggcttcccaagacaatacatatcccgccactagtaacattgttcgcccttctgcata

SEQ ID NO: 74229 - DNA, 179 bp, Zea mays
  Clone ID: MRT4577_167697C.1
cgcttccgccaggccgcgcccgctgcccccccctctagcagatcctcacctgatcctccgacggacacagagaatgctcccctcggcagccagcatgacacaactaccattctctgccgcgagcacaggcctcttcaagcaccaacattacttccacaacttgaccgtagcaccaccct

SEQ ID NO: 74230 - DNA, 340 bp, Zea mays
  Clone ID: MRT4577_167698C.1
aaaggcgtaaagagagtataatactttattacatcatctaaacattgtatcttgaacaagtatcacatcaaagtaaagcagaaataaataacaggggcaatctcccacaggaagatgactggcgcatcgttagacttagaattcgtcgtcgataaaatctccatcaaagtctccagcatcaccctcttgctcaaaagtatcctgcagatcgtctttgaacgaattcggttcgtctaccacaccgtcagcctcttcactgtctcctatgtgcagaacgatgggtgagcagggagggtcgtcgagcagaggggtttggccggtagcagttgcctggggtcgc

SEQ ID NO: 74231 - DNA, 1456 bp, Zea mays
  unsure (1)..(1456): unsure at all n locations
  Clone ID: MRT4577_167699C.1
atttgcgctcggcacgcaggcgacggctgcgggctgcggcgctcaggttgtggttctcatcgacggcgtcagcggcttcccctcccgcctctcgccagtcgcttcgcgccctcgcctccggtcctccgcacactggccggtgaccctgcatagtattatctgattttcctggaggacacattttaaggactgaggttacaatggcagatgccagccctagaacagaaacatcaacagatgatactgacgacaataacgggcttgaaccaggcagaggtggtcttgttgcttctgactccagtgacagatccaaagacaaacatggagatcaaaagacattgcgtcgccttgctcaaaatcgtgaggctgcaaggaagagccgactaaggaagaaggcatatgttcaacagttggagaatagcaggctaaaacttacccaactagagcaagagctgcaaagagctcgtcagcagatattttctctcacagggcatttttatatctagttcagttgatcagtcacactccatgagtggaaatggggcattggcctttgatatggagtatgcgaggtggttggaagagcacaatcggcaaattagtgaactaagggctggtgtcagtgctcatgcaagtgatactgatcttcgaagtgttgttgataagatcatgtcacactatgatgagatttttaggctcaaaggcaatgcagccaaggcagatgtttttcacgtcttatctggcatgtggaagacaccggcggagaggtgttttttgtggctaggaggtttccgaccatctgaggttttaaagcttctttcgacacaacttgaacctctcaccgaacagcagctgtcagggataagcaaccttcagcaatcttcacagcaggctgaggatgctctttcacaaggaatggaggcccttcagcaatcattggccgaaaccttggctgggtctctttcgtcttctggatcaacaggaaatgtggcaaactacatgggtcaaatggccatggctatgggaaaacttggaacgcttgagaatttccttcgtcagactctacaacagatgcaaaggatcctgaccactagacagtcagctcgggcgctacttgtgataagtgattactcttcacgtctccgtgccctaagctctctctggcttgctcggcccaaggaatagcaagaacatgctatttgactgcaatacttttcacaatttggttttcaatggtcaggagatttgacaaggctgcgacagacttgattcggacatatctgcacatactatgacccaaatggaaggggatgttcatgtagcttaggctgcttagctttgtagttaagtgttgttgatgtatcattaccaactgctgtaaaattctccctccgtatgcccctgatttgcagcgaaccaatagaatgcacatttatgntcacctgacgattttttg

SEQ ID NO: 74232 - DNA, 569 bp, Zea mays
  unsure (1)..(569): unsure at all n locations
  Clone ID: MRT4577_16769C.1
aataacgcagaaaaacacgcatatagatctaatattaaccccggcccgacgcgagagtgacacagatgccggctacaacgacgacgtactagctagctagctcgttcgatcgcgtgcgtcgttccacaccgacgaccggcggagacgagcggnatggaggcctccgccaaactgcccgtcgtcgtcccgaagggcgtcggcggcatggacaacgacgacgtcgcgccagcgggcggcaagaagcaggcggcggcgggcaggtgggggttcgtgcagttcttcttcgtgctcgccgtcgtcttctgcgtgctactctacgcaccgcgcgtcctcgtgctcagcccgtacgggtacagcatcgacgtcgggctcttcgcgccgacgccgacgacggcgacggcctcgtcggtgccgcagcgcgtcgccggaggcaatgcggtggcccttgaccttgacaaccaggtgcggtccccgtgctcgtccatgcgcgaccacaccatctgttgngaccgntccagcgtgcacacgggacgtgggctttatgggcgggcgacgtgcgcacggacgcc

SEQ ID NO: 74233 - DNA, 745 bp, Zea mays
  Clone ID: MRT4577_1676C.1
gcacgagccggctccaatggcatccctccggctcgtggcaacgctagcgccctccggtcctccgccgccacctcgacgtaagcagcggagaccgtcctccgcagtccgtctgacaggtgggatgggcctggcggcagctgctgccgtggcggcggccgcggccgcctcaccaccggcgctcgccgcgctgtccgagccggcgaacgcgctctcgctgcccacctgggccgtccacgtctccagcgtcgccgagtgggtgacggcgatgtggctggtttgggactacggcgagaagacggggctcaagggttggaaaggcctctcgtgggggatggttccacttctaggtggagcaatgtgtgcttgcacgtggcatttcttctacaattcagagtctcttgaagttcttgtagcccttcaaggtgctctgacagtggttggtaacataacaatgtgcatagctgcataccgcatattcaaagcatcccaggaaggctcaaaaacttcgtaggctgcaagattggatcttacagccggtttggcaaggtgatgagatatggagcttgcgtttctctgacatggatgctttgaataagctatttgattgttgttttttttttggcccattagataaaagtttattggaaaggacaacctttcacagcaatatgcatcctctgctgtagtattatttctcaggggccaagataaaagacaatgtctggaactcaaatcatgataggag

SEQ ID NO: 74234 - DNA, 400 bp, Zea mays
  Clone ID: MRT4577_167700C.1
ttttgcttttttttttttttttttttttttttttttacaagatcataaaaatgtatttttattcatcatcaccctaaatccaatacacaatttattggaaacaatgaatcctcacacttggtgaaaaaagcaaccaaaaatgaagtattataattcacgttctttcgctaaccatgattataaaaaaattaaaaattaaaacttcgagaaaccctttttagtttctttacatgagcaaagccgccttgaaaaccccatcagcagtcaatccagtatcagtgaatttgttaaaagctgcccccttttgagagggagcccgtgctccaattggaggagcggacattgcttaaggagtgaccgagggaacaccggttggttacacggacggaaacttttgaag

SEQ ID NO: 74235 - DNA, 1684 bp, Zea mays
  Clone ID: MRT4577_167701C.1
ctaacttatgccagtcctgttataggttatcagttcctctccattcatcttcctcgcagcgccggcgctccatctcccgctcccttccttactcgcgctcggctctcaggcggcaattcgggacctcggactcacccgccgtttcttttacttgcgctccgcacgcaggcgactgcggtcgcccccacgttggggttttcccctacggcgtcattgcctttcccttgcatttctcgctaagcgatgcgcgctctggccttcggtcctaggcacgttggccagtgacggtccacaggctaatctgacattcctgaaggccacattttaaggactgaggttacaatggcagatgccagccctagaacagaaacatcaacagatgatactgacgacaataacgggcttgaaccagccagaggtggtcttgttgcttctgactccagtgacagatccaaagacaaacatggagatcaaaagacattgcgtcgccttgctcaaaatcgtgaggctgcaaggaagagccgactaaggaagaaggcatatgttcaacagttggagaatagcaggctaaaacttacccaactagagcaagagctgcaaagagctcgtcagcagggcatttttatatctagttcagttgatcagtcacactccatgagtggaaatggggcattggcctttgatatggagtatgcgaggtggttggaagagcacaatcggcaaattagtgaactaagggctggtgtcagtgctcatgcaagtgatactgatcttcgaagtgttgttgataagatcatgtcacactatgatgagatttttaggctcaaaggcaatgcagccaaggcagatgtttttcacgtcttatctggcatgtggaagacaccggcggagaggtgttttttgtggctaggaggtttccgaccatctgaggttttaaagcttctttcgacacaacttgaacctctcaccgaacagcagctgtcagggataagcaaccttcagcaatcttcacagcaggctgaggatgctctttcacaaggaatggaggcccttcagcaatcattggccgaaaccttggctgggtctctttcgtcttctggatcaacaggaaatgtggcaaactacatgggtcaaatggccatggctatgggaaaacttggaacgcttgagaatttccttcgtcaggctgacaacctgcggctgcagactctacaacagatgcaaaggatcctgaccactagacagtcagctcgggcgctacttgtgataagtgattactcttcacgtctccgtgccctaagctctctctggcttgctcggcccaaggaatagcaagaacatgctatttgactgcaatacttttcacaatttggttttcaatggtcaggagatttgacaaggctgcgacagacttgattcggacatatctgcacatactatgacccaaatggaaggggatgttcatgtagcttaggctgcttagctttgtagttaagtgttgttgatgtatcattaccaactgctgtaaaattctcactctgtatgcccctgatttgcagcgaaccattagaatgcacattgatgttcacctgacgattttttgttcactcttaggaacactagcgtaaacataatgttctgcccagtatcatctaaccagggtatatggctgatcccccgcact

SEQ ID NO: 74236 - DNA, 390 bp, Zea mays
  Clone ID: MRT4577_167702C.1
ccggccggggtctttcctagggtttcgtcgcttccagccgccgccgcgtccgcctcgccgagcgcagtagccgccgcagtacatctgctctcttgatctcaggcactggcggaggtgtagctgcaacaggacacctcgaagctcttaaaccgctggaccttcgatgatgtccaggtgaacggcatctcgctgaaccactacctcgctgagagcgcgacgaagaccgcgatgtacctgccgcacaccggggggcgctactccaacatagcggttccggcacagcgcagtgcccgatcggtgatcgcctatacaacgtccctcactgtgtgcacgggacgcaacaacagtcagaaggtcatggctgtccgcaacatctagcatatgctgaag

SEQ ID NO: 74237 - DNA, 291 bp, Zea mays
  Clone ID: MRT4577_167703C.1
cccacgcctccactcacgtcgcaaagtttttgtgcccagcgataaccacaacacaacaggaagccaaaatgagaaccccggtccgcacgtagcccatgggaatggctttccttcccctattgctctccgccctcatcgtctcctgcgacacgcaatcgccggactaatcgccgtccgcgtggaatgctcctccggtcaccggctcagatccgaggagctctgtcgcgccaccgacaactgcggactctgcgccgcatggctctgtcgcaacacctacgacaactgcgggct

SEQ ID NO: 74238 - DNA, 241 bp, Zea mays
  Clone ID: MRT4577_167704C.1
cccggtcgacccacaccacgcgtccgcccacgcgtccgcttacgcattcgataactcgtacgacatcatttgcgcataccagtcggggacaaacctctcgtctgctgccatgtacaacaccttcatcataaattggaattgattagacaaatatcaattatggcatgggcgaatgcgtcttactcttatatatcatatacacacaatcttcagccatgctagtggacacatattctagtgt

SEQ ID NO: 74239 - DNA, 244 bp, Zea mays
  unsure (1)..(244): unsure at all n locations
  Clone ID: MRT4577_167705C.1
tcgtcgcgtggaaaagcaatttagcaagagacagctatgctgtatgacgataccccttggactgtgagtcgagtggatgtagcttctnnttactgtctggacacgttcacaggtgatcgaacgaaggcttgatcgattgcagtggacctgtacaagcagtgcttaagggaacccagtcattccagatgcttttcaggtnnagggcagcatttctggcacttgtcacaggtgatcgtataaagaa

SEQ ID NO: 74240 - DNA, 301 bp, Zea mays
  unsure (1)..(301): unsure at all n locations
  Clone ID: MRT4577_167706C.1
cccccccctctcccttttgtncaatttatggggaaaatcccggccaacccaacaaaagaagggtgcaatcatacattatttttttttttttttggccaaaacgacgtgaaactggggcattcagggtttccattttcatttttcaacaataaacccctggatctctatcccagggggacggggggggccctgtttcctcaccagaacttcattaccggcttttagggaagtcacaggaatggggggccttccacttgaacctgggttaggggtaataagggctactggttctgcgttttgg

SEQ ID NO: 74241 - DNA, 372 bp, Zea mays
  Clone ID: MRT4577_167707C.1
tttttttttttttttttttttttttttttttttggtttttttttttttttttttcctttttttttttttttttgggaaggaaatctgcatgcgattcaagctgaaaaagattgtttttgcctgccccttttcaagagaaaaccctccatctgcctaaacaagcaaataaattttggcaaaactcctaatgcatgggtttcccagtaagcttcgaatttttcggccccacattgaattctacagtttcttcaagaagtttttgatctcccctagatttttccctgctcgatttggctgtttgttataccctaaaagaaaacgggttaaactgaatcctacagttaattttcctcctccggccttttgagagag

SEQ ID NO: 74242 - DNA, 178 bp, Zea mays
  Clone ID: MRT4577_167708C.1
gacatatacttaaccttactattttacaattttgaccatcatagctttcatggggtgctggggttgatagatagggttataataacatttaacagacacaggaacagtgaaattatacaccactggataaataagaaggtagtcatatacaacataaatgttatcaggatgtacgagg

SEQ ID NO: 74243 - DNA, 268 bp, Zea mays
  Clone ID: MRT4577_167709C.1
caagagggtgacgttcaaacagacgtttacaaaaatcaaaatggactaaggtagagacaaaactttattgcactgacacttaagacttgggaagcctgacatttctatctggacagtgtgactatcttatgtcaggaccttcatgtgctaaacgtcagtgctgttttcatatggtaacttcgcaggagtcaggctagtggagagatgaccaggtgtacagttctgaccatcctgtgttgtaagtacccgtggaatggatttgtaaggt

SEQ ID NO: 74244 - DNA, 317 bp, Zea mays
  Clone ID: MRT4577_16770C.1
gacgacacgcgcgtgcgttgaacatatgttctgaagggcaagtttttttttaagggtctgctcattacagatagggcgggcattgacaggatctgggagccacaaaagccttgagggtatgattatcgctattgcattgcacaatcagtaaatgcatgaatggacatgaatatgatatgtcacaggtctgagaaatctttggatgatattgcttacttgatggaggcggaccacataccaacacctcggattgatgatgctgttgaacgaattctgacggttaagtatatttctggagtgtatgagcatccattttc

SEQ ID NO: 74245 - DNA, 660 bp, Zea mays
  Clone ID: MRT4577_167710C.1
agatcgccagccgggcagtagctctgagacagataggagagagagagatcgatctgtatcgtcgtcgaagctagcggaagggtacgttacgtacgcagcggccggcccctcgctgatcgcgcgcgatggagcggcggagcggcggcgcggggagctgcctggggctgctggcggtggccgcggtgtcgacgagcatcatcctcgtctcctaccgcctccaccgccggctggaggcggacctcagggccatgatcctcggcgaaggtgacgacgacggagcagcggaccacgaccggcgccggccgcgtggcacgacgacgacgagaaggaagaagaaggtgcgcttcgcggccgacgtggcggagccgtcgtccaacagcgaggagtaccggcggcggcgggcgcgtccgtcgacaacagccaccagcgcaagaagatagcacgccgccgctgcgcgtcagcccggcgccgcctgctcaccgcggcacgcgtgagccgtacccgtaccgtacgtcgtggacccgtggtggctgtgtatcttgcatgacgtgacgtggcgtcgtggcatgcacgttcaggcaggctttgagctgccgtcagtaacgtaagcctttgcagttgctttggtgtaataaactccatcaccgagctgtcatcatc

SEQ ID NO: 74246 - DNA, 273 bp, Zea mays
  unsure (1)..(273): unsure at all n locations
  Clone ID: MRT4577_167711C.1
ccggcttggcatgaagggtgcaggcctcgnnaaaaagctagagacgngngggangngggggganagnagcagggggnnatatatattcagttgtgtgtttactatttaatgcgaggagtgaaaataatagtacctgtaccagtctgtgtatggttattacttccaaaaaaaaaaaaaaatttataaatttataaaaataaaaaaaaaaaaaataaaatataaaaataaatataaaagaaaaattaaaaaaaaaattaaattaaataataaatt

SEQ ID NO: 74247 - DNA, 158 bp, Zea mays
  Clone ID: MRT4577_167712C.1
cttcagggtttttaggacccctcaaaaaaaccacagatttacccttccaaccaaataccaatccccgttcaaaaagagtacaaatatttatcaccactgaccaacttaactaaacttgattcataatccattccacctttcaactaacaagaacaaaa

SEQ ID NO: 74248 - DNA, 494 bp, Zea mays
  Clone ID: MRT4577_167713C.1
aaaacagggaaaaaaaaacccagtttgccccttggcccttttccaaggcccctttccaaaataaataactgggcgcccctcccccgggataactccttttccccaaaatttggatgacaaaaagttttggaacttacaaaattcccccctggcctccaaaggaggaagttttaagggggaaaaaaccctttttccaccctttggatccctcacccctttcccaggggggacccccccccccggttgctgcttttttaccttcccaaagaggtaaaaaaaagccccaaaggtcaggccgcttttaatcaaattttgggggccccctggaaagctcaaaacagggccagggcaacaccctgggactcctgccttgattccaccattttttccccggggttttttcaaaaagcaggtttctaaactttgaccccccccaagaaccccaaatttttttccaaatgccccccctttcccaaaggggcctttaatcccct

SEQ ID NO: 74249 - DNA, 800 bp, Zea mays
  Clone ID: MRT4577_167714C.1
cggccgggtggacgacacgtgcgtggcgatgggcgagtgggtgcagcacccgcaggcgcgcacggcgctggacgacatcctgccgtgcgtcgacacggcagcggccaaggaggcgctgaaccggagcaaggaggtgaactaccagctggtggccgtgctcaacgccgcgctcaccaacgtctccaaccgcgacttcccgccgcaggtcccgccgccgctcaactacaaccagtcgggcccgcccgtgccgctgctctgcagcccctacgcggcggacctccgcgaccgcgcgtgcgcgccgggcgaggtgcccctcgacgccgccacgccgcggcaggcgtggcagcgatacgtgtgccgtggcgtctccgcggacgccgcgtcgggggccgaggtgtgcacgtccccggggcgcgtcacgccgtccatgtacgcgcagctcaccggcgcggccgacgtcagctacgggctgtaccactacggccccgccctggtggcgctggcggactgcaccttcgtcagggagacgttccggtccatcggcgacgaccactgcccgggcctcagccggtacagcggccaggtgttccggggcttgctcgccgccgccgtcgccgtgctgctggcggtgctgctctgggtcgtgcactcgcgggagcgccgccggcggagcgaggcaatggagatcctgcgtctggcctcgtcgccctacaagatcctcctggaggagagggcgtttctcaagagccccgcgaggccgtacatgtgatttaaactgacttatacaccgtccgacaaaa

SEQ ID NO: 74250 - DNA, 307 bp, Zea mays
  Clone ID: MRT4577_167715C.1
gactggccagcttttatgagcatcctctacaacctgaaggcgttgaccatgctgcatcattgtgccagctgtatccatcacattgacggccttgtccaagaagccgacttgactggatcaaaacacgcaatgtaacaccgaatctactgatgaggtggacggaccgaggaacattacactaaaaagacttgaactctgttccaccaggtggaggtgccttcacctgggccggagcgcactcctgaccaccctcgtccacgttccagtcattccctagatctataaggacctttaacccccccaggct

SEQ ID NO: 74251 - DNA, 515 bp, Zea mays
  Clone ID: MRT4577_167716C.1
ttttttttttttttctttttttttttttttttttttttttttttttttttttttttttttttttttttttttttttttttttttttcaaaacacccattattattttttggggctacaaggggtgccggaaaataaaaaaaacaacaaatttggggggaaggggccgcccataaaggggggcgggcgccccccaaaaaaatttttctccaccacccgccccaaaaaataaaaaaaactcggcgggtagggcgaaaacaaaaaatggacttttttgtacttttttccgacggggaacaaccaagagtggaagaattcccccctggaaaaaaaacaaaaggctgttttttaaaaacccccccacgaaaaaaaatgatctgcgtaaaaaccccccctgttgacaatccttgttgaaaaaagccccccctgggggtcatcacccccgaagaaaggaaaaaccggtggttgcgccccccctgggggatttttattaacccgccggataatccgcggcgag

SEQ ID NO: 74252 - DNA, 614 bp, Zea mays
  Clone ID: MRT4577_167717C.1
ccggccgggagactcttaccttcgttatcctactttcgccatatcaaatcatcattcttcatttcaattgtttaatttctcgctatttcaatcattgaagcgagaaacggtgacggtcatgtctctcaccgcgcgtgaacgccgcaacccgccaactcggcggaaatcctgcgccgcctgtacaaaggccaagcggcgttgtgactttgccataccagcatgtcttcgatgttcacaaagacgtatccactgccagtacccgagccgagtgatgagagagcagttttcttcatcagaagcatcagtggccgtgtctcctgactatcttaccactgatgactcgtctcctcaactggcagagagtcttccaagcgatacaccaataattgaagatttcaatgcagtcatttcgggacttgatgcatgctctgaagatcttggggtattggaatttccattggaagacaataccttgaaatttgttgaacagccatggacattgactgcgccttcaacacaagacttttcgcatgttccacaacgcattttgaaccgtcttcaatgggcgacagatgaaataaagcgagctcccgaaaaaatggttctttgagaac

SEQ ID NO: 74253 - DNA, 588 bp, Zea mays
  Clone ID: MRT4577_167718C.1
cgcgccgatacatgcctctccgctgttctccgcctcctctctctgctcgaccctcgcgacctgggatactgcgagcacatgtaagattggatagttgaaaggtgacaccatcaccacaaagatcacctcccgctccgccaatgctagaccagtagtctctcagcaggggcagtcttaggaactgattgacagccatgacgcatccgcgccaccgagtgactgataagaagcccatgtgcatcgtactgctattgtctttcgatagagatggacttatgcttctactatgtccacgcaaacagagaactgctccgacatgctacttctttgctcccaatggctgtacgcgaatctaggatatgtctactctgctggagatggtgagcgatctgtagaagacagaggttcgtcatatgcttatgaaagatctgcctctcctggactattggtaggcaaaacaagccgcatatagtctatatgtgcttgacaccgaagtcattgcctattggagaagcagagctgcctcctatctacgagtacgtgaggaacagataaatcttacctcactatgcatgatatcgacgagca

SEQ ID NO: 74254 - DNA, 372 bp, Zea mays
  Clone ID: MRT4577_167719C.1
ttttatttcctataaacacccctttttttttgctctacctacaacctaccaacagggggttcctagatattagcccttacttgcgctactagacctcttagtgtgctcaacaaatgctttcatcattccacatagctcacttgctcctaatgccactatcccacatgtcctcccaccagctactagaatcgggtgcgaacatgctgccatgcaagcctacacgctacaactagcgcttgcagggagcgtcttacaacaaccaattgcccaattgcaacaacactccttggcacatttaaacctacaaaccatctcatcgcaacatctacaactagcttctgccttctctgatccacctagccgtggtgtacc

SEQ ID NO: 74255 - DNA, 219 bp, Zea mays
  unsure (1)..(219): unsure at all n locations
  Clone ID: MRT4577_16771C.1
tttttnnnnnnnnnnnnnnnnnnnnnnnnnnnnnnnnnnnggcgaggtacctgtagttggagggcaacttggcggcccagatgcagtcggcggaggccgcgtcccggaacgttcggttgaggcaggccacctggcagatctcagtcgggccgaggtagagcagcaccgccgcgatgcagctctccggcatgtcgcccagcgacgtttgcccccaccccc

SEQ ID NO: 74256 - DNA, 212 bp, Zea mays
  Clone ID: MRT4577_167720C.1
cccgagccatggagctggttgctatcctcattcctcatgtacttgggcatcaatctgaggtagaatttgaagctggctttccctatgcatgacacgagcctacaaacatctttcaagccacgacatggctacccttcaggcggactgagaacaattagaagcccgaagacatgctgcgaccctgcttgcgttttgagaaggtagcctaattt

SEQ ID NO: 74257 - DNA, 900 bp, Zea mays
  Clone ID: MRT4577_167721C.1
cccacgcgtccgcccacgcgtccgcggacgcgtgggggcttcatcatcaactgagattggttcagatatgaccatctctgacactactacatctgaagtcccggtccatgaaatacctccggctgtacttgatgtgcaggaagaagaagagattgtatccgccgctgtgcccgtttctgtgcacgatgtggctcctttgcagcaggcagagataggtaaagatgtaccaaaacatgttgaaaaggaggttgaggttccccaatggctgaagagtcttgctggtgaggaagcacaggactggagagcctttgtccgcactaggatcaatgggcatactgataggacctatactcacaagcaataccgccaccagttccgttccaaagctgaagtcaaactgtttgtggattccaatgggatgacaacgggcatatttaaaggaagaaaacttcaaaagaagaagatagctggtatggatgctcaaggtgctggaacaagtgaatctgctgggagaagagcgtctgcctaccatgctagacaaaagcgacgacgttcacttggccaccagctgagccgttctgacgaaaagatgcctcctggtttcatttagattcttaatgatataatatcaactttatttctagaggaataaataaaggtacgtacgtacttggaggaaactatgtgagaataattaagctaggtgaacaagggcacctgcaaacgttcattatatttgatgcttgctatgctatatatggcggcggaattgtgttgttagtcgtgtgtttgttatccctaattaaactgctggtcgtagaccttgtagcagcaatgttttgcattgtaaacccttattgtatgcttgttatccctaaattaactggcctgaacagtatg

SEQ ID NO: 74258 - DNA, 209 bp, Zea mays
  unsure (1)..(209): unsure at all n locations
  Clone ID: MRT4577_167722C.1
gcccgccagtgggtgatggatcnatctgcagaaaatctcgcccctctagcgtnggtncgnncggccccgaggtaccttcgtnntcgctanntcggtctctttcgcctggtatttagctctctggaccggagctttacccggggccgatttgggctttgcattcccaaacaanncccgactcgttgaccggcgctctcgctggccgcgac

SEQ ID NO: 74259 - DNA, 368 bp, Zea mays
  Clone ID: MRT4577_167723C.1
aaaaaaagggcaaaaatccacataaggccaaatccctagggtcccaaattccccccgggtcccacccataggtcacatttttgggtcacagggtcaaacccccaagttcaaacattggccccatcggtctggaccaggacattgggtttttggtggaggggtcattcaaattcccagactgggggacttggttagccctggccattacatggcccaatggaggctgaaaggaaaagctaattagggggaaaaaagggttaaaaaccttggaaccaactaaagggcccagttttggaaaccggagccctagcctaaggggcgggaaaaaaaaactaaaacattggggcgggcggaagattcaatggggg

SEQ ID NO: 74260 - DNA, 671 bp, Zea mays
  unsure (1)..(671): unsure at all n locations
  Clone ID: MRT4577_167724C.1
cctccgagccggccggggcagagatcgactgatcgagaaagcgtttacagtcacaattaccaactgccaggacaaatgcagtacgactacaggaggagatgtaaaaaaaagatgttcttgtaatctccaaccaaggatgcagacatgtcatggaagtaaacggagggcctagccataaaacggctttgcttttattccaaagtccaatacaagtctttgggtaattgggcacagaagaggagacagagagacggagaggggagacccggtcactgccaatgccaagaacaagaaaccagagaggacagtcgtcaatccaatccgagtctcctccaaaaacccatcaatctgcaggaacgagagcagcaggagagcatcctaggaaaaaagttaggaccaactgaccgagcaaaaaagtttcgacaagagtggtgtgagtgttgaagagctcctcaacatgatggatccggccttgcttgacgacgtcatacgccggctgctggaggtgaagaatctcaagcctgggaagaacgcgcagttgtcggagtcggagatcaagcagctctgcgctgccgccaaggagatcttcctgcaccagcccaacctgctggagctcgaggcgcccatcaaaatctgcggggatgtccatggccagnactctgatctcctga

SEQ ID NO: 74261 - DNA, 830 bp, Zea mays
  unsure (1)..(830): unsure at all n locations
  Clone ID: MRT4577_167725C.1
ccggccgggccgggatatgatggtaaacacatgatgtgtattgatgagactattttctaaatgctgtaattgtagattgcacagcaggtagctgtattaatctctaatattgcacgctgggattacccaaaagagcggtatgtgtttatgatacagtctgccaatgttctaatttcccatcatgtgtttatggccttgtttcaaaccccgaagtaggtggcgattaaacattttgccatggctctgaagaattatggagagaaaactcagacgagtccttcaaagacaggcaaatcgctaagttgatttaagcaaggcagaaatccatccatattgtttcgttcaccaaagtgtgcttccagctacagttgactatggcagaagattattatagatcctgaacggactgactgctcgaggagtttcagtactggactgcaggtcccacagagggtcaatttttaatataccctgatgaaagctactgaacccaggtccaatccacacgccggatcgggcaccaaatccttccagctgcctggatcagcgcctcaggggagagaggaagaagctgcaatggaaggaaaggtttagcagaattggtatttaggggctgcacacagccaggtatgtgcgttgcagtcgggcaaggctgttatcgtctatgttgttgttctagttgccggcatagaattatactgccacgtgatgatggctcatttggattatatatgcaaaagcaaagtcattatcttccgccctaattaagttgtttctctcccaaatcagaccttccatccaaatatagcanactcggcttaaattgagca

SEQ ID NO: 74262 - DNA, 537 bp, Zea mays
  Clone ID: MRT4577_167726C.1
atggatccggcgttgctggacgacgtcatacgccggcttctggaggtgaagaatctcaagcctgggaagaacgcgcagctgtcagagtcggagattaagcagctctgcgctgccgccaaggagatcttcctgcagcagcccaacctgctggagctcgaggcccccatcaaaatctgcggtgatgtccatggccagtactctgatctcctgaggctatttgattatggtggctatccgcctcaggccaactaccttttcttgggtgattatgtggatcgtggaaagcaaagcctagaaacaatatgtcttcttttggcttacaaggttgtcgaagatggatacgagtttttcgctagccgtcaactcgtaacaatattttcagcccctaactactgtggagaattcgacaacgctggtgccatgatgagtgtagatgatacattgatgtgctcgttccaaatattgaagcctgcaaggaagatgatgggtggttcaactaataacaaatctggcttcaagtcattcaggggatggtga

SEQ ID NO: 74263 - DNA, 917 bp, Zea mays
  Clone ID: MRT4577_167727C.1
gccggccgggctgggaaaaaaaacaacacatagcggcgaccggcgacgagcggaagccttgctccatcttcaggctgctagtactcagtagtcagtacagtggtgacgacgacgacatgacgaagatctcccgctcgttgctcgtcgtgccgccgctgctcatcgcgctgctcctcctcggccctcacctcccgccatccgacgcgctgacgcccaagcagggcgtcaagtccaagaccttcctgtccccgcccatcctgcttcgcccgggcgacgtggccgacaagttctactacgacatccccttcccccggggccacctggcgctcaagagcttcaacggcgaggtggtggacgagcgtacgggggcgggcgggaggccggggacgaggcgggctacatcgtcggcatgtccacgtgctacccgcgcccgggcgccgtcacggtgcgcgacggcgagccgctcaccgtcgtgtccaggtacagcagcgaccggcgccacacgggcgtcatgggcctcttctacatcctcgtggccgaccacgcccggcagctgccgcagcaggagggcctgtgcttcagcttcccggtccaatggtgcctaccgtcatggctgtcgagcaacctgtgagatctttgttgcagttgaaagctgttagctgcttggttagggttcggggctggtcagcaaggaaggccgcgtgggtccttgcgttattactcatacagtagtagtaatgtaaaatatactagtagaagcagcggtcagtctactctgctgttgctgtatttttatacaataaccaccacgtcgctccgtttgacttctccacatgctgccgttgttgcttagacggaatcgctgtcggtcagactccaaaaaaaagtcaaaaccatgtggaggggggggggaggaa

SEQ ID NO: 74264 - DNA, 1568 bp, Zea mays
  Clone ID: MRT4577_167728C.1
gaggggagacccattaccaatgccaagaacaagaaaccagagaggacagccgcgaatacaatccgaatcccctccaaaaacccaccataccgtctcccccatctgcaagaacaagatcaggagagcatcctagggggaagaaacaggagggggaaaaagaagcccagaaagaccaactgaccaaacaaaaaggtggcatctttgtgtcaccgaggcaccgccgatcacagaccaaagcccgctcctctggtccatcccaagcccttgagtcgctgagaagtttcgagaagggtggtgtgagtgtcggatagctcaagatggatccggcgttgctggacgacgtcatacgccggcttctggaggtgaagaatctcaagcctgggaagaacgcgcagctgtcagagtcggagattaagcagctctgcgctgccgccaaggagatcttcctgcagcagcccaacctgctggagctcgaggcccccatcaaaatctgcggtgatgtccatggccagtactctgatctcctgaggctatttgattatggtggctatccgcctcaggccaactaccttttcttgggtgattatgtggatcgtggaaagcaaagcctagaaacaatatgtcttcttttggcttacaaggtcaagtacccggagaacttctttcttctaaggggcaaccatgaatgcgcatcagtaaatcgcatctatggtttttatgacgagtgcaaacgcagattcagtgtaaagctgtggaaaacattcacagactgttttaactgcttgccagtgtcagcattgatagatgaaaagattctctgtatgcatggtggtctatctccggagttgaacaagcttgagcaaatactcaacctgaatcgccccacagacgtgcctgatactggattgctctgtgatcttctttggtctgatccttccaatgaagcaacaggctgggccatcaatgatcgtggtgtttcattcacatttggtcctgataaagtttctgaatttcttgagaagcatgatttggaccttatctgccgagcacatcaggttgtcgaagatggatacgagtttttcgctagccgtcaactcgtaacaatattttcagcccctaactactgtggagaattcgacaacgctggtgccatgatgagtgtagatgatacattgatgtgctcgttccaaatattgaagcctgcaaggaagatgatgggtggttcaactaataacaaatctggcttcaagtcattcaggggatggtgacaacggcctgatggtgggcacgctgcgttcgacagggggtacatcttacagcggctgcaactaacaggcatatgcattttcgcggaaacctgcttgggccttggaagggcaaagcagatgtagaactgtgcatcttccatgttggattaacacttgatgtaatgtattgttatcggtttttactgtgcggatctccttatgatatgggaggatgtgaatgagtactgccctcccctttgcgtcctaagattcggaaagaatccattcgccaataaaaatagccagactattctcttttcc

SEQ ID NO: 74265 - DNA, 750 bp, Zea mays
  Clone ID: MRT4577_167729C.1
cgtggccggttgcggcgtggagttcgacgtggaggagcagtccaccgtcggcgcgggcggggagtgcgtgcacgtgaaaacggccacgcaggcgctgccgcggggcggcgacgtggtgttcggcgtggcgcaccagcacgcgggcggcgccggcgcgtcgctgcacggcgccgacggccgcctgctgtgcgagtccgcggccacgtacgggggcgggcgggaggccggggacgaggcgggctacatcgtcggcatgtccacgtgctacccgcgcccgggcgccgtcacggtgcgcgacggcgagccgctcaccgtcgtgtccaggtacagcagcgaccggcgccacacgggcgtcatgggcctcttctacatcctcgtggccgaccacgcccggcagctgccgcagcaggagggcctgtgcttcagcttcccggtccaatggtgcctaccgtcatggctgtcgagcaacctgtgagatctttgttgcagttgaaagctgttagctgcttggttagggttcggggctggtcagcaaggaaggccgcgtgggtccttgcgttattactcatacagtagtagtaatgtaaaatatacttagaagcagcggtcagtctactctgctgttgctgtatttttatacaataaccaccacgtccctccgtttgacttattcacgtgctgccgttgttgctaaggatctgttcccatcggaacgagatcagaaactattctagatatcaattattatat

SEQ ID NO: 74266 - DNA, 230 bp, Zea mays
  Clone ID: MRT4577_16772C.1
gtgcaggctgctgctagccgtggcggcggccgtcgtgctcgtggccgcggcagtgcaggcgcagtagacgtgctcgaggaccgtcctcgttccttctgactatgcaactcgggtatcattgcttaatattttctatgctgaaaagggtctcacttgtttcaaaacagtgtcagtgctgtcattgattctcctcgatcggattgccatatgaactgttttacgtctctagt

SEQ ID NO: 74267 - DNA, 1835 bp, Zea mays
  Clone ID: MRT4577_167730C.1
actcaaacacgtcaagcaagtaaacggagggcctaaccataaaatggctttgcctttattccaaagtccaatacaagtcttccttggggaattagctcattgaagagagagagagagagagagagagaggggagacccattaccaatgccaagaacaagaaaccagagaggacagccgcgaatacaatccgaatcccctccaaaaacccaccataccgtctcccccatctgcaagaacaagatcaggagagcatcctagggggaagaaacaggagggggaaaaagaagcccagaaagactcaactgaccaaacaaaaaggtggcatctttgtgtcaccgaggcaccgccgatcacagaccaaagcccgctcctctggtccatcccaagcgtacagcagccgagatttcttcgatctgcgcttgcgtttttttttcttgtaaagattttagttttccccccttcaactgttgctagccttgagtcgctgagaagtttcgagaagggtggtgtgagtgtcggatagctcaagatggatccggcgttgctggacgacgtcatacgccggcttctggaggtgaagaatctcaagcctgggaagaacgcgcagctgtcagagtcggagattaagcagctctgcgctgccgccaaggagatcttcctgcagcagcccaacctgctggagctcgaggcccccatcaaaatctgcggtgatgtccatggccagtactctgatctcctgaggctatttgattatggtggctatccgcctcaggccaactaccttttcttgggtgattatgtggatcgtggaaagcaaagcctagaaacaatatgtcttcttttggcttacaaggtcaagtacccggagaacttctttcttctaaggggcaaccatgaatgcgcatcagtaaatcgcatctatggtttttatgacgagtgcaaacgcagattcagtgtaaagctgtggaaaacattcacagactgttttaactgcttgccagtgtcagcattgatagatgaaaagattctctgtatgcatggtggtctatctccggagttgaacaagcttgagcaaatactcaacctgaatcgccccacagacgtgcctgatactggattgctctgtgatcttctttggtctgatccttccaatgaagcaacaggctgggccatcaatgatcgtggtgtttcattcacatttggtcctgataaagtttctgaatttcttgagaagcatgatttggaccttatctgccgagcacatcaggttgtcgaagatggatacgagtttttcgctagccgtcaactcgtaacaatattttcagcccctaactactgtggagaattcgacaacgctggtgccatgatgagtgtagatgatacattgatgtgctcgttccaaatattgaagcctgcaaggaagatgatgggtggttcaactaataacaaatctggcttcaagtcattcaggggatggtgacaacggcctgatggtgggcacgctgcgttcgacagggggtacatcttacagcggctgcaactaacaggcatatgcattttcgcggaaacctgcttgggccttggaagggcaaagcagatgtagaactgtgcatcttccatgttggattaacacttgatgtaatgtattgttatcggtttttactgtgcggatctccttatgatatgggaggatgtgaatgagtactgccctcccctttgcgtcctaagattcggaaagaatccattcgccaataaaaatagccagactattctcctttaaaaaaaaaaaaaaaaaaaaaaaaaaaaaaagaaaaaaaaaaaaaaaaaagcggcc

SEQ ID NO: 74268 - DNA, 1797 bp, Zea mays
  Clone ID: MRT4577_167731C.1
ctacccgctgctactactgaattcggcgccggcgacgagcggaagccttcctccatcttcaggctgctagtactcagtagtcagtacagtacagtggtgccgacgacatgacgaagatctcccgctcgttgctcgtcgtcatcgcgctggtcctcctcggccctcacctcccgccatccgaggcgctgacgcccaagcagggcgtcaggtccaagaccttcctgtccccgcccatcctgcttcgcccgggcgacgtggccgacaagttctactacgacatccccttcccccggggccacctggcgctcaagagcttcaacggcgaggtggtggacgagcgcggcgcccccgtgccgctccacgagacgtacctccaccactgggtcgtgcagccctactacgccctggtagtatcggcggagggcggcagcagccggccgcggaccatcccggcgcgcaacgccggcgtgtgcagcggccacacgctgggccagtactacgggctggggtccgagacccggcgcacggccacgtgggtgcccgacccgtacggcatcgagatcggcgacccggccgcggcgcccgccgagggctacgagcagcgctggctgctcaacgtgcacgccatcgacacgcgcggcgccgccgaccggacgatggcgtgcaccgagtgccgctgcgacgtgtacaacgtgacggcggactggcgcgggcacgccatcgagcccgggtacgccggcggcctgcgctgctgctacgacggcacgcggtgcggcgccgcggcggagggggctgaggggaaggccaggactgtgttcctgcgctacacggtgatgtggcgcgactggagccccgcggcggtgctgcccgtgcggatctacatcttcgacgtggccggctgcggcgtggagtacgacgtggaggagcagtgcagcggcggcgcgggcggggagtgcgtgcacgtgaagacggccacgcaggcgctgccgcggggcggcgacgtggtgttcggcgtggcgcaccagcacgcgggcggcgccggcgcgtcgctgcacggcgccgacggccgcctgctgtgcgagtccgcggccacgtacgggggcgggcgggaggccggggacgaggcgggctacatcgtcggcatgtccacgtgctacccgcgcccgggcgccgtcacggtgcgcgacggcgagccgctcaccgtcgtgtccaggtacagcagcgaccggcgccacacgggcgtcatgggcctcttctacatcctcgtggccgaccacgcccggcagctgccgccgcaggaggtgatggtagggcaaagcaaggaggcctgtgcttcagcttcccggtcccatggtgcctaccgtcatggctgtcgagcaacctgtgagatcttttggtgttgaaagctggtgctatgttctaattagctgcttggttagggttcggttcggggctggtgatggtagggcaaagcaaggaaggccgcgtgggtccttgcgttactcatacagtagtagtaatgtaaaaatatagaagcagcggtcagtctactctgctgttgctgtattatacaataaccacgtcgctccctccgtttgacttctccacgtgctgccgttgttgctcaggagtcaggagtctggacatgttcggttacatcggaactattctgaaactattctaaatgatcaattattatataaactaaattatcattctgaaaaaaaaaaaaaaaaaaaaaacaaaaaaaaaaaatctctgtcggtcagactcagcatcgacgtcgttaccatgttg

SEQ ID NO: 74269 - DNA, 1082 bp, Zea mays
  unsure (1)..(1082): unsure at all n locations
  Clone ID: MRT4577_167732C.1
gggaccctcgaggccggccgggaacattatcgactgcagagatcgactgatcgagaaagcgtttacagtcacaattaccaactgccaggacaaatgcagtacgactacaggaggagatgtaaaaaagaaaagatgttcttgtaatctccaaccaaggatgcagacatgtcatggaagtaaacggagggcctagccataaaacggctttgcttttattccaaagtccaatacaagtctttgggtaattgggcacagaagaggagggaggagacggagaggggagacccggtcactgccaatgccaagaacaagaaaccagagaggacagtcgtcaatccaatccgagtctcctccaaaaacccatcaatctgcaggaacgagagcagcaggagagcatcctaggaaaaaagttaggaccaactgaccgagcaaaaaaggtagcatctctgtatcaccaaggcaccgccgatcacagaccaaatccctcccccctcctctggtccatcccacacgtagagcagccggtatttcttcgatccgtgcttgcgctttttttttctctttgtaaagatttcgtttccctcccttttaactgttgtcgagaagtttcgacaagagtggtgtgagtgttgaagagctcctcaacatgatggatccggccttgcttgacgacgtcatacgccggctgctggaggtgaagaatctcaagcctgggaagaacgcgcagttgtcggagtcggagatcaagcagctctgcgctgccgccaaggagatcttcctgcaccagcccaacctgctggagctcgaggcgcccatcaaaatctgcggtgatgtccatggccagtactctgatctcctgaggctattcgattatggtggctatccgcctcaggccaactaccttttcttgggtgattatgtgggatcgtggaaagcaaagcttggaaacaatatgtcttcttttggcctacaaggtcaagtacccagagaacttctttcttctaaggngcaacatgaatgcgcatcagtaaatcgcatctatggtttttatgacgaggcaaacgcagattcagtgtaaagct

SEQ ID NO: 74270 - DNA, 329 bp, Zea mays
  Clone ID: MRT4577_167733C.1
agacgacgtagcatttcacctctctggggtcgcaactacagcaggtcccctcgatatcgtcctcgccgtgattcaccttatgtgaatgcagattaaaatcagaatgtgaacggagcaagtgctgaatagtttttaggatgttctctctgctagagtgtagttactctaggattggttgagcataccacagacatgttagttatgttgatgtcatgacaatgggtattgttaagaacttggcttatgatggaactacatagggttgtagctggcaaaagggtgcgttggacactgttatgcattggctgtctctcttcagctgactgaaa

SEQ ID NO: 74271 - DNA, 1799 bp, Zea mays
  Clone ID: MRT4577_167734C.1
gggacctcgagccggcgggaattgggcacagaagaggagacagagagacggagaggggagacccggtcactgccaatgccaagaacaagaaaccagagaggacagtcgtcaatccaatccgagtctcctccaaaaacccatcaatctgcaggaacgagagcagcaggagagcatcctaggaaaaaagttaggaccaactgaccgagcaaaaaaggtagcatctctgtatcaccaaggcaccgccgatcacagaccaaatccctcccccctcctctggtccatcccacacgtagagcagccgtttcgacaagagtggtgtgagtgttgaagagctcctcaacatgatggatccggccttgcttgacgacgtcatacgccggctgctggaggtgaagaatctcaagcctgggaagaacgcgcagttgtcggagtcggagatcaagcagctctgcgctgccgccaaggagatcttcctgcaccagcccaacctgctggagctcgaggcgcccatcaaaatctgcggtgatgtccatggccagtactctgatctcctgaggctattcgattatggtggctatccgcctcaggccaactaccttttcttgggtgattatgtggatcgtggaaagcaaagcttggaaacaatatgtcttcttttggcctacaaggtcaagtacccagagaacttctttcttctaaggggcaaccatgaatgcgcatcagtaaatcgcatctatggtttttatgacgagtgcaaacgcagattcagtgtaaagctgtggaaaacattcactgactgttttaactgcttgccagtgtcagcattgatagacgaaaagatcctctgtatgcatggtggtctatctccagagttgaacaagctcgaacaaatacttaatctgagtcgccccacagacgtgcctgatactggattgctctgtgaccttctttggtctgatccttctaatgaagcaacaggatgggccataaatgatcgaggtgtttcatatacatttggtcctgataaagtttctgaattccttgagaagcatgatttggacctcatctgccgagcccatcaggttgtcgaagatggatatgagtttttcgctagccgccaactcgtaacaatgttttcagcccctaactactgtggagaatttgataacgctggtgccatgatgagtgtagatgagacattgatgtgctccttccaaatactgaaacctgcgaggaaggtgttgggtggttcaactaataacaaatcaggcttcaagtcatcgagaggatggtgacaatggcaagcctgatatcaggttggttggtgagcagcacgccagtggtcgacggggggttgttccatcataatcatattacagcggctgcaactgacaggcccaatgcatcttctcttccatgttggatcaacactcttgtaatgtattatttactgtgcggatctgagaggatgtgaatgatttcatttgcgtcctcaagttcaaaagattcaggaaggcatgcttgaaataaaaatagccagaaacatgcaaggtgctccacgacgcagcacggcatttccagtgttttctttttgctgtctagttctgaatatattttaccgccagaccagcacgtaagcttgcctggcaatggtttttatttgttgctatgccatctcaaaagtcaaaaccatggatttatatcaaaagtcaaaagactttgagaagtatttatttggtagcctagctacaatgttcctcctctttgatgcatagcataggggatggggatgggtgatt

SEQ ID NO: 74272 - DNA, 867 bp, Zea mays
  Clone ID: MRT4577_167735C.1
gcacgagcccttccggccctgtccttctatcgggaaccttttctcccctccatttatattccttccgccgtgccggccgggggaatcaagaaacaaacgaagccagccagccagccgggtcctcccgcgtagctagcgtaggcgtaggcgtagccgtagcagcgtgtggcgagaggggaagaaatgctggaggggagggcgcgggtggaggacacggacatgccggcgcggatgcaggacgcggcgacctccgcggcctcgcgcgcgctcgacctcttcgacgtcgccgactgccgcgccatcgccggccacatcaagacggcacgtcctctctcctctcctctgctcttttctatgctctgctctgccgccgtcctcgtgtcacatttttaattgatggatgagatcacgattcattcctgaggacacttggtgctggcgctgacaccctgatcgatccttgcctcccgtccgttccgacgaacacaggagttcgacaagcggtacggcgtcgggtggcagtgcgtggtgggcgccaacttcgggtgcttcttcacccacagcagcggcaccttcatctacttctccatggagcgcctctccttcctcctcttcaaggccgccgtcgtcgcagccgccgccgccgccgtcgcctcctaatcaaccaagtctccgtccatcacaccgtgcactttgtactgctagctagtatctatatatatatatatatatatatatatatatatatatatatatatatatatatatatatgccatttgtaatgtccagaagctcagaccctgtacggccagcagcccgtgtagtagtgtaaatacatcgcgccatgcttcgctcgttcctcgtcg

SEQ ID NO: 74273 - DNA, 1153 bp, Zea mays
  Clone ID: MRT4577_167736C.1
tgttgcaccctacaattacaatggaactagcaaggtaagtacccatttgtgcgatttagcaactaggtccttctttgtgtcatctgtgtaagcaacttacagctgttttttaatcaacgatgcagtggctaagaggttttgatcagcgtgtacgcgagagcattgactatgcaatttgcttgaacagtgttggttcctggagcaatgacctctggatgcatgtatcaaagcctccagaaaatccctatatcaagcaaatctttgaagaattttcggatgtctctaaagaaatgggtgtttcagttggaatcaagcacaagaagattaatgtctcaaatcctagagtagcatgggaacacgaacagttctcgaggtttagagtgaccgcacttactctttcagaaatgtctacccctcctgaatttttggaaagcactggtggtcttcatgacactagagaatctacagatgttgagtcagtaatccgaactgtcagattagtttctgagagtcttgcgagaatagcagcttagccatcaatcctcgctacgtccggtcctggttggatcttttgtcacggacaccacgagtcgcaccttttctacagaagaatgatcccttcatagcagcgctgaaaaaggaactgtccgagcacacgtctgatgtgcatgttcaaagtgatgcgcttgaaggcatgttcactttctatgatacaactaaagcgactctaaatgtgtaccaggttgcaagtgttacctttgatctgctgttccttctggtgctgggttcctacctgatcgttctcttctgtttcctagtaatcagtacacggggtgtcgacgacctcattaacatattccggcggcctccgtcacgcaaactcaagggggcataggctaggttgtgttttgtgttctagaagaagagatagacatgaggatgacaggcaagctagcttcccacagcacatagacttgtacttgcaaaattttactgttccttcccccgctccgtccaaatgtgagtggccttcaatttgttcccattttttttatgtgcgaggaacttcgaatgtaatttagctgtattttggttacagttttggcttaattattcgggtggactggtgaaaaaaaaaaaaaaaaaagcggcc

SEQ ID NO: 74274 - DNA, 625 bp, Zea mays
  Clone ID: MRT4577_167737C.1
ccctctttcgagttttttttttccttttttttttttttttttttttttttttttttttttttttttttttttttttttttttttttataaaaaaaaaaccttttctttttatttttttaaaggggaaaaacaaaaaaccaatgaattattgtccaaaattccaggggggcatttttttgtgtgtgggggggggggggggaaccaggccctcccttaacctattttttcccctgcaaaaaggataacaagggggataacaatttttccctcttacagaaagcatcctttatatttttttgaggatttttcccccccccgaataaatttttggggttttcggacaaaattacccatttgaatttggggccggggtttcctcgcccacctgggtcccctgttgaaaggtcaaaaaaaggttgcggcccccgaaaactttgcccacacaaccattttttggccaaaatttggccccccgaacccttcccgggggaaacccaaggaactccctgaaaaacggtttgttccatgtgtaccccataaaaagttgcggggggggaggagcccccttaagaacattgtaaaccacatttgttttgccgttttttatctttgaaatcttttccct

SEQ ID NO: 74275 - DNA, 356 bp, Zea mays
  Clone ID: MRT4577_167738C.1
ggaaaagaatttcaccagtccacccgaataattaagccaaaactgtaaccaaaatacagctaaattacattcgaagttcctcgtacataaaaaaaaaaaatgggaacaaattgaaggccactcacattttactgttccttccccccgctccggccaaatgtgagtggccttcaatttggccggagcggggggaggaacagtaaaattttgcaggtacaagtctatgtgctgtgggaagctagcttgcctgtgatcctcatgtctatctcttcttgtagaacacaaaaacacaacctagcctatgcccccttgagtgtgcgtgacggaggccgccggaatatgttaatgaggtcgtc

SEQ ID NO: 74276 - DNA, 652 bp, Zea mays
  unsure (1)..(652): unsure at all n locations
  Clone ID: MRT4577_167739C.1
tcccggngtcgacccacgccgtccttttaaaaaaaaaaaaaaaaaaaaaaaaaaaaaaaaaaaaaaaaaaaaaaaaaaaaaaaaaaaaaaaaaaaaaaaaaaaaaaaaaaaaaaaaaaagggcgggaacccccgcccagggcgcgggggcccaggcacaagcagcggagagcaagaaaagcccccccgccgtccgggtaaggaaccctaataataacggggggggccccgcccccgcccaggggcaggcccagggatacctgatccggtacaccccttcccctttgccaaggtggaaggcaaccccgggggggcacaattctttttccggggagtcccggagttactacccaaccccggtgcgcgagggcttttaccgattggccaccgacgccaacaggttcaccacctttttaagggaggaaaatcccaacgcctgcaccatcgtttgaaactgaaagcgacggccagaaaggaataacccgttgttccgttcgggcaacggttcgttttcctttgggttcttggttgattggggatggaatcattagccaaaaatccggttttttttgtagggagtgttgtagataagaaaaaagcaggaaactttcggttcggccggtatgatgagatgtaaacttccttgtgctgtt

SEQ ID NO: 74277 - DNA, 153 bp, Zea mays
  unsure (1)..(153): unsure at all n locations
  Clone ID: MRT4577_16773C.1
tatttgttattataaagtagaactatcaaattaaaaacggaggtattaggacgaagtcganngttataaacagtaggagtagatgtattcaccacaccgattattgacggaagaagcanaactcagtgctagacgtatcgacatgaactgatc

SEQ ID NO: 74278 - DNA, 510 bp, Zea mays
  Clone ID: MRT4577_167740C.1
ccatggagacgaacgagcggggcggctcgggctttcttcccactagtactagacattgacctacgacgctgtcgctacggtgtttgggtgcagaacaatgacccgggctcgagatcaaagctaacgagcacggtaaccgtacgacggggtcatgcgcacccttgacggtccgccagcgccacagccgataaccggccatcatctagttcgtcatgaaccggatctacaccgggctgcgagaccagagaatcatcggcaggagcgccagagcaactgctacccactgcgatatcaagcggtgggccttcacagtgatttgtgcgcatggagacaagtcaatgaacgttgtccagcacaagggtagaggacaagcatttcgcagctgaagagatctcctctatggtgcttatcaagatgcgacgagattgcagaagcttaccttgatagcacgatcaagaatgctgagatcacaggcactgcctactgcaatgactcacagaggcaggccac

SEQ ID NO: 74279 - DNA, 286 bp, Zea mays
  Clone ID: MRT4577_167741C.1
gttgggcgcatagaatccccaagcaaacaaacagggtagagggagaggagaggagaggagaggagaggttgggtctgtcacaccatggctccgattaagctttacggcgcggtgatgtctttgaacgtgacgaggtgcgcaacggcgctggatgaggctggctccgactacgagatcttgcccattaacttcgccaccgccgagcacaagagccccgttctcctcgtccgcaacccgtttggtcaggttcctcatctgctcctctgtgacttgttcctattactat

SEQ ID NO: 74280 - DNA, 928 bp, Zea mays
  Clone ID: MRT4577_167742C.1
cggacgcgtgggggcttcccacgcgacagtggaaggtacgtgcactttgctgagcagctgacagcatgtggtttcggagtatacgcaatggattggatagggcatggtggaagcgatggcctgcacggctatgtgccttcactagattacgtcatcgaagacatcgaagtgcttgttgacagaattctgatggagaatccaggggtcccttgtttcctcctcggccactccaccggtggggctgtcgtcctgaaggcatctctgtaccctcacatcagggagaaactggaaggcatcgttctgacatcgcccgcgctgcgtgtgaagcctgcgcatcctattgttggggctgtggcgccgatcttctctctggtggcgcccaggttccagttcaagggcgccaacaagaggggcatcccggtgtcccgcgaccccgcggcgctgctggccaagtactcggacccgctggtgtacacggggccgatcagggtgcggacggggcacgagatcctgcgcatctcctcccacctgctgcaccgcctggagaaggtcaccgtcccgttcctggtgctgcacggcaccgccgaccgggtcacggacccgctggcgtcgcgcgagctctacggcgcggcggcgtccgcgcacaaggacctgcgcctgtacgacgggttcctgcacgacctgctcttcgagcccgacgcgacgaggtcggcgccgagatcgtcgcctggatggacgggatgctccggctccggcggcaggctggatgaagggatggccgtgctgcttctctccttctagctggtgttaattcctctccaaagtataaataatagatatgtgtgccaagataaatggatgcatttgtgctgtgtaactacgttacgtatttatctataacagcggggtaaaagggtcgttttgtttt

SEQ ID NO: 74281 - DNA, 1246 bp, Zea mays
  unsure (1)..(1246): unsure at all n locations
  Clone ID: MRT4577_167743C.1
acggacccgnaacggcccggccgcggctccacgccatcgcgaacaactctcaagccctaagctcggctgtgtgcttcatgctggatcaacgggacggtgataacaccgcatttgttcagttcccacagcgcttcgacaatgttgaccccacggaccgctatggtaaccacaatcgtgtcttctttgatgggaccatgcttgcccttaatggtttgcaagggccctcatacctcggtactggttgcatgttccgtcgcttagcactctatggtattgacccaccccactgtagagcagaaaacatcacggccgaagctagcaggtttggcaactccacaatcttcctagattcagtgtcaaaagccctgaaaaatgacaggacaatcacaccgccaccaattgatgacacattccttgctgagcttgagagggttgtgacatgttcttatgacaaaggtactgactggggcaagggtgtagggtacatctatgacatagccactgaagatatagtaacaggattccgcatccacgggcaggggtggcgctctatgtattgcacaatggagcatgatgcgttctgtggcgttgcaccaatcaacctaaccgaacgcctccatcaaattgtgcgctggtctggtgggtctttagagatgttcttctcccacaacaacccattcatcggtggtcgccggattcaaccccttcagcgtgtctcctacctcaacatgacagtctacccagtcacatcagtcttcatcctaatctatgctctaagcccggtgatgtggcttatccccgatgaagtatacatccagagaccattcactaggtatgtcgtgtaccttcttgtaatcatcgtgatgattcacatgattggctggcttgagataaagtgggcgggggtcacatggctggactattggcgcaatgagcagttctttatgatcggctcaacaagtgcatatccaatggcagtgctgcacatggcagtgaacctcctcacaaagaagggcatacacttcagggtcacttccaagcaaacagccgcggacgacaatgacaagttcgccgacctttatgattttcgatgggtgccaatgctcatcccaacaatggcagttctgatctgcaatgttggtgccattggtgtagccctgggcaaaactgtggtatacattggaacatggacagcggcgaagaagatgcatgcagcactgggtctgctgttcaacatatggatcat

SEQ ID NO: 74282 - DNA, 397 bp, Zea mays
  Clone ID: MRT4577_167744C.1
cgttttctaggaccgcacatacaccttgagatatgtagaagcataggaaacaagacaccaacaaaaattgtgagggttcgaccgcaaaacaaatatacccggctcctattgtttaacctacgcaccctaaggacattagtgatatattactaccagagctgttttattggggaggtggtgtgggctctaagcttaccgaaacgtctaaacaaacaatgactgagcattcatggattaacagcccttaatagaacagatgcatcattctatgcttctggctgatgaaaccatggcacattcgtggatagacacgaatgctgctcaagcacacagacagtctccttggaagggaagggttttatggccgtatgaaacattctgagtgaccattcaacac

SEQ ID NO: 74283 - DNA, 628 bp, Zea mays
  unsure (1)..(628): unsure at all n locations
  Clone ID: MRT4577_167745C.1
aattcggcacgagggttgcgtctccaatgagcgtgcgtgtcaccaaggagaggcgagggcaggcggtggtggcgatgccgattgcatccgtcaacatgcgcttggtggggattgcctcctccatctgcataaactttcaaagcatttcgacccatcttccttcaatcaagcgatcccttccctgtcgatcacttactggccagtaccatggcattgggtcgagctcagcttcctccgtgccgacctacaacagcagcagcaggcgccgggtcttaagacctgaaaaggaggcggcgcggatctgcagtcagtagtatcttgtgcgacaccactgcttgtggccggcggggcaacgacaaacaccaagccaaaggtgtccgctctcgaagaaaggcaggctgtagtgcgacatctgctctaccacgtttctgctgtggtggtgccgtggtgggtgtgactaatcatcagagataagtagcaaaccgtcaaccaccagggagacgagccaggttgagaaggaaagcatcgcgagttcgccatacgngatgggttccaaagcgccttttctgtctcacgctcctcttgctgctcgccgcggcctgtggacctgctgcacatgcccacgatg

SEQ ID NO: 74284 - DNA, 634 bp, Zea mays
  unsure (1)..(634): unsure at all n locations
  Clone ID: MRT4577_167746C.1
tgggttccatctcgtaggtttcgtcgtcccttgccacatgagaggtttgtctgtagataagatagaggcggaataaagaaaagcaagacaaacgagagagagctgagcaagaaaggataacctaggtagctaggtcgggagcatggatccggttactgcatccatccacggtcaccatcttcctccacccttcaacacccgtgatttccatcaccatctccagcagcagcagctgcatctcaagtcggaggacgaccatggcggcggctctccgttcggcggccacggcaccaagcacggccacgaggatgacgagaacagtggcaacggcaacggcagcggcggtgagcttgctctgatttccccttcaggtggcggacttcaggatggaggcgagaacggatcgcgccgaccgaggggccgcccggccgggtccaagaacaagccgaagcctccaatcatcattacgcgggacagcgctaacacgctccggacgcacgtcatggaggtcgcgggcgggtgcgacatctccgagagcatcacggcgttcgcccgccgccggcaacgcggggtctgcgtgtgnagcggcgcggncaccgngaccaacgncacgctgcggcagcctgcctcgcag

SEQ ID NO: 74285 - DNA, 341 bp, Zea mays
  Clone ID: MRT4577_167747C.1
gttccttattttttctgatttcctaagttttttcgttatattacaaccccggaatatcacaaaccgagcacgggaccggggcaaccgggaagcacgaaaacagaaccccatacccacaaccacccaagggtaacaaaaaaaacgcagaaaagggacaactcagccccgaggagagcccacacctggtcctccagagcgggagagaacagcgcaacccccttaaaacaggtagcgggcactcccagggggcccaacgaggacaggcgacaaccaccaaggcccaagccccgccaaagcaaaagacggcccccagcacaaatgggagggatgcggcccccccc

SEQ ID NO: 74286 - DNA, 304 bp, Zea mays
  Clone ID: MRT4577_167748C.1
gccatgacgtttctagtaatatatatgtcgggcatcaactggggtttatgtgggaggaaaggagatggccttctgaaggtggcggtccgctcccattgccattaaggttcactggactatagcggaggagaggacaccttgcctataaagcattatggactgctatggtgctagcgtgccgacaagatgtatggtgggttgcgtgtaaaaggtggcggcaagagttggagaaagtgaatgacttatatgttctgcatgtctggtctttgccttggttggataaacacactgaggtgaaagttga

SEQ ID NO: 74287 - DNA, 526 bp, Zea mays
  Clone ID: MRT4577_167749C.1
attcggctcgagaatggttcgattttattttttttacttttgtgcccgtggcaggatgaaccctttatcatttgctcgtgggcggacgatacacaaatgtttcatgaccggaatagaacaaacagttccaagtacaaatcatcaacgctgaccccccgctggggcactggccaccaaatgcaaaacctgttcaccgtaccgtggtgcagaaccggccccagatctaacaaggacgcaaactgctcgggcgacagccgacacccttgggttgcttaaaaacccagaccaactgtccacattaggaacatcctaatatgggactgctgaaaaaaaaaaacaactaaagcgacctgaggatctttactgacaaagatcgggacatgctcactgacggattaccatcaatggaatttaccaccgcgaacagtgttccagggccaaccacctctcaatatgcagaaagaaccaaaatggccgccaagaccacggtacaatcttgcatccaaactaactaaaaatgcatgcc

SEQ ID NO: 74288 - DNA, 323 bp, Zea mays
  Clone ID: MRT4577_16774C.1
ccaaggaatcttcgtgtttattatagccggtggcgtagcagatttgtaagaactggaacaaggtttgcagggaaattttcccaacgatgaagtgttgaaatcatatcatgtagctactgaaaacaaacccatccttagacacataatttcttcaaacaattcccatgcttgaaaaaggcttgataacaaaaaacggtgcatgcgaccaatgaggttcctgaagatcaaaaaccttataatgttgacctttggcgaatttcataaaaaccaccacaacggggttgtgggggatgttatgttaaacctactgagtggacattata

SEQ ID NO: 74289 - DNA, 600 bp, Zea mays
  Clone ID: MRT4577_167750C.1
catccagtgccagcacctgctccagttggagtccggggccgacatagtgaaggggcacacggaatggcggcacgagggcgcccgaagcgggcgcgtggcgaggggagcttcgggggtttcccggcggagaacgcatgaatggaactcccacctggagccgaccggaccggaccggccgagcaaaggaaatcctatgttgcatgggtatgctaacgcagaagctttgcacatggtggggagttgtttgttatcaggtccatggtcgctggaggcttggaggcaattggtagagctgagcatcatgcatgggagggggtaaaaaaaaaaagccctggaggtcaggacggggaggaaaaagcaggaacagggttttgaagcgtgtggagttgttgtgaacgagggatggatgatgcatgcgggagtggagtttctgcaggggatgatgtatgatgtagtagggtaggctaggccaggttgggtgtgtacaatgcaagccccccccctctgtaacagcctgatttgtacattcttgccatctctgtcttgtggatcgatcgaatcgcagacctcctgggtttttttaaaaaaaaaaaaaaaaaa

SEQ ID NO: 74290 - DNA, 203 bp, Zea mays
  unsure (1)..(203): unsure at all n locations
  Clone ID: MRT4577_167751C.1
cgcagctcgcaagcaaatcgaacgaacccattcgaagcgcgagctgagcaaggcggaggctgcgggaccggcgatggagcggctgcagcgcatctttggcgcctccggcatggtgcagccgccgacggactcgccgctgctcgactcctccgagcaggnctacatgtcctgcgtcgcgctnctcatgatgctcaagcacggga

SEQ ID NO: 74291 - DNA, 683 bp, Zea mays
  Clone ID: MRT4577_167752C.1
cattgggtacctcgaggccggccgggagaaatccattgcagaaaaacgagaagaccggggaggaaggcacgagaagcaagagagctaggcttccggccgatgttccttcacctccgccgccctatgcccgtcctcccctctcttgttccgccgaccccacgccagtagagatgagggccacatcgtccccggtgcccgccgccgtcgtcctcgtcgccccctcctccccctccgccgccgccgtagcagtgaaacctcgtgccgcagcgagtggcggcggaggaagcacagcaggcaggcgcgacgtgcttgccgccggtaccgggctgggcgcggcgctgctgctggcgctggggccggcgcgcgcggcggacgaggagtacgtgagcgagaccgggtcactgttaattactgtgagcttgttcccgcctctgcagctttgctcgaccgctcgcaattacgccgccgcgttctgttgtggccatgtgaatggggtgttcgacgaaatgctaagtagggcagcgagtcgtggagagcatatccaatgatattggataccatatccataaacacaaatcatttaatccctaaagtagatcaatgtccatttcaaccatgggattaaacctttctgccaataaagagtatatgcaccttgcaaaaaaaaaaaaaaaaaagcggcc

SEQ ID NO: 74292 - DNA, 794 bp, Zea mays
  Clone ID: MRT4577_167753C.1
tttttttgagcagcaggctggaattattaggactagtttggaagctcaaattacctccgggattgctcaaattacctccgggagaggtattggaagccgaaaaccgccagaaaccggtgaggcaagttttccatcccatgagtactggcagtatgaaatgtctctcaaagcattactcaaagagccttggacattattctcgaactgaatggtacaagctgacaactattttgactcttcaccaaaaaaaaaatctacactgacctataggagccacagcactttgataagctccaccacaactgcaaaaaatgctagagtaagagccgattacaagccagcaataacattaaaattgtctcatctccaaaatcttctgctggaaggcatttcagcacttgaagacagcacccacaaaaaaaatgccttgatgaacgcatgtcttgggggagccaaggaaacataacatcattcgcaaggcaattgattgctactggttgctgaccaaaatattatccagttggtgggagtaaagatacattgcttgtgcacggcttctcggcaagtacggtgcaagcaaatgtgcctatttcaaatccaaccttgaacattatattcaggaccagcaacacatcgtccaatcgcccagaggtgctcaacgactccaccaagtaatcaaatgtctgtctttggggtcttatgttgtccttcaacatacctgccaaccatgccatgccctcatcagacagattgatcttacaaaagccactgatgatgtgatcgtttgtccacac

SEQ ID NO: 74293 - DNA, 780 bp, Zea mays
  Clone ID: MRT4577_167754C.1
cattgggtacctcgaggccggccgggagcgacatatgctagcaagcatacaagccccaagcttttcttgagctccacaaatttccattgccgcgcgcgcgcgtttaagctagctgtgtccaccgatcaactgcaactctcacacacgtccacctgcaattgctgcaaaacaatggctcctcgcagcgcctacgtgcccgtgtgccttgttgccctgctcctgctcgccagccttagaccgtccagcgcgcggctgctccggccgccgatggggcgcgacggcgcaatcgatgtggctatggaggtgaaggacgccgtcgtcgacaagtacgcgccgctcctccttgccatgctgccgagggggccggcgccaccgtccgccccgagcggcggcaccaatgatatcccccggaattaaaaggaaccggtggccgtagtagttgtacacgcatggaccccggccagagcccacaggaagtagataatagttggtgacttttggtggtatgttgttattggttttagtcataacgcataacaagattttggtgtacaaaattcatcagattggggtagaccagtctctacatgcgtatagtataggcgtaaagtctaatagcttctttctttgtatccttgtttattttaagttagctgatatatctacactattatataaaaaaaaaaaaaaaaaaaaaggcccctaaaaaaaaaaaaaaaaccagggggctcaaaaacggccgcctcgccatgttctccatgttcgaattcttcgtccagg

SEQ ID NO: 74294 - DNA, 393 bp, Zea mays
  Clone ID: MRT4577_167755C.1
tagctgcgaagaacgacgaaaagcagagagagggaggaaaggggaagtccgccgccatcatcgaccaacgcgtatgcctccatgaaagtcttcctgccgtgatgcgaggctgctctagaaaaacatgtgggaggaggctggagctgaaaggatgtttctactggcagcctggtgtgaagacagagttgagcatatgtggcagaagcaagttgtatgtagcacatagttatattcatcattgataataaatcaaactattgacttgatccttgatgtatgttttcaacattttttttgtctacgtgtttagtatcaatatgtaattatattattacactttacagagtggtacacataactgataaaaaaaaaaaaaaaaaaaaaaaaaaaaaa

SEQ ID NO: 74295 - DNA, 533 bp, Zea mays
  Clone ID: MRT4577_167756C.1
ttttcgcgtgggcggacgcgtgggtgtggaataggtttaaattagctctttgctgaggagtgaggagaattaatagcgtgaagaattgatttagtaatccaaacgattatctgataaggttgtcgtctttgattttgtaggatattttggtggtcaaacctgaaatgtttgattaattgtggacatgtaaaatatgtgaggtgtaaaataaaattaaaataattcttcgtgagcaaagtggtataatttataaagcgagggataagtttagaatttaattagctgataagttgtgtttaggccaattgtattaaatgtgtatagtttgttgtttcgtgatgtttgcgctagattcagttaatttagagaagcgtaattattgcgcgtagtcgtataccgataagtagtatatctgtaggaaatagtacaacgcctcgctgctaggtatttaattcgcggacatgtaataatatttagtctcataccattcctgtctatatgcattcatgtgtatcggacatttcaattaggta

SEQ ID NO: 74296 - DNA, 928 bp, Zea mays
  unsure (1)..(928): unsure at all n locations
  Clone ID: MRT4577_167757C.1
tctcctctctgctctctcccccggtcgcacgcgcggttgccacttcgctttcatccccactcccatttttatctcctcaccagatccccgccaccagctaccgcattccccaaagatccagatcacaccaaacgggggcagcccagatcgagctcccgagctcccgagaagaagcgagatccagatcgagctgagctgagctgcccgggccgccggagctgagctgagctgctctgaccgccggaggcgaagaagaagaagaagaagagcaagaagatgaagcggaagacgcggaacaagatcgtggtgacggtgctgctgctgggggcggcggcggtgctgatcggcggcacgctggcgctgatcctgacggcgggcacctggaaggtgaagctcaaggagtcgcaggagaaggtgtgcaacaaggggtgggagtgctccggcaccaagtactgctgcaaccagaccatcaccgacttcttcaaggtgtaccagttcgagaacctcttcgccaagcgcaacttccccgtcgccaaggccgtcggcttctgggactaccaggccttcatcaccgccgcctcgctcttcgagaaccagggcttctgcaccaccggcggcatcgacatgcagatgatggagctctgcgccttcctcggccacgtcggcgcaaagacctcatgtggatacggcgtggcgaccggcggtccgacggcgtgggggctgtgctacaaccacgagatgagccccgaccagggctactgcgacgactcctacacgcagtggccctgcgtcaagggcgccgagtactacggccgcggcgccatcccggtctactggaacttcactacgggcggnncgggnaacgggcctgaaggtggacctgctgcaccacccggagctgctggacanaacgcgacgctggcgtcgc

SEQ ID NO: 74297 - DNA, 189 bp, Zea mays
  Clone ID: MRT4577_167758C.1
gagacgcgtgcgcgcacgcgtccgtctacgcgtccggtcacgcatgcgaatacgcgtcaggtgacacttgcggacgtgtctaatgaatgcacggagctgcataagaggatcttgtgctgcaaactttacactagagaataacgataagggagatcaggaaccacatatggttcatgaggaacactttat

SEQ ID NO: 74298 - DNA, 1030 bp, Zea mays
  unsure (1)..(1030): unsure at all n locations
  Clone ID: MRT4577_167759C.1
ggaccctcgaggccggccggggatgatctcgtgtcgacgacgccttcgccctctccgagtctccgtccgtcttccgcgtcctccgcagctggactcgtgcgctattccccaggacgctactcccactagggttttcggattaggtttctagaaccttccaccgccgcctctccatgcacgcgccgccgctggtcacgttcgcagggggcgcctgccccaccaccgcctccgcttcgccgtcgccctggttggcctcgccgcgggacgccatctttgccgcgccggcgaggcccctacggtcccgccgcgggacactccggctggaagctaaggccgcgtggagggctgccggagggggacggggcccgcgggtcccggccaagggcgctgtgctcgcctcctatatgggcgccgaggaggtggtgggaccatcgtcgctgcttgacgaggaagagttcatttctcacatcagaaaggaactggataatggaaaacttcctgcagatgttgccagtaacctggaggagctgtattataattacaggaatgcggttctgcaaaatggagatccaaatgcatatgaggtcatgctttcaaatatgatgacctggtttgatcgtgttctactggatgtacagaatccatttacctttccaccttatcataaagctttgcgggaaccatttgactattacatgtttggtcagaactacattaggcctctggtagatttcaggaactcctatgttggcaacatttcccttttccatgacatggaagagaagctccaccagggccacaatgttgttttgatgtccaaccatcagacagaagcagatccagcaattatcgcctcgctccttgaaaaaacccatccatggaccagtcaaaacaccgtttacgccgccggcgatccggccgttaccgatccactctgnaagccatttaccatcgcgaacaaatctcatttgtgtgtactcgacaaagcatatgaatgattctccacagctaattgagatcccgaggagat

SEQ ID NO: 74299 - DNA, 382 bp, Zea mays
  Clone ID: MRT4577_16775C.1
gtcgacgcaagcctccgcggacacgcgggttatttttttttttttttgtttttttttatgtttgtgatatttctatgttgttcattatgatctattctcattctcttttaaagacgaagccgtccattttgcagcagtgagagattattaagtccacggtgaacgaaacatgcacaaaattacatgcggattgaggagactaacccataagtcgactcacgcttcgacgccatcagctgaagtcgcacccaggcgctagcctcatctcacaactacaaatccaaaccgagcagtgggtccttgacgacactgggctgacacatttctccgcgaagatcgcgtccaaggcggacttcttgggagacagcccggagtactacac

SEQ ID NO: 74300 - DNA, 580 bp, Zea mays
  Clone ID: MRT4577_167760C.1
ggcacatcaacggacagacacacacaagcaaggcggctagcggtgcaagtagtgcgaagctagctaggtgctggtgcatgcaatggcggcttcgctgggtctgaaccctgaagctgtcttcacttcctacacctcctcgccgccgttcatgtcggactacgtggcggcgagcttcctgccgccggccgtcgtcgactccacggacttctctgcagagctcgatgatcttcaccaccacttggattactcatcgccggcgccgaccttggccggggctcggagcgatcgcagcgagaagcagatgatcaggtggtgtgagggtggtggtggcgagaagagactcggtaggatcgggttcagaacgagatcagaggtggagatcttggacgatggattcaaatggaggaagtatggcaagaaggctgtcaagagtagcccaaatccaaggaactactaccgctgctcgtcggagggctgcggcgtgaagaagcgggtggagagggaccgcgacgacccccgctacgtcatcaccacctacgacggcgtccacaaccacgcaagccccgcagccgccgccatc

SEQ ID NO: 74301 - DNA, 326 bp, Zea mays
  Clone ID: MRT4577_167761C.1
acggccatggtatgctccttctccgccgcgttcaaattacaggtctcagcaaggacgaacaatggcaccgaggctagcgcgcctcctagctctggccatggcagccatcgtcgtggcgccgtgcacggaccagaactcgccgcaggactacggggacccgcactactcggcgcgcgccgacgtgtttttaggggcggcgtcctgggacgacaccgcggccgcgtacgcacagaggtacacggaggggcgccaggacgactgcaaggtgatcccctccggagggccctacggagagaacctcttctggagctccccccgcgcctact

SEQ ID NO: 74302 - DNA, 443 bp, Zea mays
  Clone ID: MRT4577_167762C.1
ggcaaaaacaaacccgggggggtttttttttatgggaaaacccgggggggttaaaccagtttacacagggccacggttttaaggtattattcttacgggaaaaccaaagggggggggatcttgaggacccctgcccgggggtcaatcgccttaatcctttggagggacaaaaaaaaagggcaggcttaccccttcctaaaaaaaaaagccgcccatatattttgttttggacaacgctggggggctcccccagaaacttcggctttggctatggctcggcttaaaaaccgacgggcttccctccgatgtcccgccactgggattacgggaagggggatttgccatgtatcgattcccaaaatcggggggctcgaaaaacctcccctggggaccaaaaggatatgcaggggcatggccccaccaatgggggtaagggttttttt

SEQ ID NO: 74303 - DNA, 748 bp, Zea mays
  unsure (1)..(748): unsure at all n locations
  Clone ID: MRT4577_167763C.1
gtggtacgcctgcaggttccggtccggaattcccgggtcgacccacgcgtccggaggaagaagtggatatcctcagcctgtcagagccactgaagacaaacattaaaaaggagcaggaagaaaagcaggaagaaatgagattctaccttccaccaaccccaggctctggatttgttggtgacattacacagaagattggaatcaccctgcagcctgtggcgctgcacaggaacatgtatgcctcagtggtagaggacatgatcttaaaggccacggaacagctggtgagtgacatcctgagacaggcactggcagttggataccagacagcatctcccaacaggattcccaaagaaattacagtgagtaatattcatcaggccatttgcaacattccttttctggattttcttacaaacaaacacatggggagactgaatgaggatcagtgaatacagcgaagagatccctgaaaagcgggagaggctgtgtctgcagtgtgcagactgtgaccctcgtgtttgaggaaagctggtgttttctgtgttggaacgccacggttgccagaccattccttccatctaactgcgtattacacaagggcatcgagttccaggtgccccccttttaggacagagttgtttcccaattctggagggaagctgaatggacacggcttcgtcagtttgcatttctttactcccacaaggctctgcggngtctttggtgtgagacaggcacatgcacg

SEQ ID NO: 74304 - DNA, 356 bp, Zea mays
  Clone ID: MRT4577_167764C.1
aaggaataacacttcgaggagaatattttggggggcaggcaatccaatcttgggacaattttttctcaaacaaacccttttgagttcaattcacccaggacaactatagtgttggatataataacaggacatattatagtacccaacatgggtaactaatttcgccgcacgcctagcacttgatctccttaagaccatgagagaaatagaggaatgcctttttaggtggaccatccttgtaaatgctatcacgatagacgtatgatgggggatggacttaccaacaaaaaatatggtggaccttcatgttggtaaggggaaacttggttgcaccgtctagacccttattgaactca

SEQ ID NO: 74305 - DNA, 452 bp, Zea mays
  Clone ID: MRT4577_167765C.1
accaagcccatatatttagaattttggatagccactcttcatactctctagtgaaatccaaatcaaacaaagaggtcgatcatacacatacacaagactgcaaccactgaaacctttgcctactactgttgacaaaacccaaatttcgccaaaaatatgctccaaatatagtgccctcctacatccccaagaacatgaacaacaaaggcgagaatcacaccagtttgtccatctcctttagcccctcagaggcggtcgatggcggagaggcattttcccagcaggaagaagccacagctcggaggcagccgatggcgaagagctcgaaccaaccagtcattgtctgacaaactgaagtgggattagtgacaaggtcatcaccgacaatatgcagttgctctccaatttcttcagtcatcttagcatagcaaacccagtcgtcctggacacct

SEQ ID NO: 74306 - DNA, 1091 bp, Zea mays
  Clone ID: MRT4577_167766C.1
gctaatcagtaaatggcatgctatgagttctgtcgtgaataactctctgggagcaatggcttggttttgtggtgggcgtttgaacaaaatctttaggattaacaagactttgtaggttgaattagaccttgcaaaattatgattttgtcttagtggtgtcactaagcatttgccaatgcccagaaaattatgattttgtcttattatatcgacaccatgcatattccaatcttctgtcatgcctcaccactttggagtctctatccagtctggtatggcccttctggaacctgcgcttaatgatgtacaaaaaaggttggccaacatgtgggcgtcactactgttattacgtggctaggtccgctctctctccgtataatggttatcatgaatgaaattggaagacatgttctaccttctaccgctcttgctagatggcccattgtattataatttgatttgtatcagtttagttcattgatgagatattatgacttgttcacactgcatttttacagtttctcatgcagtgaaaaagctattgttgcatcacgagtgtaagtaaaatgaattatcctccgtaatggatcatgcagacaaataggaaattgtaccattaacacaaaacatgaactatcacccaaacagaccctatctataaggctaataatatctaacactcttgtgacattgcttatgacctttacactaatcccacttcagtttgtcagacaatgactggttggttcgagctcttcgccatcggctgcctccgagctgtggcttcttcctgctgggaaaatgcctctccgccatcgaccgcctctgaggtgcggcttcttcctggcgagaaaaatgcctcccaatccctcatggcttcatttcgttacttatatcttgctaatgtgtttcattgtgctggtaatgagcaattctcaaggggatttcgaatggactctcgtatgggcaggggctaaaggagatggacaaactggtgtgattctcgcctttgttgttcatgttcttggggatgtaggagggcactatatttggagcatatttttggcgaaattctcatcggcccatggtgc

SEQ ID NO: 74307 - DNA, 638 bp, Zea mays
  Clone ID: MRT4577_167767C.1
ctcgaggccggccgggccgggatcattgccgaagaagcaatcactgatcactcctcaaggttcgaagctttcccttacttctggagagaaaagcctccacggaccacggcttcagaagctgctttcatggagtcgtcgctggtggaggagcggcggcaaaacctgctggtgcgcgcgacggagcctgaggaactgaagtttgtgaacgtttggcctactatggaatctcaaaaagtttggtcacttacctttcaacaagactacatgaaggaaacgtttctgctgccaggaacttcacaacctggcaaggaacttgttatcttacaccacttattggagcaaccttagcagattcgtactggggaaagtacaggactattgctgttttctccactatttactttcttgtaagacacgaatgtgcatttacctcaagatacctgtagttgtgcctttgtgtattaatttttagggaagttaatgtattaagtgccctaaaattgtagtatgttgttttgcattggtatttacctattggttgtcaattaaagaaagattggataaatgttcacatatagcttttctgctatgacataagcaacttcataaaaaaaaaaaaaaaaaaggcccctagggcc

SEQ ID NO: 74308 - DNA, 449 bp, Zea mays
  unsure (1)..(449): unsure at all n locations
  Clone ID: MRT4577_167768C.1
gcacgagtccaagcgggccatgcactcgtaccagctgggagcagctgtccttccactggagcaccggcgccgggcccnggatcgggtgcgtccgtgactacccgtccgagctccagttccgggcgctggaggatgtcagcctgtcgccccgtggcggcggcaggtcggtgaggttcccgtcgcccaggccgggcgcgctcacgcccaacagcatccctgcggccaagtgtggctctcttacggcggacggcgacggcgtgcacgcgtcgctcaagcccaggcagaggagtgccacttggactgcgttctgagggacataccatgcatgcatgcatgctgcttccttcagcttttttttttcacagcattgtgacgataaaccgagggaaaagtgagatagcatgctccttcacgtagacgaggatagaaggatcagcattgacagacat

SEQ ID NO: 74309 - DNA, 2870 bp, Zea mays
  Clone ID: MRT4577_167769C.1
aaaaaaaaaaaaagtatacaaaactcaaaacgataagctcgtcggttcgccgtctctgcttggcgaatatattagttggaccaacatcaattgccggcaactagaaaaaacactcaattgccgaagaagcaatcactgatcacccttcaaggttcgaagctttcccttacttctggagagaaaagcctccacggaccacggcttcagaagctgctttcatggagtcgtcgctggtggaggagcggcggcaaaacctgctggtgcgcgcgacggagcctgaggatcttgccaggtacacaggtgatgggtcagttgactttagaggttttcctattttaaagcataacacagggaactggagagcatgttcattgattcttggaactgaagtttgtgaacgtttggcctactatggaatctcaaaaagtttggtcacttacctttcaacaagactacatgaaggaaacgtttctgctgccaggaacttcacaacctggcaaggaacttgttatcttacaccacttattggagcaaccttagcagattcgtactggggaaagtacaggactattgctgttttctccactatttacttttttgtaagacacgaatgtgcatttacctcaagatacctgtagttgtgcctttgtgtattaatttttagggaagttaatgtattaagtgccctaaaattgtagtatgttgttttgcattgtatttacctttggttgtcaattaaagaaagattggataaatgttcacatatagcttttctgctatgacataagcaacttcataattgttgtgagcatttactggcatgatagttcattgaaaacatgcatgatgcgtcaattgcagacctacttgtgtttctctacctgccaattatgaatcttttatccttcttaagcaatcattcctgcagatattctgtgccaagtgctaatgactttttaatgtgcattcaatgaaggggatgtcggcattgacactttcagcatcagttccttctttccagccccctcaatgtgttgggtctatttgtccacaaccgaccttatcacagtatcttttatacttcgttggattatacatgattgctctgggagctggtggtataaagccgtgtgtttcatcctttggggctgaccaatttgatgatactgatccagttgagaaagcaaagaaaggagctttcttcaattggttttatttctgcataaatattggttctttgatctctggcacagttcttatttgggtacaagagaattgtggatacagcattggctttgggatccctacttttttcattgccttggctattggaagcttttttataggttcagatatatataggtttcagataccgggaggaagcccacttacaagagcatgccaggtagttgtggcagccactcacaagcgaaaaacagatttgccggttgacagttctcttctctatgagctagatggtaagacttcagctattgaggggagtcgtaagctggagcacagtagtgaattcaggtatttttcttggttatcagtgacaattattttccctgtaagatatatccttttactcaacaaaggagaaaggcattgagaagttgtggtttaggttacatgtttggggaaaacaaatattcaaaaataaaagtttactgaaatgtatcaaatacagatattcatttatactgcacttttgttctgacattgcatgcttttaagcttgtgtcttggaacttcctggacacagcaaccttttttcagaactatgaaaggtaagcatacacaggatttgtacatatgcgcgaagactcacatgctgtcccagctgacacgtgctctttcctgaacagtttccttgacaaagcggcagtcattttgtggaatgaatgtgatggtcctcgcaattcatggagactttgcacagtcacacaagttgaagagcttaaaatactactgaggatgtttccaatctgggcaacaggaattgtgttcttcaccgtatgtgctcaaaactcatcgatgttcatagaacaggggatgaccctcgataaccaaattggtccattcaagattccagcagcaactctgtcgtccctagatgttatcagtgttgtcgtttgggttccaatttatgagaggttagttgtgcccatagccaggagattcagtgggaaagagagaggtttctcagaacttcaacggatggggatcggtctatttgtgtctacagtcgcagtggcagttgcagcgctagtcgagatcaatcgtctacaggtggcagtggcagaggacctggttcatcagaaggtacctgttcctatgagcatcctttggcaagcgcctcagtatttgctggtcggtgtgggcgaggtgttcacatcaattggtcaagctgagtttttctacaatcagtcaccagatgccatgagaagcttatgctcagctttcgctctcgttaccgtgtcacttggaagttatctcagctcattcatcttaagcctggtgtcatatttcacaactcggaatgggcaattggggtggatccctgataacttgaacgaaggccatcttgaccgctttttctggctgatagccggtctcagctcactaaatttccttgtttttatatattacgctcaacaatacaagtgcaagatagcttctgttgcttaaagttccttctccactttgcaatttacttgtacagcaaagctcaatgtacaatttgtttatgctgaaatactacagtgcgtacataatctcatgtgtcgtgtactgtgtacattactccatctttggtactggatacaacattacttggataatggaaacatactacatcattttgttcc

SEQ ID NO: 74310 - DNA, 1737 bp, Zea mays
  Clone ID: MRT4577_16776C.1
attacagtctacagtttacagccatgttactctccggccgccaccactgccaccacaaattcaccccttcttcaccgccggccgcctttccgctccacccatctccgctgtctccggccgcttcggtccctagcccttgcatccgccaaccctcctccgccaccgtcgccactaccttccctattcccgtcgccaaggcgtccatggcggtggcggcacagcgccagcgacgttatcgaagaccttcctcctgtcgaggccgatggaaacgacgccgtcaaggtcaagaagagcttctgggcagcggtgagcctcatcatcggcacggcggtcgggccgggcatgctgggcctgccgtccgccaccatccgctccggccaggcgccctccgcggtctgcatcctgctctcgtgggcctacgtggtgtcctccatcgtcctcgtcgcagagctcagcttcgccgccatggcgcgtgacggcgtcgacgaggtcagcttcacgggacttgcgtcgagcaccctgggggcgggccctggcgcggtcgtcgctgtcgtgtacgccgcgctcagcttctccctgctcgtcgcttgcgtcgccggcatcggctcgctcgtctcccagctgttccccggggtgagtccggtcctggccaacgccctgttcccctgcttcgccggcgtcctcatcgccttcttccctttcaaggccgtcgacggcgccaaccgagccctctgtggtctgatgcttgtttccattaccgctctcgttgtgactggcgtgtccgtcggtcggaccagcttgctgggatctctcagctacgcgtgctggagcccaggcgcgatcctgccggccataccggtgaccgtgctcacgctcgggttccatgtcatcacacccttcatctgcaagatcgtgggagactcggtgtacgacgctcggaaggcgatactgattgggggcgctgtgccattggccatggtgctgtcatggaatgccgtcattctcgggctggctagtgctggcggcaatgctgggtttgatgaccctatcaaactcctcctctcagtgaatccagccgcgctgcctgctgttcgaggcttcgcttttgctgcactggcgacgagcctgatagggtacgcagtgagctttccgaagcagttggcggacacagtggagctgattcttcagaggttttctcagaagcaaggaagcatgcaccaagctaatggtagcggtggatatggcagaaatggggcgattcttacatggatggtgctgatcattcccatctttattgcgtcgttcttctcagcagtcttctccaaggcactggattttgctggggtttatgcaaactgcttcctgtttgggatcctgcctcctgttatggcctggatccatcggtcacagaagaaaaggagatctcctgattcatgtgaagatgttctacctggcgggaatgctgctctgctgatacttttcgctgttgctgttgtcctagcaatctggcactagtagaaggtaagcacaccagggactcattctgtttgtttgccagactgttcgtcagtgaactgaaagcactgaggtggttagaactttgaggttttgaatgttcatggcatcaatgctttatagttcctctccccgtatcatgattttcttctttgtttgtcctaagttggacgctaactaactatttacccatttaaatgtctctttcgtaagattctggtg

SEQ ID NO: 74311 - DNA, 345 bp, Zea mays
  Clone ID: MRT4577_167770C.1
cacgactttattgatgacagcgtcataggcctcctctgggacaggatcaccgtcggcacggacacgacggtgatctacgtggaatgggcgatggcggaacttcttagggaccccaaggtgcatgaaaagcttcatgaggagcttgaccgcgtagacgggcgcgaccgggtcctgtccgaaacggacttaccgaacctgtcttacctgaaagcattcaggaaggagttcctgagcctgcacccgtcgacgccggtgatgcatccaccacagggactgctccagcgaaaagatcgccgtgtactggatgtccaagggcgccaacatggaaataaacatttgggctgt

SEQ ID NO: 74312 - DNA, 361 bp, Zea mays
  unsure (1)..(361): unsure at all n locations
  Clone ID: MRT4577_167771C.1
aaggccattcaaggaaaggtcccttctttgtttttgaaacaaatgccgttcagggaaaataatttttgaaatccataatgacccaaaatagatcattatttttttactaaaacaacatggggggcctgatttactccaaaaaacacgggctggttcaccctgaagggcgcgacagcccctatgtttttagtttgctctaaaacatgtaaacaacaagggttttaaaaacctgcagttgaggggacgggtttcaaactgcccgaattttggttccatataaattgcccagcaaccggggtccgggctgattctcaccttttagtctgaaattcaatntattgacgtcggcccttaaaggaac

SEQ ID NO: 74313 - DNA, 328 bp, Zea mays
  unsure (1)..(328): unsure at all n locations
  Clone ID: MRT4577_167772C.1
gaagctcggttttcgtttcgagggagggtttgttcctccccgattattagcaccggnacgggaacgagaggagcaccgggtttttgaaacgagggcgagcgtttctagatggcggcgtcggatgttgagtaccagtgcttcgtcggcggtctcgcctgggccacggaacgaccactccctccacaacgtcttcagcacctacggcgaggtcctcgagtccaagatcatcctcgatcgggagacgcaaaggtcccggggcttaggcttcgcaaccttcaccacggaggaggcgatgcggaacgtcatctagggcatgaacggcaaggag

SEQ ID NO: 74314 - DNA, 733 bp, Zea mays
  Clone ID: MRT4577_167773C.1
caaatctcaagacgaaccagaggacgagagaggggaatggccggcgctgctgatgcaggggtttgtggagtttgtttcaaccattgcaagtatgagagcaagggaagcggtttcagcatgcttgcatgggaggagttcaagaatgcaggggttgtgccttgcaatgaaagggaccgtttcaacaatgcgacaagagagaaggtgacgtttgtggcaaaccaacgggcatacactgtaaagtgttacaagggtcgcagaaagagcgctatgtatgggagaggttggaggaagttctatgaagacaacaatctgggcaagggtcagatggtggtgttctacctggatgaacctttgcctacggcatctattttgtggttccaggtgggcaacggctcgaagccattgaagattcagatttcaggtaatgaggatggagaagcttcaagcgatgatagtgaaggcattgtttgcactagggggcttttgcttaatgagacagaggatgctcagctacaggggctgctgcctctcagtgatggtttcatcgggtttgcttttgttcaccgcctcacaaggactgacattcgcttgggcatgatgaaaatacccaagaaagttgctgctgccacgccgtttgaagaacaaggggttgttggtatttctgtggatggtcggagattcaaaaaaatctcatacaaaactgctgatgatggccgcattgtgtttggcagga

SEQ ID NO: 74315 - DNA, 1232 bp, Zea mays
  Clone ID: MRT4577_167774C.1
cattggggccctcgagtccggccgggatcacctccaacctcctctctatttccaatttccacgccgccgccaacatgaccacctcagccgccgcctccgccaccgccgcgttgtccaccccatcctccgtcaatccccatcgatcgtcttctgcgctcaggctcccagcgtccctccgccgatcccatcccaacagattcttatcgtcgtcaccctcgcgctctccactcgtgccggtctccgccatggcctctcccgccgccgccggtgagacgtcctccaggaagaaactcatcatattcgatgcggaggacgacctcgcggcgtcactggccaagtacacgtctgagctgtcggcgaagttcgcggccgagaggggcgccttcaccgtcgtgctctccggcggctccctcgtcaaggccctcaggaaactagcggagccgccgtacctagaggcggtggattggagtaaatggcatgtgttctgggtggatgagagggtggtgcccaaggatcacgcggatagcaactacaggctcgcctcagatcagttcctctctaaggtgccgattcctgctgaccaagttcatgccatcaatgacgaactgtcatccgagggggctgcaggggactacgaaactcgtttaaagcagcttgttaagaacggtgtgatcgaactgtcgccggtgtccgggttccccaagttcgaccttatgcttatggggatggggcctgatggccacgttgcctcactcttccctggccaccctgttgtcaatgaaaaccagaagtgggtcacctttgtcaaggactccccgaagccgccgccggagagaataacgttcactttcccagtgatcaactcgtccgcacacatcgcacttgtgatcaccggtgctggcaaagctggtgctgtgcataaagcactttcagaagggcaaagtacatcagatttgctgcctgtcgagatggtttctcttcagaacggggagctcgtttggttcactgacaagccagcggtgtcaatgttgtcgagcatctgaagcccacgattgtataaatttgaagctttaatttgatgggattcatacacgattgggccttgttcggttgcatggtgattggaggggattagggatgattatctctctttctatttacctctacatagcaagggacttaatctcctctaattctcctcaatctagttttaaccaaacaaggcctttatg

SEQ ID NO: 74316 - DNA, 476 bp, Zea mays
  Clone ID: MRT4577_167775C.1
cggccgggcacctcgttcccaatcggctaacgactatcaacagaagagccacaaacaagagcacatcaccactcacttattcgggaatatatcaacgtgtgtgctctccgcacacctctgccgtgatatactcccatcaaagacgagcaaatagagtgagttactgggagaccttaagcctattatataaggaatgatcacctgctgcatcgctaccttctatctgtggaacacctctgttccctcttgtactaatacctaccgaatttgatatgcctctcttgtcccctacaggtcaatacgaatgataatgagaccatccgcacatacccgacagtttctgacactatgacgattgatcattcatgaaatgcacacggactcaataggaccgaggcttaaggatgccgtatgcgtgattagctatatgaacaaaacggctatcctctcagatgccgacatccttcatgtcatga

SEQ ID NO: 74317 - DNA, 458 bp, Zea mays
  Clone ID: MRT4577_167776C.1
ccggggggtagctctgcgtaaaaagccatggcatgaagcagacaacttctgcagcagatgaggtattgtgctacaccttgcctgcatgccacttatatatatcgtgatataattggtgtgtgcgttgtacgatgccagggacgtctgttatgtgcacatgtcatatgctgagaggccaacatagcaaggtactgggatggaagtagcttgtacctgtactcagttgccatgtatactagagcaggagagatgcgtatcattgaattgattaaagatgctacagggtaaagaaatacatcatagaccggccctacttgctctaagaacaaaagacctgaaaggttcttagggctgatagcaccatggagagctcttatttgtgattggctggcacaccgtcctaataacacttgaaatgattccattaaaaagacatgatactgatgtttgcagatctc

SEQ ID NO: 74318 - DNA, 287 bp, Zea mays
  Clone ID: MRT4577_167777C.1
gagtgggttaaactgtgtttactttcgctctgcccaccagtgttgtctaaagcccatggggggccctacgacaagggctggtcttggctaatgtactcgatttacgtaaacacttgaacaaagaaatgatttgaagaggtgtgatttatctaggtgacaatctgtccgtacgcaggtgtgctcttttctactggcagatataatgatctctatgttggttttgctcgaaaaatactttcttataaaactgactttgcatattttcttgatgatcaattacatgatta

SEQ ID NO: 74319 - DNA, 576 bp, Zea mays
  unsure (1)..(576): unsure at all n locations
  Clone ID: MRT4577_167778C.1
gatcacgctcggcgcctctcggcgtcgatctgaatcatcattcttcctcgctcgggtcctccccgccgccgcaccgcaaccccatggacatggtcacgactgccactatggtgttcaatacgatatgaaggctgatgagcacggttgtactgaccagtgatcatgtcaagatcatggatgactgcgccccctttatggacacctcgtacgtgacctacatggtctactactacactgaacacggactgtgggatcaccatgaagtcaaggtgaacgactccaaaacccttctctttgctgagaaggaggttgctgcgtttgcctgccagaaccctgaggagatcccgagatcctcggatgatgctgaagattatagtgatactactcatgctaccactgaccattatgactgtgcaatgcgcattgagtgcttagccaagagttgtgccctctctgctcctaagaagaatgccctcatgttctaacatcggaggctcctgnagatgctcgatgctgtcatctacattgactccgatgctatctggacaaccaactgccttgctcctcttgttaagg

SEQ ID NO: 74320 - DNA, 438 bp, Zea mays
  Clone ID: MRT4577_167779C.1
aaaaccaaaacagttctccccacccacaacaaaacccaccacaaagggccccagcaaacaacaaaacagtaaacagggctaaacaccatggaaagggggggggggggtcctaaaaatccactaacccaccccaaagggggggaagggccccccccccccaacccgatcgaaaaacaaaaaaatttttttttccaagcaccccaccccctcctttgactttgaaaccgaacaaagggcctccctaaaccgcccctaataaaaacccatcaaaaaaaacgccccagttcaaaaaaaaatcaaacctaccccccgggtaggccaaacccagccccgcaaaaccaaaccccgggggcataaaaggaagcaaacatgcaaacctcctctttttccgggcacacaaccaggcttccttccggggtaaaaaacccaaagcatggg

SEQ ID NO: 74321 - DNA, 673 bp, Zea mays
  unsure (1)..(673): unsure at all n locations
  Clone ID: MRT4577_16777C.1
cgaggcgagcagtcgagtgttccctagagtccccgttcctccgccgccgcctgcaaccgcttcacgtgccctgatccatcgcaggtcccctttctgaccccaaaggagccgaagaagtcctctgctcagcaccagccccacgccatggaacccaagaagtcctctccacgcggcgccggggccgtcgccgccaccgccactgaagccgagtccccgttgagcagcttgttctacccgccggcgcccgcgatgggtttcttcgcgtacaggcgcagtagcgaatctagccgataatatgatcggggtcatcaaaagcagctttgctatatcatataaacttttatgaactttaacagtattttactaaagaatttataaaatttatcggggtcggctgaccccgataaaccaccctagattcgcccctgtacaggcgcgttcctagttgtataccatagttttcccttttccatttttgttaagtttggtgtgtttcgaatgtggatacgctcctttttcataagtatgtgctattatcgtagagtagcgtttctaaacacgattatagaggattattntagagtgatggtgatatgaaatcctaaaagggttatttcaaaactttctttgttgttggatatattagtgaaaactttcttctttttccctttcg

SEQ ID NO: 74322 - DNA, 578 bp, Zea mays
  Clone ID: MRT4577_167780C.1
gtcccctctcctccgcctgctccggcagtccgcggacatctcggcggtggcggggcggtacgcgcgctggtgcgtgccgcagctgttcgcgtacgccgtcaacttccccatccagaagttctaccaggcgcagagcagggtgtgggccatgacggccatctcgggcgccgcgctcgccgtgcacgcgctgctcagctggctcgtcgtggccaggctcgggcgcgggctggccggcgccgccgtcgtcggcgacgtctcctggtggctcgtcaacgtcgcgcagttcgtctacctcgtcggcggctccttccccgacgcatggacagggttctcgcgcaaggcgttcgacagcctcggcggcttcgtcaggctctccgtcgcctccgccgtcatgctgtgcctggagatgtggtattatacggcagtgctcattctggtgggatgcctgaagaacccagagattcaagttgatgcgatttctatatgcatgaactaccagctttggacactgatggttgctgttggcttcaacgctgcagtaagtgttcgcgtgtcgaacgagctcggtgccaaccacc

SEQ ID NO: 74323 - DNA, 312 bp, Zea mays
  Clone ID: MRT4577_167781C.1
attcggctcgagccggatccacacgcacaatctgtggcaagcaggccaaaccggcccaatctgggggccttgggcacctgaaacgccacaggaaaccgctccccactgctgtatagggcacgaactaacgggatcttaccccaggacttcctcagccaagaccgacccgagtgacactagccacatggaaaccctttttgccgctaccaggagtccctccagacaaaccccaatcaatcacggccgaataacgcacgtgtcgataggctacatgccaagacagggcgaccaaggctcatctgggaccacacc

SEQ ID NO: 74324 - DNA, 1866 bp, Zea mays
  Clone ID: MRT4577_167782C.1
agccggccgagcagggtaagaaggggtagacaaaatgcctcgagccgaggtccgagtaccaagcgctgcagcgctgaagtatgcgcccgcggccggccgggggggatccctgcctccgtggtagaagtcctggcagctccagctccaagcgcattagctcgacctaattccttcttcaactgttgtgtacttgtgtgggtgtctctctccctctgcccgagatgttgtctctgagctgcagctgcccaggggtgtcgtccatgagcaagacggcgctcgattcggggcacctggtggcctcctgccgcagccgctggcacggcgcgcgggcgccgcccagacggcggcgcacgccatgtgtttgcttggttgcctcaccgaccaccacccagcctggccctgctgctgttgatgtgccctcacggacggttcctgctgtcacaacatcaagcgcccctgaacgcatttctgtttctgcgctgctcgaggttgtctcagacgacttgctcaacctcaacaacaatctcaaatcgcttgttggtgcagaaaatccagttttagtttctgcagcagaacaaattttcagtgctggtggaaagaggttaagaccagcattagtttttctggtatcgagagcaactgctgaattagctgctttgccggagctaactacagaacatcggcgcttggctgagatcatagagatgattcatactgcaagtctaatacatgatgatgtcatagacgatagcgggatgcgaagagggaaagaaacaatccaccagctgtacggcacacgggtggctgtgctcgctggcgattttatgttcgcgcagtcttcttggttcctagcaaacctagaaaacattgaagtcatcaagctcatcagccaggtaattaaggatttcgcgagcggcgagataaagcaagcgtcgacgcttttcgactgcgacgtgaccctggacgactatctgctgaagagctactacaagacggcctccctgatcgcggcgagcacgaggtccgccgccatcttcagcggcgtgggcagcggcgtgtgcgagcagatgtacgagtacgggcggaacctgggtctggcattccaggtggtggacgacatcctggacctgacgcagtcggcggagcagctcgggaagccggcggcggggagcgaccttgccaagggcaacctgacggcgcccgtgatcctggcgctgcgggaggagccccggctgcggggcatcatcgagtccgagttctgcgagcccgggtccctggcggccgcggtggagctcgtgcacaggggcggcgggatccggagcgcgcgggagctcgcggaggagaaaggcggcctggcgttgcgcagcctgcagtgcctcccgaggagcgagttccggagcgccctcgagcgggtggtgcactacaatctccagcgggttcggtagaggaaggtgctgtgcttccatgtggcagtggcatggcagtgcgtgttgtttagtgtaaccgacactgccgcgtgcccaccaacctcgtggagcatgcatctgtaaggttctccatttctttggggggtgagtgagggcactagtagcatggtgtgcagtggttgtgaggttctattgttgttgtaactacaagcaggtaaactgttctggacgacaccacgatgtatatgtacatatgaaatgcactgctgctgtgggatgtatgcaatgagccaatgagtaggtttatctccaaaaaaaaaaaaaaaaaaaaaaaaaaaaaaaaaaaaaataaaataaataggccggtaccttggttggtgagagcaattcttaattgcgtaaaaagtgattttataaatatttgtttatttctgggggg

SEQ ID NO: 74325 - DNA, 428 bp, Zea mays
  Clone ID: MRT4577_167783C.1
cggacaccaggcccgtcaccgggtcatgtgcttgtctctattggtgactttatgacatgcccacacgctggcgaatggttgttgccacctattgatcacttgttcaagactgatatctggaaggacgaatactgtgactatatatgggcagactattgtgctataggctgacatgctattgaactcttatagcccctacggctactgctaccaggtgtgtaaataccattctagattagagcatggagctgatgatatataatggaatgagaaacttggatggcctaaatagcatttgcttgggtgcattctgaagggtggcctattcaaaaaggacatctaaccttataacttgacccttctgaaatattcactagtgagggccggaaatcagggcggctgcattgatatagtttcaatttatctgg

SEQ ID NO: 74326 - DNA, 628 bp, Zea mays
  Clone ID: MRT4577_167784C.1
ccggccgcataacctcatcttctctccttttgctcggtacgacacaccgtaccgggctccgatctccgattcccgatcccctcggccatacatgatgccagcttcaaactagactctcactgacaaatactatcaccctccaagtggaaacctctgacaccattgactgcgtcgacgacagaatccactacctcgaatgaattcccccggactaactgcccgttttcttcgctggaaagcagctcgagcacgtgcgtacacttgtcgaccaccacatccagaagagagagcaccctccatcttgttctcctcctcttcctaggtctgtgaatcttcgccatcaccctcactggtgagactatcaccctcaagtcgcactcatctgacaccatcgacatccacaaagtcaagatacaacacaaggaagaacttcctccggaccagccagcgactcatttttgatggcagcaggtcgaggacgtgcgcacgctgcccaactaccacactctcctaacgagaataccctccatttgctgttgcgtctcaggtgcggaatgccgatcttcctagtaacattcactggaatactattgccctctacgtcgagtcttctgataccactgaccat

SEQ ID NO: 74327 - DNA, 772 bp, Zea mays
  unsure (1)..(772): unsure at all n locations
  Clone ID: MRT4577_167785C.1
ccnggccgggaaaaaaaaaaaatcgttacctaggtatacgctgaactttgcacccgttaccaagaaagatgttaatgtatcatttacaggcattgtttgtgcagtatcactcatgttattcccaaaggggatataacagttcttcaatgcaaattgcaaagacttttagaggccatttccatcttccagaaagcatcaataaacttgtcaatctggtccatgttgacgtagagaaggcatatgttcttatgttatccagcactctcaagcttccatttgttgagtgtgctggagaattccatgtcaatgatgagggaagtctactaggtctgaaggaccttaacatgatccgaggacatctcacacttctgtccctagataaggtgcaaaacaaagaggaagcttctaaggctcatctacaccataaggagcacataatgaagttggagctacaatggggatcgcttaattttgctagttctaccaaacaggggtgttgaggtgctcgatgtcctgaaaccacactctgatcttgaggagctaactataagtggatatcctggtgctaggtctccttcttggctggagtctggttggctgagcagactacaatttatttgcctacgtgattgcaacagatgggaggtacttccacctttaggggatctgccattactgaaaactgtcgaaatacggcgaatgcaagggcttagaacacttggtcagaaattctttggccgtgctggatttcatctttggagagattgctact

SEQ ID NO: 74328 - DNA, 386 bp, Zea mays
  Clone ID: MRT4577_167786C.1
ccagttccatgatccatggcactacagtgctgcagcacagcggggcgtattatatagtatgcaatatatatacgagaaggcacaataatctacatactgtagtggtgctctgtatgcggctgatgtgtacagtagtagtatttttttttctccttttgttgatgaggtgttcttttctgctccctttcttattttaccatcttttaccgaagaagaagaataataataataataataataataataataataataataataataataataataataataataataataataataataataataattagtactactaggactagtaggagtaaagaatgttgtaacaaggaagatcaataggctttgttcttgcagtgtaattttat

SEQ ID NO: 74329 - DNA, 303 bp, Zea mays
  Clone ID: MRT4577_167787C.1
gtcacctacaactacgccatgtcttcttccatgttcatgtcgctgccgcctacatcatggggcgcgagttttcctaagacccctctccatctacaaccaccaccaacttgattcactcccaacacaatctcagccactgtctttgaatcaactagccgtgtcaccatcagagatacaactcggtatagctttgagtgcaacatatacttttagctccctcatgagcccatacatactctctcttgccacctatttttctgaacctgcctctacctgaggcttcacattcacacacactcacca

SEQ ID NO: 74330 - DNA, 223 bp, Zea mays
  Clone ID: MRT4577_167788C.1
cctttgttttttttgtggtgtgtttattatgcttatttttccaacgaaccacgtttagaaaagaaatttggcttacagtgcacaaacttaatacccgacctagaacctgggtacaaacaactaacgttaccaacttaaaggttaatcccacgaaagagaaaaacagaacacagggagcgtatttcgtcagcacaagcctataactgtgatcaaactgggtggc

SEQ ID NO: 74331 - DNA, 307 bp, Zea mays
  Clone ID: MRT4577_167789C.1
gccacacgtgccagaccctcttccttgtaatgtggactaagatctgtcgggtaaggtgtatatacaatttgcgaaataacctaagcctctgtaacgtttaccacactacgactatcggaggtcatcagaaagatcgacactcttgttttacacaagttagcaataaatcttatatggactattgcctcgttacccatattttctacggctgctgtatgaactattacttgatccttacaccaaactgtgtacccaggttttccattatttccacgaatctgtcgagtctcgacttcagagtgattaa

SEQ ID NO: 74332 - DNA, 411 bp, Zea mays
  Clone ID: MRT4577_16778C.1
actaccaaatctctttcatagggggaaatgggcctcttgggggtctgactgcacggctagttcattggcactgcttaccgactcctgaggctgcatcacatcgggcagctctggcgggctggaaaacggctcgatgcacagggcctcaaaagtgtcatctgcccggaaggccagccccactgtggctggagcctgtggccgtgctgtttgactggtcaagcctcactcggccagagtgctgccatcctccaatagttggtcatgcttgtacagccactagccgtcaagacgccagtagaggatgccctcgacgatgcgcttcagttcgaacaccgtgctagactccttggcatccgcgaagatggaggtcttgcggcgccggatcatgaagaacacgtgcatagcggctgc

SEQ ID NO: 74333 - DNA, 394 bp, Zea mays
  Clone ID: MRT4577_167790C.1
gacgcaagcccacaaattttgttggaacttccaccgtttcaaattcacgaccaccttcaacattggggtgacaaaaggcactgggggttccataaataacaaactttggggagactggacttcaacaccggggggcaatcactttaaggaggggctttacaatggattttacgttcaacttttttaaggccctgttggactggccacagcccaccaacattactggagctcccaatatttataccactggaaagggctggttcaacctttttgtcgatggtgtcaaacttggtgagcaggataccctcgatcaatctatcagtgggaacagcaaatagggctgctaatttctggttaaatttagtgagctgatccacaacatcgttttcaacca

SEQ ID NO: 74334 - DNA, 288 bp, Zea mays
  Clone ID: MRT4577_167791C.1
aatgttgcgccaaggagcttatattttttatatttccactaaattttttttttgttatttttttccagaaccctataaggtaaggtaagcccataccactaaatgatgtaacacgtatatgatgatgaatactttattgtgataatttaaacgtgaaataatatggttgaaaataaagaggattttttcttaataatgtgtatgttggtgttgtaaaaaataactataagaaaaacctcaaggtggtgatgtattaaaaaaaaaaattttaaaaaaaatctgggcgat

SEQ ID NO: 74335 - DNA, 564 bp, Zea mays
  Clone ID: MRT4577_167792C.1
atggaggacggtgccgccgccgccgtattgatccgcgctgcggcgagttcggcgccgtatcgccactccgccttcctatccgcgctttgggctccgtcgtcccagttcccatctccggccaccactatttccgactcggtcagcatcggtcgggatttctcatcaggggaactcaagccaccgcatccacttcgcacgagcaccgtagttcaaccatcccttggtggtctggcggattcgacagggtgcgtggatcgtgctcaggactattggaccggggaatcatgtgtcccgtggatggaattgctcaccggatcgggctcacccgcggccgcgccgcatcacactatggtcggggtcgtcatcgcaaaatcattggtaagcgccacgttccctgtgttaatttcactcacccgaagtatagagccgattgagctagacgatagatcaccggagcccttagaatttctcgttggtgtggttgatggccgcggggccgctgtgcctcgtgggcagaccgcctccatcgcttcaaaccttcaagtgaatgcaccaccatgctag

SEQ ID NO: 74336 - DNA, 586 bp, Zea mays
  Clone ID: MRT4577_167793C.1
ggccggccggggtcaaatctctcttctaaggcggggtgacataagggattaaggggtgtgtgggaggatccattcgcgccgcgaggaccgggatccggtgctcgacgacgcccatgtcgggccacctcgatcgcttcgtgcagtcatgttagttccgaggctccttcacctcccctgaacccctcccctgcttagatttctctcgcaaattcaaggttgctcgttgctgggttcgggctccctgctcgatcgggcgtgccgctggcggcagcccagccatcacgctctgtctctctggcgtcgtgtgtgaaaggtgcaaaaatggcagcacgtgggaatttgagcgaagaccaggttgctgaagagacccatgcgagagtgaagatgaagaaaagtaatggtaaataatggataaattcatacagcatgcagaatggacagattgatgtgcatgatgagcagtattaagattctctcgaatgaaacaatgaaaatcttgcggtaccctgatttaataaagcagttggtatgataatgaaaactcattaatttaaagctatgtagagaagggtcctatttatattat

SEQ ID NO: 74337 - DNA, 378 bp, Zea mays
  Clone ID: MRT4577_167794C.1
cccacgcgtccgcccacgcgtccgaattttaaaaaaaaaaaataaaaaaaaagatgggaaaaaattacaagtttaagttatacagtatatatttcaaatattttatattttatcttttgggcgggcccgtttataggttccaagcttacttccccttgcattccaccttaatgctcttttattgtgacccctaagtccaattcactgcccggctttttccaacataacgccgtggtaacccttcgcgttccccacctttattggtcttgggtgacattccccttttgtcagctgctttaattactaagaggcccctaccgttcgctttttccaacattttcccacccttaatgccacttgggaccccccctttagggc

SEQ ID NO: 74338 - DNA, 1451 bp, Zea mays
  unsure (1)..(1451): unsure at all n locations
  Clone ID: MRT4577_167795C.1
tataaatataacgcctcgtatgcaattgcttattgtgaaaaaaaattgagcattgtaaaatgaactgttattatgtgtcaacactaaagaatcttgatatcagctgaagacgaactgctacaactacaggcctccactactatacacgtggcaggctgcctcaaggctaaaataaaagcaaaaagatggtctgactggatcaagaaatgtgatggacggacacggactggaggacggcctcgaccaccagcgtcagctggtgcagcgcggcgaaggcggacacgggcacgctggcgagcaccagcgcgacgacggccacggcgacgccgggcctggtgcccatgagtatcagctgcagcgcgccgacgaggctggacacgtcggagacgtaggcggggtagtagcgcttctcccacggcgcccactcggcgggagcctcgtagttggtctccgccatccgcacctcccggatccgccgcctcagcacggacatgccctcgtccaccagcgcgcctccgtactggtcccggccgccgctcgcgtcccggcgtaacgcggcgcaccgcgttgtcgtcgtcgccgccaccggcgacctcctcggtagcgctggtcgtccgtggcacgcctcgtgccggagcgcggccggcgttgctgggagggagagggaagaagaagcagccatggggatggggtcggctcagggagctgatctttctcaggcaagaaagtgaacgcagttgcttggatgacaaggaaaggggaacatgcaccatgaaagcgtagctaacatccaccatncttaataataactctaatagttcaccctccatcctaaaaggaccaatgtaatgatactaagtgtactataaagttcaatgtgctggacgaagagagaagaaccgttaacaagaacatctgaagggtaaggacccaagaccacccgtggtaacagagtagaaggcacattctttgttagtatcattccggaacggaatcactttgtcaatgacgagcgtgatacaaaatcaaaccacactaatagaacgactaagcacaaacagaagacaagcgggattaaacacacataaaaagcctttttttttaataaagaatacttcaaatttttcgaaaaaagaacatgtcaaaggaaaagaacatgtcaaaggaaaagaacatcgcgaagtatctcgtgtagtgtgtttggggaacccgcgcggccatcatcgcgcgcgctccgaccgcgggcagtcgtcatcgctcgtcgccggcagcgacctcgggcgcaagcgccgcctcttcccgacgaaccgcgccaccaacccaccaacccttgcaggccggcgggggcaacgcgggcacggggaggcgactccggccgccgcccgcggtgctgccggacggcgcgctcggataagatcaagtaggttccccggccggctcgaggtcccaat

SEQ ID NO: 74339 - DNA, 857 bp, Zea mays
  Clone ID: MRT4577_167796C.1
ttggtacctcgagccggccccggcttctccacatattcccgagaaaaaccgtcattcgcgcgcacacgcggtcgcagctgcggtgcccggctcaacgccgcggagatggagggcgacgccaccggagctgacggaggaggcggaggaggaagtggtgagcgttctagcttcgtgatcggcctcatcgagaaccgtgccaaggaggttggtgttgcagcctttgatttaagatcagcctcattgcacctatctcagtatatcgagacaagttgctcatatcacaatacaaatacactacttcatttctatgatcccatggttgtcattgtgcccccaaacaaaacagcagcagatggtatggttggagtttcagaactgatcgataaacattacccagcaaacaaaaaggtcactatggcacgtggttgctttgatgacacaaagggtgctgtcattgtaagaagtctttcagctagggacccatctgctcttggtttagatacttactgcaagcagtattatctttgtcttgcggctgccactgcaacaattaaatggttaggccttgtttccaattgttccaatggttactggagcataaaagtcatcaagtgggtcaaggaggagtctcacctctggtgtagggctggagccagtggattagatagcatcctttccgctccagcgcactaatcggcgaccttctgttttgggtttccacggtcacgagtatagttgttcaactatcgttgtatttctagctatcctttagtgtgtgtggggtcgtgtggcattgtatgaggtttttatcctcaccttttctccttatatatgatacgcagctctcctgcgttttc

SEQ ID NO: 74340 - DNA, 527 bp, Zea mays
  Clone ID: MRT4577_167797C.1
ttttttttttttttttttcacaataaaaaagcagctactttactaaaaaaaagtatgaataaagctaaagtgaattagcaaatttattcgcgttgagcacggcccaaaccaccacggaattcgggcttgaagtcaccggaagcaccttccttacgtctgtagttatcacgatcaccacggggagcacggccttcacggtcaccaccgaagttgcggcgaggagcagaagaggcaggacgagcagtcttcttcatagtggcaggaacaatttcagtgggcaagtgaaggtattcacggaggtagtcaataccctcatcagtaagggtatagtagtaccattgccaagagaattgagtcttaaccaaacccttggaggtcaaggattgcatagccttaatgacttcaaggttaggaacttcaatttcgggatgcttgggagcattgtagtccttgggagcacaaagggcaccatctttgaaaagggctgagtaaatggcctttctattctccttggaaatgagcatgtt

SEQ ID NO: 74341 - DNA, 269 bp, Zea mays
  unsure (1)..(269): unsure at all n locations
  Clone ID: MRT4577_167798C.1
ttaccaacttagtattgcacctaacataatattataaaacagaccttaataaatcaaaccttccttctcataccaactgagatgatacaatattactccttaatacaaacacatcatttttcttaaacgttgttgaccanctaataattctatttnccattatataatccatccttctcttaatcacatactccctcacttcantcnntatcacaatcaacacatanccaccccatcctctaaaacattcacaatctactnatnaattc

SEQ ID NO: 74342 - DNA, 757 bp, Zea mays
  Clone ID: MRT4577_167799C.1
tattgtccacctcgtccgccgccgggccgaccatccagtcctccgtgtccagtcgagtctcagcaaggaagatgtgggggagaggaaagaagcgtttcggcggtggcggcagcggtgagcccgcggccaagcgccaggccgcgagggacgatggcccctccgaatccgctgaagacggtaccgtcgtagccgagatatcgaagaacaagaaggtgtccgttaggagctggaaaggcagggtcttcgtcgacttacgcgagttctacttcaaggacggcaagactctccccacccgcaaaggtatatcactccaattagatcagtggaagatattgaaggacaacatcaaagccataaatgaggccatcgaggaaaatacatgatggttgccgccaagcagtcacgtgacgggcgagcttttgcttcttctctgtttgaggcctgatgtacggaagtagtttttgttgcccatatgctgccgtgttgcttttgtccatttgaccacctgctgttgtaggtggccgcatggccgaaaggtttggtttctgccccgtgctactagtaaacttaaacgtcggacggatgacgtaacttctcactattatcttgtagccaaaaacagcttgttaggattgcagaactaagatttagtgtaaaaatgatccggtttctttcttgctttattatgagatcatcgtgagagtattttgccaaaaaaaaaaaaaaaaaaaaaaaagcggccccgtccttttttttt

SEQ ID NO: 74343 - DNA, 350 bp, Zea mays
  Clone ID: MRT4577_16779C.1
atcctctaaagcagacacccttctcccttttcctatctctttatcttttttttttatacacacttcataattatcttgtccccggtttttttttaaaatacaaattataacactaacccattattttcaaaacttaccatcccattttccttacacctataccccttacccacctaaaaaatcctataccaccttttaatcatattaccaccaataataaatatatactttcacaccccctataaatcaaaaaaaaaatcaaaacaaaaattttacccttctccaaaaaatctacaaaaaaaaattttactattttccccacctaaccccttccctcttaatatacatat

SEQ ID NO: 74344 - DNA, 490 bp, Zea mays
  Clone ID: MRT4577_1677C.1
tcgaaatggtgccctcataccggcatgcgcttcctagaaataatcaatatattgatctgagacttatctcgaaaaaaaaaaaaaaaaaaaaaaaaaaaaaaaaaaaaaaaaaaaaaaaaaaaaaaaaaaaaaaaaaaaaaaaaaaaaaataaaaggaaaaaaaaaaaaaaacctggcgcaaaaaaaaaaaaaaaccccccctccggaccaaccttgaaaggggtaaaatcccaaacccgggggcggggtaaaagggggacccgtctcgattccaaacttgggagaaaccggaggaaaaaggtgtacagggggaaaaggttaatgagtgaaatacccaaaaaaaaaacgcggggcggaacaaaaacgggaaacccggggggaaacttggggggccacccccataaattaatgggtcagcgaaaggggagaggtttttgggggaaaaaccgctctcccccttcctaaaaaaaagactcccaacccccggaaa

SEQ ID NO: 74345 - DNA, 346 bp, Zea mays
  Clone ID: MRT4577_167800C.1
gtgtgggggtcgcttctgctgcgccagccaccccccgcagcggcgggctcgaccggaggagctctcatcgacgtcgccgcggcagttgagagcgacaagctgatgggcgccgggcccgtcattctcaatgcattgccgccgcccatcgttcttttgcacggcgtttttggcttcggcaaagggaggctcgggggcctcttctacttccccggcgccgagaagaaggaccaccgcgtgctcgtgccggatttgggggcgctcaccagcttccatgacagggcgcctgagcttttctacttcctcaagggtgggcaggtggactaccgccaagaacacaacaagggtt

SEQ ID NO: 74346 - DNA, 282 bp, Zea mays
  unsure (1)..(282): unsure at all n locations
  Clone ID: MRT4577_167801C.1
ggggggcggggccccaacgctcggcggagcaggcgtccgggcccgtgccggcgctcaagttcctcatctacggccgcacgggctggatcggggggctgctgggcggcctgtgctccttttgcgggatccccttcgnctacggcgggggggggggggttttctttttccagntcgcggccgacatcgacgccgtcgcgcccacccacgtgttcatcgccgtgggcgtcactggccgccccatacgtcgctggtgcgcgacgcaccgtgccgggtccatgcgcg

SEQ ID NO: 74347 - DNA, 362 bp, Zea mays
  Clone ID: MRT4577_167802C.1
tgttagatctctcaacagtgtgattgatgcaatccaaatgccaacagaccaaagctgcgcatccaatggaaggcccctgatgaaccatctgccagtctatagaaatgaacggccccaggtgaaccaaacaccataagtaacccgagtgagccatacaccggttgcaaccatggctaaccatagaccagtagcccatggaaggcacctggcgagccaaacaccacctgctgatgggaaacctgtgacgaaccaaacatgagtagcatatggaagatccctgatgagccaagtaccagcatgcttatgggaaacctctgacgaaccatatagcagtgccaaagggaagacccatgatgaggcac

SEQ ID NO: 74348 - DNA, 609 bp, Zea mays
  Clone ID: MRT4577_167803C.1
atccgaattcgcggccgcgtcgactctgcccatgcgacccgcagccgtcgcacccggccgcctccgtccctgcccttggcgccgcgcccatgagcctcaccgaggcgccgtccccgtccccgtcgtcgtcgagcaggagcgatgacttcgcggccttcctcgcctccgagctcgagctcgcctccggtgttgactccgccttccctggtgacccctcctccgtgttccccgccaccgacgacgagggcgaggacgaggatccagaggagctagaggttgaagccatagaacaaaacgggagatactccttttttatataattacggattaactatgttattccatcttattggattggcttctgaaggctcaacacactaatcataggacagacggatgtagctcgccataaccaacaatggcggtggcgcgggtggttgatgcatgaacgaagaccggaaaagaatagactcatctatccgcccgtcggtcaagctcaggccagggctccaaccgttaatctaataatttgtaggaacaaaataaagtgcaatgcttgctggcggatttggaagggcaagctgtatcgaccacctgtggtcatctttt

SEQ ID NO: 74349 - DNA, 566 bp, Zea mays
  unsure (1)..(566): unsure at all n locations
  Clone ID: MRT4577_167804C.1
actcatgcgaggtatccaatgcccaagttaccacgtctctcctgtgagtgagacaacattcctgtggctctgacatgagctcctcccaanagtgtaactccctattagtagagccattggcaattttgccattatcatttgtgggcttcgccagtatgccatcggacccacaaatcatagacacagacggtcccaccagtcatagacacgggatggcataataacaggcagccaaatttgagagtggcaaaacaggaatgtagtaaggggccgggtaaggtcaaccacccaatctccctcctcaaagcaattagccaccaaggcgtccttctccctacagatctcaaaaatcttatgatatttgatacataacggcacatccccaaccaagtatctttccaaaaaagagttccttccccattgttcaccctattcatcgctccccagcgaaaaaaggggatggaagggtagagaccgagaccgtgcccacaaggagaacatccttgaacgagggtgaaggttctccagcgcaagaactggacgatgggctaacgtctctccatctg

SEQ ID NO: 74350 - DNA, 279 bp, Zea mays
  Clone ID: MRT4577_167805C.1
ggaaggaaagagaaagagggccgactccaccagtgaaggcgaacctactgaagccaaacgccaaaggggtgtaacagaagttgtatctgagcctgccactacttctacttcaagacgtgagttaatcacccttgtgggtaaagccacggaggaacagctccaaaaggtttttatgcaaattgtgagcgatcattctctccaagatgtagccgttgagctccttcgcgaagtgaccaaaaaacccactatctttatcgatatctccattgatggcaagcc

SEQ ID NO: 74351 - DNA, 154 bp, Zea mays
  Clone ID: MRT4577_167806C.1
ctcttctccatcgccgttagttctctcacgccacacggtcatccgatccctgtcgaccgcgttgggagcagcgcaccattggacgacaacgagagagggtgaagacagtgagaatcagaaggagaagcactaggggactgacggcaaggatgaa

SEQ ID NO: 74352 - DNA, 867 bp, Zea mays
  unsure (1)..(867): unsure at all n locations
  Clone ID: MRT4577_167807C.1
actcttgcattcacgtggaccccccgcagccgctgccgctcctccccctctcttcctcccttggccaattttgcgggaaacgcgacgccacccggagaaaccctcctcccgcacctcgcctcccccctgccaaaaccctcgcccctcctcctcctacgatggccgcgccgacgcctccgcccgccgccgcccccgccgcggcgccaggaccgacgccgccggcgcaagtggtcggcaacgccttcgtgcagcagtactacaacatcctccaccagtccccggagctcgtcttccgcttctaccaggaggccagccgcatcggccgccccgccaccaccggcgccgacatggacaccgtcaccaccatggaggcgattaacgagaagatcatgtccatggacatcgcgcgggcggagatcaggggggtggacgcgcaggagtcgctatgtggcggtgtgaccgtgctcgtcacgggccacctcacagggaaggacgacgtctgccgcgagttcgcgcagtccttcttcctcgcgccgcaggagaagggttacttcgtgctcaacgacatactacgttatgtcgggcagggtgaggccgacccgtcattgccgccacctcagcagcagcagccggcaccggagttggatgcagtggttgcccctgctgccgccctggcaaatggtactgttgcccccgtggagagtgtgcctcgcgagcaggaggcttcgccgcagccagagccggatctctctgagtctgttcctcataccaacgaggaggaggatcccaaggaggaggtttacaacccaccgaatgacacgnaggtgcctgttgtggaggaacaccggttcctgaggtcatagatga

SEQ ID NO: 74353 - DNA, 460 bp, Zea mays
  unsure (1)..(460): unsure at all n locations
  Clone ID: MRT4577_167808C.1
cccacgcgtccgcccacgcgtccgcccacgcgtccggtttgattttgtcctagtgatgcggatcggttttgttttcttcttctccggcgccgaacgcctctctcctccgccacaccactcagcactcagcagctgagcccttcgccctcacacactatcgttctgtccgcaagcagcacacgggccggggccgatcttactcgtcnagcaaggtgagcaaggtggacccatctgatataaagcacaaaaacatctatccaacaaattatcnccagcagataacagcagcacgaggtcacactctcattcactaatcgcgtttcatgttctccccctgtggttaattagcggccacacgtcgcacaatcaaaatatctctcccatataaactccgattccattgattcttcatcgatttatctgaaatcaaattatacccatcataatgtttcataatctt

SEQ ID NO: 74354 - DNA, 470 bp, Zea mays
  Clone ID: MRT4577_167809C.1
gatctatatactagtcccacgcgtccgggcctcaagcagaggaagctctccgtccgggaacgccataggggtcgctgactctacttgctgcctgctgatccctcctgctcacggtcgcagatcctgcccgggtacagtcactacacaggcgtgtgccgctaacgcaaatcggatgaaatcccgctaccggacacagttcgttcctccaacctgagctgcaccagccgcatagcccatgttagggggcacccataacggacaaccttcccttctacacagaacagagccaccattatccacagcagcgacccacctcgagctctacattggacgactgggaaccccatttccaacaggcgggctctgttggtttgacgcagaaagcccacggtgtatctcccctccgctgcgaccaggacaacaaattcgtgagattctggcgaaccttggactgaaccatcttgcatgtg

SEQ ID NO: 74355 - DNA, 679 bp, Zea mays
  Clone ID: MRT4577_16780C.1
ccggccgggatctttgtccgaattctcctctcccctcccgggcatggcaagcagcgtcgcgtcggttcggccggtggcgctcggcgacgagccgatggagatcccccgcctgaccggccgggccgagacgtcgcatctcctgcgcatcctgctggcgctgtggcgctggagcagagcaacctggcggaggcgggcagccatggtcgccgtcgtctgcgtcctcttattcatgtccgccacgcttgcgcaccgcgtcgtcgacgtctctgcctttaccaccggccggctccaacttcaccgccctcgttcgtacacgacggtctacgacctgcagcggttcgccacctcctccgacagtccgagcctccgacttcgacgcggcggtggccgacggcgacggcgacatggagtcagtaccccttgccttcacagattcgttgccttcacagcaacgccgccgcctgaagatctggactcagatacgtaagcaaacttgagatggacaaccaaattatatcctagcatgcccctatggcttgcgagcattctgatttttttccgggttccgaattcacaaacatgaaacggtggcagactagtacgtgctcatgaaaaaaaaaaaaaaaaaatttgttctctcatgactcattggtgatctgataaacaaatggttgacacg

SEQ ID NO: 74356 - DNA, 620 bp, Zea mays
  Clone ID: MRT4577_167810C.1
ctctctctcttttattacctatgtcagatatcaaaacccctggtttcgcaagttctgaagtgtttgctactcttgattcttctttgaaatctctttctgatgatgaaaaggcaaagttaatgaagaaagtgaatggtatctttgaattcgttgtaaagaatagtgaaggaaaagaagaaacttttaccgttgaattgaaaaaaaacggtactgttcttaaaggaaaaggttctacaaaggcagatgctatcatttctattaaagatgctgatttcgttcagttggcttctggtaaactcaacggtcaaaaagcttacatgtctggtaaactcaagattaaaggtcaaataatgttggctactaagcttgatactgttttcaaagaacttcccggtgacaaatccaaattgtagttttttttttttttcttaataaaaagtacattttaaacatgtatgtgagaaaaacaatacaacaaaaaaaaaaaaaaaatcatataaataaaatccaacaccacaacatctatactattagaagcactaaaaaaggaaaaaaaaaaaaaaaaagggcccctagggcccgggccgttcaaaaacaaagggaccccccgggttgcagga

SEQ ID NO: 74357 - DNA, 598 bp, Zea mays
  Clone ID: MRT4577_167811C.1
cctgcgagatcgcctggcaatggctccggcaatgacgcgagctctcgcggcttgggtctccagagcgacttctgctgtcggcaccgaccggctccgtccgctccgccaggaagagctccctgcaccatttcgcactcttccaccaaacatcggagttgatgccaccacgataccgacctgctcagatccgctaggcacaggggcatgtcgtcgctctgcaacaccacctaggcagagctacattgatgactccacaataccagaaacaagacaaagggccgttcgggtacacgaggaaagacgagctgctgatccgcctcggggtcaccgccttcggggtcggcctcaagtacgggctcgagctcctgggagttgacaccttgcaggacggcaacgacgagcacctgctggtggagctcaaggaagacgatggggagaataaggtgctcaatggtaaggtccgcgaggagcgtgagaagcggaagcaggagaatgagctcctacactgaaaccaaactgcaaaggatcaccaaacaaaagaccatccggaagatcggcaagtccaacacgcgcaagcagcttcaggtcatccccgatg

SEQ ID NO: 74358 - DNA, 1799 bp, Zea mays
  Clone ID: MRT4577_167812C.1
aattcggcacgagggttactttaattatgtactcagatcacaaaccatgaaatagagaagctgaccttgtagagctgactatcggattcacggacccatcctcgtcttctcccaattctcattgcatcgaatcgggctcgatgctgcccctctccctcttcgtttccctcttggtgctccatctcccccacgcatccgccgacggcgacatctgcatcatcggcggtggcatctccggcgcctccaccgccttcttcctcaccagctacaccagcaccctcggtggagcgcagctgcgcgtttttgagcgccgtcagaaggtgggcggccgcctgggcaccgtcactctcgcgggcgacagcttcgaggccgggggctccatcatccacccccgcaacctccacgcgcgccgcttcgccgacctcctgggactcgccgtgaagaccggcggcgacgactggctagggatctgggacggcaaaagcttcgtcttccagacggcccgcccacctcctgtcggcagctcctggtggcggcgcaagctgcacagtctcgtcaactcgctgctgctgctcaggcgatatggtctgtccctgctaaagatggacaagtttgtccaggttaggcgaatgttgcggcggtttccccaaataggatgcacagatttggaacaatggcatggagtctcgccctgtgtttgccacggttgaggagatgctccaatggacgggtctctatggcctcacccgcaggacccttgaggaggagctgctggatgccggcctcaacacccgaacgatagcagagcttgtcactgttatcacaaggatcaactatgggcaaagcacacacataagtggcctggcaggcgccgtgtccttagctggatctgagtcaggattatgggctgtcaaagggggcaactggcagctagctgccggattgctcaagacctctaatgctaccttgcatcttcaagaaggcatgggctccatcactgatgccggggatcactacgttctgagatccaatagtgggagcgaatacgagtgtatggtgacggtggtggcaaccccactcgacgagctgaacattacgtttagccctccaatctccattccgccgaggaagatgcagcacacacatgcgacctttgtgagaggcatattgaacccgggatattttggtctgaactcggcatcagatattccagagctgattggtaccctagagctccctgatatccctttctcctgcatctctgttctgaagaggtacagcgaaggcgacatggcggcgtacaagatgttttcacgggcaaagctggatgatggtttgctggatcagatcttcagggctcggatagagacgatccggatcaactgggctgcttacccgcactaccaagccccagaggagtttgctccgatagtgttggacgggaagcagctgtactacgtgaacacctttgagagcgccgcgagcgccatagagacgggtgctgtagcagcagagaacgtggcgcggctcatcatctccaggctctctctactaccgcaggcacagcagcagcagcctcatatcatcaagtcattcgccgaacaagaatcccagcgtcgccatgtagacctgtgaaatgttgtaatggcattgtagccagttttatcccagctagcattttggtacatttatttatgtatttgaccaatggtttggtttgtaaatggatgatatagttagtaattgttagcgccgatctagacgtcaatcattgcgatgagtatcggcgacgttgctct

SEQ ID NO: 74359 - DNA, 507 bp, Zea mays
  Clone ID: MRT4577_167813C.1
agtgagtttttttttttttttttttttttttttttgggagaagaacacagatcaaatttaaaaacatatttgtttttgggtatacatcataaattctccctcaaaattaagcaacgcatacatgcatgcattcgatggatcgatccctactactacggtagtagataggagaggtaggttgctagtcgatcttgtagaacttggacggctggagccctgccgtgaagttgaagtacttgagcgcctctgcccacctcgggttgctcttgagcctgtgcacgccgatggtggtgggcatgaactcgtgctcgcactggtccacgggcaccgggttgaggtagtcgtggatggccggcttggcgttgaagcggttcttccccttgcccccgatcctgagccataggccggtgagcatgtcctccgtgcccacgctgtggttgcgcgccacgtcggaggtggcgatccactgcacgaggtcccacgacagcccgtaggccatgccggcca

SEQ ID NO: 74360 - DNA, 336 bp, Zea mays
  Clone ID: MRT4577_167814C.1
ctcctttggaaaaatgtcctggaacattaggggggtcttttaaatacaagggggcattcaagtcattggtcacactgacactgccacccatggggaggggcgccacataattactcaatcatggacggcaaatgactcaactagatagctaggcagcggatttactacaacacatagttttttcagagggggacaccgccgggcgcaccgtaggggcatggcggccactgctgcaggccgcacaacaacgtaagttgctgcactatatgcgcggccaacagccgcaatacctggccgctttgcggatgctgacgaagtatggactggcggaccaat

SEQ ID NO: 74361 - DNA, 315 bp, Zea mays
  Clone ID: MRT4577_167815C.1
gcgacgcgtggcacttgacccaaacctcacgcattacatgtacagcgaaaagactgagacggtatagaaaattttagtgaggcaattccatgcacacaaagaagttacttccacattactagatgactctttgtatactgggctcagcgcacttgtatacctgctgacgagcatgtaacgccatgcagaatctgcactaattcgatgaactacctgcgcctatggttcatgttgacattgacatgtctgttctggctgatgatgttatagctctgctcgagagggcagtgttagaacccttgactccgaaacctg

SEQ ID NO: 74362 - DNA, 788 bp, Zea mays
  Clone ID: MRT4577_167816C.1
gcagctagctagagctccattttagattttactaactcatatcatgaaagaatatagatacagcaagtgatctcctatatgctgatatatatatatgctccttctccttgcacaaatgcaccaccgaaattagtactaagtattttttacctacgtactcaacagtactactacagggctactgagcacggcatttctaagccacctcagggctcagggctgcagcttcggcctctcccatcagttccatctcgctgagtcttctctgcaggccagcagcttcttctctgagcttggcgttctcacgagccaggagagcatgcttggcggtcacgtggttgagctcgaccagaagcctctggttggtgcccaggagctcggcgacctgcaatgagagttcgtacaggcgcctctgcttcctcacgcgcgacctcctcgcggactcacggttcgacgctaaccttctcttcttcctctcgacgtcgttgccacgcctctcctgatgcttgtccgccgccgcggcagacactgagctgacggtggtagtagtaacgctgccattgcagctgcacggatatgggtcgagatcgaccatgtcgaaggtgctgaaatcatacataggatcgtcattctgtggtaggaaaaggctgcccaagtccaagccagggaggcaagctaaatcggctgcccagttttgttgcatctctgaatggagtaggcttggtggcttgcaatgtggagaaagaagggaagaggcagtacgtggtgttctactgcaattgcaaaag

SEQ ID NO: 74363 - DNA, 529 bp, Zea mays
  Clone ID: MRT4577_167817C.1
tcacgcctgcgtgtaccgggcccctattacacggtcgacctcagcgttcgttttcagaacggagttccctgcgttcacacttgggtgccttgcgcttttggcctttattgctgtaagacggtttctctcatgttttggtgcggctcaacatcctttcagccggttaaaagaatttggaagagttgggcttctccccaagttaattcttttttggctagcctctctaaatccgcgatggtcagcttgcatattgtcccagctaggatttggtcactcatgacaaatgccttttttgcgatcaacaggcagaaacaatcacatattttgctcttttgtgcgttctacacaaacattttgtggcgggtgtggagcaaagcgggtgatgcatcatctggcacctgagcctgtggacattattttgcaccattggtggtgcaatgctgaacgccaagctcctttagataagagaaaggtcgtaacacgcctgtaatccttgttgtttgctggctgtggaaacatccaaacactt

SEQ ID NO: 74364 - DNA, 487 bp, Zea mays
  Clone ID: MRT4577_167818C.1
aaaacatgaaaaagggtttggttataaaagtctcaaacaaccagcatgaaaaatatattttcgtattttgaacatttttggaataattttccttaaaaattattaatttcaaagtttattatttatttacatcatcgggatagtaataattgtattagtttaataaataaatactccttatgtacacacagaacgtttaaaatttacaatattcacaggattgaaaatcgtatctcttttaggatgattaactttgaaaaaatgaaaaaaacaaataaactatatacataattcgaagctatgcttggaagttaaggaaaaagtaggtatacaattatcaaattaacttgaacagtgtattgaatgcgtcctagatcacaaatttcatttgtgattgacaataaagaaataaaaacttcatggaaattcttcagctattataagattggtaactaatgatagagttctatgaatatttggctgattt

SEQ ID NO: 74365 - DNA, 634 bp, Zea mays
  Clone ID: MRT4577_167819C.1
cccccgaggctggccgggatcccagctcacatccgatttctatttcaatccttcgatcgcacagcgccgcccgccctctcgccgctctctccaatggcgcgcacgaagcagacggcgaggaagtcgaccggcggcaaggcgccccggaagcagctggccaccaaggcggcgcgcaagtcggctccggccactggcggcgtgaagaagccgcacaggttccgccccggcaccgtcgcgctccgcgagatccgcaagtaccagaagagcacggagttgctcatccggaagctgcccttccagcggctggtgcgtgagatcgcacaggacttcaagaccgacctccggttccagtcctccgccgtcgccgcgctgcaggaggccgccgaggcctacctggtggggctgttcgaggacaccaacctctgcgccatccacgccaagagggtcaccatcatgcctaaggacatccagctcgcgcgccgcatcaggggcgagagggcctgatcgctgctctgtcttcctgtttctgtagtgtctgaactaggcgatggaatctatcgcttcttgtcctgcaatcatgtaccgatgttctaggtaaatcagtttggctgttatgaatgtgatcagtgatttg

SEQ ID NO: 74366 - DNA, 137 bp, Zea mays
  Clone ID: MRT4577_16781C.1
accctcactaagaggacaaagacggagctcgaggccgcttttttttttttttttcccagatgaaccgagtgctataattgagagcagtaacattttacttgctcaaattagaagatacatgcgtatcagctactata

SEQ ID NO: 74367 - DNA, 711 bp, Zea mays
  Clone ID: MRT4577_167820C.1
ccggaaaaaaaaaaaaaaaaaaaaaaaaaaaaaaaaaaaaaataaaaaaaaaaaaaaaaaaaaaaaaaaaaaaaaaaaaaaaaaaaaaaacctcgttttttgttcccctttccttttttaatctaattgggggccggggccccccttgttggtcattcgggagggcccggatcagggggcacgacctgcgcggaaagagcaagacggttctgcaggcgcagttaagggagctaaaatgggagctttccttcctacgcgtcgcaaaggtcaccgggggggctccaaacaggctttcaaaaataaaaatggggcccacctccatcgttggggtgctcaccgtaatttcaaaaaacaaaaagtcggcgttgggtggggcgtacaaaaaaaaaaagtttttcccgttggatctccgcccaaaaaaaacccgcgcctttcgaaggcgcctaaccaagtcccaggtatatacttatgttccttgcgtttacttaaatgcgttttttttcattgttgaagcgcttattttattgttctaccagggctgggaggttacctgggttaaaaatttgttttgccctgaaactttaactcattacttggagttggcaaattgatcctgtcgaggccaacgggtttctgttaattaaaaggggttaagccgatttgtatgacatatcgagatattcacatgtagccgaagggtttgttacatag

SEQ ID NO: 74368 - DNA, 634 bp, Zea mays
  Clone ID: MRT4577_167821C.1
ccggccgggatccacagctcccatccgatttcctatttcaaatccttcgatcgcgcagcgccgcccgccctctcgcagctctctccgatggcccgcacgaagcagacggcgaggaagtcgaccggcggcaaggcgccgcggaagcagctggccaccaaggcggcgcgcaagtcggctccggccaccggcggcgtgaagaaaccgcacaggttccgccccggcaccgtcgcgctccgcgagatccgcaagtaccagaagagcacggagctgctcatccggaagctgcccttccagcggctggtgcgcgagatcgcgcaggacttcaagaccgacctccggttccagtcctccgccgtcgccgcgctgcaggaggccgccgaggcgtacctggttggtctattcgaggacaccaacctctgcgccatccacgccaagagggtcaccatcatgcctaaggacatccagctcgcgcgccgcatcaggggcgagagggcctgattgctgctcttgtcttcctgtttctgtaatgtctgaactaggcgatggactctatcgcttcttgtgctgcaatcgtgtaccgatgttcttggcaaatcaatttggctgttatgaatgtgattcagtgatttgattt

SEQ ID NO: 74369 - DNA, 629 bp, Zea mays
  Clone ID: MRT4577_167822C.1
cggcacgagcccatttcgaatccttcgatcgcgcagcgccgcccgccctctcgcagttctctccgatggcccgcacgaagcagacggcgaggaagtcgaccggcggcaaggcgccgcggaagcagctggccaccaaggcggcgcgaaagtcggctccggccaccggcggcgtgaagaagccgcacaggttccgccccggcaccgtcgcgctccgcgagatccgcaagtaccagaagagcacggagctgctcatccggaagctgccgttccagcggctggtgcgtgagatcgcgcaggacttcaagaccgacctccggttccagtcctccgctgtcgccgcgctgcaggaggccgccgaggcgtacctggtgggtctctttgaggacaccaacctctgcgccatccacgccaagagggtcaccatcatgcctaaggacatccagctcgcgcgccgcatcaggggcgagagggcctgattgctgctctgtcttcctgtttctgtagtgtctaaactaggcgatggaatctatcgcttcttgtcctgcaatcgtgtactgatgttctaggcaaatcagtttggctgttatgaatgtgattcagtgatttgatttaaaaaaaaaaaaaaaaaa

SEQ ID NO: 74370 - DNA, 289 bp, Zea mays
  Clone ID: MRT4577_167823C.1
ttcgccggtccacccacgcgaccgcacacgcgtccgcggacgcgtggggaatttcttcaatctgctggtcaatgacgctaatcccaacgccgcttagcccattgcatccatcgccgtccccaagccgaatcccttgatcaaggtcaatgtcaagaccgttgcaatacccaatgcggcgtcctcaatgtcaaggtcatcgtcaacgtcaaggtcatggtcaagcctatcgctcctgcctcctcgtcatccatgccccgcctgcgcaatctcaacgttgccaatatctccg

SEQ ID NO: 74371 - DNA, 301 bp, Zea mays
  unsure (1)..(301): unsure at all n locations
  Clone ID: MRT4577_167824C.1
ataaaaaaaaaaatagaaataaaagcacttgttaattaaaaaatgaaaaaaaaaacacattggggacattaaaaaagaaacaaacagacagaactaaaaaaaaagggcggtatttttagaaggggcgatgtntcctactcttctaagtgccatttgctggtcttttgtcgggtgaccattattaatttagtcctctatggttaataaacgtgctgtctgtgaaaaccatgacgatttttaatttttttgtatttcaataattatttattttgagaaaaacctttattatgaaaagtggata

SEQ ID NO: 74372 - DNA, 1157 bp, Zea mays
  Clone ID: MRT4577_167825C.1
aaatgctctttgaatttaaatcttgctcgacaaaagttatgaatcaaagcactgaatcacattcataacagccaaactgatttgcctagaacatcagtacacgattgcaggacaagaagcgatagattccatcccctagttcagacactacagaaacaggaagacagagcagcaatcaggccctctcgcccctgatgcggcgcgcgagctggatgtccttaggcatgatggtgaccctcttggcatggatggcgcagaggttggtgtcctcgaagagacccaccaggtacgcctcacgcagctctctccgatggcgcgcacgaagcagacggcgaggaagtcgaccggcggcaaggcgccgcggaagcagctggccaccaaggcggcgcgaaagtcggccccggccaccggcggcgtgaagaagccgcacaggtttcgccccggcaccgtcgcgctccgcgagatccgcaagtaccagaagagcacggagctgctcatccggaagctgcccttcccagcggctggtgcgggagatcgcgcaggacttcaagaccgacctccggttccagtcctccgccgtcgccgcgctgcaggaggccgccgaggcgtacctggtgggtctcttcgaggacaccaacctctgcgccatccatgccaagagggtcaccatcatgcctaaggacatccagctcgcgcgccgcatcaggggcgagcgcgcgtaggcgtatctcgcgcccggccccagtggcggcggagggatggaggagggcaatttgtaaccttatgctgtttgttcgcttttagacggcgtggtgaagaactagtgtaaaaacggctttaaagtctattttgtgcggtagttcgtgtaggccgcttcgtcccgaagcgatcttggtaaaagacttattcgtgttgccaaacgacacaattcgtattttttttgtgtgccgtgtagaacacggtttgttgttattggaatggttcatcgaaatctgtgtgcccgtttggttaaatatcgagggcacgggaatcagcagctagacctaatcgatgtactgtaattgccctcggtcgcaagacaatgaggcaattagcagtcgttgcgttggagggatggccggtcatgaaaaatgtggtgttattccggattttggaac

SEQ ID NO: 74373 - DNA, 299 bp, Zea mays
  Clone ID: MRT4577_167826C.1
gttctagatcgcgagcagccgcactttattttttttttttagctagtacgtgtacagagactactgcatcttttaaaaacaatataaagatatttacatcgctgcagctagctgagaatcaaatgaatctgcgcgctcggataagaaaactaatcaaacgcaaccagggaaacttgtgattaccccttcttcttcttcttcgttgctactgctaggctgctaatcctcactccatctcccccatggtctctagcttccatgcatgtggcatactggcttggaagacgccgtcttagtac

SEQ ID NO: 74374 - DNA, 514 bp, Zea mays
  Clone ID: MRT4577_167827C.1
gaccggcacaatggccgtggacgggaggctgccggaggtcctcctcgttaggaaggtccagctccttgagcagcaggaccggccggtggaggccctggcggaccggcggctggacggcaagtttgaccgtagggagctcgtgcggctggctcggctcggcatggcgtgcacccggtcagacccggcggcgcggccgagcatgaggaagatcgcgagcattctggacggcaacgaagacgtgctggacaagctggagcagaggaaggagagcacggaggactggcagaggaggaacgcgaccaatcttgctctagtgaggagattccaggctcttggcatacactgaaaagtttgaaacagaggaaagtactagtgattcagcttttgttgttcttctgtatatagagaattttaatttcttctgtgagtttttgtggggatatggccaaaacttcctggtgtaaataatacttgctttaatttaggtttaatgttgagcagttacaactaaaaa

SEQ ID NO: 74375 - DNA, 1014 bp, Zea mays
  Clone ID: MRT4577_167828C.1
attgggtacctcgaggccggccggaaaaaaaaaaaattgacaaccagaaaaataaaaatcttgtacctggatatagcctgacacgagagaactcttccaggagaggcgcggagggcggcgcggctgggcaccggacgacgggcggcgcagccaggcggacgtcaggcggcgcggcagaggagcggtgctgaggaagaatccacagctcgcatccgatttccaatttcaaatccttcgatcgcgcagcgccgcccgccctctcgcagctctctccgatggcccgcacgaagcagacggcgaggaagtcaactggcggcaaggcgccgcggaagcagctggccaccaaggcggcgcgcaagtcggctccggccaccggcggcgtgaagaagccgcacaggttccgccccggcaccgtcgctctccgcgagatccgcaagtaccagaagagcacggagctgctcatccggaagctgcccttccagcggctggtgcgtgagatcgcgcaagacttcaagaccgaccttcggttccagtcctccgctgtcgccgcgctgcaggaggccgccgaggcgtatctggtgggtctctttgaggacaccaacctctgcgccatccacgccaagagggtcaccatcatgcccaaggacatccagctcgcgcgccgcatcaggggcgagagggcctgattgctgctctgtcttcctgtttctgtaatgtctgaactaggcgatggactctatcgcttcttgtcctgcaatcgtgtaccgatgttcttggcaaatcaatttggctgttatgaatgtgattcagtgatttgatttataacttttttgttccaaaattggaacaatcactgatccaagagagcgttgttttttgagccagaacataaaatctaggttttatcggttcttatattttatcgtgacagtagcagccaaaaaacagtgaatctaagcatatctattttaaaatatcaaatttgttctaataagaattcagatgtttagttcc

SEQ ID NO: 74376 - DNA, 745 bp, Zea mays
  Clone ID: MRT4577_167829C.1
ccggccgggctcgagagggatcgaagcgccccctcccgctttgccgtttccgaccgccaactctcccaaggctgctctgctcgcccaccggaattcccgccgcggagggtgctgtggtataagctcgctttaggattggagggctctggttggttgcctagacgccggcgatggcgtcgccggccggcggcgagtctccggcgaagcccgtcctcctgcacggcgacctcgacctctggatcctcgaggcgcgcctgctgcccaacatggacatgttctccgagcacgtgcgccgctgcttcgccgcatgccgaccgccctcctcctgcgggaccaagcacccgccgcccgccgccgctggccgccgccaccaccaccggaacatcatcaccagcgatccctacgtcacgctgtccgtgtccggcgccgtcgtggcgcgcaccgccgtcatccccaactcccaggaccccgtctgggaggagcgcttcgccgttccgctcgcgcaccgcgccgccgacctcgagttccaggtcaaggacaacgacaccttcggcgcgcagctcatcggcaccgtcgccgtccccgccgaccgcgttgtctcgggcgacgaggtcgaggactggttccccgtcataggcaccaacggcaagccgtacaagcccgacaccgcgctgcgcctccgcttcaagttccagcccatcgccgacaacccggcctaccgccacggtatccccggcgaccccga

SEQ ID NO: 74377 - DNA, 1056 bp, Zea mays
  Clone ID: MRT4577_16782C.1
ctcgaggccggccgggggcaaccgcccctcgccgactgcacggacggggaagcctcctggagagtggactccctttccttctataaatccggctcctcccaatccaggatcttcccagcctcgccgccccaccaccccagcattgccttaccttgccttgccttgccctgccctccattccacctccacctcgccgcccaaatccccccaacccaacaatcccccatggggtcgcaggccatcgaggcgcaccgcgcgggcgcggaggtgtaccgcggcgcggcgctgtgcgcggagaagtcgacggagctgctggcagaggcgcacctcccgctgggcctgctgccgctggccgacatggaggaggtcggctacaaccgcgccacgggcttcgtgtggctgcgccagaggaagtcgctcacgcacacgttccgcccgatcgcgcgccaggtctcgtacgccgccgaggtcaccgccttcgtggaggaccggcggatgaggcgcatgaccggggtcaagaccaaggagctcctcatctgggtcaccctctccgacatgttcgtcgacagggacgacccctccaagatcaccttcaagacgcccaccgggctcggcaggacctaccccgtctccgccttcgccaaggaaggcgccggtgacgacggcgcggcggccaagcacaaggatgatgcccccgccccgaccgccgccggtaaggctgctgccagcaagtgaggtgcgcggcgtccggagctttttaccttgccgtagtcgccatacttgcctccccaataatggcgtttgtaccccctctacctgcttcaaattagtgtgttttatgaatggaaaagaggaaacgaccatccaactttccatccgtccttgcaatgtgtcacggggtgtttttactacacatcagctttaccagtttcaagattgtttttttccctaatcttgagctaaaacaaaaactaataagtgctcaaaaaaaaaaataaaaaaaaaaaaaaaaaaaaaaaaaaaaaaagtactctgcgttgttaccactgcttacga

SEQ ID NO: 74378 - DNA, 217 bp, Zea mays
  Clone ID: MRT4577_167830C.1
gacgcatgcgtctgctggcattttcttgggcctcgcttgcgtatacggctggctatcaaagacacatggatgtcaaggacggaaaccagcctcgacgcaacaaccccgtcgaggagaagtcccgaggcatcatgtcgagcggcggcgagatgctcaaggaagcgaaacgggtgctcggtgaccagtacgtcggacaggagggcgctctgggcatgcg

SEQ ID NO: 74379 - DNA, 141 bp, Zea mays
  Clone ID: MRT4577_167831C.1
ggagattttgtccatattatatgggattctcatgtctataaaaatcaccttccaggtcttgagggacatatttattatattcctaaaccactttcaattttaaagataaatccctccaaatatgatatatattccttcatg

SEQ ID NO: 74380 - DNA, 167 bp, Zea mays
  Clone ID: MRT4577_167832C.1
ggtgtgttaacaataggttaaaggaggtttccatacaggtacattttgtttaacaggctaagagattgattgattgagttattgggacacttatctgtttactgtagaaggggtgttaaaaagggccgactgcttgcggggaattactctaccaatttttttcaaaa

SEQ ID NO: 74381 - DNA, 769 bp, Zea mays
  Clone ID: MRT4577_167833C.1
ccacgcgtccgaggagagaccatctgctatacctggtcccatacctgatgaattcgtggtccccaccacaaattcaattggtgtgacattgttaatgaaaatgggttggcgccaaggacgctctattagggactcacatgctgattccttatatgaatcacgcaggaatgctagaaaagcttttcttgctctctctggtgccaaggatggtgaagatcaagatcaaagtgctgaaaagcctagcttagataaagctgttgtggggtcagtcggggaaatacctgtatctggaaatacccctgattttcatggattaggttacgatccattcaagcatgctcctgagtttagagacaggaaaacattgcagaagtcaagagagaggggccgcaaacgaaatgatgtttctatgaggggaaatcttctgatttctaactcaggacattatgctcctggttttgggattggagctctcgaagaacttgatgttgaagatgaagatatttatgcatcaggttttgcttatgaacaaactgaagttgatattgagccttcaaaaactgccaatgacagtaattataaacttgatgacagaaaaagaggtttctatctgagctttaagattgcctcaaattctgaatacaaacttgaacggtaatgcttcctcctgagatccctgatgatttgatgctcatacttttcttcatcttgatggaatagtgtgaactaccttcgaaagtctgggctttggtttttcattctaccttct

SEQ ID NO: 74382 - DNA, 340 bp, Zea mays
  Clone ID: MRT4577_167834C.1
aaaacaactatagccaccacccttggatgctggattcagttccaaacaaaaaaaatactttacatttttaaaaccaaaaggtttggtccaaaaacggggggggggggggggggacaacagctggtgctggccacaacctctgggggggggcgctcacaacacgaaacaaaagttctcccgctgtgcctgggtgcttaaaaaacaagcctcctacaggggaacggggttaacacccaaagtcccgagggaaaacccttgggagggggactctagttcatcccatggaaatcacacaaggggtggccgataagggggagccgccgagcctgagcaagatacc

SEQ ID NO: 74383 - DNA, 254 bp, Zea mays
  Clone ID: MRT4577_167835C.1
ttatgatgtacatataaacgcttttgttgtatggactctccatgttactgtatatatctgccagcacttcccagttacactcctgtgagtcagcttatttttaccctaacataaatagtatgttttgtagtagttatcaaatttaagagatacagcaatcattatgtttggactttcttctatcttaatgtgaatttcataattaatgtctatttattcagctattcattaaaatacaggattctttgggaaaa

SEQ ID NO: 74384 - DNA, 3192 bp, Zea mays
  Clone ID: MRT4577_167836C.1
ggccggtccaccctaccttcccgacgggccgcattggattcctcccgtcctcctccgcggcacgagggcctcctgttcctcttcttccgccgccgctgtacgatcacactgcaccgccagcagcaaggtcccatggacctcgacccggcttaccccacatccgcctgcgccgacgcctggccctttgactcgctcaccacgtccctgttcttctccccgcagctcacgccgataccggccaactcatcctcctcctggctcaccccacactcgccgctctggctcttcgaggaccgccacctgctcccgttcgacgcgcccgccgtcttcgaggaggtccagcggccacgctccgggaattctcacacttcaagcaagccagctgaacagatcagtcacagatggcagtttcatctgtccctggacgaagatggcacagacaactccagcttgttcaaggagaagctgacacacgctcttcgctacttcaaggagtccaccgatcaacatctgctggtccaagtctgggcaccagtcaagaatggagaccgctatgtgctcactacttcaggacagcctttcgtgcttgaccaccagagcattggcctacttcagtacagggctgtatccatgacgtacatgttttcagttgatgcggaaaatgttggagacctgggcctacctgggcgtgtctataagcaaaaggtgcctgagtggacaccaaatgtgcagtactatagcagtggtgagtatcaacgacttaaccatgcgatcagctacaacgtccatggtacagttgccctgcctgtttttgatccttctgctcagtcgtgtattgctgtcgcctcccaataatttggtgccaatgaagcattcagggtctgtaacgataaaggcgagttttaaagaagatattgtgaggttccgtttctcatgctcaggcagtgttattgtattgtccagatatgtaatgaaggccgtcaagcggctctggtcgaaatactagagatcttgactgtagtatgtgaagagcacaagcttcctttggcacaaaccagggttccttgcaagtatagaagtgtattggcacttggatgtggtttgcagaagaatatctttaagcgatattgaaacacactttggcagttcttgtggaagctccggttgatatgcctgtcagccttttgctctgatcaatgggtactcgaaagtgcttgtaccatgagttcagttccacgggacaaggagtttctggaaaggcatttatctcacacaaaccttgcttttcaaaagatatccgcaagttctgtaagttggcatatcctcttgtacactatgctcgcatgtttgggttgtctggctgctttgcaatatgcttgcaaagttcttataccgggaatgacgactacatattagagttctttttgccactcgattgtattgacgaagatgaccaaaatgccttactggagtctatattaactctgatgaagcggtgtcttcgtagcctaaagctagttgatgacaatgatttgagtggggtttctcttcaccttagtaatgtgctaaaacttgagaatgaagaatccaaaacagatgcacagtttgatggttcccttcgcgaatcacctgaggatgatagacatggaggatcccacaagtttgataatgagaaccagaaagttttggatatcacagagggacaattgttgactgatgactactctcaagacaatggtacttctgttggcagaccaaatggtagtggtgcttctgattcttcattgcttcacaaaaccaacaaaccccctgaaagaagacgtgggaaagctgaaaagactatcagtttagaggttcttcagcaatatttttctggaagcttgaaaaacgcagctaaaagccttggcgtttgtcctacaaccatgaaacgcatctgccggcagcatggaatttctcgttggccatctcggaaaattaataaggtcaacaggtctctctcgaaattaaagcaggtgatcgagtctgttcaaggctccgatgcggcatttaatctcacatctatcacaggtcctcttcctatacctgttggcccttcaccagagtctctcaatgtagagaaattaactcaaagtaaagtggcagaactttcgaatcttgctgttggtgttgacagagattctttgcagaagtcgcttgaaaatgatgaccattttgatatagtcatggcccagcaaggatttatagacaataacaatgacgtgcagcttgaagctgacaaagcttctcactcgagaagttcatctggagagggcagcataaattcacgcacttcagaaggctcatgccagggaagtccagcaaaccaaacatttgtttgtaagccaatcgcttcaatgttcgcagaacctcaacttaatcaagaggagttcaacaaagaaccttttcaagaaccacaactaccactttcaaggatgctgattgaagattctggtagctccaaagatttgaagaatctcttcacttcaacatcggaccaaccatttttggcccctcccaacaacttggtgtcaatgaagcattcagggactgtaacgataaaggcgagttttaaggaagatattgtgaggttccgtttcccatgctcaggtggtgttattgtattgaaagaggaggtagcgaagaggctaaggatggatgttggcacgttcgatatcaagtatctcgatgatgaccatgagtgggtaaagttggcgtgcaatgcagacttggaagaatgcatggagatctcgcggctttctggcagccatgtcattaggctactggttagcgatattgcagcacactttggcagttcttgtggaagctctggttgatatgcgtgtcagccttttgctttgatcaatgtagactcgaaagttcagttccacttggtagttttgttgctagttagctttagctgtttcattgtgtttgataaatgtatcattgtattttacccccaaaaaaatacatgtaattgtgcagaacgcacttgtagtcaactttgtatatatcatgtgctggaaattctatttcaagttataaaaactgaatttgttattgtctagactcgaaaaaaagaaaaaaaaaaaaaaaaataaaaaaaaaaaaaaaaaaaaaaaaataaaaaataaaagggcggccgctcgcgat

SEQ ID NO: 74385 - DNA, 395 bp, Zea mays
  Clone ID: MRT4577_167837C.1
aagctacatttgaggacgtccatactcctgcggcccgccatgaaatttgacatttttttttcaactttaaccaacgaatggcccgttctcgttaacattttcaaagttcacaaaccaggctgtgcgaattaatggggaaacttaatgttgacgacgccaacacgttctttttttttttgaaggagaaccgtggaactgtatagacttccactgtcaaattctggaaaaggaacagggttccctatgggtgggtctcaacactaatagaatgctatccgggacacgctctcaagctttggcgtgccggaatgtgaaacttttcgactttacggggcccatggttcgcgccaacatcagggaccggtgctccgacttaaataccttaccttttggaa

SEQ ID NO: 74386 - DNA, 322 bp, Zea mays
  unsure (1)..(322): unsure at all n locations
  Clone ID: MRT4577_167839C.1
cgagtagggcgggggagggcacggcgttttctgtaccaaagccggcgacacctgcgtgcttttactcttttttatggcctacctcaactccnctctctgcctctgcaccaccatcaaggccaaggctcttagcattagcctcatgcttcccatcttcatcttgttgctagttaacgagtgcggcatgcacatttccttcaattttcaatgctcttaatctatataacttcatttaatcccatactgatcatcgactgcatatatatgctaactactatgatgtatcaccaccactaatctatatccgaatgcatgcattatt

SEQ ID NO: 74387 - DNA, 424 bp, Zea mays
  Clone ID: MRT4577_16783C.1
gaatcacacaacagcagctcaaaaaacctttcacacctcaacaagcagagcatagacccgggattcgtcggcgcggtagcgagagctagagatggacggttggatgttctgtttctagacctctctgtttgtggcgctgtatctccttctggacgtgctcttctgctactcctgctctgtctgttttctttcttttgtttgtttttttttttgttgtcttttattttctttatatttatttttactttttattttattattttttttttttatatttttttttttttttattttttttttttttttttttttttttttttttatttttttactttttttaattttagttttattttttcttttttttatttcttttttttttgtttttcttttttttttcttttttttttttttttttattttt

SEQ ID NO: 74388 - DNA, 760 bp, Zea mays
  Clone ID: MRT4577_167840C.1
gccggccgggtcgcgatgagtctgtaaaaaaaaggctgatatgatgatgagataaaccgtacgagatcgccaacgtcccgtatcctgcacacgccatcgcaacgcctccaaggctccttctagatctgcctcggccacggaacggtgccgctggagctgcagccatccagccgaccgccggccaccagccgagccgccgcacgaaggctatgatattcaatgtgatctcatcaacaaagcaatcgtatggagaattggaatgttttcagtcctattaaatgccacttgatttgcagaagctgttcaaaggggttactggtggcctctctggattgtcaaagaatgtcacgtgccatgaaacactgccaagaaatattaggagctggtttgagaaaggcccaacgtaatagcaactgggagcaacagccactaacccaaaatcaggttggccactgtcattggtgatcttttttcttgtttccttgaaaacagccctgttatcatgtgtgtcaacatctacttctacgtattagcaactgttttttcatatctggacattgtgatttagtaagttgctcatatattctactacattctttagcacgctttccccaaggggggcagttttaggcattcctactgtggttctgaatgaagagataaatgatactccctcattcctgaagtctctgaccgaatttatagaaattagtaccaacatttctctctccaacaaaaaaaaaaaaaaaaaaggccccta

SEQ ID NO: 74389 - DNA, 258 bp, Zea mays
  Clone ID: MRT4577_167841C.1
gagctcactattcggtggccgccctttttttttttttttgctcagtggaatatctatatatgattacgattgcgtgtgggcacacatgaatcggtttcttattacaaaacggacggagggagacacaaaccgaccgggcgtttttggagcaagctgttgccaacataaccatacgggagacatccacgcccggggccacggcgacgacgacctaaacggatacgacaaccagcccactaatctggtagtgatggacat

SEQ ID NO: 74390 - DNA, 503 bp, Zea mays
  Clone ID: MRT4577_167842C.1
ttttgggcagagcaggagagttctattatttcatagttcaggttttgcttaattcctctccgagtcacaacacttctcatatatgccttacaaccccacggcaactggcccacacacagtccaacccgagacaacaggttacatccactcgggcccacacacacggggattcttgcgacgaatacggcgcccgcgtccttcagttacaatgtcttcctgttgcttgtccagcactttggcatccctgacactcccgacctctggagaacctgcttgtccccaagcaggcgcaaagggaaagcactggcggagggcttcgcgatctttccaagttgccagctcgggcgaaggaccagaccatgccaccagtgcgtgtatacgactggtagcgggcatactgaggcggtaagccacctgtcccacgcgagctagtatctgatagggggcaaaaaaacttggaactgagcttgtgatgagcacggtgcatgacagatgcttgcaca

SEQ ID NO: 74391 - DNA, 865 bp, Zea mays
  unsure (1)..(865): unsure at all n locations
  Clone ID: MRT4577_167843C.1
ccacgcgtccgccaccagttcaccccctctcctctccgggagcttagacacctgtaggctagcgcattgttctcaaggtcagagcttcgccgaggaggcgaggacgatggcaatcgccgggcagtgctcctcctgctattatacgtcacccaccctgcagctccagctccaacgacggcacagccacctgccgcggcagccccaagccgcacgaagagcgcgtcggccgaggttgcaggtggccgcagctgccggcagcggggccatcagggcggccacggacgccgagttcttccagccttccgacaccaggccaatcatgctcttcgacggcgtctgcaacctctgcaacggcggcgtccgcttcgtgcgggagcacgaccccaacaggttcttccgatgggttcgcaactccaacaggagcatcaggtacgtgccgctgcagagcgagtccgggaggaagctcctgcagaggtcagggaggtcccctgacgacatctccagcgttgttctcgtcgagaaagacaggtctttcatcaagtctgaagcggtgctgaggataatggagtacctcaacctgcccttcccgcagctcgccgtcttcctcaagttcgtccctctgttcctgagggacttcgcgtacgacaacgttgcgaacaacaggtacgccatgtttgggcgcgccgaagcagaagcatgcgagatactgtaacaactggtgccctgagatctcgatgcttagggtctgtttggttgggctgtggctgtgaaaaaagttgctgtgggctttgagctgtgaaaaaagctgctgtaantgttaaaaagctaaaaattgtttggtggaaaccattaaaaaaaaaaaaaa

SEQ ID NO: 74392 - DNA, 148 bp, Zea mays
  Clone ID: MRT4577_167844C.1
gtggcatatactgctctatagagttatttgtgacaagcgaactcatgttttcactacagttggtaacaatgcgaattttcaggctaatgcacactaaaagtttgaaacggtgcacatttactacttcaagtttgatggtctagaggat

SEQ ID NO: 74393 - DNA, 1044 bp, Zea mays
  unsure (1)..(1044): unsure at all n locations
  Clone ID: MRT4577_167845C.1
ccggccggggttgaagcccaaggcacaccagctgcttgtggtgctggttgcacacttgaaccgcaccaccagttcgccccctcgcctctccgggagctttgacacctgtaggctagcgcattgttctcaagctcagagcttcgccgaggaggcgacgacgatggcaatcgccgggcagtgctcctcctgctattatacgtcacccaccctgcagctccagctccaccgacggcacagccacctgccgcggcagcccctagccgcacgaagagcgcggcggccgaggttgcaggtggccgcagctgccggcagcgggcccatcagggcggccacggacgccgagttcttccagccttccgacaccaggccaatcatgctcttcgacggcgtctgcaacctctgcaacggcggcgtccgcttcgtgcgggagcacgaccccaacaggagcatcaggtacgtgccgctgcagagcgagtccgggaggaagctcctgcagaggtcagggaggtcccctgacgacatctccagcgttgttctcgtcgagaaagacaggtctttcatcaagtctgaagcggtgctgaggataatggagtacctcaacctgcccttcccgcagctcgccgtcttcctcaagttcgtccctctgttcctgagggacttcgcgtacgacaacgttgcgaacaacaggtacgccatgtttggccgctccgaagcagaagcatgcgagatactgtaacaactggtgcccctgagatctcgatacttagtctatacgattcgatgtcaacagtctgcatacatgatgtcccccgaacatctatgtgtgcgtagttttacccatctaaacaaagctcaaacaaaaaaaaccttgctctatctctatgctccttgcagtgcagtgagcgataggcactgaagggcgtatactagctacaaaggctgtgaaaactgtagctttgggctttgagctgtgaaaaaagctgctgaaagctggtaaaagctaaaaatgnttggtgaaaccatttaaatcgttaaagttcttcg

SEQ ID NO: 74394 - DNA, 1020 bp, Zea mays
  Clone ID: MRT4577_167846C.1
gggtacctcgaggccggccgggaccgcagttcgcagtagcagcagcagagtccagaccgttctccgcccctctccccgccacgctcttccggagagcatcgccggccgccatgggctcgccgctccgcaccgtgcacctccgtcgctcgtcgccctcgtcgccagcggataccgtggcgatcacggtggatggcggctcaggggtggacctggccagggtggggctcgcgctggggctggaccccgcctccgtccggcccaacggctacttcctcagccgcggccctggccacgtctgctccgccgtcacgtggcgcgcgctcctcgccttcttcgcgaagcgcgggctgcccaccggcgccgacgccgccgcgcccgttgtcgtccacggcaggcccgccgcgcctactgcgccgagctcagattctgcaactcctccatgcccaaagcgaaaatctggagtcgaagtagaaagatgtcccaagaagagcaagcctcaagagaacaaatcagttcttccaaaacgaaggcacgatgtactcagcgatgaaatcatccttggtctaaagagaaggctcaggctggacgacccaatcccagctaagaagattacgcaagtacaatgcagttcagagacacaacgaccagttaaattttcttgcggctttgtgaatgcaaatggaaagcggctatgggatgtggagacacagcaaccagttaaattttcctgcagttttgtgaacgcaaatggaaagcggctacgggatgaggagatgatcacctcgctttcatgtaaaaaagctcggtgacaggagctgaggtaaatgccctaccatatgttccagcagtcatgtaatcttgaacaaaagggcgtatacttcgcttggaggcagttccagacgcagctgttgtatgtacatccatgcaccttgtgaatatcacattgattgtaactaaacaacatttttagagtgataatcctggtacaagacgtgcaagtcaaaaaaaaaaaaaaaaaaa

SEQ ID NO: 74395 - DNA, 228 bp, Zea mays
  Clone ID: MRT4577_167847C.1
gcggcagcgtattgtatctacgctaattggcatttaggaaaccactatctactatcacgttggggatggatcatcacatcaaggaaacgtatcatcaatggaagaaaacactgatgcttatttactacattatcctcaagaattgaaagactcaactgaacctatgcataatattgctgatcctggaaatgctaacctcagacccaaacttgatgaagtcctccctaa

SEQ ID NO: 74396 - DNA, 385 bp, Zea mays
  Clone ID: MRT4577_167848C.1
ccgggagactgccagcgaggagtcaaacgtgctctgcctatccaagtcccccaacaagcacggtaggctttatatgaaggcgcggcccttccctgacggcctggctgacgacatcgacaagggcgaggtgttcgcccgccaggagctcaagcagcgggcccgctacctggctgagaagtacgagtgggatgtggccgaggcccgtaagatctggtgcttcggccctgatggcacgggccccaacatcctcacggacatcaccaaaggtgtgcaatacctcaatgaaatcaacgacagtgtggtagctggcttccagtgggccaccaaagagggggcactgtgcgaggagaacatgctgggcgtgcgctttgacatccatgatgtg

SEQ ID NO: 74397 - DNA, 143 bp, Zea mays
  Clone ID: MRT4577_167849C.1
agagaatatatagcatgggccatgggggaaacaggtcgccgtcgttccacgaatctgacggcgaaaggaggtgagggcggcgagcagccatcgtcagcaagtgataatcatgttcatgtcaaaaaaaaaaaaaagatgcatat

SEQ ID NO: 74398 - DNA, 763 bp, Zea mays
  unsure (1)..(763): unsure at all n locations
  Clone ID: MRT4577_16784C.1
aacctcttacgaaaccctaccgcgcgcaccctcctctcggctcccagtctcccaccctctctggcgttcggcggcggcggttgaacggcggccggcaccggcggatctgcagagcaatccgagaatggcttggggtcagggtgctagaaggcccatactagggcttctgtctcgtgctcaacgacaagccgctcgagggtatacttctgcaacgttcgaaactcatctgtcgagcaatcattttgcccaaaatggcatgattcgtaggagatttagctctgaggtgcctgcttcggagcaaatgaatcttattaaacaactacgcgaaagaacgtgtgccccgatcaaagatgtcaaagcttcgctagtcagttgcaactgggatattgaggatgcacaaaaggatctaaggaaaagaggggtgatatctgctgccaaaaagtcgtcaaggactgctgctgaaggtttgctagctatcgcacaagatgagaaaagggctgttgtggtcgagctaaactgcgagactgactttgtggcaagaaatgatgtgttccagtatctggcttcatccttggcaaagatggctttgtcagcacaggatcccggcaaattggtttttccttttgctcctgcatatttggagaacatgagtattaacctagatcatcctaaactcagtggtgaaacaactgttcaaaatgctgttacagagtcgctgccatggttgnnggagatgtaaaactcagacgaggtttcatgttgt

SEQ ID NO: 74399 - DNA, 292 bp, Zea mays
  Clone ID: MRT4577_167850C.1
accatggggggttgttacaattgatagggggggaactcaagatgtgtataaaagaaaaagcacattacacatcttttatatacgaaaagcacgcctgacaacaaggcgctgaaatcaaagtgacccaaaaaccccacattttggatacacaacgttcaccattccaaagtgtggcaactacaatgacagatcgcgcatcacaacatgctggccgagggaagaacacaaaaagaactcgcatccgacttatacagccaccctcctgagtatctaaagcaacggcgggagcttc

SEQ ID NO: 74400 - DNA, 155 bp, Zea mays
  Clone ID: MRT4577_167851C.1
aatcaatactaatgtcaaactctatattatgatctcgagagaagaggtacaacgggataatttaacccataagggggctaactacactagctaataacttgagatgtatcaacctgaaatttatttcatgattaaccacacaaattggataaagc

SEQ ID NO: 74401 - DNA, 460 bp, Zea mays
  Clone ID: MRT4577_167852C.1
ggcccaaaaaatcccaacccagcccaacttttacccagttattagcagggtttcccaaatcaccttcgcccttagaaaaggggcaaccttttccttaggcaatttaagggcttaaccagttttgtttccagccagcccccttcctttaaaccttttcgggtaaagcagggcccccccctaaaggggctccgggccctaattattggaatggcccccctcttttgggccctaataaaaaaggcccccctgggcccactcgaaaagctccttgtaaaaaacctggccctttccaaactgggaaccatccggcccacggaaaacccaagggcctttaacttggaaggggggttaaaaccctataacaagctttttcccaaaggcgtccttggggacaaggcccttccgttgaagaaatcccccacccttgttaagggccccaaaggaaacggggtcccaataa

SEQ ID NO: 74402 - DNA, 127 bp, Zea mays
  Clone ID: MRT4577_167853C.1
ttgccacccaagtaagatacacacataaaggggcccaaccgagctactgggtcccatagaaagatcaccgcactttttcatctcagtatgggggaacacagattgtgatggtatttattttaacctt

SEQ ID NO: 74403 - DNA, 651 bp, Zea mays
  Clone ID: MRT4577_167854C.1
ggcccgaggttttttttttttttttttttttcaaacgtcaacatcccggtctttattgtataataaactcggttcaggacaggaaactgcaagttcagaaagattacaagttgacggtacataccaaaaccaagaccaaatacagacacctggcgttccgttttttacttcaatgaaacatactcaggtcggcttgcccaattgatgtagcagtgacccaagtagcagcaggtgatcaaaggaaacggttcaaatgcgtcagcgtgatagaaaacaaatcacagtgaacgcggttttgcagagctcatcataacaagattagaaagatctaaaaatataggccaatgatacggattcactatagtattatggtactagggcaaagaaggtaaattccatgtcaggtcaaggcgcaggggaccggatcaaatgctgtgccacacgctatccattgctttttgcggctgtatggtagcacgcaatcaggaaccttttgccactcccttttcagaaggttgtatgtaacaaggcggttcatacgcttcgccttcaaggagagcatgagcaaaccactgttgcccaggcatgtcatcttcatgtgcttaccgtagaactctaagcaccagatatttggcactcccggcacggccg

SEQ ID NO: 74404 - DNA, 669 bp, Zea mays
  Clone ID: MRT4577_167855C.1
aattcggcacgaggcagacgatggcgcggggcaggacgcgctgttggcggcgctcacggagctctgcgaggcgctatcgttctgtacggaggacgtcggtgggtacttccccacagaggcagccgcgcgagcgctggtgcgccgggccggcggcggcgatggcgcgggtactaccccggacgtgattctgctgtccgtacgcgccatcacgtacctctgcgacgccatgccgcgtgccgctgacgccgtcgtccgccacggcctcctccccgtgctctgctcccggctgctaaccatcgagtacgtcgatgttgctgagcagtgcttgcaagcatttgagaagatatcacggaggcagcctacccagtgcttgcaggctggcatgatcaacgctgtgctggcattcattgacttcttcgctgcaagtattcagagggttgcagtgtcagctgtcgcaaatgcctgcaaaaaggtcccgtcagattgctcccaatttgggctggatgcgttcccaactctctgtaatcttctgcaatctgaggacaaagtgatagtagagtacttcgcagctggcagtgaaagcattgcttactcctttagcacgtcgcacgatcttggggattatgatcaaaaaaaaaaaaaaaaaaaaaactcgagggggggcccggt

SEQ ID NO: 74405 - DNA, 685 bp, Zea mays
  Clone ID: MRT4577_167856C.1
ctttgtctctttcacccagtgacagcgcacagctcccaacctgctcgtgctcgacgggcgcaccatggagctctccctcgcgatgatcccgtcgccggccggctactgggaggagcacgtcgcagtcgtggaggccccggacgggaagcttggcgtattcgcgcacggtttccaccaccccgacggcaaagccaatctacactactatacgatcgtgcacgacaaggaagccgccggcgacacgaagcggtggcagctggagaagacgatccagctgccgtggccgtcagaccaccggtctttctgcctccggggcacggccaacgggtgcctcaacgttggcctcatcattgaagtcggcgagaagaagtcggtattcatgggaagccaccgcatcagggacgccgagctattcaagatcgacgtcaagagtttccagctccaaaagatctgccgagcacggtgcgccggcagtgctgccggcgagtgctgctggccatacttcggcttcccgccgtcgctgtccttgcccactgtgtgagaagcttgatgttactgagacaaaatgaattatgttacagcttcagagccgtccgtctgtatgtaacatgtataagcaacacttgtactcgtccagtttgtttacaaaaaaaaaaaaaaaaaagtaccctagggccttgtacaa

SEQ ID NO: 74406 - DNA, 372 bp, Zea mays
  Clone ID: MRT4577_167857C.1
ggccacgacgccacgcgttccaacgttcaccgcaacttgagctttttctttcgtatatacacccagttctttgagccagagggtattgcaaatgcacaaagatcgctgcggttgggacaggaagaaaaagctcttggagtgcgttaatgagaataaaaagcatttgggatttttgtggaatctgaaagtgaatttatgatatgatttctttatatggttatctttttaatccatgaccaaactgtagagacatggaaaaggaactctcaaatcttgtttgaaattggtagagttattctcagttatatttatttactcgcgctcgagctatcctataacacccaaccctgtataccgaatgataagcaccct

SEQ ID NO: 74407 - DNA, 564 bp, Zea mays
  Clone ID: MRT4577_167858C.1
tactgcttcacaagataacaatacaacagcgagaccagtccacagggccggtgcaccagacgcttcgcgaggaagcagtcacccgacggacctgtcgtttgcaaaggaggatccctggacaaacaacgtaaagcagcgggaactgttgctggacgaggttgtaggtagcataacaggaggagctctgagaacctcctcctccgtccttggtatctccctcgtcagcaatacgaaagggaagagaagcgagagggaagggaaggggcacaaccgagacagcctcaggtccggccgtccgtcgccgtccaacgcaaagggtgaaaggaagaacaaaacaaagctcagacagaaggcagccaacatctctgctccttcaggaggtctacagcttccagcgaaaacaacgcctcccagcagtgggaacggcaaggaggagagcgcagcagcagcagcagctgctgctgccaggcatggtggtgatccggcggcgaatgcttcgaatgacgccgaaatgcccgacctggctaacctcgagctgccaggactggacgccgactttggcgg

SEQ ID NO: 74408 - DNA, 380 bp, Zea mays
  Clone ID: MRT4577_167859C.1
ctcttgtgtgtttttttttcttttttttttttttttttcctttgcatatggaaattttttcggagaaaatctcgacgcatgcatttgctccggaaaaacccgaaacatggaacaacagagggagacgtccgtacaacagcacgccgttgcttacaggcacactactagaccctcgatcgaacgccttaacacacgacgaggggatacaatttgggatcacaaaccgcacaccctttgttttcatgcatggagccatggactggtggcaacccgcgcgatctacggcaacaccagccggccgctgggcgagctaattagtggcattgctgggagcaaaaacaacggcggctgaagcccgtgcaccttcccccggggaaccc

SEQ ID NO: 74409 - DNA, 359 bp, Zea mays
  unsure (1)..(359): unsure at all n locations
  Clone ID: MRT4577_16785C.1
ggggaagaaagagaaaanggacaacgcnagcngccaccgccacggaggggcagggggaggaagacgccgcgcagagggacacngcccncgncangcggaccacaccnaagagggagcgagaaaacacttttttttatccggacccaacnggaagnggaagcggcagcgggggttcaagcgccgccgaaagacagcnacggagaagaagggganncgcggagcaacgagncagcaggnccagcacccaagcnnanccnnccnnngngnnncgagnggagcnnggngnnngnncngcccgcgccanancgcccggcggcggccccggggcnacccgccnncgaaaggcagcggcggagaag

SEQ ID NO: 74410 - DNA, 319 bp, Zea mays
  Clone ID: MRT4577_167860C.1
gtcaaactagctgtggaatgggggcaacgtttacagtacatatgtctgcacttatgacactgggactgaacgacattctgaggacagaaattgacatcacatgcttgacagatgctcagactgtgatctgactggcatttctggatcgcaaacctattcttactacaagattgacgcttatacatatcaagtgcacacacacaggagttgcacatacttgactgccgattgttactccaaaacgggtcggcttacgagtcgtaacgatcatgatgctactcggtacgcctaatctgtatggcactatggtggctaacac

SEQ ID NO: 74411 - DNA, 355 bp, Zea mays
  Clone ID: MRT4577_167861C.1
gggaaagggccctttttatttggggggccccccaaacctcatccaaaaaaccttattgggggaccttaacccaaaagcaaacaaaaagggggccccccccaaggggggggggggggaaaaccccgggggggttgcaaaaacaaggggggggaaggggcccaattggggccgttgaaagggggggcccccgttgggcaaagcgggccgggggaacggcaaccaccgttgttgggtcaaaaagggcgcggggcccacaaaaactaactgggtaaaggggaaaagttggggcccccggaaaaaagccccagagttcaatgccgctaggggggggaagggaaaaaaatggggggggggg

SEQ ID NO: 74412 - DNA, 230 bp, Zea mays
  Clone ID: MRT4577_167862C.1
aaaaaaaagataaatttttggggggaactggtttcccccgggttcccccaaaatcccaaaaatgatccccggggctggattttaacaacacaaaaccccccccccattaaaggggaaaaaccggttgttaaaaaaccgtttccaaaaaaataatctggaaatggtggagggtccaatatattgctccaagcaaacactagcccaaatgtgtaacccttaaaccataattg

SEQ ID NO: 74413 - DNA, 489 bp, Zea mays
  Clone ID: MRT4577_167863C.1
ggcggcaaaactgttcttgactataataggggatactatttgaaggaccatgtgtgcaaggagacaggaacaggtccaaaaccgccaaaagctggtgttgtgggcgaaggaacaataggctgcgcccccatggctagcattacactggtagccactcttacttatagtgtaataaatcgaatggactataacttatcccaggcgtgaacgcctgaaaaaatggttaaaaactatgatctaccatcgctgttagtcattggatacatttccgcgtatcttgctactgaaatcgggatgcttagatataactgacactttaatggtcacatctttgggtgcgctaattccaaaagacatggtctccaagcacttaaacgttggcaataaacacaccatagagcttatacgggtgctatcttgaattgttcgggaccacgtgagatcccttacaaggattgatgccaaggattcttataacaatatttacag

SEQ ID NO: 74414 - DNA, 304 bp, Zea mays
  Clone ID: MRT4577_167864C.1
gttgagaaacaaaccccacaaaacagcaaaggcagtctaagacccgtgtcaaaaccaaaccactgaaatttgggggatcaaaaagtgaattgttctttgatcattgatctcaccggcccactatagaagggtgggagagtaccaaaccaagatgtgaattattaatcgagtaactgtgttacaaaggtcgacttgacttatgacgattatggtcctgtgggttaccaaagaagtaacggacatggaacgtttaggacaaaacggatgtgactacaaatgggacaaccgttgagcggaatttcga

SEQ ID NO: 74415 - DNA, 571 bp, Zea mays
  Clone ID: MRT4577_167865C.1
ccctgcgtccgttgaatgcaatcgccgacataaaagtatgcttccggcgaatgcgccaggcgcatagatgggagcgcacgccaccgcatgagggggccgcctggggctgtcataaagctggcgcttgcgcactgagacaccgtgcgtaccgccgtcaatggcctgatatttggatcgtctggtggagtccttctccacacgagacgtaccttcggttattgacgccgcgcctgtatatcaacacatgcaatatatgcctctgcttcccacgctcgagctatatgctcacggctcaccatggagcagtatgaaacccaacgcgaacgcatgggcgaggctgggtactatcacgccaaccacgtctaggacgacaccgtagctcctcgcagtgactaagcgcgtgggaaaccatatctctctaaacttcctccggttggaggcgttgcacaagtactgcatgattgttgaggttgccaaggaggtgaagtggaactaccctgacatcatcatgcacaccgaggatacaaggaaggagaaggccaaggctggctatgataggaggaagcagctg

SEQ ID NO: 74416 - DNA, 433 bp, Zea mays
  Clone ID: MRT4577_167866C.1
gtgggggggtttttttttttttttttttttttttttttttttttttttttttttttggtttttttttttttttttttttttaggtctctaacaaaagcctaaatagaaaacctggattttctggttataaaaaacacaaagaaagggcttaatgggggggggggggataaaccctggtaggcatcagttaaaaccgggtgaaaaaaaaaggggttcagggcaaaattttattgaactagctcttgttcagctccagggggagaaattgaacggggacaccaaaacagatatgggtacaggggaatttttccgcatacaccccaatatgctccggggggaaaaagggacctctcaaacacccaaatgtttttcacaagtacctcctttgacttgtctccagacacaactgcaccctttgaattataggcttcaa

SEQ ID NO: 74417 - DNA, 402 bp, Zea mays
  Clone ID: MRT4577_167867C.1
gggggataggtgcatttttaaataaagccaaatacctcacaccataaaataaatgaaagccaacttttgggcctaaaaaagctaactaaaattgtatcctttctaaaacaaaaggaataaaaactaacaccaagactttcagggttaatttcatgttacactcaaaactttcatggtatgaaatggataccactaccataagtccaacaaaagtttttacaagacaatgtaccatcgaaggcctggcccttcaattccaaaacataccatgttctgtgaaagccaaacagcccacgagggaaacagataaacatatcctccctgcaaaaacatcagttcgtaccaatgccttccattataaaacattaactgcccagtgcaaaataaaaagaatcaagttaa

SEQ ID NO: 74418 - DNA, 759 bp, Zea mays
  Clone ID: MRT4577_167868C.1
cctgtacagatgttgagactggatcgaaagtcagcgaagacactcaacgacaaccccttggtgaagatgtcggcgaaccgcagcgtggtggggacgctgtgaacccgaacgtcacaatcggcgacccgctcgcggacaaagtgcaggtggcaagtgcaacagcaacattcgtgatgatgttctcctcctccctctctgtggtggagttttacttcctgcacagattccccctgccttttgctggctacctcatcttcatttccatattggctggattctggggccagtgtttggttaggaagatcgtgcatgtgctcaagagagcatcgcttattgtcttcatcctctcctctgttatcttcgtcagtgctcttacgatgggtgtcgttggaacccagaagagcatttcgataatcaacaatcacgaatatatggggttcctcaacttctgcgagtaactcaaacaccatcagactgtcgatccgtccgggagaatccaggccaatgcctaattgacctcatctccctcaaaatctagaagaataaagtcgccaagtatgtgcacaggtttttgtcacgtctgcgtcagctcctggctgaccagcagttgtttgtcgttcattctctgcgtcagctcctggctgaccagcagttatttgttgttcattcttgcgctagcaccaggctaggctgcaaaactgcaaatatttgttgcatggaacattgtaaatatcagtcaattcccattctgtttgttcg

SEQ ID NO: 74419 - DNA, 3191 bp, Zea mays
  Clone ID: MRT4577_167869C.1
aagaaaatctcgaggttggccgggtcgactctgcggttgcggcctgcggggcgatgccaaaatcgaaacacgcctccccctcctcgtctggctccccgtgaccgatctcgtaatctcatccgcacccgcctggccgccttgcctagccttgcctgctctcctcatgccctggccgccgcctataaaagagcgaggcggaggggcaggcgccggccgttcttctctctcctccttcctcggtcctctcctctccgcatttcgggcggccacttgtggcggcgtagctagcgtactacagctccctgcatggtgatggaggggcgcacgggctcactctacggccgcctcaacaagagcagcacgcgggggttcctcgcctacaccgccgccggggctgcctgcgcggctgtcctcgcctgcttcgtgctctccgccgcggactcgccggcatctgcggcgcgcaacgatggcgagcgcctccgcctgtcctcgcgctcaccgcgcgtctggcccgacctcgcgttcaactggcgggtggtggtcgccaccgtcgtcgggttcctcggttccgcgtttggcaccgtcggcggcgtcggcggaggcgggatcttcgtgcccatgctcaacctcgtcgtcggcttcgacaccaaatccgccgccgcgctctccaaatgcatgatcatgggggcctcggcgtcatcggtttggtacaacctccaggtgtcgcacccgaccaaggaggcgcccgtcatcgactacaagctcgcgttgctcttccagcccatgcttatgctcggcataaccatcggcgtagagctcagcgtcatcttcccatactggctaatcactgtcctcattataatcctcttcgtaggcacctcgtcgagatccttctacaagggaattctgatgtggagggaggagaccaggattctgacggagacacgcgggcgagaagagcaatccaagtctacctgcgctgcaagtgatgtggtcattgatcccagttatggggagcccctcctgactcaacctcagcccaagaagtctgcatgggagactttcatgttcaatctgaggtggaagaatatccttgtgttaatgtctgtctggtcattgttcttggtgctgcaagttctcaagaataattcaaaatcatgcagctctttctactgggtgataaacgttctacaggttccagttgcggtaagtgtgttcttgtgggaggccatgcagttatgtagggagagtcatgcacgacgtatgaatgggaacctggaatgtgtgtgtgaggcctctattgagtggtcaccagcacaactgatcttttgtgccttttgtggccttctcggtgggactgttggtggccttcttggatctggtggtgggttcatccttggcccacttcttcttgagcttgggtgcataccgcaggtggcaagtgcaacagcaacattcgtgatgatgttctcctcctccctctctgtggtggagttttacttcctgcacagattccccctgccttttgctggctacctcatcttcatttccatattggctggattctggggccagtgtttggttaggaagatcgtgcatgtgctcaagagagcatcgcttattgtcttcatcctctcctctgttatcttcgtcagtgctcttacgatgggtgtcgttggaacccagaagagcatttcgatgatcaacaatcacgaatatatggggttcctcaacttctgcgagtaactcaaacaccatcagactgtcgatccgtccgggagaatccaggccaatgcctaattgacctcatctccctcaaaatctagaagaataaagtcgccaagtatgtgcacaggttagctcctcgctaacatgtgcgcatttagaccgacagagtcgctgtagtgaattcagctcgtgttagctcctggctaacgagctgaccatacggctttagttttgtgaagtgggcgcgatttcgtcatgtcatgcatgtgttagctcctggctaacctgcaaatgcgtgtgttggtgcaggtttttgtcacgtctgcgtcagctcctggctgaccagcagttgtttgtcgttcattctctgcgtcagctcctggctgaccagcagttatttgttgttcattcttgcgctagcaccaggctaggctgcaaaactgcaaatatttgttgcatggaacattgtaaatatcagtcaattcccattctgtttgtgcaaaaaaaaaaaaaaaaaagcggcccctccaaacccgctgcatcttgctctcttcctcatcgtcatcttcgtcccggctttttcgttggacctctgtgtggcggggaaaaacctccccattcccgatcttccccctcccctttgtttccttcgtcttcttcgtttccctgtgcgccggtttgccccgggagtggttctggctgagtaacggtcattggcttattggcttcacgcttcttccggtcttcacctactctgctgcctacttgcgtcccgtgggtagcgattccagtactccgcctctgtgctgtcatctgcctctctgtactcaatatcggcgtcgtcctctccctgccaaccgttaccccctctctatgttgccttgtctctgggcgccttctttggtgagggtgttcggggttctgggcatggtcgcgcacgccgtgcgggcccgtctctgctctgtgggtggggtcctcctggtgccagttcccctaaatctctgctcttgcgcgcccgtggcgactggctcggagagcctttgcggggccctgttgcggctcctggtctgtggtggtgtggcctccttcttgttgggcccggccacacacctcagttgacccgtgccccgcgttatgtgtgtgacgattctctgccctcgtcgccctgcctgtccctaccccaccccgtcgaggtccgctcggcgaggctttcctgttctagctggggtggaagaccagccttgcggtcggagccgcgtcggccgcgttctgcgttccgcgtcttcccgcgctgcatgcgatgtcgtcgctgacccctgtcttcgggggcccctccggtctccacctcccccctgcggtgtctgcatgggagactttcatgttcaatctgaggtggaagaatatccttgtgttaatatctgtatggtcattgttcttggtgctgcaagttctcaagaataatt

SEQ ID NO: 74420 - DNA, 415 bp, Zea mays
  Clone ID: MRT4577_16786C.1
aggccataagacaaggagcatggtatatcttgactaaagacgcgaagagccctatcgtatggtggcggcactgtataggagatgctgtaggcgcgatacgcgtaccgtatcctttaattctggcaaataggcggcacggtgggcacatgggatcattgctataagacagacatatagtatgcggaccatgctactaaggtccgaggatgtggccaatggagcggagcgagcggaggggggaaggggtttgggcatgactacctgcagcacatacacgacctgcagctgcacatgcggcagaagaacaacaatctacaaccgtcatgaggaacaatgaagtgacctcaactgctgagttagaatgctcagggaagagttgcagttgcttgcaagagcctgtctcatatattcatga

SEQ ID NO: 74421 - DNA, 1359 bp, Zea mays
  Clone ID: MRT4577_167870C.1
ccacgcgtccgttccaattttgtcttctcggcacccgcgggagctgcggcagcggcatgaaggcgcggccccgtgcgtgctagtgcctccgtcaagtgacaaggcgtggccgcaagtcgcgcacgagtcgtggcgacggcatccaagcaaggaaaagaaataaagcggaaaactttaaacgggtacgcaggagatccagcgaaatggcggcgccgccgccgtcatatccagcggccttgaagccggagatcggccctgacggcctcgctcgagattctcccgtaatcgcctacaccgagaaggtcattttggaggagcagctgcagctgaagaaatacattcaggagaactattccaaaattcgtgatgtagaaaaggagttagagagtcttactttagaaatgaaactgacagctggaccaaagaaagcagcactagagcatctgaggaagaagattgaaatatcaacagagaaaatacgtttagctaaggtgaaagaggaacatgcaaaaaagacttgggaagttgctgcacaagttgttaaagacgaagaggatgctaagcagaaattatgtgatgacctaaaccatctagtccaggagagtgctgcttcccaatatgcaagattggaggagctgaagaaacgtttagaatctctaaatcccataagggattctgttaatgtgtcaggtgtttatactgcacagcatgctactctgaattcagtacctcagcaaccaactgcacaaaatcctgcagatgtaactggccgtcagaatattgccacaaagcctgcttctatgcaacagcagcctatacctgcggaggcagaaaagaagagaagaccctcgaattcggcaagagggaggggtggtgtcatgatccttccgaagggaagagagggttctgggtcaggatggacaggtgctgggtttgatgtagatagccgtacatgacgcccggtatttcaagttattcgtaccattgaaaccatgctctccaaaattcacaagaattagattggtcaccaaaaaaaaaaattcagagccattccagaattctaatgtgaggaaggtgtacgtttgatcatttgttcatccattgtatatgaatcatgcactaaattaatcaaagttttaacatatatattcaaaggctagaaatctgaacctaagtatgagcacccgatagggcatgttgtcgtagggtgtgtttgactatggtacatctggatgaacggatgtatgctaagttgaattgtattttaataaaaggtgtttgatgcggatgtatgagtggatgtaaaaaaatacagagattatttggttgtatgagccaatgcaatttgttgggcttggg

SEQ ID NO: 74422 - DNA, 283 bp, Zea mays
  Clone ID: MRT4577_167871C.1
ccctcatagcgggcgcgcgcgcagtacaatgaacgcctgatcagcattacacggggggaggaatgagcactcgagccacaatgagttccagaagagcagctggattcggtctcacacagggtggcaaaataggctacattcattgcgaatagcaagcaagatggttagcacaagccgcacagaattgtgttgcaagcaacagttctagccatgatcgcattggctcccttttcattgagaaatcaggggtctattcgagcctttgagctaatgtaccccgcat

SEQ ID NO: 74423 - DNA, 731 bp, Zea mays
  Clone ID: MRT4577_167872C.1
tagaaatgaaactgacagctggaccaaagaaagcagcactagagcatctgaggaagaagattgaaatataacagagaaaatacgtttagctaaggtgaaagaggaacatgcaaaaaagacttgggaagttgctgcacaagttgttaaagacgaagaggatgctaagcagaaattatgtgatgacctaaaccatctagtccaggagagtgctgcttcccaatatgcaagattggaggagctgaagaaacgtttagaatctctaaatcccataagggattctgttaatgtgtcagtaagtgaataaccccaaggccatagatctgatgtttcatctttgaaattatttattcctcactgtcagtatttctgctttagtatcaacaggaacgagtcttattgattatatgtttcctgtttgctagtagacattagttcttttgttgttttctgagcagataatgttggttttggtctcaactagtatgtgtatgttccgtattattgtctcaccttttcttgtatcagggtgtttatactgcacagcatgctactctgaattcagtacctcagcaaccaactgcacaaaatcctgcagatgtaactggccgtcagaatattgccacaaagcctgcttctatgcaacagcagcctatacctgcggaggcagaaaagaagagaagaccctcgaattcggcaagagggaggggtggtggtgtcatgatccttccgaa

SEQ ID NO: 74424 - DNA, 606 bp, Zea mays
  unsure (1)..(606): unsure at all n locations
  Clone ID: MRT4577_167873C.1
cttcgatcctcgcgatctctccaacgagacgggatctgagcctccgctacaggtgccatcggaggagccgatccatcgccgaccgacgacgggaaccggtcttctcgccatacgcagggaggtggaggagacgggtctacgctacaacacgccgtcgccatggctgccaccataaacaacaatgaagctacgtacccatgttcctctcgatagaatagatctactcatcatcgaggattttcaattgcggattggtattctaggggattaggaatcgatcctagccaccatagaatctaacaggagaaagacagcccccacagtattatattaagaagaaactcaattagagctccgaccgagaaagatcacgaaaactgccctaacatttcactttttaaaaaatgttgtattagtacatatatcacctaatgccatgtttgaaagtaaagtatttttgtagtttctagacaataccgtgattnttagtaataccatagtatttttatgctataaggtgtttggnttgtatttctgaaaactgtgttttcaaaaccatagtattctaaataccatgatatttttgggagtattgaaaacttcact

SEQ ID NO: 74425 - DNA, 614 bp, Zea mays
  Clone ID: MRT4577_167874C.1
aaaagtcaccaagtcaccaaacaaacagcggctggaggaggaggaagcagcgacccatttgagcccacatccagtgacccactccgcgcctccacctagaggagacctcagagtttgtgaggtcctccttccccatggcggccatggccaggagcaacagcagcaatggccacggctaccaccacgaggcgtccaccacttcctcctcctcttcctccacgtcgttggctcgggggcggagatcactggagcagcaggtccccgggacaccggggcggccgttgctgttcctcacctcatcctcctcgagcccggcccacccccagctcgtctcctcgaggaggtcggtaccttccaagtgggaggacgcggagaagtggctgacgcagtcgtccgaccaccgcggccatcaccatggcaaggctgcctccaagcagcaccacattggaggaccggcgccggcaacggcgaggaggacctcactagacgccaatgcgcttgctttgtacacactacctgcagaggtgctcctcaaagacaagtacaccgacaacgtggagccgtccaaagagagcttcgtgttccggagctcctactgtgagccggtcaagaat

SEQ ID NO: 74426 - DNA, 443 bp, Zea mays
  Clone ID: MRT4577_167875C.1
actaatacgactaactataaggaaagctggcacgcccgcaagcaccgatccggaatagcgggcgcgatccacgcgttcgctactccagagagcacaagaacccgatcgacaccatgagggagtagctcgatgccctacactctactgtggtctcgctgggagcgccacctccacgcatacaagcggcatgctgcggttagacaaccaccgtcgccagctaatctaccgccgtcgtacgcatatatcacctccggatcacctgacacctccggtgatgtgcacgcgctggcacctgccgccgccggcccacctgccaccgccggtgcatgtgctcgccgcccgggtcatcatgccgcgcgacaccatgccactaccctactcaaccgcccgaggctcaggctgatcaagagccacacccatgcgcgtgccaacaggcgcatcca

SEQ ID NO: 74427 - DNA, 1449 bp, Zea mays
  Clone ID: MRT4577_167876C.1
taccctcgggcccgccgggacggggcagcgtatatccttgtcgctcttcgtcgtctccccccacaactgttatattcccaccggcgccgccggctcttcgtcgtcctcctccgggtgtgccccagttcgctgcccgttccccagccgccgatccctcgatctccgctagcttcgttccttcgtacaggaacggtcgagcagaaactagcagccactcccgagtcccgactcccgatcgcgattacttgccgcggcaccagtactccagcggccaccatgagcagcgggaagcgatccttcttcgcgcccaagaagaaggccaccaacccgttcgattccgactccgacgacgacaaaccgcagcagcggccagcgcgggcgtcctccgtgcctcccccggacgagcagcggggctcctcctctctcttcggcgccggcgacagaggcgggctcttctcttccgcggccaaccatcactaccggaacgacttccgcgacgctggcggccttgagggccagtccgtgcaggagctggagggctacgcggcgtacaaggccgaggagaccacgcgccggacgcgggggtgcgtcaggatcgccgaggagatgagggacaccgcatccaagacgctcgtcaccgtccaccagcaggggcagcagatccaccgcacgcacatgatggccgtcgacatcgaccaggatctctccaggagtgagaagctattgggcgatcttgggggtctattttccaaaaagtggaagccaaagaagaatggcgccatcaggggtcctatgctaactagagatgattccttcataaggaaggggagtcatttggagcaaaggcagaaactagggctggcagatcatccacctccatcaaatgcgcgccaattccgttctgaaccctcatcagcacttgagaaagttgagatagagaaggcaaagcaggatgatgatctgtctgatctaagcaacatactgacggagctgaaagggatggccgttgacatgggctctgagatcgagaggcaaacaaaagcaatgggggatgcagagaaggattatgacgagctgaacttcagggtcaagggagcaaacactcgagctcgccgtctcctcgggagataaaaaaatgcatatattcttgtctcttggatggtccataacacattaactatatgggggcatcaaattctgatgattttgtgcatcagattttgattagcattgttaccgtggacatgtcggcgtgtatggtagttgagacatattttatatgtttgcttcttttttctatttttttagcattgcacgagcttaggatttcagtggattttacatggaaaaccttgtctgattagaaacttcttttcgggtaaataatgctgatacatagtgatttgtcgcgacagcaacgaaaaaaaaaaaaaaaaaaaaaaaaaaaaa

SEQ ID NO: 74428 - DNA, 163 bp, Zea mays
  Clone ID: MRT4577_167877C.1
ccagcagcgttcccaacgtcgttgacgactgacgaaactaggctgcagctacctatgttactagattgcccacaagcagacagactcgacatgtttaactactcttataacgtgattctggtttagcttttgctttggttataagagacagctgattcagagt

SEQ ID NO: 74429 - DNA, 527 bp, Zea mays
  Clone ID: MRT4577_167878C.1
gtacacacccatccattccagctgctgatcttgatcctgcatccccgagccgtactcaacagctatgtcgatagaacttcgcatggacgcggagcagaactaagagcaccagaacacggacatatcgactaccccggaggtgaatgtttacgtccgtgctatctcccacggtcgtatcgcgcactctgctcgaccctgaattaggtgctggcctactacaaactctcttccttgacacgaccgaacggccaccactctcgatgggacgacttgtccaggacctgttacgaaaagagaacaacgttgctgtgagtgtagctcccgctcctcatgacaagaggaatcgagaggtttcagctccgaaagctactgccctgaggtgctgcgagacggcaaggtgcagcatagtcaaagctggtagcggaggcctcacatttgaccaccttggtctacgcggtccacttggggagaacacaggcctcttgagggcccccaagaatggccccgaggcggtgaagcacttcggc

SEQ ID NO: 74430 - DNA, 475 bp, Zea mays
  unsure (1)..(475): unsure at all n locations
  Clone ID: MRT4577_167879C.1
aacacacgagacgtactaatacagatacacatctcatatgcgatcatgaaagatagaaacagagaaatggccgtggccaggctgcaacatacttgcctacttctgtcgctcactgcaagctcacacagatgaacatggacggcctgtacctcgcaccacacacccgctcgngatgcctccctcaccacgactcccgagtagacagatgtcgccactgtgtgctacgccaccgtagacttgcaaatacattgtgtgccacactcctgcttgctactgcaactacagtgaccgtgtatgctacttgataatcactcccgttgactgaggccactccttcaagccacagctcttacatgcatgggtcggtcgaccacgactctgactctcgtgatcattcatgtgcaagccgatgcatggttctatggatgcatgcacggttcatgtagacgagatgcacattatcatctacacgaag

SEQ ID NO: 74431 - DNA, 422 bp, Zea mays
  Clone ID: MRT4577_16787C.1
ggccgcttttttttttttttttttattttttaaaagttaaggaattaatacataaggaaaacatcatgtgcattacaagttaaggaattaatacataaggaaaacaaaacaggaacaagaataaagcatgtctagttgcatatctagatttgtcaggtgcataagaaaaaacataatcaaccaaaagtgaaattctaacatccaacatcttcgacatcctcgtcataccatttgtccagtcaaccttcaagaacacaggtccttttttaggagtctcggccaccaaccgctctcatctttcttgttctggcagcatatgaatttatatctcatctttcttgatctctccctttctaagaaggataaccattactctcaccataccagtattttattggaagaacagaatggttgggcttgca

SEQ ID NO: 74432 - DNA, 929 bp, Zea mays
  Clone ID: MRT4577_167880C.1
cctcgaggctggcggggactctctggtgcgggactgcacggccctgccatgccaacgccatccccgccggccgccgcatcaccacctacacccacctgaagaacgccgtccccataaactctctcgggctcgatactttccccatctcccatcccatcatcctccgctttcccttcccctcgccgccccccaccccccagatcggcaaatccgcccgcacctaccccgcgcgcgtcgcgcgtcccggatggccatcgtctcctccgcccgactcgtggttccgtagcatgggccactccccctcttccctttccaaatccggcccctcctctccaccgcgccgcagcaggtcgttctcccccatggcgccgccgcagcagctgcggctgaccgcgccgttgcaggtcgctgcggggggcagcggcagcgactcgtcctcctcgttcgtgccccccgctcgggactacacccaagacctgcccgacgagatcctcgcgctggtattcgcgtcgctctcgcccaccgaccgcaacgcctgctccctcacctgctcccgatggatggaggtcgacgccaccacgcgccaccggctctccctcgacgcccgcgccgcgctgggcaacgcggccaccgcgctgttctcgcggttcacggctgtcacgaagctcgcgctccgctgcgcgcgcgactcaggattggacagcctctccgaccacggtgctgcggcgctggccgccgcgcttccctcggagcgcctcgccaggctcaagctccgcggtctaaggaagctctccgacgccgggctagcctccctcgctgccggcgcgccagcgatccgcaagctctctattgcgtcctgcaccttcggacccagggcattcgtcgcggtgctccagtcgtgcccccctcctcgaggacctctccgtcaa

SEQ ID NO: 74433 - DNA, 966 bp, Zea mays
  Clone ID: MRT4577_167881C.1
atttttcctagccgccactttcttctctccctggcttcttcccccacgtgcagcgacgcccttcttccccaatagcatggagcagcggcttccctctcccagctcggcctcgccatcgcgcagggaagagcagacgcccagctctccctctccatcgcgcccccatccatggcgcccaagccctagtttcttcctcctgctgatttccccatggtgcagcagcccattcttcaccacacccagcagcggtagcagcttccatggaggacgcccagattttttttcacccctccttggcctcccttgcacaggggcagcagcctccatggccgacctctcctcctctgcgcagggcgcccctgttcccctgctccttctccctcgcacaacagcagctcgccccaccttccctcgctgcgcagctcctcagcaaaacgccgctgttcctgcagccacggcgtccaagtccctgcgcccagccctccgatccaaaaacagcagccctgcgtagagccccttcccttgctcctttacgatgtgcgcagggtgctcgacgaaatatgcagcagccccgatggctccgcgtgctgccggcttgttgttttattgcgcagtgagcagcacaccgtgatgcccgtcggtggtttgctatttttgcgcagccccgccgtcgtcgtcgttcaccccggtgagaccgcgatgctccttgttcgattccgcatcgacattatttttctatgattaattatgtatatgtgctgctttgttttgtttttgtggaggagagaaaccccgtgttttgcgtggagaagaaggcaagtcgttcaacgctcgtcaatgtgcggagctatgcacaaatcgaatcgccaacgttcttacaaacaccgattgagtttgtttatgttgagccaatgcatgtcgctctcgattgacttgatttataaattatatagatgtggttgaaat

SEQ ID NO: 74434 - DNA, 534 bp, Zea mays
  Clone ID: MRT4577_167882C.1
tggaattccgcttgagccgcccacccaatgaaggaggggtttccattggtttccggggttaattacccgcctacgaaaaacccttccgttctttcaagttggttctctaccggaacaagcctggcccgcccttcgttggccgccgccttggggaggggaaggttcaggggaaagccaacgggccgccgaatcttctccacaccgaaggaaatcgctgctgggccttaaggtcgccctcgcccctttaagaagaaggaggaggaggaagaggaggaggatgaaggagaagagccagaggaggaagattctgaagacgagtctgaggacaaacctaaccttaaaggtactgagggttttattcaaatggaaaatccgaccttagtaaaagggaagattctaaaggccaaggaagtggatctgggaaagacaactgaactctcaaggcgtgaaagggaggagcttgagaaacaaaaagctcatgaacgttatatgatacttcaggagcaaggaaaaacagatcaagcacggaaagat

SEQ ID NO: 74435 - DNA, 413 bp, Zea mays
  Clone ID: MRT4577_167883C.1
ctttgataatgcatacagaggtggccaagatgttaaggttagttgattttcactacagctgtgggcttttaatcgagcatattaattcaatgcctactttctttattccccgaactgtaggtttctgttgaactatcattcatggaagctgtccaaggttgcagaaaaaccattacgtacgaagctgatactttttgtggaacttgcaatggaagtggcgtcccccctggaactgtgcctaaaacatggtaaacatgtccagggttttgtgtgatatacattcccaaagggatatttactgtgcaatgtacctgctccctgtgccatgggagcgggaaaaatgtcaagaatttttgcaagacttgccaaagagaacacgtagtgaaagggaaaacgtcagtcaagctagacat

SEQ ID NO: 74436 - DNA, 776 bp, Zea mays
  unsure (1)..(776): unsure at all n locations
  Clone ID: MRT4577_167884C.1
gccgggnaccgcttccaccatcgccacccgtcagtccgtcacccctcgcgcccatagtccccttccccataccatgtccggcgctacgtgtcatccgttgccgacgaggggatggactgtgcgctcgccgcggcggtgtacggaggaaaaggtggagtcttgtcacagctgcgcgagctcaaggcgtggttcgaggagcagactctgttccacttctactcggcgtcgattcttctgggctatgatgctgctgcagtcgcagcaggcggagatgggggtggggtgacggtgaagctggtggactttgcccatgtggccgagggtgatggggtgattgaccacaacttcctgggcgggctctgctcgctgatcaagttcgtttctgacattgttccggagactcctcatacgcagcctttgggtccttcttaagagaggatcctggcatttcgatttgataacaaagccctacaagttttgtctggaaaaagaagcgcctccgagttgtgctgggtgtggagatctgagacggtcgtcggcccacttggttgccttgcctttgccttgcctgcaaacatacggcaacctgctccttttttcgcaaccccttacttccgaagaaacttttttttcccactttgggggttcgattacgttggatctggtttgtgccactcggtcagaggttgtaagcatggatggaggcgtgttgatccggcaactgtgtcagtctttgcgctgcctgccgtttctgcatggcttttgcctgctgcgat

SEQ ID NO: 74437 - DNA, 496 bp, Zea mays
  Clone ID: MRT4577_167885C.1
tttttttttttttatttttttttttttttttttttttttttttttttttttttttttttttttttttttttattttcttgttttgcccacgggagggcgaaccgggaaaagccggagcggcacccgaaggggaaccaagcaggacaaggggggggggcaaaaaaggcaggggaaaccaccggaaaaaaaggcccccgcgggaacaagggcacacaacaaaaaacccaaaaaaaaaaaaggggaagccaaaaaaggaaaaagcgggagggcaaaaaaaggaagggaaaaaacaaaaaaggccccggccaaaaagccaaaccaaaaagccaaaaaaccggaaggaaaaggccaaaaaaaaagcagacaacccccggggaaaggccccaagcaaattggcaacaaggaagagccatacagccacaagggaaaagagaaaaaccgccaggccctaaaaaagctgggccaaaaagagcaaaaagaaggggcccacgagggg

SEQ ID NO: 74438 - DNA, 1426 bp, Zea mays
  Clone ID: MRT4577_167886C.1
ccggccggggagatgccctcctctctttcgatgggagcctccgagccggccgggaccgcttccccatcgccacccgtcagtccgtcacccctcgcgcccatagtccccttccccataccatgtccgacctccacccgccggagcaccaagtcgccggccaccgcgcctccgccagcaagctgggcccgctcatcgacggctccggcctcttctacaagccgctccaggccggcgaccgtggggagcacgaggtcgccttctatgaggcgttctccgcccacgccgccgtcccggcccgcatccgagacaccttcttcccccggttccacggcacgcgactcctccccaccgaggcgcagcccggggagccgcatcctcacctcgtcctcgacgacctcctcgcggggtttcaggcgccctgcgtcgcagacatcaagatcggcgccatcacgtggccaccgagttcgccggagccctacatcgccaagtgcctcgccaaggaccgcgggaccacgagcgttctgctcggattccgcgtctccggcgtccgagtcgtcggccccgagggcgccgtgtggcggacggagcgcccggaggtgaaggccatggacaccgccggcgtccgccgcgtgctccggcgctacgtgtcatccgttgccgacgaggggatggactgtgcgctcgccgcggcggtgtacggaggaaaaggtggagtcttgtcacagctgcgcgagctcaaggcgtggttcgaggagcagactctgttccacttctactcggcgtcgattcttctgggctatgatgctgttgcagtccagcagccggagatgggggtggggtgacggtgaagctggtggactttgcccatgtggccgagggtgatggggtgattgaccacaacttcctgggcgggctctgctcgctgatcaagttcgtttctgacattgttccggagactcctcatacgcagcctttgggtccttcttaagagaggatcctggcatttcgatttgataacaaagccctacaagttttgtctggaaaaagaagcgcctccgagttgtgctgggtgtggagatctgagacggtcgtcggcccacttggttgccttgcctttgccttgcctgcaaacatacggcaacctgctccttttttcgcaaccccttacttccgaagaaactttttttttcccactttgggggttcgattacgttggatctggtttgtgccactcggtcagaggttgtaagcatggagggaggcgtgttgatccggcaactgtgtcagtctttgcgctgcctgccgtttctgcatggcttttgcctgctgcgatccgatgtgtactggagatcgtagtgatggacgtctctacctccaaacgaatccgtccgataaatctaacgcaggttgagagtccatttgggtt

SEQ ID NO: 74439 - DNA, 179 bp, Zea mays
  Clone ID: MRT4577_167887C.1
aagcacgaggaatgcgtacccgaggatgggcgcgtgcacgttcgagacaaccgaaccgtccgataactggccgttattaacaagtacaactgaatctattttttgttcgcgctgagagggccgcgctgcttccgcagctcgaatgagatctcatgaccttctttcggggagcttgagag

SEQ ID NO: 74440 - DNA, 373 bp, Zea mays
  Clone ID: MRT4577_167888C.1
gggcccaaaaaacccgggggttacgggggagggggattttgggcttagggggggccaaaaaatttgggggaattaaaggggccagtttcgggggggcctttcaggggggggccgaaaaattttacgggggttaggggggatttaaaaggggggccgaaaaatttaacggggtttaggggggacttaaaatgggggcccataccagtttttgggtttgcccttgaaaacaaacaaatttttcccccccagggggggggctgggaaaccaataagggggcccagtttccccccaaaataattgggaaaaggggtttaaaacttttaggggaaaaaaaaacccggaaaaaacgtatcccaggttcccggggggggg

SEQ ID NO: 74441 - DNA, 372 bp, Zea mays
  Clone ID: MRT4577_167889C.1
gggacggccgccagccagacgacgttgttgccgtcgccttgcatcccagtcccagcgagccgccgcccggagagcagagaaacagagatcgcatggcgcgctccctcgtcctcgtggccacgctcaccgcggtcctactggcggcggcgcctcctccgacgcgggcggcgtgggtggagtcggactacccgtcgagcgtgccgtgcggggtgaccatccccgtggagcagtgcgacccggcggtcacggcggcgaacgccgcgtgccgggacatgtgccactacgggggccggcgaggcgggcggtgcgtgtccccgggccggctcgcgctggtgcagggatgccattgcaggtgctagctcgccggcccgg

SEQ ID NO: 74442 - DNA, 618 bp, Zea mays
  Clone ID: MRT4577_16788C.1
ccacgcagtccggactcatcgagtgcaaagcagttgttatcccaagaaccatgcatatgctaccagaataagaaagatgagagcggttggtggccaaggctcctgaaaaaggacatgtgttcttgaaggttgactggacaaatggtaggatgaggatggcgaagatgttgaatgttagtatttcacttctggttgattatgttttttcttatgcgcttgacaaatctagatatgcaaccagacatgctttattcttgttcctattttgttttccttatgtattaattccttaacttgtaatgcacatgatattttccttatgtattaattccttaacttgtaatgcacatgatgttttccttatgtattaattcctttacttttaaagcacatgatgaaggctggttgttaggtaagttctcttaaactttagtaagcttgcgtacttttgctatggatcttttgaatcaattacaaggtaattcatttaaaaagcgtagtaacacgtgtacctaaatatcatatataaaagtctgtatggtactgatggttgcaatgtagtggtgaaacaactagattaaaataacaaaatttatgtatggataggatcacatatgt

SEQ ID NO: 74443 - DNA, 603 bp, Zea mays
  Clone ID: MRT4577_167890C.1
aatcttattctacatatcttacgttcgctcgcaaccctttgctctcctaagattccgtcacataaccgactaactccgtctcgactccgacagcagacttttcttcgtcttccagcgcgactagcgtttcgtgatagtaggtcttccccgttcacgtcgtctcggctgcgaccttaacgtttcatttaacgcccgcctcactggcgttggtggtccggtcgacctctcctttggttcttgaggacgactccacagtagcagtccgagtggtcgcgacactcacacgtttccaagggttcctccttaaggagaaacagctctcaccagataacgtgtgatcgtcgacagtgtcacagtgaccctccaaagagttcgcacgacgagaacttcgcaactaacaagcgaaactagtcctcttgtcccaagtaggggtcagcgtcgacgtcctccgatgcgaaacagttgatgttcctcttcatgttgttgttactcctcttacttttcctcttacgtctaccgttaaaaaagaacaagtaggcgttggcaccatcctctgtttcttctttcctctcggcggcgccactcttatatttctcttatagc

SEQ ID NO: 74444 - DNA, 503 bp, Zea mays
  Clone ID: MRT4577_167891C.1
ggccgcttttttttttttttttttctttcgttttttttgttttttttttattcccttttttttttttaaaacctgcttttttgtggcttcctttttggatttcttccgagatgaacgccaaccaaatggtcgcttattgctgggaaacccgtcgccggaagggggggcccattaaagggacccgcctgtatggaagcaaaaagagggcccctccaacaggcggggtccttccactacacgcgctggttcgttaaaaaaaactggcggcacgggtccaactccgcctcctggtggaaggcagccaccatggggattggccccggttgtggcacaaagcccgctgggcctggccggctcgctcagtcagatctgcggcagtcggttgccgcaagggtcattgccggtcggtaggggcataacccacagccagaggtcttggtgaaagcagttgtccatgcttgagctactcggcacggtccaccacggctggagcactgcccgct

SEQ ID NO: 74445 - DNA, 483 bp, Zea mays
  Clone ID: MRT4577_167892C.1
ccggccgcagccgccaactcctcaactcttaacgacggtgccagtgctcttgtcctaggaagcaaggccattgcccagcagtacggttcaggctcccgagtcttggccaagatctgcggttacgctgatgctgctaccgcacccattgacttccctgtcgctcccgccaaggctgtccccatcgccctcgagcgtgctggcattaccaaggaccaggttgctatttgggagttcaacgaggcttttgccagcgttatcttggccaactccaagattctgggtcttgagggtgccaaggtcaaccctctgggaggtgccatctcactaggtcatgctctgggtagctctggctcgcgaatccttactacccttcttcaccagcttaagcctggtgagtatggtgttgctgctatttgcaacggtggtggcgctgcgactgcccttgttgtgcagcgtgttgagcccgtataaatgcgagggata

SEQ ID NO: 74446 - DNA, 352 bp, Zea mays
  unsure (1)..(352): unsure at all n locations
  Clone ID: MRT4577_167893C.1
cgtttcgccctaggtctgacgctgtggcgcggcgccgtcagcaacagctccacgcgtagcgtgatccgctcactccgccgtcaccgacccgggcccgcgcgtcggttgcttcgctcggtggagacgacgatctccgcctggtggtatcagacgtcgttactttcaagacggcgaggcaacgtactaaacgggcagtaagggaagcaggaactcgtcggggtaagggcgaacgcgggtactgatgcagctccaagcatcagctgcgtgtccttcgagccggcaagtagcacgggacctcagtatctcgattatgtggctgactggctgcaggggagacgggctagggnaacac

SEQ ID NO: 74447 - DNA, 739 bp, Zea mays
  Clone ID: MRT4577_167894C.1
cctcgaggccggccgggccgggatgattctgccttttcttctccttccctcacctgctctctctctctctccctttctttcccgcggcgacggtgacgacgaccgcgcgagcgccgccgactccctactgcatcaggtgcctcggccttcgtcgtgctctccgccggcaacgagtatagggtcacctgcacacctacaggttctgtgacaacgtgtggaccttcatcttgacagacgcaagcttcaagaatgaggaggccacggagcaggtgggcaaggtgaagattgtggcatgtgattccaaattgctcggacaataggcctgtgtaccctcgaggtcaaggaaggaagcttttaagtgcggcgaggcggggtctgtctgcgcgtcagctgtacacgcctaggctaccgcgaggcggggtctgtctgcgtcagctgtacacgcctaggctaccgcccgaacggcatttcatttgccttcttcgtactgtatgtgtatcttcttttttccccttgtatacaatctgctgcagctataccggccaagagtatggcatggtatggcggcaggcagccgcaaacttgtttttacctacttggtgtagcgcctgtgtaacagttttcgatcgctcttgcttgttgtgttgtcgatgctaataccgcagtgtaattgacgaaatgactaaaatgaagagtagtgtagtaaatgtccaaaaaaaaaaaaaaaaagggcccctaa

SEQ ID NO: 74448 - DNA, 152 bp, Zea mays
  Clone ID: MRT4577_167895C.1
atcggcttcatcatgagcgctaagagttaaggagtcaatgctgtttctgtgtgtgcctgcaaaatcgtctacaggccatgccgcagctcactgacagcacgtgactccccgacatagtagacccagtgatcacggacacgatggacccaaag

SEQ ID NO: 74449 - DNA, 409 bp, Zea mays
  Clone ID: MRT4577_167896C.1
agaagaccctttacatgcagctgcacgcggactgcacccctacagtaagctctgaattcggctcgaggcgtcttcctcgcgttcgcgccggaggggcgctgccgccttgtcccaagtgcttcgccaccgcgagttcgcggctgccattcgtcgtcgccaccgctctatcggtagttgtagctaccgtcccctcctctcgcccgctcgtcgatgacttcttccccttcctctcctcgttgtcatcctcgcccgcgccagtgggaggtatcgccggagctggtgcctacgggcgtcgacgcccaaccagcagggcgccagagctgcaatttcggctgacaacaagccagaggagaagcgcatgacgaccgcgccgtcagcgccgaacgaggcggagcggcaacgccatgag

SEQ ID NO: 74450 - DNA, 818 bp, Zea mays
  Clone ID: MRT4577_167897C.1
cattgggtacctcgaggccggccgggtctgccttctcttctccttccctcacctgctctctctctctcgccctttctttcccgcggcgacggtaacgacgaccgcgcgagcgccgcctactccctattgcagcaggtgcctcggccttcgtcgtgctctccgccggcaacgagtatagacgggcgcgcatggccaccttcgagctgtaccggaggtccaccatcggcatgtgcctcaccgagacgctcgacgagatggtctccaacggcaccctcagcccggagctcgctatccaggtcctcgtccagttcgacaagggtcacctgcacacctacaggttctgtgacaacgtgtggaccttcatcttgacagacgccagcttcaagaatgaggaggccacggagcaggtgggcaaggtgaagattgtggcatgtgattccaaattgctcggacaataggcctgtgtaccctcgaggtcaaggaaggaagcttttaagtgcggcgaggcggggtctgtctgcgcgtcagctgtacacgcctaggctaccgcgaggcggggtctgtctgcgtcagctgtacacgcctaggctaccgcccgaacggcatttcatttgccttcttcgtactgtatgtgtatcttcttttttccccttgtatacaatctgctgcagctataccggccaagagtatggcatggtatggcggcaggcagccgcgaacttgtttttacccacttggtgtagcgcctgtgtaacagttttcgatccaaaaaaaaaaaaaaaaggagggcggccgcattagagtgcacccagctgacg

SEQ ID NO: 74451 - DNA, 996 bp, Zea mays
  Clone ID: MRT4577_167898C.1
cattgggtacctcgaggccggccgggccgggatccggcagcgagagtagcgggcgtggatgattctgccttttcttctccttccctcacctgctctctctctctctctctctctctccctttctttcccgcggcgacggtgacgacgaccgcgcgagcgccgccgactccctactgcatcaggtgcctcggccttcgtcgtgctctccgccggcaacgagtatagacgggcgcgcatggccaccttcgagctgtaccggaggtccaccatcggcatgtgcctcaccgagacgctcgacgagatggtctccaacggcaccctcagcccggagctcgctatccaggtcctcgtccagttcgacaagtccatgacggatgctctggagaaccaagtgaagagcaaggttactgtcaagggtcacctgcacacctacaggttctgtgacaacgtgtggaccttcatcttgacagacgcaagcttcaagaatgaggaggccacggagcaggtgggcaaggtgaagattgtggcatgtgattccaaattgctcggacaataggcctgtgtaccctcgaggtcaaggaaggaagcttttaagtgcggcgaggcggggtctgtctgcgcgtcagctgtacacgcctaggctaccgcgaggcggggtctgtctgcgtcagctgtacacgcctaggctaccgcccgaacggcatttcatttgccttcttcgtactgtatgtgtatcttcttttttccccttgtatacaatctgctgcagctataccggccagagtatggcatggtatggcggcaggcagccgcaaacttgtttttacctacttggtgtagcgcctgtgtaacagttttcgatcgctcttgcttgttgtgttgtcgatgctaataccgcagtgtaattgacgaaatgactaaaatgaagagtagtgtagtagatgtccaactatagcatttcaccagtccaaaaaaaaaaaaaaaaaaaggccccta

SEQ ID NO: 74452 - DNA, 703 bp, Zea mays
  Clone ID: MRT4577_167899C.1
ggccggccgggtaaaaaatccaaaaaaaaaaaaaaaaaaaaaaaaaaaataaaaaaaaaaaaaaaaaaaaaaaaaaaaaaaaaaaaaaaaaaaaaaaaaaaaaaaaaaaaaaaaaaaaaaaaaaaaaaaaaaaaaaaagggttttttggggcccaaccgggaaaaaaaaaggggcccttgggtggccaaaaaaactttttggaagggtttttttttgtgaagggggaaaaaaaggcccttgtttcccaaacggggaacccttccattgggttgggcccagggggggcctccttcccggggggggaggccccaaggaaggggggcccccggttttggctttgttccaaaaaaaaccgcccccgaaaaaaccccttaaacttggtgggggggggcaaccccaaaaaaccctttgccaaccccaggggggtttccaaactggaagggcgaaaaatgaaaaacccggcccaaccaaggggcccctttttcagggggggaaccccaaaaaagaaattccccgtaggggggtggccccaaagggggccaagggccccccaaatggccccagaaaagccccccgggaaggcccccttgttggccggggccccaggccattccaccgggaagggacccgtggatccccccaaggggccccccaactggctttaatccaaaagggggttggggggaaccccaaaaccccccc

SEQ ID NO: 74453 - DNA, 834 bp, Zea mays
  Clone ID: MRT4577_16789C.1
agtactcccaatccatccctccgtccgtccgccggcttaaaccctagacgactagacctagggctcctccgaccaccgccgccggttgccatggagttctggggccttgaggttaagcctaaccagtccgtcaaggtttcacctgatgacgagcacttcctccatctctcccagggtgcccttggtgaagtgaagaaggatgacaaggcaaccatgttcgtcaagattggcgaccagaagctagccatcgggaccctctctactgacaagttccctcagatccagtttgacctcgtcttcgagaaggagtttgagctctcacacaattccaagacgtccagcgtcttcttctctggctacaaggtcttccagcctgccgagggagatgagatggattttgattccgaggacgagtctgaggaggaggaggaagagaagatcatcccagcactcaccaaggaaaacggcaaacctgaagccaaggagcagaagaagcaggttaagattgacactgctgcacattcaaagtcaaaggctgctgccaaggatgtgggaaaatctaagaaggatgatgacagcgatgacgatgatgacagtgatgaggatgacagcgaagatgactctggtgatgatggagcattgattcccatggaggatgattctgatgatagtgaggatggtgatgattcctctgatgatagtgaggatagctctgatgaggaggaagaagaaacacccaagaagcaagagactgggaagaagagggtggctggaagcgtgttgaagacccctgttactgacaagaaggccaagattgcaacaccgtcaggccag

SEQ ID NO: 74454 - DNA, 565 bp, Zea mays
  unsure (1)..(565): unsure at all n locations
  Clone ID: MRT4577_1678C.1
cttgtgtggcagtccagcagaaactcgctatgtgctgaggctcaagactgtgaactgaggtcccaggtcacctgttcgcctgttgttgccaagacaagggggaagtctgctcaagccggttctgtagaggtgggcgcagttgtccctttgaggcgttccaggagaaattcactgagagctgccgagtctgaagaagtagaagtggctgtttttgttgacaggaagcgcaagtgcaagaaccaggagaatgataggctgttgttctcagcgctcaggttggagcttcgtccagagttacaagaagatcaagcttgngcggtggctgctgctgtgttgcctcctcttgttgaaccgaagagagggtaggggagaagcagctggcgttcagacttctantcagtgggaagtaccggctaggattacaagatctcgctcaatacaccggttgtaatgtcacctatgtggttgagaacaagaggaggaagaatggagatgcacaacatatgtagagctgcctacngtttcagatgtgcctagaaatgatgctcctgtcaccaggtctttg

SEQ ID NO: 74455 - DNA, 347 bp, Zea mays
  unsure (1)..(347): unsure at all n locations
  Clone ID: MRT4577_167900C.1
cggnntctcccgggtgcgtcccccgccggtccggctccttttgcgcgggcttgcgctgccctgggctccgtgtccttctccggctctcggcctcttgttgggctggggggtttgttggcgcctctgtgcgtcttctcttggtcctctgtggccgcgtgcgggctgttttgctgttgggtcttgtcctgttctggtgcttggtctctttgcgggctgcccgcgtgcggcctctgtgctcttcccgccttgcgtctggtgtgtggcgttttctgcccgggcttggttctcttggggtcctgctcgctccgggtgggttttgtcctttgccggtgcttttcgcgctttct

SEQ ID NO: 74456 - DNA, 273 bp, Zea mays
  unsure (1)..(273): unsure at all n locations
  Clone ID: MRT4577_167901C.1
cccgggtgcgnacccacgcccgtccgtctaanaactgagctgagggtacaagcaaagcttttaggctagctgttagatnnctcaccaaggnatctgtcttctattagctaccatcatgatccatattatgcaggagtcctcgcaacagnagtgtctactttgctgcagggnnatgaatagaaatgnnccttatgataaattgtgttgtgtgctgggaacaacttnnttctgacagnaagccagtnacccgttcaaagggtgtngccacaatac

SEQ ID NO: 74457 - DNA, 441 bp, Zea mays
  unsure (1)..(441): unsure at all n locations
  Clone ID: MRT4577_167902C.1
agcgcagagttcaactttgactttagttctgtacaaaaagcttgtgttcaatatagtggttaggacgacagatccaccatgttttgaatgtccatggacagtatcacatgaaggaagaaacgggcggtaaagacattgcttcgttaacaaactgacttagaaaaacttgaaacaggattctacatgcataagccatgtggtaactatatcagtgtagaactgtagataagtgtagccatacttgctgtttatgcagaggtgtcatgttggacaatgacgggagaaaggcaggcaacgcgcattcgatctctgtacctcaaatctgtcctgagacaagagatagcattcttcgatgtagaaatgacaaccgggcaaatagtttcaaggatgtctggtgataccgngctagttcaggatgccattggtgagaagggaatagct

SEQ ID NO: 74458 - DNA, 113 bp, Zea mays
  Clone ID: MRT4577_167903C.1
gggaaaaggattggagtttattcgagaaacgagtatatgcccggctttgcaagagtcaaaaatggagaaatatgacacaaacacatacaacgacagagtagtgcacagaggca

SEQ ID NO: 74459 - DNA, 283 bp, Zea mays
  Clone ID: MRT4577_167904C.1
gcagaccctgcagggaattcaccccaagaacatccaaagtgtgaacgtgaagtcccccggaccccactgcgcccaaaccgaagtcatagccacactcaagaatgggcggaaagcttgcctcaatcctgcatcccccatagttaagaaatcatcgaaaagatgctgaacagtgacaaatccaactgaccagaagggaggaggaagctcactggtggctgttcctgaaggaggccctgcccttataggaacagaagaggaaagagagacacagctgcagaggcca

SEQ ID NO: 74460 - DNA, 251 bp, Zea mays
  Clone ID: MRT4577_167905C.1
tcccagcatccgagagagctctcaccgccaggtccccatcgccgcggcgcttgccccacctctcccccgcccggtattagcctcgccgccgttgccgagatggggtccgtgtccttccccggcagggtgctcttcggcgccgctttcctcctctccgcctaccacaagtctaatgaattccgcgctgacggcggaccaacacccaacgccctccaccccaaattcaacgtcgatccccccaaatcgtatct

SEQ ID NO: 74461 - DNA, 159 bp, Zea mays
  Clone ID: MRT4577_167906C.1
ttcatacactggtgtattgacaaaggagagatttatgcgaagaggctgtcaccgggtgggcgcgccgttctgatgatgacatacctcgtgttcgatgaaaactgtgctattgcccgcttgtcatgaagtgctatcgacacacggctagttgtcatcggt

SEQ ID NO: 74462 - DNA, 1206 bp, Zea mays
  unsure (1)..(1206): unsure at all n locations
  Clone ID: MRT4577_167907C.1
ncccacattgggcccatcggtccgcggcgggctcttcgttaacgtgatcgcgacgcgcgtccgagaagcatccgccttccgtccgcagaccgcaaccatggtgacaccagcctccaccgcccctgcgtccaccgcttccgccgcagcggcgaccggctccggccgcgaagtagtccgcctcctccgctatcccgcccgctgcctccttcctttggctgcggcgcccaggacaggcacgcggctgaccaccgtgctccgcgcaagaacccagccggcggagcccgagctggtggagcagtcggtgaacactatccggttcctggccgtcgacgccgtggagaaggcgcattctggccatccaggcctccccatgggctgcgcgccgctgggacacgttctgttcgacgagttcctccggttcaacccgaagaaccccgcctggttcgaccgcgaccgcttcgtgctctccgccggccacgggtgcatgctccagtacgctctcctccacctcgctgggtacaatggcgtcaagatggacgatctgaaaactttccgacaatggagaagcagaactcctggtcacccagaaaattttgaaacacctggcgttgaagtcaccacaggtcctcttgggcagggttttgcaaatgctgttggactagcacttgctgagaaacatctagcttcacgtttcaacaagactgacatgaaagtcgtggaccattacacgtatgttatacttggggatggttgccaaatggaaggtgtttcgaatgaagcggcctctcttgctggtcactggggccttggaaaattgatagctttttatgatgacaaccacatatcaattgatggtaatacagatattgcattcactgaagatgtgcttgcacgatatgaggcactagggtggcatacaatctgggtgaagaatggcaacactgggtatgatgacatacgtactgcaataaacgaagccaagggagttaaagacaagccaactcttatcaaggtgactaccactattggttttggatctccgaacaaggccaacacatatagtgttcatggtaacgctttaggttcaaaagaggtagaggcaactagaagcaaccttggctggtttcatgagcctttccatgttccagatgangtgaaagagcactggagtcngcatatcgatganggtgcttcacttgaagctga

SEQ ID NO: 74463 - DNA, 269 bp, Zea mays
  Clone ID: MRT4577_167908C.1
ggcacgtgcgatggtgcccgagcgcgcgcggtggtgaaccccagggcgtgcggtggctcctcgattcggagttgcggcggcggttcccaaattcataggcgtgatggcggcggctccctaatctggagggcgagctgcggcggggccctgaggcgggcgagcagtggtggcgccccatgaggcgcgactgtctccagcgacagttgccatgctaggcacatgtgggtctaacggcgacgacggtcttgcgagacacgtgttgcgagggt

SEQ ID NO: 74464 - DNA, 248 bp, Zea mays
  Clone ID: MRT4577_167909C.1
cgccagattggtatatcgatcgattgatcggtggcggttgaaggggaggacggtgggcagatggggtcgggccggtgcttcttcgagtgcctgctcaggctgctcaacttcatcctaaccgtcgccggcctcgctatggttggttacgggatctacctgctcgtccagtggattaagatatcccaggaccgcatcggctgggcttcgaccgtggaagttctcgacttttgccggccgctgttgggggc

SEQ ID NO: 74465 - DNA, 332 bp, Zea mays
  unsure (1)..(332): unsure at all n locations
  Clone ID: MRT4577_16790C.1
gcgctggacaaggggccgatggctggggcaggggcaacttttatcgttttcggccngcnanagagcaaaggtccgggctcctcgtcgtcgccggtgacaacggccattttcctcttcttcttcgttgtcgtggtcggcgtcctcgtgtccgcccgctggatcaccaccacgactcatctgtcgaccaccaatctggatcagtggagctcaaagctggtaggtaagctccggccctttatttccaaacaaaaatttcttcaatcactcagataaacatactcttaaatacgctgttcttgcttgcaagctacaaaaccccaactcttatatag

SEQ ID NO: 74466 - DNA, 389 bp, Zea mays
  unsure (1)..(389): unsure at all n locations
  Clone ID: MRT4577_167910C.1
gcggaagtatggtgaccatctgtatggaaaacaggaatatgatgaggctatgtcccagtatatccacactattggtcatcttgaaccatcgtatgttatacagaagttccttgatgcanagcgcatctacaacttgacaaattatttagagaagttacatgatcgagggttagcatctaaagaccacactacccttctgttgaactgctataccaaattgaaagatgtggagaaacttaaccattttatcaagtacaactcatgcctcccagccttttttgccacanacatagcatgttcatgatatccagctgcgcggcatactcttatggcagtttccacatcanacttgatctcaccaaccccatcttcatccttgctgatcgcga

SEQ ID NO: 74467 - DNA, 766 bp, Zea mays
  unsure (1)..(766): unsure at all n locations
  Clone ID: MRT4577_167911C.1
ccggccgggcaggtgcaccggcgtcggtccctcccgccgccgggtcattgctggagaacaccccggcgactaacgtcccggtgaccatgcccgccaactccaacgcagcgacaggtgcaccggcgccggtccctcccgccgtcgggtcgttgccggagaacaccccggcgaccaacgtcccggtgaccatgcccgccaacgccaacgccaacgccaacgacaacgccaacgcagcgacaggttcaccggcgctggtccctcccgccgccgagtcgttgccggagaacaccccggcgactaacgttccggtgaccatgcccgccaacgccaacgcatcgacaggtgcaccggcgccggtccctcctgtcatcgggtcgttgccggagaacacctcggcgatcaacatcccagtgaccatgcccaccggtgcaccggtgccggtccctcccgccgccgggtcgttgccggagaacaccccagcgaccaacgtcccggtgaccatgcccgccaacgccaacgccaacgcagcgacaggttcaccggtgccggtccctcccgccatcgggtcattgccggagaacaccccggcgaccaacgtcccggtgaccatgcccaccaacgccaacgcagcgacaggtgcaccggcgccagtccctcctgccgncgggncgttgccggagaaacacccgtcgaccagcgtcccagtggacatgcccgccaacgccaaccagccgggccacgtcgttccgcccgcagtaattgtgtc

SEQ ID NO: 74468 - DNA, 554 bp, Zea mays
  Clone ID: MRT4577_167912C.1
gttgtgccgagatttatgaggcatgccagcagttgaagggaacaaggccagatatagaagtagctgcctccaaacctgatgtgcaaaattgaatacctgcttctgcatgtctttcgcacagtcagctctgcttcagcatgcctttcactctacaggactttttcattagtgctgcacatcattcaagaccataaatgagaacaagcttgggttgtggaaaatttcagaaagtaaaggcctataactctcgttgatcacttcagaaccactggaatcaagacatatagcaccacaagccatacctttgattattttaaaactactgtacctctttgattcttttagtcagcttagtggatagaagaccaaaaatgctttggaaatttgcatcctactgatacattgctgcatgagaaattaaggctggcccaggaaggctcaacatatgcttgtgaataaagcttctagtgaaagtagattttcaacaattcactaccacaatgttgtcttgatggatgagaatgacatggaagacagtgacctagaagaagaca

SEQ ID NO: 74469 - DNA, 584 bp, Zea mays
  Clone ID: MRT4577_167913C.1
ccctctacagtaatactgtgaaacctcttctatacatgaatagttgaccttcatcgattctccagccaggatgatgttttattggatgatgtgttggtcgtggttggcacaaaattcagtaggacattttcattggtgctacacatcattcatgaccataaatgagaacaagcttgggttgtggaaaatttcagaaagtaaaggcctataactctcgttgatcatttcagaaccactggaatcaagacatcatatagcaccacaagccatacctttgattattttaaaactactgcacctctttgattcttttagtcagctgaaacatatttgcatcctactgatacattgttgcatgagaaattgaggctggcccaggaaggctcaacatatgcttgtgaataaagcttttagtgaaagatagtagattttcatcagttcactaccacgatgctgtctcaatggatgagaacgccatggaagacagtgacctagaagaagacagcaacctcatctaagttgaaaatgtgttgcccgtggttaaagaaaatcctgcagatgaacagcgccaccctccctgttct

SEQ ID NO: 74470 - DNA, 1194 bp, Zea mays
  Clone ID: MRT4577_167914C.1
ggatgaggctgagaagttattccaggcagccctactagaagctaaggaaggatttggacttagagatccacatgtcgcgtcagcccttaacaatctggcagaattttataggctaaagaaagagcatgtgaaagctgaaccactatatttggaagcaattgagatcctggaggaatcatttggacctgatgatatacgggttggaagaactgtgcatagtcttggaatatgctatcatcttcaactcaagcttgctcaagcccagacatgttatgagcgtgctttgaagatagaaggacgtgttctgggggttggtcacccagagtattcaagtacaatgtacagtctagccaaggtgctcagtctacaaggaaaaagaaaaaatgcagaatgccttattgaagagtctattagaatacttgaggaagctgggcttggcgattcactaacatgtttacgaagaatggtctctctctctagagagttaataaaatcaagacgatttgctgaagctgaaatctggcaaaggaagatattacatgttctggagctttcagagggatgggattcattggtcactgcacgtgcagctgaactcctaagtttaaatcttgaaaccatggagaagttgaaggaatcagaagagctattggaacgatgccttgcagtcaagaaaaagattctacctgaagatcatcttcaggtagcttatacgttggtacacctggcaaggttaacattgcacagagttgtaaaggatcgggatgtaaacagcgatgtaactgcatattacctcgcaaaagcaaaacagttcagcaatgattcaatcaggattacagaaggacaattaaattcttcaagaaaagatcagaataaaattaacaacacatcaactgcagatacagataagagtgcagcaataattctttttcaagcacttcatgtttttggactcattgatattgcagcgaagcagttgctagggcaaggggagcaagactataattctgttcaagatgctctgcagaagtgtgtttcactttacaaagagcctcatacacgaaggttggtgaaaaatgctgccaagcaggactacatgatatgcctgaccagcctgatcgatatggttcagagcttgtttcccattccacacataccggggttgcaggagttgctttgcgaggcctaacaaat

SEQ ID NO: 74471 - DNA, 342 bp, Zea mays
  Clone ID: MRT4577_167915C.1
cccaataaaaaaacacggggggggggcacactagtacagaccgacacattacataaaaaaccggactagccccaaaccaacaacccacacaaaaaacaccggtcatgaccaaatactcaacggccagatcttaccaactgaacaaggggacacagaactatgtcaccccctgcctgccaaagaacacaaaaaaaaaaaacggtcccaaaaaagaaccggaaagggcctggtaaaaagaaaaaaaaaaaatttttatcacgaacacgcaaaaaaccgctgcgttaaaacagccccacatctcaaacggggtctaaaaaagattcgaaaagggcccctttacgg

SEQ ID NO: 74472 - DNA, 429 bp, Zea mays
  Clone ID: MRT4577_167916C.1
ctcacgcctgccatgacgcatgaggcacgagcacctataggtggtggtcgccgtactgcaaggcctttccagcgggcccaggattgcaccgcattgcaggccgtaatatctcctacaacaccctgcattgaaggctgcaatgacactgactattcttggaaaacaaagggctgacatgagcaagcgaccactgcctgtgatccggctatcactactgctggcatctatccagcactctgcaacgtgcctgctgctgaacccacacatgctgccagaagtgaaaatgtctaacctaagagactaatgtactagctgagcctgaccaacagtactggctacgagttctctactatatgaggaggatgttattgcatatcacacgggtgtagaagatccattgaaaccctataatggagctctcaacattga

SEQ ID NO: 74473 - DNA, 123 bp, Zea mays
  unsure (1)..(123): unsure at all n locations
  Clone ID: MRT4577_167917C.1
canagggggacgccagngagctgaattcggacgagggcgaaagcccccaaaccctcgcaccctaaaacagcggcgcacaagatgtccgacgaccccaccaactgggcggtggcggtgatcgcg

SEQ ID NO: 74474 - DNA, 421 bp, Zea mays
  Clone ID: MRT4577_167918C.1
gctgatcaacgctgtcgattactgccataggcgacgcgtgtaccagcgagagatccagggtgaaaatgacatggttgatgctatcggcaagttcaacggtctctattgtggactgagcgcactatctaaaacagtcgcagaggatactgtgctacgcacaacctgtggaactagcaattatgttgctgcctaggttataaacaataacggctctcatgtacctaacgctgatctggtggaatgtggactcattctctatgccctgctggcggggtacctcgcatttgaacattcgaacctgatgctgctctacaagaagatcttcaaagcggatctcaggtgcacgagctgactctccacaagcgcagagaatatcatcacgaacatacttgaacctaatgctaacaatagaataactatt

SEQ ID NO: 74475 - DNA, 336 bp, Zea mays
  Clone ID: MRT4577_167919C.1
catggaccacgacgcgtcacggcaagaagcggcggggggcgtgtggcgcggctcggtgcgcgcggtggcgtctgggccgactcccgacgaggcgtgggcgctgctgggcgacttctgctcgctgcaccggtgggtgttcacggtgcgggcgtgccggcgcgtggaggtggtgggcgcggcggcggcggatccggagccggaggggcgccccgcccccggctgcgtgcgctactgcgagggccccgtgaacatggccgcgccgggggagctcgtgggctggtccaaggagcggctcctggagatggaccacgcggggcggtggtacagctacgagct

SEQ ID NO: 74476 - DNA, 807 bp, Zea mays
  Clone ID: MRT4577_16791C.1
taggggccttttttttttttttttttctttttttttttttttttttttttttttctttttttttttttttttttttcaggaaaccaaattctcatgtatctccaaatgattggattcttttacaacaatgtcatagcattaagaactacaacatgaatttaatttagtcttcctcctgtatctccaagtgattccattcttttacctttttcttctttctaaaatcaagcagtgcatgaaaaaaaaaaataccagtgtagttgtttagaagaagggctcttcttgaacatgctcctctccactgcctagttcagcaaaagatttgaacagatttatcgataattctatgaacagctcaatctttttcctaaaagcaaaaattgcttgatcttctttcttcttggcatgagctttgcaaaagatgtggatcacccaatttcatccccattccccgattgggaaagaaatggcaatgccaccggtgatcttggaatcttgcccttgctcgtccagcagtcctacaagatgtggacggggccgatggagcagaacgcgtccgtcggccccgcaccggcggcgatccggaagtgccagaggcggccctttgcggcgacgaggttgtcctcgcagaggtactcccacgcataccaccgctccaccgtccggtccacatcgtgcaccgccacgtccactgcctcgccgccagccatggcgcgcgccagcgccgcggcggtgtaaatagtccccatccggccgggctcctcgggcgccgccccgctgggtccgtcgacgacgaccacgtcccac

SEQ ID NO: 74477 - DNA, 219 bp, Zea mays
  Clone ID: MRT4577_167920C.1
cggacgcttccttctacacttccgattctaaatgctcgaagatattcgattccctgaggtagggtttataacgaacatggacccttcaatattccatttgtattaaaatcatatgactagcttcacttcattatctaaacttatcttttaatgcattaaataatgtacatttcccttgtaattgtacttgtggactctgatgctttaataaaatacaaa

SEQ ID NO: 74478 - DNA, 320 bp, Zea mays
  Clone ID: MRT4577_167921C.1
gtcgtttgagatcatctttatttttctcctccttgtccttattaatttcacgagcgttcacaccgtcgttttcactcagatgtgattgacaatgtgccattcggaactctgtctggaaattcagcatacacaaattgtcatcgagtttgggaatgggggaattggaatggggtgagtctgtatgtcgataaaacagtgattggtgaggcggagattcgactggtgcatttggattggaatcggaagtggttaatggagtgatttaacactttttatggttaacccttgcattcctctttttattatgggtattttgggtt

SEQ ID NO: 74479 - DNA, 184 bp, Zea mays
  unsure (1)..(184): unsure at all n locations
  Clone ID: MRT4577_167922C.1
cgccaaacgctgctgctctctctccttctcgtcctgaccctccagcanaagagaggaggggcgcccagaagagcctgtcgttttgatcggtggcgctgcccccgttcccgccaggagagagcaacctggagaaaatggcgccgatatcgcgagccgcggccctccttgctgatgggggtcatca

SEQ ID NO: 74480 - DNA, 284 bp, Zea mays
  Clone ID: MRT4577_167923C.1
attcggctcgaggctgcagcgatttttcacctgcagacgctaaggtggcgaccgactgcccccttaatgatatgctgctggttatatcttacctggcctctgatgcactggcccttcaagatcaagagagtctccgagctcaccacactgaacttggtccacctctacatgcccattacgtggtacgcactgaacagggtgtccggctaatgcatggctcacccggcaggcgtcaccaattgctagacgcatcactctggccgatctgatcgccgtagccggtg

SEQ ID NO: 74481 - DNA, 684 bp, Zea mays
  Clone ID: MRT4577_167924C.1
cgaatcccacgccgaaccaaccttcgccagctcgccttgggcctataaatacctgggccctgcaaccgccctcctcatcgtaccaattgattcaccgtgagccaactccaccaaggatcataccggtggacaccgtagcgtcgagcgagagagtcgtgagcgcgactgccaccgttgacttcgtgttataccgtccccttgctctcggggtgtggggggaggtgatcggctgagcccaccgcgcatcctcaacggttagccgagcgaagagggtgaccatggtgcggcggattgctcgctggaggcgttcaaccatcgtagatccgtagtgcgtcgaggtcgggaccccctgagtgcataatcatcgacgagtaagtgaccgaggaacctgaatcaccgcaaagttgaagattctaagcaggagctcacagaaggagaagagaaggcaccaccggaggaggactactacgatgtgttcgatgagatctaggtgtcgtctcctagtcaactatgccgtcgtgaagatagttatctaaatttgagttatattattatcagctattttgtacgacattctcgttatgtaataaagatgatgacattcgtctctatttactaagtcattgtatgtgtggatctttatttgacgcacacataagacatacctaggtttgcccttaaaaa

SEQ ID NO: 74482 - DNA, 376 bp, Zea mays
  unsure (1)..(376): unsure at all n locations
  Clone ID: MRT4577_167925C.1
gatttaggcggagcacgctgccgccttccccgacattggccccgtcatcaccaagtccttccaggtccggcggaagggtgtactgtatcgcctttctgattcaatgacagtgatgagttccttcaccaaaattgaaggtgggtgctttcttcacgtcaatatggcagaggctacagaagccacatactgctgccaagatgctccagcaattgatgataaaagattgagtgatgttagtcttggaattcatgtaaagaaccatattgaggagctgcctgtgatggcatcagatgttgcttgtgatttgctccctagagaccttgaanggtgtaatgatgacgccacgctgaataatgntcaagcacatgatgcattg

SEQ ID NO: 74483 - DNA, 1720 bp, Zea mays
  Clone ID: MRT4577_167926C.1
tctgttgtttttcgctcgtcttgccttcttctggagtttattttattgggcttttttttttttttttttgctctaagaaatgtgcagcacagtggacatatattacacaacattatatggtgcactacaatggttggaattggaaataagtaccgactactgaactgaaatggacaagatattaagtacatatgaagggtggaataacaaatagttcttcgtgtcctacgagtagcatagcgctaatttattattacaaccaccatgcctggtaatagtagattaaagagcactaaggtctctgcgatgtgcagtgagagaggtgggggattggggaggggggcctggacctaaccatggtagtgacactgagaagtaatgacatctacatgagtggggtgacccaagacaataaaaatttatctatgggtccattgtgttaatgagttacacagcagtgcttggttactccaaagccttctttggagtcccaatactgtgtttggagggacagggggtagtgccaagtgctaaaaacaaacattggcactactctgaacctgtttctgattaggggcacaggctctccttagagccttgaccacctagatgcaagctatcaactgaaagatcaaataaaatgttagttggtgcatctaagcatttgcaaagaaaagatgagttggttacacaagtagtcgctggtcatatatcatatgcatttggtctaggtaacaccgtacagcaggactatagaagggtaggtttgcctaaatggtttatgcttcaacaagaaatgtcaggcctaagctaggtacagttgggattctaccgatgacatgtgggagtggcatgctagtcagttatttagctgtcattgttgtccaatttgactagtatcagcatgaaccctccctgggtcatgcttgactgtacctagcttaggcatggcatctcttgttgaagcatgaaccatttagcaaaacctacccttctatagtcccgatgttacctagaccaaatgcatttgatatatgaccagcgactacttgtgtaaccaactcatcttttctttgcaaatgcttagatgcatcaactaacattttatttgatctttcagtcgatagcttgcatctaggtggtcaaggctctaaggagagcctgtgcccctaatcagacacaggttcagagtagtgctaatgtttgtttttagcacttggcactacctcctgtcactccaaacacagtattgggactccaaagaaggctttggagtaaccaagcactgctgtgtaactcattaacacaatggacccacagataaatttttattgtcttgggccaccccactcatgtagatgtcattacttctcagtgtcactaccatggttaggtccaggcccccctccccaaccgcgtcccccacctctctcactgcacatcgcagagaccttagtgctctttaatctactattaccaggcatggtggttgtaataataaagtagcgctgtgctactcgtaggacatgaagaactatttgttattcaacccttcatatgtacttaatatcttgtctatttcagttcagtagtcggtacttatttccatccattgtaatgcaccatataatgttgtgtaatatatgtccactgtgctgcacatttcttagggcatgtttggttcgtcttttttgtgacgaggttttctgagaatttgttt

SEQ ID NO: 74484 - DNA, 686 bp, Zea mays
  Clone ID: MRT4577_167927C.1
taaaagaacagtactgttgcgcctgggcctcactacctcaattcggcccacaaacagaaacctccaccgcgtggcccaacccgtcctcccacgcgcgctccgcgctgcctgtcacttgcgcgtggggcctgtgtgccagccactgaactcctatgcgcacgcgttgcctctgctcgcactggctcgctgccaggtggggtcctcgcgccagtgaccgggatgcggtcctgtgtttcttccctcccgcacgacgcgcgcgtgttcaaccgaacgccgctctcctctccacaaactccgattacgtaacaaaccagctccaaagcttcatgcctcccacgcgggggtatataagggacccttcctatcgcctgctccactgcttgcttcgaatttcgccgtggggaatcaggaattcggtgagcagagcgacctggcggacccgtcgctgtgagtcttcaacgccgtgcgcctggtttgagcctagatcctcaccgcgccacgctgtggataccggcggctcggcaaacgacgtcgggtgtcctcggcgcctgggatttcgtagcaacgtcagacagcgcgacctccaccgtactcccactctttcgtggtcgggcatcacctcacctcggctggtcacaagtgagttcccatcgtgtttgtcttcctttcccccacatcatgcccct

SEQ ID NO: 74485 - DNA, 294 bp, Zea mays
  unsure (1)..(294): unsure at all n locations
  Clone ID: MRT4577_167928C.1
tcagcagcgcgagaaactgtcttaaccagggagctcttctggtggcgatactatgaagcagttggtgagaaaggggctcactcctaggtggtggggtgaccttgatgttaaccagcacgtgaataacatttgttcatttgttggattgtttgatagtgctccgatcgctatcttggataancacgatctcgcaagcatgacgctagattacaggaaggagtgcggtcgctacagcatgcttcaatcgttcaccatcgtcgtgggtgaatgcttagacagcgacacagactccac

SEQ ID NO: 74486 - DNA, 709 bp, Zea mays
  Clone ID: MRT4577_167929C.1
gttctcatcaccgaacaactcccgggacgccgccgcctccgtctccgcaaagaaccctagccggcttcaccgatatatctccaaggtcccagaccatgcggtccacaaagaaaacgaagaatccacgaacacatcagtaaccacctgcagctcgtatcatcgtagcaccgactgggacactcgctgttcacaagaatcagagcgctcatcgactctcacgtaagtcgaagaacatagctagagatcatcgctgagaactgcccgccccattctagggcggatagaatgaatacgatgttatcgatagtgcacggacactgtccaccacgtgcatgaagaccatgccaagcttgcaactgtctgggccactcacttgcgaacactgcgtgaactcgagattactctcgatcctgcttgattctgatatcatcaagactacaccgcagtgacaagcaacaccgcccctgcagatgctgacacttactgtccccgtgctgccgctccgctaaacaaaattcacctgcgagaatcctgagttattcctcacatcgacgtgaaaaggaactttgctcgggtggaatgacactgaaatatagctccatgatataccgttgttaagaccagcagctgtatggtgcctatatctgacctgcaaacgaaggctccaccactgtaggtgtctcccttaagttggctatgctaagcccct

SEQ ID NO: 74487 - DNA, 247 bp, Zea mays
  Clone ID: MRT4577_16792C.1
ccttaacgtggataccccacctaggtgactccaggcttcaactccaagaaggtcaccactgaggcgattgctgactaccccaacttgcggtcaatcaaaatggccattgctgcacatctccataactcgagacgacccctactgcacgcatctacaaggcccaatccgccctataccgagcttgatgtcaattaagtgatcgctgtttcacaccgaaaatacttatcaaactcctgctttcacacaa

SEQ ID NO: 74488 - DNA, 237 bp, Zea mays
  Clone ID: MRT4577_167930C.1
tcgaaactgtcggccgtgcgtcctctctcctcgtgcgctccgcccgtctccacagttggtgcaggtcgctgaaacacttgcaacagacagagcttgcttttgaagtgctatagcacctaaaggatcagtggaaggatatctaatgtagagttaatttgaaaagattgcatctacttcttcaacagactcaatgatgactacaacgacgacttcacagtgtgcctatttcaccaatga

SEQ ID NO: 74489 - DNA, 508 bp, Zea mays
  Clone ID: MRT4577_167931C.1
tattcggcacgaggctctctctctctctctctctctctctctctctctctctctctctctctctctctctctctctctctctctctctctctctctttttcttttttttttctttatgaagctagcgatcgatctagatatttataaagattttaagcagggagagggtgttggggggggggggggggagaaagagagagagacaaagaccgtctgtgagagagagagagtgacagtgagagacagtgacggagaaaaaaccagaaagataaaaagatagaaaaaaagaaaaagcgcactcacaacaaaacacacgcacacacagaacacacacacacacacacacacacgacgggcaccacgggagaatacacacatatacacacgtgcacgcacacacaaacacaaaaaaacaaagacacagatatagagagaaacagagacacacagacacacctagaccgaggaagcgcgagcacgcacagacacggtatgagaaactgcctac

SEQ ID NO: 74490 - DNA, 165 bp, Zea mays
  Clone ID: MRT4577_167932C.1
cccacgcgtccggtcacgtactcggagatccgagagtgctaccaactttcaacgagcttgaacaaagacgtctgtcattggttcaactcacacgatcacagcggaacaatttgtggatgatctcaagggtctggaactttgtggagtcggatctcgtgggctttc

SEQ ID NO: 74491 - DNA, 386 bp, Zea mays
  Clone ID: MRT4577_167933C.1
acccactcgtccgcccacgcgttcgcggtttcgtgggcttctcttggcccagaatgggggaatggctcgggggcctgttgacaatcctgctgagagtgaaatgtgcaagtttcaagtacttctaacttctaattacctgcattacaaatatcattttttcccaaatataacatagcatcaggtttttctctgttcatacttttttagtaacttaattcctttgagttatgtagtattaaaattatgattggctatcttttgatgcaatgaagttaatatctgtaactttttactatggaatctttctgactttaagttactaatatttgttttgagttctccatattgctctgatattattgatgtttgcaaccaaacttaagcta

SEQ ID NO: 74492 - DNA, 294 bp, Zea mays
  Clone ID: MRT4577_167934C.1
atcctaggatccttgtcatcctcctcaaactctctgctgcacaaaggcaaaagtatcaaaattcaattattgaaccatcttaaaatttacataaagtagagctgcaagttgtcaagcactcaagctatttcaaggtcagaggaacaagataacaagtcattgcaggcttcaagcaaaagagtacaacaattattacataagtctaaagtttaaagttctcaaatgaaagtccactgataattgatgtactatctaaagcaaatcttcatccacttgaaatgcattttcagtccc

SEQ ID NO: 74493 - DNA, 412 bp, Zea mays
  Clone ID: MRT4577_167935C.1
gccgcagtgtgatgatatctgcagattcgccttagcagtggtaacaacgcagagtacttttttttttttttttttttttttttttgggttttttttttttttttttttttttttttttttttttttttttttttttttttttttttttcggagaaacgatgaaaccctcaacaggattttccccaaaggggaccggccccgtcaaggggggggacccggtaccacagccccgggggaaccagccctttacagggggcggccggcaaaaaggaatcggcaaagcctggaaaggaaaaaaaaaggggaaaaagggggggggaagggccaactggctttccccggggcccccaaaccgggattttcctggggggggggtccccccgggggccccgggggggtccccccgggtaag

SEQ ID NO: 74494 - DNA, 455 bp, Zea mays
  Clone ID: MRT4577_167936C.1
ttttggttttttttttttttttttttttttttttttttttttttttttttttttttttttttttttttttttttttttttttttatggcagcaatttttgccgctgtaggaaggcagcgaccaatggggtacccactgccaatgggttaagaaaccgttgtccccgttgtagggacccaacaaagttcgacaaagttagttgggtgaatggaaccagctgttgcaagaaggcaacagggtttgccacagctagctgagttaaagccgggacaaactgttgcaaaaattcctgttgcagggatgtaggggcattggccacagcgagcgggctaaatgaaagcaattgttgccgttgaaggtaggcggcagggttcaccaaggctaattgactaagccctggcaaaaactgttccaattggtgttgttcccggtttgcaaccacggttgcaaaaaca

SEQ ID NO: 74495 - DNA, 277 bp, Zea mays
  Clone ID: MRT4577_167937C.1
caatagcctgggcgacgatcactctagtcggcggccgcccattcatcggttggttgatgttaagaagagttaccgctttatcgcagaagaaagaactccaggacactgcaggacgctaacgaatttactgatgcaatggacacctggagaccggcgactgctgcacagaggcgcgaccccaccgtcgcacctatacgtgacggctcgtgccggaccaacgctggaggtggcagcggtcatcaccatctaccaaggggtattctctgtgcgggcgaag

SEQ ID NO: 74496 - DNA, 191 bp, Zea mays
  Clone ID: MRT4577_167938C.1
gcggccgcccttttgttttctatgttggcacattttttttcctttgctttcaacacagaaaaccaagagtgttccccgccaatgacccgctccacttgaaccctaggaccttcaatactcccaatactaaattattttgcgggaggctgaggtaacacctgtcgatattgtggttttccccactagcaggt

SEQ ID NO: 74497 - DNA, 781 bp, Zea mays
  Clone ID: MRT4577_167939C.1
gaaataatagatcaattatgccatttagggataaagctttggagtctgctgtacggcattcgcctccagcgacgaccgcgcttacacgtagtggtgccactgctagaatttgtcaggaacacaagcacacaagaatccgaaaatgaaaggcagcagccaacagggaacacgccgggcctggaactgggtcagtgccgtctacaggtggtggacgcagtcgtatgtgttgatgtcgtctgccgtgcacctgaggtccaagcgccgccgcccgcacgagtgctgctcgccgcgcgcctgagcgccatccgcagttcgttcgggccgcctgagcacaaccacgaggccgcacgtccgactcccgagcgctgccaaccacacacctaaacgcgccgctcacgcccatcagcttccttgagcgcaccacgctcgtctaccatgaccgccccgccatcgtcgccgccggacacgccgccgcgccgccgccccgcacctggcggcagacccgggaccgctgcctccgcctcgccgctgcgctcgcggggctcggcgtcgcgcgccgtgacatggtaagtctctgtccaaccgttgccttgcctcggtagattcgggcgttatttacctgccgccgtccaagcattcacttttactgctcttgctgttctccatcctggctgtctctctcgatttgctgctgcttctagtaccgcatcgaatcgaacttgccgggcggtcctcaaccgaagccgttgctgcccccgtgtaggttgcgcggacgcgtggg

SEQ ID NO: 74498 - DNA, 126 bp, Zea mays
  Clone ID: MRT4577_16793C.1
ctctttttatactccaaagcagcatgaccatttggcaaaggggcgctagaggccagcatcaggccataataggccagagagcatactaggcatggctacgtccgtggcctgcgccttcttcttctt

SEQ ID NO: 74499 - DNA, 200 bp, Zea mays
  Clone ID: MRT4577_167940C.1
agtggcgtcggaggcggacggaagctcgggaattgcggctgcgagtgcggaggacggagggcgatctcatttgggcaagccgagcacgaacatcgtcatccagagggggcgggggacgagtgccgacgtgctcggggcgtaggcttcggcagcgaggatggtcagggagggcatgatgctaacgtggctgcgtgccgtgg

SEQ ID NO: 74500 - DNA, 472 bp, Zea mays
  Clone ID: MRT4577_167941C.1
gggggggcaaaggaatttactttatcccccggtgggttacaaggtaaaaccatcaaaagtttcagtagctggagcagccaaggaccatgcccattggaggccatggggtcgcagctgggggaacacaacaacattcacatgaactttagctactgggacagggcaacgggaaatatagaggtctcctgctagtttgaacgtaaagcactttacaacgaccttgaaacgctctggtttgggctgctttacttttggtttccttctggatacattggctttttctggtggggcagctcagcagagcgggaggggctcgccgttccactccttggggcactcgagcagggggatcgatgtgcttgccctggttggtggccaccagcaccttgtttagttccttggcgggggacctcgttttttcgccggtcaggttcttggggccgaccttcttgggcccgaacagggtccaggg

SEQ ID NO: 74501 - DNA, 738 bp, Zea mays
  Clone ID: MRT4577_167942C.1
tggagttgctcttagggttggtcttgtgcatgtgggcaggtcttgctgttcccactaaatttctctcggtgcttccacattctgatgagaataggatcgtctcgctcccggctaacctggatttcatgatcttcaaccaccgtggaagagtgctgccgtcagactcagacctgaaactccgtacatagacatgtcgtcccagaatccagatcttttttctttattttccctgctgtaacctgtagggatgaaaacggtcggaaacggtatttattcggtaatcagttttttagtcgtttttctttgattgcgaataaataggatatataatctacaatacaaatttgtattcttgtttttaacatccagcttgtaaagattcataaaaggtaaaccttaaattcacaaaaaaaaaaaaagggcggctccaaagtttagagacccagattgaaattagcttgtgtctttcttgcaagtaatgcagtgtacttgtgactttcttgcaagtaatgcagttcgtgcctcatgcttggtgccaccatatgcaatacaccaatggctgtcacatttcatcattttcatctccattccgcatgaacgattgctagggaaaattaatcactgatgttttaaatgcagggtcaaacacaaagcccgtcttgtttttttcccacatatttcggcagaaactcgtccgttggaagttgtagaagcgtttaagaccgccccacgcgtccg

SEQ ID NO: 74502 - DNA, 1796 bp, Zea mays
  Clone ID: MRT4577_167943C.1
gggcagacaccagacgcagtcggctgccgcagactggtagtagccggcgcgccgtcaccgtatcctcagatcagcggcgagcagaaaccacaccactctactgacgcccgacgagccatgggtaaggagaagactcacatcaacattgtggtcattggccatgtcgactctggcaagtcgaccaccactggccacctgatctacaagcttggaggtattgacaagcgagtgattgagaggttcgagaaagaggctgccgagatgaacaagcggtcattcaagtatgcgtgggtgcttgacaagctcaaggctgagcgtgagagaggtattacaattgatattgccctgtggaagttcgagaccaccaagtactactgcactgttattgatgccccgggacaccgtgacttcatcaagaatatgatcactggcacttcccaagctgactgtgctgttcttatcattgactcaaccactggtggttttgaggctggtatctccaaggatggccagacccgtgagcatgctctccttgctttcacacttggtgtgaagcagatgatttgctgctgcaacaagatggatgctactacacccaagtattcaaaggcccgttatgatgagattgtgaaggaagtctcttcctacctgaagaaggttggatacaaccctgataagatccacttcgttccaatctctggttttgaaggtgacaacatgattgagaggtccaccaaccttgactggtacaagggcccaaccctacttgaggctctggacttgatcaatgagccaaagaggccttcagacaagcccctgcgtctcccccttcaggatgtgtacaagattggtggtattggaactgtccctgttggacgtgttgagactggtgtcattaagcctggtatggttgttacttttgggcctactggtcttactactgaggttaagtccgttgagatgcaccatgaggctctccaggaggcccttcccggtgacaatgttggcttcaacgtgaagaatgttgctgtgaaggatctgaagcgtgggtatgtggcctccaactccaaggatgaccctgccaaggaggctgctagcttcacctcccaggtcatcatcatgaaccaccctggccagattggcaatggctatgccccagttctggactgccacacctcacacattgctgtcaagtttgctgagctcgttaccaagattgataggcgatccggcaaggagctggagaaggagcccaaatttctcaagaacggtgatgctggtatggtgaagatggttcccactaagcccatggtggtggagaccttttctcagtatcctcctcttggtcgatttgctgtccgtgacatgaggcaaacggtggctgtcggagtcatcaagagtgtggagaagaaggacccaactggagccaaggtgacgaaggctgctgccaagaagaaatgatctatctggctggtgctgtgcttgcttgttggttacctcgtggaagcttaaaatatctcgtcttgttgacatccttgcagttgtcgcgtgaacaagtaatctatgatggcaatgtttgcctggtcatgaagtattattactttcgttgaaaccgtgatgctattaagacttaattttttttatggaacatcgaatgtaaggcatacatggttatgagttttgtactacccttgttgcagtgtgttcctgtttaccttttaaaaaaaaaaaaaaaaaaaaaaaaaaaaaaaaaaaaaaaaaaaaaaaaaaaaaaaaaaagggcggcagctagcgat

SEQ ID NO: 74503 - DNA, 514 bp, Zea mays
  unsure (1)..(514): unsure at all n locations
  Clone ID: MRT4577_167944C.1
ngactacttgtctagcatgattcttctcgggtgcaaatttgtcacctgtgggactgtaccgaggatgtcacaagaaacaccaaagggttttggttctctcgtgttgtaccatgtcacttgtaaggcacttcaaataaaaaagaaatagtaatagttaaaaaaaaaaaaaaaaaaaaaaaaaaaaaaaaaaaaaaaaaaaaaaaaaaaaaaaaaaaaaaaaaaaaaaaaaaaaaaaaaaaaaaaaaaaaaaaaaaaaaaaaaaaaaaaaaaaaaaaaaaaaaaaaaaaaaaaagggggggccggtttttagagggtccaaagtttacttccccggctttccaaagtaaaactttttttttggggcccccaaaataaaattcatggcccgcggtttaaaaacgtggggccgggaaaaccccggggttacccaaattaaacccctttgaaaaaaatccccttttccccagctggctaaaaacaaaagggccccgccccgatcgcccttttccaaaaa

SEQ ID NO: 74504 - DNA, 964 bp, Zea mays
  Clone ID: MRT4577_167945C.1
ggcagtgtacaagattggtggtattggaactgtccctgttggacgtgttgagactggtgtcattaagcctggtatggttgttacttttgggcctactggtcttactactgaggttaagtccgttgagatgcaccatgaggctctccaggaggcccttcccggtgacaatgttggcttcaacgtgaagaatgttgctgtgaaggatctgaagcgtgggtatgtggcctccaactccaaggatgaccctgccaaggaggctgctagctttacctcccaggtcatcatcatgaaccaccctggccagattggcaatggctatgccccagttctggactgccacactcttgatgactccgacagccaccgtttgcctcatgtcacggacagcaaatcgaccaagaggaggatactgagaaaaggtctccaccaccatgggcttagtgggaaccatcttcaccccaatatttattcggataaacctgaaagcgatagtggaacagagatggcagagttcagagttgtacttgactcgtccaccatgctaaaggctgagtgctctgaacttgaggcagcaggaaagcagctggcctctaaggcagataaattgaggatagaactcgatgtgtggcagcggatgtaccagggcctaagtgacaaattgcgatcctacgatgggcttcaaaggttgcgttgcagtcgccattgcagcagctccagtattgggttcatatgagctaagagaagcaattccagcgttggattcacaatcaagttagaaatggcattagtccctcaaagtctatcttttcgtgactgtagatctggcagtatattatttgttagacctagtaagggtttttggggctagtccccttgtaattaactgcataccctgtgtaaggcagacccatctatacttagtctattaatacaactcctaaccctagttagggctagtttttcc

SEQ ID NO: 74505 - DNA, 2472 bp, Zea mays
  Clone ID: MRT4577_167946C.1
ctcgaggccggccgggagacaccagacgcagtcggctgccgcagactggtagtagccggcgcgccgtcaccgtatcctcagatcagaggcgagcagaaaccacaccactctactgacgcccgacgaggtacacttccgcgcgcgcgcttctcttccttcttttttcgctcgacgaggtactctgcttcacgcgcgggcgcgcttctcttcctcctcttttcgctctgccttgagcctgttcgtttgatgcccagatctactaggtttgtcgatcgtcgttatgtgtgatgagctgagccgattcatgcactgtatttttaattaagtgtttttttcctccgccgctacctttattgtctatgtatgaacttgcagcttacaactggttattgagccataaattgtaactgagtttccgagatctataatattacgtggctgaggcgcttcatctctgttttgtttgtatgacagtaggagtactaatccaagtttagcttccgcttcttcatctacctttagtatgtatttcgtatataaatacgattgcagtttgcaactgattctcggccatagatgattaccgttgcgttgttcatcgggtctagtttcggatctctgatgttgtgtgggtggggtacttcgacttgggttttcctgccctttgtttgattactggtttattgacatatatttatctattgactttttatctgctatgtttgatgtaagcagcagtgtaacattttccttcagccatgggtaaggagaagactcacatcaacattgtggtcattggccatgtcgactctggcaagtcgaccaccactggccacctgatctacaagcttggaggtattgacaagcgagtgattgagaggttcgagaaagaggctgccgagatgaacaagcggtcattcaagtatgcgtgggtgcttgacaagctcaaggctgagcgtgagagaggtattacaattgatattgccctgtggaagttcgagaccaccaagtactactgcactgttattgatgccccgggacaccgtgacttcatcaaaaatatgatcactggcacttcccaagctgactgtgctgttcttatcattgactcaaccactggtggttttgaggctggtatctccaaggatggccagacccgtgagcatgctctccttgctttcacacttggtgtgaagcagatgatttgctgctgcaacaagatggatgctactacacccaagtattcaaaggcccgttatgatgagattgtgaaggaagtctcttcctacctgaagaaggttggatacaaccctgataagatctacttcgttccaatctctggttttgaaggtgacaacatgattgagaggtccaccaaccttgactggtacaagggcccaaccctacttgaggctctggacttgatcaatgagccaaagaggccttcagacaagcccctgcgtctcccccttcaggatgtgtacaagattggtggtattggaactgtccctgttggacgtgttgagactggtgtcattaagcctggtatggttgttacttttgggcctactggtcttactactgaggttaagtccgttgagatgcaccatgaggctctccaggaggcccttcccggtgacaatgttggcttcaacgtgaagaatgttgctgtgaaggatctgaagcgtgggtatgtggcctccaactccaaggatgaccctgccaaggaggctgctagcttcacctcccaggtcatcatcatgaaccaccctggccagattggcaatggctatgccccagttctggactgccacacctcacacattgctgtcaagtttgctgagctcgttaccaagattgataggcgatccggcaaggagctggagaaggagcccaaatttctcaagaacggtgatgctggtatggtgaagatggttcccactaagcccatggtggtggagaccttttctcagtatcctcctcttggtcgatttgctgtccgtgacatgaggcaaacggtggctgtcggagtcatcaagagtgtggagaagaaggacccaactggagccaaggtgacgaaggctgctgccaagaagaaatgatctatctggctggtgacgaaggctgctgccaagaagaaatgatctatctggctggtgctgtgcttgcttgttggttacctcgtggaagcttaaaatatctcgtcttgttgacatccttgcagttgtcgcgtgaacaagtaatctatgatggcaatgtttgcctggtcatgaagtattattactttcgttgaaaccgtgatgctattaagacttaattttttttatggaacatcgaatgtaaggcatacatggttatgagttttgtactacccttgttgcagtgtgttcctgttttaaaaaaaaaaaaaaaaaaaaaaaaaaaaaaaaaaaaaaaaaaagaaaaaaaaaaaaaaaaaaggcccctagggcc

SEQ ID NO: 74506 - DNA, 359 bp, Zea mays
  Clone ID: MRT4577_167947C.1
gggggggccaacttggaaaagaattcgatatacacaattactttacaagggcattttaccccctacaattttacggggccaattttttaaccgccgactttaaggaaaacatagccggacaatttttaaaaaaagcccgccaaaaaacacaaaatttcctttctttctttttttttaaaaagggctcccttgctaaactgaaaaggttaggaatgccggctccatgggggtttggttgttttttccaaacccccccaggcaccctaagtttaagctccttcctggaaccaccagaaaaaaacagggccaaattcctttggatgatggggccataatggctgtcacggaccttggggggg

SEQ ID NO: 74507 - DNA, 323 bp, Zea mays
  Clone ID: MRT4577_167948C.1
acaaaaaaacgaacgccacattttttatcaacctcaatttttcacaaattttttggcaacaaccaatttaaaactaaatcgggtttttggcttaatcgaacaggtgtttgaacagaggcctaactaactgggctaacaaatgcgccacggaattttggtcgggggtaacctgacgtttttccatttttttggggggattaggtacttaactttcttgacatgcatgaaagggaattttaaattttttcttttttgaagggtggagatcatttaccacccatgggcaacctggtccaagggccccccggaaatgcccccattgg

SEQ ID NO: 74508 - DNA, 1992 bp, Zea mays
  Clone ID: MRT4577_167949C.1
gggtacctcgaggccggccgggcaggagagccgtagagttgggtgctggagtgagcagcttcaaaccaggggaatctccattctgttctcactctcagacaccagacgcagtcggctgccgcagactggtagtagccggcgcgccgtcaccgtatcctcagatcggcggcgagcagaaaccacaccactctactgacgcccgacgagcagtgtaacattttccttcagccatgggtaaggagaagactcacatcaacattgtggtcattggccatgtcgactctggcaagtcgaccaccactggccacctgatctacaagcttggaggtattgacaagcgagtgattgagaggttcgagaaagaggccgccgagatgaacaagcggtcattcaagtatgcgtgggtgcttgacaagctcaaggctgagcgtgagagaggtattacaattgatattgccctgtggaagttcgagaccaccaagtactactgcactgttattgatgccccgggacaccgtgacttcatcaagaatatgatcactggcacttcccaagctgactgtgctgttcttatcattgactcaaccactggtggttttgaggctggtatctccaaggatggccagacccgtgagcatgctctccttgctttcacacttggtgtgaagcagatgatttgctgctgcaacaagatggatgctactacacccaagtattcaaaggcccgttatgatgagattgtgaaggaagtctcttcctacctgaagaaggttggatacaaccctgataagatccacttcgttccaatctctggttttgaaggtgacaacatgattgagaggtccaccaaccttgactggtacaagggcccaaccctacttgaggctctggacttgatcaatgagccaaagaggccttcagacaagcccctgcgtctcccccttcaggatgtgtacaagattggtggtattggaactgtccctgttggacgtgttgagactggtgtcattaagcctggtatggttgttacttttgggcctactggtcttactactgaggttaagtccgttgagatgcaccatgaggctctccaggaggcccttcccggtgacaatgttggcttcaacgtgaagaatgttgctgtgaaggatctgaagcgtgggtatgtggcctccaactccaaggatgaccctgccaaggaggctgctagctttacctcccaggtcatcatcatgaaccaccctggccagattggcaatggctatgccccagttctggactgccacacctcacacattgctgtcaagtttgctgagctcgttaccaagattgataggcgatccggcaaggagctggagaaggagcccaaatttctcaagaacggtgatgctggtatggtgaagatggttcccactaagcccatggtggtggagaccttttctcagtatcctcctcttggtcgatttgctgtccgtgacatgaggcaaacggtggctgtcggagtcatcaagagtgtggagaagaaggacccaactggagccaaggtgacgaaggctgctgccaagaagaaatgatctatctgtctggtgctgtgcttgcttgttggttacctcgtggaagcttaaaatatctcgtcttgttgacatccttgcagttgtcgcgtgaacaagtaatctatgatggcaatgtttgcctggtcatgaagtattattactttcgttgaaaccgtgatgctattaagacttaattttttttatggaacatcgaatgtaaccaacaagcaagcacagcaccagacagatagatcatttcttcttggcagcagccttcgtcaccttggctccagttgggtccttcttctccacactcttgatgactccgacagccaccgtttgcctcatgtcacggacagcaaatcgaccaagaggaggatactgagaaaaggtctccaccaccatgggcttagtgggaaccatcttcaccataccagca

SEQ ID NO: 74509 - DNA, 316 bp, Zea mays
  Clone ID: MRT4577_16794C.1
gaatattaaattttaactttgttgaacagtcaaagatcttattttacagaaggaaagggcgcaaaaggggacttagggttgagaacacaccaccctatctagttttatttttgacctagaacatggttgaagccttttagacccaaacatgtcaacttagggaagcccgctgcagcttagttaattcacaaaagtcagctgcttaacaagtttaaaaaaaacgaaaacttaagggtcatgctcatctagagtgtgccagcaagacatgacatttgaccatggccttccacaaaatcttgttggaggtttttttttt

SEQ ID NO: 74510 - DNA, 255 bp, Zea mays
  Clone ID: MRT4577_167950C.1
cggcactgaaaatttatcatatttcatttagccacagccaacaataaggcaatacctatgttagcattttgtgaactctaaggcaccatataaatgtaactgttgattttctcacttggtgctgggtactaggtttataaaattgtatgatagttattatattgtgcaaataaagtaggacattttgaataacaatgattatcttttgaatacgcatacgcaagggattggttgtctgaagattcccactatagt

SEQ ID NO: 74511 - DNA, 390 bp, Zea mays
  Clone ID: MRT4577_167951C.1
cgttgctgtcgactagacacagaaattcctcatgctgccatttagggtttagggttggttctcctacgtttcaacctcgaggtatcaatgattctgaggcatacgacatattttttgtggtacgacatgtagcaactacaaacctgcttgggattgttgtcttttgggtctgggtgtggatgtatttgaagatatgaagaacaatgtctgaattggaccacactaattgttgttgacatgttctgccatatggagatggaaagtgatgccacttttctttgcaacattatcaacgtctatccattattaacatctatccatatttgactatctaatcttaacgacgtgatgtttatttttctcatattctcaaaggggacgacagcaacg

SEQ ID NO: 74512 - DNA, 2017 bp, Zea mays
  Clone ID: MRT4577_167952C.1
ctcgaggccggccgggccgggacccacggccagaccagaccaccagagtgcctccaccctcgaggcctccagtgtcggctggctactcgccccacgccacccaaatcccgtcgggacgacgaagaagccaagccggtgcgccgtataaatctaaccaatcgccacccgcccaccccgcaaatcccaccacccttttccccttccaccctcgggatctctccggcccgccatggaggtgttctactacctcgtgttcggcgcgctcgccgccatcgtggcggcgctggagctcgccaagtccggcaaggaccgcgtcgccacctccccggccttcaactcatttaagaacaactacatcctcgtttactccctcatgatgtctggggactggctgcaggggccctacgtgtactacctctacagccagtacggcttcgacaagggcgacattggccgcctcttcatcgccggcttcggttcctccatgctcttcggcaccatcgtcggatccctcgcggataagcaggggcggaagagggcgtgtgtcacgtactgcatcacctacatcctcagctgcatcaccaagcactctccccagtacaaagttcttatgattgggcgcgtccttggtggcattgccacttcgctgctcttctcagcgtttgagtcgtggctcgtggcagagcacaacaagaaaggatttgatccacaatggttgtcgataacattctccaaggctatatttcttggcaatggtctagtggccattgttgctggcctatttgcaaattttcttgctgataacatgggttttggtcctgtggctccatttgatgccgctgcttgcttcctagcaataggaatggcaattatcttatcatcatggggtgagaactacggagattcgtctgacagcaaggacttgataacccagttcaagggtgcagctaaagccattgcttcgattgcttcagacgaaaagattgcattgcttggagccatacaatcattgtttgagggctcgatgtacacatttgtcttcctatggactccagcattgagcccaaatgaagaagacattcctcatggttttatttttgctacattcatgctgtcatccatgttgggtagctccgttgcgtcacgtctattagcccgaaagctcaaggttgaaggttacatgcagattgtgttctcgatatcggctgtcacccttgtcctccctgttgtcaccaacatcctagtgcccacatcttctgtgaaaggaggcagcatatcgattggaggttctcttcagcttcttggtttctgcacctttgaggcctgtgttggtatattctggccatcaatcatgaagatgaggtctcagtacattcctgaggaagcaagaagcacaatcatgaatttcttccgcatcccgctcaacttatttgtttgtgtggtgctttacaatgtgaacgcattccctatcactgtcatgttcgggatgtgttctatcttcctcttcatggcagcaatcttgcagagacggctgatggttgtctcggatctacacaaatcatcaactaaagcacaagaaatgatcggggaagacgagccactaaatccttagacgtcgacagaaccatacgtgcaaatcagatacgaaggcggcatacacagagcaattcatttccacccgcgcaataagatggaagtcagaaccatgtagttgttttcgtttgtaattttgtttctatagtgtaagatttgacaaggctgttagtttgcacctcggatctgcttatatccacagggcaatcgatagttcagcaagtattgagctatacatatgtcccgagaagattagatgagttggcgtcttggcgatcgatgtgggcttttcccgttgttgttccttgcaatttattttcgaaaaaaaagaaacatgttcgctttaaggtttacgatacggtatatattaaacatgttcgcttttaaggtttacgatacggtatatattattcttggaagtgtt

SEQ ID NO: 74513 - DNA, 759 bp, Zea mays
  Clone ID: MRT4577_167953C.1
ctaatgataaagccattgatggctttgttttctcattcccttttgttcttgctgacaatgggcaattttacactgatattgtacagaaaggatttgatccacaatggttgtcgataacattctccaaggctatatttcttggcaatggtctagtggccattgttgctggcctatttgcaaattttcttgctgataacatgggttttggtcctgtggctccatttgatgcggctgcttgcttccttgcaataggaatggcaattataatgtcctcatggagtgagaactacggagatccatctgaaatcaaggacctgatggcccagttcaaggttgcagctaaggcaattgcgtcagatgaaaagattgcattactgggagccatacagtcattgtttgagggctccatgtacacatttgccttcctatggactccagcattgagtacaaatgaagaagacattcctcactgttttatttttgctacattcatggtgtcatccatgctgggtagctccatcgcgtcacgtctattagcccgaaagctcaaggttgaaggctatatgcagatcgtgttctcgatatcagctgtcacccttgtcctccctgtcaccaccaacgtaagagctcgtcagtcactagacgaccgtcaagatgtatatatgctgagggctcctttcttgtgaaatgtccaaataggctgcaacattttgaatggggtaggaggtgccaaaggaaatgagcaaacatagcatacag

SEQ ID NO: 74514 - DNA, 2808 bp, Zea mays
  Clone ID: MRT4577_167954C.1
ctactgaatttgttgagcccgtttttcattaagaagcaacagttcttacaacgaccaagtagagagagcccctttttttttttttttttcgtcagtaacagcaccactagaattgccatcagatgcagcaatgcaacacttacaaggatatataccgtatcgtttaaactttaaagcgaacatctttttttaaaaaaaagaaacaacaatgcgaatagccaatatcgattgacttgctcatctaatcttctcgggacaggtgcaaacttagcagcctggtcaaatctacactacagaaacgaaaaccactagactacatggttttgacgtccatcttattgcacaggtgacgaaacgaaatgcagtatggagtatggacgtcgtcgtcaatatctgatttcgcatgtatggttctgtcgacatctaaggatttagtggctcatcttccccgatcatttcttgtgctttagttgatgatttgtgtacttgatcagagacaaccatcagccgtctctgcaagattgctgccatgaagaggaagatagaacacatcccaaacatgacagtgatagggaatgcattcacgttgtaaagcaccacacaaacaaataagttgagtggtatgcggccgaatttttttgcttttgtttttttttttttaacacttccaagaataatatataccgtatcgtaaagcttaaagcgaacatgtttctttttttttcgaaaataaattgcaaggaacaacaacgggaaaagcccacatcgatcgccaagacgccaactcatctatctgatcttctcgggacataggtatagctcaatacttgctgaactatcgattgccctgtggatataagcagatccgaggtgcaaactaacagccttgtcaaatcttacactatagaaacaaaattacaaacgaaaacaactacatggttctgacttccatcttattgcgcgggtggaaatgaattgctctgtgtatgccgccttcgtatctgatttgcacgtatggttctgtcgacgtctaaggatttagtggctcatcttccccgatcatttcttgtgctttagttgatgatttgtgtagatccgagacaaccatcagccgtctctgcaagattgctgccatgaagaggaagatagaacacatcccgaacatgacagtgatagggaatgcgttcacattgtaaagcaccacacaaacaaataagttgagcgggatgcggaagaaattcatgattgtgcttcttgcttcctcaggaatgtactgagacctcatcttcatgattgatggccagaatatgccaacacaggcctcgaaggtgcagaaaccaagaagctgaagagaacctccaatcgatatgctgcctcctttcacagaagatgtgggcactaggatgttggtgacaacagggaggacaagggtgacagccgatatcgagaatacaatctgcatgtaaccttcaaccttgagctttcgggctaatagacgtgacgcaacggagctacccaacatggatgacagcatgaatgtagcaaaaataaaaccatgaggaatgtcttcttcatttgggctcaatgctggagtccataggaagacaaatgtgtacatcgagccctcaaacaatgactgtatggctcccagtaatgcaatcttttcatctgaagcaattgccttagctgcaaccttgaactgggccatcaggtccttactatcagatgggtctccatagttctcactccatgaggacattatgacagccatgccaatcgccagaaagcatgcagcggcatcaaacggagccacgggaccaaaacccaagttctcagcaagaaggttcgcgaatagcccagacacaatggcaattaagccattcccaaggaagatggctttggagaatgttatggacagccactgcgggtcaaagcctctcttgttgtgctctgcgacgagccaggactcgaaggcggagaagagcagcgaggtggcgatgcctccgaggatgcggccgatcatgaggaccctgtactcgggggagtgcttggtgatgcagctgaggatgtagctgatgcagtaggtgatgcaggccctcttgcggccttgtttgtcggcgagggagccgacgatggtgccgaagagcatggaggatccgaagccggcgatgaagaggcggccgatgtcgcccttgtcgaagccgtactggctgtagaggtagtagacgtaggggccctgcagccagtccccggacatcatgagggagtagacgaggacgtagttgttcttgaaggagttgaaggcggaggtggtggcgacgcggtccttgccgctcttgccgagctcgagccccgccacgacggcggccagcgcgccgaacacgacgtagtagaacacctccatggccgcccgcgccgccgctcgccggagggagggaggccgaggacgcggggtggatcggtggcgcgttgcggtgcggtgcggtgcggtcccggccggcctcgaggaagccgacgacccggccggctggcacaggttaataacggggatcgctcgtcgctccccctcgcggcgtcgatttataggggttaagatcgtgaaacttcctcgtcggacagtgggcactggagtaagtgagtgagtgtgcatgcgccaaatcttcgcccgggccgctcctcacactgactgcacccgcttgctggtgctcgggtgtgggtgcgccaccgcccaccaccgccgggtccgtgtgatggagctggtggggatagagaaaaaagttgtttactgctcgagccgaattccgagca

SEQ ID NO: 74515 - DNA, 2093 bp, Zea mays
  Clone ID: MRT4577_167955C.1
ggaagggtattcggctcgagcagtaaacaacttgattcccatccccaccagcaccagcacacggacccggcggcggtgggcggtggcgcacccacaccccagcaccagcaagcaggtgcagtcagtgtgaggtgcggcccggccgaagatttggcgcatgcacactcactcactccactgcccactgcccgacgaggaagtttcacgatctcaacccgtataaatcgacgccgcgagggggagcgacgagcgatccccgtaattaacctgtcccagccgcaccgatccaccccccctcggcctcggcctccctccggccatggaggtgttctactacgtcgtgttcggcgcgctggccgccgtcgtggcggggctcgagctcggcaagagcggcaaggaccgcgtcgccaccacctccgcattcaactccttcaagaacaactacgtcctcgtctactccctcatgatgtccggggactggctgcagggcccctacgtctactacctctacagccagtacggcttcgacaagggcgacatcggccgcctcttcatcgccggcttcggatcctccatgctcttcggcaccatcgtcggctccctcgccgacaaacagggccgcaagagggcctgcgtcacctattgcatcagctacatcctcagctgcatcaccaagcactcccccgagtacagggtcctcatgatcggccgcatcctcgggggcatcgccacctcgctgctcttctccgccttcgagtcctggctcgtcgccgagcacaacaagagaggctttgacccgcagtggctgtccataacattctccaaagccatcttccttgggaacggcttaattgccattgtatctgggctatttgcgaaccttcttgctgagaacttgggttttggtcctgtggctccatttgatgcggctgcgtgctttctggcgattggcatggctatcataatgtcctcatggagtgaaaactacggagatccatctgaaagcaaggacctgatggcccagttcaaggttgcggctaaggcaattgcgtcagatgaaaagattgcattactgggagccatacagtcattgtttgagggctccatgtacacatttgtcttcctatggactccagcattgagtccaaatgaagaagacattcctcatggttttatttttgctacattcatgctgtcatccatgctgggtagctccatcgcgtcacgtctattagcccgaaagctcaaggttgaaggctatatgcagatcgtgttctcgatatcggctgtcacccttgtcctccctgtcgccaccaacatcttagtgccaacgtcttctgtgaaaggaggcagcttatcaattggaggttctcttcagcttcttggtttctgcacctttgaggcatgtgttggcatattctggccgtcaatcatgaagatgagatctcagtacattcctgaggaagcgagaagcacaatcatgaacttcttccgcataccactcaacttatttgtttgtgtggtgctttacaacgtgaatgcattccctatcactgtcatgtttgggatgtgttctatcttcctcttcatggcagcaatcttgcagagacggctgatggttgtctctgatctagtacacaaatcatcaactaaagcacaagaaatgatcggggaagatgagccactaaatccttagatgtcgacagaaccatacatgcgcaatcagatattgaagacgacgtccatactgcatttcgtttcgtcacctgtgcaataagatggacgtcaaaaccatgtaatagagtctagtggctttcgtttctgtagtgtagatttgaccaggctgctaagtttgcacctgtgccgagaagattagatgagcaagtcaatcgatattggttattcgcattgttgtttctttttttaaaaaaaaaatgttcgctttaaagtttaaacgatacggtatatatccttgtaagtgttgcattgctgcaacaaaaaaaaattctagtggtgctgttactgactgttgagggctctctctacttggtcgttgtaagaactgttgcttcttaatgaaaaacgggctcaat

SEQ ID NO: 74516 - DNA, 262 bp, Zea mays
  Clone ID: MRT4577_167957C.1
aacaaggggcaccagcagcatgtactaaatcagattcaacggtgcggaacaaagtgagacactatacaaggagaccaccaccctaacaacaccaattcggagcaagggaatttaaaaaaaaggcccttttttcctccacttcccttttcaacaagcttcttttctgggactaaatctcaaaaaggtacaaaaatgggcctacacaacatgcggagaggaaaaattcatttcacatctcgtggcaaaagcgtaacctgcaggg

SEQ ID NO: 74517 - DNA, 283 bp, Zea mays
  Clone ID: MRT4577_167958C.1
ctcattttttccctcctctcctcactagtatacgatggctcactaccgccgactattgtgggggattgacttacctctgccatgcctgacagtacctcctcctgtctcgccaatatggcgccgtctcagtgcccttactaaccccgcgcaggagcagcagtgcaagctcacatgcgtcttcaacatcacgctcaaatccgaggaccacatcatcaaggtcatgaaccacaccgtcttcgcctacatcaacgaccttgacacctcttacttgtacggggatccc

SEQ ID NO: 74518 - DNA, 368 bp, Zea mays
  Clone ID: MRT4577_167959C.1
cgtagactctagagtgatcccttgagaaaacagtatttattaaaatgacatgattatttatttagaaaatctgcatggaatgcatgaaaaactactagaggtaataaatgaagttaacaaggttgcagatataagcccaatatacaaaaatcaattgtatttctatgttcctccagtaaaaaaattggtcattgaaataaaaaaaataccattttacaacagcattaaaatataagtaatgctaagagagaaatctgacaggatgtttacaaggcctgtaacatggaaaactataaaacattgctgagagaaatttaagaagacacagatgagggggaagaatacctaattgggttttaacactcaat

SEQ ID NO: 74519 - DNA, 294 bp, Zea mays
  Clone ID: MRT4577_16795C.1
gaaaaaggataggcaaggaccaacgagcgagtgttacttatatgacgaatatggacgcgcacctggcgcattgaatccatcttattgaacgcttgcacctgctctatcttttgattctcaatgacaccctcatattgaccgaacacgatcttcttttctaccttgatgcgttagtcttccgatgcacgaaagaggacaaccaacacgtggctaactgacatgaggtcgatatgatcagtaactatgctgttgatcaatactgtaactaacagggccacgatcactatatcgttc

SEQ ID NO: 74520 - DNA, 257 bp, Zea mays
  Clone ID: MRT4577_167960C.1
gaaacaggacaaacttgctatacgataactagcgccacttgacgaggaccagcaagcaggccgcgcagaatgagactgacactgctccagaccaccgagcagaagatcctcccgtgccagcaggacgccgagcaggacgctggcgatggaaagaacgccgccgccgcgggcgacgaaaaggctacccccacgctgaacgagacggaccgaggaggcgacgacgaccggacgaagaggcagacatatggaacatgacc

SEQ ID NO: 74521 - DNA, 475 bp, Zea mays
  unsure (1)..(475): unsure at all n locations
  Clone ID: MRT4577_167961C.1
gtggcggtagctacggtctcgcaaggcacgagtgttggtggcgatgaccgcctgaggcacgagcggcggcgagcgcgagccagacgtcgaagacggcgtcctgcggntcgaggnacgagcagcggcggttgctgccagaggcgcgagcggtgactgtggcagtgacctcccgcggcggtggtcgtgaccgctcgaggcgcgattggcgacaacaactattactgttccgtgacaacatccgatggcgacgacctctttcgattcggtgcgnctcgggcatccgatgacgatgaccacctctgattcggtggcctctaaagcgtcctcagatccgatggtctcgtggtcgacctccggcggcgacctcctcgatccatgtttatggtttccatgatcccattttatgccaattacttacactatttatgcaatatgttgagaatttttataatgttgaatacgatgtctctcacat

SEQ ID NO: 74522 - DNA, 824 bp, Zea mays
  Clone ID: MRT4577_167962C.1
cccacgcatccgcgcatgtagtttctgcagaagctagccaggcagacgagagagcgagtcaccgcgagaaggggatcgcggaaagtgagagcagaatcaacaatccacctgctcatcgagtcgatggagatgaaggttgctgcctcacggccaggatgcaagaaacgccccccgagccgtctccagaagcatgcgccagcgtcgctgcaactggagcaggctgtcgccagtgcggggacgggagcaccgcccgcggtgtggggtgacgggagggcgccgatcccgctcctgtcgccgctcgtcgtgtcgcccatggtgccggtctgggaggcggaccagacggggggcgccaggaaggagggaggaggggaccaggccgagggcaggagcggtgccgagcagcagcagcgcggcgccgccgctcggcatggcagcagtggggagcaccaggtgcacgacgtgacaccgaggccgtcggcgcccgcgctcggcatggggtggcggcacccagcgatgtcgacgcccgtggcggagccggcgtcccttgtgcccttattccagtcgcagtgcgcgttggaggtgcgcaactcgcagcagtgagggggaatcatttgctcaaccaagcagccatgcccatagtagtgcgctcgagctcgtgctcacgacaggcgccgctacgatgtgagaagacgatgacgctttcgtcctcgcaggctattctcgtcgtgatctatctttgaacaactagcattggttttgctgctcttcatcagtttatcgtaatatctttacaatgtggtcacagttctttgtgaatataattt

SEQ ID NO: 74523 - DNA, 360 bp, Zea mays
  Clone ID: MRT4577_167963C.1
cccgtcggacccggcctgttgtctgccgtcgcgatacgcgtcattggacctagctcctgtgggagtacgggagatatccctggccgcgtggtacagtggatgttagatgcatgcgcaggctggtagcctctcggggcagcaagcagcgcgccgtgcgagatcgcccgctgtgttgcccaccgtgtcctggatgctgattacgtgcgacccgtccacgttgtccagcgccgtgccgtagaaatggcccatcgaccatgacgtgctggggaaccggccgacgaccagggaccaaatcttcatttggtgcgagctgcagtagtcgtaggtgccgtagctggacgggtccatggggacaaatgt

SEQ ID NO: 74524 - DNA, 234 bp, Zea mays
  Clone ID: MRT4577_167964C.1
ccccgccctacaaaacccctacgggggaaaaccggaaaccacgcccgccccccacggaatgcgggcaggggaagcacgaccccgggccgcctcagggtctactcgccctctccccacccgcaggggccactcccattcccccaacggacattgcccagggggccagggcaggaccacccagagggcacaaccctacccgaatcgccgctgcatggaggccgcgcgcgcgtcggc

SEQ ID NO: 74525 - DNA, 326 bp, Zea mays
  Clone ID: MRT4577_167965C.1
attgatcattatgcaccccaaaacatttcagatacagaacaacaacccaaaaaaagaacaaagggcggctacaacaaaaccaaactttagcggggggggggataaggacccttatcacaaaaaaaacagcgctacataactgccgaacccttcaaaaattggcatgcaaaactctcattcaacccccctccccgggggtctaaacgaccaagaccttgctggcggggggcacgaccttggcgcctcccccactgcaggtgaggaccaccctcacaccgtccggaagggccgggcacaggttccccaggtaagcaaacccgggggag

SEQ ID NO: 74526 - DNA, 147 bp, Zea mays
  Clone ID: MRT4577_167966C.1
gactggtatcggtgttggtcacaggtgcaggtactgggggggctgtcttatggtactttttgtgggaaggaccagacatacttatacccagtgcttgtgatcgtatcttaccgccacaggaagctagcgctgtagcgggggagttaa

SEQ ID NO: 74527 - DNA, 346 bp, Zea mays
  Clone ID: MRT4577_167967C.1
gcggccgccctttttttttttttttttttctcaactgcataatcagcgggggctgattactcagatggggttttatgaaacaaatgtttacacatatgggtgtaggaggaaacccctctccctcgtgatccgacagccgggagtgtatacacatggggacacaccaaaacgcttttcgtccgctgttccagccacaaaggcgggagcaccaagaaaccacatgcacaaagcccacacaaaccaccttcttgcaccgctcttgacgtcggctatcaggacacggcacgaccgtaccagcgacaaggtgtgggacgctacaacgtttttctatgaccgacgaaccttc

SEQ ID NO: 74528 - DNA, 397 bp, Zea mays
  unsure (1)..(397): unsure at all n locations
  Clone ID: MRT4577_167968C.1
acaagctttttttttttttgttccatcatcacatcattggcggtgccctcttttagattgcttattaggtagcaattcaataatgaagttttttggttgatgtatgtggcctactagaataagaagtatatttcctaaaagaaaactaggtggaaaaaagggtccgggctagctctgggggtagtcaggatattttaagtacacttgggggtccctttagggggaaatttgttgttctaaaaagagcctataagaaaaatttgggaacatcattgaggctcctagcatgnaacactgnaacacaatctcataccagaatccagacggatgtggttgcactggggctgtctggggagtcattgatgtaaaaaccgttgagctggtgcgatgagctctc

SEQ ID NO: 74529 - DNA, 284 bp, Zea mays
  Clone ID: MRT4577_167969C.1
ttttttttttttttttctttttttacagtgttttttctatatttttttttttttttttctttttttacagtgttttttctatatgcttcaaaaaatctgcgtgccgtacaagaagcaatatcagtggcggacccaggaactgatgacagcctagacgagaatacggtgtgatccccacgcctgtgctcgtgccacatactgcttgcttccgtgtactgtgctcgcgccttgcccgctcgtgccacatactgcttgcttccgtgtactgtgctcgcgccttgccc

SEQ ID NO: 74530 - DNA, 295 bp, Zea mays
  Clone ID: MRT4577_16796C.1
aataaactaacaggtaacaattagtttgaggttcaatatataactactagcgccagacaattctaatccttacttcatcatcatccatcacttcattcccaacttcttaccactcccaaccacatctatccactacgcctcattctatgatattactcacctctaatcaatcataataaacttcaaccaccacaacaacccatcaaatctcacttcaatgttcttaaatattctgatctacaacacatcatctctcccaaaccaacaatgctttctgctgccttttatcattcca

SEQ ID NO: 74531 - DNA, 181 bp, Zea mays
  Clone ID: MRT4577_167970C.1
tcttcttttcacttatcatacctcacctacggtcggtttccattactggtaaggaggcatcctcatatcctataagactccaacctgcatatatcatgtttgaattaatcaacatattctcctaataactcaccccttattctgcctacatttgatcccctgacaaaagtttacctactac

SEQ ID NO: 74532 - DNA, 358 bp, Zea mays
  Clone ID: MRT4577_167971C.1
aatgataacttacaataaagactgacggaggcgccagaactgattgatccgtgacccatgctgaacgatgcatgggtctgataaaaacacctggttgtacacagcactaacatctgacacagagcggcctcacaatcaaattcatctttggtgctcaacaaacactatacgctacgaattcaacgctccgggatagggtaacaattacgggtgcagaaccagaaaactcggccgcgcgggctacacagattaggtccaccagttcccgagggacttgtcggagccttccaaaggttaatactcccgtagacttctacaacaccaccattgcccccatcgacgagatatgctggaacac

SEQ ID NO: 74533 - DNA, 189 bp, Zea mays
  Clone ID: MRT4577_167972C.1
cggagttgttgtttatcagaattaacctccggcattcaacgtccagtaccacataactaaagatagccacatgcagcatcattagttatgtggtacttgacgttgaataccggagttgttgtttatcagaattaacctccaatttttgtaggccagcctttaaagagcttggcgtaatcagggcggccg

SEQ ID NO: 74534 - DNA, 145 bp, Zea mays
  Clone ID: MRT4577_167973C.1
gacgttcggagcgggcattttcacacagatctatcactatcctagacgcacttcatacactgcataggccgggtcctacgaacacacaaccgggcgctcggaaaactccatggagggcgaaggacgcgaaccaacgacgacatat

SEQ ID NO: 74535 - DNA, 471 bp, Zea mays
  Clone ID: MRT4577_167974C.1
catattcgttgtgacagactcctgaacacaacatgcggtatccctactacatagctcctgaggttcagcgaacatgagctatgacagctccttgagcagatctctagccactgggggtgatcactctacctgaagcttggaggctgactttccttcgacgactgaaacctcggagataattatcataatattgttaagcgacactggcatattctcaattgggtttctgctgccgtgcatgatcttctcaacaagatccttcagcctaatgcgaggaaagatcaaggccatgcggaccaaacaggactagtggatcaagagggactacttacctgcatgttccccactattatgacaaaaacttactttacagtccagatccctagataaaggatcccatcgatgaaccaaaacaagacaattgcacatcaatctactctactcagtggatcaggatggcctgctcctttg

SEQ ID NO: 74536 - DNA, 541 bp, Zea mays
  Clone ID: MRT4577_167975C.1
cgcctccccacaccctggtcttaccgtacctgcctcacacaaatcataaggaattttccttcccttttcctccgacataacacaggggggaggggaaaacacatgcattcacccggccgcaataatggtctaggctccggctccggcgacgactaccccctgcgtgcttctatgcctatgcgtcctcctctcctgtgccgcggatgacaaccccaacctgcccgactacgtcattcagggccgcgtgtactgccacacctgccccacctggttcgtgaccaacgttatctatgtacatctcttactccaaggtgaggctggagtgcaggcacttctgcacctgcacgctcgatcgcgccatcgacggggtgacccacacgaccggcacctacacgatttagctggaggacaatcacgaggaggacatctgccaactgctgctggtggccaaaccgcacaaggactgcgactaggtgcatgcgcttaaggaccgcgccggtgccctgctaaccaggaacgttggcgtctcctacagtctgtt

SEQ ID NO: 74537 - DNA, 290 bp, Zea mays
  Clone ID: MRT4577_167976C.1
tgttcttataggcacagtgtcttataaatgtaagtggtgacgcagtggtttttgttcgtgaatctgacttagaagtggtgtcatctcagcaacctactaccaactgccagtcatcatgtactgaaggcgaagttacaacctgaggaaaattaggaaaaaagagctcaactaaatgaaattcatcaatctctgttattttgtcattaattatcttcttagacttaaaattgaacttgagataaataaggaagaattgagtagatttgatttgcctggagtcttttggaggc

SEQ ID NO: 74538 - DNA, 751 bp, Zea mays
  unsure (1)..(751): unsure at all n locations
  Clone ID: MRT4577_167977C.1
atcttttagattctatcctaagctccaagtggtgcatctgcaggcgcccaacctctgctcttgttccgcccagtttagctccctgccgttccagttctcactagtttggctccccgccgaccttgattctggagcaaagcccaatcacaagccaaaggttcggagtagcggcgaagaagttgcgttgatccgtggcagccgcgcatgctcgaacatctacatatcagacacgaaactagtgtgtagcctgccatagaagctaagatagtagcttttctctccccaccctccaccccgaatcggcgctcgcccgtctgcagcatggcgcggtactttgatgatgagaaacctccaacttcagatgcagagaacaacgttgggattgggctagtgaggatgaaaaggccggcctatggcaagaaagaggtggcgctgacagctgactccgttgcggtcatggtggagctcaacgccacatcctccgccatggcgagggaggggctcgatctggtggtcgtgttggacatacagcttagctgggaggggaggggatgtcaagttctcaaaggttaaggaggcgatagagttcttaatcatgaagctcacccccatggatcgtctctccatggtcttcggaaaggataccgccggcgtcgagcgccgtctctgcccgctgagatgcatgactcgagctggncagggcgatctcaaggacctcatcagcggcagcgggcaggacaacctttctctg

SEQ ID NO: 74539 - DNA, 440 bp, Zea mays
  Clone ID: MRT4577_167978C.1
gcgcccctggctgcagcgcccagctggagcgccgcctgtgacgcgtgggaggcgcagctgcacgccgcggcggcggctgctcactcgtcggagtcgtcgtactgatccgatccatcatcgatcagttattagacgcacgtacggatcacgtagctagaatgttcacgtttttttttttttgctcacgtagtacgagtaccatagtactaccatacatgggcgtgttcggctggctacaagccgacactgttgcagctgtttgtactgctgcagctgcaatccatagagagaaaaatactgtagaagccgcagccgcagccggattgcagccgcagcaagccgcagcgaacaagctgttgtcgttacagtactcagacacacacacacatctctgattagctgagcgttcccttcgattttaataatacaggttcacgcat

SEQ ID NO: 74540 - DNA, 365 bp, Zea mays
  unsure (1)..(365): unsure at all n locations
  Clone ID: MRT4577_167979C.1
ggccgcttttttttttttttttttcttttttttttttttttaacaacgaagcattgatatgccaaattactgatggggaatggattactgatgttgctaacttctaatcccctgctcccaaacaagccctaagtgctgccagctaccccatcgtgagttcgtgaccggtcttcctgccatcagttgccgggggggccctggttgagaacaagtccttcagcattttgtccaaagaatccttagctaacggagacttcttcacttctttctgccctgattctagaggaccgttaacaggtgctgcaccgttctgaagctctgcactagcatcttntcggcgctctgacgggtgacccttttggttg

SEQ ID NO: 74541 - DNA, 376 bp, Zea mays
  unsure (1)..(376): unsure at all n locations
  Clone ID: MRT4577_16797C.1
acgcgccccaaccccaacccagncgagncccccnccgcgcgggcggcagggcngcacncngcagcngccggccagggcgcgcgccccgagcacgnggacgccgacccncgccanggngcnccacgncggggccgccgccgccgnggccgngncgacggaggcggccagggagcccgccgccgccggaaaccggacggggggggaggngcncggagccgcggcgaggcggggcggccggagcacccggcgccgcgcgaacgagaacgggcacggacgaacgccgcaaaagggggggaanaaccggaaccacgagggaggcggaaacaacgagaaccgcgaacagcaaaccaggaggggcgcagggcaacaacaagga

SEQ ID NO: 74542 - DNA, 466 bp, Zea mays
  Clone ID: MRT4577_167980C.1
cgggctcttcggccgccaccccctttttctcccccttggctggacgccccctggggtatggcagccatcctacatagcttcctcccccaagcatcatcccctacgcaccacggatagaacaaaggagagacactttgaatgcaaaacaccgacaggatcaagaagaagatcatcatcatctccatgagcataataaagggggaaaccttagggggggggactcaacatcaggaataaagcagacctcgacatgaacagaagggccgaggagctcacacctgaagagctgaagcaggagaagacacaccttgactaaccctagaaagctgaagaggcccaactgtgatcctacaacagaaagaaggattacaaggagcggaaagtactaacaagttcgttatccaacgcctatgtacatgaaagctaagaggacgatcgtccagaggctcaaggaagatcagaaacc

SEQ ID NO: 74543 - DNA, 470 bp, Zea mays
  Clone ID: MRT4577_167981C.1
cgggttcgacccacgccttcgggaacgggtaccacctgcgcgaacccaccggagcgcccgcagctatagctagctcttgcttgcgcgctctgggagaggagagatcacatggcgtcccggggcagcatgacctggagtcttcaacttgccgtccttgtttccgccgccatcgcgcttgggttcggcgtccgggccggcgaggggcagctgtccagcgaggactatggccagacgcgccccgtcgtgcaccgggtcgcgcggcgggtgctgaagaaggcgcatgatgccgtctgttcgtatctacgccagcctcacccgcctccacttccccgactgctttgtgcaaggctgagactgctccctcctggtggacatcacctggagcatcgtccccgggaagtttgtcaggcccaacaccaactgggcgctcggccgccccgggcgggattccctaccggcccccctggagg

SEQ ID NO: 74544 - DNA, 719 bp, Zea mays
  unsure (1)..(719): unsure at all n locations
  Clone ID: MRT4577_167982C.1
cccccccccgccttcccttcttgccgtcgtggcgtagctgcgctgcggggcgcgggggaccgcagggccgccggcgcggccgcgggcgcgcgggcccccgggccgccgcgcgggcgcgcctgcgggcccgggctcgcggcccgcaggcgcccgggcccccgcccccccgccccccggccgcccggcgccgcgccgcccgcctccccccgcccgtccacccgccccgccgcgtcccgcggccccgccgcgccggccggccgggccgccgccccgccccccaggccgcgaggcggtcggcggccccgcgcggacggtcgctcctgcgggcggcgccgctgcagggcgcggccgcgctcgaccacgggctctgcgggcggcagtgcgggccctggcacttccgggcgcgccgtgtgcccctgccccgccggccggggcccccgcccccgcgcgcggcgccgccgcgccgcctcgctcctgcaccccgccgcccgggacccccggctccgcgacgtggtgtaccangcgcgcacacctgcgtccaggccggcaccccggcgccaacagctgcggaggagcacancgcacacgggcacancgcaaagagaaaggacagggagctcctcccgctcgcgctggcaccgggctgctaganccatgangcctactcgttcgctcagggncgacttcncgctcttctcgcgacgggtttgacggcactg

SEQ ID NO: 74545 - DNA, 911 bp, Zea mays
  Clone ID: MRT4577_167983C.1
gaaaagtcgtccccggattagttgtactgtacattgttcctgcgaagacactgggtcgtccgggtcaatcggcagcttgaaccagccatggcggcgcatcggccgaacgccgcggcgccgctgctcgccaagctcgacgccaccgccacgccgccggcgaagcgcaacaagtaccccttcttctgcgccgtgctcgcatccatgacctccgtgctcatgggctacaacgtcgcggtgacgagcggcgcgcagatcttcatggcggaggacctcgggatgagcgacgcgcagatcgaggtgctctcgggggtcatcaacatatactcgctcgtcggcgcgctgctggcaggctggacctccgaccgtctcggccggcgcctcaccatcgtcctcgccaacgccttcttcctcgtcggcccgctcgccatggcgcttgccggcgggtacaccttgctcatggtgggccgcttcatcgccggcgtcggcgtcgggtacgcgctcgtcatcgcgccagtctacgctgccgagatcgcgccggcgtcatcccgcgggctcctcagctcacttcctgaggtaacctctgctgtgtggcttggtgcgctgttttgtgcagttcatcagattttgcggcgcttgaattagtaatcttcggaaatgtcgcttcttctgtttgaagatttttatcaacactggggtgatgctgagttacgtgtcgaatctcgccttctcggaggccaaggccgtgctcgacaagacgtcggacacgcccgctgaggccgagcagcggctgctcgagatcgaggacgtcgtgatggacagcagcggcgacagcggcgcgtggaaggaggtggcgacgaaggctggcgtacagcgcgtgttggcaacccgggtgacgctgcaagtcttccagc

SEQ ID NO: 74546 - DNA, 2039 bp, Zea mays
  Clone ID: MRT4577_167984C.1
cggattagttgtactctacattcggcctgcgaagtctaataaccatccgacagctcaaggtcctgcggactgccacgccatccagcggcatccatatctgcgtgcgcgacggctatccgggcggcagtcgtccccggattagttgtactgtacattgttcctgcgaagacactgggtcgtccgggtcaatcggcagcttgaacaagccatggcggcgcaccggccgaacgccgcggcgccgctgctcgccaagctcgacgccaccgccacgccgccggcgaagcgcaacaagtaccccttcttctgcgccgtgctcgcatccatgacctccgtgctcatgggctacaacgtcgcggtgacgagcggcgcgcagatcttcatggcggaggacctcgggatgagcgacgcgcagatcgaggtgctctcgggggtcatcaacatatactcgctcgtcggcgcgctgctggcaggctggacctccgaccgtctcggccggcgcctcaccatcgtcctcgccaacgccttcttcctcgtcggcccgctcgccatggcgcttgccggcgggtacaccttgctcatggtgggccgcttcatcgccggcgtcggcgtcgggtacgcgctcgtcatcgcgccagtctacgctgccgagatcgcgccggcgtcatcccgcgggctcctcagctcacttcctgagatttttatcaacactggggtgatgctgagttacgtgtcgaatctcgccttctcggggctgcccgtgcacctgtcgtggcgggtgatgttcgcggcgggcgtggtgcccaccgtgttcatggcggccggggtgttcaccatgccggagtcgccgcggtggctggttatgaagggccgggtcgccgaggccaaggccgtgctcgacaagacgtcggacacgcccgctgaggccgagcagcggctgctcgagatcgaggacgtcgtgatggacagcagcggcgacaggggcgcgtggaaggaggtggcgacgaaggctggcgtccagcgcgtgttggcaaccgtggtgacgctgcagttcttccagcaggcgtcaggcatcgactcggtggtgctgtacggcccgcgcgttctcgccatggctggtgtcacgtccaacagcttgctcctgagcctcaacatcctcttcggcgttgccaaggttggctccatcctcatcgccatggctctagccgaccgcgtcggacggcgcccactcctgctggtcagcactagcggcatgacggtggcgctgctcgtcctaggctccctgttcgcggtgttcgcgggagccaaggatgacgctgcggtggctgcggtgagtgtggtggccgtcatggcgttcgtgatggccttctccgtcggcttgggccctctggcgtgggtgtacagctccgagatactgccgctccgacttcgcgggcagggtgccgggctcggcaccgccatgaaccggatcatgagcggcgtgatcaccatgaccttcatctcgctctaccagggcatcaccatggccggcgcgttctacctctacgccgccatcgccgccgcgtcgttcgtgttcgtgtacgcctgcctgccggagaccaggggccggagcctcgaggacatggaagagctcttccacaccaagtgatttcgtatgtgctgatccaaccaccatttggttcaattctcgattcagtggcaatgcagattttgccattgttggagctggttttgagcttggtcgttatcatcatggcacatgcgtatacaattgcaagattatattgaaatcgattgattgagccggttggcgtcgacatgggaacacgtgcatatatagaattgaagcattgtacacatactgcataatcatggccatttattttagattcaacatttcttttatatctatttcttcgtacacagaacaaggtgaaagtggtggaaggtagtgatggaggatgtttttttacaaaatatacaaggcaacaagagaggtgtgaaaagacgtcaaatatgtaatggataatcgtgattttttt

SEQ ID NO: 74547 - DNA, 1874 bp, Zea mays
  Clone ID: MRT4577_167985C.1
cccacgcgtccgggaagggagggaggggcagataaagaacactgcaccatttgatttgtgtgctcctgcagtctacaccctcacttgctttcaaacgtgcacctcctctcttcttcttcctcccctcatctccttccaacagtgccataaccacagcctccctctcctctctctcttgttgcacgaatatgacgccatgatctcccccgtgaacgacaaggagaagcagagtgctacataggtacatgtagggtactataggataggaactatacagctaggaggtagcgcggagggaggagcacgccgccagcagtagggatgtacaagaaccagctccaagaactggcgcagaggagctgcttcagcctgccgtcgtacgtgtgcacgcgcgagggccctgaccacgcgccgcgcttccgggcggccgtcaccttcaacggtgagaccttcgagggccccagcggctgcaccacgctccgccaggccgagcacgccgctgccgaagtcgccctcgcccgcctctccctccgcggcccgtccactaccctcgccgcccgggtcctcgatgagacgggggtgtacaagaacctgctgcaggagtctgtacagaagttgtgtacgaggtcaactactatgcatctccctcgctctctgtgtgtgtttgaccaggatctagatggctagatcttcgtcagaaaggcagccatggacatgatgaggctgtgaagggttttaggtggacgatgaacatatatgaatatatagttgtactgttctagggcttcagtagaagccatgctccgcctggtctttgctcagtgccggaggctcgcaaggagcccggcgccggcgacgagcaggagcacgtggctgtcgccagagcgctcgcggcgctgaagccgcgagacggcggcgacggaaaggcggcgccgcctctgcagaagcacagcagcaacggctcttcttcctccgctcttccgaacccgtcgctgtacagacaccaatggcggcctcggaccagtacccctgcccagcccctgccgccgaggacgggggccctgcccctgcagccgccggccggcccaaggatcctgcccccactgcatctgctacaacggccggcgtgcggctccagggacgccgcggcggcagagctggtgcggatgctggagcgcgccatggtgcgcgaccgggaggcaacgccgccttcgccgtgctactacgcggcgcctgccgcctcggcgtaccgccacggcagcgcgccgaggaccttcgccgcgggcgggttccacgccccggctgtgagcgtgcggtcggtgatcccggtgtgcgccgccccgccgccgcagaccccggtcaaggaggaaaggaatggcccggcgacaccctcaggcgcatgcaagagggcgtgagcgacgtggtcagcttgtgaagcgcagcaagagaagaagaaagaaagagcctggctctgttgttgcaggggagttttggatcacaactttctctgtagtctgtacagaagttgtgtacgaggtcaactactacgcatctccctcgctctctgtgtgtgtttgaccaggatctagatggtgagatcttcgtcagaaaggcagccatggccatgatgaggctgtgaagggttttaggtggacgatgaacatatatgaatatatagttgtactgttctagggcttcagtagaagccatgctaccgtgttaacaagcgcatcgtatcatcccttcggctcggcaatctgcctgcctgcacacagatcttgaactctttcttggcttgtacaaaaaaaaagaacacctcatatacataaataaatctttcctgaacctcgaaaaaaaaaaaaaaaaaagcggcc

SEQ ID NO: 74548 - DNA, 384 bp, Zea mays
  Clone ID: MRT4577_167986C.1
gcagtttagcacctctatctagttcttctctcttcagcctcggatccaggcgagcaccatacccctgcaaataataaggttaccagcttgcaggcagccacaggcacggtacttcagagcaatacactattacttcctctgccaggattcaggcacagtattgtatttggaattattgaacagtgtatttctcgtacaattcgactcataagttttttaagattcatcacaggcttcaactacaacttggctagagaaattttaaaagaaggtatgtagctggtttgtttaatttatttatcctcccaaatatggttactgtccagacacaaagatgtgttttggagaataaataaattaaggaaatctactatatatataact

SEQ ID NO: 74549 - DNA, 587 bp, Zea mays
  unsure (1)..(587): unsure at all n locations
  Clone ID: MRT4577_167987C.1
cctaaacaaggggggaggagaaaangaaaaccttacaaaagccacaaattaaggctcagcatgtcaatagttgtttttcatttgctaccggtcaaggttaagtcttcttttaccacatctttgtatatcaactttagccttctcctatctctctttccattaacattgcgccgtagaatcccattacacactgggactctggaggcctcttggacacgtccaaaccatctcaatcagtgtgggataggatttatttaattggcgatacccctagtcaatcatgtatatcatctttctagctccagactcaatctcttgtaaggctataaatgcaacacaacatacatattttctgcaacacttattggctaaacatgacgaccttttgttggccaacattctgcactatacaacatagcaagtctaaccgtggtcatatataactagccatttagcttctgtggtacattcctgccacatagaacacgagatgcttggcaccacttcctccatcctgcttggattctatgcccatatctttctataggcttgatgctaagaaccggaaagtacgggatcctttctag

SEQ ID NO: 74550 - DNA, 632 bp, Zea mays
  Clone ID: MRT4577_167988C.1
acgccctttttttttttttttttttttttttttttttttttttttttttttttttttttttttttttttttttttatttttttttaaattttttttataaatattaataaatttttttttttttttttttttttttttttttttttttttttttcttttttgtggccgggggggggggcaaaaccaaaaaaaaaagaaaaaaaaaagaaaaagaaaaaaaaaaaaaaagggaaaagaaagggataaggttagggaaaggaaaaggaaacggtaaaaaaaaatgtccggaagccatttgggggacgcctagggggggggtcaaaggggaggaaaggaaaaggaaaaaagcccggacggggaaaaagaaagggaaaaacaagagaaaaagccaaggaaagaaaaaggaaaaaataaagcaaagggggaaccccggaaaaagcccctcctaaacgggccggtggaagcgccgggaaaccgccccgttgaggggaaggcaaagaaccgggcccgggcgatggttcgagggggggcccttccggtccccgttttggaaaccgggcgattcacaaacctgggcgggggggggggccccccccggtctatccggggggggggcaggaaaaccctttttc

SEQ ID NO: 74551 - DNA, 781 bp, Zea mays
  unsure (1)..(781): unsure at all n locations
  Clone ID: MRT4577_167989C.1
gactcctgtctatggtcgcgagcgagtgagactggtagacgggacaccagtccacgactcccgggccccgacgcttccggagatccctccgtccctggcgccggcgacctcagaggaagaccggaaaactgacagtgccgtggcggcaatcgggcagagctggagagatagggaggcgggagcttggagaaggccgcttctttccttcttcccccacgctcgtcagggagtccagcgttcgggtctactgacggatcaccgcattgcaatcagccatggtcatggacaccactgacccgggctactggctcaactggaggttcatgctctgcgcgacctgggtctactcctgtatggccctggcgttctacttgatctggaagtacgaggggccaagttcgccggccggcaacgacgaggggggcgacagagaggaggctcggcccaggatcggacccggagttgtgtatcttgaggactgctggaagccgtgccttgaggagatccatcccgcttggctgctggcttttcgccttgtgtcgttcttgttcatggcttcggtgcttgtctctgatgttattgtcgatggatggaccgtcttcctttactacactcagtggaccttcttgcttgtcaccttgtactttgggcttggttcggtgctttctttctatggatgttatcagtacgcgtgcaagacggctaaatctgatggagatcatggctcttatatcattgctccaacgngggaaagtacatacgacgattccatcaaaagttc

SEQ ID NO: 74552 - DNA, 410 bp, Zea mays
  Clone ID: MRT4577_16798C.1
ataacttatcaccgtctgtagaatgctcttatgtgacatgtgagaagattcgtccttcgggctctgatgctgtccaggatgcttgaacttatgatatcgaagatgcttagaactctactggtgtacagacctcatctgcttgtgaagctagtctcgatgaaatgcacaatgcttgtgcgaaattctcatacaatcacagatgattgctgaatgcattcatccgtaaaaaccctggattgctgctgaagtcattctcgctgatgttgaaaattcctcgcctgattgattttgacaatcaacgtgcatattttcggtctaaaatcaagcatcagtatgatcatcatcatcatagccctgctagaatctctgtgcatcgtccatatattcttgaggactcctacaatcagctt

SEQ ID NO: 74553 - DNA, 1054 bp, Zea mays
  unsure (1)..(1054): unsure at all n locations
  Clone ID: MRT4577_167990C.1
ccggccgggattatagttagattcctattaagctggataaatcaattatgctttgcatggggtatgtccagctgtgcatgcaggatttggagttttaagaataaaagaaagtggtttaagcatatatgcttaatcaaaaagaataaattgttgaaccaaatacctttaatttgcccatgtcctccagctccaagaatttggagctagtaatgagcggctccaaaaaatcttggatctggagctgtgcaaacagctcctagcacatgtgttgtatgatagtaatagctatcaggatccaaactgaccgagaactgtttgatatttttcttttacttgtttcattgatgcagttttatgccattctcaattttttgttaccaggaactcgtcgccaaaagtattgagtcttccgacctcaacttctcacgttacggtgacaccttttttgaggtggtttttgttggaggacgcactcagcctggcactgtaaaacctgaagaaggagaccgccacccttattctatgttagattgtgtggcacagcgtgaaacaattttgcctttcgtactctatatccagaaaacattgcgcaggaggcctttcttaataaaaaatcttgaaaatgttatgcgcaaattcctccaatccttggagttctttgaggaaaatgagaggaagaaactcgccatattcacagcccttgcattttctcaaaagctgtcagggcttcctccggagacagtgttccagccattgctcaaggataatctggttgccaaagggatagtactttcattcataactgagtttttcaaggagtacctgaaggaaaacaccttggatgatttgattgcgcttttgaagaaaggaaaaatggaggacaatctgttggacttttttccatcagctaagagatcctctgaggctttatctgagcatttcatcaaagaaggtctgactagccttgttgagtacaatgaaaanaagaatgtttgaagttaaacttaaagagataaagtcaacactgaccactatgatcaatgatgaggctgca

SEQ ID NO: 74554 - DNA, 268 bp, Zea mays
  Clone ID: MRT4577_167991C.1
aaaagagaggaccaaagcattgtatataggcacatgatcaattggaaagagcaactacacggactggcatgaactgattgttgaagagcaagagcacagacatgtgacatagacgtaccggatacacacttgagttatagggcacgccaaatttacatgctctctttattggaaggaacgatatccattctggtttttagacacaacactcttctgccgtcagctgcaaaagcaaccgatgaatgttaacaaaccaatggccgtgact

SEQ ID NO: 74555 - DNA, 384 bp, Zea mays
  Clone ID: MRT4577_167992C.1
gaagagtctttgacgatactcccgtcgtaagctccgccttctgctcgaggtgttaccccagctttgttatttcccacagcgcgccgacatccccgggggccttaataagcgcctgggggcccaaacttccctgcgcgccgacagacgcaaggactcacgtcataaactacagcccagtactgcttcgagacccacacaaaacacactatgcttcccaacaccactccaatcgacagacgagctttcgtagccacgttcaccatcgacaaatatattgtcacaaccgacagccaacccatttgaagtcatgaggtacagaggatgcctatatttccttcccgtttttcaaaatggagcatagttcttactaatatacacaaatca

SEQ ID NO: 74556 - DNA, 423 bp, Zea mays
  unsure (1)..(423): unsure at all n locations
  Clone ID: MRT4577_167993C.1
aacccccccccacccacgccacgncggcgccgncgacagcagcagcgaaggccacccccgaccagcnccacaaacagcggaaccaacccaacctgggcgcccaccaaacaacacgcgggaggaggggaccccagaccgcgacgccgacgccgccgcagagcgcgacgccagcgacagccgcgccaacaacgcccgcggcgcccaccagcnggagaacagcgagagcgacacgacagccgcgaccccgcngcaggccgcgaagcagcncgcgccggaccccacngaagacaaggaaggngcgacccccagncccaaggaanggcagagagaaacagcaacnggaagcaancccggncngcggnggagngcaggaaccgnaaccaagcaagagcaagaccacaaagaggcccgcaagcacacaca

SEQ ID NO: 74557 - DNA, 225 bp, Zea mays
  Clone ID: MRT4577_167994C.1
ccggccgggaaaccacattcaatccatgcctcgactgctccagtattcccctaccaggcacgcgggcgtagaattagctcagccaagggcagcccgacactgttgacggcgaatgaagactacgacctgccccacctcaagccgagactgcgaggaagaccagggaccgggacaaagacgagctgctctccacgacgtaccccacggcgggggccaacaggggcg

SEQ ID NO: 74558 - DNA, 356 bp, Zea mays
  Clone ID: MRT4577_167995C.1
ggaaaaaaaaaatgggggggaaattattatttttggagaggggcctttaaaaagaaacgggggccaaaactaaagctagctactaaaaccattttttggggggaaagaagggggataaccctttcggccggaacaaaccagggggggaaatgtaaaaccccggaaacgaaaaaaaaaaatggggaaacaaaacacgggggaggattttccgggggtttgaaattccagcttttccaggtaacccattgggtaaaaaatggccttttgggggggttttgggagctccccaaagaaaataaattcatttagtgtcagggaaaccttgggaaaaaaaaaaaataaatgggggcccaaaa

SEQ ID NO: 74559 - DNA, 328 bp, Zea mays
  Clone ID: MRT4577_167996C.1
ggggggggttttttttttttttttttggggcaaaaaacgtgaacttatagcactccagggggaaacaagggaaaatgaacgaattccgagttaaagatccaaagtttacacgtgaattcgaaacaaaaaaaaaattgacgtaaaaattttctggaaaaaaattaaaattacccgcatttgagggggaggaggatgaaaacacttttaggggggctttaaaaaattttccggggaatgatttttaccagcaaaaaaaacctgggctttttttaattggagggggggaggggatctccctctccaaaaagaaattctctccctttaaaaa

SEQ ID NO: 74560 - DNA, 447 bp, Zea mays
  Clone ID: MRT4577_167997C.1
gagattaatcttaatgtacttgtagcagacaaaacatggtatatgaaggtgacagcttatggagggagcttcacgagcaagcgaatctaaatccaggcctggaacacaacggaataatccgtccaccagaaaaacacaaaaaaataaaagtgaaagctacgaagaagaatggggacaaggaaaaaaaaagagtagcctagacaagcatgggtcctagtacaatcttgtttttatctaacagatgaagacctcacttgggcaagcctacgagtagctcgctcttattacctatgctgctgcttctgacaggatatttttcttaaaacactatttggcctactcctcggcggatgcggtggccggcggctagtggaggagcaccatgagcatgggcgtgaagatgccggtctcgccgccgcggatgaggtgctgcgcgggctcgtacag

SEQ ID NO: 74561 - DNA, 363 bp, Zea mays
  Clone ID: MRT4577_167998C.1
tgccgtgccgggtttcgggccgcccgacaagtccgacccgtttggacatgtataagttgttgcctttttcgccggtgttgctttattttggtggtggtcttgttatcatcttcgtgagtgttgaggttttcttttttgttttattttctattgtatttggttctttatctatcaaaatatgcctggcatgcttttaatttttttaaaaagaagtgcatggggataacgattcaagtattcaacacactgtgtcgtatcattaggaagcacgggaatctgacagctgccaagctgagtgagttcccttgctattttagttcgtgttgtttatctcaacctctttggaacaacgccatgtgggaa

SEQ ID NO: 74562 - DNA, 301 bp, Zea mays
  Clone ID: MRT4577_167999C.1
ggaattcccgggtcgacccacgcgttcgcccacgcgtacgcccacgcgtccacggttcgtgggtgagctgatcgagatcggccgcgtgggatgttgagtaccgctgcttcgtcagctgcctcgcctgtgccacggacgaccactccctccacaacgccttcagcacctacagcgaggtcctctagtccaagatcatcctcgatcgggatacgcagaggtcccgcagattcgggttcgtcaccttgtccacggaggacgcgatgctgaacgccatcgatggcatgaacgagctggaactgga

SEQ ID NO: 74563 - DNA, 379 bp, Zea mays
  unsure (1)..(379): unsure at all n locations
  Clone ID: MRT4577_16799C.1
ggcacgagcctcgctcgtgcactctctggtctctttctcttcgcctgaccctgagcacagcgccacagacacaacaacctcggactcgggagtacgtgtagctaggcccgatcggtcgagactgagtgcctgcccganacaggatgaccaaagccaataactgtctgatggacaaactggccttctggctcggatggattgctatcctgcaaggctgcatggtgaaatcatctctcccgtacgagtacgactactctgcaagcatcgagtgcttgccggagccgctggagccgcagtacggcgggggcgtcctccgcaacgccgacttcagcgcgggcctgcggggctggtccgccttcggctacggcagcatcgcgga

SEQ ID NO: 74564 - DNA, 811 bp, Zea mays
  Clone ID: MRT4577_1679C.1
caaccactgtctatccttgaatacaggtcgacaaaaacattgcctaaacttcttttgggacaagggaagaaacaacaccatctactccaacaaaatgctccttaattccctccctagaacactcaccatcaaacaacactaaggagacttctacatttcaacgttcccatgttatcaaatcattgacattttcaaacgaagaaaacactaggtaaacatatttctctcaacattattttcatcttgttactacctatttcaacaaatgattcctatttaatgacacttatattttattacaaaaccatttaatgcaaaccggtagcaaaaagaactcaaaaaagaatgttgatgctccacataaggtacgctttattaccctcgaacatagctatacacaaccatagtttaactgttaccgcaaaaaataatttgcaggatacagaagatttggtatctactgatcctcaactcctaaccaatacagtacaatcacccacaaaaaggcccaaaaagatattggaaacagcaggcacctccacttctgaaacgccgccttaaaaatgactaaggacaaaactgtccacacttaccattggaaacaactttgctggtccttttgccgtcacctgaaactaatgactacgacatgttcatgtaatatagcagaaatgaattatgtataataacatatgtacacctaagaactgacgcttctagcagcttttatctaatatgcagacaatatattctgtataatggcatctatgcgcatcaaacatatataaacgtaacaagttctttttcatgt

SEQ ID NO: 74565 - DNA, 285 bp, Zea mays
  Clone ID: MRT4577_167C.1
gttggcttcctattttcattttttttttttttttttttttttttaacaccctcccccaaatggttaacaaatgaaaaatattgaatcctttttttgcaacaaagggaaaaaaccagactctccaaaaaccaataaccccaccccccatatgggagctcaacatttcacacggatccctccgggtgacacccccctcttaccaaatttttcccaaaagggaacaatctcatctcgcttttaaaaaaaaacctcttcataaaccacggggggcaacttttttttttg

SEQ ID NO: 74566 - DNA, 858 bp, Zea mays
  unsure (1)..(858): unsure at all n locations
  Clone ID: MRT4577_168000C.1
cctcgaggccggccggaaacttatcgaagtcaagtatcacaagtgttttcaaatagttatttttcacatcactgccctacaatccctgcaaccgcgttcacactatcctgataactctatcataatggcgcacgttaatggcaatgctcccaaaatcacgctctacacaaatcatggctgcccttatgctcaccgagctcacattgttctaaaagaactgggcttgccgtatgaggaagttataatcgatttggatactccgagagagccttggtatctggaaatcaatcctagaggtcttgttcctgccatcaacttcaatggagagatcgttactgagtcagccatcgtttcaacattcctggctgacgcctatccctcgcatctcttccctgcaacaggatccccagaagctgccttgacccgtgctaaaatcaatttttttgtcgatacctggactaccaaggctggcagccattggttcaagatcttgatgcaagattctgaagaggaaaaggcaaagctgagccaggaatttattggaaccgtgagcaaagaactggagcctcttctgaaagatgcaaagccattcttcggcggtagtgagaagctcacactggcagaggcactaacggcgcctttcattatccggatatatgcattctcaagacacggtgtactccccaagtccattgcagcggacttggatgcacttcccaacttttccaagtgngctgcagcagtgataaaacaagagagtgtcacatatgtcttttctgaggacacaatcatctcgtccaccctcaagagactggaaaagatgaaagagaagaacccggcagcatcgaagtgaacttt

SEQ ID NO: 74567 - DNA, 492 bp, Zea mays
  Clone ID: MRT4577_168001C.1
atggcgctggaggacggcttcacggcgacgtgcttggctgccggtgtccgggcggacaggggctgggctaccggtggccgggcgacgtgccctgcctgggatctggacctggacgcagagtgctggactgccggtggctgggcggctggcagtagcagcttgggatatgcctgggcccggtggccggctcctgccttggagtgcagtgacgcaagggccttggagtgcagtgacgcaagggcaaggagccaggtgctagggacgcaggatcctagggtcgctcgacgcctcggcttgatgcctgctgctggcgggtggcgactgggtggttggggcagtactgctggcggccgggacaccgggtgggacttgaagagcttagggttagcccagtcggtcacaagttgggcctgcaattgggccacaattgactacttggctcggtggctcctatttacatattttcggatatccgcgggtacccgcgggtaa

SEQ ID NO: 74568 - DNA, 191 bp, Zea mays
  Clone ID: MRT4577_168002C.1
ctcagcgcctcagcccatatatagatttgctcaagaaaagaaaagaaaacgagagacgttctcacgttgttctggcttcaagttttgtagtttcgctgtttctgcgatcacatcaaaggtctgatttttttccccaggtcgggcagcctctgtccatctattacagcctggtgacgccttcgcaatccttg

SEQ ID NO: 74569 - DNA, 405 bp, Zea mays
  Clone ID: MRT4577_168003C.1
gtcggacgggccttccgttaacctattaaccaattttgaaccctgtttttttcctaaagagatcccactccctaaggagtttatttggattggcgacctttgggttaaactttatccaagtttggccgaaggagcacccctttttttaacctggattgggcccaattttgcggaatttttaagttttgggggaggactagatccaatacccggtggtttatggtggaccatttttgcccaccataattaacctatggcttttcttttccggaccgctggtcatatgtttaggaccaattggggtttgggtaatggcctaaaagatatttgggaggctaataagggcccattaacaggccagggccttaaaggtttttatgaaaccctaacaccgtaatggaatgc

SEQ ID NO: 74570 - DNA, 221 bp, Zea mays
  Clone ID: MRT4577_168004C.1
atgaatattactaccaatgtgaccattatgttgtgggcagtgggactcatgtttggtctgttaaccattttgtggcctgagttgtttggactcgattaatttcagggcagcatgtggctttgcatgatcctaaactagagcctggtgtcatatgcctcatcaatataagattgtccccaatacaggtggctcaagctgcttgtgaagatgcatgttctgtc

SEQ ID NO: 74571 - DNA, 358 bp, Zea mays
  Clone ID: MRT4577_168005C.1
tactttccatcctctttggcaacgctgcacagctaccaacacgcgtgggtagagttctaggtgccttgctgaagttggagctctatctgcattgcatttctccaattcgcactgacaccttcacctcttgcgtccatcctagagatgctgtgatcgtggacttcgtttggttctcggatcgtcctccccacacctcctcatccattcttctgcaatacttccgtccacgtccccacccttgcctcacgctgctctaatatgccactgtgatgtgaccgactgcatgaggacttccattaacgggagacatatcaagttgtttggtgataatggatccaaagcattccgctgaagtgtc

SEQ ID NO: 74572 - DNA, 341 bp, Zea mays
  Clone ID: MRT4577_168006C.1
attgagccaagccagttcccacagtcctaccaccagtcccaccgctgtatcaagagacggaagggtcgacatggctctcacgcaatctgaagcatggggcgccacggcagcctggataataatattgtcatctttagcgacaacctatgaggccaccattacctgcaatcagcaaaactccgacatcgcgccctgcctctcctactccctatgaacgaggttctgcccctccgtgtacaggtgaacctggtacaaaaacttaaagagtgccgtaagcaccaactacgtcagatgcccctgctagatactacttaagaactccgatacttccgtgagttgtc

SEQ ID NO: 74573 - DNA, 545 bp, Zea mays
  Clone ID: MRT4577_168007C.1
aacgcggtgatctaccataatattttcaggattcaaaaacacaccaggcgaaacgcactagcaacgacctaacagcaatgggtaccaagatattacgccctccttgcgatatttggccttttagagagcgcagcagatgcggtgattattgcacagggctgacttggtgctaaggccattattggccagagactgacaccagggaggtcagtggactgagaccatcacagccggcaggactataaggtgcggctagcacttgcggagagcgcctgacggcgaccagttggccgattgcagcggcaatccttaggacatgtaaccctacggaccatcggggcgcagcaacggcggcatttggctgcgcccgcgtgaaccacctaacggtggaggaaccctgacgactacttgcaacagcagctgcttggatcctacccacttgctctgacgaacgtagctgcctaccagcagcaacaacagctgggacaggttatgccgccgctaagaaaactagccatgggaaccctgccgtgtacctacagctg

SEQ ID NO: 74574 - DNA, 317 bp, Zea mays
  Clone ID: MRT4577_168008C.1
cccacgcgtacgtgcattgctttctcaccgtgaacacttacagcgcgcgcttcaaggtctagtactgattgcatgctcaggacgacaggatcatacggcagactcaaccactcctgtgatgtagaggctaatctcaaacagcctggtgaaccagaccgatcagatgaacgtggcccttagggactgtccattcatcagggaggccaaacccaatggatcattcactgtactagatgaagtctcgtaggataggtcatggaggatctgactatgctgccaatggtgcttaaaatgctgtcagcacatgaaagcccatt

SEQ ID NO: 74575 - DNA, 1182 bp, Zea mays
  unsure (1)..(1182): unsure at all n locations
  Clone ID: MRT4577_168009C.1
gcatggnacaccatgattgctggttattcacacatatgggagacacatgaatctcttgagctgttcgaggggatgaaggcgaccaattgcaagccaaatgaggttactctcgttggtgtgttgtctgcatgtgcacagctgggttctgatgaacttggggaacagatcgggagctacatcgagagtcagacactgccacttaccagctaccttggatctgctctgattgatatgtacaccaagtgcgggcatgttgccagagctcgcgatgtcttccaccggatggaacagaaggtggttattgcttggaactccatgatcagaggccttgcactgaacggctttgcagaagatgcaatcgccttgtacggggaaatggtaggagatggggttcagcccaacgagatcacctttctcgcgctgttgacagcgtgtacccatgctggcttggtagacaaaggcatggcattcttccaagagatgaagaagaacaagcagcatgcctctcctcaagttgagcactgcgcttgcatagtggacctcctctgcaagtctggcaggctgtgggaagcctacaagttcatctgcgacatggaagtcgagccaaacgcggtgatctggaccacgctgctcagcgcctgcagagcccacgcggacgtcgagcttgccaagctcgccgcgggcaagcttgtagtactggagcccaatagctcgtcgatctacgttctcctctccaacatctacgctgacgcagggctctggggcgatgtgagggagatcagagacctgatgaggagcaagaacttgcagaagctgtccgcctacagctggatcgagctagacggtgaggtgcacaggttcctggtacaggatacgtatcacccgaggtcagctgagatttacaacgtcgtcgatggcctgggcttgcagctggagaggactagtcctgatcatgagttaatttcagaggtttgctgattaaaattactgtcatgtcagttacaatactttctcgccaaatgtcatgcaatttgtgctctgtaggagtacagttgtagaagcataaaaggcgaaatgcgtcggatattcatgtttttttttctttcctagctattttatgtttcgtgtagtcgtgtatgattttatatttttattattccagtgcagtaaccacatgcattg

SEQ ID NO: 74576 - DNA, 378 bp, Zea mays
  unsure (1)..(378): unsure at all n locations
  Clone ID: MRT4577_16800C.1
ggagccaccaaccanaccagangcagcagccaacaaggcacacaggcaggcagcagcggagcgccccgggcgaccacgaagaggacgaacgccaggaacnaccgccncagcgcccccgagcgcaccaccngcccccagcaccagcgccagaacacgacggcaacgacgcgcagcnccacaagggcagcaacagccacagggccacgcncaagggcccggcgcggaccgagaacaagaacgcggacgagcccggccgagcagaccgcgaggcagaccaaggggcacgagngcaccaacacgacgggcgccaacaccagcaacggcaccgagcagcagnaccgggaccacccaaggaaccngaaccccagccaccacaac

SEQ ID NO: 74577 - DNA, 714 bp, Zea mays
  unsure (1)..(714): unsure at all n locations
  Clone ID: MRT4577_168010C.1
gggtaccctncggagccggccgggnaaaaatgattcactcccttaagccttagaaacagccgtcggccgtcactcagccgcccttctgcttccgcccgccgttcgccgagccgtcgaggccgagaccaagacgccgagtgaccacgcgcccacgcctatgccgctgtgccttccgccgctgccttccacacttccgcagttccgctccagccgcagcggcagcacgcgcacacgccgacgcgccgtggcgtcagccgctcagcgtccggaccggcggcggcaaaggcagcagccgcgccgggaggagcatccggctgggctagtcactagcgagtgtcgtccgcccggtccctctcccgcgcgacgcgccgagttccgcctgtcagcccgccgcccaccggactgtgtccctacgtccaccggattccaccctgctggacatggcagtcggcacacagtagatgcccacgcggccacgcctataattgtaagcaaaatcagaggtacgacagttacatattttatagcaatttattctcattttagacagtgttctatttctttatatatatcactaattgttctacaacttgattatttgtatgctaaatattatacggtctagagccatacctaanatttttttttggtcctccgccactgccaaccagagcctgtggttntaaaaatatataggggacggacatgcatggg

SEQ ID NO: 74578 - DNA, 530 bp, Zea mays
  unsure (1)..(530): unsure at all n locations
  Clone ID: MRT4577_168011C.1
ggccgcgggttttttttttttttttttggcagtttaaatttgaataagatgcgtataaatacctgttgttcagaatttaataggatcgatgcaaactgatcggccaaaaaacaattaactacagcacaactaaattcttgcttgcttgcctagaaagtttattaagaaactagagacggcatcgctttcaaaccctatgcaacccataaagaaccagctggcgacaattgggactgctactttgctccaaccagctggggggcccttttatttgttcacaacatgaaaacctgggcctcggaaggatgacgccatttctcttgacctggaaccacttgatggagtcctccttggccaccctgtgccgaatcccgacgcggcacttgcacctcctgcggcctgccacacggtancccgcacgctccagcacgacgtaaaagcccattcggggnatgcctgttgaaggatcgcccttgntcccaaggccgatgcgcctctggtttccgaacccaaagcccccggtgcccctg

SEQ ID NO: 74579 - DNA, 574 bp, Zea mays
  unsure (1)..(574): unsure at all n locations
  Clone ID: MRT4577_168012C.1
cctttttctttttctttttgtgctaaactattgtgtacctttatatcacaatgacaggggacacaggggatacggtattctattgctccatatcgtgaaatggcaataagcatgaacccgagggtgtagcattcttttgctgtggaccccttgctgcnnatcagaaaatatataacaataagaaatgatggataacatgatccctttgtgcaaacatatgctttggtccaaataggaaacatcccaagcatnctatgcacaaacttgctcttacaccagagaagtctggtaaatgatcctaccatggtttgacttaagacaattgcaaaatctagacatatcaagatcgatctacagattttggacgaaagagagacgcacgatccgaaaagaagagtgaaaggaattcgattgcaaaatcttggtctattactctattttaggcagaatgtctggaaggagagtagtccagagcatatatctttgcaacatcttcaatttagcccttgtcatcaaggacgacatcaatctgttcaacctggcgactagaaaaaaatgggtcagaaaatgggag

SEQ ID NO: 74580 - DNA, 422 bp, Zea mays
  Clone ID: MRT4577_168013C.1
tcgaggccggcctattaggcactgcacaaatgtacacctatacgtgtgcatcatcagaccttcaattctcgagaccataattcaaaatatgtccaaacggtgatgaatcagaacatcgttgtggtcagtaagattaactttgctatataatataaattttcttaaattttaacagtgttttgttgccaaactggattctgggtctggaagatcgagacgcacgtacgtgcacaagatggagcctataaataaacagtaagcatctcagcccatgcattgacctactgccagcaacgacgatgccacccacatcggtggacgccaccgtggccacgcctgcgctggagccgcccgcccgccgccgccccgcgcagctccccaacgcaagcgccggctacgtcgccgccacggcgcggggggcc

SEQ ID NO: 74581 - DNA, 640 bp, Zea mays
  Clone ID: MRT4577_168014C.1
tcaagcgggcgcccgggcaggtgctctttttttttttctttgttcattttgctttatttaatttttaattcttatcatcattttatcatcattggttaccaagatataaagcctgcttatgctacttgctggtaaatacatgtgttgctaacgcgacaatcctaccccaatgctcacaagcgtcctatgagcttcccttatttcccggataccttccatcaattataaataaagtttgttgaaaacccacctcttaaacctataggctaaaacaagcacacccagcaagcaacataccttgatggcccttggtgtttcaacaatcaccagccctatctttagacagcatgcattggtacaaacaatgatggcacaacagctgcaaaatgcttgtgctaactgagatcgagcaagtgggtctagaaaaaatttctactcactgtaagtaacaacattaatggccattcaatcaactgtttacaataaaccctggtggttattgggagcaacaactataaccaaaaaaccagctagctactgcctactctcagcaacaacaactaattgcatttaaccaattggccgaactgaaccccgctgcttatttgcaccagcgaatactactgacaaatagcgagct

SEQ ID NO: 74582 - DNA, 465 bp, Zea mays
  Clone ID: MRT4577_168015C.1
actatctattattaacacttcttggtactatgggttaacaacacggttttttttctgtttatacttggtcgtgcgggccccaccgtttagtttcttcagtttccgtttgtgttgccgcaggcgccgccactgttgccaccgtcgttggcgtcgccaccaccaccgttgccgccgccgtcaccaccgggggcgccgacaggggcgccgccgccggcggcatcacggccgcccggcaccgtcgtagccgacgtcttcaccgccaccaccgaacccggcgccgtcgtcgtctccactgacgtcgcggcactgggcctcgatgacggtgatgttgcggtcgaacagggtcttttcgttcatgccctcgatggggttccccctggacttctccgcggggaccgtgacgaagcccaagtctccgtacctgtgggtctcccgaacgtgggtgatcttggactcaaggacctc

SEQ ID NO: 74583 - DNA, 800 bp, Zea mays
  Clone ID: MRT4577_168016C.1
gatgtgatgtcgtaagtaaaatgatcgttctcacagtgagctacacccatcggaggatgatgacttacctgctcagcaataaatgtaataccctggtggttaaccatctcatacgtctctccaaggatgggattgaaaggcttccacgtacggtggtaggctaggtaggctgacaaagcccatgtagaagcatataccatccgcatgtgtggatcctcacattcatctgctttgtctaacaggtcacaatattccatcaactctgccattttctgaagcattgacatcggctcaaggatgatgactggaagtgtaacaagtgacgttacatctgatcctatgtacttgttcatcatcttccagtaactgtcgcgatcctcctgtttccatcgccccttcatagcctctgcttccgcatcgtctgtgcctccatctggattgataacttcaagcccttcatagccaaccaacccgttgaccgatttgtgcacggcagtgccccagctgcgcacgcccgcggcgatcgaggagaagaagcctccgccaccgcccgacgacgcggccaggtcctggtccttggaccccatcgacggcgatctgcgcggtcggagggaagctccggcgcagaggagtcggggaggggggtatgctagggtttgggacggccgcacgcggagagggcgcacgctaacccatgcctagaggaggaggttgtagaggagcgctgctgaggagagagcggcagcgatggcgatggcgacgtcgccgtgtgggagcaggaatactagaacgagacggga

SEQ ID NO: 74584 - DNA, 216 bp, Zea mays
  Clone ID: MRT4577_168017C.1
atggtggtggcccccggggtgaagtaccttagccaagaatacgaccccatgttaacgtgggctgccagcacctaccgctccccctcttgcccatctttcagaggtggatgggaccacggctggcggcgtcgaggcgaaccggggcgttgccgaccacaggaaagtggaagagcgggcgtccaaggtcacgaggaagtcttcaccggcggcggatag

SEQ ID NO: 74585 - DNA, 278 bp, Zea mays
  unsure (1)..(278): unsure at all n locations
  Clone ID: MRT4577_168018C.1
gctcacctcggcgatggcatccgcggcggccgnggagtgggaggcggcggcgcggaaagggctggtggcgcgcaagccctgcttcgggctacctaccggctggccaacctggctccccgggctcctctaccttcgcatggggcaaggtcccttcgacattcacgtcgacaccttctttcccgatgccgaacacataccatatggtgaaattggggattgggtgggtttcaacaacgagaaaaggggcgtgaatgagtatctcaagggtgagaaaaatg

SEQ ID NO: 74586 - DNA, 474 bp, Zea mays
  Clone ID: MRT4577_168019C.1
caagatggctgatgttccattgctcgagggcgcagacgcacgcaacgggggccggggtgggagtgaccctgggggaccgaagagacagaacggaggctgccactatatgaataacaaagggcggaggggcgctggacacagggagcaagagaatcgccttccccaaaaggagggcaagaagcccagcaagcccgagccttgaggaccagacggaactgacaagacaaggcaggagccgcaatcagcaaaaccagacggccgcacaggcgcaaactgctcaaaggccgcaaacgcgtgccaaggagatcatatcgacgctgttgtcgcggaggggaacggagcagcatttagcggatcataagcgcacaccaggaaccggcggcagaaacagaagaccggaagctcgctggaggaagcagaaaagaggctcagcaccgaccaaaggcagcaaaaagaagcctgcagaaggagcgc

SEQ ID NO: 74587 - DNA, 435 bp, Zea mays
  Clone ID: MRT4577_16801C.1
ttttatttttttttttttttttttttttttttgtttttttggggatttttttcgtttttttttctccaccttatatctttttagggcccaacaccaaacacttctggagaaaaaaggcccgggaggcaaacccaaatgggcatcatttttagcaaccattggccctgcttggcatgcacaagggacaagaaaaaggtttgttcactcaaactaacaccgattgatttacaacacaacactggctacaaaaaactttaaaacaccagctacgtgaaccagacctgcccacaaacgccctggcttctaaacccgaccaaaaaaggggccaccaatgccccaggcaaagcaagaaccagaatcgccatgaggccaccccaaattaaccccggaaccatcccatgggcaacgggggttaaggccaaaaccctggagcct

SEQ ID NO: 74588 - DNA, 569 bp, Zea mays
  Clone ID: MRT4577_168020C.1
ccggccgggcgctgccgttctcaaccgccgattcattaacaacatgttcactggtacctctcaggttgactgtgccttgcctctatcattgactccaccactggtgggttcgacgatggtatctcccaggatgcccacacccgcagaactgctctccttgctgtcacccttgccacgaactacatgatttgctgctgcaacaagatggatgcaaccactccaaaatactccaaggaacgttatgatgagattgagaaggaagtctcatcctacctcaagaaagctggacacaaccgctcataagattcgccttcgatcacatttctgactttgacggcgacaacatgattgacaggaccaccaaccttgactgctacaaaggtccaaccctgcttgaggctcttgaccagatcaccgagcccaagacgtcttcagacaaacccctgcgtctgcccctccatgatgcgtacaagattgagggtattggaactgtacacgatgggcgtgtgaagactgatgtcatcaagcctggtatgatagacacctttgctccaactggcctgactact

SEQ ID NO: 74589 - DNA, 316 bp, Zea mays
  Clone ID: MRT4577_168021C.1
cccactctttcgattcaattcataattacttacacgaaaaccacaacttgttcagagggagcgcgcaaactgagatgctaaacggccgttagcctttcttctgatatcaaacttcctatgttggctgtgtacatgcttatgaaccaaactatgttaaaaagcaagcttgtttttgatacgatactgtagtttatttatcataattagagcgcctgagagtgtcttggtcttcttttaaagaacatgccttcacaacatgagttggagaaaatattttctctcgctagacagttttttgatatatatatgtgggacg

SEQ ID NO: 74590 - DNA, 2378 bp, Zea mays
  Clone ID: MRT4577_168022C.1
ccggccggaaaaaaaaaaaaaaaaaaaaaaaaaaaaaaaaaaaaaaaaaaaaaaatccgtgcctcaatccccttccttcgcgcagcacccttccatccatggctcgcttccagaaatccccctacctacggcgcagcgtcgcagtcctgaatccacccccaaaatcactacccgctctgcggcgatggaagggaatcaaaacgcatgcttcccccttccatcctcggcgttgcgcggattgcatggccatcgtttcgcgcccccaatccgtcgatgcaaggaacgcatgcttcccccttccatcctcgacgctgcgtgaattgcagattgcggattgcatggtcatcatttcgccccagttcattgcccgcatcagatggaagggcgccccgatctgcctcacctccatcaatgaggtgtctgcctttcttgcatggagacgccaaagagaaggaaccagtcactaagtcggcctctgtacggtccatgaacacacatcaacggagcgtgatgtccgctctggttcagacttcacctccttgaatgtttccgacatgagcgccgagtcgataaggaggacgcagtaccccagcttcactgaccgcccgtctaacctgagggtgttctcctttgctgaattgaagagtgccacccgcaacttccgccggacgcgtgggcgggggcgtgggaaaaaatccaccaatttgttaatatacctctccccgggtgaagcgaagatgggcagccatggctttggatgtatattgcttgatgtggtcagacatgccttttgagttcttgtatactatggcagcagagctggaggagcttatgtcatgtgcagttgccgtatgcgccaatgctactgtgtttgtaaaggtctcagctgaggtgctgcggctatcacgggaaaaaaaaaaaagttaaaaaaaaaaaaaaaaaaaactaactaaaaaaaaaaaaaaaaaaaaaaaatacgcgtccggtgcaatcaccaggaagtagctcttccagtactggagcaattgctggtggagtggctgctggtgcagccttgctatttgctattcctgcaattagttttgcctattggcggcgcaggaaaccacaagaacatttctttgatgtacctgccgaggaagatccagaggtgcatcttggccagcttaaaagattttcactacgagaattacaagttgcaacagatggcttcagcaataagaacattcttggaagaggtggatttggcaaagtctacaaaggacggctggcagatggatctttagttgctgttaagagactaaaggaggagcgcacgcctggtggagaattacagtttcaaacagaagttgagatgattagtatggctgtacacagaaatctattgcgtcttcgtggattctgtatgacaccaacagaaaggttgcttgtgtatccatacatggctaatggaagtgttgcgtcacgtttaagagaccgaccaccagctgaacctccgctagattggcaaacaagacaaaggattgcattgggttctgctaggggcctgtcttatttacatgatcattgtgatccaaagattattcatcgtgatgtcaaagctgcaaatattttgttagatgaagacttcgaagctgtggtgggggatttcggtttggccaaactaatggattacaaggatacccatgtaactactgctgttcgaggaacaattgggcacattgcacctgaatacctttcaacaggaaaatcctctgagaaaactgatgtatttggctatggaattactcttttagagcttattacaggacaacgtgccttcgatctagctcgtcttgctaatgatgatgatgtcatgcttcttgactgggtcaaggggttgctcaaggagaagaaactggagagtctggtcgacgaagatctagaccacaactacatcgatgtcgaggtggaatctctgatccaggtggcgctcctctgcacgcagagcaaccccatggaacgtcctaagatgtcggaggttgtgaggatgcttgaaggcgatggtctcgccgagaggtgggaggagtggcagaaggtagaagtggtacggcagaggttgagctaggccctcatcgaacctcggaatggattctcgactccaccgacaacctccacgctgaacagctgtcagggccgaggtgaaggcaagcttgagatcagactcccactaattctggtacggaggagtattttgcaagggcaatagagatgtgtatcaatcatcctagtaaaaaaatccaccaatttgttaatataccagtcagtgggtgaggcgaagatgggcagccatggctttggatgtatattgcttgatgtggacagccatgcctttttga

SEQ ID NO: 74591 - DNA, 165 bp, Zea mays
  Clone ID: MRT4577_168023C.1
cggtcgcttgggctcgccgtcgagatgtgcacctctggagtatactttttcaattaggtccttttcccttgcaagattaagcttcacattcagccatgggtaaggagaagtcccacatcatccggtgtgctccattaacactaatacttttgtaagatcaaacac

SEQ ID NO: 74592 - DNA, 139 bp, Zea mays
  Clone ID: MRT4577_168024C.1
gtcgtctcgtgtactgacccctctgtcctgcgcttcggcgcactcatgctaatagctgccatccctcgtgctgactactaggtatcctgctcacaattccagatctctcatccgtcccgaacgatatatcgtcacacgt

SEQ ID NO: 74593 - DNA, 255 bp, Zea mays
  Clone ID: MRT4577_168025C.1
cccacgcgtccgcatttctatgtcaaaactatagttatcataatgaactcaagtgttaaggtatatattagactgtcagtttgtattttttgataggttgcaaactgtgtgcaggaccatcttcttttgtgttgtaacaactatatattcttcacgggtatctttcagttataacaactaatcactgcttacatatggcaaagacagaatagaagatgggaacaggtcaatggtacaaagatttagatctcaact

SEQ ID NO: 74594 - DNA, 251 bp, Zea mays
  Clone ID: MRT4577_168026C.1
tgcagattatgcgcgatatataccgactgtaaactttctatggggcatactggtagcttccactcagcaaaaaaaaagtctaccagcaccttcgcagaaccaggggttttctttatccaacaagatgtgatctcatgggggtacgaggattgaaaagcatttgcctttttagatgctactgaagcatgtgcgcttgtgcctgccaatgaggatgattcctccagcacgctccacaagaaaggtgcaccctc

SEQ ID NO: 74595 - DNA, 259 bp, Zea mays
  Clone ID: MRT4577_168027C.1
aacctcttccgccgcttcaacgcaggcgagctcggctccggtcacccgtcgatccacgcaaccatgtctgcagcagcggcaagtgaaaccgcgggggaagacgttccccctggacccaatgtccgtggaggagagtttgtccttggtgttgctcacatctttgcatccttcaatgacaccttcattcatgtcactgatttgtctgggagggaaactttgggtcggatcactggtggcatgaaggttaaggctgatcgtg

SEQ ID NO: 74596 - DNA, 627 bp, Zea mays
  Clone ID: MRT4577_168028C.1
cgagttctcccccgcgccggcgccggcgccggcggcgacaccacgggccgcctcctggatcggcggcacctgcacctgggccggcgggccgctactcgacgacatgttcctgcccgagctcctcggggacgtcagcgagttcccgcctggcgacttcttcggcaccggcgggttggccccgctgctgcaggacagggcggcggcggcgtccctccaggagctctccgcgttctactttcccaacgcgcaggccgagatgtgggctgcagcggatcatcacgttcatgccaataacaagcctgcggccggactctgccacagcctgacatgactgctctcgatcatgcgcagagccgcagagggctagcgtgtctctctcttgctagtcgttcttggctgatctctccctgtccatctgtatgatcgctctctaattctctatgcgaggtcatcacatgtacattactattatcttatcactctccatatgcatggtctgtgactagcaccataccatagagaagttattaggttcggatcgccattgcttcgttcgtatggcttatgtctgcaccttcacagaaaaagtgtgggacaagataataaactgggccaacctctcattct

SEQ ID NO: 74597 - DNA, 342 bp, Zea mays
  Clone ID: MRT4577_168029C.1
ggagtcgccatcgtcgtcgtcgttctggcggagaacgcctaggtccagatctcagggaacgccacgaggatggctacattgtggcgcggcgcgatcagcgcgaggaagtggcggaagagttatgcattgccacacatacacaaacagcaaaccaacaccaccatcacattcctaataataataacctacaacaacatctttacacgtgtttttccccttttccgtcccttctttatgttacaaaggccaccaccgcccggtgacgacggtgacgaccaccaacaatgcagcttccttagcttctgaacccaaagttggaccaccttcttccgggtttctttt

SEQ ID NO: 74598 - DNA, 269 bp, Zea mays
  Clone ID: MRT4577_16802C.1
ggcaagacccgcaagatttcctgttccattaaaatcagtttaggcaaaccacatttccacgggggccgacccccccttgttagaattttgggggggggaaaaaaaaaaccggttttttttggttttggggcccccaccacaaaaacacctgggtgggttttgggcaaacaccacccttcattttttgggacccgccaaacattttaacaaaagggagcagcgggctttttttgctccccaagaaaacatcctcatcctttttctttttt

SEQ ID NO: 74599 - DNA, 328 bp, Zea mays
  Clone ID: MRT4577_168030C.1
ggcttcctcggggattggtgccggtcggtggactgctccgacgcgggctcgggtgtgtgctggtggtgggtttgcttcattgtcgtgcattgccgtagggaaggagccgttatcaacactgcgagccagaattaacatgaacggcagctatactcttacacgaacatcgacacacacctacagtgctaatgccaacggcggggaaacgctgttcaagtttctgagcagtgaccgtgatccgcgcggcagcagtaacactggccttgcgtacggtttggtcgtcccaaccttcaagccgatactaatgcatcgagctatgattagcaat

SEQ ID NO: 74600 - DNA, 356 bp, Zea mays
  unsure (1)..(356): unsure at all n locations
  Clone ID: MRT4577_168031C.1
gtcacgacatggtgttcgccaaggcctctccggcggggctggccgtgaaggcgggggggtggtccgaggcaactcanaggttcctcaagcgctccgccgacgccggcaacctcgaggcctgctacattctcggcatgatccgattctactgcttgggcagccgcagcggcggcgcggcgctgctggcgaaggcggccgtcggcgggcacgcggcggcgctctactcgctggccgtcatccagttcaacggcagcggcggcgccaagtcggaccgcgacctccgcgcgggcgcggctctgtgcgcgcgcgcggccgctctggccacgtggacgcgctccgngagctcgggcactgcc

SEQ ID NO: 74601 - DNA, 351 bp, Zea mays
  Clone ID: MRT4577_168032C.1
gcacagacgacactcggacacacatcggctgtgcagccgtcaactcaccccaagtttatgtcggccaatggatcactgacgtaatgatgggatccgccagcatgtggaccctctagatcgcctcccccgtggcaccacatcgcatgttcggcaccaccgtgatagacgggcagtaactgacgctcacagtctcgtcgcaagtcgtcaccaactctgagtccgtttagggtgactgctgcatcggaaccgtcaggcagttcatcttcaccacagtcatccggttcaacatcacgaatgagcgtctcgactaccccgactcggacacgtgcgagtgccagaacacgctcatcg

SEQ ID NO: 74602 - DNA, 1434 bp, Zea mays
  Clone ID: MRT4577_168033C.1
ttagctatcgtcaccggagtcggagtctccggtgaaaacatccttcaggaccccctcaggcgactgatacccgaggtcccgttctcctgcggccacctcgccgctgtcgactctttccttgccaggccgacgacggggtggggagccatccctggaggtctgctcgcgtcgttcgctgacacgctttgcgagtttgatgatctcacgacactccatggcgctatggtgactgttggggtgtacagggcatgagtcgttgttacccctctgcggccgtgggcgcttgttacgctcgctccggcccccagtcgcagctgcgacgaccagagcagcagacgacgacttctcatggtcgcggttctttttcttcttctttttgttgtcctgagcgacggcacccgagccacccgtctgggcaaccccggtcttggtgaagcgggagatgaacgtccgaagagtttccccgggctcctgcctcactgcgtggaggtgggcctccatgccatgctgctgataagcgctggcgaagttcgctatgaacctcgcgcagagatcttcccaggagtagatcgacctcggggtaaggttcatgagccaagtctggaccggcccagacaaggcaacatggaagtatgttgccattacagcagtgtctccacccgctgccgtaatggcggtgacgtacacctgcaagaattccgatgggtttgacgtatcgtcgtacttttccagcaggtgcggccggaacttggatggccaagttgtcgcgcggagatgatccaccagcgcggcgcagcctacgccggccaaggagacacccgcctggattcgggcacctgttggagtctgcggtgcaaccgcagcgaagtcgtagtcgagattgcgaccctcgacgttctgtcggcgctcacgcaccctctctagagagatgcggacatcttcgcccgcacgcctgcggttgagttctgtccgcaggtcattagacctctccagagagactggagcgtcctctcccacacgccggcggttgagctccacccgcaggtcctcagtcggtgtggccctcaccgagggggagcgcactaacgctgacgcctcgtgtttacgccgggatgactgaggccggggcctggttgagccagagtgcgccatgccgagtaggcggtcgacgtcgtcgcgccactgcttcatggcccctggcgaggccatggagctaggagggtggcgcagcaattctctggccgcagacagcgccccaggcgcagccttagacgccctggatgtttgcgcgggagcgtgctgccgcgcagagtgcacaacagcgactgcaccaggagtagggagattggtggcccgtggtgtggaagaggcagacgcctcttccaccatgaagtcctcgggcatgaaatcatggtgctcgacaatgtgaaccat

SEQ ID NO: 74603 - DNA, 111 bp, Zea mays
  Clone ID: MRT4577_168034C.1
cctagttctagatcacgagcggtcgactattgatacgccaggctctgaggaaagtcactatcgacaaatctgatacgcattgaggtacagatgtgcacttagtttgcgaag

SEQ ID NO: 74604 - DNA, 755 bp, Zea mays
  Clone ID: MRT4577_168035C.1
gggctcaccggtcatcggctcgagatcgatggattaggtgcaaaagtggatcgcgggccgacgccagtacagttgtcagctcggcccaccttctcggcccgacgccctgattccgctcctcttgctctcgaggccggccgggactgccggcggcggctgaaggcggcgcggtatcagcttggtgatttgtgagcgatggcgccgccggggtcgcggcggtgggcttacgtgcgcgtgatggccggcaccatcctcggtggcgtacttggattctacgtcatgcaccgcgtcgagacctcgtacaaggcgagaatggaggagaggctgcggagatacgaggcgcatctgcttgccaaagccaaggagtcgcagcagttgcaggacgaggcacagcgggaggataaagcccagttcctgcccgactcgtgacaccgacattcttcccctcttgcgcctgctcttttccaagctgttagaataacatagggcactggggcaaaggagtccgtccactcgtttttttcagatgtagagacataagatcgacatgtactttttgcttgttgctgtctttttttttttttggtatcaagaaaaatgcaccattcgagcgcaaggttggggtcaatgtatgaacgccaaatatgaatatactttgatgtctatccgcacgtactctgctttgcaatctattggttctcatcaacattatccattcagtgaaattccaaaaaaaaaaaaaaaaaaggccccta

SEQ ID NO: 74605 - DNA, 336 bp, Zea mays
  Clone ID: MRT4577_168036C.1
ctcttttttttttttttactttaattggatttgggggggttttttattttatttctggcaaacaaaaacttgtcgaatagatgacagaaaagtctaataacatgcgcggaaaaatggagagcccaaactatggatcaatctttcatacgatgggttcgtgtctacctaaccgccagggctcatgataccagatccgggcaccggaagaaacacgtactgctggaattgggacaccgtcctcaaaggttcactaaacagtctctgggggacacccaagttaggcagagtccgcaggctttggctcggcaggcttctagaccagcgtttcagtgccca

SEQ ID NO: 74606 - DNA, 372 bp, Zea mays
  Clone ID: MRT4577_168037C.1
cccacgcatcctcagacgcgtgcgttgactctaactaccaacatacatagcacaatagaagaccaactattgcacccacaatatcttgcttacttatgctccttgttattcccgcaagtgttgctaccacaaccatttccccacacttctcacaacctcctatacattctcttattgccccatacctttcaccatacctgtctccaatgtctgataacccaattgaacaaccctacatgatacatcacgcaaatcaaacaaccatcttaccattatcaccctcattactacaacaaccgccacacctattacaacacttacctctggaccatcttgtggcacataacatgacggcacaccaactacaacaac

SEQ ID NO: 74607 - DNA, 719 bp, Zea mays
  Clone ID: MRT4577_168038C.1
aaatacccctaccgaagcgcaaaaagaaactcgaagcacaggaacacgaagcaagctgccccccccccccctcctcacctccgactcactcacgatccgggatcaggatggccggatcgacggaactccctaccaagggcggcttcagcttcgacctgtgccgcaggaacgccatgctggagaagaatggcctcaagatgcccgggttcaggaagaccgggactaccatcgtcggcctcgtgtttgcggatggagttgttcttggcgcagacacaagggcaaccgagggtcctatagttgctgataagaactgcgagaaaattcattttatggcaccaaacatatattgctgtggtgctggaactgctgctgacacagaggctgtgacagatatggtcagctcccagctacaacttcaccgttatgctactagccgtgagtcaagagttgtaaccgctcttacactactgaagacacacctttttaactaccaaggtcatgtcagtgctgctcttgttcttggcggagtagatgtcactggaccacatctacacactgtttatccgcatggctccaccgatactcttccttttgccacgatgggttctggatcccttgctgcaatgtcagtgtttgagtcgaagtacagagaaggcctcacaagggaggagggaattgcacttgtagccgaggcaatccgtgctggtatcttcaatgac

SEQ ID NO: 74608 - DNA, 158 bp, Zea mays
  unsure (1)..(158): unsure at all n locations
  Clone ID: MRT4577_168039C.1
cttctggacaaaccaaacactatccgaacgatgaatccacncgagtagccagccgtcgtctccttaacccgcagccgtgcacgaatgtacgtgtgcgcatccgtctccatggcctccacgttttcaccgctacagctcgcggcggccggcgtgccgaa

SEQ ID NO: 74609 - DNA, 258 bp, Zea mays
  Clone ID: MRT4577_16803C.1
ttagtcctttttcgaggaagcgaacgcacagtcggagaagcgtaatactgagtgtggtgcgccatataatatttaatgacacgacatcgtggcagttagtgctgtcgataactgctaagtcaaataccctttaaagagagaccaccatgataggagttgactgaagatatccaatattcggaacatatcagaactgaccagatgcagaggcaggaaattttgaggcgggctacacaagagtgcaccgtgcactgcaat

SEQ ID NO: 74610 - DNA, 705 bp, Zea mays
  unsure (1)..(705): unsure at all n locations
  Clone ID: MRT4577_168040C.1
tttttttttttttttttttttttgaaccacattaagntccaagcatcaatcaattaacccaaaagtttaagctgatgagaggagatgaacaattcatctatattatactctacaccaatgagaaaccgagccgacgaattgagtatactgatgcgatatatgaagacgctaagcagccttcatattcattcctttggtcttattatggtatggcttgtttttgccagcatgcatgcatatgcgccagcccagcttcacgtacatggtggacagtactagtggtccttgctgcagcatcgacgatcgatcgagaggagccattgcagtcggcggtgtcgctagctgccgagctcatcatcatcggcggcagggtagtgcagcagggtctgcgtgcacaacagccttggcgccgccaaggaacctctccatggcgtcgatgacgtgccgtccatgcgcgtacctcgccaggctcgccgcgttgctacttgccacctccagcagcaacctcacctgccgctcctccgccgtcaccaccatcttctggatcacaaagttcgcgtacgggttgatcatcatgtccacgagatggtccaagtgctgctgctggccgccgccgccgccggcgacgatctcgtcggcgatgagccggcggtcctcctggctcccgaacgccaggcacttctccaccacgttggaggcgaactt

SEQ ID NO: 74611 - DNA, 1667 bp, Zea mays
  Clone ID: MRT4577_168041C.1
acttaatagttaatactttcacaatataatactaaatataatactacatctgttctcaaatatttatcatctaatgggtaatttttatactaaaacacaataaataaaaaagaacggagttattatattactttcttttcctatgagttgatatctttttatatattgcctgcgaaaatgattttttgatcaagcatcttcgtcatctccaactttgttgccggttcgccggcggtcagagccccagcggccggctagtgcttggtagtccacgtccctgaggcgcagcagcaggtacaaaacaatccccgagatgaaccccagcgcggcgctcgagcccgtgagcgagactccggcgcagataagcatgacgaaggactcctccttagtacccatgtcgcgcgacgccatggcaagctcgatcccggagaagagcagcatgacgcccagtatcccgatcgggaactggccgaggatcgtcacgaacgagtttccgaacacaagccccagcgccagcttgccgatggccaggaacaccacggacgcgccgctccggccgccgaaccggtactgccccgccaatccgcccgcgccgtggcagcacggcatggcgccgaaccagcagccgacgaagttcatgaggccgacgctcaccgacacccgcgccggggagagctcggcccgttcggggaacagatccgacgagagcttgcacaccgcgatcaccgagttgagcacggacagcgggagctgcggcacggcaccttcccagaacccgatcttgaaatcgtcccaggtgatcccgacgagccgtagaggcgacggcccgaagcgaaggccctgcagaatcgatgggtcgcgcacgaagcagagcaccagcccgagcgcgaacacgatgagcgccgccgggacgcggctgcaggagcggcggcgacgggccatgccgtcgctggagacgtcctcgtcgtcgccggagccggtggcgaggatgatgaagagcagcgcggcgagggcgaggaccaggccgtcgaggccgaggagcgggcgcgccacggcggtggaggcagaggaggagcgcgagaagtcctggacgtagcggacgtacttgacggcggtgaaggcgaaggagagcccctgcgagagctggacgccgcgcacgacggggagcgggaggaggcggtagatgcacgtcatgaggcccgtggcgccgaggaagagcaggacggcggcgaccgcgagccccgcggacatgatctgcgggacggtgaggtgcgcggaggagagcgcgacggcggcgatcgacttcatgggctgcaccggcatggggatgccgaagagcaggcccgtggcgaagttgtagagggccgtgaagatgagcgtggtgccgaggtccaggtgggacgcgagcgacagcgcgagcacgatagggatgtaggtgcccaggtcgcccacggcgccgcccagctcggaccagacggacgtcttcaggcggatgcttgaggggaggaacccgaggcgccggccgctgccctcgccggggaggagcgggtctgcggcggcggacgccattcaactccccgaagcatttcgtcgcttgctacgcccttcctcgtctctgggtgcctaggtatccaccgcacgcctttcctcttttatttcccggccgg

SEQ ID NO: 74612 - DNA, 467 bp, Zea mays
  Clone ID: MRT4577_168042C.1
gggagccaaaaaggggggtgaaaaaaaaaaaacctgaacaaaagggacgggcccagggcacttttttgaaggaggaaccctaacagcaaattatctaggggtaaccatctctggtaaaaaaaaaaaaaccttttacaaaaacagcaccaaattcgccctggaacctggaacaacaaccggacaaacgtttgtttcattgcccaaacaaccagagaggccgaaatcattttcaggggcaaaaatgacggggcattggttggacttggaatcggaattggagccttcggaatcggaaaacgaacccactttggtagggtcttcaccaccattaacaccagtttaagctcgcttcttttttttacgcgggttttttttttgccggttaaggggcttttgggggggccgctcccaagggggtttaaaccccccccccctccggagggggaactcagctattttttttcttt

SEQ ID NO: 74613 - DNA, 449 bp, Zea mays
  Clone ID: MRT4577_168043C.1
aattcggcacgaggccaaagccctcccccccgttccagccatcgctcactaccgcgctccgatcactcggccgcctcgcccttctcgttcggctctggcgggagctccagcggtagcgtaggtgtccggtcggttgatgcattcgtcgcgtatctgccgcatgacgaggcggccgcggcgggtctcggcggcctcgatgcacacgagtcgcaggtcgtcgtcgaccacctcaacgacgcacttgccgcgctccttcggaccaagcctcgcgagctctggctccgggtggcacagaacacttctttgcatgaactccttgatagttatctactattcaccgcacaggtggtatgatttgccacaccgaggcccaaagggaactgtaccacgtttggttgctggggagcttgagctttgccgtggcgtatttatggtcctttatcgcatat

SEQ ID NO: 74614 - DNA, 224 bp, Zea mays
  Clone ID: MRT4577_168044C.1
tgtgcggagggggggttttcggagattggtcggcgccaaccatcagtcaagcccactacatggacctatgcttgctaaccatgctcaacactgtaccaccaacggtgtgttgtcttcataccactagctgcattgtcctccattgaaccttgggtgggggcggaaccttcatgcgtatttggaggtgcggcctaccccctacaatttgctggattcagcctact

SEQ ID NO: 74615 - DNA, 285 bp, Zea mays
  Clone ID: MRT4577_168045C.1
acccctgcgcaagctcggaattcgtctcgtgcccattcgacaaccacacttttcgtctaccccccttcacatctatcctcggggggggttacaaaaatttgcaggggggagacacaacccattatacaatgacactactatatccttactatcagcaaagtgcagccacatttattgcaacacagtcctacagtgccgttgcttctatatccattaagccccaaactcatactggcctattcaactaataatacacattaactgctcttacacacacaggcaacc

SEQ ID NO: 74616 - DNA, 624 bp, Zea mays
  Clone ID: MRT4577_168046C.1
aggctggtctcagggcaccgcgacgttctacggcgacgccgacggctccggcacgatgggtggcgcctgcgggtaccggcaacctgtaccaacgcgggctaccggcatcaacaacgccggcgctgagccagaccctggtcaacgacggcgcgtcgtgcgggcagtgctacctcatcacctgcgacgcgtcacggcccggcgggcagtactgcaggcccggcagcaactccgtcacggtgtccgccaccaacctgtgcccgcccaactacgtggtccccggcggcgggtggtgcggatttggctttttccccttgttttttttgccgcgcgcgtggggaagaggaggattaaatcgaagattaagacgaggcctctctccgggtatatttaaggaaggagaaggctttgcgcgcgtttttttaaggctgctaatctagcacccgcctaaacgtttcccttttttttggtggatttcggattggatcggaccaaatttcgatccagctcctagtgctaataaaatagttggacttgaaaaaaatgaataatggtaatttattgtttttttgggcccttaaaaaaaaaaaaaaccccaaaaaaaaaaaaaaaaaaaaaaaaattatt

SEQ ID NO: 74617 - DNA, 188 bp, Zea mays
  unsure (1)..(188): unsure at all n locations
  Clone ID: MRT4577_168047C.1
ctgcagtaccggtccttaattcctctttcgaccggcgcgtcctcacatagtttcttccttccatgcaaccataaagcaagttgcccctcctcgcatactaataagagagcagaggattattggtcgtacgaancatacctccctgaactccactggaggcaatgcccccctcaagcatctcttcacca

SEQ ID NO: 74618 - DNA, 459 bp, Zea mays
  Clone ID: MRT4577_168048C.1
cccatcccaactgccacctgctgcttccggctgccacatgctgccgccaagcggagagagatttggagtagaggtgtatatactctatatatggcgttctctctcttccatgcatttagagtagccgttgaggtgatccagtgcagtgggtttttactctatacgtagcgctatccagatagcgtattgtttagagttgcccactgcgggcagccttatcaaaaagctacagtgttatattatattacagacactatagaatttttttcagtaacgagttctgctctgctaacaagatcgatcctacacaaggcggtactgtcgacgtacgtacacatctttggttctaccttgcgcagctgcagatcaatgcatcaatccgactcctgcaggccagcgagcaccgacagagccaacgaacagcccggcggctcccgccgcgagcacccgcgcgacgac

SEQ ID NO: 74619 - DNA, 816 bp, Zea mays
  Clone ID: MRT4577_168049C.1
ccggccgggcctgaggatctcaggcttaagctcgacgacgaggagccagggaacaaggacgttggtgggagtacggcgcatgcggcgtcctcgggctccatcgtcgacgtgttccggtcgccgaccacgcgggtgcggcttgtgctctccgtgcttatcaacctcctcagctcggtggtgtactacggcctcagcctcaacgtggtcaacctcaagaccaacctctacgtcaccgtcgtcgtcaactcgctcgccgagatgcccgcctacctgctcacggcgctcctcctcgatcatttcgggcggaagcctctcgccatcggcaccatgctgctcagcggcgtcttctgcaccgccgggagtctcgtacccggcgcagggatcatgagggtggcgtgcggcgtggtgggcatcttcggcatggcggcaacgtacaacctgctgttcatctacacggcggagctgttccctacggtggtgcggaacgcggcgctggggtgcacggcgcatgcggcgcagatgggggccatcgtggcgccgctggtggtgatgctcggggagaggctgccgttcgcggtgttcggcgcctcgggcatcgtcggcggcctgcttgtcttgtacctgccggagacgatgaacaagcccctgtacgacaccatggcgggtctggaggaaggggagaagaacgttgtcaagtgagaggatcggtctagccgtccaggtgaattgcacaaagcgctgcgtcgtcggaatgtgcatgtccacagcccactgttactggatactgatcttgtgaataatacgtttcgtttcgat

SEQ ID NO: 74620 - DNA, 336 bp, Zea mays
  Clone ID: MRT4577_16804C.1
ggattaggagccagacctggcggcgccgggcgtacaagaaacgctgcctaagaaaatccctacggcggtgggcgtcttgaccgcagcggctcaagcttattcttttcgtttacaccacactaggatgaatgttggcattgacaggggagagctggcaagaatacactactcaaagatgaagaaaacccacagtggacaatgatttgagaggcggcattcatgctgtggttgaggtaaacgaaggacttcttattttttaagattactagtgtacaatgatgagggacattgctgccactctatactgctgtaagtgcgacaacaaggtttctagag

SEQ ID NO: 74621 - DNA, 304 bp, Zea mays
  Clone ID: MRT4577_168050C.1
gccattagggaaggagacgtttatttttgaattaccaaccccattactttacaaactaatactacacttacaacatcaatactgtattctgcgataaatgtgagttttaccactcaaattggccaattcaccatcgccaatcagagtgcttccagacaccgaggaatcacggacgaagacccgggtttgatgagccccgccccctaccaaaatatccatatcctataataacataatagccacgactaccagcgccgccacagtgtcccctacctcggatgcccattggtggaagccttgctga

SEQ ID NO: 74622 - DNA, 325 bp, Zea mays
  Clone ID: MRT4577_168051C.1
gtttccaaacttgaggctcctagcggacggaaacccgcgggaaccgtacggatggggctcgtattgcattctgggcgctgaaaacaaaaatgccttcccggcacttattgctgcagaatacagtgacgggcaaagtatgagctagaccaaggattttgagatgggtgtttccaacaacacccctgattttctacagatgaacccccttgggaaggatcctgttctgcagactcctgatggtcctgcttttgatagcaatgctatcgagcgctatgttgctcgcttgaaggatgacaaccctcttttctggacttcccgaattgaa

SEQ ID NO: 74623 - DNA, 839 bp, Zea mays
  Clone ID: MRT4577_168052C.1
cgaggccggccgggaagtgtatcttttccagaattgcaggcccttgaattctctcaccgaccttcccttcccttcccttcaggaatggcatctatactactgcctataaagagagagcccatcaatcatcagcacgtctctgtccctctcgtagcctcgctctccctttctcagcggcgcctctcctctgcaagctctctcatcagccatggccgccgggaggcgtctgacagacacggcgcccgcggaccgccctcgcccgcggcctaacattaggctcggggactatggtgcagccaaggatgacttgccgatcgacgtgacgcctcttggcgtgtctgatctcgtcgccgatcttcggcaagttgttcttggctacaccgtggctcctgctcctgatgtaaggcttcgtctacggcgacacttcgccgtcgacgacgagcaaggccaatcaagagcctacgttggggcctttttccgccgaaggtcctctaagcaaaaacactttcggaaagacagcaagcaagcatgtgtgacatgaagatgtatgccgaagctacaactgaaaaagcttcggcatgatggcacacttgagacgaagggtggcaccgacttaaagaggaaaagattgcatagtccctgatagtttgtagtcatgattagttatgaagtgcatgaatgtaattttgtcccggctctgtcccccgcctataataagatgaacagtacctcgtactattcacactgactgggaatcactcacacgtcactcctagattcttaccttctgttaagacgaaggtacaaatgtaattaatatcattaatggttgttcatga

SEQ ID NO: 74624 - DNA, 329 bp, Zea mays
  Clone ID: MRT4577_168053C.1
cctgtttcattcattacctatgtttttttttgggactttttagaattttttgtccctatattaagtgactttgttattttggatatcagcgactgactctatagatagtgacaaagcatgatcttccttgatgagtaggttctaactcaatgggcctgaggtgtaagatagtagtatttttggcctcaagatacagaagatgcccggcattttcattattattgggagaaataaaacgcgatacctgccagaacatcaagggcccatattggaatgctagtaggtggccttctttgtaaaaaaaaaaaaaagaagggggggcttttttc

SEQ ID NO: 74625 - DNA, 3173 bp, Zea mays
  Clone ID: MRT4577_168054C.1
ccaccattcccaaccgaatccgacccacagcttctaagccaccctccacggggccgccctccgaaccgccgccaaatactttaggagcaagtgccagttcctgtacacccatagtccacgagggtttagggcccagcacagccgacggtcgccacaagggccactcattctggccgtctcttcttaaagttccttcttgtttggttgagctcattactccaaatatcaaggcaaccagaggccaaactacgaaatcattttacacaatgccagagtatgatgaatggagaaagaatttaggagcaagtgcaagttcgtggactataaaatactacaaggggttggggacaagcacagccaaagaaggccggaagtactttgaagatattattgatcacaaaaaggattttgtctgggtagatgaccaagatggcaaccatattgagttagcattcagcaagaaacggattgctgataggaaacagtggcttacaaattttcagcctggaacatacattgaccaacgtgagaaacaagtcaagtatagcgatttcatcaacaaagagctgatactcttctcaatggcagacctgcagcgatcaataccttcaatggttgatggccttaaaccaggccagaggaaaattctgttttgttcattcaagaggaattttgtcaaggaagctaaggtggctcagttctctggttatgtgtcagaacactcagcataccatcatggtgagcagagtttagcaggtacaattattggaatggctcagaactttgttggcagcaataacatcaaccttatgtaccctagtggtcagtttggcaccagagctcaggggggcaaggatgctgcaagtcctcggtatatcttcaccaagctgtctaatattacacgttcaattttcccgaaggatgacgatattcttcttaattatctgaatgaggatgggcagtcaattgaacccacctggtatatgccaatccttcccatggtattggtcaatggaagtgaaggaattggaactggatggagcacatatattccaaactacaatccaagagacattgttgctaacgtcaggcggttgttgaatgaagagtctactgtaccaatgcatccttggtataggggattcaaggggtctatagagaagacagtcaatacgaaggtagctggttccacgtataccgtcaccggaatcattgaggttgttgacaacactacactgaggatcactgagctgccaatccgccgatggactcaggattacaaagattttctcgaaagtttagctccagatcctaagaacaaggacaaagtaacattcatagaggatgtcacatcacaaggtgataatgaagacgtctacattcaactcaaattaagtgaggcaaatgtgaatgtagctaaggaagaaggactagtgaagaagtttaagttgacaacaacaattggtacaacaaacatgcacttgtttgattcagatggtaaaattcggaaatatgacactcctgagcaaatacttgaggaattctttcaattaaggcttgaattctattgtaagagaaaggaagcattgttgaagaatatcaagctggacttaaagaagcttgaaaacaaagttaggtttatccgctgtgttgttgataatgaaattatagttaacaaccggaaaagggcagatctatttttggagcttcggcagaagaattttgatcctttcccaaagaaaaaaaagaaggctgaaccagctgctgtaggtgctttagaaagaggaggaaaatgaagagagtcctgaagctgctggagcggaacctagtgactatgagtatctcctctcaatgtcaattggtacgttgactttggaaaagatacaggagcttaatgctgagaaacaaaaattagtggatgatgttgaggaattggagaatatgtcaccaaaatcactatggttgaaagatcttgatgcttttgagaaagaactggatgtgcttgatcaaatggatctagcagaggaactgcaaagggaaaagaggataaatgctggcaaaaaaggaggatcaaaagctgcacccaagaaaccacgtaaaaaggctgcatctaaaaagctggatagcgatacagaagatgatgattttgaaccagcggttgcaaagcgtggagctcaaccgaagaaaacatccagcaaggcaaatgattctgcgtctgaagatggagattatgtggctgctgaaaatcaaaagaaacaatccaagaaagcaagtgcccatgtggacgaagaagttgacatgccttcgttaaaagaccgtctggctgcttttaatatcagcgactcctctccggatcattctgccatggaaactgaagtaacagaattgacagaacagcagaatgaaaacaaagcgacagagggagcaagcaaaagaggcggacgaaagaaggcgtcatcatccttggcgacgataccatctgatgttgatgaggaagtcctagaggtccaagctcagaagaaaggtagaggaaggaagcctgctgccgttgtgaagcccaaggctcctgccgccgccaggaaaagggcgccggctcagggcaaggtaacgcagaagaaaatagatgagatgctcaaggccactgaggataacaacaccagtgcatcttcccctgagaagaaggtccggaagatgaggtcctctcccttcaacaagaagagcggctcaatcttacagagaggctcgaccgcttctgcaagctctggaacaactgttgaagcttcaccaccctctggcagctctgcagagccagttggtgctgcacaacctagaaggacagccagggctaccaagaagcctatctatattagcgatagcgaccctgaggatgaagtggagttgattgatgattcggactttgatgcggacggtgactctgacgagtgaagattgtagtcatccgtactttggctgcaacaatatccagtttgtgtcgttgcatgtgacaatttgataatgcatttcttgtgcgttgtatgtgttcgttgcgttgttcagaactgttgccaagagctcaagacaacctggttaactggttaactgaattgtatgtcaaattttgaaaaaaaaaaaaaactgtggtaaagtttattggggttaaatcataaaaatgg

SEQ ID NO: 74626 - DNA, 307 bp, Zea mays
  unsure (1)..(307): unsure at all n locations
  Clone ID: MRT4577_168055C.1
agccaggataagagggttcctttcattctctcttttttatctttacacgtactatcaccaaaacacataaaagaatatccaaagggattaatacggacacaaaaaaatgggaatgccggtatgcgccccaaaacaaaacgacggggggcatccaacaacacacatacgaacaaacaaacccagtttatagcttccaccaattcaagaactccatgggtacccccagcccctgccccaagaaaacaaagttctccgtttccctcccaatattgggccgaaccctgaaagaaaaacgtngggcccgaaa

SEQ ID NO: 74627 - DNA, 543 bp, Zea mays
  Clone ID: MRT4577_168056C.1
atggagaaaatatctgtagggactttaaaaatgattctgaaggtatttctcaggaggaaaatatttggagaaatattggtgggatatttgagcagtatttctggaaagaacttgaaggggattactggggaaatatctgggcgagcgagtttgagaaaattacaagatttgaattttttggatgctacagtattccaagttagctggcctccagtatcccatagtgtacagaaaggtgttgagaatgctacagcggatgttctttcccgtcagcctcaagtgtctgctacatgtgcctcattgtctcattgcacacctacatggctgcactcagttgtggagggttatgctcagtacagccccactaaggaattgttggccaaattaagtttacattcgggagtttttggaccattttctctgaccagtggcgtgattcgctataaagggcgtatctggcttgatggcaatttggagttacaacagcaagtgctgcaagcgatgcatgactctgcaatgggggtcattccgggattccagtga

SEQ ID NO: 74628 - DNA, 169 bp, Zea mays
  unsure (1)..(169): unsure at all n locations
  Clone ID: MRT4577_168057C.1
nttcggggattcagcacggccgcccgttcgggaaggggagcgttcnagggcgggcccnngccgcggcgcggtctggcccgggcgggnnctgagccaatgggcacggnnngcccttggggtcgtcgatacgccctnaactgtnnnggtcgggnngcgggcgnngcgagca

SEQ ID NO: 74629 - DNA, 441 bp, Zea mays
  Clone ID: MRT4577_168058C.1
cagcgcatgttcacacgggttccgactaaaaagcaagccctcgaggatcgccggcccctctcgaggccaggttggccgcgacggccacagagcaaaccccccgggggggggttatttcgggtaggtgaaaaaggaggaacgcccacgcggcttactaggcctgcttgtacgacaccacccgatgaattggcccccccccagatgtcaactcttaaaaacctggccctcaatgcagggaatggtttgctatggccccgggcgttgctcaaaaaccatgaatatgggcgtgctcctttttaacaatgccggcctggaccaggaaaactaagactaccattcctcagaccaccccggagctgaatgaccttgccaacgtttggggcctggaccactgtaccattggaaccaaactcttttttgaaaactttgaggcatcttggt

SEQ ID NO: 74630 - DNA, 374 bp, Zea mays
  unsure (1)..(374): unsure at all n locations
  Clone ID: MRT4577_168059C.1
gcccccgccggagncctggccgaaagcttctaacacccccctaccagctgctagttcgggggctgcacatagccccgtgctccaggcctcccatttgcctggctgtgagggctggcctttgactgcattgacactgacgtgcgtttggtctttgtggggttggacacagcggtctgcctgctggcaaaaagtaacgggcgctcgaggtggggaggattttgaaaacttcccaccagccctgcaggcggagcgcgcgctgtcccgtgacaggcagaacatcgggcggtcgtatgcccaggccttcaggtgcaggaagcacgagtcctactgtgcaatagaaaattaggtgagacaggggcggttcattcccgagc

SEQ ID NO: 74631 - DNA, 846 bp, Zea mays
  unsure (1)..(846): unsure at all n locations
  Clone ID: MRT4577_16805C.1
ccccaccccccccttgaggaattcggcaccagggcgactggactcgccttgttctctgatcgagtttgagcctccttgctgacagatttgttgtcattatgagcaactcctgggatggttgggtggagaagaagaaaataagctccagcgcatcgcacacctggtgctcgacgtaatggttgaatcgaaatcgtcgtcgtttccgcagtctgatttagttatggtacactagttgatcacgtgatgtggaggacaagaactgaattgatctcaaagtgatgctggtggatgaacctaagatggatgatctgatcgagtgccaggaggggagatggtcatcaagcgagtatcatctaacaacattaacatagtgttttatcctaggcaaatctcagtgcattcacctctttccttgttgtttacaaaaattttatcatcttatatgatgcattacgatcgtgctaagggctagatgcacagcagtgggaaactcatcgcggactcactatgactatcatcattgacttgtacatcatactggagggctagatgcacagcagtgggcgactcatcgcggactcactatgactatcatcattgacttgtacatcataatgatatactcgatccgtccaagactggactatctattttaagtgttaaagtagtccaaggataatctaaaaaaaaaaaaaaaaaaaaaaaaaaaataaaaaaaaaaaaaaaaaaaaaaaaaaaaaaaagnctcctcctccgncgnaggaagggncgncnacgngncctccgacttcgggctgctacgctatctcttgaacgaggatggaaagcatgagctggacgacattg

SEQ ID NO: 74632 - DNA, 699 bp, Zea mays
  Clone ID: MRT4577_168060C.1
tcgaggccggccggggtaggcatctgtccatgagcgctgccagtattactccacgataagatccaagagtgcaaggaggacttaaacctcttgaataaggatgccgacaagtggatcaataccatcgagcttgaaactgagatgcgctcccttggggcccaacccaactgaagaagacttcgtcgacatgatctgcgacgacgatggctgatgtaaatgctagcattgacttcacaaagatcccgcacctgatgacaaggaaaatgacatacatcgcgaactccaagaaggaaatcagggaggcctttcgcgtcttcgacaaggaccagaatgtcatcctctcggttgctgagctctcgccatggcatgaccaacctcaaggagaagatgactgacgaggaggtccacgagatgatccgggagaccaatgttgacaccgacggccacatcaactacgacgaggtcgtacaggacatgatgaacaagcgataagccatccccattatctatgaatgaattgtagtgaaaaaaccagcacacgaggtgtactgtgtcatgcctccttatgatgacacgtcagcatcatgcgaagatgtaatgtctaatataggacaggtgatgtgtcgtaaccatgtgaactcgacatcagatacctgatctcttctgagtgagatgtcatctagcattaacgcacctgct

SEQ ID NO: 74633 - DNA, 153 bp, Zea mays
  Clone ID: MRT4577_168061C.1
ggtcgatcaggagtccgcaggaaaggagatgagcagttcactcaggaaggcagcctcccttgccactccttttccttgagatgacgattacgagcgatgaagatgcatcagcagctcctggtcatcgtttctctcatgtttctcgttgcggtg

SEQ ID NO: 74634 - DNA, 428 bp, Zea mays
  unsure (1)..(428): unsure at all n locations
  Clone ID: MRT4577_168062C.1
ccgggactgacgagctcgcatagacctcctctcctctgccgccgtcaccgccccttccttcgccgcacctgcgccagcccgcgccgtggtcagaaggaggtccttcaccgtgcgcgactctctccgcaaggtcacctgcnnctgcgacgcgtaagaaaaaaaaaaataaaaaaaaaaaaggagagaagaaagaagaaaaaagcaataataaccaaacaaactaatacgaccagaacaaaatgaagagaatactgaaaccaagtgatacaagaggagagataatgaacaaaaatgaaaataataaaatgaatagaacacaaaaaaaaaaaaaaatttttttttatttaccccccaccccaaggaaaaggaagggttaagaagaaagtagaaaggaaaaaaagagaagaaaaaaaagacatatagaatag

SEQ ID NO: 74635 - DNA, 762 bp, Zea mays
  Clone ID: MRT4577_168063C.1
attgggtacctcgaggccggccgggatcgccatcctcatcgaagaagagccacagaaaagattcatccgacaacaccacccccacccgctccgaggagaatatttggctcgaatagaacaacaaccaatggattgttacgacaacactagcatctatagatggagactcaactgaagtacgctctgacgttatcatgcctgcctcggccggagtaggttcaccacgctgctgcaatagccgagcatatagcataaattaccacaacgacgcgctcctgtcggttcccatcgccgccaacgttcttctgttacaaaccacgtactcggcgacgcaatgtatggtgatcaccaactacatctcgacgctgacggtaacacacccgaccgaggcgcattcggaacctatcatgatcacgcgttatttgatgctaagaacgaactacctgagatccaaggagacgatcaccggagctgcgactccattcccacctcgacgaccgaaactgatacctcagctagagtctggcggatagtcaccagatcatgttcgacgactctggatgcccgaatcgcatgatctgccgagagctcacttgctacgactgatgcgtgctactcaaaataagatccaaggtgtctgacaaaaaaacttgaaacgcgcctgcactgagaacgtctgtgcgtacaatgtgcgctatgaacggctccaacactgttgcgtcatgcaaagctcgatgcgcgcatctcctactgctgctgcca

SEQ ID NO: 74636 - DNA, 486 bp, Zea mays
  Clone ID: MRT4577_168064C.1
atggccggcgggttcttcatggccatcaatggcgtcagttttatggaggagagtaatgggagggaaaacgatcgctgtgaagctccattaacgcgcgttggtgaacagacgcgcgggaaacgactcttgggctttgacgaggtcgcggcgtcgggcgctgggctgctcggtcgcggcgcgttgggcggtcggtgtcggggctcggatcctgggcgcgtgttctggcgtggtcgggtcatcgggcacgggcatcctcctggcgctggggtcacgcggtcatgggcggcgctcggttcggctcctggcggccgtgcgtggaagcagggaagggaggagagacaaatggccgggtggggcccgcttgcaagagagaagagggggaaagggaagtggagggtggcggcggctggcttgggagccagggggaggcgcggctgctccaatcatgggcccctagttggctttagatgttacacgtatgggtga

SEQ ID NO: 74637 - DNA, 562 bp, Zea mays
  unsure (1)..(562): unsure at all n locations
  Clone ID: MRT4577_168065C.1
gacgctgacaccacgccagcccgacgcccctgaccgtagggcaacttgctcactcggtcggctcgtcgcgccccgctgtcgcccaggtcatggcatggacgcgcttcacctacgcgcgtacctcctccctgtgcggtgcggtgcgacccgcgcgtgagataattttctaccactgtggtgggcgtagaaggagatggtgaaggaatgactagatctactagaacgaggactctaaggtcctatctaggatcagcatgagaaattcatgtgatggaaattgtcccattgaaagatatcacatggggccatcaaatacttctgttaatgcttctgngcaccagtggtaggccgaacctggaacacatgattctacaactatctggagggaggtatcatcttctctagatgctggttacagatattccctgacaatgatggtgatacggagggaattaacgatagcctgagtttcccttctaagtgtgcatggctttgctgatgtatcggctgtggtcgtcaatgctttgctgaggtgatggattgctgaggtttatggaatatc

SEQ ID NO: 74638 - DNA, 429 bp, Zea mays
  Clone ID: MRT4577_168066C.1
tttttttttttttttttttttttttttttttttttagggggggggttttttttttcttgcctttttgcaaaaagaaaaaaaaattcgggccctgcaagggggcaatatttataaaaaattctgtcacaaacagggcgcttggggcacacagctgtgttttgccacccagttggttggcccactcgggggtcaaaaaaaagacagcctggcgacccgtttgcgctttgtgggaaaaacaacccccccaatcggttttcgggggcgtgggaaaagacccttaaataaatgttgaaacccccgggggggggggcccctctgggccggtgaatccccccgaggtgtaggcccccctgctcccctcattgtgccggaagcctaacccccgaaacctgggaaatcaaaccgcgagccgttcttcctccgcggggg

SEQ ID NO: 74639 - DNA, 248 bp, Zea mays
  Clone ID: MRT4577_168067C.1
aatctctcggggggttttgttattcccgggacccacaaaagtaggcggggaaggacacacacggggacaaaaggggggggaagcacaaggcccccccaaaaaaaactaaaaacaaagcggtacactaaacagacaacttgcggtgaagagggagggacaaccgccgcaaaaaccaccaacagggcagccacctccgacagaaaaaaccacgacccaccccccccacaaaaaaaaaccccaccaccagg

SEQ ID NO: 74640 - DNA, 306 bp, Zea mays
  Clone ID: MRT4577_168068C.1
tacgccttttttacttaacaaagacaccccacggccgtgcaccaatttttcttaattcgtcaacaccactcaaccaactacatacatcaataacaaacacacattgtttgaccaacaaacaaaagggattgatgttttcaccaaattgacaagttcatgcctaacaaaaatgacaaaccatatctaaatttcaaaatcactaatgttacaattaacaaaacatcatctctttatcagatgaactcggacattgtacctacaatcctctaacggacataacgataaaccatatgaagctataatctt

SEQ ID NO: 74641 - DNA, 347 bp, Zea mays
  Clone ID: MRT4577_168069C.1
aaggaaagtacgtggcggagcaggcatggcttcatcggtggccgacgctgcgagcagagtcctgggcgcccgtctggcgcaccaggcgccacagaacggtctcatcgtcgcccgcttagggtccgacttgagcggcaaggcgaagcctgctcctaagaaggtggcgaagacatcgacctgctttgaccggccgctgtggatccacggcgccgtgacacccgactacctggacggctcgctggtcggcgactacggtgtcgacccgttcagcctaggcaagcccgcagagtaccttgcagatcgagtacgactcgatggaccagaacctgtgcatgaatgacgccggc

SEQ ID NO: 74642 - DNA, 217 bp, Zea mays
  Clone ID: MRT4577_16806C.1
accacgcctcaggatacgaccgtgctgcttttccaaatgctaagcgtgaactatctaaaccgaatattctacttgcacaaacaacattctcaacaccatactcatcctacttactatcatcgtcatagatcttacatagaaacactacctactcactactgtactactcctactagcaccctgttacattatcaacaacagtccatatcatacccat

SEQ ID NO: 74643 - DNA, 215 bp, Zea mays
  Clone ID: MRT4577_168070C.1
cggactcgtggggacctgcatcggcttgccgcgacaaccagaggtcacaggagataattgactgcatccccggacatctgccatgggaggtaaccccggacggcgtccagcatctcgactgaccaataggacgtgccgggaagacgatcctcgatattcgtacacacggttcctcttggaataagactcacatgcgggaccatcattgacaagct

SEQ ID NO: 74644 - DNA, 236 bp, Zea mays
  Clone ID: MRT4577_168071C.1
aggaagcaggcgggcaccatggtgaaagttttctcgggacagcgcgacaggctctacgtgcggggtaccatccttggatacaagacgttcaagtcgaaccaatacgagaccacgttgctcgttcagatgttgggggtgaacaccaatgatgacctcgcgtggtacactggaaagcgcattgtgtacatttacaaagtttagaccaatatcatggttacccgttacaggtgcatctg

SEQ ID NO: 74645 - DNA, 133 bp, Zea mays
  Clone ID: MRT4577_168072C.1
gtgacctgtaataatttgtgtcattatattgtattgtatgtgctccctcgcccagttcaataggtcccatattgcgagtacatgtacgttgtaacttttgactaataacttatcagacgagctactatatatt

SEQ ID NO: 74646 - DNA, 408 bp, Zea mays
  Clone ID: MRT4577_168073C.1
gacaataacaagaaaacaagatggcaaaacaagcaaaaagaggaaacactaactccaaaaaggccaaaggtgatgttcgggagggaagatgaaacaaaaggttctaacaaagtcaaaatctgaagttgaggatgatgagcaagatggtaatgggggcgaggattaataaatagtactatggggaacagtagttttgcaattgagtgtttgctgctttacttatttttctatatgctggccctttttatgaaatatgctgaaagggaaaacctgtgcgtgaccgaaccttatggtctgggatgctggacttctttttttaacctgaagagacggatactagtgccagcctcgtcaccttttcaaaacagttgcttccttgattgataaactgatcgccccactacccaa

SEQ ID NO: 74647 - DNA, 1063 bp, Zea mays
  Clone ID: MRT4577_168074C.1
ccgggcacaatccagcggctgccgcacggctcggcctcggtcctacagctacaagaaccatctctctctctcgggcgggcctgggactcactcactccccccattcctacctttcttctcctccacctcgtcaggcaccctcaaaccctcgccgcaagaaagaagaggtcaatcaaatcgaaccaaaacctcccgaccccacaaggccaagctcatttccatggtggtgtacacgcaggaacatgtgtaccggcacccgtgggaccgggtgacagcggcggcgtggcgcaagttcacggatccggcctcctgtacggcgctctcccacgtcgcagacgttcacaccctacaccgccgcctcgactccgacacgggccgcctccaggccgcgcgctccatcaccgtgcggtccccgccgctccctttcgtcctgcgccgactcctcccgtccgccgcggcgtccccaaacggcgccgcgctctgccactgcgtcgagacctcgctcgtggacgcccagcgccgcgccatggacgtcgtcgtgcgcaacgtcagcctccggggcctcatcgaggtcgaggagcgcgcctcctacagaccacatccggaccggcccgacgactggacgcagttcaggcaggagaccacgatccggtgccgcccgctcgcggccctcgccgccgtcgctgagaaggtcgagacccggtgcgccgagaggtttctgcagaatagcgccaaggggagggaggtcgtcgagcggatctgccggtacctcgaggccgagtccgccggcgccgcgccctccgtaacctgatctcgtttgcacatctttgcttgatccgaacggatccaagggttcctcgatctgtgctgtgtgcgcccggataaatcgaaccccgcctgctaggcgcttgcttttcttcattttttgtgtgtgaaatgatgagctgaattcggaatagaataaagcttctggtcatacttgtttcttctgttgtaagtatgtggaaccgctttaacctccctgattttgatcatgagccttgccaaatactaatttgctaat

SEQ ID NO: 74648 - DNA, 518 bp, Zea mays
  Clone ID: MRT4577_168075C.1
aaaaggacccccctccttttttatcaagttttatataacattcaaaccccgtttgatttccaaataaaaccttaacaaaaaaacccctccccttgccaattttccaccccccccccaatacttttttttttcggccccaaaaaaaaaaaaaatgccccccaactaaaaagggctcaccccaaaaggcaagctttggctttggcccccaaattcccaacctaaatcataatctccaccccccaaaggtttatttcttgttccggccccaaaaagttaacggacacaaggccagggtcaatattgaagttaaactccatttcccccaagtccaaaaggcccctccccggttcccggaagaaaaaagccccaaaccaaccgcccccgaaaaccttgaaagccatggccttgcccccaaaattgttgaaaacgttgaactcttaaagggcccccccggggttaaaaatttccaaaaccccagagggcccaaaacaaaacccccggaacaaaggggcggaggg

SEQ ID NO: 74649 - DNA, 585 bp, Zea mays
  Clone ID: MRT4577_168076C.1
atggctgggggacagcatcagcttgttggcagtgcaagtttagagcttcaccgaggaaggaaggtggagtacctcgacattcctatcaaggacagtattaaaggatggcgtcttgagtggttcatcatggaaaatcacttcaaatctctcccccctcggtcagggaggcaaccagatgttcgcacacctagctgggtagaatctcctacttttttggagataacagaggccaaagtattacttgctgaaatctgcctgctgaaagacgggggtctgactgctgaagttgtggttgctgacttcgtcttcaaaaacattcaacccttgaaggacataatttaccctgcttacttatatagcgatgtcaatgattccatccgggttacaaataggaggattcccatcgaagatttgctgagccgactggacatgattctgaggggcatagtctcgaacgccggtgctcgtgtagcctactctgcgtggaacctaccgccaaataggccattctctgaatttgtctccaaccctcctgcttgtgacggtagcccgggtcatagagtgtctaatacccaaaatgtataa

SEQ ID NO: 74650 - DNA, 329 bp, Zea mays
  Clone ID: MRT4577_168077C.1
tcggttttggggcgcgtcaccgtccctgtttgtttcgttgggtctgatgtgtgcggcggtcgcttggctgtgactcggaggggtccaagggaggtgggacgtttttcggtcgaagcggaaaactagcgggaatggaagggcgaggcagtcggcaggccgagggcggtggcgccggataccggctggtgccggtgcacccaaagtgcgacaatgttcgttgccagaagctgcaccgcctacttgcgtctacgtcatgcgagcggatgctggcgccactctgcaagcaaagatagatgaattcaagcccaatctttcagatgatagctgac

SEQ ID NO: 74651 - DNA, 275 bp, Zea mays
  Clone ID: MRT4577_168078C.1
tcgaaaaaaaaaaaaaaaaaaaaaaaaaatttttaaaaaaaaaaaaaaaaaaaaaaaaaaaggggaaattaacaaaaaataggggaaaaaaaattaaaaaagggtgcgtgctccttcgtttccatgctttccttccctctaattggacgtcatttctcttcatttaagtccccttaattctgttaaatgcccgacttttcccaacttggtgacccggaaaaccttgccttttcccacctttatcgccttgcacatttgcccttttggacagttcc

SEQ ID NO: 74652 - DNA, 286 bp, Zea mays
  Clone ID: MRT4577_168079C.1
ggccccgccgccgaggacaagaacgtgccgtcggcgcccggcttcggcggggcccgcgagacgacgcgcaagacggcggcgaaggccaagccagcgacgccgtccgggagcccggggtacggagcggaccgcatgctgttcctgggcccactgtccggggagccaccgagctaactgacgagcgagatgccgccccccccccctgggacaccgctgggctgtcggcgagcccggagacgtgctccaagaaaaaaaagaaggaggcgatccactcgcggcgtgccat

SEQ ID NO: 74653 - DNA, 223 bp, Zea mays
  unsure (1)..(223): unsure at all n locations
  Clone ID: MRT4577_16807C.1
ccggcgggacccacgcgtgcgagtgcacaattatgctgnctaataaaaaatatcttgggcatctattctacagggtccgagcctacacactaaaagacacgaatcgacatctcttcactgcagagaccccactcagaatactaagcctactcttacacctccaagacctacacaaacctggcttacaccatcctaatcaacttctacatcatcctcaataacc

SEQ ID NO: 74654 - DNA, 296 bp, Zea mays
  unsure (1)..(296): unsure at all n locations
  Clone ID: MRT4577_168080C.1
ttgttagtagtaaagtgttagtgggatatttattttttgagtgtgatatatatgttagatcngcggggtttggtgattaaattgaagtttttgatttttgtttttatttattacaactcagggaagaaatatagtgggcataaaggaggtaaaattttaagtacagggggatgaaaattaaggggaaaaacaggggaaaatggggggaaattttagattagaatactttgcaaggtcgtgcaaattgactagttgatctttacagacgaatttgttaattttgtgaaccagaagtt

SEQ ID NO: 74655 - DNA, 224 bp, Zea mays
  Clone ID: MRT4577_168081C.1
gtctctctttcgccgtcgatatatgccgtcgattctactacctgccatcgcactctacggctaccccaacgaggagtgctgcttccgttgcattgcatgctactcctactattcaccagcactgaacgcccgctactgccagagtacgagactacgagagcgtgaacgaagcactggagggcagccggtcggctctcgcgcaggctcagtgctgcacaccggga

SEQ ID NO: 74656 - DNA, 510 bp, Zea mays
  Clone ID: MRT4577_168082C.1
gcaggggagttaacgactcttacaacatcagggggtgtaaaccacacaatacttcataacagacacacataacacgatagcaggagcaactgacggaaaatcacgggataagggcagcacactggcctgatgctgtgctatcagcaaacttctactagtactcgtggaccctcgtggtcatgctcgccctgatagaactcagcggcgacctgctcgtagtgcttctcgagcgccgccaggtactaacgggccttagagaactcacctttctgcataccctgaccgacgtaccagtgcacgaaggcacccttggcgtacatgaggtcgaacttgggggcgatgcgggagaacaccttcacaacactggtgtgagctggagataatgcacacggcacactgcaccttgggcaggacgccaccaggcacaacgctatgatgctggtaattgatgcctcacttgaatccagtctggcaccaatccacgaactggatggtgcgtttggtattgat

SEQ ID NO: 74657 - DNA, 401 bp, Zea mays
  unsure (1)..(401): unsure at all n locations
  Clone ID: MRT4577_168083C.1
cccgggtcgacccagcgttctttcggcgactccggcgtcggcaagtccaacctggtctcgcgcttcagcgcaacagttcagcctcgagtccaagtccaccatcggcgtcgagttcgccacccgcagcatccacgttcgagggacaagtggcgctcaagggccccagnnatctgggnacactcgtcccggccaggnaaaggtgtgtaaattggggggggggggggaatcgtggatagaaaccataaccatagacccgtgctcagctgttcgatcgacaacgcactgctgttggttcctgtgtgtgatacaggagtgccattactcatgtgggcaaagggttcctgcgtgtttcatactgtttaagagtactagccttcttatccatgtggttttgtgccgtt

SEQ ID NO: 74658 - DNA, 1977 bp, Zea mays
  Clone ID: MRT4577_168084C.1
atggccggggggcagcaccagctcgtgggtggtgcgagtttggagatgcgccatgggaggaagacagagtacctcgacatcccactcaaggacaacatcaaaggatggcgcttggagtgttttgtgcccaatcctcctgctagcgacagtggcctgggtcttagagtgcgaccctctcccgaagaagtcgaggctctggttgcttcacttggtgatctcccgaatgatgaaaggcaagttcactttgagatgcctataaacccgagtgatgcagagataagtgctatgctggacatgttggctgaggattcatctgattccgtccctgctgaaaccatagctattgcaactgtcctcgagcctgaaaagaccttgactgctcaaaaatctgatggtgctcgcccaaagcgccttcgcccggccagtcatccaactattcctgccgaggggaagaagaagaaaaagaggaggcttcggctagtgtcatgtttgaatcaggatgccggcccttctgctcctgctactaaagaaatgccagtggaactttttactagagccgatcccaatgggtgtgaccctattgacgctgaccccaatgggtgtgaccttgatgatgctgaacccaatgggtgcaatccgggcgacgctgaccccaatgggtgtgttgttcgtattgttgacgaggatgaagaagaggaggaggaaatccccttaattcggaaaaacagtcggcgttacctagtcagtggggggagtagtgatattccttctccagctttgtctgctctcgttggtctgcaagagttgtccatagcaaattttgaccgggctctcgaggatatggttcctgaagatctgctgtccgagccaacagatggtggtatgatggacgtttgcactgacattccggatgtggagttagagttatcccgagcaagaacccggtccccaaggatggcgctagcgattacccagcccccgagggtgttgccggcaatgatccggctcgagtgggtagcgcgagcgagctacaacccagcccccgagggtgctgccggtggtgatccggctccaatgggcgatgcaggctgcgacctagcccctgagggtgttcgagcgggctccccttctcatacctccatggatgtccacgtcgggtcttctcctccacattttgattgcatggcagcaacacgtgcttcaaatcaggaagtcgccttagagactggcatacccaacactagagttttgatttctgctggtgatgttgagttgatccccaatgatgctcttcagattgcctcgactgatattccctcatcaagtcaccaactggtttctcatgatttggggcttccttcattcttctccaatcttcagctgtactctaagctcgaggggaagtactctcaaggtcagatggacctggctcgagtttctgcttctttagacgacaccaacttattgaattcctctcttagtgctcagcttgtctctgaaagggtggctaacgaagaagaaaaacgtgcccttgcagcttctcgcgataaacttgataggttgtatcgcgatgccaacaattctttgactatcttggagaggagccatcgctttaccatggcagacttggataatcatcgttacaagctgcaagagtcccaggatgaactcattcgtgttaggcaattggtgtcaagcaaagattctgtcatcaaggatatgcgcgcttccaaaagattagtcgtccaggagctagaaactgctcggctggctgttaaggctgctgaagacacttctaccaccttgaaggctcagcgcgacaaggctatggacaaagccattcgcgcggggtggatcttgatgagaaggtcgggtgtgattgttcctgatgacataattgctgatgtcaacgctgctcctgactcttcgagtcgcccttcttcatcagttgctcctgagaaaaacattactaagtag

SEQ ID NO: 74659 - DNA, 962 bp, Zea mays
  unsure (1)..(962): unsure at all n locations
  Clone ID: MRT4577_168085C.1
tgtaccaacgtgttcgggagaaagtagtgtgtatgatgagaggcaacctaagagaaggaagcggaacattatgaatagtgagcaaatagatgaattagagaaggctctagtagatgagcctgagatgcacaggaaccctgttctattgcagggttggtcagagaagctaagtctgcagggcccagagatcacatcatcacaacttaaaaactggctgaacaatcggaaagctaagcttgctcgcattgcaaaagaaagagggacatttgagggagataatgctgataagccatctacccctcatcccggcgagtcttccgaaagtgctggggaggacaactatataccccctgcaagggtgatgactgctccatccaaaggcagactggtgagcccggacggcaatgagaaaacatcgcaggcagagctatcccccaacacgatgctgatccgcccattcacgagatccttctcactggagcccggtcggctcgtttcactagttgacagcgacgggaaggaggttggcaggggcaagatattccaagcgccagggaagagcccagccccagtggagagccgcatctgcacggttgatgtcaccgagctcaggaccgagaagtggagggagctcccacacccttctgaggcatctgggaggaccttccaggaggcggaggcgaggaatggtggaatcatgagggtctcttgggactccggcaggctgttgcctgtagtgtagcaaggcagaaacttttcgtcaggttgctgtataccgctaggcacaaggtgagcagagggagcctttggtttagggcgagagactggatcatgggattcttgggggcctaagtaacactgttaaaacctgtggttaactgtggtgtatccatcaactaattgtctcaagcaatgcaggtagagtagttactaatttttttaaangagaaaaaggaaagaaa

SEQ ID NO: 74660 - DNA, 302 bp, Zea mays
  Clone ID: MRT4577_168086C.1
gagctcactagttggtggccgccctttttttttttttttaaaattaggaactactccgtacctgcattgcttgagacaattagttgatggatacaccacagttaaccacaggttttaacagtgttacttaggcccccaagaatcccatgatccagtctctcgccctaaaccaaaggctccctctgctcaccttgtgcctagcggtatacagcaacctgacgaaaagtttctgccttgctacactacaggcaacagcctgccggagtcccaagagacccttatgattccacctcgagccgaat

SEQ ID NO: 74661 - DNA, 592 bp, Zea mays
  Clone ID: MRT4577_168087C.1
aattcggcacgagggcccggtactgacaagagtacctgctcacacacctccctggtacctactactcgggctgaacactgcaacatagcctgtgctagcacacccgatcagcgccaataaaatggcggatctcaacgactgcgaggtgctcgtgcgcgtacacccgtgctccacctgggcactatcaccagcgatggcacggactccgcttactcgtatacggggtctgcacatgctcctcagcgcgcggtgtctcctgccatcttatatatctccaccgttgttagaccctaacaaaagaaaccgagcaaagccgggcgcggatgccagcctgtacatgggctgtctgtacccgacgacgcttctgaccagcgtgatccagttccgcgtcaccttcgactgggaggtggagaagcagggcatcccgggcgccatcatcgggaagacaaccacgcctccgagtttttgctgaagaccatcaccctcaacgacgggcccgggcacggcaccatcgtgttggtcaacaactcgtggatctacccgtagtccaagtaccgctacaaccgcgttttcttctccaacgacacgtacc

SEQ ID NO: 74662 - DNA, 435 bp, Zea mays
  unsure (1)..(435): unsure at all n locations
  Clone ID: MRT4577_168088C.1
gattggatttggggggggggggggataaaaaataatatgtggggttggattanttatagattatggggagantgttgaggagaagagaaggtatttgttangtgttattgatattgattagggtagggntagatgaaagaaaggaggggggggggtaagattagatatgnggaatganaagattgaagtgggtttttttggtatattatggagataagaaaattgttntattgtggaaatggtaaagattgaattagtgaagtaggagagagtggaagttattgnttaggtgagagaggtgtntnatganatgagagtgagtgantnataagagaatgagtnttaggaggaatagggtgtatgatgggggattagtagggtagtataaatatgatagataagagaataaaaagggtaaggaaaagaaagggattg

SEQ ID NO: 74663 - DNA, 598 bp, Zea mays
  Clone ID: MRT4577_168089C.1
acgtgatgggaatttgtgcccgaattgaatcccagtggaaatcagttcccgtcatgtgttttccacccaacttatcaatccttgttagtgattggttgttacgagtccttggaactttgggacataagggagaagaacaccatgaccttcaacaatgcgcatgacggtttggttgcagccctggcagcatccagtgcaacagggaaggttgcctcagtaagccatgataggactctcaagctctggaaatgacttgtatgaaacccatgttggacttctgtattctggctgttagatgatagacaaacaagactttgccaaaaatgaccacatgacgaaaaggttgctgacaagatactctggagccgcgtgggctcaagaactaacagtgttttgttttgtggtcgttgtatgctgttcagtatgccactgaagcttgtaacttgtaactcgtaatagaaactttggttgaagaaagattgtacctcggacaagtggcaaatatttattctctaaaatattctgcattttgttttttgaaaaaataaaataaagaaattgagcctgaagcatagttttattgccggtaagggcggcc

SEQ ID NO: 74664 - DNA, 498 bp, Zea mays
  Clone ID: MRT4577_16808C.1
ttgggaccctcgaggccggccggcgacgtgacgaccaccaccaccacatgttgcatgagcagcaggcaccgccaccggcgcaaggcggaggagaagcgggcgtcggcggaggccaagcggggcctcaagctggccaaggtgctggagctagccaacttcatgaaggccgtcggcagggtgcccaccaagcgctccttcttctagccagccgactacccctgccacctccgtctctccctgcctgcgtgtgatcgatgtacgctcgctgctgcatccgagaacctaactgtaaagaaaaaaaactgtaagctgtatacgtactgcgcctgctggttcccctgtgatgtctgtcagtgtcatccatcacagggtgccagttgttctcttctctttcttttcttttctcttctcttggcttgtatatcggatccatatgctactggtggtgcttgaacgagctgttgttgtttgctgaaaaaaaaaaaaaaaaaagcggcc

SEQ ID NO: 74665 - DNA, 797 bp, Zea mays
  unsure (1)..(797): unsure at all n locations
  Clone ID: MRT4577_168090C.1
cattgggtacctcgaggccggccgggactgtccggtgtgtcagaactagcggacacagccattccaccaaccacccaagccaaacggttatagccccgctcggttcaagccggtaccgtacacctccggagtagcttaccccaaccaaatccatccaaattcaatcggaattcgcgtgcgcaagctcaaatcggaccacggtaatccaaaggccgcggcgtagcggacgcgcgggcgctggtgataaagcgggggctgggcctcgtcgcctctgctctgctctcctcgcatataggcatcgcagtcgcagcttctaatcgtttggagagcacacaagaatgtcgttcgtgcagctctctggtgctggagtcgccgcagtggccttcacgaacaagagcctagtctctcggcacgcagcgctacgggtctgctcgtcgaggcgctcgatccgtagcctggtcgttaaggctgcaactgtcgtcaccccaaagtacacttcactgaagcctctgggagatagggtgcttgtgaagcttggtgccgcagaggagaagacagttggtggcattttgcttccatctactgcccagactaaaccacaaggnnaggtgaggttgttgctgttnggagcaggaaaggaccatcggnngacaagaaaatagctgtgggatatagagactggagcacaagtagtatactcaaagtatgctggggactgaggntgaaattcatgactcanagcatcttattctccaagagacgatatcattggtattcttgagacagatgatgtgaag

SEQ ID NO: 74666 - DNA, 523 bp, Zea mays
  Clone ID: MRT4577_168091C.1
gtagacgaagctcgcgctttatcgatcgtttatggcttgttccgaagacgttttccagccggattaaggagcgttgggggtacccctaattacggtccccgacaggaccggaaacttcgataacatgctactaaacatggccatgaacttgccatccacatgtttagaaattgtataaaacacaaacaaagtcagaaaatcatgaaacatgtccatgtgtcatgatatcatatgcagaggctgtgataaaaatttgaaaaagtttcgagaaatctgtgacacactatgtggagaatcctaagagatcgtgtgtggatctctatgcttttatgcgccaggtgtcaagaggctttgtctgcccatagttaggacattaggtccctggcctctgaagagaatgactccacttgtgcagaagccatcttttgtggggcgggctccacattgctcgtgagcatgatagtgtagagagctattgatagataaagtctggctgtggtgatggtatacctatactgagatc

SEQ ID NO: 74667 - DNA, 1004 bp, Zea mays
  unsure (1)..(1004): unsure at all n locations
  Clone ID: MRT4577_168092C.1
ctcgaggccggccggctcgcatatagggtttatcttctcccctcctctgcccccatctcgcttctcgcacacggcagccggattccgaagcgcgccccctcggccccagccaaaagcatcgcagcttctaatcgttntggagagcacacaagaatgtcgttcgtgcagctctctggtgctggagtcgctgcagtggccttcacgaacaagagcctagtctctcggcacgcagcgctacgggtctgctcgtcgaggcgctcgatccgtagcctggtcgttaaggctgcaactgtcgtcactccaaagtacacttcactgaagcctctgggagatagggtgcttgtgaagcttggtgccgcagaggagaagacagttggtggcattttgcttccatctactgcccagactaaaccacaaggnaggtgaggttgttgctgttggagcaggaaggaccatcggggacaagaaaatagctgtggatatagaggttgcagaagccgaagacaaaactcctgggggccttatcctcactgaaacaactaaagagaagccgtccatcggaacggttgtagctgttggcccgggtcctctggacgaggaaggcaagagacagccactgtcagtgtcggcgggcagcacagtgctgtactccaagtatgcagggagtgagttcaagggcgcggatggcacggcctacattgtgttgagagcgtcggatgtgatggctgtcctgtcttgagcatttcgtttccggctcgttaatgtagtttgcagccaatagttgtcatgtggtatgaaacgatcgctttgtggtggtcatcaaaccatgttggtgatcatcacaacatatgctgatactgttccggacagctagaatttgttgtgtggcaggtataaacgtcagcatctgatagcgagagcactcggttaccttctacagacgatatttaaggggtgatagtcacgcctctttgctggggaaaaaaaaaaaaaaaaaagcggcc

SEQ ID NO: 74668 - DNA, 785 bp, Zea mays
  Clone ID: MRT4577_168093C.1
tatcgatcggcaacggccgccctagctgccagccgcgctcggtacgtacagccatgtgcgacttcttccttccgcggatggagggcgaccaggccggcggtggcgaccttaccgacatcgtccggtccggcggggccgtccctagcagcgccgccgaggccacggcgagggatgagtggcagctccaccagggggagccgccgatgctcttcccgccgcttccctcgtcgacggcgacggcatcggaagcaggctgcgccgcagggagcaccggcgctaacgtcttcggcgccgacgaccctttctccggcctcgtggacccgttctgtaccgactactactcctcatgcgccgacttcttggacgccaccatgccggacgcgatgcccaaggtcggcttcgacgcggctatctgtggcggcagcggcagcggctgcggaggaggcggaggccagggccagctgatagacgtgaggcggaagcagcctctcttgccgcgtggggtgcagatgctgccggttggcgcgctggcgccgagggagatacaaccgtacccggcgtttgccagcgacatggtcaagctcggaatcacggccgggcaggtggccgggtgcgccatcgacgccgccgtcgtcggcatgcagatgccctcgcctcgcgccgcgggcgggatcaagcgcaggaagaaccaggcaagaaggtggtgtgcatcccggcgccgacagcagcatgggggagaacaactggtaaggaggttccttctgatctctgggcctggaggaaga

SEQ ID NO: 74669 - DNA, 1468 bp, Zea mays
  Clone ID: MRT4577_168094C.1
ctcgcggccggccggccgattggccgggagcttaccccaagcaaatccatccaaattcaatcggaattcgcgtgcgcaagctcaaatcggcctctggtaatccaaaggccccggcgtagcggacgcgcgggcgctggtgataaagcgggggctgggccacgaggcctgcgctctgctctgctctcctcgcatatagggtttatcttctcccctcctctgcccccatctcgcttctcgcacacggcagccggattccgaagcgcgccccctcggccccagccaaaagcatcgcagcttctaatcgtttggagagcacacaagaatgtcgttcgtgcagctctctggtgctggagtcgctgcagtggccttcacgaacaagagcctagtctctcggcacgcagcgctacgggtctgctcgtcgaggcgctcgatccgtagcctggtcgttaaggctgcaactgtcgtcactccaaagtacacttcactgaagcctctgggagatagggtgcttgtgaagcttggtgccgcagaggagaagacagttggtggcattttgcttccatctactgcccagactaaaccacaaggaggtgaggttgttgctgttggagcaggaaggaccatcggggacaagaaaatagctgtggatatagagactggagcacaagtagtatactcaaagtatgctgggactgaggttgaattcaatgactcaaagcatcttattctcaaagaagacgatatcattggtattcttgagacagatgatgtgaaggacatgaagcctctcaatgaccgtgttctcatcaaggttgcagaagccgaagacaaaactcctgggggccttatcctcactgaaacaactaaagagaagccgtccatcggaacggttgtagctgttggcccgggtcctctggacgaggaaggcaagagacagccactgtcagtgtcggcgggcagcacagtgctgtactccaagtatgcagggagtgagttcaagggcgcggatggcacggcctacattgtgttgagagcgtcggatgtgatggctgtcctgtcttgagcatttcgtttccggctcgttaatgtagtttgcagccaatagttgtcatgtggtatgaaacgatcgctttgtggtggtcatcacaccatgctggtgatcatcacaacatatgctgatactgttccggacaatcggctaaaatttgttgtgtggcaggtataaacgtcagcatttgatagcgagagccctcagttacttttacagacgatatttaaggggtgatagtcacgcctctttgctggataatttcattggattctggactcctgttctgttacatccgttgggatttgtttgctgccaaactttaaacattcgtataaccagaaaaggttacatgaagaatataagtctaagagttgatttttttatttatataattaccgtccgacaaatcattattat

SEQ ID NO: 74670 - DNA, 343 bp, Zea mays
  Clone ID: MRT4577_168095C.1
gggttttgcactttgcagccgcgagaggttcgcggagctgaatgccaagctgtggtgggaggagaacaaggagaggatacaggctcagtacctttgaaaactgagctggaacgaggctgaatcttactaggagttcagttgagcagaagctggtgataattatggtgttgtgcaaggggctgacatataattaatctggtataagtatacggggagagtttatgtttcgagttaatttggagatggggggagagatggggtggggttcatttggagctgggaaagataggcagggatgagataggggttcatgcatgtgtagggcacctcacctggctgccca

SEQ ID NO: 74671 - DNA, 290 bp, Zea mays
  Clone ID: MRT4577_168096C.1
tcttcctgaagcacttacttacttggatactcatcaacagcttataattaagagtgttcttaggggtcgtattctaatggtgcctgttttaatataatctttatataatatcgtgaatgagtttaaaaaacttcttttaaggagtgacaacaagaacatggccacccttatggcagagtttaacaagaataacgtaaagcttttaattcgtaatgaggatctttctaattatcttaatagaaattgaatttgacattgttaaaattgagcttactgaacttaaaaatgaa

SEQ ID NO: 74672 - DNA, 406 bp, Zea mays
  Clone ID: MRT4577_168097C.1
tttgggcttgtttatgtgcttgtttatgtgcttgggagtttgttgtggttgacttcgctgttgaggtagaggtcgtcgtctttgaggagtctgttgtggatgagttggaggtcttcgtcttcgtcttcgtcggcttttaggagttggttgttgaggtggaggtcgtcgtcttcgaggagtttgagaaggttagtgagcgaggttgcgtgtatgtagtggtggtggttagggtttaggttttaggggactggtgcgtgtgtgcggtggagcagctcgctgtgtgtgcatacggtagcacgatatgggaccccgtcgcctagcatgtcatggtcatcggtgctctctcgcgcgcgcgcgtgcgcgcgctgcatgcagtttggcatgcagtcagtagcgatcgctgtgc

SEQ ID NO: 74673 - DNA, 914 bp, Zea mays
  Clone ID: MRT4577_168098C.1
ttctgaattctgagggccatggagaaggcgcggcggcaggcacgtgccgtcgttttgggagtggaactactactactcctcctcctcgtcaacctccccggactccgcgcccgccgcggccgagccctgctggtggtacgcgccggagccggaggcccgcagcgaggcctggttcaggttcttcccgccccctcgccgcaggccggcgccggtgccggcttccaagaaggcgcggcggcccgagaccgcgggcggcggcggaggagccgtcgccgccgccgtagctgcggagcgcaagagggcggcgccgcccaagggatccggccgcagggtggtggttgtcaggcccgtcgacgaggacctttaccgcgtgccgccgccggacgacaacgacggcgccgccgctgtctcccgccttcccaggcgccggaagcgtgcggcgaggaggagcttgtggatgggttgcttgggcctcaactgcgtggcctgaagcctgaagccagtagtagtagtacgtaggttttacaaggtgcattcgggcggctaattaagctcagtagtactactgattagttaagctgtatacgtatagtaagtatgtcgtgcgtatgggatctgggcaagttgtactagtactagtagttagtggtagagtcagggtgctcttaacgttttccatgtttcgtgttcgtcgttagcttagaccgcttgctgttgtgccagccaaggattagagagtagtaccggtcaaattcaacagggcccagtagttgttggttgcagcatctcttgtctctctgggtctacggaaactaaaacactgccttagttttcagccgcttcagatgtttgtactgacaagtatgttgccataagcatgcagaacaaatatattataaaaaaaaaaaaaaaaa

SEQ ID NO: 74674 - DNA, 800 bp, Zea mays
  Clone ID: MRT4577_168099C.1
ggtaccgcggcctttcctcgagttttttttttttttttttttttttttttttttttttttttttttttttttttttttttttttttgttgcgaacagcaatgcggcaatgctttcctccatcaaacatggcgactgattacatcgaaatcaaacgaagggccacagcccacagagtatacaaaagtaaattgcgtggatcaggatcaagttccgcagggaccagcaacagcaggccagcagcacaacgattcttgttgctccgtcgtgactcgtggcactgggcctactcctttttcggccttcgccccgaacacaacttcggcaccgtgccggagcacctcggcgtcgcggcagaccctggccgtcgcctccgcgggcagcgtcaccaccacgtctcgcgcctcgccgccctcgggcgcgggcaggacgagcaccagcccctcgccggtggccccgcccacgcggcacgacacgcgcgccggagaagccccggcctcgaactccgcgccgtacatgggcacgtggtccagcgccgcgcacgtcagctccggcccatacatctggaacggcgcgttttcctgctgctgccgcgtgtggagccactccagggcgcgccacagctcctcctccggcacgccggcaacgtggcggtccagcgccgcggccacggcgggcaggccggacgcgaggtcggcgcgcgcgcgcgtgaagtggacggagctgccgtagtacccccacggcagcggcgcgtacatccgcttgcggaagtccagcgccagtgtgagctctcgctcccccg

SEQ ID NO: 74675 - DNA, 929 bp, Zea mays
  Clone ID: MRT4577_16809C.1
gagattgttcgttctttttttttttaccccgccgctcggttcgagccagctggtaaaatcaagcaaaccgtgtaggtgcatacgcgccatgcatgcctaatgtatgtatgtctacacatacatgaaaacaagtctgatcgatcgatcatgaaggtacatgtacgttcatgctagtagccagaagtttttgtgggtcttggtgttgagcaggtatccggcattctggcccttcttctggacgcttacgcacaggcacttgctatgctcgatcaagaactccgccgtgctgtcgtgcccgcggctcgacgacccgctcgggcttcttaacccaaagaaagaggacgcgcggcgcaggcctatgacgaggagctcgacgccgcgtcgctgggactcggcgaggatggtctgcgccttggcttcccggccctcggtagcgggctcgacgcgctccgcgttcacccgcgcgcgggggtaccgcgccttgcacgcggcgcacatctcctccatgaagtccgccggatccgcgccggcgcccgagccgccgcctccacctccgcctaggagcgcggcgatcggggaaccggtgctcccgccagacgaggagcgtgagggcccggatctgcccgcggccccgttgtgcgggtacggcatgttgacgtggaggagcaggatgtcgtcgccctcgacaatggcgtgggagagcgcccactccagcgccgccgtcgactcgcggacggggtcgacgacaaccatcacgagccggggtgtgcccggcgcggcccccgagccagtgcctgaggcgcggccgcctcgcccgaggtcgatcggggccatgctgcagcccccggccgacgtcgccgcatgcacgcacacgcagcctcgtgcgcctggcttaacgagaggcaagctctcttcggggatgctcgtgc

SEQ ID NO: 74676 - DNA, 317 bp, Zea mays
  Clone ID: MRT4577_1680C.1
ccgggcgaccgacgcgtccgggacgcgtgggctcaatttcaagcactgcctgttggccagtccatctcacttaacacctggggttgatcataagactctagggtccataaccttatatcctatctaccaggactaacgtccatgcaccatcactatctgctcgctttccgacgacaactatgtctattactgtacagctactgcatacaccatacctacaagaaaatgaaccgaccaaagcccgaatcctcctattatcaattgaagatggaagtatgcattaattgcccagaaagaaccaattgatcatctattcg

SEQ ID NO: 74677 - DNA, 276 bp, Zea mays
  Clone ID: MRT4577_168100C.1
tcggtccggaggccacatggacgaccagcacgcctttgtgacgaccggcggcgcctatggggagcagggacacaccggcagggcctacgggcagcagggacacaccggcggcgcctacgccaccggcaccgagggcaccggcgagaagaaaggcattatggacaagatcaaggagaagctgcccggacagcactgagcggcgcctatacgtggctgtggctgagctgtgctgggcgcgtcaaaagccgtgactcttatatgcgtttccataagatt

SEQ ID NO: 74678 - DNA, 813 bp, Zea mays
  Clone ID: MRT4577_168101C.1
aggcaattgaggcccgggacagagattatatctgtacagagtactggcgatcaaggccccatgcaacaattgagaatcgagacaatcagaatatgtcacctcaggatccaccccttgttgcactgagggggctcttccagcgggctaattgtgatgaactgcgagcactacgcagtttgctgatgagcaatagaattctgggcgacaattctaggcagcaggcttgccaaatccttgatgaggagattgcgaagcaatggcactgaccagcgtaaatacaggatgttgtactaaccaattgtttggcatgattttgttttgacgggataaatcagttttaaggcttgcttcttccgttgcccttgtgcccattcttttcattcttgtgaccatacccaattctttattgcaagtggtgtcaacaagcatgaggctacagctgcatcacctgcaaggaagtcaaaagtaagaggcacatgcatttgtaatggcatcataatgttctttattcccatttcattatggttcctcactatttctgaatagttgtggctgattgttatgttacccaatgacaagggtgagtaacttattataagatgtagctgggtcatcatattcctttgttcttgaaatctgttaaccatgcatgcttgtctgatgtaaaccacccttagattccgggtactcggtcattattgggattattctagtagttgtattctttgtggagcaaataacgatttatatgtattgtatgcatggtgtaactataactaactctttcatataaactgtatcagcattccatgc

SEQ ID NO: 74679 - DNA, 1975 bp, Zea mays
  Clone ID: MRT4577_168102C.1
ggattggaggccacaaacttgcagcagcaagcatgatggttctttctggtcaatcatttcctgcaaatgctggtgaatcagtgagaaatgcgcatgtcttggcagtatttaaagagggtagagactgtacatcttcacttacacttagggagtatcataacaggccagtgtcaatgattgataatggagctaacatgaagctggatctggaaaacatagacaattctcatatgttgatgtcatcaccagacttcaatgcaactgtatgtcattcttacaaggatcaaacattcttaacactggaaactaatacctctgtgatgactgagaaagatagcagtcaggcccgtaatgcaagccagcagtttgtcagtactgctttaagaacacaaaatgtgtctcaggaaccattgtgtaccgcgattgctccaaagcaactcatagatcctcaagttcagaaaaaatcatatgggggttttggttctggcagtgcccatcttgggcatctgactgttggtaatcagcaactaaatgagagatggcatcaaagacaatctgattctttatccagtgtggaagttagagctaggggtcattcagctatgatagtgcagcctgctctggaaaatcacagcagaaatggagttgcacagaagggtcctcgcatagctaatgttgtacatagattcaagtgctctgttgaacctatagaaattggtgctgtgttatctgggaagttgtggtcctcaagtcaagcaatcttcccaaaagggtttaagagcagagtaaaatacttcagtgttgtagatccagtacaaatgacatactacatatctgaaatattggacgctggacagcagggaccactttttatggtgactgtagaaaactgtcctggtgaaattttcataaacatctctcctaccaagtgctggaacatggttcgtgaaaggctcaatatggaaataaggaggcagctcaatatgggaagagctaaccttcctacactacagcctccaggatcagttgatggccatgaaatgtttgggttgttaacaccagcaatagttcaggcaattgaggcccgggacagagattatatctgtacagagtactggcgatcaaggccccatgcaacaattgagaatcgagacaatcagaatatgtcacctcaggatccaccccttgttgcactgagggggctcttccagcgggctaattgtgatgaactgcgagcactacgcagtttgctgatgagcaatagaattctgggcgacaattctaggcagcaggcttgccaaatccttgatgaggagattgcgaagcaatggcactgaccagcgtaaatacaggatgttgtactaaccaattgtttggcatgattttgttttgacgggataaatcagttttaaggcttgcttcttccgttgcccttgtgcccattcttttcattcttgtgaccatacccaattctgtaagaattgctaccttattgagtgatataagaggtgcctcatctactactacggggttgcaaattatgatccttgttttttcttgatcagttattgcaagtggtgtcaacaagcatgaggctacagctgcatcacctgcaaggaagtcaaaagtaagaggcacatgcatttgtaatggcatcataatgttctttattcccatttcattatggttcctcactatttctgaatagttgtggctgattgttatgttacccaatgacaagggtgagtaacttattataagatgtagctgggtcatcatattcctttgttcttgaaatctgttaaccatgcatgcttgtctgatgtaaaccacccttagattccgggtactcggtcattattgggattattctagtagttgtattctttgtggagcaaataacgatttatatgtattgtatgcatggtgtaactataactaactctttcatataaactgtatcagcattccatgc

SEQ ID NO: 74680 - DNA, 206 bp, Zea mays
  unsure (1)..(206): unsure at all n locations
  Clone ID: MRT4577_168103C.1
nnnaaaggaagtttttacagaatgttataaggccnaaaaaacnnnnaacaaaaaaaaaaanacattggccaaaactgcaaaaacccaacaaacaatcttgccttacccccccctgaaaaaaaacaacccctgcgaccaacggaccaaaaaccgccccgctagaaaaaaacccgtcccttatacccaaataacatgtggctccaccg

SEQ ID NO: 74681 - DNA, 656 bp, Zea mays
  Clone ID: MRT4577_168104C.1
agccctctcccccactctggagaaatgctctccgcctccgcctcgcagactcccttctatcctctccggcacgagacgtacagttcaattcacctcggcccgggaccgcgactacaccgacggcggggcgtccgagcccagtcgacgacgagccaatggtgactccagcgacattctccctccgccccagcgagccccccgggccgcctcgagacgggctgccccgcgctcgggcctgtatcgcgcccgtcatccgcacctccccttccgtcgccttgtcctaccagcctcggcgcttcaacgtcatccgctgcgccgaggacgtctactccgagcagggcttcgccgagaacccatagcacgagaacaagcccaatacgtactacttgctggaggtaaacgacaagctcatgcgtggacgaggaggagcacttccatgagcgactctgcgagaagctgcgcaactacgacgagcgctgacaaagagcaggacttctggatcgtcgaggagcccaagttcctcgacaggtgtcccgcacattaccaagtgcctcgagtgccccgccgacgcgattgtctccaccgacggcaactggatcacattcctgaagttaaggctagacagggactgacaagaccagttctgcgcagaatca

SEQ ID NO: 74682 - DNA, 232 bp, Zea mays
  Clone ID: MRT4577_168105C.1
cacgatgcgaacgaggcagactccagcagtagatgcgaagtcgtcgccggagcaggaggttgagcgagcagcaagatgtcgtggcaggtgtacgtcgatgaccacctgctgtgcgacatcgaaggccagcacctcagcgctgccgccatcgtcggccacgacggcagcgtctgggcacagtccagaacttccccgagttaatgcctgaggaggtatctgggatgataaagga

SEQ ID NO: 74683 - DNA, 169 bp, Zea mays
  Clone ID: MRT4577_168106C.1
atttaggataaatgaatttgtaaagatgacttcgatgtacattgcatttccttgtaagaagcactggtttcgtctattttagctttgtaaacattatttattggaacagggagcaacacatttaatcctttactcatataaaggatgctatgtcgaattaacacataat

SEQ ID NO: 74684 - DNA, 207 bp, Zea mays
  unsure (1)..(207): unsure at all n locations
  Clone ID: MRT4577_168107C.1
agcaaatgtgaaattnattcaagaaaagaagttaattggnaagtattttgaagagatnagtnaggatactgggaaatatgttttttttgtttttganantntgaaggtttttgaaatgggtgntgnngagaaaatgattgtgtgggaaaatntggnttttaatagatttgtgataaagaanagtgntantggggaaattnttttaaa

SEQ ID NO: 74685 - DNA, 469 bp, Zea mays
  Clone ID: MRT4577_168109C.1
agattttctactgatatgttactccatcaagcagcgggcttgcgagtacataaacgtgtactacaagttctgctaggccagttgccagcgtaccctagctgaggggcgttatggtacgagttgcgcaacgatgtttacactttgacaagaaagacaagctcgtgacgatctgaactacacacccgagacagtatgctggagacgctgactaccatcatgtggatcacctctggccatcactctgtcgttaacttcggacagtaccagttctgccgctactttctcaaccggccgaccaccatccggaagaacatgccgttgtaggagggcggcccagtccaggagacggagaagttcatcatgtagtcagagactacgctgctggacatgctgcccacgcagatgcagaccatcaaggtcgtgacgaccctggacatcctcaagtcgcactccaccgacaaggtgtaca

SEQ ID NO: 74686 - DNA, 141 bp, Zea mays
  Clone ID: MRT4577_16810C.1
tattagcctgggcgtgcatttcccccgggatgatttccggatcttatcggttaatccgaactaactatgatatacattcagactaattttctacacataaaggttttatgtaatgcggacacatatataatctgtttactc

SEQ ID NO: 74687 - DNA, 326 bp, Zea mays
  unsure (1)..(326): unsure at all n locations
  Clone ID: MRT4577_168110C.1
atatttttcctcttntacttaataaaacagggttgtatatatattcaaaaagggagccaaacgttacagggacataaactcacacactggcgcaaaaagatcaaaaaagcatggtgtgtaacgatgccatacgattacatgcaccaacacaagcccaacatgaaccgacaccaaacatgcaatggcggaaagccagagtcaaaccagacgatggctccatcctttatttttgacacgccccaagcacaaagcaaacagtaaaaaaaaggtgaaattccatcatgcccaaaacgaaacaactcataaagatcagcagttgcaggggc

SEQ ID NO: 74688 - DNA, 318 bp, Zea mays
  unsure (1)..(318): unsure at all n locations
  Clone ID: MRT4577_168111C.1
ggccaagccagccttcgaggaacctccagccttaataaaatggaccggttaaaaaagaaggcccaaaaagaatcccaattggaaaacctggaaaggttaaaccgaatttggtcaaacccggaaaaagcaccgggccaaaggcggaaaaaaaaaaacctccggcgggaaaaatttgaaattgcaaaccgggataatgtttaacaagaagcggatgcatctgagcgtgatgacagcataaatgatggggaaatgaaaccagatgcatcctctgacagttcagaaatggcgtanaggtggtangagggttgggaggcactg

SEQ ID NO: 74689 - DNA, 708 bp, Zea mays
  Clone ID: MRT4577_168112C.1
aaattgagcccgttcttcctcctataaggaactgtgatttagcacacgaaacactagctactgaacccggcccaactataaatcatgatatagtatattcttctgagttgtgacatgagagacgtccatctctgtgagactcagaacatttacctagtgataaaagtgagtatctaaattgttattatgacaaatttaatattttaaaatagatatagataaaatttgatttgatttttttcttagttatcgaacgtattattacaaataagaataaaaatttgtatagattattttatacattatttgcttcctacaacaaaaaaagatgcacaaatatagagatatagagtatgaatatagagagctgagcagctatggccgaaagtaaggtaggtgcatatacttcgagattgcattttttatttcttttttatattttataattaaaagatataatcacggaaccgattttatatttgtgtttctgatatttgtacgaacaaaactagaccacacatgttatataatatttgaagatttatttgtgcactcttctctaagtacacgttgtaatacatataaccaaatacgagttgtatctgatctgaatgtactaatataaacaaccaaataaaaggctatgtacagatctagcatgtgcactgctcatgtatgatccaggctaccggtgtacagcaactaaac

SEQ ID NO: 74690 - DNA, 403 bp, Zea mays
  Clone ID: MRT4577_168113C.1
tgataatttgccatttgtcgcggattagtttcctctttttctccttttcatgacggcgaccgcgaagttgtatgaaaatcacattagcgtcatacattaagtgacaattaattttgcaaaggtgagatatttaccaaaaaaaaaaaaaaaaaaaaaaaaaaaaaaaaaaaaaaaaaaaaaaaaaaaaaaaaaaaaaaaaaaaaaagaaaaataaataaagatacggaaacttatctgggggcggccgttttaaaggtacaaattttacatcccctatattgcaacgttatgccccttttttggggtcccctaaactgatttaaccggcgcgctttctaaaactgacgacggggaaaaaccgttgggttcccaaatttaatgcccttttgactaatcccccttt

SEQ ID NO: 74691 - DNA, 171 bp, Zea mays
  Clone ID: MRT4577_168114C.1
tcacgcgcgccgtcggccggctcaagtcgggctgcagaccaggtcttcctcggcaacctctcggccgcccgggactgggggttcgcgggggactacgtcgaggcaatgtggctcatgctgcagcagaacaccggggattacgtcgtcgccactgaggagtcccacaccgtc

SEQ ID NO: 74692 - DNA, 810 bp, Zea mays
  unsure (1)..(810): unsure at all n locations
  Clone ID: MRT4577_168115C.1
cctcgaggccggccgggaccatttgtactggctgtgtgctggtcgtagctatcatccggatatagttaatggggaactgctgcacagccggctctgcaaagtgtgccaatgcatccactccatttgaatcaaaggtcacaagcaagagcaccgcgtccaacaactacagcagctcgacggcgacgacgacaacgacaacgatcgcctccgcgcagcttcagctaggcggcgactcctccgagggcgccgcgctcaagtcgttcagcatgagcgagctccgcgcggcgaccaagaacttcggctccacgtcgtacctgggcgagggcggcttcgggtgcgtctacaagggctggatcgacgaggcgacgctggccccgaccaggccgggcgtcggccgggtggtggccatcaagcggctcaaggaggagagcgtccagggccaccgggagtggctggccgaggtcacctacccgggccagctccaccacgccaacctcgtcaccctcgtcggctactgcgccgactccggcgccaacaagctgctggtgtacgagtacatgatgcgcggcagcctggagaaccacctcttccgccgcgccacgcacccgctgccctggcccacgcgcgtctccgtcgccgccgacgtcgccaggggcctcgccttcctgcacgcccgccccgtcatcttccgcgacctcaagtcctccaacgtcctcctcgcccccgactaccgcgccaagctctccgacttcggcctcgncaggaacgggnccacgggcgacaggacccacgtctccacgcgcgtcgtcg

SEQ ID NO: 74693 - DNA, 376 bp, Zea mays
  Clone ID: MRT4577_168116C.1
atcttctccgatccatcaaccatcgccgggagcgatcgagagataaataaagatgaagaaagtggccttatcggcagcccgtctcttctggctagccctgacgcctatttgtgcgcccctgatatctgaggccaagaagaagagagtctgcggcgccgccgcccgggagaagaaagggcaagacaacttctgctcgaccctgtgcgagggcccgaaggggatggacctggtggtgtgcaggagtcctgccacctcttacagcgcttcaaccttgggctggtcggcccgattcatcgcaagggcaagtgcaccgctcagaagggcgtctcccgcgccgcctatgaaagggtcgccagaagcggttcacaaggactac

SEQ ID NO: 74694 - DNA, 516 bp, Zea mays
  Clone ID: MRT4577_168117C.1
ccacgcgtccggtccgtattgctcgcatgcatggctggtctcgtcgattctaacaaccttgcctatcatgggcaacacatactatcggactgggtggtgccgtcggagggcgacagccggaagcgagggccagctagtttgttgagccacatatttatctggaccagtcaaacctggacgactacactacacgcccagatacacttcgaggtgaagctcgagcaaagtcttatatggcctatcggttgaacagtatcatgcggtgcaaaacatctgtactggatgacattggctatgactactttacacgagagtatgatgcaatatactacaaaaccatagaatcggaacatagataaaggtcatcttatggagcgtgcctgtcgccatcagatcaggaacactcttcccactgacggccttaacgctactcatcagaggggaagctgatgtcgctgacatagagcctgcatcattacctagtcgtagggcaacacaaggtgagaggaaatggtg

SEQ ID NO: 74695 - DNA, 195 bp, Zea mays
  Clone ID: MRT4577_168118C.1
tttgttttttgcctcagggcaacgggcgcatttttaacatttgaaatataagaccagacacagattggtattcctcacgatgaatattggggtagcaacatgagcttaaacagtacagtggtctaaaaacattgcaacgttccacacatcagctaggctggctgagccatgatcgcaagaaacttgaaatagtgc

SEQ ID NO: 74696 - DNA, 468 bp, Zea mays
  unsure (1)..(468): unsure at all n locations
  Clone ID: MRT4577_168119C.1
tcgaggccggccgnggttcccaactaaacgtgcagctgacccgatgctgctagttcgatttcgatcacttgctggtagctatgcacgtcacacctctgcggcggcggcaggcacggtggcctgcgcgatcctcctgagcttggcgatgatcatgacgaacttgaggtggatgatgctcaggtcgtcgccgagctccctgatgtacgaagactccaccagctggtccgactcccactgctgcacttgcacacaaaaaaatacgggcatgttatagtatatattgtaatgtatagtagtagtgtttcaggttgggccaagtattcgtaaaaactactactaccacagtcacaggcacggctactacaaatatcaggctacctacagcattctttctatcctaacttctactttaaattttacttgcaaacaatgttatatctagaaaaaaaaaaaaaaaaaaggccccta

SEQ ID NO: 74697 - DNA, 1506 bp, Zea mays
  unsure (1)..(1506): unsure at all n locations
  Clone ID: MRT4577_16811C.1
ctcgaggccgcccgggtcgcccatcccatccgcctctccttcggcgataaactccgtggtccgcagccaccgagccgagcccggcacagacgctactggcacgcacgcaccagcaccagcaccacaccacatgaatggtggagcctagcacgggcagctagctcccggccggcgacgtgacgaccaccaccaccacatgttgcatgagcagcaggcaccgccaccggcagtagcagcgccaccgccatccatcaaccccgacgacgacggcgcccgcgatgtcgaggtcaccacgttccgcgacatccaccctctgacgcccgacgcgccgccgcccgcctccgcgtcctgggacaccgccagccaccgctccttgtcgtcgtccgacgaccagcagtacatgacgatgagccgcgagttcacggccatggtcgccgccggggcgaccatgcagcccggcggctacgacggcgccgccgaccagctcaccagcatcggcgaggacgagctggaggagaccaacccgctggccatcgtccccgacagccaccccatcgccacgcccgccaggtccagggcgtccgggctggaggtcgtgcccgcgggcccggcgccgcagccgcagccgcagccgcccgcgcacctggaggccagccaggtcaagaaggaggaggtggagaccaaggtcacggcctggcagacggccgaggtcgccaagatcaacaaccgcttcaagagggaggatgtggtcatcaacggctgggagaccgagcaggtggagaaggcctccgcgtggctcaagaagatcgagaggaagctggacgagcaacgcgccaaggcgctggagaagacgcagaacgacatcgccaaggcgcggcgcaaggcggaggagaagcgggcgtcggcggaggccaagcggggcctcaagctggccaaggtgctggagctcgccaacttcatgaaggccgtcggcagggtgcccaccaagcgctccttcttctagccagccgactaccgctaccacctccgtctctccctgcctgcgtgtgatcgatgtacgctcgctgctgcatccgagaacctaactgtaaagaaaaaaattgtaagctgtatacgtactactgcctgctatggtcccctgtgatgtctgtcatccatcacagggtgccagttgttctcttctctttctcttctcttctcttctcttggcttgtatatcggatccatatgctggtggtgcttgaacgaactgtcgttgtttgcttaaccgtgcaaacatatacagtggtatatagtatatacactacattcaacaccccgtggaaaaaaaaaaaaaaaaaaaaaaaaaaaaaaaaaaaaaaaaaaaaagggcgggccggtcttaaagagatccaagacttaccgtaccccgtgccatgcgcacgncatagatttcttctatagtggtcaccctaaatttaattnacctggcgcgccgcgtttacaacgtccgcgactggggaaaac

SEQ ID NO: 74698 - DNA, 431 bp, Zea mays
  Clone ID: MRT4577_168120C.1
agcggccggggatcgcgcgccaacccgagaggagggaccaggggggcgacagaggcagccgcggaaacccgcccgccgaaggacaggacaggggggacaggaaagcagaggcagggacaggacgccggcgacgaccgacgccgcaggcgagccggccaccacggagccgcggagggcaccgccggagacaaccaccaccccggccaccgaaaacaaggcacggggggagcgcgacaccggacgggcccgggggcgagaccaaagcaagcgaagacagcgcgggcgccaaggggaggcgggagagcaagcaccgggcgcaccgagagggacgagcgcagcaacgacggggcgacccgacgggaacagggacggcacggaccgagcacaaggacagacaaccaggaggacaaccgccaaggggacacggggga

SEQ ID NO: 74699 - DNA, 428 bp, Zea mays
  unsure (1)..(428): unsure at all n locations
  Clone ID: MRT4577_168121C.1
gtgtgttctcttcattcttcacggcttcgccctcagacctcgctgcttcttctatccggagaagcttctagaaacaccatctccgatccatcagcccagccaggcctacctgctggtggaggtcgacacggcgtgctgttccgtgccgcttccttagcggtcgcgcgaaggatgctggcgtccagggtctggtctaggtccgcgccgcagtcctcgcgcgccttggcttccgcagcggcctcggcggcgaggtcccttctactgaggtccggcatgcagctctcccaggctcctcccggnctcgcagagcggccctgcgccgggatagctgaggctgatgcgccgccgctgcgctcttcttcaggcgattcacgaggacaacatgcctgcttaagacgcccatatccaatacatccagcgtctaatcc

SEQ ID NO: 74700 - DNA, 836 bp, Zea mays
  Clone ID: MRT4577_168122C.1
gccggccgggcccggatctcactgtccgtagcttagaacggatctttgctccagcttgagttcgtcttctccccgaggagctcctccccgagcggtcctctccctgggcgctcctctcctctccccgagcgctcctcctctcctcgacgacgctggagctctcctcgacgaccctggggaagctggccatgtgctgcgtggtgttcgacttcgcggacccgaccaaggacgtgcgggagaaggaggtcaagaggcagacgctgctcgagctggtggactacatcacctccgccaccagcaagttcccggagcccgtcgtgcaggaggtcgtcaggatggtgtctgtgaatctgttcagggtgcccaaccctgccccgagagagaacaaggcgctcaagtcgttcgacatggaggaggaggagtccgtcatggaccctgcgtggtcacacttgcagatcgtgtatgagttgttcttgaggtttattcagtcgcccgagacgaacgcgaagctggccaagagatacattgaccacggcttcattatcaggcttcttgatctctttgactcggaggatcctagggagagggagtacctgaagacgatccttcacaggatatacggcaagttcatcaggaaggcaatcaacaatatattctacaggtttatattcgagacggagaagcataatggtatcgcagagctgttagagattctggggagtataattaatggctttgctttgccgctcaaggaagagcacaaattgtttctagtctgccacttccacatgagtagtcggattgaccattctaggctgccacttccattcacatga

SEQ ID NO: 74701 - DNA, 477 bp, Zea mays
  Clone ID: MRT4577_168123C.1
ctgaaaaaaagggggccttgcccggcggggggcccccccgcacaaaacccccgacgggccctcccaccaacccgaccgtaccttaaaggcgaccgtccaaaccttgaaaccaaaggcggccgcgacccaacctagccccccaagaaaacaccccccccccgaacccttcctaggagggccccactggggccccgaaccttgccccggcgcaaaccgggggatcaccgaacccctccccccccccaagcagctgggggtccttggccaggcgcccaaaccgccagggggctcccaccttgaaagggcccccaaaccggccccccccaagggccgcccataagggggcccccggccccccacccccgggggttgcccccactccccaaccggcgggcctggacatcctgaccgtttgaaaacaccggggagcagaccccgttgggggcccccccaacaagggaaccccggaggggttct

SEQ ID NO: 74702 - DNA, 214 bp, Zea mays
  Clone ID: MRT4577_168124C.1
cgtacacatgttcatattcttttttttgttttttttctcccctgcgctgttaatcacgtcgagtgttccaacagtggtgcgagcaccccgagcggggactatgcacactggtacgaggaatgtaatgtgggggaccagcccggactttcccgacgaccaggacccgtactttgcgtctttcctagatggtgtgcgcgctcataaccagttctca

SEQ ID NO: 74703 - DNA, 3234 bp, Zea mays
  Clone ID: MRT4577_168125C.1
atctctagaaggcgtatatacaaactctgctgccaccttgtcccgatactttgggctaagaacatcttgcaacgataaaaagagaggaaatcatgcaggagaatagatttcgtggcaccacaccgatgaacgtggagcgggaattctccagcgcggggcgcgtcgcgaaacgcgtacgccaagaatatttttacggccgacggtcggagcctatccgttttcacgacgaaacttggatttggtccagaaatgcacctcgccgtcgtcttaaatttcctcgcccgatgtgggctatcgcccaccacctccctctactgtgtctgtctcccccgccgcgtcgtcccggacgtatccatccactgcgccagcgccgcgagaagagacccgcccgccgcaccagcgcctccgtccgcgagttccacctgaatccccacagcttcccgcaccaacgaatccggccagtccgcggcgcccccggcccactcgcggcggaaattcgtgacaaagccgcgattttttttcttcttcttcttcgcccttttgctttcgctcccgccggcccccttttccttttcttgttgaccccgccggtctgccccttttattgctgcgccggatcgtgttttctcgtcggaaggcgcgggctttccgagggcggcgatcgcggattcgcccccggaggcgtcgatttggttcgcaggtggaggaggggtcatggatccggggagatttctttagcgcgggttcgttcagggacgcttgtcagaacccgtcatgattaagcagatcctcggccggcttcctaaaaagcaggccaagtccggcgagaaggagctggccggcgcgggcccgtcgctgcccagcccgacggccgatacgagaaccaccaccgatttgaccacgtctagcaggcttgtcagtcccagcaactacgcctccacggccacgaatcaaggccagagcttcgtggcggtcagggtcgccggcgtcagcaacgggttcccggcctcggcagggtatgaggcgctgccgagcttcagggacgtgccggcgccggagaaacctggtctgttcctcgggaagctggccatgtgctgtgtggtgttcgacttcgcggacccgaccaaggacgcgcgggagaaggaggtcaagaggcagacgctgcttgagctggtggactacatcacctccgccaccggcaagttcccggagcccgtcgtgcaggaggtcgtcaggatggtgtctgtgaatctgttcagggtgcccacccctgccccgagagagaacaaggcgctcgagtcgttcgacatggaggaggaagagcccgtcatggaccccgcgtggtcgcacttgcagatcgtgtatgagctgttcttgaggttcattcagtctcccgagacagacgcgaagctggccaagagatacattgaccacggattcattatcaggcttctcgatctcttcgactcggaggatcctagggagagggagtacctgaagacgatccttcacaggatatacggcaagttcatggtgcatcgccccttcatcaggaaggcgatcaacaatatcttctaccggtttatattcgagacggagaagcataatggtatcgcagagctgttagagattctggggagtataattaatggctttgctttgccgctcaaggaagagcacaaattgtttctagtccgagcgctgattccactccacaaaccaaaatgtgttgccatgtaccatcagcaactgtcgtactgcgtcactcagtttgttgagaaagattgcaagcttgctgatactgtcataaggggtttactcaagtattggcccatcacaaatagctcaaaggaggtgatgtttttgggtgagttagaggaggtgctggaagctacacagccagcagagtttcagaggtgtatggtgccacttttccgtcagatttcccgatgtttaagcagttctcactttcaggtggcagaaagagctctctttctatggaacaacgaccacatcgagggtttgatcaaacagaacaacaaggttatactgcccataatcttcccagcgttagaacgaaacacgaaaggccactggaaccaggccgttcaaagcttgagtctaaatgtccggaaaatattcatggaccatgaccccgcgctgtttgaggagtgtcacaagaagtttgaggaagaggaagcccaagaagctggcgtaaggtcaagacagggaggctagatggaggcgcctagaagaaatcgcctcgtcaaattctcctcagtgaagtagcgcgtcctcctgaggctgtagttcttcatcagtagagttcttctagctatcttgtcttggggactttgcatattagcagctcttttggacaggatcaagtaaatgctgatgatgtagttgctggatgtcttctttccacttgttacttgtgaccgaacgttctacaggccgacatgaaaatacgaggtacatgatgggctgtgaagcttcaaccgagcctcggcgggttctctttgctttgtgatccactgatgacagtgtcggtttcatcatcataggacaaaggaaaggaggtaaaatggtccttttccgggtcaatgtcttgatccaaggactgttaggagcacttgaaagacgaggaaggaggcaggtagcacttgcccttgctgatggtgattttgctgaaatgtaatactatgctttatgtatgatgcatggtaacttgaagccatgtctggtgataatatgtaatcctggtgtacatgtcttttccttcctttgatgtatacagaaatttggaatgaaaaaaaaaaaaaaaaaaatcctcgacccagggaaaggatgtaaaatggtcattcctgctttactgagatgctcatgccacatgttaacgtctagtctgcggctcaatgtcttgatccaagcactgctagaagcacttgaaagacagtcgagcagcacttgttcttgcctgctgatggtgattttgctgaaatgtatagcatgctttgtgtatgatgaatggtaacttggagccatgtcttgtgatgatatgtaatcgtgttgtacatgtcttttccttcctttgatgtatacagaaatttggaatgaagtgctcattgattgatgtttaaaaaaaaaaaaaaaaaaaaaaaaaaaaaaaaaaaaaaaaaaaaaaaaaaaaaaaaaaaaaaaaaaaaaaagggcggcggctcgcgttctaga

SEQ ID NO: 74704 - DNA, 694 bp, Zea mays
  Clone ID: MRT4577_168126C.1
ggtatttatggctcctctctgtcgcgtcgtaccccctacagtaaggaagaggagggcaggatgtcgcaccgtaagttggagcagccgaggaacgtgtccctcggcttccttctgagaaagcgctcctcccgacaccgagctgaagggaagtaattccctagggatgacccccagaagccttgccatctcactgccttaccatggctacaacgctggtatgactacagcattgtccgagaggctgagaagccaccatccatagctccataagaaggaaacttgagaggctgctaccatcattgaagaccctcctcttgacattgatgggctcgaggaatatgtaaagactccgcgggggctccggacactcaactctggatggcgcccacatcttaataaataagtgatgagaagggtctacgagaactggagcaagagcaagaacaacgctttcactaagtatgctctcaaatatgaaaatgatgcttgcaataatgaaattcagctgcaacttgagaagatgaataaatatgcttctggtatccgcgtcattgctcatacccacaataagaagatgaagggcttgaagcataagaaggctcacctgatggagattcgcgcctatggtggtaccattgctgacaatgtggactatggctacaaattctttgagaaatagggccctggtgatgct

SEQ ID NO: 74705 - DNA, 645 bp, Zea mays
  Clone ID: MRT4577_168127C.1
ctcgaggccggccgggcagtctttcccacgcggcgacgccttcacctcactccttcctccgacgcttgctcctgcgctgacacggtcgcccgacttacgttcgatggccgccgcacgtctccgccatcaccgccggctccggcggagtgcttccccgacacctggctatcccaccggtcgccgccgccgaacgtcctatacgaggtctcctcatgccgccgcatctccttgagctctgcccctcaccaggatctgtcagatgatccccctcactgatgaaagagtccaaactgaagaaccaacaccctgccacgtgcgttgcttaaatgctaacacaaggagaacataggccctagtcgctggggggtaaacggaggaaccgacgacgccgatcaactcgaaggcaaagatcgacaaaataattggcattctgaataactacctcaatgaggatgctgataagagaaactgcacgcatcgaggctggcgaatattgactgagaagaacgtccaacacaggagacgccgatctttaagccataatcatcagcgatagcacaaaactggtgggcacactacaatccgcgacagaaagatcattggtggcgtaggaccccagataaccttcccagtgaactcacccag

SEQ ID NO: 74706 - DNA, 437 bp, Zea mays
  Clone ID: MRT4577_168128C.1
tgggcttgcttgctcttaattaggtcatcagcaaacaacaaacaatggcaccgaggctagcgtgcctcctagctctggccatggcagccatcgtcgtctcgccgtgcacgggccagaactcgccgcaggactacgggcacccgcacaacgtggcgcgcgccgacatcggcgtcgggacggtgccctgggacgacaccgtggccctgtacgcccagagctacgcggcgcatcgtcagggcgactgacagctgatacactccggcggaccctacggtgagaacctcttctggggctccgcccgcgtcgacctggccccgtccgtactccgtggtgttctgagtgcccgagacacatgactacgcccacgagaccaacacctgcgcgaaggggcaggtgtgcccccaccacacacagctgcgagtggcgtcgactccacc

SEQ ID NO: 74707 - DNA, 1657 bp, Zea mays
  Clone ID: MRT4577_168129C.1
aattcggcacgagggctacagcaaagtcgtgttaaaagtcgcccatctgcacagctatccattgggagtagatcgaggaccatcctcgctaccctgcaggccggcactgcactgcactgcagtctacagaactcgtcagtcacagatcggtgcaggcggtctgcacctgcatcacctaaccaattcctcgattagtctgctgttgcgatttgcgaggcaggtcagctgcaatctttttgcagcagccactaaacctgtaccaagtcttcttgcctgagggcagaggcaggctccgtcagtcacgccggcggcgtacagatcatggaggactttggcggctggaatatgcagtatgcagcagagctatgcctgccaagccgccgggacgacgacgacgacggcctcctcggtgatttcctaggcggcggcggtttggacatccgttctgaccatggcggcctcaacctgccctcgtcgcaccctgctgtccagaaccttgtgccctgccacggcggcgtgagtctttccgtttccgacgccttcatgggcctggacacggcggatatgctcgctagcgtcaccggcgcactggactgcagcctcctcgacacgtttgcttgcggttcggacgccgtcgtcgtcgccgaggagcccgccgcgcagcccaccgcgtcgagcaacgccttctccggatacagcagcaccacgggcggcaattacggcaacatctcctccggcgagtccaacacgtacggcggcagcggcggaggccatgacacggaggttgcgtcgccgacctgcgcctcgaagcggaagctggccggcaagtaccctgcaatagccgcgtcggcctcggccacagccacgacgacaacggcggaggggcaggttgcagccccgcggcgtggcacgaagcgcgactccgcgacgtcgtcttcgtcgaccagcgccacggtcgccgggcatggcggcggcaaccatgcggccggaggaggcgggtcgtcatcggtcggcgacgggaacgggtacgagccggactcggaggcaatagcgcaggtgaaggagatgatctaccgcgcggcggcgatgcggccggtgcaccagctcgtgtgcggggccgccggcggcgagccgccgtcttcgtcccagaacaagccgcggcgcaggaacgtgcggatctcgagcgacccgcagacggtggcggcgcggctgcggcgggagagggtgagcgagcgcctgcgcgtgctgcagcggctcgtgccgggcggtagccggatggacactgcgtccatgctcgacgaggcggccggctatctcaagttcctcaagtcgcaggtcaaggcactggagagggcaaaccctagtagtaatggtggctacaacgacagcagcttcctgccgcagaattacacggggtgcctctgtgtcgacggtggcaccagtgttgcctttggaagcgatggcgccattgggggctacgtaaaaccaggtaggaacatgcaccggtagcgatgcaataatgtaaccattgatgcgagtgagcgatatatgagagaagtactgcagtactgctactggattttgagtttaataaggctttactgtatttctgagtaataataatcaaaacgatttgatttaaaaaaaaaaaaaaaaa

SEQ ID NO: 74708 - DNA, 681 bp, Zea mays
  unsure (1)..(681): unsure at all n locations
  Clone ID: MRT4577_16812C.1
ggcgggtctcgnaaaaaaaagagcccggcacgatactactggcacgcacgcaccagcaccagcaccacaccacatgaatggtggagcctagcacgggcagctagctcccggccggcgacgtgacgaccaccaccaccacatgttgcatgagcagcaggcaccgccaccggcagtagcagcgccatcgccaacttcatgaaggccgtcggcagggtgcccaccaagcgctccttcttctagccagccgactaccgctaccacctccgtctctccctgcctgcgtgtgatcgatgtacgctcgctgctgcatccgagaacctaactgtaaagaaaaaaattgtaagctgtatacgtactactgcctgctatggtcccctgtgatgtctgtcatccatcacagggtgccagttgttctcttctctttctcttctcttctcttctcttggcttgtatatcggatccatatgctggtggtgcttgaacgaactgtcgttgtttgcttaaaaaaaaaaaaaaaaaaaaaaaaaaaaaaaaaaaaaaaaaaaaaaaaaaaaaaaaaaaaaaaaaaaaaaaaaaaaaaaaaaaaaaaaaaaaaaaaaaaaaaaagggggggcccttttaaaaagaaccaaatttacctacccgggcatgcaaaggaaaaactttttttttggggccccc

SEQ ID NO: 74709 - DNA, 228 bp, Zea mays
  Clone ID: MRT4577_168130C.1
cattttctttttcgcataccgcaaacaccgacggtgacgactacaatgtttgttgggacctcaccacagatccgacattttttgccacctactcctacgattcgttctgccatgttgggcacaaagagatatatacatacttgcgtacatactgctataacatcttgtatttttatttactagctcgcgagcatatatatgataaatataaccgactgtcgtttatgc

SEQ ID NO: 74710 - DNA, 654 bp, Zea mays
  Clone ID: MRT4577_168131C.1
ccgggccgacccacagatcgaggaccatcctcgctaccctgcaggccggcactgcactgcactgcagtctacagaactcgtcagtcacagatcggtgcaggcggtctgcacctgcatcacctaaccaattcctcgattagtctgctgttgcgatttgcgaggcaggtcaggtactgacgtattgcatttgcatgcttagctagctgatagatgatctttgtttcttctctgcttttgctctgtgtatgtgtttactgcaggagaatttgtaattgcaaatcgtctcacaaattggtactgactgaaagatgatcttgtgtttcttcattctgtttgcacgatgctgcaatctttttgcaccagccactaaacctgtaccaagtcttcttgcctgagggcagaggccggctccgtcagtcacgccggcggcgtacagatcatggaggactttggcggctggaatatgcagtatgcagcagatctatgcctgccaaaccgccgggacgacgacgacgacgacggcctcctcggtgacttcctaggcggcggcggtttggacctccgttctgaccatggcggtctcaacctgccctcgtcgcaccctgctgtccagaaccttgtgccctgccacggcggcgcgagtctttccgtttc

SEQ ID NO: 74711 - DNA, 286 bp, Zea mays
  Clone ID: MRT4577_168132C.1
cagcaagcatcatataatgtccagtccattttcaacactagagcagcagtggcgaccaagatagtggccgtgcttatgctccatgcggtctctacatgtgatgctcacgcgacaattctccactaatgctcacacgctcctatagctactgttattaccccataccttccatcattaatagcttcagtatgtgataacccatctcttcaaccatataggcgttaacatgcattctcagctagcaacatacctttatcgcccttgtaagctcaacaatcaccaaccc

SEQ ID NO: 74712 - DNA, 419 bp, Zea mays
  unsure (1)..(419): unsure at all n locations
  Clone ID: MRT4577_168133C.1
ggacaaaaaaaaaacccttgtttttataaaaaaaaaaaccgccgggcagggcccttaattttttctgataattttgggttacaggcgggggagggggggagcctacagttttacccattccaaaggcttaacgggggtccatttttgccccccccctccacaaggaaatcattttatacccgaccctgacctttttttgtgggggcccccaaaggaatcccttttgcacctttttcagcggggnaagaccagggcttgaaaaaccccccataccgttttgtccacccccccaactttccagggatgttctttgccccgggggaatctgcccagggcatgcccccccccctacaagggggaaaccccctcccaaanattgaagggccgcctacgaccaaaaccccgtacggaaacccccc

SEQ ID NO: 74713 - DNA, 786 bp, Zea mays
  unsure (1)..(786): unsure at all n locations
  Clone ID: MRT4577_168135C.1
gggttccccgaccgaaggctcgcgaccgcctcctcttcatcctcagatctcgccgccgccggaatgctcccctcctcccgcggcggcggccgcagacgcctcgtcctcctcctcgcactcaccgccgtcttcgccttcgcttctccgctccgcgcgtccgcctcagagtctgaccacaagtacaaagctggagattcagttaagctctgggtgaataaagttggaccttacaataatcctcaagaaacttacaattatcacagcctcccattttgtcaaccatctgagaaccctgggcataagtggggtggtcttggagaagtcctgggtgggaatgagttgattgatagtcagcttgacataaagttcttaagaaatgtggaaaggggatccatttgcacactggaactagattccaagaaggttcaacaatttgctgatgccattgaaagctcgtactggtttgaatttttcatagatgatctgcctctttggggatttgttggagagactgacaaaaacagtgaaaacaagcactatctttacacgcacaagaacattcttgtaaagtgcaatgataacaggataattcatgttaatctcacccaagagtctcctaagctccttgacgctggcaagaagttggacttgacatattcagtgaagtgggtaccaacagatgtttcatttgcacgccgtttttgaagtttaccctggactatccntttcttttgacaccagattcactggntctccattttcaattctttcatgatggttattttt

SEQ ID NO: 74714 - DNA, 1055 bp, Zea mays
  Clone ID: MRT4577_168136C.1
gggtacctcgaggccggccggtcggaagtatggcccggggactgagagaaaatacttcgccgagaaggaagaatcagccgtgcggttggacacggagatgccgagaagatggacgcacggagtcaccacgaacctatcgactttttatctccagatccagattagctaccacggcaccgccagcccgggcggctataaagacgaggcccatctcgaaatcgacggcgatgaagaagaccagttcccctctcctgatcgtcctgttcctcacagcagcagccatggcggccgagccggagaagcaggcggcccccgcggcacaggagacggccgtgcacatcgtgtacgttgaccgccccgaggacgccgaccctgaggagttccacatccgcaccctcacccccgtcctcggcagcgaacagaaggccagggacgcagtgctctaccactacaagaacgccgccagcggcttctccgcgaagctcaccccccagcaggtcaaggatctcaaggagcaaccaggtgttctccaggttgtgccgagccagacttaccagctacatggtcctgggtctggcactcaccagggcacgacacacaccttgggccttatgtgaaggcgtatgagaatcaagaagactgtgtttagtatggctgtatggcacaggtctgacgaatgtgtatagtacagtactatgtaagaataagggacgtatcgtctatatactgctttgcgcatgctcagccctgttctaaagcttgtaatgcaccaatgcgtatgttttcaatacaatgacaagtatgctatcttgtttggtgcttgatcggtccgtgtttgatccttgaatctggagtggagcactctgcctctctgcgtccgctttgtgttgcttatttgctatgttgttgagtttagggttgaaaacggaccggtaaaataccgacctgtatcgttttctatatttgacccgattgtatatttgatccgattgtttctatatttacggaaaaatatggaaacgggatggattaaaaaaaaaaaaaaaaaagcggcc

SEQ ID NO: 74715 - DNA, 456 bp, Zea mays
  Clone ID: MRT4577_168137C.1
tttaaaaaaaaaaaaaaaaaaaaaaaaaaaaaaaaaaaaaaaaaaaaaaaaaaaaaaaaaaaaaaagaggggaacaaaaataaaaaatacgatgttatgggacgaggtttttgggttttttaagggtgccctttcttggccttcgtgggccggtgttttggcccgggtgtcccgggagtatgcctgggggtacccccttgtcttcgcctggttgattgggccacctttggccaccccctttattttccgtgctggtccccctttgccggtcccttgccttttgtgtttcgcactggttgcgcactgtggtcgcccttggggcgggcctttaacgcggggggttgggggggtttgccgggggggttccgctaagtgggcccggtcccttgggccccttccttgcgcccctttcctttgctttctcgcctggtttcccggttttttcggttttttttt

SEQ ID NO: 74716 - DNA, 407 bp, Zea mays
  Clone ID: MRT4577_168138C.1
gggaaaaaaaaaaatttaggtccctttaaaccccccccttttacatgactacccattgacagaaatttgactgaattttatgccttggtaaacatcaaactttcaaaggggattgtttctccccccttcccccaacaaaaacatggttttaaggatagcattccaaacaaagggcaaaaccttttggggaggaaatcccccctgcatccttttaaagcgaagaattctctatcccgctttttggattcttttatccccgaacgggagggggacaagttttttagccccttgcggatgttctgtccctttgtataccttgggggggggaaataaattttttcccaacctttccttggggagcatgccacaaaccgcatggtcaaagattctttctggaattccttttt

SEQ ID NO: 74717 - DNA, 235 bp, Zea mays
  Clone ID: MRT4577_168139C.1
tttttttttttttttttttttagattattaagcttattataacccgtacgtactcgttacaatgcaatatcaaatatcgcccgcgcgcggtccaggtttgcacacttgcaggcctacgtacaggcttcctacaagggcgacgtcgaccaacattggcgacaaggtcagaggcacggcgacggagggccgaaggggccgccgcggggagcccaaaggtcggcgaaagcggagagga

SEQ ID NO: 74718 - DNA, 145 bp, Zea mays
  Clone ID: MRT4577_16813C.1
gcgttccagcacgtcgtttcgtgagctgtaaatgtgctagctttcgtcaaactcattgacgggagcagtcccgtcatttgctggtgtgcatatcccttctcattgtgctcaaccttgaccgtaatcaactgtacggtcacatccc

SEQ ID NO: 74719 - DNA, 498 bp, Zea mays
  Clone ID: MRT4577_168140C.1
aatacccgtttaacaacaaccgaactgggtttcaccctatcacatagcggattatgtgtaaaattccctccaaatacacttggcgacaagacaactctgcttccttgtcccacctgtaaaaccagacaagatgttcttgcagatgtttgacagcttgggtctgtaacaccaaaagagtaggggcgctcctaaacatgtcctccaactagaagaccatctttttaacttattagccttctttggtgcatttgttgaccgatggcttaatcttactggtgctgtcgcatggtcctttgggctcctgcaccacatctatccttccttcttgcactttttatatcactgtaagtcttgatcttgtttcccttggccttaaactgaccctagagagtcttttttatgggcttgtatgtctttgacttgatgatgctacgaatgattccacttttatttacaaacatgggtccttttagtgccatatacctattgttggcttca

SEQ ID NO: 74720 - DNA, 427 bp, Zea mays
  Clone ID: MRT4577_168141C.1
cccgggcgggccacacccttccaaaaaaaaaaaaaaaaaaaaaaaaaatttaattttaaaaaaaaaaaaaaaaaaaaaaggaaaggggaaaaataaaaaaaagggaagggattaaaaaaaaaaaaaaaaaaaaaaggggcccccctttttaaagatccaaattttcctcccccttctttccaacttataattttttttttgttgcccctaaattaaattaacttgcccgcgttttaaaaccttttaacttgaaaaacccttgccttccccaacttaattccctttaaaaaaattccccttttcccaacttgctttataaccaaaaggccccccccggttcccctttccaaaaatttcccaaccttaattgcaaattggacccccccttttaccgcccattaaaccccgcggttttttttgtttcccc

SEQ ID NO: 74721 - DNA, 299 bp, Zea mays
  unsure (1)..(299): unsure at all n locations
  Clone ID: MRT4577_168142C.1
cgcccagcgtttggtgggttgcccttncaaaaacccccggggggggcgccttgctccctggcggtgtcttggcgccctttgtttggccgttgtgtcgggctcgcctgttgttctctgggttgtcctgttctcttgcccgcgcctctttttttttttgccgncggccgccgggggggtgtttttttttttccgngccgcctcttcggggggggcggggggggccccgcgtcggctgttttctttcttttttttgttccttggcttgtctgcgtgctgccgttgtctctcttgttgtgtgt

SEQ ID NO: 74722 - DNA, 329 bp, Zea mays
  Clone ID: MRT4577_168143C.1
ctctgatctaaactacttttgaggacggactcaattccgcatcacacacatcccgttcatgggcgatattcagaggctgggggtgctctccatcctcgacgtcgttctcacaatggtggccgaacacagggaggaacttaacctactaaatgactacatccagagacgctactattacgacttgtgcagcgactaccccctgcgattccggcagttagtgaaatcctcctttgaaattcaataactttgaacaattattattactaaataagccgcgttttcttggacaattaatttaacttccggaaggaaggcctttcaattttatt

SEQ ID NO: 74723 - DNA, 429 bp, Zea mays
  Clone ID: MRT4577_168144C.1
gcgtgcgcgaatgattcgacgcatacccgagagtggttgtgggacgagctatgggctgcgcgcccacgtggggcgcccaggtccctttgctcgcgcagcatggctgttcatcattcgtgcgcgagtgcaggtgcgcgggtctacagggaacttaaagcctgacgcggaacgcactgtctggcgctgcctcagcaaaagcatggcgccatgatcacgtagagaaaggccgcggcgtgtgccaccttccgccgatcgactatggtgctgggcaccctgatcctgtccatgacgcttatcgttttctctgtagccaacccactgcggctgacactcagacgcgttacgggcgcgacaatctgttctacctaaacaacgacggccagtgtgtcacgacccctcctctcgtaagccaggtgttgaccgtctgca

SEQ ID NO: 74724 - DNA, 360 bp, Zea mays
  Clone ID: MRT4577_168145C.1
aaaccggaacacggaatttaattcctaataaaaaacaggacatccaaactagacatatggggcaggcggaaaatccgcctttccgacaaaagggggacccaaacagaaaatagtccggaactgaactgaaggcccccaaacaaaagcttgcccacacaaagcaaaacaaaaaaacgactggttagagctttggggggaaccgaaactttacggaagggtacgaaaaaaaagccaccgccttaaagggccaaatcccccccccccggaaggggtaaaaggaggccccccgcccggccccctcaaggggggtttttttataaaaacccctgcccctggaaaaagcggggctgggctgaaacc

SEQ ID NO: 74725 - DNA, 1419 bp, Zea mays
  Clone ID: MRT4577_168146C.1
cctcgaggccggccgggttttttttccccacctctctaaaaccctcgctcttgcccgctgttttacacctaaaagaaaggtcctcgccgtcgagccgccggcttccatctcccgcgccgtcgccgacgaggacacaccagacgactcgctgatggccttggctcgcctcggacggtctcttgccggccgcctccaccgctctatctaccgtccaccggcgcccacagactaccatgcctccgtttcccgacccttcgctccgacccacacaggcgtatgcgtacgaggttttgcaagcttgacgtacaatgccagcagcatgattggccacaatctcgaggggccgttgccagtccacattgtgaaggttctggatctcgtagtacatatgaatcatgctagaccgatgtcaacagcagcagcatcaaaggtgcctgttggagcccggaaggttggtctgaaggttgccatgatgagtcctggtttcgtatatgagccgtacagcccacgggaacgcattcccttctggaaaagatggtttacactaagtggctggagaaggacaaaggaggacatcattttggagatgaagaacgcatatgctgtttcaaggctgaggaagaaaactgggtataccaaaaatcaattctacgatcaagcattaaaaatatacaaggaggttaacactttgatggcacatggagacacatcatcgcttcggaaaattctgacagagaggatgcattctactataaaaaatgaactaaagagaagacagtccatgtggaattctgtacactgggaactggtggagcctgctgttagtatcagaactttgagggctcgcatgattggcctcgataagaatgacctggataaagcttttatacagcttacacttgagtttgttaccaaacagaaatttgaagcctataattcaaagggtgcagttgtgtctggagacaagtcgaaggaggtacttgtgaaagacatttgggtgtttgagaggtccctttttcaccccggagcatattggcgtgtatgcggaagaattacactgtaaccatatctgttttggtgtccacgttcaatttctcaccctggagctgaacaagagctagttcaataaaattttgccctgaactccttttttttcatccggttctaactgatgcctaacagggtctatgcagtgatgtagtatttatgcctttcttctttgtgttttttattagcagaaaatacaggttttctatttatgcttttgttagagaactagcccttggagagggggcatattgaccccatttggaagagtttgcatctcagcagcagcaggtatcagaattgagaatactgcctaatgtgcgcgacaagtaaaagctggatctcttttgtctaaaaaaaaaaaaaaaaaaa

SEQ ID NO: 74726 - DNA, 486 bp, Zea mays
  unsure (1)..(486): unsure at all n locations
  Clone ID: MRT4577_168147C.1
nggnggaccantgttttttgtttttgattcttttgtttgtngaggtgttttnngnnggggaaggaattttgttttttaaaaaaaaaaaaagccttttgttaaaaaggttaaaaacagtttgggaacccctggggggggggggttttggggccccaattttacactttgttttggtttcttggggacccaccttttttaaatttccgttaaaagtttggactggcccggggggaaatccaaccactttaaggggagaggagccccgggaaccttcttttgttttggaaaatttttaaaaactttttttaccgggaaaactttgggtggggtggtgaaggggttttcatcccccccatttgcggaagggaaaacaggggggggtgaacccaaaaggttttttctggcctggaaccccttttggggaatttgaagggccccaagttttgacccgaattttttgtcctttttttttaggaaattgttttt

SEQ ID NO: 74727 - DNA, 630 bp, Zea mays
  unsure (1)..(630): unsure at all n locations
  Clone ID: MRT4577_168148C.1
caaacgtcatccgaatccgcgccgnagccagcgcagaggtgcgaatctcccggaccggggccccgcactctgcctcgccttcctcccatggcgacgccccccgccgccgactcatcgccgccgccgctatgcactccttgatcgtcccgccccctccgccgctgccccgcacatccatcttcctcccacaccagccgcggggacccccgccccccgcggccggaccgccgagcctccgtcaagcccctcctcgacgtgcgccagcttcaccgcaccccgtccagcagacctggggaacccccatccctacccccggagttcggaccgccacctcctcggcgagggccgacctatcacgctaccactgccgacagaacccgctcccggcagagagcaccccttactaaaagttcctcgtctggcccatcctcattacgaggtaactggtgggcaccattctcttcaagggtgcggacctggttgacatggagccacgaggaacagaacctcttagccaggccctctttcaatggagctctttccaaagccaccctaattgagaaatcctgggaggcccccaactttccgatttattcctgctcccatggccttgtgcaatgcctcgcaaga

SEQ ID NO: 74728 - DNA, 334 bp, Zea mays
  Clone ID: MRT4577_168149C.1
cccagccttaggctcacgcagtagatcacctagcctaagacgcctctcaacaggcccatgcgacacgtacctccagcatgtgaccaggactggcagtattggaactgtacacaacggtaacatgctacactgtcgacaagaaacactgccatggaattaaccaccaatacagctcaccagactactgaggcgaagactgaagatatgcactacaagacgcatcaggatgctgcactagtcaacatactcgtactcatgctctcgaaccctattccgaccgatctcaggctgctgttggcttgtgttagaagctaggacgctcgatcaaaggaga

SEQ ID NO: 74729 - DNA, 485 bp, Zea mays
  Clone ID: MRT4577_16814C.1
catcaaaaagaccgggacagacactactggcacgcacgcaccagcaccagcaccacaccacatgaatggtggagcctagcacgggcatttagctcccggccggcgacgtgacgaccaccaccaccacatgttgcatgagcagcaggcaccgccaccggcagtagcagcgccaccgccatccatcaaccccgacgacgacggcgcccgcgatgtcgaggtcaccacgctcgctgctgcatccgagaacctaactgtaaagaaaaaaattgtaagctgtatacgtactactgcctgctatggtcccctgtgatgtctgtcatccatcacagggtgccagttgttctcttctctttctcttctcttctcttctcttggcttgtatatcggatccatatgctggtggtgcttgaacgaactgtcgttgtttgcttaaccgtgcaaacatatacagtggtatatagtatatacactacattcaacactgc

SEQ ID NO: 74730 - DNA, 382 bp, Zea mays
  Clone ID: MRT4577_168150C.1
gagacgaccatcgtccgcgaaattttgggatgcttccccctccttctagctctaccagggattggtggagagtgacgcggagccgctccttcctcttggagttaaggaaggcatatagcacaaggaggctgggtgtctttcccccgagggacccatgctctgcatcacaaactgcgacctcaaaaaaagtgcggcgaccatgaacatgtgctccaagtgccacaccgacataatatcaaagcacaatcacgccaagaaggctgcctcctctatggacagcatcgtgaacggcagcaacgccgtcatggagccgtttgatgctggcattaacacggtagtagctgttgcccaagtcgagccgcaaacaatgaacgtgcagcag

SEQ ID NO: 74731 - DNA, 282 bp, Zea mays
  Clone ID: MRT4577_168151C.1
gatcccccgagcagcaggttttcggtatgaggttttgtgaagaaagtggcacaaaattcacaattacaattgagaagtaggagataacaatgaaaatttcaacacaaaagtcaatgaaatcaacagggggaactcagaattcaatcgtcatacagaacataggttttttaaatgataattattgagaaattaagtaaacagtcgccatcttgatcaccaccatcaaaatcactgtcttcttcgtttctccattttcatggtcacaaagacagtgcaatatct

SEQ ID NO: 74732 - DNA, 318 bp, Zea mays
  Clone ID: MRT4577_168152C.1
cgggcctcgcggacctaggtcgcggcgacatggccaaacgtaccaagaaagtcgggatcgtcggtaaatacgggacccgctatggggcctccctccggaaaatggtgaagaaaattgaaatcagccagcacgccaagtacacttgctctttctgtggcaaaaccaagatgaagagacgagctgtggggatctggcactgtggttcctgcatgaagacagtggctggcggtgcctggacgtacaataccacttccgctgtcacggtaaagtccgccatcagaagactgaaggagccggtagacccgccgccgctcctct

SEQ ID NO: 74733 - DNA, 331 bp, Zea mays
  Clone ID: MRT4577_168153C.1
acgcgtactagacgtatgactctgacaagtcggactagagaatggaaaagctttctggtggagttgctgtgattaaggatgtatcattgagcggggcttaactaaaataccgcaagctgcgcataaaggtcatcgaagaacgcaactttagtagcacttgaggaaggtattgatccacgaagtggcgcacaatgtgtctatctatggacactcgtgccggctatcaaggagacgtcggatcaccctcaagagcgcctaggtgctgacattatacataaggcattggtgagacctgcagggtttatagctcataacgctggcacggaaggtg

SEQ ID NO: 74734 - DNA, 140 bp, Zea mays
  Clone ID: MRT4577_168154C.1
cgggcgacccacgcgtcggaaaaatgtcccaagaacgcaagctttttatgctcactattgttattgcagtgtcattgctaaaacaccaaaccttttgaccataaacaaagtcgaaaataacaaaggggcggtacctctgc

SEQ ID NO: 74735 - DNA, 316 bp, Zea mays
  Clone ID: MRT4577_168155C.1
aaacattccgccacgcataattttttatttaattaccatggtaacagacaatatagcacgaccaccagcccaacttgtattgctggttaactgctaagacccacaccctccatatactaaatctttcatcatccccacaaacccgatacattttaagaagaaacctatcacaaacagtcaccttcagctatctttggaacgcaccccatttttcaccgcaacataacacacctacaaatatttaccaaattatacttggatttacagaggacaccatttttaatatccctttttctacctcgcatttacttcaatt

SEQ ID NO: 74736 - DNA, 403 bp, Zea mays
  Clone ID: MRT4577_168156C.1
cccacgcgttcgaacggagccgacatgcttgagatctaaacccaagtcgtgcctacggtccggtcacccgtcgctccacgcaaccatgttgaggaggaagaccagggatcccaaggaggagaacgtcaaccttggacccactgtccgtgaaggagagtatgtctttgatgttgatcacatctttgcatactacaatgacacctacattgatatgactgatttgtctggtaaggaaactctggttcggatcaccggcggcatgaaggtgaaggctgaccgagactagaccgaaccttacgctactatgcttactgctcaagatgtatcacatagctgcaaggagcttggcattactgcactgcacattaagcttcgtgccaccggaggcatcaagaccaatacc

SEQ ID NO: 74737 - DNA, 1744 bp, Zea mays
  Clone ID: MRT4577_168157C.1
tgtccgggaaaagtataactgtataagtaatgccatcagctccgtacttgacgtagattccaatggaaatggaactagaccctttcctgggcgtcgtgctcgccaccgccgtcctcctcgtcgccgtcctccgccggaagcgcggctccagccgcaagtacaagatgccacccgggcctaggccgtggccggtgatcggcaacctcaacctgatcggcgcgctcccgcaccgctccatccacgcgctctccgcgcggcacggcgcgttcatgtcgctccgcttcggctccgtccccgtcgtcgtcggctcctccgtggaagcggccaggttcttcctcaggaccagcgacacgtcgttcatcgaccgccccaggatggcggccgggaagtacaccgcctacgactactccgacatcgtctggtcgccctgcggggcgtactggcgccaggcgcgcaagctctggaaggcccatctgttcagcgacaggcagctcaggtcgcaggagcacgtccgcagcgaggagctgcgcgtccttctgcacgctctgtcgtcgtcctcctccgcgggggtggccgggcgcggccggcgcgccgtcgcgctcaaggagcacctgctcatgtacagcctcaacgtgatctcgcgcatggcgctgggcgggaagtacgtcggcgagggcggcaccgcgggctcgccgatctcgccggccgagttcagctggatggtcgacgagctcttcctcctcaacggcgtgttctgcgtcggggacttcatcccgtggctcggctggctggacctccagggctacgtcgggaggatgaagaggctgggcaagatgttcgatcgcttcctggagcacgtggtggacgagcacgaccagcggcggcggcgggagggcggcgggttcgtccccgcggacatggtggacctgctgctggagctcgccgacgaccccaaactcgaggtccccatcgaacgggatggcgtcaagggattcgcgctggacctgatcgctggcggcacggactcgtcggcggtgaccatcgagtgggccatgtcggagctcctgcggaagcccgaggtcctcgccaaggtcaccgaggagctggacggcgtcatcgggcacggccgcctggtcaccgagcaggacatcccggacctgccgtacctggaggccgtcgtgaaggagaccctccgcctgcacccggtgacgccgctgctggcgccgcggctgtgccgcgaggacgcgtgcacgggcacctacgacatcccgcggggcacgctggtgttcgtcaacgtctgggccatcggccgcgaccccgccgtgtggggccacgacgcggaggagttccgcccggagaggttcgtcggcagcgccgtggacgtgaagggccacgacctggagctgctcccgttcgggtccggccgccggatgtgcccgggctacgtcctcgggctcaagatggtgcaggtcaccctggccaacctgctgcacgccttctcgtggaggctgcctgatagcgtggcgccggagaagctgaacatgcaggagaagttcgggctcgccgtgccgcgcttggtcccgctcgaggccgtcgccgtgcccaggctgccaccacacctgtatgccgggccatgatgcatgtctatgtttgttttgtaggtgcatacaactgtctcgtaataaaagatacatatcttttctctgtacatatacacctaataaagagacaaacagtatcgtct

SEQ ID NO: 74738 - DNA, 485 bp, Zea mays
  Clone ID: MRT4577_168158C.1
acgaacagagtgctggccggttagcattttttggcaatccgggtgctgtatcaactggtctaaggctgtcctacgaggacgatgagcgcaattcgtccatcacatctggcagcggtagcatggcctcgttgcctgccacgatgtcctgtgttgatggtttcatggctgaactggaggtggaggcggtgaacaggaagagcaaggagctgaacgagcagatgaggcaggtcgccatggaggtgcagtcgtggcagtcagcggccatgtacaaccagtcggtcgtgaacaccctgaagaacaagctgatgcaagtggtggcgcagaacaccaacctcgcgagagaaggcatgggcgacagcgaggatgtagccttcagccaaagccccgacgccggaagagacgccctgggtggtcttaggggcacggctaccgtcgggctgggggcctgcaggtgttgcggcaagaagggagcgcccgtgctggtg

SEQ ID NO: 74739 - DNA, 528 bp, Zea mays
  unsure (1)..(528): unsure at all n locations
  Clone ID: MRT4577_168159C.1
actccctcaccttattgaactataaagatcgtccactcaaccagcagcttatgagaccgcggtcgatggcgaagaccaagggatcgccacgtcgctctcgctgcaagcgcaaccgtcggcgcaacaagagagcgcggcggccgtcgagggaagcagagcctaccccgacgggtccaacaggcgtgcaccacatccccgaccacctcctcgagctcgtgctcctgcgcgtggccacgcccctcgccctcctccgcgccgcgtccacgtgcaagcgctggtgccgcctcatcttcacggacgacgccacgtccccggaccaccggttccgccgctccctccgcgcggcccgcgtccccggccactaccacgtcgacgggaacaaccacgtcttcgtaccggaccccttggcggccgacggcttcgacagacgccaattctccctcgactttctcccggncgtccctcacggctcgctgccctgggagctcgccgacagccgcggtggcctcctcctcttctataggaggg

SEQ ID NO: 74740 - DNA, 262 bp, Zea mays
  Clone ID: MRT4577_16815C.1
aaattgttattcccgaacttttattctttttaaaaccatgtccatgaacattgtttccaactatatgatcaaatggaatgatttttttttccctaccttcctgatttttaaaaaaatatctgacggttaacccttaaatttgaaagaccttacttttcacattagcctttggtttaacaatcactctcccaccaaggtttacttttcaaggcgggtgaattttttgattgaccctatcttttttttctttaaaaataaccaa

SEQ ID NO: 74741 - DNA, 564 bp, Zea mays
  Clone ID: MRT4577_168160C.1
cgggggtctaaggctctcatacgaggacgatgagcgcaattcgtccatcacatctggcagcggtagcatggcctcgttgcctgccacgatgtcctgtgttgatggtttcatggctgaactggacaaggagagcaaagagattaacttctacttgagactccaggcagaccaaatctgcaagcggatgaaggagacgaaccagcggtggatggtctcgttcctggcgagcgtcaatcaggcggtggggaagaagctgcgggacaaggaactggaggtggaggcggtgaacaggaagagcaaggagctgaacgagcagatgaggcaggtcgccatggaggtgcagtcgtggcagtcagcggccatgtacaaccagtcggtcgtgaacaccctgaagaacaagctgatgcaagtggtggcgcagaacaccaacctcgcgagagaaggcatgggcgacagcgaggatgtagcctccagccaaagccccgacgccggaggagacgccctgggtggtctcaggggcacggctaccctcgggctgggggcctgcaggtgttgcggcaggaa

SEQ ID NO: 74742 - DNA, 407 bp, Zea mays
  Clone ID: MRT4577_168161C.1
ggggggggcaaaaaaaaaaaagggaggtaaattttggggaaagggggacggcacgggcattaaaaaaaaaaaactacggactttaaggggcaaaaaaggaacgccttatttgtttgggaggcaaaaaagacccaaaaccaaggtggggggaaagaaaaaaaaggaggggccattggaggggggaaatcatgcaaagggggctaaaccgggggggcaaaaccaaaaaaccccccgaaaaaacacttggggggggggggcccaggaggaaaattaggggcccccccatggcccggtcaaaaaacttgggcttcctctgtaaaactggcggtttgaaaaacatccgctgccccttggtgccaggcggggtcccaagccggaaaaaagcaggccgggataatgggggccgg

SEQ ID NO: 74743 - DNA, 135 bp, Zea mays
  Clone ID: MRT4577_168162C.1
tctgatgctccttatctatctctcttccctaccaaaccggatcacttgggggtccttgggcgtcgagaagcgaccgtccgtaatcagctacgttttccttttcattcaccatgctgagggttgcggtcaggcgct

SEQ ID NO: 74744 - DNA, 294 bp, Zea mays
  Clone ID: MRT4577_168163C.1
tgcgatctagaactagcagatcctcggtgtacaaataacccgtcttatcctatgagacgggccggcgtcagtgtgttctggaggaatttttatgtcagagcctttttctttgtgtgcttgatgtagatgccaagggaagcttattggctgttgaagcttgatgcaaaataaattatggaactctgttttttgtttatctaataataactagcaaatatgcttccattgcattgaaactaacagccttttgtgtttccaagttttattttgtgacaatgtcatctatttcaattg

SEQ ID NO: 74745 - DNA, 426 bp, Zea mays
  Clone ID: MRT4577_168164C.1
ggaatttaatggccggaccaacgcacccgtaaaaaaagcgcttcgaaataagaggaccaaaaaataaaaaaaaaaaaaaaaaaaaaaaaaaaaaaaaaaaaaaaaaaaaaaaaaaaaaaaaaaaaaaaaaaaaaggggggggccgtttaaaaaaaccaaagttaactaacccttgattgcaactaaatagtttttttatagggcaaccaaaataaaattaactggccgtcttttaaaaacgtcgaaactgaaaaaaccctggggtaaccaaactaaatcgctttgaaaaaaatccccttttcgcaagttggataaataaaaaaaaggcccgaaccaatcgcctttccaaaaatttgcccaccctgaatggcaaatggaaccccccctttagcggcccataaaccgcgggggttgtggtgttaaccc

SEQ ID NO: 74746 - DNA, 1291 bp, Zea mays
  Clone ID: MRT4577_168165C.1
cattgtcatcctcgcggttggccgggatattcctgcttcctggccgttgtctggcagccggacgaaatccgaaaacctaccgagtaactgacaatctcgatccccgcagtcatcgcgggatcggcccgtcctcgccggcgactcattcccgcaactcacctgctctcaaccgcgaactcggcgccctgcacggcctccaagtcgcacgatgcggcggcgcccacatcctacgtggctgcgtctccgcctccgctttcgccgcgccgacgtgtcagcttcccgtccactacagagtccacattgtcctcctattacttgctccgcccgcaactattcgcggctccccagtcgccactaaatccgctgccgtttcttctcgagtgtgaccatggcggctcagggatccctcgtcatgtggagggcggtcttcgcagcgctgggcttgctcatggtggccacgctggtgtacaccttggccaccgacggctcgccgttccgccttgagctgtttacgccgtggatggtggcaacactggctgatttttatgttaatgttattgcaatctcggcttgggttatctacaaggaagcaaactgggttagttctgctgtgtgggtggttctgttgttttgctttggcagtgctgtcacttgcgcttatattgttaagaaacttcttgaagtaacatctgcagggtcatcccaagatcctcttgaccttctatttatcaggcaaggtaatctatcccaaagaaagtgctcttatgttgtaattggaagggttattttcagcattttggggatattcatggctgcggttgtcacatatactgtcatcactgatggactaccttttaggaaggaattgttgacaccgtggatggcggcaaccttaattgatttctacataaatgtctttgcgatatcggtctgggttgctcacaaggaatcatcatggatatcaactaccatttggattgtcttgctgatatgctttggaagcatcacaacatgcggctacattgtcatccaacttttcaaagtatcatatcaagatccaatctaccacgtgctattgaactcccacagcaagtaccacaattaaggggacaggaggatagcaattagacaagttgttttactttgaataaaataactcatgtgctgagttctctgctaaatgaactgtaacgtgaaatcctttattgtatttctgattgaaattgcttgaacaataatctcctttgttatggtttcgtccactttgaattaaagaactcatgagctgagt

SEQ ID NO: 74747 - DNA, 548 bp, Zea mays
  Clone ID: MRT4577_168166C.1
ctggatgctgcaccggggcggcggtcgatctagaactagaggagcccactggctggaggaagtccgtacgaggcctcgtgccgaattcggcacgagggaaaagctgtgactcattaacccagtaaacatatacaaagtaagcttaaaacactataaacatgagataagggaaaatgaatccagagttctcatattaataggtagtgaaacaataaggctttttagagcagactttgttggcataaaataacctggcttctatccctaaccctttcctacctttcctctccgtcaacatgtcctcatactgaagacaaacttgtttcaatgatagtcttcattttcaaaaacaaaaaggcaggcagacagaaataatgatgttttcttgcactaagaaggtactacttgtacacatatatcaaaacctcattctgcaaagtttttgaaggtttcaatgggaaatttgattttattacaaaataaaacattttttaatggtaaagtttatatattccatgcttggtttctattcactggcatggatgatc

SEQ ID NO: 74748 - DNA, 829 bp, Zea mays
  Clone ID: MRT4577_168167C.1
cccacgcgtccgcgctggtgtacaccttggccaccgacggctcgccgttccgccttgagctgtttacgccgtggatggtggcaacactggctgatttttatgttaatgttattgcaatctcggcttgggttatctacaaggaagcaaactgggttagttctgctgtgtgggtggttctgttgttttgctttggcagatcctcttgaccttctatttatcaggcaaggtaatctatcccaaagaaagtgctcttatgttgtaattggaagggttattttcagcattttggggatattcatggctgcggttgtcacatatactgtcatcactgatggactaccttttaggaaggaattgttgacaccgtggatggcggcaaccttaattgatttctacataaatgtctttgcgatatcggtctgggttgctcacaaggaatcatcatggatatcaactaccatttggattgtcttgctgatatgctttggaagcatcacaacatgcggctacattgtcatccaacttttcaaagtatcatatcaagatccaatctaccacgtgctattgaactcccacagcaagaagatttgaaaatttattgaagttttatgtgcagcttggctggtaatattaaaatgttccttctatctatatgtaaggtaccacaattaaggggacaggaggatagcaattagacaagttgttttactttgaataaaataactcatgtgctgagttatctgctaaatgaactgtaacgtgaaatcctttattgtatttctgattgaaattgcttgaacaataatctcctttgttatggtttcattgc

SEQ ID NO: 74749 - DNA, 673 bp, Zea mays
  Clone ID: MRT4577_168168C.1
aatccggattcatggctgcggttgtcacatatactgtcatcactgatggactaccttttaggaaggaattgttaacaccgtggatggcggcaaccttaattgatttctacataaatgtctttgcgatatcggtctgggttgctcacaaggaatcatcatggatatcaactaccatttggattgtcttgctgatatgctttggaagcatcacaacatgcggctacattgtcatccaacttttcaaagtatcatatcaagatccaatctaccacgtgctattgaactcccacagcaagtatggaattccaacttcactgtgataattcatcttctatgatcctggttagcttacagttgtctaaacttcagcttgtcatctggtcattgatttccattcataattcacttgtttgaaatgtaggaagatttgaaaatttattgaagttttatgtgcagcttggctggtaatattaaaatgttccttctatctatatgtaaggtaccacaattaaggggacaggaggatagcaattagacaagttgttttactttgaataaaataactcatgtgctgagttctctgctaaatgaactgtaacgtgaaatcctttattgtatttctgattgaaattgcttgaacaataatctccctttgtatggtttcatttcaaac

SEQ ID NO: 74750 - DNA, 255 bp, Zea mays
  unsure (1)..(255): unsure at all n locations
  Clone ID: MRT4577_168169C.1
ggggggaggagaacagagcaacacaaggccanagcccagacacaannggcagaaaacaaggaaagacaagagagagccaaacacgcaaggncgaaagaaagccaagaggancacacaacacagaaacaaacccacaaaaaaccaaagcagccgagcgcaggaccaagacgagaaggacggacaaagccacaggagaaggcgagaccaagaagcaggaacaagaaacgcgcgaaggcggagcgccaagcgagcccg

SEQ ID NO: 74751 - DNA, 659 bp, Zea mays
  unsure (1)..(659): unsure at all n locations
  Clone ID: MRT4577_16816C.1
ggcacgaggctacgacgggnccgccgnaccagctcaccagcatcggcgaggacgagctggaggagaccaacccgctggccatcgtccccgacagccaccccatcgccacgccagccaggtccagggcgtccgggctggaggtcgtgcccgcgggcccggcgccggcgccgcagccgcccgcgcacctggaggccagccaggtcaagaaggaggaggtggagaccaaggtcacggcctggcagacggccgaggtcgccaagatcaacaaccgcttcaagagggaggatgtggtcatcaacggctgggagaccgagcaggtggagaaggcctccgcgtggctcaagaagatcgaggtaccgactacaccgacgccctcttctttgctccctcttcgtcaatttatatatatcttgctcaactcaaaccacgagttgaggatctgcgttcttgtttgttccgcagaggaagctggacgagcagcgcgccaaggcgctgggagaagacgcagaacgacatcgccaaggcgcggcgcaaggcggaggagaagcgggcgtcggcggaggccaagcgggggctcaagctgggccaagtgctggaactcgccaacttcatgaaggcgtcggcaaggtncccancaagcgctcttcttctaagccagc

SEQ ID NO: 74752 - DNA, 360 bp, Zea mays
  Clone ID: MRT4577_168170C.1
acgaacgacaaaagagctggggttcaataaaacaggcacctcgcatttctgtccccaaacaactacatatctcagtaattttcattgttcactgaaaccaaaaccacagatataggtctcaaaaagtcttaaacattggcaaaaacaagaactaatacgactgccagcggcataatagttccagtgcaagtgcaccaggatacaagctccactcaacggttggccttggcaacacgctcaatctcatccttcttcttgatggcataactgtttgaagagcccttggcagcattgatcagctcatctgcaaggcactcagcaatggttttgatgttcctgaaagcgctctcccttggcacc

SEQ ID NO: 74753 - DNA, 381 bp, Zea mays
  Clone ID: MRT4577_168171C.1
tgcaagcgtctacacagacgtcgtagtatccctggctcactatatccaggagggatcatttggtccagtcgatagacatggacatgcgtcacgtcgtcagatccgtcctctgcaccgtttccttgggaatcgccgtgctaggactctgtcacggttgatgtgcagtgtcatgcctgcggggttttggctatgtctagcgtgcggatgaatgcaagaagagccttgacctgagcaatccacacattgagcacgtcagacgtcgctgtcagtattgaattttacttggcctgttgacacttttggcgagatttgtagattttacagtatcatggctaccgtattactcagtagcacaggtgatgttctttgtatatttgtggt

SEQ ID NO: 74754 - DNA, 214 bp, Zea mays
  Clone ID: MRT4577_168172C.1
aggaatagattaaaattattctgtctttttttcatgttcttctgtgggtcagtcttcttagagaacttcgtgatctgagagacagctcctgttgtatgcagtactccgttcaaatttcaatttattctgtcttttttccctaaaaacatggaagcttaaaaaaacacatcttgttaaaaacctataagattttcccaataaaaaagggcggccg

SEQ ID NO: 74755 - DNA, 1006 bp, Zea mays
  Clone ID: MRT4577_168173C.1
tggtgattgtgatcctgcgtttgctattgttatggagtatattggcaaggatgactcaaacattcgtattggagcaatattgggtcttggaattgcatatgctggttcccagaaagaagaggatagtgtggaggctaccgcagaggtctctaaaacatttgatgagaagatagggaagtactgtgatgtaacacttatgtcactggcatatgccgggacaggaaatgtgcttaaggttcagaaacttcttggcatttgctcacagcatcttgagaaaggtgaaacacaccaagggccagctgtccttggaattgctcttattgctatggctgaagaattaggagctgaaatggctgtacgttcacttgagcgtcttctgcagtatggcgagcagaatataagacgagcagttcctcttgctcttggtatactctgcatatctaatcccaaggtatgtgaataaatccgtcttatgcacactaaagttctgatacgtgaaatctaattcctgctagaaacaatgcctgatcaatgcagttttaagaactttggtttcacacaaactttattatatctgaatccttgagtgccccatggggatttttttttgttctagttggtaaatttctaaattgtgttttatatctaagaaatatctctaatgagaccatctgaatggaattactgcatgattgtgctaactatttgatgcacttgcaccagcacacaaacatgtgtgaattctatataacttttcaggttaaatttttgaccatgaaaccaatctaccaaaagtattgtctctatggactgacttttttaagtgttcccatgatacaagttttttatttattttcctgatactgttggacccagaacccatcaagctgtatccatccatattagaagtaaatcatatcataacaggccagttttactgcagcacctttctataatagattgcgacatggataattttgcatgccactttcattattaaaagctt

SEQ ID NO: 74756 - DNA, 270 bp, Zea mays
  Clone ID: MRT4577_168174C.1
gcacaatatacctccctagttgatgcggggatgtcgacagatatatgcgttagaatatttacggttgcacatcttgaatagatatggaaggataattggggtggtgaaatggtaccttgggctgttctgctgtgaacattgaacgggtgttggtattagatcagtgctgttggggatggtaaatcgttgacgtgtctactgaatgcaagtacaggtgaactgaatgatagaaagaatgttacactcgaaagacaacaccatcatcttcgt

SEQ ID NO: 74757 - DNA, 3963 bp, Zea mays
  unsure (1)..(3963): unsure at all n locations
  Clone ID: MRT4577_168175C.1
tgtaattcggcacgagggacgggcaggcggctcttgctcttggtatactctgcatatctaatcccaaggtaaacgttatggacacactgagcagattgagtcatgatgcagacgccgatgtgtcgatggctgcaattatctcattgggtttgattggtgctggcactaacaatgccagaatgggtggcatgcttcgtttttttttaagttattactacaaagaagctgctcatctgttttgtgttagaattgcccagggccttgttcacctcggaaagggcttgttgaccctttccccataccattccgatagatttcttctctccccgatggcacttgggggccttgtaaccgttctccacgcgtgccttgatatgaagtccaccatcctagggaaataccactacatcctctacattattgtcctggcaatgcagcccaggatgcttttgactgtcgacgaggatctgaagcccctgtcagtacctgtccgcgtcgggcaagctgtcgacgtggttggtcaggcaggaaggccgaagacaatcaccggcttccagacacactcctttgatggagcgtagtgagcccgagttggcagaacccattatactgaagcttactgttgcactgacccttttatatcttggaaaacaggatagtgtggaggctaccgcagaggtctctaaaacatttgatgagaagatagggaagtactgtgatgtaacacttatgtcactggcatatgccgggacaggaaatgtgcttaaggttcagaaacttcttggcatttgctcacagcatcttgagaaaggtgaaacacaccaagggccagctgtcctagggattgctcttattgctatggctgaagaattaggagctgaaatggctgtacgttcacttgagcgtcttctgcagtatggcgagcagaatataagacgggcangccctctgcgttttgtattactcggagtatattggcaaggatgactcaaacatacacactgagccaatattgggtcttggaattgcatatgctggttcccagaaagaagagcttcggccggggtatgtcactgcggacagcctgagccactaagttgagtgagggatatcttactcttgctcgcgatattgaggtcatggagcctaaatccccagaggatatatacaaggtccatttgattgatggccgtggtgccagctccagtcttgattccgcaagacagaatttagctgcaacatttgtaaatgcatttgtgaatgctgggtttggcaaggacaagttgatgaccgctccatctgattcacccagcagcgggtcttccggaaattggttatttaagaacaaggaacatggaaaagccagtgcagcagctagtctgggaatgattctcctgtgggatactgattctgggctcgctcagcttgacaagtacttgcatagtaatgatactcatgttgtagctggagccttgctaggtattggaattgtcacttgtggggtgaagagtgattgtgatcctgcgtttgctattcttatggagtatattggcaaagatgactcaaacattcgtattggagcaatattgggtcttggaattgcatatgctggttcccagaaagaagagcttaaaatgcatctatctgctgtgttgggagactcccaatcacctcttgaggtcttggtcttctcggccattgccatgggattggtgtttgtcggttcttgcaatgaagagattgcacagtctattatatttgctgcgttggagcgtagtgaggccgagttggcagaacccattatacggttgcttcctgttgcgcttggccttttactctcttggaaaacaggatagtgtggaggctactggccgggctctctaaaacactttgatgagaatactagggaagtactgtgatgtaacacttatgtcactggcatatgccgggacaggaaatgtgcttaaggttcagaaacttcttggcatttgctcacagcatcttgagaaaggtgaaacacaccaagggccagctgtcctagggattgctcttattactatggctgaagaattaggagctgaaatggctgtacgttcacttgagcgtcttctgcagtatggcgagcagaatataaggcgggcagttcctcttgctcttggtatactctgcatatctaatcccaaggtaaacgttatggacacactgagcagattgagtcatgatgcagacgccgatggtgtcgatggctgcaattatctcattgggtttgattgttgctggcacaaacaatgccagaatagctggcatgcttccctatctctcaagttattactaccaaagaaattgctcattctgttttgtgttaggattgcccaggcccttgtacacctctctaggtgccttgttcacactttccgaatacctttactagataatacaactcccctctaaggccctggggggccttgtaaccgttctccacgcgtgccttgatatgaagtccaccatcctagggaaataccactacatcctctacattattgtcctggcaatgcagcccaggatgcttttgactgtcgacgaggatctgaagcccctgtcagtacctgtccgcgtcgggcaagcggtcgacgtggttggtcaggcaggaaggccgaagacaatcaccggcttccagacacactccacgccggtcttgctcgcagcaggggagagagctgaactagcaactgaaaaatacattccactgaccccggtactagagggctttgtgattctgaagaagaacccagagtaccacgaggagtgaagaacccagatagcatattggtgtttccgaggcccgtccagataggcagcctcgaagccgaatcgtttgcgcggccttggatatctatcttctttcttgctcagcggcagcgccatcctggccctctccttcctgggtccgtgtccatgtttgattcttatcttaccggagcggtggctaactgaaagagctgtctttggttggcttaacttgtagtacgaccgtatttattaattactagaagacgtttatagagcttacgatgtacggcgaggtgatgacatggtggcatagcgtagtgtaatttttttttgtggccaaaacatagcatacatactccacaccagtcttgcttgaagcaggggagagagctgaactagcaactgaaaaatacatcccactgactccggtattagagggctttgtgattttgaagaagaacccggagtaccatgaagagtgaaacgctttagcatgccaaatagcatggtgtttcggaggctcgtgcacatggcagtcttcaagccctggcgcacccctcgtcgagaaatcgctcgccctttgctcaacccttcgcctggagttcatgttgaattcttaccagagttgtggctaactgaaagctgtcttcggttgtgctgatatacgattgtatctgtacgattgtagcaattactgggacagcttactctgtatggtgtggtgataacgtggcatagcatttttggcgctggtctaggttagtccttgtgttgacatggtgcaccatcattataagttttctgtattttatggatccgttctgttcgtgtgtactggaaacctgtgtttactaattactagaagacgtttatagagcttactctgtacggtgaggtgatgttttggtgccatagcgtagtgtaagtttcttgttggcgtccgtctccgccaatcgatagcatgcatagtccttgttgtgacattgtctaccacctttatcactgccatatacccggacagggtctgccccgaagcttcagaaacttcttggcatttgctcacagcatcttgagaaaggtgaaacacaccaagggccagctgtcctagggattgctcttattgctatggctgaagaattaggtcccgtaatggctgtacgttcacttagggct

SEQ ID NO: 74758 - DNA, 1595 bp, Zea mays
  Clone ID: MRT4577_168176C.1
tacacttcaggcatcttggtgtcaatgcagttttgctggagccagttttcccattccaccaagtgaagggaccatattttccataccattttttttcacctatgagcttgtatagcagtgaatgctccagtgtttcagctatcaagtctatgaaggatatggtcaaaacaatgcacagaaatggaatagaggttctcttggaggttgttttcacgcatactgctgaaggaggggcggagtgtcagatgatatcacttcgaggcatcgatggttcctcgtactacattgctgatggaatcgctggatgcaaggcaagtgtgttgaattgcaaccatccagtgactcagaagctgattttggacagcctccgccattgggtgctcgacttccatgttgatgggttctgcttcatcaatgctcctttcctcgtcagaggtccacgtggtgagggcctctcacggcctccacttctggaagccatagcatttgatcctgttctttcaaagactaagatcattgcagatccttggtctccgcttgacatatctaatgtgcaatttccattccctcattggaaaagatgggctgagatgaacacaagattctctatggatgtgcgcaagtttcttaagggagaagcacttatcagtgatcttgctacacgtttgtgtggcagtggggacttattttcctcaagggccccagcattttcgttcaattatgtatccaggaattctggactcactcttgttgatctagtgagcttcagcagtgatgagcttgcttctgagttcagctggaattgtggtgaagaaggaccatcggagaacaacgcagtccttcaaaccaggctaagacagatacgcaacttcttgtttattctattcatttcccttggtattcctgttcttaacatgggggatgaatgtggaaactcagctgctggttcaacatcatacaaggatagagggcctctgaactggaaagccttgaagaccgcttttgttaaggaagttaccgggtttatttcgtttctatctgcactaaggagtcgacgagcagacattttccagagatgcgagtttctaaaacttgaaaatatacattggtatgggagtgatttatctgagccatgttgggaggatcctactagcaactttctttgcttgcacataaatgcagagctggacgagaagctaccagattcgactggaggtgatttgtatatctgtttcaatgcaaacgaggagtcagcgagtgctactttaccagctattgcagaaggatccatgtggctgcgcttggttgatacatcacttgcatttccaggtttcttttccagagggtctagtcatgaaacacaccaggtgctaggattttcctcatatcaagtgaaggcacatagctgtgttctgttcgaatccaagagggttctttcatagtttgtgatgtcaaacatgaagctcgtgtggtttcagcaataattaggaactttgtggttactatattactatctaattttgggaggccctcagttccaataaattgccaattgtagatggaatgtttatgataataaagttcttcattttcat

SEQ ID NO: 74759 - DNA, 230 bp, Zea mays
  Clone ID: MRT4577_168177C.1
ataaaagtgattaataatatgctgttctaatgctaataggtcattcatctagccccctaggaaggggtgcatgaaaacagagcggtcaagccagaaacttagaacttttcttctttcatctccactgcaataaaccatcatggagtaggtggtcaagcgaaggcaaattagcacaatgtcatattttggagggtaaatcggatcagaaatgtagcatttctctagtggac

SEQ ID NO: 74760 - DNA, 713 bp, Zea mays
  unsure (1)..(713): unsure at all n locations
  Clone ID: MRT4577_168178C.1
tatattccactagttgaaccaaactagctcctgacggctaatattagctagctaactcttagcagctaatggatccaaacaggccatttgtctcaccatataggagaggcatgttttgtgctacattgcaaaattgatgtaaaccatcgattccacatgatcaccaggaatatgattctcgtactcgtcagttcattttgtcaagactcaaaagtgtctcattattttatttttcttatcagataaatgcactcttcatgagcttgctaatagcagcacccatgtggatgctattatctattcaatggaacatttcttggctttctccatatccatttgcatagcataactgtcttgtctacttggaatatagcacttcgatctgattaggttctgagatttgctgatgtttttgttttgggtacacccaggtgacccatgcagatttcaagaaggcaaaggagaaggtgatgtacaagaagaaggaaggtgttccggatggtctctacatgtagccaatctattcatcatgccgaacaagttacccgattgtgtgtgtactagcacatctcttcatcatgggagatatgttaccacaatacttgntgcatactgtgctaagtggtcaggagaaccttgtattaattaattatcctttcattggctcaaagtaaaaatttcccttgcgccaaaaaaaaaaaaaaaaagcggcc

SEQ ID NO: 74761 - DNA, 310 bp, Zea mays
  Clone ID: MRT4577_168179C.1
cacgcgtccaggatggtgctcaacattattcacttcaacactttgacatatcaggctgctgagcggccaacttgtactgtgtgccatattataacagtacagtctcataaaacatcagttggtggatctatactatctcctagtatccaaaaagttcgagaatcctgcacaatgcgaacaagctttggtcggcaagtttaagatactgtattacgaccttaccactgcgttccttaacctataagatgagtcacggtcaactgctgcacattttatctaagacattacctggctgccaaatgtcttataa

SEQ ID NO: 74762 - DNA, 288 bp, Zea mays
  Clone ID: MRT4577_16817C.1
ttcctggttcgacccagcgcgtacgcacgcgttagcgcattcgttcggtcaggtgcaatcttgcggggcgcagatcttcagattgcttacgggctacaggtataattgcgtgacactcatttgactgattctaagctcggaagtgcaaatgttcttggagctatcacatgatctacagactgatcctgtagcttgatactgcgtatactgttctttacagatgcatcgtatgcaatgcggcaggaccatctgcagagttcagaactcattcatgagcgacaacacgaa

SEQ ID NO: 74763 - DNA, 251 bp, Zea mays
  Clone ID: MRT4577_168180C.1
aaaatattaagggttaaaactggggagccaaatgagggaggtaacttaaaataaataggttgggcttacttaacggtttaaaaaaagaaaatttttggggtcagctacattaacgaattcgaaaaaaaaaaaagagaaggccgttgcgttttaagaaattttccccttccggggtaaaggggtttgtttatttgggcctttttgctttgccaagcgttttaatttctttaaaggggggattaccggtttcc

SEQ ID NO: 74764 - DNA, 171 bp, Zea mays
  Clone ID: MRT4577_168181C.1
ggggggtccaaaaacacataacaacacatccatatttagcaggatccatcgaggctttcccaccacccttagtttccaacaactagcccacccgatcggacaacggcacattccgaaaactgattaaatgattcaaaccgtacttaaataaatggtgcgttctcctgggaa

SEQ ID NO: 74765 - DNA, 555 bp, Zea mays
  unsure (1)..(555): unsure at all n locations
  Clone ID: MRT4577_168182C.1
ccccccacagngtttttttttttttttttttttttttttttttttttttttttttttttttttttaaatttttttttttttttttaaaccttggggaacccctaaaaatttttttcaaccgggctaacccgggagaggacccgtagaccctctttaggggcaaaaaaancccctttttccctttttttcccccttcttagggtagcgaacccctttgtttcggaaattccgaggggggggggtttaacaaatcgaaaatcgggggggggcgccttcgtttgttaaattccaaaggggcgggaacccggggggaaaactaatctccgggcttaaccctaggggcccaaagctacggctacacggcggcttacttaacttcgaaaaccttctcgggggcctaaaaaacgtaaggggaaaaaaaggggtttcccttaccagggccaccaaggccggcctttaaaagttaaaaccccttttcggccttttccgaacggccaggccttaaaagaggttccgggggggaaaaaaaccaaccccccggaaactaaaaagggg

SEQ ID NO: 74766 - DNA, 182 bp, Zea mays
  Clone ID: MRT4577_168183C.1
aacagggccatggagaggggccgaacgaggccttacgagggacaagcccggcgggcaccaccgcaagtgtttccaggaaccaggaacaccgaaaaagagtggcacttgcataggaggaccaactagaggctagagggcgacattccaaagcatggacgcaggaaaagagagaagagagcggg

SEQ ID NO: 74767 - DNA, 233 bp, Zea mays
  Clone ID: MRT4577_168184C.1
agacgattaactttatctacaccagagcgcttaagaaccagatcgacaccatgaggggggggctcgtggccctggttctgctggttcttgctagcagcgccacctgcacacatacaagctgcggctgcgacagacaaccaccgcatctacctcatctaccgtatatggcgcatctgccatatctggttcaccagccacatccggagcatttgccacagccgaatcaactaccg

SEQ ID NO: 74768 - DNA, 691 bp, Zea mays
  Clone ID: MRT4577_168185C.1
atttcgctccgttgctcgtacccagagcaaactctaacgatgtagttgatttatcctctgcagccatgagaaagtagcgctgcgagtcgatcaaggatgccttctcccacactgaaggggtagacgacgacaagaatatgcacgtcactgagactgatccactatggatggttccgcagagatctgatccacagtaaaccaagtcgtgctccgcttctgctacgatgcgcatattcctcgtccctagatgctcctgcgcatgctagatgatgcccagattggagacgacgccgataatatgtaactggactacatgattgtggagggtctccagataatgaacaagaacgagcagcttgttaagaggattgccaagaagtaccttgttgtcttgcgcttcggaggccatgatcaaccagattccccgactccttgttactggtctcaagaaggcaatccagttcccgaccctgtgcactcaccaggaatccctcgtttccaaggtgaacgagactaatgcaacagtcgaagtccagctcaagaaggtcctttgcatgacagtggacgacggcagctggcgagtggacgataagcaaataccgctctgcatcgagatgagcgtcaacttcgttgtttcccttctgaacaagaactggctgaaagtgagatggctgtacgtcaagagcaccat

SEQ ID NO: 74769 - DNA, 507 bp, Zea mays
  Clone ID: MRT4577_168186C.1
ggcgcctccagttgcgccgcctcctgttgtaactgcagagaccgcagggaccacgtcagggaccgtctgtgacgaggaggaggaaccatcgccgtctgcaggtgatgaaccacagaagcagaccaccacgccgacgtccgcctcggctcctcctacaagtacttccagcgctagtgcaagtagtagcagtgcccccgcggccaccacgtcgacgacgacgacaaggaaggaggaagaaggatccgcgccaagctcgtgataagtgcagatcatctacatatcatcacctcccaattctaatcccacctccatcttaaatttttagttgcctattattactatatatttttattgcttattgatataagagaggtctaagggactaggatcatgttaggagtacatccatataaatgaaacatatatatatcagttcatttgaagagaaaaaaataaaatagattgcaggaacatgaagtagtaggaaaagataagttctctgttccc

SEQ ID NO: 74770 - DNA, 264 bp, Zea mays
  Clone ID: MRT4577_168187C.1
ggcactcagtagatgccataatacgagtaggatagataatctgacatccatcacacatgtaactcattaacagtatggacataatcatgcctaggcacattctatacgagaaggtaggatgtagatgtgcacgataaacccagctttgtgcgaaggtctttctatcataaaatacgtctgtgactatggctctaattgtatgcactaggctatcatactagaggatgaaggtgagcacgcaaacaatgtctttagaactaatgc

SEQ ID NO: 74771 - DNA, 205 bp, Zea mays
  Clone ID: MRT4577_168188C.1
caggagcatccgggatgacgggttccggaagaagggagccgcgctcatcgcgccgcgctcgcccgacaccgtgcacgctccgtgggatagcatcagtacaacccctagtgttagccaagatcaccttgacgagtgcacggtaatatatatgtctagtgtaggataagatccgtggccgaaagatgtcatggctggcttagggtgt

SEQ ID NO: 74772 - DNA, 200 bp, Zea mays
  Clone ID: MRT4577_168189C.1
catctgatcttcagactagtaggccttaccatgggttggcttagctagctagtctgtgtatcttcattgtatggtaagtgtctctgtgtgtgtgtggaatatggcaggtccgaatactggagatgagtgactgtcataccggccggcggcattggtctttggcaaaacacaaaaaaaaaaaaaaaaaaaaaagggggggg

SEQ ID NO: 74773 - DNA, 170 bp, Zea mays
  Clone ID: MRT4577_16818C.1
aggacaaggaacagaagaacaagctaaccctctttaaattatacacttgctaaccttacgtcatcagccaaatactcaccggcgcccacgatcagctatgtctattcctgctcgggagatctacggcaagcatgattcatggtatggacctgtgaacgatggggcacgag

SEQ ID NO: 74774 - DNA, 911 bp, Zea mays
  unsure (1)..(911): unsure at all n locations
  Clone ID: MRT4577_168190C.1
aagctcccgcgcccttggcggtggtacgttcacctcgccggtttcccgacagccgtcccctccgtgatttaagagaggcccatgagctcgctgctcttgtgcccgcggtgctagtaacggttgctctagatccgttcatcctggtggttttgtgaggtcgaaagcggcgagcgaattagaagatgctggacaagctgtgggacgacgtggtggccgggcctcgcccggagacgggcctggagaagctccgcaaggccaccaccgcccgcccgctcgtcatcaacaaagacgcggacggcggcagctacaagcgggcgcagtcgacgccgtcgaccccgacgacgccggtgacgccgtcgtcgtcgacgacgccgcgcggcgccggcaacgtgtggcgcagcgtcttccacccggggagcaacctggccaccaagggcatgggcgccaacctcttcgaccggccgcagcccaactcccccaccgtctacgactggctctacagcgacgagaccaggagcaaccaccgctagatcgggcgagatggacagtgaagaggcccggtgtctctgtcaggccatgtttgctggtccttgtggttatctaaaacgcatgcatgctctattatagctagtcatcactatatatatacttgtgtttgtgtattgttgttcttgttctgctggtgtttgaggataaagactccgccgtttaagttgacctatgttatggagtgagtgatatatatatgccgtcactcctagtatatagtagtgactagttggtatgtgtagtactgtactatcttttctccatatgcatgttttgccagcgcgtaatgaatggaatgtgtactgctactacgtgctctgttacttcgaaaaaaaaaaaaaaaaagcggnccctcgagctca

SEQ ID NO: 74775 - DNA, 1050 bp, Zea mays
  Clone ID: MRT4577_168191C.1
gcacgagctcagacggacctgcagaggaggtccgctcaccgcgcgccccagctgaaattccaggccaccggctgaacgcatccctctcaccgcgcccttggcggtggtacgttcacctcgccggttccccgacagccgtcccctccgtgatttaagagaggcccatgagctcgctgctcttgtgcccgcggtgctagtgacggttgctctagatccgttcatcctggtggttttgtgaggtcgaaagcggcgagcgaattagaagatgctggacaagctgtgggacgacgtggtggccgggcctcgcccggagacgggcctcgagaagctccgcaaggccaccaccgcccgcccgctcgtcatcaacaaagacgcggacggcggcagctacaagcgggcgcagtcgatgccgtcgaccccgacgacgccggtgacgccgtcgtcgtcgtcgtcgtcgtcgtcgacgacgccgcgcggcgccggcaacgtgtggcgcagcgtcttccacccggggagcaacctggccaccaagggcatgggcgccaacctcttcgaccggccgcagcccaactcccccaccgtctacgactggctctacagcgacgagaccaggagcaaccaccgctagatcgggcgagatggatggacagtgaagaggccatgtttgctggtccttgtggttatctaaaacgcacgcatgctctattatagctagtcatcactatatatatacttgtgtttgtgtattgttgttcttgttctgctggtgtctccgccgtttaatttgacctatgttatggagtgagtgatatatgtgccgtcactcctagtatatagtagtgagtgactagttggtatgtgtagtactgtactatcttttctccatatgcatgttttgccagcgcgtaatgaatgtaatgtcagtactgctactacgtgctctgctacttccaattcagtttccttaatcttgatgcataaaaaaaaaaaaaaaaaaaaaaaaaaaaaaaaaaaaaaaaaaaaaaaaaaaaaaaaaaaaaaaaaaaaaaa

SEQ ID NO: 74776 - DNA, 688 bp, Zea mays
  Clone ID: MRT4577_168192C.1
gcacgaggtcgacgacggcgagagagaggggtagagcttgagagggcgattgcccccggccgaatgggccgggagacggcgaaatgtgtacgtgaaatataatctccaaaggggagacgtccccttcacacatctcggtgacgaccagcggcggcatatataggccaagcttcaattcgcagcatctcatcatgcagatgcagtacgtacgacggattgattgggatttgagcagggaaaggaacagtggtgagtgtggcctcttccgatccaagtcgcggctcaggttgctagctagctagacaaaagcaagattctctccggtaaccccatcactgatgtgatgtcacggcgatcttacgatcggtacgtacggcgtacgtccgtccatgggttttctttcttttctgcaataattccgctagatgatcgtcatatatataccagaacatgaaccggcctgcaggtgcagtgcagatgcagtagctagtgtactgttgagatttgcaggttgatcgatcacatgacgcgttatactgtgtgtaatcctcatcctgtagcaagtacaaagcatacatcataaagtaagggtgttgcattgtacattcgcatattgtggttaataatacacatacagtacccaaaaaaaaaaaaaaaaaatttgcaaaaaaaaaaaaaatttgcggcc

SEQ ID NO: 74777 - DNA, 403 bp, Zea mays
  Clone ID: MRT4577_168193C.1
ctcaactacagcgaaatatgccatgagtgcgtcagtacagcaaaaccattcacttttcaaaaaaacaaaaataaaaaaaaggaaaaaggtaaaaaaaaaaaggggagacgaaaaaaaaaaatctaaaaaacaagcctaacaaaaaaaaaaaaaggggcggccctttttaaggtacccagttttcctcccccttggttgcaacctaatactttttttttgggggccccaaaattaaatcccctgcccctgttttaacaacagccttattgtaaaacccttggtttccccaaattaattccctttgcaaaaattccccttttttcagggtggttaaataccaaaagggcccaaccatattcctttttcaaaaaattgccaaccttttatggtaaatggccccccc

SEQ ID NO: 74778 - DNA, 199 bp, Zea mays
  Clone ID: MRT4577_168194C.1
tatgcatactaactaacgaacacttgcgcttatcacgaactagctgtggttatcgagtgctgtttctctgaacagcgagaagtctcctcaggctatggtctccatgcatctttcgccggcaaatcagggctatctgatcctgaactatctaacaagctgctcattggctactacccttatcaaggaggggaacaagaca

SEQ ID NO: 74779 - DNA, 300 bp, Zea mays
  Clone ID: MRT4577_168195C.1
aataatacaagtacttcgcggtctcagatgcaaatgcaagaacaaaccctctaatcccaggaacgaaaacatagcagccacaactccaagggcccatactgcagtaaaacactggagggccaccattccaacacagcaggctgaaaaaaggtgcctcatcattaggcatgaacaacagctacaacaaatactttcaagcacaacaaccagtccccctgactctagttatgcttagaaccctctgcaaggaattccaacctaaaaagaacctcatgagcagtgtatgcatgagcccccact

SEQ ID NO: 74780 - DNA, 349 bp, Zea mays
  Clone ID: MRT4577_168196C.1
aatcttctataattaagctttgtgcttttctcattatactacattggtccggcaacagtttcactagcattgctgtgtgttgcgaataacactagggctactacggaaaataattactacaaaccgtgtactgagaaaaacaagaggggtccggactttctcccaaaggcacttttcacggggctatccgcggaagtcaagccccccttgtagtgcgaaccttgtgctcttgcacagcccgacagcaaaagaaaaaaggacacccaatgacgcttgggtagcctattttatggccttccaaaaaaggatccatttccccatggcgaggttgatacaatatgctttttcc

SEQ ID NO: 74781 - DNA, 155 bp, Zea mays
  Clone ID: MRT4577_168197C.1
ggggattacgatgaacacagtccagtccaagtcgcttctgggaattggtaactaaaacctttatcacctggattgcgcctgcttagattctagtaggttccttctttatgctgagttccatctttagtttccttaccgcataatttggggactga

SEQ ID NO: 74782 - DNA, 322 bp, Zea mays
  Clone ID: MRT4577_168198C.1
ttccctccttttttttttttttttttattattgggggttttttttaaatttttgcggtgtaaaagccccgatataaaagtattggggggcccccgggggtgggggaaagatacttttcacacaaaacaaatgttggggcgccggagtgtgacttcacaaatatggcccccacccaaaaaaaggggaggccgggctccacccaccaaaaggggagggggtggggccacacgggacccctcctcgggggaattggggggagcaaagggaacccgtttgttccggagaaaaaaactggagggaaaaagggaaaaaaagggggggg

SEQ ID NO: 74783 - DNA, 1931 bp, Zea mays
  Clone ID: MRT4577_168199C.1
cccacgcgtccgcggacgcgtggggaagaaaagaagagatatatatcatattgaaaagattcactggctagaacgtgtagttttttaactgctgctagtgacatcttcagcgctaaggtctctggtaccttcaaaagggcccagattactcaaggacgtaaggttttatcgaccttggatagcctatcaaaacttgttgaaaaggaacaatcagtttcagtcatcatttcgtctgcgggagacatgctacctcagaaatatctccttgagaagcgtgctgttgttgatgttgataatggcaagttattaaatgaagatagtgatatcagatcggtccttcagtttttaatggatgatgtgtctgacttcttgtcaacacatttttctagttcaatggagagaagcaagactgatgagaaaggctgtgcttctacacttaaagctttcattgattatatatctttgagggaaactgaaaattttcgatcccgaaaggaggaaaataagaattctatcacattaacaactattcatcagtcaaaaggtttggagtgggatgttgtgtttattgtgcaggtatttcttcactcttcaggacgagcttgcatatacaaatattctgccatatatgtagtgttaggcagacagtgtggtagcgtctggcatctaattgctgattaagcagcttgtcctctgtgatctggctgaagaaacaattcagtactgtctggccacatgtgtgtttgctagagaggcctggaccatcctcttattcatcaaattgagatggccgactctctcacctcatccaaatgacagaatcctacactggtggagtcaatctgttaaggcaaatgattcggaaattcctttgttgcatgagtacaatggtagtgtgaaagaagctggaagcacactggaggaggagaggaggttactctatgttgcaatgacacgagctcggaaaaagctgtacatcttgcatgttacaattgattctaaccgtcagcttctgcaaccatcacgttttctcagggaaattcctgatcaccttcttgaggtgcagggcgaagagcctctgagaaaaatgcctgaacgaccttcaggtgatgttccttttgatgactctgaagtggatacatcaatcggaaagccaattatgggaccaaacgaagcttcatcttatccagaacaggctcaggcatgccttgctaatgatttcttgagaaggtttgatattgatgatagatcggtagtctcacatatatttcatcattggggcaagaagcaggcatttcaaaatccaaagagattacttgaaaagatcagttttgtaattgatgaacgcctacgtggtaaaggatacaagcgcaaggatgtcttgcgaaagctgaaatcgttcctaagcggtgatgaagcattgggctacgcacaatatgttatcaagtgggaacagattcctatagaaaagcggaatcatttgataagagaaaggaacatttccaaaagcagaggattgagaactctatgggttcgtcagaacccacagccaagcagatatcgtaccttcgaagcttggggtgcaccatcactccgacttctcgcttacacgcatcacatcttatcgaaaagtacaaatcgctctaacttggttgaagaaagtacaaatcacaacattttattgttttttatgtacatgccgtccatactacaaatgtagtagtgttgtgtactggatacatcaaggttgtacggcagctccgatcatatctattgtctgttcttcttagccatattcctgtagtacatgctgcattgttgtgacaccaagagtttttgcttctcttgggccttggcagtggtattggctaggcattggctaaccttgtactccattcctacttatatgaactccattgtgtttattattc

SEQ ID NO: 74784 - DNA, 146 bp, Zea mays
  Clone ID: MRT4577_16819C.1
gcgtgacctaaaaaaaattgactggacctaatttaacaacgttgcaactgataaacccttgccgaaaccgaatataatcgactagcagcacacccatctttcttcccaacacttaatcaccaaaaatcgccaacggaacgcccttt

SEQ ID NO: 74785 - DNA, 246 bp, Zea mays
  Clone ID: MRT4577_1681C.1
gacaagatggcgtgcacaaacaatgcgatgagagccttattcatcctggtcctcttctgcatcgtgcatggtgagaaggaagagtcaaagggcatcgatgcgaaagcatccgggcctggtaggtccttcgacatccacaagttgggcgtctccggcaatggcacgacagacagcacgaaggctgtgccggacgcatgggcatcggcgtacggcgacactgggaagcagacaatcctcatacccaag

SEQ ID NO: 74786 - DNA, 850 bp, Zea mays
  Clone ID: MRT4577_168200C.1
gaacatgtgcgcgcgccgtccgcattatcgaagacgctgccgtgacgccgccccaccgccagttcaccaccagctccgcccagcccacgcgagagcatctaaccaagaaatcatcagcctaaaaggggaacagcacactgacaccctctgtaccagcccgcgcagaggtactctagcagagcagcagcagcagcgaccatggcggctaggccgtcggccctcctcgccgtgctggtgctcctcgccgtgagcttcctggcgggggccaaggccgacttcgacgaccagttcgaggcgatcggcgaccgcgaccacatcgggtaccgggacgacggcaaggacaagggccaggagttctcgctggagctcgaccaggagtccggctccggcttcaagtccaaggccaagtacctcttcggcgagttcgaggtcaagatgaagctcgtcgacggcaactccgccggcacagtcacctccttctacctgacttccggcgagagcgcgacccacgacgagatcgacatcgagttcatgggcaactccagcggcgacccctacgtgatgaacaccaacgtgtgggccagcggcgacggcaagaaggagcaccagttctacctctggttcgacccctccgccgacttccacacctacaagatcacctggaaccccaagaacatccatcttcgaggtcgacggcgtgcccgtgcgcaccttcaagaagtacgacggcctgcccttcccctccagccggcccatgacggtgcacgccacgctgtgggacggcagctactgggcgacgcagcacggcaccgtcaagatccactggcgccaccacccattcgtcgtcccc

SEQ ID NO: 74787 - DNA, 333 bp, Zea mays
  Clone ID: MRT4577_168201C.1
ggggatgggaaataattctgaaattacttcatcttttttttgggactaaaaataaactaaattttaagaggggcctctcttgtttaaaggaagaccaaattctaaggttctttggattaaacatcacccccttgaaatgtgatcagcttaatgggttttaaacaaggtttttgcacataaacaggtttgcaaaaatggttaaaatagagtgtggagggagctttgtatcaaggggggaaaaaaaaataacctaggcgtgttttgaaaccaatcacgccgtgaaagaatacataggctaagcttgcattgtcaattctttttttaaaattttat

SEQ ID NO: 74788 - DNA, 317 bp, Zea mays
  Clone ID: MRT4577_168202C.1
cacatcacggtttatttttacccccagggagctgtcgcattccattaacgcatatgatgacatggtctcatccacagcttaaccatggccccctttggactttattgcatcaaacgagcggacacaaactcataaggggcgatcgggatcaatagcggttataacaggattatggggaactcccgcacctgaacgacggcagggacaaatcttttgaggaaacggacctatgttgaaaggccatgtcactgtgagaccaaatacccgccaaggtaacgcgtgaaggatgttcgcaagaatggactgagttgctgcct

SEQ ID NO: 74789 - DNA, 759 bp, Zea mays
  Clone ID: MRT4577_168203C.1
gcattacccaattattttccacttcaagtactaccacctctctggacagcaacctgatctgaaacttccaagatgccctgtaacgagtccaaccaagagaacgagtccgaccaagagagcacacgcaggttatagattatatgatgttgagctgactgtccaaagaagctacaagggtcatcatgtgccccttgtttccctcatcagtaaatggacaggtaaaccaattgtggggtatcctgtcactgtggaggttttggaggatagtcgtcccacaacaagtagaaatgagcatcgcccgccgatgggtagtctcggctccttaccaaagagcagagttgcagaaccaaggcaagcaagatcttcacccgcatcacgatcaaaatcaaaacccagtggacgtaaaaaggcctcagaacatgatttggacaagtcttggcggccccatatcaagaaaccagcatcttcgccgaggaaaatgcggaggctgtcatctttcgccggcagccggagagagagtgcagaccagaagcctgtagttgtgaaggctggcggaccagcagtcgcgtgtgtcccgcttcgacttgttctgagtaggatcaatgaagcactaagcttcccgttgagacaagaaaaccccacctgaggctgtggcagttttgcattgctgagatagaatgtgggcaggcatatacatttgctaggttttctttgtacattagttaccatattatctgaaagcgtattgcctggcatatt

SEQ ID NO: 74790 - DNA, 1135 bp, Zea mays
  Clone ID: MRT4577_168204C.1
aacattttgcagcggaaatctttttaccaaattttacaagttacatcaagttttacattagatttatcggagtggttacagaagtggttcaaaggattacctttaacttataataattattttatagttttgaaatatatgctagctcaagtgaacattctcaataagaagtatagaagagttacttagacttataagaaggccgagcccaccggcacttaacaccatcaacaacagcacaaagttagaacctgggtaacactaggttagtgttgttagacgacgaccacttgacgatcagccttttgttttggcattgttcagattatccatcttccggttcgtccatcagcatcatcctgcggattagcccgcgcttgagatcgacttggctcttcttccgcatcgcgcgattaattaacgttccgcttcagcagctgacacgaatctgcgagatcggtagcgattttccgatccaggcaatttgtcgagcgcttggggaatatcgcgctgttggctacgtcttcatccgacgcttgggatttcttgacgacacacgaaacgatgacgagatcgtgtttggagcgagctggtgaggtggggttgagcaggggatgacgggttcgacgactcaacagcaaatgcgagcacgcgcgaaatccgatagacgaagagcgagagagatcgaggtgagcgactccggccacacccacgagcaatccagggacatggggctgggcgcgagttggctagggactctgcaggggcgtctggaaaggggctggacgagcaggagcttggagctcgcgtccatggagggtgctgtggtcatgaagatccgagctgcgaccgggacgtgcgcgccagggagctcggccgagcaccatcgggcgagctgagagagaaactccaagctggactgcggcagagagagagcagggaggtagcacgcgcgccggcatgggagggcgcaccatagggactcggtaggaagctccggcgagctgcagtcgggcgccgagcagggagattgggcgaccgagcaccagagagctgcagcgcggcggccatggcagggaccaggggggagagagagagagagagccgcgagcgtcgagggagataagctgggcgc

SEQ ID NO: 74791 - DNA, 171 bp, Zea mays
  Clone ID: MRT4577_168205C.1
ctgtcatactggttgagtggtactctaccgtacctgcgcgtgggaatcggtcgtctaggtcgttagcgacgcgagcggcggtgacgagcgtgccttctaagagggagagcgggagcactaaggcgaggatgagcgcgttggtgctgggcgggccgcccgtgcgcaccacca

SEQ ID NO: 74792 - DNA, 274 bp, Zea mays
  Clone ID: MRT4577_168206C.1
aggggcaactggtccttgccaaacatgttttctacttgtttaatccagtgcaatattcaaccctctagggtttgccccgcaagggttttaattcctaccaaaatttccaattggaaaagggggcccttcttttggcaaccgccattttttcttcttcctacattttccgctcaagccggtggagtttgaataaaaattcacgtttttgagcccataccgcttaactggtgtggcccctttaaaaaccaagcccctcaaaaagggtgtgaccccc

SEQ ID NO: 74793 - DNA, 223 bp, Zea mays
  Clone ID: MRT4577_168207C.1
caggtgtcctaatattgcgtactttatacctataccatctctccctaatacttctctggaacacattacacatctcgctttgcactttgaaattctctccacccatactctcaacagataactccttttctcattaggctagactgtcatgtgtcccccaaagctctatccctgagctttcgttcttataatgctttctcaagataatcctatgatgatcaat

SEQ ID NO: 74794 - DNA, 549 bp, Zea mays
  Clone ID: MRT4577_168208C.1
attaagtgacactatagaaggcccggccgggatttcctctcgcctttccccaccttccttcctcccccgtcgtcgcggctccagcttagggtttctcgcccccgccctcccgcctcaccgccggccccgtacgccatgtcgaagcaaggagggaaggccaagccgctcaagcaggccaaggtcgccgagaaggactacgacgagaatgacctggcatacctccagaagaagaaggatgagcaaaaggccctgaaggagctgaaggccaaggcaggccagaagggtgcgctgggaggatctggtctcaagaagagtgggaagaaatgagtctgcccacccttacgtaatgcccagaaaatgataatctatctatctacctatctgtgtcgcgcttcactatctgtggttgtaaaagactaccttcagttgtgttgagcattaagcattgtcgcagtcggttgctgaaacctatggcatgtcagcagcctcttctgcttatctgtgatgcagatggctcgtagctaataatgacatgacttgttttgtgac

SEQ ID NO: 74795 - DNA, 728 bp, Zea mays
  Clone ID: MRT4577_168209C.1
acactcgacacacactgcggattctatatttatttgattatttctgtagtaaccaaactaaccaaggacaataatctcccacgcatgcatgtgtggtggtcggtccatgtccatcagaggttgagcacgcatctaagggacttgccttcctccagcaactggatggctttgttgatgtccgagaagggcatcctgtgtgttatgaacccgtcaaggtttatatccaggtccccgttgacgcacttgtcgacgatggccggcagctgggacttccccttgacgtcaccgaagacgcaggcggtgatccgacggccgtcgaagagctccatcgggtgcagcggcagcatcttgggcgtcgcatggatccccagcaccaccgtcaggccccaaccgtcatgcgtggacacgaaggcctctcgcagcacgccgttgatcccggtacactcaaagctgtagtcgacacctccatgggtcatctccctgatcacctgcacatcaacccgtcatcatttcaggtcctgtatatgtatatgcggaggatgggaggacgactacctcgtgcaccggtttgtcagaggccctggagtcgacaaagtcagtgacgcccatctctctccctttggtgaacttttcagggtttatgtcaacaccgatgatccgagctgcccctcgtagcctggcaccctcagcaaccgcgagcccgacagcgccaaggccgaaaatcgcaa

SEQ ID NO: 74796 - DNA, 291 bp, Zea mays
  unsure (1)..(291): unsure at all n locations
  Clone ID: MRT4577_16820C.1
ggggaannngnaggaagggggganganngnngaannanaggagaaaggngagaaaaaaaagaaangnggaattgtgtatagaaacaaaangaangagttggggggggggggntnangtatatgaagaatggntttttggtnnttttnngtaagtggttaggaaatngtnttttnatgtngaagaaangggttggattgnngtaagggatggntantntttnnnggnngntttnagttagtgtntattggtgagtgatnggtngttatntggntggaaaaggtggtnnggaa

SEQ ID NO: 74797 - DNA, 1677 bp, Zea mays
  Clone ID: MRT4577_168210C.1
ttgggtccctcgaggccggccgggccggattcgatgatgaaaagctctgtgcccgtgggtgttcggcactagagccaagagctccatccatttcatttcctccactctctaaaaagtagaccagccaggggagagaagtgaggcatcgaaggaagcccccaccatggcggccaacggcaagagcagcttggcgaacggcgcctccaccgggggaaagcccatcaaatgcaaagcggcggtggcgtgggggcccggcgagccgcttgtgatggaggaggtggaggtggcgccgccggggcgcctggaggtgcgcgtgaagctgctcttcacctccatctgccacaccgatctcagtttcttgaagggagagaacgagctgcaccgcaagttcccccgcatcctgggccatgaggcagccggagtggtggagagcgtgggggacggggtggaggatctggccgccggcgaccatgtgatccccatcttcaacggcgagtgcggggcgtgcgcctactgcgagtccgatcggacaaacctgtgcgggacctaccgcgtggacgcttccaagagcaccatggtctctgacggcggcaccaggttctccgtagcggaccgcgtgtccggccgcaccgtgccggtctaccacttcctcaacacctccacctttgccgagtacaccgtgctggacgcggcctgcgccgtcaaggtcaaccccgaggcaccactgcaaaagatgtgcctcctcagctgtggcatctccacaggagttggggctgtatggaacacagccaacgtttccgcgggctccaccgttgcgattttcggccttggcgctgtcgggctcgcggttgctgagggtgccaggctacgaggggcagctcggatcatcggtgttgacataaaccctgaaaagttcaccaaagggagagagatgggcgtcactgactttgtcgactccagggcctctgacaaaccggtgcacgaggtgatcagggagatgacccatggaggtgtcgactacagctttgagtgtaccgggatcaacggcgtgctgcgagaggccttcgtgtccacgcatgacggttggggcctgacggtggtgctggggatccatgcgacgcccaagatgctgccgctgcacccgatggagctcttcgacggccgtcggatcaccgcctgcgtcttcggtgacgtcaaggggaagtcccagctgccggccatcgtcgacaagtgcgtcaacggggacctggatataaaccttgacgggttcataacacacaggatgcccttctcggacatcaacaaagccatccagttgctggaggaaggcaagtcccttagatgcgtgctcaacctctgatggacatggaccgaccaccacacatgcatgcgtgggagattattgtccttggttagtttggttactacagaaataatcaaataaatatagaatccgcagtgtgtgtcgagttgtacaattcacgtgtgcaccagtgctactttattgtaaaggagggtgtgattgaagccaactagtagcagcagggcacaagtgttgtttctatcgtacatgtgctgtgatgtctcaaagttatctcggttctcacaacacaacttattgtcataaaatatgctgatctttgattttacataacaaactgtttcgctagtttctcg

SEQ ID NO: 74798 - DNA, 306 bp, Zea mays
  Clone ID: MRT4577_168211C.1
ccactctcattctgtccagtcccggaagcatggcgtcgacgccggccggtgcggcctcccgtcgtcgatcgtcagtcgcgcgcttcttggccacttaccgctggcgaccggttcacgaggcccctaagcggagcaggcagggtcccggcttcctccctctacctgacgcgctgcggtgacaatggttgaccgtgggcctgcggggcccagaacctgcgggtcggcagcggctggaacgcggggccatgctgcgggcggatctatccgagtgctgccaagcgctgtcaccgccgaggacacccgcag

SEQ ID NO: 74799 - DNA, 272 bp, Zea mays
  Clone ID: MRT4577_168212C.1
cacgcgggatcctcatcggatcggcgaagcagacggggctggcctaccccagacacgaagcaagcagccaggccaactgccacgcattccagacgaagctactacggcgaaagaagcgcccgctcaggcacagcagctaagaactcgagccaccgcacacaagggaagaaagggagctgaagcggaagcaagctaagggcagagcccagtgcgtgcaggacctgctgctcgagaatctatagcggcgacagcaagactagccagagcgagcc

SEQ ID NO: 74800 - DNA, 941 bp, Zea mays
  Clone ID: MRT4577_168213C.1
tgcatcgtcaggagttggggctgtatggaacacagccaacgtttccgcgggctccaccgttgcgattttcggccttggcgctgtcgggctcgcggttgctgagggtgccaggctacgaggggcagctcggatcatcggtgttgacataaaccctgaaaagttcaccaaagggagagagatgggcgtcactgactttgtcgactccagggcctctgacaaaccggtgcacgaggtgatcagggagatgacccatggaggtgtcgactacagctttgagtgtaccgggatcaacggcgtgctgcgagaggccttcgtgtccacgcatgacgtactacgctcgatctgcttactagctagctagctagctagtcccttgaattttagtaacgtattacgttgtgcaacgcatatgcagggttggggcctgacggtggtgctggggatccatgcgacgcccaagatgctgccgctgcacccgatggagctcttcgacggccgtcggatcaccgcctgcgtcttcggtgacgtcaaggggaagtcccagctgccggccatcgtcgacaagtgcgtcaacggggacctggatataaaccttgacgggttcataacacacaggatgcccttctcggacatcaacaaagccatccagttgctggaggaaggcaagtcccttagatgcgtgctcaacctctgatggacatggaccgaccaccacacatgcatgcgtgggagattattgtccttggttagtttggttactacagaaataatcaaataaatatagaatccgcagtgtgtgtcgagttgtacaattcacgtgtgcaccagtgctactttattgtaaaggagggtgtgattgaagccaactagtaaaaaaaaagcacaagtgttgtttctatcgtacatgtgctgtgatgtctcaaagttatctcggttctcac

SEQ ID NO: 74801 - DNA, 346 bp, Zea mays
  Clone ID: MRT4577_168214C.1
cggacgcgtgggcggacgcgtgggcggacgcgtgggcgcgtccggaggcaagagcgttccgcgccgaacgcggctcgccgctcttcctcctcctccccctctcccgtaggcgtcctcgccgtcctagcgtctgcctttcgacgctgctgccgtggagcgcagatcaaccctgactcttgccgatttcttctctcgttgatgctgaaagtcatttcttacatgttgcaaaatgtggaaaaaccttgccatgaaatggaaaaatggtttgaaaggaatggcaccgcttaagtccacaagcagattcttttaacgccattcttcaactatttgcttactgaattttcta

SEQ ID NO: 74802 - DNA, 872 bp, Zea mays
  Clone ID: MRT4577_168215C.1
cctgtgtcattggctacctcgaggccggccggggcatcgatccctaccgaataatattctgcagtagtttctcgagctcctgtagcaagaaagaaaccatgtcgggggtatgggtgttcgaggacgggatcgtgcggcgtgcggacagcgacccgcccagcggcgccggcgccggcgggtcccggccgaacaaggtgctggtgcacgttcccagcggggaggtggtgacgtcgtatgacgtgctggagcggcggctacgcgagctcggctgggagcgctacctctacgacccctgtctgctccagttccaccagcgctccaccgtgcacctcatcaccgtaccccgtgacttctcccgcctcaagctggtccacatgtacgacgtcgtcgtcaagacccgaaacgtcttcgaggtccgtgacgccgcccctgcctgatggtcttcgtggcgacgcaagctgctgctgtgtgcctattagcttcgtgcaagctcgtcggaccggctggtactggagccctatcgccgccgtatcaacatacgtgcgcatgtattgtatgtttgtgattggtactgatcgagtacttacgtgtgatttgcatggcgcagcgcgttcgtgtggctgcttcttgcatgctgtcctactttgtctgccgccgaataaaatgtacgcgagagcgccgccgccgtcgccgtcgccgtatgcttcttatatatccggatttgagggtgtgttctttgactctttagtattcctcactttctagaataccaaatgggttgaggatttctaggaactaatatttagtcctagagtttagacacgggtgactaaagaaatcaaacgttccatattgcttctctctctatataa

SEQ ID NO: 74803 - DNA, 1018 bp, Zea mays
  Clone ID: MRT4577_168217C.1
gatatcgatactgaaatgatgcatgtgcgaggtatacacagtatgttgcatacgggaggagcattttggtggacaaagctcagttcatgcagctacaacgaaggtttgcattcgtatgtggagaaggctgggttggaggacgagttaattgtcaggaatgcattggttgacatgtatgggaagtgtggttgcattgagtcagcacatagattgttttgtttgatgcgtgagaaggacttgcattcatggagaccaatgatttcagggttgtcttgtcatggacgcggcgaagaagtggttggtttgttcttcagcagtgatttcagggctgcctgtagccatgctggattagtagatgagggatgcatatcttcaattccatggagagtgagtacaatgtttcctcggacaccaagcactgtggttgcatggtggaatttttttcagcagagcagggcttgttcaccatgcttatgtattcattagcatgatgcctttcgtactgaataaaatggattcagtctgctcctacaaagaaggtgctggtgtgcttttgtcctgtgatcagtacatgtcatcggcaacctgggtgatgtcagattgtgaattttcagcagatctaaattttttgcagttaccatcatcagtccaactccattcccaagctcatggaacgttcgacatatttgctacggttctctgcacactcgaaggagctgatccaccaactattgtctacgctatcaacggcttgggggcaagccgtattttaagcggcggggaatgtcagcaccatcacagaagaggatctagccgcctaggtcgaagaggcaaagacaagctgcgtcaggaggaagagaagactgagccacgcccatgtcggatgaggcgcgctaatgttggaatggttgggccagaatgagctctgtaatagttattgggccgatcatgtaagggaggttaaaagaaaacgctggcgtcgggaacagctatcccagaacagaatacaaaaactact

SEQ ID NO: 74804 - DNA, 371 bp, Zea mays
  unsure (1)..(371): unsure at all n locations
  Clone ID: MRT4577_168218C.1
agaacgataattttttacatctttntacgcgttagtcgatacaattaactaacaacattataacacattgaaaattaaacacaaagaaaatagtaggagagcacggatgtatccatggatgagaggttgaccacacattatcatggtttaaaagacattgctctcatttttcttccatgtcttgtaacaaaattaaccgggccgacgtgtgtggccttaattggtggagtcatcattgtcatcctcattgcctgacaggccttctacaccctgggggccaagtgcaatatacggcccgctaggtacattgtgttgtgcgtcagacacaggggcatcggcggactttgtctcggccatctgtgctaccacca

SEQ ID NO: 74805 - DNA, 374 bp, Zea mays
  Clone ID: MRT4577_168219C.1
attcggctcgagggatgagacttttttcactggtggatcatctgcttttccaagcgaccatgtgaaggagaaatgggcctagcaccgttgcatggcttcaatatgctatggacgatcagtgtcattaggcttgctaggctgcatccctacttgggaagagcatgttctgatcagtatatattgggaaaaaagcaactatcgctggtgctgagctctattactgtctgcatgtgttggtcacccgttcaatatgaaactccttacactggccagagtaggatctcaagaaagaacccagaggacagtgggaagcaatccgccattaagcagactaggagtgtgtgatctggctagcaacaggtacaggcgctgat

SEQ ID NO: 74806 - DNA, 682 bp, Zea mays
  Clone ID: MRT4577_16821C.1
aaactcgctacctcggttctgcgtttgtaactgatggctgatcacctgcttcttgtcttctccctttctactcgacgcgtgagatctctctctctctctctctcctctgtggagacaactggaggccctaacccctgagagcttcttccacacagtgcacgtcgaccccttcggcaaatattcttcggacccttcgtcggagatgatgcacaacatccgcacatgtgtacacccagcccactgccttagctgcctgctcgccatgacagtgctactcctgctgattgatatgcatttatttgacggacgatttctgcaagctttagaatcacgacatattccatgtgatatcctgagggtagtcactgcatgctgtgatacctctgcatgatactgaggttatactcctgaacatcattgagcactgcccctagattgacccacgctaacagaggtatcctatctgtagaaactgatgctgcgacatgctaccgcctacatcgagaggtgaagctcgaaaatcaccacaagtcgtcaagctctgatgaattgttatagcatgattaccaacaatacctctgagggctgtaggaatcttgcacgctgaggctgatgctctgatatgaactgttctaatgaccacgcgataagcagaacctttgacctcttcggcacatatcat

SEQ ID NO: 74807 - DNA, 166 bp, Zea mays
  unsure (1)..(166): unsure at all n locations
  Clone ID: MRT4577_168220C.1
accacgcgtcgggccgtacgagaanctttctgcctcctccaactttctccctttcctgccaaggcaaaacaccttcgccggcgaaaacatggcgatggcgtgacgtgtcctggaggtctaactgatgtctcgcaaattacctcaagaaagtgtctctcttctcccg

SEQ ID NO: 74808 - DNA, 626 bp, Zea mays
  unsure (1)..(626): unsure at all n locations
  Clone ID: MRT4577_168221C.1
ccgggaattccctctacttagcacgcaggttggcgaggcagagaagaaacatgcaagcaggcaccactggactgcactagctagtccattctttaccggtccaccgttggttgggcttcctggccacgcatcgcggaaggctatccacttgggtaatccaataggagagaaagagacggaaaaaaagatggtggtccaaggaagccaactcattcgaaagataataagtgaagcgatgagcaggacgttcgggtggtgcccgagggatcgacgcatttctggctgaagtcttcgttttggctcaggcgtctgcggtagtcgatcagtgcagctcaaaagtgcttttggatttaaaaaactgtgttggttgttctgccagaaactgaattttattttgctggtctgatccttttgggtttgctctctgtaaataagcttagcttaaaaactgtggggctgttaggtcggagattagtggtgtttatcttctgctatgttcgttctgatggttgaagttagtttcactagtttcctctggttgggtgatgggaagtttctcaccgttctggcttgtaatgaactgttacctatttcttaatgaaatagggnggctatgccccttcgcc

SEQ ID NO: 74809 - DNA, 777 bp, Zea mays
  Clone ID: MRT4577_168222C.1
gccggccgggctccggagactttgcccatagggaccctcgactctcgttctcccgcgccatggcggcccgacgtctccaatgggagccagtcagcaccgccgctctcgtcctcttcctcctactcgcggccgcgggagcggctgctgcctcggcggcgccagcggggcgtagggaggcggtgacgtcgccgcacggcgccgtggcggcggacgacttgcggtgctcgaggatcggccgggacgcgctccgcgagggcggcagcgccgtggacgcggctgtggcctccgccttctgcctcggcgtcgtcagcccggcctccagcggcgtcggcggcggcgccttcatgctcgtcaggctcgccgacggcacggccgtcgtgtacgactcccgcgagaccgcgcccctcgccgcctccagggacatgtacggcggcaacgagtcgctgaaagcgcggggcgcgctctccatagccgttcccggggagatcgccggcctgcacgaggcgtggaagcaccacggcaagctcccatggaagcgcctcgtcctgccggccgcgcggctggcgctggcgttcagggtctcgccgtacctgcggatacagatggaggcgaccagggacggcatcctggccaacaacgggacgcgggccgtgtacgcgccgggcggcgacatcctccgggccggggacgtgtgccgcaaccccaggctcgcccagacgctgcgggccgtcgcggagcacgggcccaccgtgttctacggcggcgcggtcggggcgc

SEQ ID NO: 74810 - DNA, 316 bp, Zea mays
  Clone ID: MRT4577_168223C.1
ggggtgattgaaaagttatgaaactttgtaatcactagaaatttacaatttttggatcaccaaaaagcaacatgggaatagcttccttgaaggagtccatcctaatagccaatgaaataaacgggactgcccaaaaactccatgtgtgccactgaagttccagaataataaaccatgcgtggatttaacacaatgggcaattaataagagttatgatgcatgaggaggggggcacacggtcagcaagttttgcaagtcgctacccaagggaatgacttccacgaccaccttctccaggtaggtggtggcgttgctt

SEQ ID NO: 74811 - DNA, 1099 bp, Zea mays
  Clone ID: MRT4577_168224C.1
caaagctgtcagcaagattcttccagaaaatctgggatacatgttatctcatcctgaaacaaaagaacgagtgcagtcatgttctgatgcttctgatgttcttagatatgcttttactttgacagaagatgcaatcgatcatcagtacgagggatgtacaggcacagcacttcttatttggtttgatcaaaataaagattgttttgcccagtgtgctaatcttggtgattctgcttgcgtaatgagacgatcgatatgactgaagatcaccgggtagctagcgcaactgaaagagctaggatagcaagaactgggcagcccctgaaagatggggaagtccgtcttaatggactgaatcttgcgaggatgtttggagacaagtttcttaaggagcaagactcacgcttcagctcagaaccatatctgagccaagctgttcgtatcaccaaagcgtgcacagcttttgccgttattgctagtgacgggctttgggatgtcatcagcacgaaaagggcggtacagcttgttgttgagggaacggagaggtactctggtgacagcgcctcagcggctaaagtagccaaccgcgtgttggacgaagctaggagcttgcgaaccaaggacaacacatccttaatatttgtagattttgacattctgagaacagatccttgtatcgccaaatgacatgtcagattcaagacacctttccgtgaaccatcttcctggctgcttatatagctccaagttttggtccacccattcagttttttagtgagatgtgatatatatattcagctgtagattggcataggagcagagtccataccatgtaatctggtgcatgcttttagactctagtgcgtgcgcgctgcctgcgtgtgggtgtgtgtgtgagggggattgtcaatgagaaggtcttcatggagaaacttcctggtcaattttcaatagagttagaattttggaacaagagtttcttggccactgaccccctcaatcttgtctgaagaacgtcgggagaaacttggtgctagacccagttgctgccacgtggacagcattgagcctgagtttttgtcaagtctggaatcctttt

SEQ ID NO: 74812 - DNA, 437 bp, Zea mays
  Clone ID: MRT4577_168225C.1
gggcatgggctcaaccaataataaccacgagaagcattcatctatacaaatagcgaataatcctgcgggcccgtcgttctttcttgtgtcaaccccgaccacgctccgttcggctccggcacaccacataacatcgccatctagatcaagaacgccgcctgcgccgccctgctcggcgcctccttcctcaccgtggtcctctacctaccaggccccaaatcccggccccaccagcgccatacgctgctcgctgccagccgccggctccgtgctgatcgccttcatactatacttaatcgcctactacctgcatctaaacataaggagggacggagggagaggctgctctctgccattgcctgcttttctgtgaattccgattatatataaatggaaaaacgtaaacactattctgaacaacacgatagatccataca

SEQ ID NO: 74813 - DNA, 413 bp, Zea mays
  Clone ID: MRT4577_168226C.1
gcgagacttcccatccattccactccgcagtggcggcggcggcggcggcgaggtctctacgactttcagatctctccgaagagggcggaggggagggagatgtcgtaatgctgccggagggctgctgacgaagatgcggaagctggtgaagggcctcgccaggcccgagcccaggtggctcagggccatggaagaggcagcaccagtgacatttcctcgcatgatgggaagattaaggggtgtttgtttgggattataatctgtccagattatataggccaacaacttgaacaccccctaagaagatcgagtttctgatgatgtgtatgttaggaagctaaacaaaaagaacatccggattcgctatgccatgatgcaatcaatggatttgatccaccaccagcacgagcttt

SEQ ID NO: 74814 - DNA, 340 bp, Zea mays
  Clone ID: MRT4577_168227C.1
gaggggggctcgctccatccaagagtgtgaggacccagatcaacttctcgggggcctcccgctacagcgccacagcgcccaccgcgggggatcagaagagtgtctcccttttcaacagaaagacctgctcagaagagaaagaacgctgcggcatcggcatcgtcgccagatatgagcaacgagccggacaagcgagatgagcgtgacaggcggatgtacctgccggatggggtgctggaccgatcggaggagtccgaggacctcaccagacaggtagctgtagactatggataagacccttttggagctgcgtgagaaggcagaggagttcagcaagtac

SEQ ID NO: 74815 - DNA, 391 bp, Zea mays
  Clone ID: MRT4577_168228C.1
attaggccccggcattttttgggggggaacccaaaaaaaaaaagggggggggctttacgggttttttacatttttagaaggggagaggggggtgggggaaattccccaaatttaaaaaataaatagggggggggaagggggggggaaaccccaaaggggtggggggggaagcggggcagttggtcctggaaaaacccacccaggggggggttgtttgggcccataataagggccagggggttaaaaccctgggttcccaaaaattgttgttgttgttgaaaaaaaattggtttaaaaaggtttttgttgggggaaggggccccctaaaactgaaaaataatttgaagttgttgggaaaaggactgaacgtcaataatcttaatttgttggg

SEQ ID NO: 74816 - DNA, 347 bp, Zea mays
  unsure (1)..(347): unsure at all n locations
  Clone ID: MRT4577_168229C.1
ggatatcanagtgtgttaattttcaggtggttgcgggtaatgtccatccggcaaagtgccaagatcacctgctcaccgagggagaaaaggaacatctactctttcagagctgttgaatccggaccaatcgaacttaaatcgccacaaacaagcactgggcatgcaagttacatccatccatggtcctcggaccaccactgaatttatctatctcgcggtttcgccgccagagaagcagccacaactgcgacgatacatacatgcatgcatacacgaaacggatcggcatcatcacgaaagaagggatccagggaaaacaaaagcaggcaacagggactagaggtaaa

SEQ ID NO: 74817 - DNA, 308 bp, Zea mays
  Clone ID: MRT4577_16822C.1
catctctgcgtctcttcgtcttcggctgcgcggcggcggcagcagcggaggaggttgaggagatgctgtccggagacatccccccgaggcagaccatctacctcatgaagctcgacgagagtgtctagaaagaagaggtgatgatgtatatttatcatatgcgattgaatagggctaacatgtgcgcatgccggtctgtgatgtaacatcttgctatgagcatgcatatcttgatattgtatcgcgaacatgcatatatgcagagtagtcattattgagagacgtgaaaaaaaataaaaaaagtggtc

SEQ ID NO: 74818 - DNA, 325 bp, Zea mays
  Clone ID: MRT4577_168230C.1
gagtcgacccacgcatacgttcgtgtgatgtattggaaagggaggatgggcttcttctgtattatcaagctgtagatgatgcttccgagattgggggtgatgaactaacccatgaacagaaggtgagtctggcttatattaggaagaataaggcttttctttatcccacaacataaaatgaagaacagaactgtagaacgccgttctattgtccctagaaagtgggacaatgaaccgaacatttagaactgataggatggcacgccagctttcatccatggttttggatcctatggctgccatcattacaacgacttatcagtct

SEQ ID NO: 74819 - DNA, 314 bp, Zea mays
  Clone ID: MRT4577_168231C.1
tcgattgttactgaattccttcaacgtgggagtttgttccgattgctccagaggaatcctgcggaattagagaggaaacggcgtgttcatatggctctggatattgcacgaggcatgaattatcttcaccattgcaatccgactattcgtcatggggacctgaagtcttcaaatttcctagttgataaaaatgggactgggaaggttggcgattttggtttgccacgtttaaagcatgcaacgtttttaactactaaaactgggaaaggaacccctaaatggatgggcccggaagttttttccaatgaaccctc

SEQ ID NO: 74820 - DNA, 288 bp, Zea mays
  Clone ID: MRT4577_168232C.1
cctgccagcagtacatggcacagcccaagccaccctaggccagcctggagtcttttccatgctctgatcacctaagctgcctcagaactcatttgcttctctccttcctggaaagcttccctttatgttttattttgaccccagatgtccagatgttttgcagtgtctggggcttgtgccccttgttgttcgttctgcttctttgcccctttcctctacatggagtgattatgttgacaataatgtgtaatgcgcgttcttttcactggtttatctacagaaatttct

SEQ ID NO: 74821 - DNA, 347 bp, Zea mays
  Clone ID: MRT4577_168233C.1
cgatctataactagtcggacgcgaccccccagcccagaatatctatcggggacctgaaagaccacaactttgtcctataaagggctatggtacaacgtggaagaatacagggcatagacgttaactgagacgaaaaactattccgctcacaatgtcccacgacttacgggataactggatctggagcaaagcccgacggggccaacaaaagaactaattcagattaaacgggtagcgctaactgtcctatataaacaactacaaacacggtggagcaacaatgccattaatggaacaacgtgcaatgactctggggagcagtgcgggatgtcttattcatgctgcca

SEQ ID NO: 74822 - DNA, 409 bp, Zea mays
  Clone ID: MRT4577_168234C.1
gtctccctcaacatatacggtcgcgcccttttccgacattcagaggggggacaggaaatcagcggctatggcctcgactccggcgacgaccttcgccgtgatcgcacccgtcctcttctgtgccgcggctggcaccgccgtcgacaaggactctccccgactacgtcgtccagggccgcgtcgattgcgacacctggtgcgccgggttcgtgaccaatgtcaccgagtacagcgcgggcgccaaggtgaggctggagtgcaagcagttcggcaccggcaatgctcaagcgctcgagcgactgggtgaccgacgggaacggcgtgtacaccatgaagctcaaagacagccacgaggaggaggtatgcgaggtggtcctggtggagagcccgcgcaaggactgcgactagg

SEQ ID NO: 74823 - DNA, 1190 bp, Zea mays
  Clone ID: MRT4577_168235C.1
ggtacctcgaggccggccgggccggggtcctttcgtctcacagcggcagcaggatccattagatgctcgggtggagcactgagccttttccggcggtgagttgagctgagcagaaccgtgctacctagccaatccacaggaggaagagaggagaacgggagccctttttatgacaagaagggaggcgccaggcgtgtgattaacagttttgaagggagagctacctgcatctgcatggaagagggaggcgacccgcagcttccgagcatctccgcacgcaccacgtccgaaggcgcggggggcgtcgacttggatctccttgagcagctactgtctgacgacaacggctggctcgaggtggtctcacgctcgcccaactcggtagcgtttcctccactctcagccttcttctcggctgacgtgacagccaccacagtgacgacgacggcgacggcagcgccggccgcgaacgccagctggtgaattcagacgggtggcgcgagcccctcctccgtggaggagcagttcagccaggccctgtcctacatccgagatacgcagagcgacggcgacgtcctcgtgcagctctgggtgccggtcaaccacgatgacgggaaactggtgctgaccacaagcgagcaaccgttcacgctcgaccaccgctccgacagcctcctccggttcagggaggtgtccaccaagtaccagttctcggccaatgttaagtcgggggattcgccggggctgtcagggagggtctttatcggcaggctccccgagtggtcgccggacatcaggtacttcaccagctacgagtatcccagggtaagggatgcacaatacctcgatgtccacggcaccatgggtctgccagtgttcgagaagggaagctacaactgcctgggcgtcatcgagctgatcacgacaaggcagaagataaacttcacctctgagctcaacaccatttgcagtgctctccaggcagttaatctcagaagtacagaagtttcaagcattccacgcataaagttcagcactgcttcctacaaagatgctttaccagagatactggaggtcctgagagcagcttgcttgacccacaagctgccattagctcagacatgggtcacatgtgctcaacaagggaaacgaggcagccgacattccgacgagaactaccggtactgcat

SEQ ID NO: 74824 - DNA, 1017 bp, Zea mays
  unsure (1)..(1017): unsure at all n locations
  Clone ID: MRT4577_168236C.1
gacacatcgtcatcgatcatcacacgcaatcgacacaagaagttaataaacagcccaaggacgcagagatcatgctgatcgagaaggacttgtactactactcagtattgtcgtcacatgcacatatatgtacataaagagctagctacctgagctctacccaaggtcgcgttgatcgatcgatcatggcgcggttcgtggacccgctggtggtggggcgggtgatcggcgaggtggtggacctgttcgtgcccggctccaaggacatcagcaacggctgcctcctcaagccgtccgccaccgccgcgccgccgctcgtccgcatctccggccgccgcaacgacctctacacgctgatcatgacggaccccgatgcgcctagccccagcaacccgaccatgagggagtacctccactggatagtgattaacataccaggaggaacggatgctaccaaaggtgaggaggtggaggagtacatgggcccgcggccgccggtgggcattcaccgctacgtgctggtgctgttcgagcagaagacgcgcgtgcacgcggaggctcccggcgaccgcgccaacttcaagacgcgcgcgttcgcggcggcgcacgagctcggcctccccaccgccgtcgtctacttcaacgcgcagaaggagcccgccaaccgccgccgctagctagcaactcctctccgaggcacgccagatgcatgcgtgtgcgtgcaggtgcaaccaccgcactgtcggcggctacgtatgaccggtgaataaaaagttttactgcaccgtaagcatgctcgccctgttgttgttggtatatgttcgcagtgtggccgtctgtatgtagtagctattcgcttgcatctatgcactctatgttagtatgtgtacgtatggttccgggactttttgagtcctatctaaatactagaagtgcccgtgcgtttgtaacgggaaccggacgcgtgggcggacgcgtgggaacgtatgcgacnatagcatacacntcgaatcaacn

SEQ ID NO: 74825 - DNA, 521 bp, Zea mays
  Clone ID: MRT4577_168237C.1
gacacatcgtcatcgatcatcacacgcaatcgacacaagaagttaataaacagcccaaggacgcagagatcagctgatcgagaaggacttgtactactactcagtattgtcgtcacatgcacatatatgtacataaagagctagctacctgagctctacccaaggtcgcgttgatcgatcgatcatggcgcggttcgtggacccgctggtggtggggcgggtgatcggcgaggtggtggacctgttcgtgccctccgtctccatgaccgtcgcctatgatggccccaaggacatcagcaacggctgcctcctcaagccgtccgccaccgccgcgccgccgctcgtccgcatctccggccgccgcaacgacctctacacgctgatcatgacggaccccgatgcgcctagccccagcaacccgaccatgagagagtacctccactggatagtgattaacataccaggaggaacggatgctactaaaggtgaggaggtggtggagtacatgggcccgcggcgca

SEQ ID NO: 74826 - DNA, 240 bp, Zea mays
  Clone ID: MRT4577_168238C.1
aagattcggcggagtgaacctgtgcatttccggcttccttgtgccggagaaggttgccggcaagagcgtcgtgtgccaccgccgcgtcagcgcgcgcgttcagaatggccttgttgtgcgccacgcgggcggcgccggcatggtgctgtccaacacgggcggcaacggccaggaacttgttgccgactcgcaccttctgcccgttttcgttttcttttatagggaaggcaccgtaatcaa

SEQ ID NO: 74827 - DNA, 192 bp, Zea mays
  Clone ID: MRT4577_168239C.1
caaaaaaaaacataagcatgtcattccggtggggatagcccctaacacgatcaccttattattctgtactgaacaccgctcacagttgtcgacggctctctggtgattaaacggagatcctgttgggtctgccacggaccaccagtccggattgtgccgcaagattgagcaaggtataagaaacgtaaacct

SEQ ID NO: 74828 - DNA, 634 bp, Zea mays
  unsure (1)..(634): unsure at all n locations
  Clone ID: MRT4577_16823C.1
gggaggcgcaaacgtggagtaaggggctctgctaggattcgaactctttgactttgatactatattaagttgcatgcaccaattggttaaacccaaaagcttaagttagtgtgtccactctaatagtcagaagtcattgctgacccactagcagcattgtctttgtattgctgattccttgtagacatccaaaaggcatataatgtgttgtcagtcctccacagaattgggtttgggcaaggtgttacacttctgttttgccctaatggtctcgcaggtgaatccaatgttgagaaattccagtgttaagggctttatgtaaaataggagtgaaaagtagtatgtggtgaagtatctgttacaattgatcactccgtccagatgacttaggataagtgaaacagatcattcttgtataaaaaattacaaatattttttataacaaggataccaataagttaggatgaaaactgtggtgcagcagctgttgattttctgtgtaggatgtggtgcttctgttacatactgcatccatggtaacggcatgttctcctctgtgctctttcaactgaactgctaattnttttccaaacactgttttgaaaaggttgnacaggcaccctgagttcaagtc

SEQ ID NO: 74829 - DNA, 285 bp, Zea mays
  unsure (1)..(285): unsure at all n locations
  Clone ID: MRT4577_168240C.1
gactcctatagggcgattgggttttcaccccgcnnccgggggcgtcccctaacangaggggcgcaggaccggtcactcggcacgcaggctagcagcacagcagcagtcaccgccatcccctctcctcgctacgcttcgcttcctcggcgccgattcctcctcctcctcctccaccctcgtccgtccccttccggcgcgcgagctcgcccgagatggcgaacgcgagatcgggtgtcgcctgtgaacgatgagtgaatgctgaagtttggagagatgcactcgaag

SEQ ID NO: 74830 - DNA, 377 bp, Zea mays
  unsure (1)..(377): unsure at all n locations
  Clone ID: MRT4577_168241C.1
tnggaaaggacatgtgtttttacacagggggattttttattttcgcataaagaaccttttggtaaatgggccggggtatagagtttcacatttattaatttaattcaacatggtgggaaccaggaactttttggggttcctttttttttaaaaatttatgttggctttttaaatccagcattcatgaacaaaagaggttcattatggttttttgggcttgggcttaggggggggggttaggaaaattacccttaaaatccaccccacaagaatgggccccatgaagggacattttccgtacacattgaactgtttccacgttttatggggggtgttaaaatatgcccaaccaaatgcattggctgggtttatggaaa

SEQ ID NO: 74831 - DNA, 1883 bp, Zea mays
  Clone ID: MRT4577_168242C.1
cattgggtacctcgaggccggccggtactgttcttgttgccattgatgtaccaccgtgacagttctattaacttgacgagacaaaaggggggaaagttctcctcctacaatcctacctccagtgatgtcagtaccaccgccggccggcggcggcgccatcatcaacgaggtcctcaccgacgacgagctccgcgcagtgctcaggcggctggggcccgaggcggagcgggacgcgttcgggctcgtgtgccgccgctggctccggatccagagctccgagcggcggcgcctgcgcgcgcgcgccggcccggacatgctgcgccgcctcgctgcacgcttccctggtgtcctggatctcgacctctctcagtcgccctcccgctccttctaccctggggtcatcgacgacgacctcaacgttatcgccagcagcttccgcaacctgcgtgtcctcgcgctgcagaactgcaaaggtatctctgatgtcggagttgccaaattgggagatggactgccatctctacagtcccttgatgtttctcgctgcataaagctgagtgacaaaggtttgaaggcggttgcactagggtgcaaaaaatttgagtcagctgcaaatcatgggatgcaaattagtaacagataatttattgactgctctatcaaagagctgcctgcaattggtagaacttggagctgcgggatgtaacagcataacagatgctggtatatctgctctggctgatggctgtcatcacataaaatcactagacataagcaaatgcaacaaagttagtgatcctggagtctgtaagatcgctgaggtttcttcatcatgcttggtgtcaataaagctattggactgcagcaaggtgggagataagtccatctattcgttagctaagttttgcagtaacctagagactcttgtcattggtggatgtcggaacattagcgatggctccatacaagcacttgctcttgcctgctccagtagcttaaggagcctgagaatggactggtgcttgaaaataacagacacatcattgcaaagcctgctgtctaactgtaaacttcttgtagccattgatgtcggatgttgtgaccagataaccgacaatgcattcatggacggggaaggatacgggtttcagtctgaactgagagttttgaagatcagcagctgtgttcggctcacagttgcaggggtcggcagagtgattgaatccttcaaggctcttgagtacttggatgttcggtcatgccctcaggttacaagggacagctgcgagcaagctggagtgcagtttcctgctggctgtaaggtgaatttcgatggcagtttgctggaatctgatccatctgctgagatgttcttctaaaatgtgatctcggttgaaatcagatttagtgtgaactgcaaaactaagatttgaagagctcggtcatggaggcgagtgcttgacattgctgctgatctttcactgtcaaaatctatgcaagaacctgagaccacaacggatgcaagccatgatcatattcagtacccaattcaatatgcatgtgatttaatctgtagaaagtagcgcaaaagaccatgaaataagttgtctgaccaaagaacgtatttgcattatgtattgtgccagtgcagcgggtgtattaaaaaaatgtgcattttaatagactggtttcagtggattgtacgcagttctgttttttatctgcatcgcttgtatagatctttgttttggcgttatgccaaacagggaaacagtgttcggtctgttgtcttatgctcaaacactgctcccacctaccagaattggtgggatgtaagccgcatattttacgatactatataaaagtattcgatattaaggatc

SEQ ID NO: 74832 - DNA, 212 bp, Zea mays
  Clone ID: MRT4577_168243C.1
cggacgcgtggggcggaagaggcggcagcgatggtggctgcttcaagtgcggcgagcctggccacatggccagagactgctccagcggcggcggcagctaacgcggtggaggcggtggtggtggtggccggtgctacaactgagggcaggccggccacatgagcagggactgcccaagcggaggcgagcggtggcagaaggaggttcggcgg

SEQ ID NO: 74833 - DNA, 453 bp, Zea mays
  Clone ID: MRT4577_168244C.1
agatctatggggcccccccccattttgggggggatggttcctaaaaccaaacaaccccttttttaccgggggggggggttttaaaaacagcccttttttgcaaccggggtacaaatcaaggcccccattggtggcaacacaagagtaaccattgggggccctccaacaaaacataacattttacaggggggcccggcctaacgagggaaaaaggggttttagttccaaaaaaaaaactggttaacttaagaatttaaaaattggattggcaggacaaaaagcaaacagccccctttttgcaaaagggggaaggggttttttatttcaaccaagttcatgttgggcgtaaaggacccccccaccctaaattcctttttcatggacctggaaaaaaaccatgggacccggggcccgcttttgaaaccccaaaaaagggttcctttcaaaaccccc

SEQ ID NO: 74834 - DNA, 242 bp, Zea mays
  Clone ID: MRT4577_168245C.1
aagatgcctcaattgagaactgccaggtggccgtcgctcgccagcaactctgctggtggtttttttatcacgagaaggctggcatcaccatcaactccccaggcccagggcgccgcccagccgctggctagacggctcctatctcctgcaaagaggtctaaaccacccagtgagaagccctctacctgactggtactcaagggtaccactccgtgactttacatgaatcttaaaggctcttg

SEQ ID NO: 74835 - DNA, 184 bp, Zea mays
  Clone ID: MRT4577_168246C.1
gacccacgcgaccgagcggccacgctcaccgactcctcacctttttcacgcgcaatgacactcggggccatctgctcatcttacaccaccggcggcgcctcactcaacagtaatgggcaccaacaagctgacaactccataggtctcctcctcctactcttactccttactcttctgcaataca

SEQ ID NO: 74836 - DNA, 270 bp, Zea mays
  Clone ID: MRT4577_168247C.1
acctcaaacggaaccaagaggaaggctttggatcattgaatttgcatatgtacggataaattacagggacaattggttcacaccaacagggtgcaccacattttgaggtttggcccgaacactcccccgttgagttagtctctattcccacctaaaaaaggtgacatctaccaggcttcaagagaaaatccagttcctcattggaacatgcccggtggttaaattgtttgctatcgaggcgccatgccactaccccaaaaacgccggccc

SEQ ID NO: 74837 - DNA, 141 bp, Zea mays
  Clone ID: MRT4577_168248C.1
aatcttaattgttattaccttttatgcagcacccaaaggtattttatttgtcgacttttaaacacaaatggtactcattatctggaatgcttcaatcaagcaccaactgggaatataaaacgatgaacctgcacaggggca

SEQ ID NO: 74838 - DNA, 809 bp, Zea mays
  Clone ID: MRT4577_168249C.1
cattgggtacctcgaggaagacaggaactcaaacctccctctctcgacctcgacccctcgcccgcaaagccccgcaagccagcggcatcccgcttcctcggcaggcttccaagacccaacccaacagcttccgagcgagtacggcggcggcgacgatggcggccaagtcgcacacacgcaaggcgttcctcctctgcaactacgtcctcctgggcgcctcctccagctgcatcttcctcacgctgtcgctgcgcctgctgccgtccccgtgcggcctgctcctgctcttcctccacgccctcaccgccgtcttctccgcggccggctgctcgggctccttcacggcgcccgccacgcccgcgcagtggcacaacgcgcacaccgcgggagccgcgctcaccgccatcttccagggcgccatcgcgctgctcgcgttcacccgcacctccgacttcctcgccgagctccagtcctacgtccgcgacgaggacggcgccgtcatcctcaagatggtcggagggctcggcaccgccatcttcgtcctcgagtgggccgcgctcgcgcttgccttctccctccgcctcgacgaggatgacgacgacgacgacctccaggccaagaactggcaatcgtaccatgtctgatcccatccactgctggcctgggctccttcaaaatgagattctttgatgtctattctattattggactattgctgtcattcttttgtactacggtgtactgttatgactgttcaaccaaaataaataaataccaaagcaaatatatattattgctcttttgacact

SEQ ID NO: 74839 - DNA, 408 bp, Zea mays
  Clone ID: MRT4577_16824C.1
ggaggatggccgcaccctggcggactatagcatccaaaaggagtctactctccacctggtgcttaggctccgcggtggaatcattgagccctcgctgcaggcgctcggtcgcatgcgcaaccaggacaggacgatctgccgcagatgctatgcacgcctgcgccctagggctgtcaactgccgcaagaagaagtgtggacacagcaaccagctgagggccaagatgaagatcaagaactgaggtgctgctcctagtcagctgcatggacaatcgctggatgtatcgcagtgtggcctgtgaaccgcgtgggttcacccaacatctgggccttctgataggtagcacctagacgacgagggcacaatactataagacaatagcaactctgtgaatgcaggaacggtcac

SEQ ID NO: 74840 - DNA, 909 bp, Zea mays
  Clone ID: MRT4577_168250C.1
attgggtacctcgaggccggccgggactccaacctccctctctcgatctcgacctcgccccttcgaccgcaagccatcccgctccctcggtaagcttccaagcggagtccggcggcgtcgagtcgaatggcgggcaagtcgcacacgcgcaaggcgttcctcctgtgcaactacgtcctcatgggcgccgcttccagctgcatcttcctcacgctgtcgctgcgcctgctgccgtccccgtgcggcctcctcctgctcttcctccacgccctcaccgccgtcttctccgcggccggctgctcgggctccttcacggcgcccgccacgcccgcgcagtggcacaacgcgcacaccgcgggggccgcgctcaccgccatcttccagggggccgtcgcgctgctcgcgttcacccgcacctccgacttcctggccgagcttcagtcctacgtccgcgacgaggacggcgccgtcatcctcaagatggtcgggggcctcggcaccgccatcttcgtcctcgagtgggccgcgctcgcgctcgccttctccctccgcctcgatgacgacgacgacgacgacctccaggccaagaaccggcagccgtaccatgtctgatcgtccgctggtgttagctccttcagaatgatatatgaacaagattcgttgattctttgccgtctgttagtatgtactattgcttttttttggtactactgtgcctgttcaaccaaaattgttaaatgccaaagcaaatatacattgctttttgttgcctttgctaaaaaaaaaaaaaaaaaggcccctacttgcatgcacattcatcagatttgatgcaaacaggttgtaaaaacaaatttctgagaaaatctgtcatttgataagccacaagtgaaaaatatatttgctcgcccc

SEQ ID NO: 74841 - DNA, 819 bp, Zea mays
  Clone ID: MRT4577_168251C.1
cttattttctcccatattggctgtggcacatgggctaggcgtctgtctgctgagagtggccagttcactacggtgcaggatatttggaaaagatgttttgtggacacttgttcgatcgcacacatggcacactattgcattccagatagccaaacatgggatatgataccgttatctgctaccttcgattcaacaacggatgcatctgatcctagaaatgagaacgaaattcttctcctatccgtcttttgtggcaggtttgttgcactctccaatctccattaatggtttgatacttgcacattaattcatgccgctagtcagttgatatatgatgctagcttctagctagcaagccaaggcattttgcacaatgattgattttctccaacatatggcattcacggttagcaaaaggcatttaaagcaacgatcgatatattctccccatccacaagttagctctggatactagtttgtttgctgtaagactttttcagcattatctgaaacgttaaatgtctttctatattcttgtgctgtcttgctatcatactgtttgtggatttcctacaaaaaatatctggctgaggttgataatgagtactacatccgttctcgaatatttgtcgcccggtagttcatttttgaactaaaacacggtagttcatttttgaactaaaacgcgacaaataaaaaaagaacggagggagtgtattacagccattagtgattacggattggtcttccgcacatgagttcatgatgatgtgctcttgttgctattctatagcttgtgcaagtatctcacacattgct

SEQ ID NO: 74842 - DNA, 492 bp, Zea mays
  Clone ID: MRT4577_168252C.1
gtgatgatatggaagagatggatgatatggaagatatggaagacttcgaaggcctcagtgacggaggcacagatgaagatgatgttttggatgatccagtatcaaagaaacccaagggatcatcttcttcgaagcaaaacgccgggaaaaggtctaggaaggttatgactgaggtggaacaagacgaagagataaatacgaggcagaggcgaagggcatgaatgtgaaatctgcaaatgtaactccagttctatggtgttagatgccggtagccacttttgttgtatgttagatcattctacttgccttcatcatactgtaacgtggagaattcatctgtggtccctgttgagaagttggcgaataatttgtcgtggtttacatcattatacattgctatatgttacgaggaaaaaacggattctagcttagttgaggatgtgggagaccatctagttcccgaggcgaatttaggtatctattttgtaactc

SEQ ID NO: 74843 - DNA, 402 bp, Zea mays
  Clone ID: MRT4577_168253C.1
gtacgcctgcggttccggtccggaattcccgggtcgacccacgcgtccgtttgcttctggcttgtagcagctggttggcttctttccatccccccagactctcactccatttacagaataaacactaggttgtcccccagtctgtgtaacacacatctatgtggatgaactgatctgaaagctgcgttccttacgtttctgcaggtctatgagaaaaaaggaatcgtttcctctttcccttcttgtgggtcagacacagcaatagaaaaatactctgcagtgctaccatcaggcttacagggacctcctctgcgggtttgatgagatccatggcagtgcaccctgccgcacagggttacttttgctgtggacgcgtgcacgacgacgcggtgcaccgcgaca

SEQ ID NO: 74844 - DNA, 433 bp, Zea mays
  Clone ID: MRT4577_168254C.1
aattcggcacgagggagccgcggtgccccgacctcaacctcgacctgtccgtgggcccgccagcggccgccgacacgcccacctcgcagtcgcagctggcggtgtgcctgtgctaccgcctgggcctccgcgccggggaggcgtgcagctgccaggctcaggctgacaacgcgggccagcagcggttcagattttcagatttcagaaccgagaggagagtcgttaagtagcttgatccactgcaatttgcaacacaggcagtttttttttcctaatggatattgctgcttcagaaacaaaacggcgggtcaaaagaaattgtgaccgcctcagatttttgttcgaaatttacagagtgcaaatccttgatttggcggcagaattcgtgagacacattatagataaatgcacaggtactaagggcctgtttgtt

SEQ ID NO: 74845 - DNA, 373 bp, Zea mays
  Clone ID: MRT4577_168255C.1
gtcccttgggccatccttagcttgatcccaagtcttgctcgtgcagctgctcgtcggggtctgagaccaggcgcgaggatgctggcggtgttcagcggcgaggtggtggaagtgccttcttgagattgtggaaaggtcgagccagactcatgaccacaagacgaaggcgtgcgaaccttgcagagcgcttactgacgaccatctgcacgcgtcaacgcgtccgggcagttaatatagctctggcgaatttgctactcgcacgacagccatgccctactgcgctcaaagtcgatcgttgcgaatgatgcagtgatctgactgttcgaagaaatttgctggacaacctgaggcacatgagccggtagatcatgct

SEQ ID NO: 74846 - DNA, 326 bp, Zea mays
  Clone ID: MRT4577_168256C.1
gggggagggggcagatcacatccattgcattttttcagaaccgctaatcataatcctccggtaacatcagcccatagcaagaagccttcttttgaaaacaacccacaccttttacacaaccatgacgggcttaactaaacacctccagcagtagggagcaggccccgaaaccgaacccccttaggcccctccccccggattccgcccccaagctggatttccttgggcattatggtgacccccttggcgtggatggcacaaaggttggggtcctcgaaaaggcccaccaggtaggccttgggggccttctgcaacgcggttaccgg

SEQ ID NO: 74847 - DNA, 409 bp, Zea mays
  Clone ID: MRT4577_168257C.1
ccgggggggggttttaaatgcatctttgcgggggatttgccccgcagcccaatcttaaacatacatcagtaacaacaaagaataccctccccttaatcgtatccaaactccaccaccaccatgatcgaattgaaaccgccatgaccaccagcatcgagtacgactatctcttcaagctgctcctcatcggcgacctcctccgtcggcaagatctgcctcctcctccgtctcgccgacgactcatacgctgacacctacacaagtaccatcggcgctgatctcaaaaaccgcaccatcgaccctcgtggaaagactgtcaagctacagaacttgggacacaccaggccccggataggtccaggacaaccaccagcagctactaccgaggagctcatggaatcattaccgt

SEQ ID NO: 74848 - DNA, 512 bp, Zea mays
  unsure (1)..(512): unsure at all n locations
  Clone ID: MRT4577_168258C.1
tcccacgcgtccggttaccaaattagcacttagtcattcagttctaaagaatgtttttcccccataatttaactacatacaataaagaatgctttagttgaatcttgattgatcaaataaaagaacatgcgctaaatttctatcgtgcgtgtggctgtacttatctgatcatgtgttaaatcttctgtccagcttagcacaaatatttatagagatgacgacagcaatgtgtatggtgagttgatgaatacagagaagatatcaactaaagcttattatcgtctctctattctattttttagttttagtgagacgactagttcacctctttttattgtctaaaatagggagatcggccccaaagacaaacaaaatactcacaagtttcaagccaaaagcttgttctatattgttctacctcttttatagctcaaaggaagccatacatgcctagtgaacactgtgcaacagagtgaacattgtctaacataggtttaactattcttatngtt

SEQ ID NO: 74849 - DNA, 563 bp, Zea mays
  Clone ID: MRT4577_168259C.1
cactacggagctcgccttacgcctgcggggccacctccaccatggccgcaaagaaggagaaggccccggccacatcgaccaaaccaagcacatgcggaggggggcagcacaagaagaatagaggtagcatgggtaagcacaacgagaagggcaacaacgctgggctctttgatcaaggcagctacgataagctgatatgctatgcgcccaagtacaactcagatcaccacatccatatctatctgatcgcctaagaggtaatggatccttggcaactgatggacatcaaggatctaatagataaggagctaataatgatggtatctgatcattctagccagcaaatatacaccaagggaaccaacacatgatgggggttttgagggttacagacttaatcagagtacaccacttgatgactgtatcatatgaagaacaatgtaatagggtctcgatcaaactaactgtcgcgataaatgttcaatattcctgagattattgcactatcataagatcatgattattataacatttaagaccatgccgccatccaaattgtagac

SEQ ID NO: 74850 - DNA, 2349 bp, Zea mays
  Clone ID: MRT4577_16825C.1
aaggaagaactagcgcctccctagctctcgttgtcagcaatggccaccaccgccgcgtccagcctcctcaatcgtccttcgcgggctcccggctccgggatttaggttggtaactgtttattttccccacattgagagagtgtttctacttgtagctcgaggccggggaagccctgctagcggtgtccggtccggcgcccccctatttcctctcgcagcctcttctccccaaaccctaatcttgctcctgcctatctctgctccaatccgttggtggagcggcggcgatggaggggaaggaggaaggtcggatcttcgtgggcggcctgtcgtggcaaacggacgagcgcaagcttcaggacgcctttggtcgcttcggcaaggtcgtcgatgttcagatcatgctggagaggcacacaaaccgccacaggggctttggcttcgtgacattcgaagatcgaagggcagttgacagcgctatcaaagagatgcgtggccaagagttagatggtcgtaccatctcagtgaacaaggctgagcctaagatgaatacagatgacacaaggttcgacaatggcggtggacgagactatcgaggtggtagaggtgatggtccaccccctggcaattgctatgagtgtggccgtcctggtcattgggtccgtgactgccctagtgctgctggtggtcgttctggcagattcccgtccaagttcagtggtggtggcaggggagaccgcttttctggatcagataggtttagtgatcgttacatggatgatcgttatgatggtggtcgttatgggtaccgtgatcaagttgatgcaagggacaagtatgctgggggccgagatcgttatgccaatgatcgctactccgctggtggcgatcactttgacggagacaggtatggaggtggcccggatcggtacgcgccaaatggttatgggagggaacgagaaagaagctacgagagagatggagttcgtggcggcggtggctatgataggaatgactcaagaggtggtggaagctatgacagggatggccctagaggcggcaagggtggtggctatgtcagggatggcccacgcggtggtgttgctgatcgttatggtggtggaggacctgcacgctatgatgggggaagttacagggacaggcctgggccatatgatcgccctagcaggggaggaggtcgttttgatgatcgccactgatgaactgcttctagacccgagcccctggtcttgtagtttagctttttgcagttttgcatagcttaatgcttaatgggctatggaagatgcctaatttacccccctctttggcacttcaatgtctgctctgtatttcaaccagtacttgggcaccggtgttgccttctcgataagtttatcaagctgactgtttttgcatgagacgggtcatcctttgggctactactctgcctgttggtccggatgtttcagttgtgcatgtcgtgcgtcctgcagttatagtggagtcgaggttctcagtgattgtttgtcattgttgatctgaatatctggtatgcatggactgactatgttttcagtgattgcctgtcaccgttggtctgaatatctggtgaacatatatgctcagtgacggtgcttgtcattgttgttggtctggatatttgggttcgcaaggatatatttgcagtgctgagatgcaagtgcttaaccgaactgtagccaaagtaaccctatgctagaagtaactggcaaccatgttgaattgttaatctcgttagttttttgtctggggtcttgaaaatgccctccagatctctcacgagaacgtgaacttcacctatcttctctatcgagctgcatcgccctctcttttggcgagcaggtctttggattcaccgtttgcttgtgtgatatctgcttagttgtgtggggatgatcaagtggttggaaagctttgctgtgactgttcgttgatcttctttctgccgctcattggatcggaggaccgtcttgtttttgtgtgaatgttcgaggaacgacactgttaacaactgacctttttatgttgacaaattacagagttgttcaccttggcattagatgttcgtttgactttaatccaaaatgtcttctattgtttgttgaaaaaaataaaaaaaaaaaaaaaaaaaaaaaaaaaaaaataaataaaaaataaaaaaaaaaaaaaaaaaaaataaaaaaagggcgggcaccaagtggggagcctgtttacccagaaaattaattccaaacagaaaccgtgagacggtaccatctatagcttaataaaattaattcgaaaaataaaaattaggattaaaaattt

SEQ ID NO: 74851 - DNA, 407 bp, Zea mays
  Clone ID: MRT4577_168260C.1
gggcggacccaggcgtccgcccacccgtccggaaattatggggctatggtgaataaaccactggtaaggctgtttggctcagttgtttcgggtggaccataaatgatttaatattaatcctgcgtaacattaattaactgttgggcaaaattgatatggctttcctgaaaaaaaaaaaaaaaaaaaattaaaataaaaaaaaaaaaaaaaaaattaaaaaaaaaaaaaaattaaaaaaaaatggggggggccttttaggggatcaaggttaactaccccgggcttgcaacgaataagtttttttttggggtccctaaaattaaatcaatgggccgtggttttaaaacgccgggccggggaaaccccgggggttcccaaattaaatggcttggaggaaattccccttt

SEQ ID NO: 74852 - DNA, 392 bp, Zea mays
  unsure (1)..(392): unsure at all n locations
  Clone ID: MRT4577_168261C.1
ttcttttttttattttaaacttagaaaactttggtcgacatttattttatattgacactcatttaattcaatgtnnaagatttttcttcaggtggggaaattgtccataagccaaacattctagagcctatcgagaaatggataatctgtgtacccaaccaccggaacaaaagtatataaggtgcccctatcaaacgtgtttaacagggcattcttggcaaaactgcattagaaggtccgggttgccaaagattatcacggccgtatgcgatgagatctgtatagccacggccaccggcaatggctttatagacttcctcactgacgtagcctacattagcaatagaacgtaccgctagacgccctacttatcggtggcagcatgtgctcga

SEQ ID NO: 74853 - DNA, 229 bp, Zea mays
  Clone ID: MRT4577_168262C.1
gcgcgtgcggccataccttccatcaatgatagctggagtatgtgaaaacccatctattcaaccctataggctccaacaagcaattgcagaaagcaacatacctttactacccttgtttcacaatcagcagccctatctttggtggccgtcattggagcggaccattaaggcacagcaactgcagaaactagtgctacctgtgatcaaccaacgtagctttggaaaacct

SEQ ID NO: 74854 - DNA, 189 bp, Zea mays
  Clone ID: MRT4577_168263C.1
ggggagattatgtagcattcactggttaaaaaagaggctggtatttccaaaacttggcaaccaagaacatcccgggcaaaacaaaacccaaaggtgacaaccggtcttaactattacatagaaagggcctttagaccggacaaaccatcctaagcctttactggctcacctgcccgggcgggccctcga

SEQ ID NO: 74855 - DNA, 376 bp, Zea mays
  unsure (1)..(376): unsure at all n locations
  Clone ID: MRT4577_168264C.1
tggtggcggaaataacggatacggctggcacggggaagctatgttggctctggtgcagcccctggaggtgccgcgccatggcaacaacaagctccccctccacctcctggtggccaagctggctatggctacggttactctgcattccctccgccacctccagctggtggtcatggtgctcctcctgggcttccgagcgctcctccaggcctcgaatccatgtactacggtggcgccgctgctccaccaccacctccgcctggcgaaggccctcctcctcctccaccgagtgatcaccctcctncaccacccccacctatgtaaactcgcccctacgtcattcgtgggtgcaatcaaaggatgtgcgaccttaact

SEQ ID NO: 74856 - DNA, 305 bp, Zea mays
  unsure (1)..(305): unsure at all n locations
  Clone ID: MRT4577_168265C.1
nctgctgctggtgtagagacagtggctgtcttgccacaacatgctggcacaattgtactagcaggtgaagaaactggattactagtgtgggctgcaaaatgacggcgaatcaattgtgaatgttgctggtgttcattcaactcttcatcttccttacgaccacactatgtatggtcagaaccttactgttcagaatttcttcaattcatgagttcctgttgctgtgcaagcagccttccactacaagtacgctgggagcaagtacttgcagcctgcagcttatgacctggccgtttacatattga

SEQ ID NO: 74857 - DNA, 266 bp, Zea mays
  Clone ID: MRT4577_168266C.1
cccacgcgtccgcccacgcgtacgcccactcgtccgttttttttttttttttattttgtggtttgattttattgttatggatttttattaatattttcgaggggactttctaaaagacacaaccgaaattaagaatgaatgcgaacgcaaaaatattaaaaaagggaaccaaaatgcaaataagatgaccgacgactaacaacatgggaactgggaaaacactagggatacccaactaaaaagggttgaaaaagaaaaacttttag

SEQ ID NO: 74858 - DNA, 729 bp, Zea mays
  Clone ID: MRT4577_168267C.1
ttaaaccaaaaaaattttttgggcccttagaaatggttgagggaaaataaaaacaaaatggtttttatgtttgttcccccggggggccgagaaagccaaacggggccacggggtacctttggggcggttgggatccttgggggggggaaccccgttcctttccccccccccccccaaaaaatttttttttttttttttttttttttttttttttttttttttttttttttttttttttttttttttttttttttataatgaccaagtgtatagagataaatgtcacatcattattacatagcggaagagtcttaaaaaaataaacgataacaataaaaagaactaataattattccttggcgccatcaagctgactaggagacgccacctagatagctcgtactcctcattgtagacctcctcctgggctacctgctcttcaccttaacgaaggatgagcagaagggcacaccacccgcggcgaggtgcggactagtggcggcgcggatactacgtgaagaattggggctcccctgcttaaacccaagcccgatgacaagcccccagagcgccccaagttccccacggttccccaaagctattggtcggaggtctgtggccccgggcgagtttgtccacgacggcgggatcttgcttccctctccctcagtctaggcgacaaggaatttcctacctgttgatgagtccccggccggcctcgaggtaccc

SEQ ID NO: 74859 - DNA, 732 bp, Zea mays
  Clone ID: MRT4577_168268C.1
ctcgaagccggcctcttgtcctgctcgataaggtcgggaagagaccggcccgtgcattagttccatatattttattttctctggcatgaacggtgctcatacttatattaattaagttattttaacccaattactaattaatgataacaaataaataagtgccttatccacgtcactgtaaaaaaatgtcaaaacttcccaaattatatttcactttgttctatactaagttattattagacttctttagctttaaacaatgcatgtttatagaaaacaaaaacacccacgcatcagttccattacaatcctagagaaatattcttgatagtctatttatttagatgttaatgtttttaagaaaaatatagtgaaagttaaggacttaggacaaaactaaattgactattgatttttgaaccggtatatgaacagctagcgttatgcctttgtacatgccctcggacaccctgaaggaccatatatatatggtagatttgcacccaaacatatgtcaacacctgctttcctggacgtaccacctaatctgcagtatggacctatgttataatccagcattgtacaatcttcctctttctttgtccttttttttcttttgcagcgcatttaatgtgtacagggtagtgcctattgaaaagttgcaccaaaacacatgaaagatgtcctattatttttaaaaaaaaaaagaaaaaaaaaaaaaaaaaagcggcc

SEQ ID NO: 74860 - DNA, 471 bp, Zea mays
  Clone ID: MRT4577_168269C.1
gttcctagctggaagttccagcacctagcgcttcttctttagcggtggccttcgatggcaaaagacacacacatggggcatgactggactcatcctaggtggtggggcgcatctggatcctcaggggagacacactatgcatggaggtcggcctgtgaaaggaggggggggggggtggagcctacgtcctgtgcgcattgctggaacggggggatggccggcgccatgccgatgcacatggtcaacatcaactgcctgagccgggacgatatcggtgatgaactacaagggactgcatgatgagcccaacaagctcactatcagtgatcatgtggagcgggtccggcttattaatggaaggccccttggcactccggaggtatgcagtgggtgaaacgatattgagattctgtccatgggggctttccgagcaggggcaatgcttctgagcgaagggaaagcagcaacggg

SEQ ID NO: 74861 - DNA, 1432 bp, Zea mays
  Clone ID: MRT4577_16826C.1
gacacacgtacgttgaacaaacacccaaggcctgacgagacgagatccggacctccgtcctcccaactagggcgcgcgcgcgacctcggcaccggcggcctcgatccatcgttctctcggatccccgccagtgcatgccctggaacggacggacggaatggcagcgtcgccggaccacctcttcggcctgcgcaacagcttctacgtcggcgcataccacgccgtcatcaccagcagccagtccctccccgcgcacgcgctctcccccgacgacctcgtcgagcgcgacgccctcatgtaccgctcctacatcgccatcggctcctaccagctggtgatcggcgagatcgggcccagcgcggccacgccgctccaggccgtcaagctgctcgccgtgtacctctccggcgacggcgggaacagggaatcggtggtctcgaggcttcgtgagctcctgtcagacgcggcggtcgggagcaatccgattctccgggtgatggccggcaccgtcttcatgcacgaacgcgattacgccgaggctctcaagcacaccaactccggtggcagcatggagctgcttgcgctgaatgttcagatataccttcaaatgaacaggacggaccacgcagagaagcagctcagggtgatgcagcagctggacgaagaccacacgctgacgcagctcgccaacgcatgggtcgaccttgtgctgggtggttccaagatccaagaagcgcgcctcatcttccaggacctgtccgagaagtacccgacgacctgcacgattcttaacgggaaagccctgtgctcgatgcacatgggcaacttcgaggacgcggaggggttgctgctcgagtcactgaacaaggacgccaaggatactgagactctcgccaacctcacggtgtgcagcctgaacctggggaaacccgcaacgcgctacctcaaccagctgaagctcgcacacccggaccacgcgctggtgaagcgaatgtcctccgctgcagagagcttcgacagagcctgccaagcaatggcgtgaacctcgtttgcgaaaattacatttgttttccctaggatgagtcggaataacatcgtgatctactctgaagcaaagcagctagtgcatggctttctcatgggcagcttggactccaccgtcggcatgcttttccactggtctcggatagtacattcggcctcgctggtgcgctggaaaggcccaggtgtttcctttaccttttgggctatgctctctctctctctgacgccttgttgcgatgggagtgactgaggggaagcaatccttgaaatcctaaacaggagatagcatgaaacagtatttggttcaggtactgcaatgctgggggtcatatctcatatgcctgttccgatctgcatataataatagggtgtttggttcaatgagact

SEQ ID NO: 74862 - DNA, 273 bp, Zea mays
  unsure (1)..(273): unsure at all n locations
  Clone ID: MRT4577_168270C.1
atttagtttgcttgtgtttttttgttgtttttacatggttacgccgggaaccgtcttaaatcatgtagggttattacaaaacaatgttggggctcaaccagttacgtgaagataatagggagacgacatcaaatatcttccaaaatttaaacctggtcaacaaatattgctactaatcccgatacagagtgtttacttatttctgttcactgattaaacaccattgttttactattcttaattnntcacggggggccactttttgttttaaac

SEQ ID NO: 74863 - DNA, 349 bp, Zea mays
  Clone ID: MRT4577_168271C.1
cgcctgacataatggtaccaacccctgtgcgcataagctatcaaaggggcaagtggctctctgttggacttgacgatctatctcctgtaatcctcgataacgctaatcgcttgttcgaatggcgctcaagaactagaatctgataactgatacctatgtgtcataaaaagacgcacaatatgcttgcgtctgatacaacaacagatgaaattgatgacacttaggaagatgtaactagagaagcctgtacgcattaaaaattacccttttatggaacagaccagagcatgaacatgaatacggtgaagtgatactaagagcacactagaataagtaacaaacttatctt

SEQ ID NO: 74864 - DNA, 454 bp, Zea mays
  Clone ID: MRT4577_168272C.1
gaggcaaggcaccatttcattattaacttggagtaacaagtttcagaagcgcggctttttttttttacattacactgcaatgcgaatcatttataaaaagaacaatcacaagggagtggaaggaaaaaaaacagttttatgctcagcccgtttattgggagagcagcaccaagattagtttttttgtccaggaaaaccaccctcccccctaaacaccattacaaaatttgggttgggtcccgggactccacgtaaccggtccccaccaccatttacagcttatcgggggcgtcgtcgacccccccgccggcgggattgccaccgggggcgccccccgaccggtggtatacggccgacacgatgggggtggacacgggctccacctccttgagcttttcctggtagtccttcttttcgggggactgggtggggtccaggcactcgagcgccttct

SEQ ID NO: 74865 - DNA, 1811 bp, Zea mays
  Clone ID: MRT4577_168273C.1
tgccgatccaataaaactcctgccattgtcctatctctttctcctccattccccactgcgccgggcttaattcccactgcatgcgcgctctgtcactgtcagtctcactctcgctcgctaccttggcgacgactggttgaccgccgctgccgctctagagcaggtgcccactgcccaggtcttcttctggtccttcgccggcgacaagcacaaccagggtgattcaagtactctgctttcaccaatatgtctgacggtcaggaaactgacaagaacattgagatttggaagatcaagaagttgatcaaggcattggaatctgctagaggcaatggcaccagcatgatctctctgattatgccaccacgtgaccaaatttcccgtgtgaccaagatgttgggtgatgaatatggtactgcttcaaatattaagagtagagtcaaccggcaatctgttttagcagccatcacctcagctcagcagaggctgaagctgtataacaaggttcccccaaatggacttgttctctacactggaacaattgttactgaagatggcaaggaaaagaaagtcactattgattttgagcccttcaagcctatcaatgcatccctgtacctttgtgacaataagttccacactgaagctttgaatgaactcttggaatctgatgacaagtttggtttcattgttatggatggtaatggaactctttttggtacactgagtggcaatagctcgtgaagtgcttcacaaattcactgttgatctcccaaagaagcatggaagaggaggtcaatctgcccttcgctttgctcggcttcgaatggaaaaacgtcataattatgtccgaaagacagctgagcttgctacacaattttttatcaatccagctaccagtcagccctaatgttgctggacttatattggctggttctgctgattttaagacagaactgagccaatctgacatgtttgatcaacgtctccaggccaaaatacttaatgttgttgatgtttcatatggcggggagaacggttttaaccaagctattgagttgtcagctgaaattctagcaaatgtgaagttcatacaagagaaaaagctgattggaaagtattttgaagaaattagtcaagatacgggtaagtatgtgtttggtgttgatgacacactgaaagcccttgaaatgggcgctgtggaaacactgatagtgtgggaaaaccttgatgtcaacagatatgtgcttaagaatactgcaactggagaaactgttatcaaacatctgaataaagagcaagaagctgaccagagtcatttccgtgatccatctaccaatgctgagctggaggttcaggagaaaacttcgctcttggaatggtttgccaatgagtacaaaaagtttgggtgcacacttgagtttgttaccaacaaatctcaagaagggtctcagttttgcagaggatttggtggcattggtggcatgttgcgctatcaactggacatccgttctttcgacgagctttctgatgacgaaggtgtctatgaagattctgattaagcaaaagtcattcatatggctgtgctggaccctggattgatgcaattgctcgttttgttcttctattttttgcttgattagtcggtttttgaggagattaccacttgagacacttgctttgtttccttgccgcagcttacaattgcaatgtcaaccacatcattagaatctggttgatacctcatgtactgctgttatgttgacatcggctctgtccaatatttatcaagatttggtgtagcgaatcaa

SEQ ID NO: 74866 - DNA, 243 bp, Zea mays
  Clone ID: MRT4577_168275C.1
aaagaaaaatcttccctcttccaaaaataaaaccaattatgctccccacgaccggaacccacacactgttaatatatataccttacccgtggggaagcctatcccatttaccaaaccttaaatatacacatggggggttggttataaacaagcctaacctctgtggctaattcgcaacactcttccactactgtcatgataggggtggtgagtataccctaggggggaacaactggccatccc

SEQ ID NO: 74867 - DNA, 657 bp, Zea mays
  Clone ID: MRT4577_168276C.1
gtaccctccgggttctgccggggcgcgccgcccccaccgaccagcttggcgacgggagcgacggaaccctacggggcgctccgcgtgagatgacgcccgcctgccggcctgctccctccccgcagatggagcggcccccctgcgatcggcctgcagaacccgcccaggctatccctgagccgctgccgggcgcgtcttcacgtcacatcctcctcggggatgcaccagcccatgccctacctcaaggctgaggggatccccgtagctggcttgcccatcaggctgctgtacgcgctgggacacatgcaggatgctgaggctgtcgctggactgggggcaggccttaaacatcgtgccgttcatccaaaagatcctcatgatggatgggctgctctacaccctatgggcctggaacagatcactcctgtgcagggggagaaggtaacaactgatcctgctgtgggaggaccatgaagatagcgagcgtggcgctcagacgaatagacgctaactatagaggtaagggggctgaccagaacaaccaagggaccctttcttttatgcgaaccaacactgcctccgaagcacgggcgttccaatgcatcatactgggggccatgttctgagtgggcagaagagcacgttcacatcgtgatg

SEQ ID NO: 74868 - DNA, 757 bp, Zea mays
  Clone ID: MRT4577_168277C.1
cctaattacaaatgtgtgttatattgttatgaaaaaaattcataatctatttgtgatcctaggcttctagccatacataaattttgttattttaatatagctatttcaccactacattgcaactaaccaccactatattgtaaccatcagtatcatgcaaacatcttaataaaaccgcaatacaaagaagcatccttattagacaagatgagcgccgattatgatctatgaggtgatcagatagccttctgcttcttgggcatcctataacctcccacaagacatgcatggtcatgcttgtagggatccaacgtcacctgctaggtaggcttgaattgatgtgctttgagcttctccaacttcaacagcgagcacggtctcagcggacagggtggagtcgatacaattaccccaagtgttgcacctcgcaggacctttcacacaacaaaaagtcctctcaccatcgtaagagacctgtccttcaaacaactgctacaaaattaagaataataacttggagtaccttgattgaaatgacagagtggccaacgttcttcaagccgtatgaagcattaagggtcaagatactgacctgatctttctccaataactgctttcagctatgcatttccacgagagcccttgctgaacaataagacagcgcaatccgataattcaaccccccaagccatatgatccggctgcaattcgcagttaagtgtataggcgattaaacagcgaagtccatgtttgcttc

SEQ ID NO: 74869 - DNA, 402 bp, Zea mays
  Clone ID: MRT4577_168278C.1
ctccaaacctacacagtatcttcttttaatgggctcatataaatcacaattaatcctagtaactattggactattacctggattcgctctgctaaaacattattcatccccctctcccgaatggcatgagatattcttcgtacatctgcacaccgtactgcttcccaatctatagagtctcttctttcaaaacttctttgtttcatctggccttcactacaagcctgccttcgtaatttttcccaggcaaaattctctgggttctttgcagttggggttcttggtttctttggctttgatgcttgggcagctggatctggtaccccattggaggaagtaaaactagattttgatggggggtcggcttcttttcttggggcttctaccggcatttcatggggt

SEQ ID NO: 74870 - DNA, 124 bp, Zea mays
  Clone ID: MRT4577_168279C.1
ctcaaggctcgcgcggggctgttccactccataccacaccataaaaagactcatgccgaggcctgcacctggcttattatccttttgcatctacagcaagattgcactctcagggaaatcagac

SEQ ID NO: 74871 - DNA, 147 bp, Zea mays
  Clone ID: MRT4577_16827C.1
atgttcaccaaaccagcccggatactgggggtgggatgaggacaatgtaggcacccacgaatcatagccatcgaactgaagcactgcaatgcaaacccatagcaccgttgccccattgttggaacccacatggaaaggctcagcgct

SEQ ID NO: 74872 - DNA, 975 bp, Zea mays
  unsure (1)..(975): unsure at all n locations
  Clone ID: MRT4577_168280C.1
ccggccgggccccctcggccggtagcttcccagacaagcgcgcgcgatcggaatactccgtggagcgagctccaggcgattcaaccgtgaccgtaacgccgccggagaaggtagccgtggttccgcgcacggcaccgaatcctttctattggtccgggcggcgagcatcagaggtcgttgtggtcgcggatccgtcggcttgcttcgtggagcggccaccccgccgatccatgcgaaggcgccgccaccggtcgtctctgtccgccggtgctgcgtctgcggggaggaggtcaacgggagttcgtcgattcgctgagagatctacgctcacccgatctgcgtcattagaccttcaaggtccaagccaaggagcaacaacttgaggattccaatcaagatgagcagccatgatgccaaagtgctgcaaaacttggtcctcaatcttgcttcctctgtcgaaagtggtgctttcaatattaggacgtttttagaagaggctttccgtcatttgggtgacgagcattaccttctcaatgctcttcttgctattcgtaaggaggtagacatgatggagcaggatgcactggagagcaaagcacggtctgacccagagaaggagaggatggaggaacaaattcaccttactgagcctgcaaagacagcgcctagacaattcactttcaccccccttcctcaccagaattgtacgaggccagtgacaatgactcctacgactcggacaggtccactaagtatagcatttggaacctgtaatagtggtacctcgacctttgtcgtagtggtacaaatgcatccaaatcaattaggaacttctgtgttatgtctgtgatgcatgcgtaaccgatgtaggactgcttcaggctaatgttccttttgtaagaaccttatgtcgaatgcttcatccttttatatgaatttatgcgaatgggtgcatccttatgatcattntctgtt

SEQ ID NO: 74873 - DNA, 217 bp, Zea mays
  Clone ID: MRT4577_168281C.1
cccacgcgtccgcccacgcgtccgcccacgcgtccgaaattttattttcctgttagtttgcattagaaatggaagatatgatagagttgtggagggaagggaccgagagtcagagaccattttgaagtctcagcgataccatgtcctgtggtgaaaaaaaaaacgggaataaacgaagaaataaaaaatctgatacaccatgttataaatgattttc

SEQ ID NO: 74874 - DNA, 376 bp, Zea mays
  Clone ID: MRT4577_168282C.1
cgaacaaaaacgaatccttttgtagctggatatttattgtcaaaagtcgaaaaggtcaatctgaaagaggagaaagaaataatagttacgtggtcccgggcatctagcattctacccgcaatggttggccctacaatcgcgattcataatggaaaagaacatatacccatttacataacaaatcctatggtagagtccctaattgggggaattcgtgcctacctcggatttcacgagttttttttttgcaagaaaagatactaaatcctcgtcggtaattgaattcggaatataaagattctgaataaacaaagaaatacccaatatcctgtgggaacaagatattgggtattttcagctttccttccttcaaaaa

SEQ ID NO: 74875 - DNA, 477 bp, Zea mays
  unsure (1)..(477): unsure at all n locations
  Clone ID: MRT4577_168283C.1
ccggcctgggatggctgcctgtctccctcgctctctctaagctagctgcactgcctgcatgctgctggtgtgcatgttagtgctgcagtgatgcggatgtaaaggatggtaaaaaatttctgcttttcttcttcttaaaaaaaaaaaaaaaaaaaanaaaaaaaaaaaaaaaaaaaaaaaaaaaaaaaaaaaaaaaaaaaaaaaaaaaaacccagttcccacaccaccactaaaacctgcacctgaggctgctaaaaatcctctaaaggataccttttgggaaagtgttttaagaaaattggccaaaatccccacaataaattctaggaaacaaccacctgaccgaaaatcacaaaatcttgaaggcaaaaaatatgaaaatatagataccatccagcctgaaatccaagttaaattttatggaaaaaataaacatgggggcagggatgttaacatccgtaaccggaaaacaaagaa

SEQ ID NO: 74876 - DNA, 776 bp, Zea mays
  unsure (1)..(776): unsure at all n locations
  Clone ID: MRT4577_168284C.1
gccggccgggttggggatccctgcgcctctctctctacctgcttggacctccctcctctctcctccccatctccccaagctcgtcgccatggccaaagctccctggcgttcgtcctggccgccgcgccttctctctgcttgctgctcgccggtgccttctctgctcctcaatccatggcgtcgttcttccctggtactcctccagccacgcagctgagctccctcgctgcggttcccagctccctttgctcacgacgcacgcccagcctctccccaagctcgagttcctctgcttcttccccaaccgcgccggtcggatctccctggtacctcgctctctgtccggccatggagctcacccagctcggaccacgaagctctctggcgctctcccatgngctggcgcttggctctagctcggcctgcgtgccctgagctctcccatggcgcccggcgattctccctggcgcgctcgctgtcctggctctacccagcgccacggcagccgagctcgtccctgcgcgcccgtgtttcctgctcctggacgccgcgtcctcccggccatggagttcgccggtagccgctccgtcgtgctcgtttctgatgctcgctctagccaaggacgcagtcgagctcgtcgttttccctgtccagtactcacgggacttcttgctcgccagtgtgccctccctagttcactgctttgtgcgccctcgctccctcagttggctcgccccttcccctgccgagcagctcgccgcgcccagccgagttca

SEQ ID NO: 74877 - DNA, 511 bp, Zea mays
  unsure (1)..(511): unsure at all n locations
  Clone ID: MRT4577_168285C.1
tcgtgtcgtcgcnngtcctcnctctgccgttccccnttcgttcaggttcgtcccgctttgctggctgcncnngctgccacgccgtcgcgtcccgcnngtccagnnatcctcgccacctcnctaatcgnatcttggccggcnccctccagcatgggcgnnngcgggggcnngggggcgnnnagggcgaaggggcagcgggnagctcnnctggcgcnntggcgcnntcgtgcnntcgcgcgtagcgggggggcgcnnaactccgnagggggcgacgnnncgctcnntcggcnngctgcngnnccgcagnncctcagggnaccccnncggcgggcgtnggcctgcagaagnnctgggnnacctccacnngctcgtcaaaacccctgggcacctgggtnntccacgtnnannnctgcgactcgcgnactaactcgngtncnacccgctcttagaatcttgggggtaatttgggaacttatncnntggtcatncntggtgggcctgnnnagcttgg

SEQ ID NO: 74878 - DNA, 645 bp, Zea mays
  Clone ID: MRT4577_168286C.1
ttttttttttttttttttgttttttataggacaaaatttataggaatcgtctgcaggaacataaaaccgtagagaacataagaaagaaataaaaaaaacccagcaatccaaagtggccttaaaaacacagcgtaataactgaattgaataaccgcatcagcttaagctgtaaactctctaagactgatccaggaagagacctcaaacgtacgtggccgcaagctcggtggtgcattcggctgtatcgctatcgcatcctatgaatatagcgctctacaatatcgcagtcgcagccgatatctgctggtcgatcatcggttctcggcgtgtggtcgctgcctgccagcgtcattcgttcggtacctcgatcgatcctccccggttatttcacatacgcactcaaagtctcgtcgccgacgtgctcctctaagctacactgcggctgcagcgctagctagctgatccgacgaaggcgaccgactccaccaacactcttcactgcccgggctccagcccgaactcgggcgctccagagcgaccagaggtgttgttggtcgctttcccatcgtggctgcctttcatctgctcctcggtcagtatctcctgcccgaagagccttatccccggcggcttgactccgtcgcg

SEQ ID NO: 74879 - DNA, 905 bp, Zea mays
  Clone ID: MRT4577_168287C.1
cattgggtacctcgaggccggccggaagtcgcctcgccccaccgtgtcgtgggcccgccggctcggtgtcgtcaatcaccgcacccgctgctgctagcccgcaactccctcgcttcctgcacccacatccccgcggcgctacctgcctacccagatcccgctcgccggtggtgccctcctcagtcctcactctcccgccgctggcgccgccggagcgagggggactgcccaaaccctactaggactagcagtaggaggcggaggggcgagatccggcggaggccgccccgatgggggacttcaacgtggcactggtgatcgtggcggcggtggtcagcgtgctggtgctgctcgtcagcgtctaccttctcgtcaactaccagcaccccgacgacgtcaaccaggcctacttccccaagctcgtcgtcgtgctcggcctcaccgtcgccgtcctctccatcctcatgctccccgccgacgtcgccaaccgccaggcatgccgcaaggccgtctacaacggcgcctgcagcctcacgctccccatgaggacgctctggctcgtcgtttacatcgttgacgccgtcctcgtcttcctcgtcatccccttcgcaatgttctactacgagggcgaccaggacaagtccgtcgggaagaggctcaggaccgcgctcatctgggtcgtcgcgtccgcggtagtgtgcggcctcgtcctcggcatcctatacggacttgttggtaaagtggacttcactgtcaggcacctatcttcctcggtccagacatttccaaactcattttctggattctcaagtggccagccgtgcattagtccattgactcgtcagtgtgcggcttctactgcaccggctaactcgcaaacaccttgggacaatgcgtgctacctt

SEQ ID NO: 74880 - DNA, 318 bp, Zea mays
  Clone ID: MRT4577_168288C.1
aaaaaaaagcccttttttttttcggggaacccccaaactttttccaaaaaactttttttttgacctttaccccataacccatccaaaaaagggccccccccatggtggggttgggggaaaaccccttggggtttgaaaaaacaagggggttaaagggcaccaattgttccccttttaaaaggggccccccttttggcccccccggccggtaaaaccgccccacctgttgttgggtcaaaaaggcaacagggcccacataaccttactggctaaatggggggacccttccctggttgaaaaaaacccccaagttcattg

SEQ ID NO: 74881 - DNA, 248 bp, Zea mays
  Clone ID: MRT4577_168289C.1
tcatcgagccggccgggggctttattccaatgaaggctacacgcggccaccatgttgaaaggactcacgtgacagcgcgttacgctctacgtccggggcaccatcctcggatacgagaggtccaagtctaagcaagacgacaccacgtcgcgtcattcagactgaggcagctgaatactaatgaggacgtcctgtggtactctgcccagcgcatggcgtaccttcacaaggtctaaaactacgatcat

SEQ ID NO: 74882 - DNA, 284 bp, Zea mays
  unsure (1)..(284): unsure at all n locations
  Clone ID: MRT4577_16828C.1
tttgaaaaaccaaacccccctccaaaatagccctgtttatatttttcggggagggaaactgaaaacagattttactagggggccctttatttttaagaccggggggaggggccgngcaaccgtgccggcaatgtgccaccaagctagactgtttttctagggggagtagcaagcctcctttattggccttggaaaatacataaggcttgttttaacaacctagccccccaaagtttacccaaaaaccccccccttgctgttgagggggaggactgccctgcccc

SEQ ID NO: 74883 - DNA, 2744 bp, Zea mays
  Clone ID: MRT4577_168290C.1
gttgactttgcaatgtacacatttcttgtatcggctcttcatttacgtctgtattatcgcttttatgattggatgatgatgttattcttgagagatgttcggtgtgtttgggggcgcttagcccccctttgatattcattcgtgttgggagttaggtcaattcattgcttttatatgtgttatatactgtgattacaatgcaagattctaggttgtattaatgatgccttgatcaaaaaaaaaaaaaaaacaaaaaaaaaaaaaaaaaaaaaaaaaaaaaaaaaaaaaaaaaaaaaaacattgctcgaggccggccgggtagagagtggcagtcgcccccgtccctttcccccctcgacgtcgtcaacccactacccaccgcaccccacctctaccctcacgcgctgctggtagcccgcagctacctgcctcccttcttgcacccaccgctgccgtcctgcccagatcccgctcgccggtggtgctcccctccccccgcgccgctggcgccgccggagcgagggggactgcccaaaccctagtgggagttggagactaggaggaagggcgcgagatccggcggcggccaccccgatgggggacttcaacgtcgcgctggtgatcgtggcggcggtggtcagcgtgctggtgctgctcgtcagcgtctacctgctcgtcaactaccagcaccccgacgacgtcaaccaggcctacttccccaagctcgtcgtcgtgctcggcctcaccgtcgccgtcctctcaatcctcatgctccctgccgacgtcgccaatcgccaggcctgccgcaaggccgtctacaacggcgcctgcagtctcacgctccccatgaggacgctctggctcgtcgtctacatcgtagacgccgtcctcgtcttcctcgtcatccccttcgccatgttctactacgagggcgaccaggacaagtccgtcgggaagaggctcaggactgcgctcatctgggtcgtcgcgtccgcggtggtgtgcggcctcgtcctcggcattctatacggacttgttggtaaagtggacttcactgtgaggcacctatcttcatcggtccagacatttccaaactcattttctggattctcaagtggccagccttgctttagtccattgactcgtcagtgtgcggcttctactgcaccggctaactcgcaaacaacttggacaatgcgtgctaccttccctgaatatgtggttgctcttactacaattgttggatctgtgcttttcacgatatttggtggtgtcggaattgcctgccttccattgggacttatattctcatttgttcgtcgtccaaaagctgtaattacacgctcacaatatataaaggaagcaactgaactgggaaagaaggccagggagttaaaaaaagctgctgaagccctacaccaagaagaaagaagtgggaacaagggccggaaatggcgcaaaaatgtgaaggctttagaaaaggagttattactcctggaagatgacatgaaggctctagaagagatgtatcctcaaggagaacaggctgaggctacttgggcattcacagttcttgggtacatcgggaaacttctatttggtgttgttgggttaattgtttcaatagcttgggttgcacatattgtcatatacttgttgattgatcctcctctatcttctttcctgaatgaagtcttcataaagttggatggtgtttggggtctgcttgggactgctgctttcgcattcttctgcttctatcttcttattgcagtgattgctggggagatgatgcttggattgaagctagtttttatcacaattcacccgatgaaatggggaggcactttaatgaactccttcctgtttaatgttgggctcatactactttgctccatcagtgtgattcagttctgtgccacggcttttgcctactacgcacaagcaactgcagctcaagagatatttggccacactttgcaatcccttcgtggaattaagtatctttacaagtacaatgttttccagtatggctttgttgctcttgccatcctcactctcttctactatgctatatttggatggagaaagaggaaaccaacaggaagattccagctctcaaattgatttgctctgtaagtgaagtttgacggattcatcatatgtgccccctgagtggtagttcagttagcatcttagaaatgtatatgatcaacaaaaccaaaccaatccaaaccaaatcatcttcccaaagagttgaggaactgcaaatgatcaactctgagaccttaaaggccagaattatcaactctgagactttgaaggcaagaatggggcaactgttggttaccacggacatggatgttaaagtagaacccagttgactttgcaatgtacacatttcttgtatcggctcttcatttacgtctgtattatcgcttttatgattggatgatgatgttattcttgagagatgttcggtgtgtttgggggcgcttagcccccctttgatattcattcgtgttgggagttaggtcaattcattgcttttatatgtgttatatactgtgattacaatgcaagattctaggttgtattaatgatgccttgatcaaaaaaaaaaaaaaaaaaaaaaaaataaaaatatagaatcaaaatcaaaagtttatcgatatcttatgttatcaacggttccttgtggacgcgcgcactcggacacaagaggggcatgttatttcagggaa

SEQ ID NO: 74884 - DNA, 731 bp, Zea mays
  unsure (1)..(731): unsure at all n locations
  Clone ID: MRT4577_168291C.1
gnaccatttcataactttgtcaaagttaaantataggctaaatcctatatatcttaatggcacatgcagcgcaagtaggtctacaagacgctacttcccctatcatagaagagcttatcacctttcatgatcacgccctcataatcattttccttatctgcttcctagtcctgtatgcccttttcctaacactcacaacaaaactaactaatactaacatctcagacgctcaggaaatagaaaccgtctgaactatcctgcccgccatcatcctagtcctcatcgccctcccatccctacgcatcctttacataacagacgaggtcaacgatccctcccttaccatcaaatcaattggccaccaatggtactgaacctacgagtacaccgactacggcggactaatcttcaactcctacatacttcccccattattcctagaaccaggcgacctgcgactccttgacgttgacaatcgagtagtactcccgattgaagcccccattcgtataataattacatcacaagacgtcttgcactcatgagctgtccccacattaggcttaaaaacagatgcaattcccggacgtctaaaccaaaccactttcaccgctacacgaccgggggtatactacggtcaatgctctgaaatctgtggagccaaccacagtttcaggcccatcgtcctagaattaattcncgnnngctccnctgagntagggnccgtattt

SEQ ID NO: 74885 - DNA, 159 bp, Zea mays
  Clone ID: MRT4577_168292C.1
ggggggggtttttttttttttttcaaaaattttgaccctccaggcccgaacaggattattgggaactggggtaaccccaaaacgttggggtagggaaatgggtcagttcctccccaaaactttgggggagctttggggccaagggcaacaattgggggt

SEQ ID NO: 74886 - DNA, 1199 bp, Zea mays
  Clone ID: MRT4577_168293C.1
ttgttgcccatggccatgacgagagcactggccatggtggccatgttggccactgctgccttgttcttcatgtccgctacgatctgtacatggggatcgacgacgcggacgccggcttggacgaggtgacggagccgcgcggcggggcggagtcctacaactgccccttctgcggcgaggacttcgactttgtcggcctctgctgtcacatcgacgacgagcatgccgttgaggctaagagcggggcatgccccatctgtgcaacaagctcctgggcgtcacctgcgccgtgggcgtcaccaagacgctcttcatcctggtggccacgttcctgttggaccgcgtggggcgtcggcctctgctactgaccagcacgggtggaatggtcatctcgctcatcagcctcgggacggcgctcaccgtcgtggggcatcacccggacgccaagatcccgtcggtcgtcgctctgtgcatcgcgtccaccctggtctagcatgaccttcctgtccctctcgtcggcggcagcttcttcctctacgccggtcgccgccgtcgcgtgggtcttcttcttcacgtgccttccggagacccgcggccggacgctggaggagatgggcaagctgttcggcatgccggacacggacgacatggctgaagcagaggacgctacagcaggcaaggagaaggtggcggaagtggaaatgtacatgccaagtaagatgtaaagcgcggctgcggctacagcgtcttcgtccccgggcagaggtcaactggaatagacggacaagatttttttttttttggagcaaatggtaaccagatgggcaggaataagattggcctatgaggtcggtgactcggtgccgtcgtccaaccgggattcttctgctcgttttctatctggaagtaccattccctgtcccgttcgacgtcgtttgcggatagtgcgatgtcgggagttagtggtgtcagagtcgcgcgtgtctgttctacaatgcagggcttggacccagaataatcagtagcaactgcagaaaaaaaaaaaaaaaaaaaaaagggcgccgctcgcgaagtttatgttgaatgatggggctttggaagttggtgttggtttagttggtctcaatctgtttacctttagtgttcttcatggttgctgtgaatgacagtgaatgatgagaaatactgaatttttatga

SEQ ID NO: 74887 - DNA, 302 bp, Zea mays
  Clone ID: MRT4577_168294C.1
aggcgcgccaccgcccgagccgaatcgaggtgcagtaaccaccttggcttgtcaggacaggccgctttcctcgcggggttctcgcagctcgccgcgcagccgggccgcgaccgcgccgtggcggtggccgtggctgtggcgccgactcctggcccggcccgcgtgggcggagcacctctacctatccacgttggggccgagctgggcctgacacgtaaaaacgttcaaccttttcttccactttaagcgctacgagttctgcctcgagtgcatattcaccattccgtgttgaagtgtccaca

SEQ ID NO: 74888 - DNA, 411 bp, Zea mays
  Clone ID: MRT4577_168295C.1
ggtggctatcctgctgaagcttggaacttctggacaagaaaaggcctggtttctggtggcctctatgaatcccatgtagggtgcagaccgtactccatccctccctgtgagcaccacgtcaacggctcccggcccccatgcacggcggagggagatacccccaagtgtagcaagatctgtgagcctggctacagcccgacctacaaacaggacaagcactacggatacaattcctacagcgtctccaatagcgagaaggacatcatggccgagatctacaaaaacggccccgtggagggagctctctgtgagtattcggacttactgctctacaagtcacgagtgtaccaacacgtcacctgacagatgatgggtggccatgccatgcgcatcctgggctggggagcggag

SEQ ID NO: 74889 - DNA, 222 bp, Zea mays
  Clone ID: MRT4577_168296C.1
gtacgtttcaggagactctggatcggctctcgtccctcgcttgttcgtgcggtgcttctgttcagcgacgcagtcacacccagagatgtcaatagggcctgtccttgtcggtgaatttctccatctgtttctaaatcccttttattcaattttgagtagcaaaagtttttatattttttaatcaacttctaaccgaataaagcaatggggaattcctccgtg

SEQ ID NO: 74890 - DNA, 130 bp, Zea mays
  Clone ID: MRT4577_168297C.1
gcctggtcttgacataacgggctggctgactgatatgccagcaggcacctgtctacttcttacacaactacaagaaggttgtactcttcatatatgcgacactccttataagtggctatgtgtgccccat

SEQ ID NO: 74891 - DNA, 227 bp, Zea mays
  Clone ID: MRT4577_168298C.1
tagcttcgtaggtagactactagagatgatgactggtagaaggtcattggacacgatcagggcaaacgtagaacacagcgctgcagaatgggcacgcccttatctggaagaaagacgcgtattctataagcttggacaccctcgtttggatgggaacttgacacataaaaggcgcccatattacggctcagctggcccatgcctgcctcagtgcgaaccccaaggct

SEQ ID NO: 74892 - DNA, 359 bp, Zea mays
  Clone ID: MRT4577_168299C.1
aaaaaaaaaactgagatgccggggggcagtttaaactgccccacaaagatagcccaattcctttttatgacgggaaacatcccttttttttgccctaggtgaaaagcttttgattttcaaaacaagccaatgaaaagcctgggtggggcccaaaaatttccttttttatttctcgcaccacaactcgtttaaacaggaagggatttggaaccggggaagttctccccccgcttgcaggacttttgtttacggggcccccttcgcataatgggagaagacccccaccccttgggggggggggggggtttttgggaatatagggccccccggggcccatggaacaatgtagggatcggggg

SEQ ID NO: 74893 - DNA, 449 bp, Zea mays
  Clone ID: MRT4577_16829C.1
cccatacgttcgatcctttcaccgaacctactggggaggagcttatgagcataactggtaagacagcgtgagggaaagtcaacaccattgctgtagtaaactaacggaggagtcacaatactaataatataaaggctataacatggcatgttgctctccagctagaaggatacaaatttcccgaacaagagatgagcgccagagtggcaaaggggcagcccatgtaagagctccagaaacaccacctgcaacctaacatggcaaaagtatcgtatacagcaccctaaatgaaacaccgtgtggagaactctacaaagtggagaaactaaaaacactagcttggctagactcatgaaatcggaggatatccttgtttttgcagctgacaaagaagctaaaaagcgccgaccggtctgcttgcccaacatgcgaactacccaaatgccaaa

SEQ ID NO: 74894 - DNA, 362 bp, Zea mays
  Clone ID: MRT4577_1682C.1
ttttatgcaaagtggtgtgcttgattttagacctctctactcacatacactagcagagagcacatgcatagattgtgaccaaggggcttacttagaaacaccagttaaaacatgttgactcaatatggaactaaaggggccggattgaacttacaaaggccgtaactcttacatcaaattgggcagaaaaaatccacgcctctgggttttactggtcccacacatgtaccctgagtggttttacatagatgcttaccagccatattttgctagagttcctgcctccgtaagattgccataaaaacacctgtgccaaagctgcataggcttcgaccaaatgtcaaagtacaaaaaaccattct

SEQ ID NO: 74895 - DNA, 408 bp, Zea mays
  Clone ID: MRT4577_168300C.1
ctcgcagatgtcgtacctggggtcggaaaggtcgcatataggcttgcgtggcgccgtagctgtgtggcaataatggttcactcatcctcatcaggtaatgaacgaattagctagcagatcggaaatgaaaatttgttgctggaagcaacacgaacctgcaggctccatgatggtatcgttctttttgctgccttgatcgatttcttgccggataagctcttcctccatcctatcacttgcatcgttcgctgctggttggcctgtctgctcttcattttgcccattattcttgacatctaattaacagtttgtcatttagtaaattgtagtaaaaaagatatgctactagtaaataaaggccgtttaatttgacacaactacagatccatgatcagaaattgctttgag

SEQ ID NO: 74896 - DNA, 568 bp, Zea mays
  Clone ID: MRT4577_168301C.1
cgaacaacttttatccacaacttttttattggaaacttaaatgagatacacataataaaaacaagatgacaaaaatgtcacaactgttgattagcatagataacactaataagtacatacatcaacatggatgtcgcaaagaaataaaaggttgatattccatcaagagacatgcttagactaacgatgttcaacgccttgattagttaataaacaatccttgagatcaaatctttgccatttcaatatatcactactagtggacacctttattttttggagatacaacaaaagcatgtcaagaggcagcaattttgctcaaaacttcgataaattgcttcccatatatgacagatcatcgattacagtcaagagaaccattctgtatcccatccttcgatatctccaatgtccatgcggggcaagggcaaggagacatcttcgtcctgatggtagtagtagtcattcaaatgtatcccgggaaaactagagttgctttcatgggtagcctcatggccaaggttatcgctggcccaatcgggcatgtccaccaacgacgacgacggat

SEQ ID NO: 74897 - DNA, 1455 bp, Zea mays
  Clone ID: MRT4577_168302C.1
ccggccggggggagccaacgaaggcaaggcaagccaggccagcggcgggggagagagaggaggcagaaggagattctagggagttaagggaggcgaccgccatgggggactccagcgactccgtgtcggtcgacgtcgagcggatcttctttggcggcaaggggcatcgagtgaggacgaggcacggccctctatcggtttctgtatacggagacgaggacaagcccgcgctcgtaacttatccggatttagccttgaatcacatgtcttgcttccaaggattgttcttctgtccagaggccgcgtcgctgttgcttcacaatttctgtgtgtaccacatcacacctcaagggcacgagttaggagcggctccgatttcagctgatgtgcatgtgccgtctgtcgatgaccttgcagatcaggtcgctgatgtcctcgattttttcagtttgggttctgtcatgtgcttgggtgtcactgctggtgcctatgttctcaccctctttgcgacgaagtatcgggagagggttcttggcctaatgttggtttcacctgtatgcaaagccccctcttggagcgagtggttgtacaataaggtattgttaaacttgctttattactatgggacgcgtgggttagtcaaggaaagtttgcttcagcggtatttcagcatggacgtccgtggtaacggacaggatccagaatcagagattgtccaagcctgcagaagtttacttgacgagaggcagggagctaacgtctggcggttccttcaggcaattagcaggcggcatgacttaacggaatcgctggagaagctcaagtgccagacgctgatctttgttggagaaaactcacagttccatgctgacgctgtccacatgaccacaaagctagaccggagatactgcgccctagtcgaggttcaggcttgtggttcacttgtcacagaagagcaaccccatgcgatggtgatcccgatggagtacttccttatgggatacgggctttacaggccatcgcagcaggaaagcagcccccggagcacactgagcccgttctgcatctcgcccgagcttctgtcgccggagagcatgggagtgaagctgaagcccatcaagacgcgcatctcacgtaacgtttagtgtggggtggatgtcggttggccatggcatattggcatggcaaccacaactcatcaaagtgaaggactcccttgggctgagctgtgcaaccacgaagttttgatgcctttcaggcatctagcgtgagaagatttacagggtgaaggcaatttttgtcgatgcagggaggttgtagataatgagggggaatggttgtttgttcatatacatatatgtgtaagttagtacacatgtacacctaaacacggcatcgttccatacagtacagaatacagagaaagaaaatgggaacgctgaatcgtcgtccgat

SEQ ID NO: 74898 - DNA, 309 bp, Zea mays
  unsure (1)..(309): unsure at all n locations
  Clone ID: MRT4577_168303C.1
ccaccaagagccagtcttgaccgggatgaggcccacagacaggttgtcatcagcttgtcccactcaagccaccgacctacaccacagacacagtggagccgcgctcttcgccagtgacacgtggacaaatgcgggctcagcagcccccccagagagggtcaggccgagccccatttctcgctcctcttaggtcattgtcagcagacttgaatatctagacctctcttccaatgagaccctcgaaactatgatagtttcanagnnaatggtgccacgtgntctctgatttggtgagctcagacttggtgc

SEQ ID NO: 74899 - DNA, 690 bp, Zea mays
  Clone ID: MRT4577_168304C.1
cccacgcgtccgcccacgcgtccgcccacgcgtccgcttcctcgctccgccaccgccacgctgaaaacccacgcgctaagtgcaccccgccaggtctaccagacgctctccggagcggcacgcgcgcgccaatggcggggccttgaggtgctcgtggggtgagggagggaggacggcgctggttagtgagggcgttaagcggcggctcggcgcggcgggccgggaggatgatacggcaccagatacggaacgagtatgggctggcggatccggaggtgtacgcggccccgggggaggaggatgacccggaggcgctcctcgaaggcgtcgccatggccggcctcgtcggcgtgctccgccagctcggggatctcgccgagtgagtggcgctgcctgctctccgatccgattttgtgtttaattaaagttctgtacaggttgtgtaggtagcctgtgacttcggtggtttctatttgtgagttgcagccgattggtgctggttgcccctcgttttgtttcgggaggtgtttgtgtactgcagtgcagcgtaatttggttattgaaattttgggggcgagctcctcggcgccttattcgctcaatctgagggggggctctgttgggcgaggacctctccttcgttttgttttcaagttgcatttcgctgcaatggttcgactactcttgttg

SEQ ID NO: 74900 - DNA, 360 bp, Zea mays
  Clone ID: MRT4577_168305C.1
cgagagagcgacacaagccgcggggggaggcgcccatgccatacgcggagcctgccacatcccacctgctcccgcccggtagaactagcagagcctcgccgccgttgccgagaatagatggggtttgtgaccttcgtcgggcgggcgctcttcgtgcgccgctttcctcctctccgcctaccaggagtctaatgaatccgtcgctgagggcgggccagcaggtaaggcccctcagcaccagctcaatgggttggtgaaaaatatgtcgtgcacatcctggcagcaggcggaccccacattccgttgaagcatgtgattgctgctacaactgctctttcgggaccaggaagcctcctttct

SEQ ID NO: 74901 - DNA, 144 bp, Zea mays
  unsure (1)..(144): unsure at all n locations
  Clone ID: MRT4577_168306C.1
cggggtcagactccacggcgctcgcgcnccnacngcngntcgccgnctacacggcgtccgngtcccnacgtacgtccgcgtgacgcgtgggcggaccgtgggtctccaacaactccttcagcagatcagcgacaacctcctcag

SEQ ID NO: 74902 - DNA, 864 bp, Zea mays
  unsure (1)..(864): unsure at all n locations
  Clone ID: MRT4577_168307C.1
cattgggaccctcgaggccggccggaaaaaaantttccaaaaaaagaaaaaaaaaaaaaaaaaaaaaaaaaaaaaaaaaaaaaaaaaaaaaaaaaaaaaaaaaaggaaaaaaaaaaaaaaaaaaaaaaaaaaaaaggttagttagcttggccggaaaaaagcttacgctgctggggttatgggcgagcccgttcgtgctccgggcgcgcatcgcgctcagcctcaaaggcctcacctacgcttactccgaggagaacctcgacgacaagagcgagtttctcctcagctccaaccccgtgctcaagaaggtgcccgtgctcatccaccacggcaagcccgtctgcgagtcccagatcatcgtgcagtacgtcgacgaggctttccccgccgccgcacctaatttccttccatccgacccctacgaccgcgccattgctcgcttctgggcctcctacgtcgacgacaagggggcaggacggcggaggagatggcggaggcggcgaggcaggccgtcgcggcgctggagacgctggagcaggcgttcagggagtgctccaaggggaaggccttcttcggaggggacagcgtggggctcgtcgacgtcgtgctcggcggccttggttgggtggctgtacgccaccgaggccatctgcggggtgaaggccctcgacgccggcaggacgccgctgctggcggcgtgggcggagcggttctgcgcgctggagggtgtcaaggggctgatcccggacgtggacaggcttctggagataccaaggccaggcgggccgtatttggcctgccgccgctccgtccttaggcatagtggacatgtttcttttctttttttttaaaaaaaaattataa

SEQ ID NO: 74903 - DNA, 221 bp, Zea mays
  unsure (1)..(221): unsure at all n locations
  Clone ID: MRT4577_168308C.1
gagctcacatgncggcggccgcccttgtttttgttttatcggaggattattacagatatttatcgcaacggagacggatgaaccaggaactctgatgacaacaaccgaagcttatcaatggaagcattaaccattatgccgatgaaaacaaaaccatttcaactgagcatcaacgctatctcgagcgtgtgaacacacacacgattcaatgggaactcaag

SEQ ID NO: 74904 - DNA, 1074 bp, Zea mays
  Clone ID: MRT4577_168309C.1
aaaaaaacaaattgtatatcattatatttatagagttgccggagcattatttttacggagctcggccgttgtgtataaggccaaacttttctaaccgaaaccagataaggatccaattatgtaacacaccatcaattaacgagagtagtaccaaatagcagcacgttttttttttttttttttacatgtgtaacaccataacagtactttatttcaaacaaacatagaacatataatttttttttttaaaaaaagaaaagaaacatgtccactatgcctaaggacggagcggcggcaggccaaatacggcccgcctggccttggtatactccagaagcctgtccacgtccgggatcagccccttgacaccctccagcgcgcagaaccgctccgcccacgccgccagcagcggcgtcctgccggcgtcgagggccttcaccccgcagatggcctcggtggcgtacagccacccaacaaggccgccgagcacgacgtcgacgagccccacgctgtcccctccgaagaaggccttccccttggagcactccctgaacgcctgctccagcgtctccagcgccgcgacggcctgcctcgccgcctccgccatctcctccgccgtcctgcccctgaacacgggtatccacgcgctgtagaacttgtcgtcgacgtaggaggcccagaagcgagcaatggcgcggtcgtaggggtcggatggaaggaaattaggtgcggcggcggggaaagcctcgtcgacgtactgcacgatgatctgggactcgcagacgggcttgccgtggtggatgagcacgggcaccttcttgagcacggggttggagctgaggagaagctcgctcttgtcgtcgaggttctcctcggagtaagcgtaggtgaggcctttgaggctgagcgcgatgcgcgcccggagcacgaacgggctcgcccataaccccagcagcgtaagctctttcccggccatgctagctagctagctgctgcggcttcgaccccgagtggcctcgaggaacccaatagcagcgtaagctctttcccggccaggcgagctagctagctgct

SEQ ID NO: 74905 - DNA, 744 bp, Zea mays
  Clone ID: MRT4577_16830C.1
cttttcgccaggagcctggtcaagaagaaggatggtgattactgatgggagggagagcacggaaggagaatgtggacaaaggcattgtgggggcatggtatggcattttgatggtagggttgtgtattttgtttcttcaaggtggtgagtggaatagagagggggtgttttttggctcttcttcctctggccatgtgagggtgccatcccccccatgatggtagagagagaggaaaagaggtggcaagctgctgttcaggaaagaagctgtccacttctggggctattttgattctcagctgaaattggtagacgagctcggggctgtcgtcttagcctctcctgcttagggttctaggagtacattgattctcttgtatttttttgacccccgccaaatgaaaaatacctgttaggtctaggctgaacgtacttagtctcttgtttaaggttgcaggagcgggttgggtgtctatttggttggtctgttatggaaaacgaacttccagatgctctggaaccagattttaactctagggtttggtagtagttggtgctaccgccattggttaactggtcgctagccttgctgtatggacattgctgacctggtaaccacacagctgtgctgtgcagctgttctcttcaccttcgagaacacatacatgaggcatagaagaaattatgaaaaataaaagggttgtaacagttttgggggctttgactgtaactggcagagttttt

SEQ ID NO: 74906 - DNA, 265 bp, Zea mays
  Clone ID: MRT4577_168310C.1
ctgtatacggtcttgttagagacacgaaaatacattagggacacctcattcttattgcttgtagacgcaaacattacagatcggtctttaagaagcgcgaacatgcctcaaggaccatgtttagaaatataattcagaggggtcttgcccactacatactaatttattgggtgaactatttgatgaaaattttttggggcaaaactattcttgttgcccacaaatatatatattgcatgaactagaaacatatatattgcacatc

SEQ ID NO: 74907 - DNA, 491 bp, Zea mays
  Clone ID: MRT4577_168311C.1
ttattttttattttttttattttttttttttttttttttttttttttttaacccccccaaaatcggaaaaaaacggcccttatgggcccaaaggctttgggggcaggggcaaacaaaggcaaagctgggacccccggggaaacaaaaaataacccccccaaaaaaaaccccgttttaaaacccctttttcggtgggaccccccggtttcactctacaggggggaaaaaacaatccccccaaaacatgttaagggcccaaaacccacaaaagggtaagggcccaaaacccaaaaaatgtttagggcccaggagttcaaacagcacaaacaattggaacgggttaaaaaggcaatctataaaaccccaaagggccccccgaggggccaaaccccccgccctcctttttggatttgaaaccttgacacggcccttaaaaaacacaagaaccaggttttgccaacaaacaacccacaaaaggtgaaaggggggaa

SEQ ID NO: 74908 - DNA, 444 bp, Zea mays
  Clone ID: MRT4577_168312C.1
ctgggtttttttttttttttttttttttttttttttttttttttttttttttttttttttttttttttttttttttttttttggggcaaatcacacaactttttttttggacaaaaaaaattttttaataaggggaaacaacctttttttttttccggaggaaacaaaaccgggaggaaccggaaattttgcgaacaaggggggttcccccccttttctttttggaaattggacttgaggaacctgatgggggcggggtccccccggaaacctttggccaaaaccttgtgggggatttccggggcggcccccaaaaggggttgggcggggaacaccaaccccggcaattgggtgttgaaaaagggtatggggcccccggggccttttcccacgttttactggaaagggaccctcccccgcgggatgacaaaatttttcccgggg

SEQ ID NO: 74909 - DNA, 606 bp, Zea mays
  Clone ID: MRT4577_168313C.1
gccggccgggcttgcaattacgttcttccgtaatccatccgccatggctgaccgacatgttactgagctcctccttcgccatgcccgtcgccgcccgtagggcctcctccccttcctccgactacattgagcttcggcaagtagcaattcggcggcctgctccctctccgccgggggtgcaaatccaaccgccgccgccctcctcttcaagaggcagcacttccagaccattggcacaaggggtgtgtgcccgttcacggacaagaagacaaagcgagcgaacaaggaggcgttttcctgccatcaatacgaagaatcagcaaatcgtgaacctgcaggacaagaaactgtggagggaggccgctaagtgcttctataagctgcgcctttccaccaaggccctcaagaccatcgagaagcacggcctcgacgccgtcgcgcgcaaggccggcatcgacctcaacaagaagtgagcccatccgatgagcagccaaactagtgtcgggtggcactagcttagcattcacattcacggggacgtctcgtctgtctgtctgcctgcctacctcctggtggtctttcgcaatcaatcatatcattatattt

SEQ ID NO: 74910 - DNA, 628 bp, Zea mays
  unsure (1)..(628): unsure at all n locations
  Clone ID: MRT4577_168314C.1
tcccgggctagttcttgggcgccggcgggcgccccgtcaaccaccggctcagcagcaaacgncacggnacagncgacctccccggggttccaagcagggcccgccgtgctgccgttctcgctccgtccggcatccaacaagccgccgggcgcccacgacgccggcgacggcgcgacgagcagccgtttcatcgcgaccggctgtactgtcaccgcgtctcctttcgtgtccccggcgacgtcagagtgccggatagttagcggcggctacgcgttgggaggtggcgtgaccatggccggcgtccggaacgtgcctgatgttgagctcgccgccacgaccaactcgcttatggctatgggacagatggatttcatgttcccgctggacgccgccagtttcttggagctggagagtccggccagctattgctaaacgacacaaacgtgcttgtccctactggtttagcgcggaaacatattattgataggtaaagacgacaaagctaaacgaacaagcgtgctttagctctctcgcttagtgcttggcatgtaagtctgcaagnacacgccgagccttatactttctgtatcccaattataattcattcgactnttttgaaaaaanaaaa

SEQ ID NO: 74911 - DNA, 861 bp, Zea mays
  unsure (1)..(861): unsure at all n locations
  Clone ID: MRT4577_168315C.1
cattgggtacctcgaggccggccaggacctgtagccgtcatccacgcgcaaggggaggggtagagtcatgcgctgcggacagtctcacctcacctgtgacctgtcccccttcttgcagatcctacttccggtgcacgcacaggcacacgcagagctgtcaggcaagcaagcatgtgcagcgcacggacggcgacccgctgctcttcgacgtcgtgtaccacggcagccacacgtgcgcccaggcccagggcgccgccgcgcgccccgtcaaccagccggctcagcagcaaacggacacggagcagacgacctccccggggttccaggcagggcccgccgtgctgccgttctcgctccgtccggcctccaacaagccgccgggcgccgacgacgccggcgacggcgcgacgagcagccgtttcatcgcgaccggctgtactgtcaccgcgtctcctttcgtgtccccggcgacttcagagtgccgaatagttagcggcggcggcggcggctacgcggtggaaaggtgggcgggtgggcgncgncgtgaccatgggccggcgtccggaacgtgtctgacgttgagctcgccgccacgaccaactcgcttatggctatgggagagatggatttcatgttcccgctggacgccgccaatttcttggagctggagaacccggccagctattgctaaatgacacaaacgtgcttgtccctactggtttagcgcggaaacatattattgataggtaaagacgacaaagctaaacgaacaagcgtaattagctctctcgcttagtgcttggcatgtaagtctgcaaggccacgcggagccaatagntatgtaaattttagctctctaaa

SEQ ID NO: 74912 - DNA, 664 bp, Zea mays
  Clone ID: MRT4577_168316C.1
gtggtctctctcctctgatctctctcgcccgccaccggccccgatctcggcgatgccgcctctcacgacccccaagtccggcgacgccctcttcgccagcgtcgagcgcgtaaacgccgagctcttcacgctcacgtacggcgccatcgtgcggcagctgctcacggatctcgaagaggtcgaggaggtcaacaagcagctcgatcagatgggttacaatattggaactcggttggttgatgaattcttagccaagtcaatgtatcaaactgtgctgacttcaaggagactgctgatactatagcaaagcttgggttcaaaatgttcctgggcgtgactgcaactgtaaccaattgggatgctgagggtacaacttgcagctttgtattggaggacaacccacttgtagattttgttgagcttcctgatacttgccaaggtcttcagtattgcaatgtgttgagtggagttatcaggggagcactggaaatggtttccatgaagacggaggttacatgggtccgtgatatgcttcgcggggatgatgcctacgagatgcgggtgaagctcaccaagcaagtcccagaggaatacccctacaaggatgatgactagtttcatttcaaggggtagctcttccgcacggtggcgcttgattgcttgt

SEQ ID NO: 74913 - DNA, 857 bp, Zea mays
  Clone ID: MRT4577_168317C.1
ttttttttttttttttttcttgccaaataaattatactacactatacttcgtttcatatcaatcaatgttcgagctagctagcctcgtgtgagctttcctccgtactctctctattcgagtgctccttttaacaccgtcaacactcccaaagaataaaaaaaaaaaggaaaaagagaaagagaagaacatcataagacctcgctcgtcgtagagatcgatatcggaagatccagaccgaccgctttggccgccaaagtgaaggccaccgtaccgtgcatgcatcctgctgctttctctcacccctctctaatacatgcgtacatgtatataactatataagtgtcttcactcaaacgtcgtcgtcgtcgagacgtcatcgaccatcgtcgtcgtcatgagcagcagcaccacccaccaccatgcatgcatggttgtccatggctatagcagctcatcagcgcatgcatcagctagcaaaagagcgggacgggacctatatggaaacggaacttccgttccattattccacgccacgcatcaacgtggtcgctctcgctcgctcgctctttagccttctgtataggaaggagtacactgctgcgtcggcgtcgtcgccaccctgctacactctcttggacggtgcttccccccatctggctctcctgaaaacaacgacgcaaaagtgaatgatgggttagcaatgcaagggcgcacaccggcggtgaaccgaacggagctagcgaggtcagtgttcgatgatgggacccatatatgcatgcatgcatgcatgcgattgccaagtaggagtacgtactagctagatatacacactgcatggtcgatctgtactcgtggc

SEQ ID NO: 74914 - DNA, 356 bp, Zea mays
  Clone ID: MRT4577_168318C.1
gagaccctggaggaggagctcgccgacagccctatttcagcagcagcgacctggactacgtggacgtggctgtggagcccttgacgtgctggttactcgcctacaataagctggtcgggatcgacatccaggaactctgtcacacgatcgtggactgggccgcgcgtcgcagagagcgtgagagcgtggccgacgcactcgccgaccctgccaaggtgctcgagctcgtacacttcctccagagcaagcacggcgccaagcgatcggaagcactgcgagtgctgctatgcaggcggcaggacatgctggtgctttgatctgcgcgatcagctctatgcccatgctagacgtcacat

SEQ ID NO: 74915 - DNA, 388 bp, Zea mays
  Clone ID: MRT4577_168319C.1
gcatgcaggtaccgaaccataattaccggggggtcccactcgttcgtttctttttttcctttttccaactttcttcttcttcctcctccttctcattctgatcgggaacaatggcgacagaagacgaagagcgagaagcaccatatgggacggaagtcccagtggaagctgtggttttgggaacattccatttgcatgcacacccagaaggcaagctttcatctctgatggatatcaagagcatgggagaaaccatcgattcaactgaaggaacggtgaagattccagaggatcaagttttagtagaagcaccctctgatgtccaactttcttcagaacatagtctaaatgggggagcatctgtttttgaaggggcatacaaacaaag

SEQ ID NO: 74916 - DNA, 713 bp, Zea mays
  unsure (1)..(713): unsure at all n locations
  Clone ID: MRT4577_16831C.1
gggcctattaattcttgggtgtctaatactcctatctataccnnntatgcccatatactttctgcccaaaacaacagtaaaaaatatggatgccatcaggggaaagtttttttagcagggaggcggtgacaaagaaatatcatgtcataaaccgggggaaggtttgcgatgagaaaaagaatggtgggcttggtattaaggaccttatgttgttaaatattagtttgctttgcaagtggtggtggaaattagagaatgaggaagggctctggcagaagttaattaggaaaaaatatatgtacaataaaaatgtgcataaagtttctcacagtgttcatggttcacctgtttagcatgatgctgaaggtcaagaatttctatttgttgggtagacaagtgattactaaatctggtgataaaactagattttgggaggattgttggttggagaattaacctcttcgctgtattgtcccgaagttatatgatatatgtgattgcaaagatattacggtaaagaaggtccgggaggtaaatgcctaattatctttcagaagattgctttgtgtgggtatgctaaagaaatgggaaaatatatgtatgaaggctgagaattttaagtataattctgatccatatgtgattatctgggaatgggagaaaagtagaatggtcactgtcaaatctatatattctcatattgntagaaaatg

SEQ ID NO: 74917 - DNA, 219 bp, Zea mays
  unsure (1)..(219): unsure at all n locations
  Clone ID: MRT4577_168320C.1
ccccccctttttcnttgcttcacaacagcacnatagcagggacaccgggaagggacaaaaagcgnngcaaaccaaacaccganganangaacaaccacggccaaaagggggcgacgaacaaancactacaaaggacaaaagggaaacacacacagcagccggacccaagggaggggaaccacagagnacaaactcaaaaaaacccaacccttcaccacc

SEQ ID NO: 74918 - DNA, 381 bp, Zea mays
  Clone ID: MRT4577_168321C.1
atgggaacatcaaggcctgcatctccatccacagctactcccagctcctcctgcacccctatggctacaaaacagaaccagtccctgaccaggatgagctggatcagctttccaaggctgctgtgacagccctggcctctctctacgggaccaagttcaactatggcagcatcatcaaggcaatttatcaagccagtggaagcactattgactggacctacagccagggcatcaagtactccttcaccttcgagctccgggacactgggcgctatggcttcctgctgccagcctcccagatcatccccacagccaaggagacgtggctggcgcttctgaccatcatggagcacaccctgaatcacccctactgagctgacc

SEQ ID NO: 74919 - DNA, 376 bp, Zea mays
  Clone ID: MRT4577_168322C.1
attcccgtctcgaggcactcatactcacactctctttctctctcacttcttgatctcttctatcgggtcaccaacttcagatgttttccctctatggacacggcgaaaatgttacaaccctctccctacccaacttaatctcattacaactcatcccactttcatccgatggcctaatacctaatataccctcaccgataccacttcccaacagacactcaccctgactgcctcactcgacacaccctgcatccactcattaagctctccagctttcttgcttactctcatcttcacctctacactttccatctccctatcacccgctcctttcactctcttcccttactttctttccacattcaccaactttccc

SEQ ID NO: 74920 - DNA, 804 bp, Zea mays
  Clone ID: MRT4577_168323C.1
agtctgcttccctacaccgtgagaacacaatcacccttcactgagacctcaaatcgcgagtaagcgaactaacgacactactgatgactcccgctcaggagggaacatttcccttgaactcagaggaaggataagactcccatcaacactacgaccataagcacctgccacactgctgcataagccgaacctactcactgctgcacctgtatctactcgcctcggctcatagctcctccacctgcgactgacatccacgagaaacaggccgatcagatgaacaagccgacattcactaatacctgctccgctaacgacgtcagggccgagtgtgagacagccatcacatattgatattgctctgtggaagttcgagaccaccaagcactactgcactgccattgatgcccctggacaccgggacttcatcaagaatatgattactggcacttcccaagctgactgcgctgttcttatcattgactccaccactggtgactttgaggctggtatctccaaggatggacagacccgtgagcatgctctccttgctttcacgcttggagtgaagcagatgatttgctgctgcaacaagatggatgccaccacacccaagtactccaaggaccgatatgatgacattgtgaaggaagtctcttcctacctgaagagagtatgatacaaccctgactagatccacttcgctcccatctctggtttcgaaggtgacaacatgactgagaggtcaccaaccttgactgtgacgaggacccaaccgtacttgaggctttggacttgatcaat

SEQ ID NO: 74921 - DNA, 332 bp, Zea mays
  Clone ID: MRT4577_168324C.1
gcgggtccggccggaattattttcgccacgcgtctcatcgatcggacgtccaccttgaagatcattggtggaacagcaaatggcagtggacatatacattcacaagggggcgcgaagctcacccactgcagtagtaagtcaaccaacgtactcattgaccaatatcacaatgctaccgtctcgcactattggcccatcgatctcacgagtgcgtgagccaacgcatatcgagttgtgctatagttaccgagctctagaaatagtctagcaaccgcatgatcacccagaaatcggacgtctacaacttcagcgtactactcatggggatgctc

SEQ ID NO: 74922 - DNA, 602 bp, Zea mays
  unsure (1)..(602): unsure at all n locations
  Clone ID: MRT4577_168325C.1
ggtcattgggacatgttcgatctctgtgtcaagtcgacccatccactggccacctggatctacaatgctctnggcggtattgacaangcgtgtngattgtagaggttgctgagaaagtaggcctgcggagtatgaacaatngcggtcattcaagtatgtcctggtgtgcttgacaatgctcataggccgagcgtgtagagaggtatcacaattgatattgctctgtggtaagttctgagaccaccaagtactactgcactgtcattgatgcccctggacaccgtgacttcatcaagaatatgattactggcacttcccaagctgactgcgctgttcttatcattgactccactactggtggttttgaggctggtatctccaaggatggacagacccgcgagcatgctctccttgctttcacgcttggagtgaagcagatgatttgctgttgcaacaagatggatgccaccacacccaattactccaaggcccgttatgatgagattgtgacagaagtctcttactacctgaagaaggttggatacaaccctgacaagaccacttcgttcccatctgtggtttcgaaggtgacaacatgattg

SEQ ID NO: 74923 - DNA, 367 bp, Zea mays
  Clone ID: MRT4577_168326C.1
ttggaagcgggcggcggagaacaggaaaaaaaatcgagggggaggagaaggggagagcggagaagcttggcggggggcggcggcgatgggcggcgagtggtggaggaagaagtgggtggcgtgggcggcggcggcggccatcttcgtggtgctcatgctcgtcacgcccgccatcccgcaggacgaggactaccacgacttcgccgaccagcgcgtcctcttcctcgggatccctaacacattgaatgtgatctcaaacatccccttcctctttgtcggtctcgctgggctcatcctgtgccactacaaaaactacttcaggctatgctcacagggggagctctggagctggacactcttctatgct

SEQ ID NO: 74924 - DNA, 722 bp, Zea mays
  Clone ID: MRT4577_168327C.1
cctgagctgagtggactgaacagcgtgagcgtaataaacttgcattccaacgggctaaccgggaacataccaccacagctgggcaagctaccaaatcttgttcagcttaggttggacaggaacaggctgaaagggtcaattcctggtggcaatgctactggtttttctcctatggcagataccgggtccacacctcacagtggactatgcccgtctcctcgattaagcgttgcagatttctccttcaacttccttgttggaaaaatcccaatttgtttgaagtatcttccaaggtctagttttcaggggaactgcctccaggatgactactctatccgacaacgtgctcatcaaatttgtgcaagcgcgtctacagctgctaatttaaagggattcaaacgccctgcttctgagcataagcatagtaaagtgcagcaaccgacttggcttattgttttggaaatcgcaaccggtgctctcctgcttgttttcgtgatcactgctgcaattactgcctccagaagctgcaatctaaagccttctataagaatatcatcatggagtagatcaaaaagttggagcgacgagataacagtactcattgattctgatatgctgaaaagtttgccaaagctgagtcgccaggaacttgaagtagcatgtgaggattttagcaacattattggctcaactccggagactgtagtcctacaaggaacaat

SEQ ID NO: 74925 - DNA, 867 bp, Zea mays
  Clone ID: MRT4577_168328C.1
tcgaggccggccgggccggaatacaccccctgggctctggctggctagctggctggccaggctcctcctcctcggcctcgatccgcttctcctcctctgcccgcctacctggagcggggagcgggaagagcggcggcgggagcccggcattctgatccgcttctccgcgcgcaacaccggcctgccgcgaatgattcttgggaagccctgtacctgactactggatccactaccaagctcttcaagttccaggatccattcctctttgtcgggcaagagctcttggcctctgtggattatcagcctgattcacaactctctgcaagaattcgagcgcagatgggccaagaaagcgcggctgacgcgattcctggtttgatggtttctgttggtgtttcgggctaacagactctcttttttttgtttacttcctcaaagttccacttcaacatatggatccgggcttcccgagttggaatctgatcactcgcgtcagtgcttcttagcttccttcatttgccgtcatggaggagcagaactcatggcttattaggaccaagttctcccatactgtctacactagagtggatccacgaagagtagcagctgttgctccggtgggcaaagatgtggtgctgccttttgctccgcttagtaaggatgttgagcggaagctgcagaaaattttcagtatgaagaagtctgcatcgatgcctgttgatcgggatgatgaagacacagggactgcattcaagcactgcgctagcttgccgctagtccggtcctcgcctcagcttgatagggacaaggttaacaagcccagaaggggggcccttgaggtttttgcaaacccccctatatactttt

SEQ ID NO: 74926 - DNA, 217 bp, Zea mays
  Clone ID: MRT4577_168329C.1
cccacgcgtacgcttagttctagatcgcgagtggtttccctatttttttattcaattaattgggggttctatattatttagtggggctactttccccaaccaaaagcaatcatttatttccttttcctggggggtggaaaattaattaaagcttagatttatgggcaaaagatttcaaacgatacattataataaaaaagttttaagttcttacact

SEQ ID NO: 74927 - DNA, 561 bp, Zea mays
  Clone ID: MRT4577_16832C.1
gccggccggtccgggctcgccgatggctcggcctcggcaggtcaagcatgctcttcggcaacagtggctaggtcgacgcctcccacgacaacaataaacgcaactacctggcctccatcgccaaccgttttcccagacttcgccaggtcactactacatgaagccaatcatatcagctgaaccagaggtgactgtgatggagcgtacacacagagacgagttcaagtcagtgtcagcatcttcaagagtagtcttatagcctcttcgtttgactttaatccgtaacggcttttattgtttctacaatgttttgtctataactctatatggattgtaactgtctttaatccgaagcgaacagccccaacagtagccatatttcattaaacaaggttgtattttgaaaatataagactcgtggccataaaatgtcctccaacagtgacactatttcattaaaattcattaaacggttatagggtctgatatctcacatcctaaatataataccccatatattcgagccaaaaaaaaaataaaaaaaggccccctagggcccgc

SEQ ID NO: 74928 - DNA, 369 bp, Zea mays
  Clone ID: MRT4577_168330C.1
tcgcgcgtgaaccctcacaggaacaggtgacatggtgacgtgctccaaggagaaggacgccgacctcttcgacgccgtgctgggagggctggggcagttcggcatcataacgcgcgcgcggatcccgctggcgccggcgccggcgagggcgcgctggctgcggctcctctacaccggcgccgtcgacctcacgggcgaccaggagcggctcatcgtcgacgacgagcgccgcggcggcgcgctggccgggctcatggactacgtcgagggctccgtcgtcaccgaccttcagcagggcctcatcggcagctggcgctcgcagccgccgacgttcttcttcgtcttgtactcggagtcggtgaccgacgc

SEQ ID NO: 74929 - DNA, 1268 bp, Zea mays
  Clone ID: MRT4577_168331C.1
atctatctctttaccccttcttcccagcgacaagagaaaggattagaaaaaggaaagatccatggacatgatctccggcagcactgcagcaacatcaacaccccacaacaaccaacaggcggtgatgttgtcatcccccattataaaggaggaagctagggacccaaagcagacacgagccatgccccaaataggtggcagtggggagcgtaagccgaggccgcaactacctgaggcgctcaagtgcccacgctgcgactccaacaacaccaagttttgctactacaacaattatagcatgtcacaaccacgctacttttgcaaggcttgccgccgctattggacacatggtggtaccctccgcaatgtccccattggtggtgggtgtcgcaagaacaaacatgcctctagatttgtcttgggctctcacacctcatcgtcctcatctgctacctatgcaccattatcccctagcaccaacgctagctctagcaatatgagcatcaacaaacatatgatgatggtgcctaacatgacgatgcctaccccaacgacaatgggcttattccctaatgtgctcccaacacttatgccgacaggtggaggcgggggctttgacttcactatggacaaccaacatagatcattgtccttcacaccaatgtctctacctagccaggggccagtgcctatgctggctgcaggagggagtgaggcaacaccgtctttcctagagatgctgagaggagggatttttcatggtagtagtagctataacacaagtctcacgatgagtggtggcaacaatggaatggacaagccattttcgctgccatcatatggtgcaatgtgcacaaatgggttgagtggctcaaccactaatgatgccagacaactggtggggcctcagcaggataacaaggccatcatgaagagcagtaataacaacaatggtgtatcattgttgaacctctactggaacaagcacaacaacaacaacaacaacaacaacaacaacaacaacaacaacaacaacaagggacaataaggttagtgtgccagaccgtggaagcgttgctgctataaataatgcaattgggtagtagtacccagtgaaatcaggagagactagtagcctagggtgcattttgatttatttagttttggtcaagatgacaagtcatcatgaatcaccctttttattcatttgcatgttttgatgagagttcatttgcagtaagctatatatcattggataattaaaccaa

SEQ ID NO: 74930 - DNA, 285 bp, Zea mays
  Clone ID: MRT4577_168332C.1
tctatagagcggcgccctctggtgtttttttttttgagaaaagggctaactccttaatttggctacgaatagcacgatgcatttgcgaggtgcgaggggagagacctgaagcacagggcagccggattgtaacagatgggacctcatgtgcatagactgatgtctgccattagtctgggcggagaacagggtatactcctctgcctctgcttgttcctttcggcagaagggggcttccagcggagccatcggcgcacatggagtcagctgttgcgttctgatgtt

SEQ ID NO: 74931 - DNA, 510 bp, Zea mays
  unsure (1)..(510): unsure at all n locations
  Clone ID: MRT4577_168333C.1
ccacactgncctncccaccacacaaaccctgcctgccggtagctagtggctcttctagccggcggcgcaaccgcttgctagcgctctgcgctctcatgctcgcatcgcaggcaaggcgaggcgaagaagaagagacaagccccaaaagctctgatggcggagggtttcgagctggaaagtgcggtggggatgggagtagcagaccactccgccacaaggaaagagggatggagtggcgccggcaacggcatcccatcttccataacgtgcacntccaaggagcatgtcgaaagtagatcgcagtanntggcaacaagcacgtaaagggccgggcgcagcctgcagcctgccgcctcggaaaggccggttccgaacgagcgggggtgcccgacttccggccagcaggacccgccgcgttgggggggagggacnttaaaggaactgggggatggcgggactttcgtcaaaggagcgacccaggccaacggctttatgggagcctcatatttg

SEQ ID NO: 74932 - DNA, 256 bp, Zea mays
  Clone ID: MRT4577_168334C.1
ggggagggcccattggctacctcgcctggcagatgatgtccagtaggaaatgtttgagtgcgagattggctgcctcagatcactatatcagcagcaacagcaacaacatcactgactcctgttcttgcgcatagtaacaacagagtccttgattcccagtttgtcaaattgtctctaaaaggtaaagatcccaactcatggcaggatactcactccaaatatgacggtggatcttggattttttgtctcgaccgag

SEQ ID NO: 74933 - DNA, 323 bp, Zea mays
  Clone ID: MRT4577_168335C.1
ccgggacctgattcttcacggtgccaagtctggcgtcaagaagaagaacatgtagtcgacgcactacgcctgtgaatctgacgttggtgcccatacaatcagcttatatttatccaatggctgcaacagttgtgagacttggtagaactagatgcaaatcgtggtaagatgttgccgattgtcattctatatgcacgaattccatgacaaagattgcttggcacttgattgctgctttgattgcacgctgcctgcccgagattactcctggattttgatgagttctgcaacatgtatatctaactagatatcgagtgcttaaa

SEQ ID NO: 74934 - DNA, 256 bp, Zea mays
  Clone ID: MRT4577_168336C.1
tttgtcggtctcgaggagtactcgcacttgtggaacggtaactaggccgggatgagcctgcaagaggtgtacaggttgaacgagctcacattaagctccagggtgggataagacatgtgctactaggtgacgctaggatgcagctcaggttattcaccgacgcggtgcatatctaaagaccccatgtatatagacagatggtaagtgcagctgtggagtactaatgaacgtgatgagaaaggggcactactagttt

SEQ ID NO: 74935 - DNA, 377 bp, Zea mays
  Clone ID: MRT4577_168337C.1
taacaccgtatgctgccaaaatagttgccctgcttgcgcttattacccttttaaggagcgcaagcatgatacggaaaattgtttcagcattgacacacattattacctaagaggcggttattgcacattgtcatcccagcaaatacttaaattgtggggggacatgcacccatgcaagccgacttattaattctagcgcttgttgggatccgccttgaaacaaacaattacccaattgacacgcggttgcttggcacatctatccctacataccattagaacgttatcacaacagtgacagggagttacattactgagccagctatactcccgcgaaacggtatatgctagttgcatggaactattgttttgatccg

SEQ ID NO: 74936 - DNA, 557 bp, Zea mays
  Clone ID: MRT4577_168338C.1
cagcagcaagcggaagcggtcagcgccgtcggcggtggcgtttcgctcacgctgggccttcaccagaacaacaaccggacctacgtcgccgagcctctcccggccgcgctcccgcaccgtttcgggctggaggacgtgagcgacgcctacgtgatgcaggggacgacgtcgttcggcggccaggaccgccatttcggcaaggggatgggcggccaccattttgtgcatgacttggtcggctgatctcgttcttgcgactgttgtcggcatgcattgtatcatactattgttaggggcagcacaggcacgcacagtggaagagaccagaatatttgacagtgtggatgagggctatagagggcacgcatggcccgtagcgttgaagatctgttccagttgtatgtagagttgatgagccctatttgttctaatcccagctggccaagtcgtgtgttgacacatgtaccactatttttctctgacatgaaattgtgaagtggaggttaaacagtggctagttcttgctcctgtaaaaaataattctttcatttgatttt

SEQ ID NO: 74937 - DNA, 329 bp, Zea mays
  Clone ID: MRT4577_168339C.1
cccacgcgtccggaaactcatgctctttagcgcaaagacggctacctagcaggagagggtacacccatactctaacaaggatcgctatgacgtcaaggcaccgtcgctgcacatcgtgcgctacatcgacaagactctcttattcatgacacatggttccaagattgcttctgacgatctgattcacagagcctatgacgttcgcctagctaatctttaaggcgactaggatcacattgactgaacgatcaagctcagcgctgaagataagcacgacagcaatgtgctcacaaactaatgctgcatgaaatttaccagtgacaaactga

SEQ ID NO: 74938 - DNA, 311 bp, Zea mays
  Clone ID: MRT4577_16833C.1
ccttacctgaatgcaccggtaaaaggggtgaaaacccagccataaaccgctacaggatccaacacgctagctgatcatgcaaaaaagatttatcactcgtggtatttacaacagtcaaacaggcctatctttggctcagtcatataaacaaaccattacagcgcaaccaattcgacaactggaacaaacagtgattactcaaagtactctggcacatacctgtctgactactctcagcaacaacaatttcttaacattcaccaactgtctacactgaaccctgctgcttatttacaacaacaacaactact

SEQ ID NO: 74939 - DNA, 604 bp, Zea mays
  Clone ID: MRT4577_168340C.1
cccacgcgtccgcgcaggtggtggctcgtctacgcagggagagtcgagtggcatggctacgtttgctcacgagttgtcgcatctgcttggtattggtgacaactacaacaacccattcagcaaccccgctagacgtacctataccggcccttggagtatgttgtctcgtggtagcttcaacggtcctggaggtccacacacacgttggcaaatcccacctgtccaaggtgcctctatgggttctctacatacgatgcgcgacaagcaccagattggcctcatcgacaacactcctatcttgcaaatatcccggtctggccttgctgcttctggtccagtgatcgctcagctcacagctagatcagtcgatccagttggcagcctcatgggttttaatattacctttggttccgcaggcgaccttgcaccaccatgcaacgtcactgttgacccactctgcgatggccgccgctacaacaactacaacgtcgaagttgttgaccgcatgggtgctgattccttctgccccgattctggcgtaatgattagcaaaaccaagaacagcgaccgtgtgcaacccttccaatgggtcattgacgcaaac

SEQ ID NO: 74940 - DNA, 308 bp, Zea mays
  unsure (1)..(308): unsure at all n locations
  Clone ID: MRT4577_168341C.1
nnantggcgggggangcctttttttgtcgggaccccaaaataaccttgcaacaaccactacccaaccgaaagccgtcaaaacaaaagtccggaatccaaggtacaacgacatgccactttaacgcaagccacaaacaccagggctgtcaacatatatcaaaaaccacacgacccaagaactaaaccaaccttttgaatcccgataacccaccgtatgatacaacacactctatccagacgcatacacagccagtctaacccggaagcgccacggcaaactggaaagcgaaaccatacaaacaaatcct

SEQ ID NO: 74941 - DNA, 347 bp, Zea mays
  Clone ID: MRT4577_168342C.1
gcatcaggcaaagctgttatattcccattgcaccctggcaagggtacgcatgggtccatgtgcatccagaaggcaaatcatttctttgccgagctgcctgataaagccctccaccaatacgatgtatcaataacgcctgtggttccttcacgtggtgtacaatcgtgctgtcatgaaacagcttgtaaaccttcatagacactcccatttggattagcgtctgcctccatatcatggaaggaagagtctatatacagctggagcattgccgcttacttctaatacattcgaaattactctgcaagatgaacaaaacagtcttggtggaggacaaagacaccaaatgg

SEQ ID NO: 74942 - DNA, 448 bp, Zea mays
  Clone ID: MRT4577_168343C.1
tcccaaaaaacccaaacccggggcgggggggaaaaagggggggtggcgccaaccgggggggggcgggccccggggaaggggccccccccccccccgccgccgccgggggggggtccccccctgggtggggggggacccccggctcccccggtttaaactcaaacccccggcctttggggggggacaccgggtttttcccttcccagcttttggcccccaaaatgggcccccccccccccgaagccctgggtcggggctccccgggagggggccccattggcggccccttggggggggccctggggggcacccaggccccctttttccacggaatctgggggccaagcttccccccgcttccttgggggaaccacgggaagaaggccgttttccagcccctgggttccacaaacttaacccggccccgggggtccccccgggaattccg

SEQ ID NO: 74943 - DNA, 291 bp, Zea mays
  Clone ID: MRT4577_168344C.1
tatcgcgttcgtttgtttttggtccgctgccatggatcacctagaccatattgtcgagggtgcacgtgcgtacatggccgtacatgatacggtgttgaacacctatggacgtaaacgctccaattaatggatctccgggtgttactgcatatggcagatgaagtatatacaactgatcatgtctatcgcatatagctgtggcgacaaccctccactgtgtgactacttgcacaggttttgtggctgtatccacaaccaggatatccgactgaggtgagcactattgccttg

SEQ ID NO: 74944 - DNA, 258 bp, Zea mays
  unsure (1)..(258): unsure at all n locations
  Clone ID: MRT4577_168345C.1
aattcgcggccgccttntaaccnaggnagcaagcatacgnatannacaagnataaatatntgatccagcaagnntncatnannncaagnnngggctnaacagcangagcgctcgattcctgatacacacacatacaaccaggngnctgtctacacggtgagttncgtcctggagacangagtgccatcgggntcgncgtagagccactngctgtgngnaaatccnggttccagcgatgttgacggggacgtgcttatc

SEQ ID NO: 74945 - DNA, 1200 bp, Zea mays
  Clone ID: MRT4577_168346C.1
ggtcgacaggcaccgacacgacccatgtcgtcaatgtggcgcgtttcccgccgcctcctccgcgccgccgcctcggcctctacctcggcgatcgggcgcggcgccgagccccgccggtgggtcccgccgccgttcgcgctgcagcgctgcggccacgcgtcgcttccggacgcggcgaggagggacggggaggaggaggtgacggcggcggaggcgaggcggctgatgcggctgaccaacgtggatgcgctcaagcggcggctcggggacggggaggtgatcccgtacgcggacctgctgcgcgcgtgccaggactccggcgcggcccggacgcgcgccgaggccgcggcgctcgcgggcgcgctcgacgaggccggcgtcgtcctgctcttccgcgacagggtctacctccagcccgacaagattgttgaccttgtaaggaaagctatgccccttgcactgacacctgagaacgatccggggaaggatgagctcaagcagctccaggtgcagctggaaaacatcaacaagctggcacacaagcaggtccggcgcatcctctggtctggtctgggtttcttgatcacccaggtgggcctcttcttcaggctcacgttttgggagttctcgtgggacgtgatggagcccatcacgttcttcacgaccactacaggcctggtcgtgggatacgcatactttctcatcacgtcaagggacccaacctaccgagacttcatggagaggatgttcgagtctcggcagaggaagctgatccagaggcagaacttcaacttggacaagtaccttgagctccagaggcgctgcaaggaccccctggagaaggcgtgcggcacgaccaacactgacatggctcatctccatgagctatccattcacaaatgacaaacaatttcaccattgcttcgttactcattttattctctgggggaaatgatccctagtagaaaaggtaaccggtgtttcttgcacttgtgagataccttttccacggtcttctctgcaaatgtgtaggtcattaatcagtataatccttttttagcgatgttgtagcacaagcacctgatagttgaaaaggcaagctcatctgcatggccggaagcttactcactacccagaactgcattaatattctgcagtctctactaatatactgtttcattgtgacttagctttatatat

SEQ ID NO: 74946 - DNA, 792 bp, Zea mays
  Clone ID: MRT4577_168347C.1
cattgggtacctcgagggccggccgggagaatgatctcggggaaggaagagctcaagcagctccaggtgcagttggaagacatcaacaagcttgcacacaagcaggtccggcgcatcctctggtctggtctgggtttcttgatcacccaggtgggcctcttcttcaggctcacgttctgggagttctcctgggacgtcatggagcccatcacgttcttcacgaccacgacaggcctggttgtgggatacgcatacttcctcatcacatcaagggacccgacctaccgagacttcatggagaggatgtttgagtctcggcagaggaagctgatccagaggcagaacttcaacctggacaagtaccttgagctccagaggcgctgcaaggatcccctggagaaggcgtgcggcacgaccaaccctgacacggctcatcttcatgagctatccgttcacaaatgacaaaggattcaccattgcttcactactcattccattctatgggagaaatggtccctgctagcaatagtaagcggtgtttcagataccttttccacggtcttctcctatgcaaatgtgtaggtcagtataatttttttgggggtaaatttgtagcgatgctgaaacacaagctagttaaaagccaaactcatccgcatggctggatgcttactcactacccagaaccgcgcgattctgtggtctctactaatatactgtttcattgtgccaaaaaaaaaaaaaaaaatttgcggccttgttggtggccaaaaaaaaaaaaaaaaagcggcc

SEQ ID NO: 74947 - DNA, 538 bp, Zea mays
  unsure (1)..(538): unsure at all n locations
  Clone ID: MRT4577_168348C.1
cgggatcattaaaaacaaaaaattctgtaggaaaattgtgtgtaaggttgtaaactgttttttattgtaagtctggatggattatataaagctgggaatgttgcatagatacgaaggtcggtgtctgaggaggaacaaacacatcatggctgttgtatctaaggtgtctaagagcaactctaaaatgatgttaaaaattttacccccaaaactgattattaagagtagactaaaaagttttaagagtgaattatgatgggtactctaataatttctctaaatgtgacatgtgacgcaatctgtacagttatcgggaggctgtgaataatctaatacgttgatgactggattggagggatggaacacataaaatatgagggaaaagatgttgtggatgcgggacataattttttatggaagaatgatggagctgttggagtaagaaaaactactattctttattaatatatggtttaaagntaggttacatgttcttttggagtcgggctaaagactagccagagtaagtagtatagta

SEQ ID NO: 74948 - DNA, 205 bp, Zea mays
  Clone ID: MRT4577_168349C.1
gttggagctgcaaactccgaagccgaacctgctgactagggataaggtcgccgttgcgccctttcggtacgatggtgacagctacgagtcgacgccatcgacgcatatcttgaggacgctcatgcagcccacgtggcaggtgcgcttcagcaacgggtctgaggtgcggttggacacgcccgggcagcgcacgcagatcgagtgc

SEQ ID NO: 74949 - DNA, 314 bp, Zea mays
  Clone ID: MRT4577_16834C.1
tgagacagcaacttgacacccattgcatcatttcttttctttttcatcatgaaatcaatcaatcaaggatgcgactactgcatccttgtcttgtgcgaacggctaggactgcttctgcccacctgctcgaacattgatagcacatgaactaccacctctttgattcttcgcgtatatcagtttatgagttcgcataatagttttactcctatgggcccatctgggcaaacatacacttgcttgcgctaagctttgctcgaacttcgcctcgtgaaatttgaccaaaaaaaaaaaaaaaaatagcccctatggcc

SEQ ID NO: 74950 - DNA, 522 bp, Zea mays
  Clone ID: MRT4577_168350C.1
tttttttttttttttttttttttttttttttttttttttttttttttttttttttttttgggggacaaagcctgaaacgggtcccttccccccggcaattcccaggcgggggaaacccaagcaaagagggggccggttaccgggcaggggggggtgtccccatttttgctaaaccaaaacccggctttcgggggggaaaccggtgaggttttcacccccaaaccctttagcccgggggttattgccttgccggggcatcccccttccaaatttgtcccgggggtcatcggtccctcggtcggtccggccgcgccccgttgccccggcgcctacgtgcgcccgtggggccggcccggggctgggcttccttccctccctcccgtcacgggccccccctttcttgggtgggggggggggagctggcccgcccccggggggggtgggcctgctaggggacccccccgggcgggcggccctcgggggggcccccgttgttgggcccttccagcggctcttcggagg

SEQ ID NO: 74951 - DNA, 1157 bp, Zea mays
  Clone ID: MRT4577_168351C.1
gaagagttttttttttttttttttatcaaatactccttcaatatatctcaattcactctaatacgactcattactagaatacctacactaggcctcagtagtcgtactggccagactgttccacatgcacctactagaacttcacacgatccagcggctttgtcaatatatccgtgagctgatcttgagttgtaatctgcttaaggataattttcctcctgtagaagaacaacccgcttgtgctccttctgtcgtcaacatctcctgcgtggtcactgtcactgaatccaaccaattccttgtgttccgtgaatccaaccatctcctgcgtggtcatcaacatctccttctgtcatccaccagatgtacgtgctgctgctccgtcgcggcgcgtggcttctccagcgctggcagcagggtcactggcccctccacagcactgggcgactcctccagcgctggggctagggttagaggtggtggatccggcgccgccttctccagcaggggccaggccacctgcttcgggggatgatctgtcggcgcctcctccaccagggacgggaccgctagctgcaacagttgtcccggcggcgcctccaatgccccgaccggggtctcctgtgggtggatctgagcccgagaagcctccagcgccggggattctgccgacgatgcggtctccaccgcagagcgggcggagctggacggaggagacccgtgcgaggagcagagtcccctcctcctcttcggcctgcgcgacataggccttccccttgttggacttagacgggcaatctctggcccagtggccagttttgccgcagctccggcactggtcgcggcctttcccagcaccggttcgctcgccagttgcttgtcgcgcctcgacgtagacgtcgcctgtggttaccggacttcgacgcgccggcgtcatttcggtgcttctccttccaccgagcctcccactgctcctccgttaggtacagcttaccccccgtcgacggtggtgaggcatcatcagcatgctcggccgctttcagtcggccggtgatatcctccatcgacagggtcgacacatccagtcggaaactactagttgcttgtaccttgactcccgatccaaagatacttctccacgaaaaaaaaaaaaaaaa

SEQ ID NO: 74952 - DNA, 430 bp, Zea mays
  Clone ID: MRT4577_168352C.1
ggggccagcaccgcgtccggagtcaagctctgctttggtgtattgggaggttcgagtggcgctgatgggttctctgctggcacacctggtggtggtaccttgctgctaggaggtagcgacagctttggcaacagtaacgttggtgctcgccagctttggcaacagtaacgttggtgctcgccaggcgctcaacaaaacacctgaaaccaaagttcgtatagtacctgtcaagcgctcgacaaattgtctgcatcggaaaatcattagcaacctcgcggattcgagtcaaatattgaaatggtgagctaatttgctattttattgactggtttgatgaatgaattgataggtgtgtaaaaaaaaaaaaaaccaaaggaaaacaaacagcgccacaaaagaacaaggaggagccacgccgacgagcgaggcc

SEQ ID NO: 74953 - DNA, 1965 bp, Zea mays
  Clone ID: MRT4577_168353C.1
cattgggtacctcgaggccggccgggatatccatctcccctcgcacagtcgcaatcgcatccgtcctcggcctcgttccgtccgccagcaatgccgctggcgctcgcgcaactgcaggacttgcgggaccgcatctccgaccgcctccgcccatggagccgctccgcgcagttctgggtccgcgccgcggacatctacaccagctacaaggtgtgccagctgcgcgcggggttcgtgaaggacgaggacgagctagagaccatgtgggagcggcagcacgagctcggcgcggagaagatgtactccctctgctccgagctcggcggtctcttcctcaaggctgctcaaattctgggaaaacctgacctggcaccgatggcttgggtgaagagacttgttacgctgtgtgatcaagccccatccacgccatttgatgtggttagagatgttgtggagaaacagttggggaagaacttcgatgacatgtttgaattcttcgatgtcgagcctgttgggtctgcttctattgcacaggtgcatcgagcaaggcttaaattatcaaagacagacgttgctgtcaaggttcaacatccaggagccgaacaactgatgatggttgatattcggaatatgcaagcaatggccttgtttttgcagaagcatgacctcaactttgatctattctctgccaccaaagagatggaaaaacagatatgttatgagtttgactttgtgcgtgaagcaagagcaatggaaagaatacgagaatttctacgtgtcactaataagaaacctccggttatggtgcctcgtgtgattcctgggatggttagcagagaagttttgataatggaatttatcaaggggaccccaataatgaatcttggcaatgaaatggctaaaaggggcatagatcctggtggtaagattgcagcaatggcaaagcagaagattttgtcagatcttactcttgcatatggtcaaatgatcttgaaggatggctttttccatgcagatccacacccaggaaacatccttatctgcaaggacacagaggtggctttacttgattatggacaagtgaaagaaatgccagaagatttacggctggcttatgcaaatcttgtagttgcaatggccgatgatgatttctcgagggctgaggaaagtttcagggagctgggtatccgaacatgggccataactgataacaaactagaagaattgtttcagttatccctgcgaatgttcgatacaagattaccaccaggtgtaactgttatgtcaccttttgccgatgattcttcgcttaacaaaattggagtggagagcttcccggaggagctattttcagtgcttcgaacaatccagcttttgcgagggttgactgtgggcatgggccttacattctcgtgcgcccagcattggagaccgatagctgaggaggcgttgttaaaagctggaagacaaagcgcttcaaaatcaagaaaacagaagaggagttttctgaggagattgttttggtgaagtaggcatttagccgcatagcgaacatcaaaggacatggtatacgaacattctgtgatgaaacggaagtagccaaaagctcgagccttcgatttttagacagtacatctgtccatattcgtttaccttgggtgcgtgttattttatatatttgctcattcctttatcactatgtgttttttgggattcagtatatagttgggattgtatcggaagctgacatgtacacaagtgacatggaccaattcaaaggaaatcatcgtggtatgtgggggtttgttctgaaaaaaaaaaaaaaaaaaaaaaaaagggggggaagaaaaaaaaaaaaaaaaaaaaaaaaggaaaaaaaaaaaaaaaaaaaaaaaaataaagtttaaaaaaaaaaaaaaaaaaaaaaaaaaaaggcctttgggttgtaaccactgtttaagggga

SEQ ID NO: 74954 - DNA, 196 bp, Zea mays
  Clone ID: MRT4577_168354C.1
cctgcgaaaaaagagagaaaaaaaaaaaaaaaaagtaaccaaaaaaaaaaaaaagcccctaaagaccgcgaaacgctctaaaggcccctagaagccccgggactgtcggaaattaataggatcccttgtcaatgaccgaatacctcaacgggcttatcgatacccacgaccccctatagggagccgtatacacaat

SEQ ID NO: 74955 - DNA, 799 bp, Zea mays
  unsure (1)..(799): unsure at all n locations
  Clone ID: MRT4577_168355C.1
tgggaccctcgggccggccgggaccgaggccgatagccancagccagacacacgtggacacggcagcggcagcgccctccgacccccgccgggccaccaggcagaaaaggaacggaacggcgcagccgcggcggcggcggcggcggcggcggctgtaggttcccgcaccagcgactggcggacacgtatatccaatcatccatcttctctcgcacggccgcacccgtcctcggactcgttccgtctgctagcaatgcctctggcgctcgcgcagctgcaggacctgcgggaccgcatctccgaccgcctccgcccatggagccgctccgcgcagttctgggtccgcgccgcggacatctacaccagctacaaggtgtgccagccgcgggctgggtttgtgaaggatgaggacgagcgggaggccatgtgggagcagcagcacgagctcggcgcccagaagatgtattccctctgctccgagctcggcggtcttttcctcaaggctgctcaaattctggggaaacctgacctggcacctatggcttgggtgaagagacttgttacgctgtgtgacaaggccccagccacgccatttgatgtggttagaaatgttgtggagaaacagttcaggaagaacttcgatgacatattcgaattcttcgatgttgagcctgttgggtctgcttctattgcacaggtgcatcgagcaaggcttaaattgtaaatacggatggtgctgtcaagggtcaacatnncagagctgaacatctgatgatggttgatattcggaatatgcaag

SEQ ID NO: 74956 - DNA, 726 bp, Zea mays
  Clone ID: MRT4577_168356C.1
ccacgcgtccgcttatctgtaaggatacagaggtggctttacttgattatggacaagtgaaagaaatgccagaagatttacggcttgcttatgcaaatcttgtagttgcaatggctgatgatgatttcttgagggctgaggaaagtttcagggagcttggtattcgaacatgggccatatctgacaacaagttagaagaattgtttcagttatccctgcgaatgtttgatacaagattaccaccaggtgtaactgttatgtcaccttttgctgatgattcttcgcttactaaaattggagtggagagtttcccagaagagctattttcagtgcttcgaacaatccagcttttgcgagggctgactgtagggatgggccttacattctcgtgcgctaagcattggagatcaatcgctgaggatgcattgttgaaagcaggaagacaaagcgcttcaaaatcaagaaagcaaaagagaagttttctcaggagactgttttggtgaagtagggataggggctatcaaagaacatgatatacggacattctgtgatgaaagtatgaaacggaattagccaacagctcaagccttcgatttttatattcacagtacatcagttcacaattcatttactttgggtgcttgttatttgactcaacgatgttgctcattcctttataacaatgtgttatttggattttagtatatgtttaggggattgtatttg

SEQ ID NO: 74957 - DNA, 236 bp, Zea mays
  unsure (1)..(236): unsure at all n locations
  Clone ID: MRT4577_168357C.1
ccctttttattttttttgnnnnnnantngtgggggaacacaacgcaaagagcgcgaaaattgagataggcgcaatttagacttttttttttttttggttgaaaccccgggttcgtctccangtgtcttgaagggcttaaagggtgcggtgggccctgtttcaaatttttccccccccgggggcgcgggggcataatgttttccccgggttataaaacccaaacagattttgggggg

SEQ ID NO: 74958 - DNA, 261 bp, Zea mays
  Clone ID: MRT4577_168358C.1
acgccgtgtcggtcaggacgtggttgccaagggcgtagtgctgcagcgtgagcaggatgaggtcgtgccagcaggcgtacgtgaaggaagtcggatcgaggagaacggggactagggatcggttgttctgaacactcagcacctgggcgtatgtttggttcacgctctcgcaggcatttgctatgcctgccaggcagacgacgtagccccagcgatcgaaatcgaacttctgggagcactggctgggctatgcaagtctgg

SEQ ID NO: 74959 - DNA, 338 bp, Zea mays
  Clone ID: MRT4577_168359C.1
tctttatatctaagtcaagaaagatacaggtgcctgacgtatctggtggcatctcatatccttgaccgaacttctgaagttcttcggcaaacaacgattggcttttatggatctgattgagcccatttttcaaggaacaatgtgttcaaaggtttggattatttatatgccctatttgattttgaaatacaaaaagattgacatctttgttttcccccagtaccccctttgttctttatgtttaataggtccaaaacttgtgatcgttagtttgcctgcccaaataatgtagttgggtagcctctaagttgagataggtgcagtggcgatacatgtta

SEQ ID NO: 74960 - DNA, 406 bp, Zea mays
  Clone ID: MRT4577_16835C.1
gagctgactagtcggcggccgccctcctttttttttttttgtctgtattgtttttatatatatatatatgcatggcacacaccaaacacctatatatgtcaaaggcctaaagcacattccctaccgcttggacatgtaccgggaaaggctttagaaaaaaagacaaaaacaaaaacttgtggaggccaacatatctgggccgaaagcttgaatcggcatggttttagggtaaagaactctaaagcttttgtgcaagggcctgattgaaaaaacaaccccacaacaaaaaaacagtcctaaagggggccgggggggtcaccaaccaccctattgcccttgggcaaaaggttgggacccaccgggaaatctaaacccacacaaaaagagaaccggggattgggtccac

SEQ ID NO: 74961 - DNA, 640 bp, Zea mays
  Clone ID: MRT4577_168360C.1
gcgcattaacctcctaagggataaaagctgggactcggggccgcttttttttttttttttttacggattctaccgagtcctgaattatgggaagagttgctcattcagaagagcgctacacaggcgaccgatagtgcttcgctcatgagacatatcgttgttaagtaaatcaactgactacagcacaaagagttgccaggaacccaatcagttttggtttccccagctgagctgatcttaccctcacagtgatgctcggaactggacacgtggaaaactggtctgtctaacctatcaaggcttgagggccacagacatgccaaccttggagctgtgctcgatgagctttgttaccacctcgacgcgaacatgtggaccacgcgactatggcctcactcggctggttcagggcactggtcttgccagaattgttgatgcggaccttcaggacgtttaggtgggtccagggccgtgctgcccgccgaaggtgagggtgttttcattggtcgagaaacattggggtaagctctgccccaaccagctgtggtgggtcagtccgctgcaacttgggatagtagggtccagtagactatcggccttgtgaatataggagacggatgccacaaggtctttttgagtg

SEQ ID NO: 74962 - DNA, 458 bp, Zea mays
  Clone ID: MRT4577_168361C.1
ggtacccgggcccccccctcgagttttttttttttttttttttttttttttttttttttttttttttttttttttttttttttttttactttttttttttggagaaaaaaaactcccgggattccacattacccccaaatttcacccataaagagaaaccaaaaataacaaggaaaaaagatggagggccatggccttgtagcacaaaacacgactgtatcagactgaacccccgttccttacaacgaataaattggcaccgttggaaaaaaccttcaggatggcctgcggcgcctcaacggacaccaggaggaaaaaggctatggccccaaacaaaggcccaagcgttttgacggccaccccctaaaacttgaatttgtgccccgaaggaagacacccccccgagcccgacttctccaaccagggccaagtcgcacgccttcttcatgcccagcccg

SEQ ID NO: 74963 - DNA, 559 bp, Zea mays
  Clone ID: MRT4577_168362C.1
cggcccgccagcgactcacacgtgaaggggacaaccactaccacgcatcccacacaagattggctcagtgctctgacccactgctctgacttatactcctatgcgtgccattcactcctaccactcgctgcgtcctacccagcattcagcaagacgtctggccctcatctgaccggaagtgctggcaggatcgaacagacaagagacactgaattgcaggagaaagatgtgcctatgtccgccgatgaactgaacacattcactaccggcgacaggggagacatacgcccctccttacacggacagacagtggggacgagatcaaagggaagggcctcagccgaacaccactctaacggccagtacagtcgcactgacactcgttgattcctattccggaccctatctccatggaacagtatgctactgcgtaaacatggactaagtgcaatcgtagatcgatcactatgcacgcgatgatctgaactgcctaataagaagtcttgaccgtcgaatccactgagtacctgccctgacggtcgttgcaagggcgatcacc

SEQ ID NO: 74964 - DNA, 1621 bp, Zea mays
  Clone ID: MRT4577_168363C.1
atgatttaatcttatatatatattatattgatcaaagttaaaatagtttgatttaggacaattttaaaacaactaaattatgtgaacggagagagtattcactaattaatgaccgaggccgacacgctgcgtataaataggatattattaccttttgacacgtacgatctgctgactactactagtaatcttacggtactgaggacggtgtgatcgcagtgttttctctacttttctcaacaatacaccgggcatgttttttgtgtgtgcatgcatcatttcacgcgcaaatacattctactctaaactcaaagtaggcagtgttcacaagaatacaccatgtaggatagaacgtatgttgcaatttattaagggccatgtttgttcatcagaatcgacttctagcagtcaaaggtacgtttcgtttttcagcttacttctgtaaaagtcgtttctacgaaaatcgttcaaatcaacatgaatataaagtctatcgagccatcacagcgggtggaatcaatccaccactcttaaaccctaaaccgtggagacttattcatctttctccgcatgtaagtcttatggaatctagattctagtgacatatagattatctagaaattctggttcttagaaaaagctctctgaaaaaaattgttccaagcatgcggaagcctcgggctataacaaccttagcgaatcaaaaaatacattttcaaaactttcagaacctagatggtaccttcaaacaactttaagcattactaatatataaattttacttttatatttttagcttcttggaagttatttctggaattttttaaaaaccaattaatagctggactgtttattttagcttctcggcacatcaaaaatggaatatctgttagaagtcaactttctagtctttcaaaatccaactcaacagtccaaccgtttatttcagcttctagtttatcagcgcgcgcttaaaatcaacaaaatgtaaaacaagcaggccctaaaagcagcgcacgccaatagtaatttgtttcacatttcgttcggactctacaaacaattacaagtaacgtgataataatgaaatgatgggtacaattttcattggtgagaaaatggtctcaattcggaacaaactaatttatcgcctacactcttacacgagctagaattttttataagacaagtattcaaaatttgtgaataaatttagtacttacatctaatcaaaatcactcatctttattgttgggagctttctccttccaaaagtcttcaaaaacataattaatcaatgtttttagcataagtcattacaggaagcttcgtttttagaatgcaagcctctttctcatgatgaagacacacgaaatgaagatcagatctaaaaaggataagaataaacgccgacctattaacagatggacaacttcggctcataacggagatgaagtataatgatgatgctgacccgaaagaggaaaaaactacttagtccttaatgatttgtattttgatcatatataaatattgaggacataaatatactttcacccgggttgcgtcccgtgcctttaaatagatgaacagtagcaccgtactgttcacgctgaatgat

SEQ ID NO: 74965 - DNA, 362 bp, Zea mays
  Clone ID: MRT4577_168365C.1
gagaaaaaaaagaaacacaaatgataaaaaatgaaggaaatacaactaaaatgggtacctggggatcgagcgcgagtctgaaagcctactcgttaacttgacaacactgtgagtggttagtcatcatgacgtcaccagaactctgcacaaggagctaaaagatattaccgagcaggctaatgatcaccttgatgaacgccctgcttaatcataaggatcaacctagtgatgtcaccagatgacgtacatgacgaatacgcgctgatagctgtccctggtagtgcctactccttacgaattcctgacaacggatctgatttaaaggctgctatataaggcatgattcatttaccttgattatt

SEQ ID NO: 74966 - DNA, 1137 bp, Zea mays
  Clone ID: MRT4577_168367C.1
cggccgcgtgggctcggctagtcggctggcttccgttctctttggcccaggacgacccagagacagcgtgcgtctaggaagcagcgccgaggatggcggaccacttcgcgttgatgacgggccggctgctgacggagtcgacgctccagtccgccatccaggaggcctttgccgatgccgtagcctcaacagccgccggctacgaccgtacagatccctccgctgttcctgaagatgttcagccgggcatgggcgtgggcaagggcaagggcaagagtggtgtcatggtggagtgcagaatctgccaagaggaaggcgacgaggcttacatggagacaccctgctgctgcaagggcagcttgaagtacgctcaccacagatgcgtccagcggtggtgcaacgagaagggagacaccatatgtgagatatgcttgcagcaattcgaaccaaattacactgctcctttgtttcggcatggaaggagcctaataaattcaaggggagctggagaagtacgggaaaacgtcggtgctagtcatggtcaaacctcggatcaggctgatggtgcatcaagcgttgattctcagaacctccacctgaaaggagtcgtatattgccgagtagttgccattgctttgatgattttgttggtgctccgtgacgcgatcttgcttatgctccgcgacgatgaaatgtgctcagtagagctaatcactctgctgctgttcagaacggctggaattgtcataccagtctacatcatcttggtatcagttaccgcattgcttcattggtgcaatcaacgacggatctttagaatccaggttgtgcacgagacgacggtttcagaacctcgtggagcagggggcctgcagcatatcatcaacattcggtaggaagctgcacggacgcacggtggttcctggtcaggcagcctctgtaaatacctgaaaagtgtttgagattcaggcttgtcgtaatggggtttggaagagacagaaccattgcgagactgtatagtttcatagcatagtttctatgtacaaaagaaattctgaaaacacatccactcaacttcaccaaatgatgaagacgaagttggatcggtgtctgttaagaaaattgagttagagtttt

SEQ ID NO: 74967 - DNA, 302 bp, Zea mays
  Clone ID: MRT4577_16836C.1
ctcgaggcgaggagatagtaccggctatctgctgcgcgtcactggcgaaagaggggctaagaacacttccttcgtatctcatacaccaagctgaccacatacctaatacctacaccaacttaaacactgatatcaatggagggcggagcgactgactcggacaaagcagaattcaatgagtgcctgcggctgctccggacacaaccttacatacttgaactactactgtctgctggcattggcgctcttctattccgataagatacaagcgtcatatactgagcccttctgtacattagaga

SEQ ID NO: 74968 - DNA, 618 bp, Zea mays
  Clone ID: MRT4577_168370C.1
aagggcgaaaagggcctgggcaagggcggagcgaagcgccaccgagaggtgctccgtgataacatccaggggatcacgaagccggcgatccggcggctggtgcgcaggggcggtgtgaagcgcatctccgggctcatctacgaggagagccgcggtgaccacaagaacatcctggagaacgtgatccgtgacgccgtgacttacacatgagcacgcgcgccgaaagaccgtaacagccatggacgtcgtctacgcgctcaagcgccagggccgcaccctctatggcttcggcggctaggctaggccggccgcgcctcgctgtcgtcgctgcggttctattgtttttgcaattcgcaagtagtggctcggtggcgaaaatgctggttactgtggcactagatcaagcatgttgtgcgtgtctgaagaaatgccaattgtgacttgctgtttgttcaaacatgctccacatttcaacacccgtcgtccctgcgatgtagttaatttagccatgatatgtcctgcgcgcatcccatctctgtccaatatgtttaatgcatttctatactgggtaatccattacctctgtttcatttgaaaaaaaaaaaaaaaaaagcggcc

SEQ ID NO: 74969 - DNA, 321 bp, Zea mays
  Clone ID: MRT4577_168373C.1
ggggtcgcaacgcaacgccccccgtcgtgctcgcgtgctatcttcctcctccctccctccttgccgcacgcgtcaaaccttgcaaagagagttcggtcgacggcgccagccggcgatggcagcgccgcgccaccgccagggccacattgcgcagtgccttggcaggatcctcgcctgccgcggcagcgccaccgccgccgtcgctgccggcccaggcgggcgacggctcaccggcgcggagttcgtcgatggcgtgcggagcctcgccgctggcctcgccgtccgcggtgtgcgccctggccacgtcgtggccgccgtcgt

SEQ ID NO: 74970 - DNA, 258 bp, Zea mays
  unsure (1)..(258): unsure at all n locations
  Clone ID: MRT4577_168376C.1
ggagaggaanaggttgaacagtctaccctcccttagcagggaactactcccaccctggagcctccgtagacctaaccatcttctccttacaccntagcaggtgtctcctctatcttaggggccatcaatttcctcacaacatttaccgntataaaaccccctgccataacccaataccaaacgcccctcttcgnctgatccgtctaatcacagcgtcctattctcctatctctcccagtctagctgtggnatcatata

SEQ ID NO: 74971 - DNA, 147 bp, Zea mays
  Clone ID: MRT4577_168377C.1
ctgatgtgatgcgtgtcggctcttggggtgacaggactgctatcgacgttcgaggcgatgcgggacacggccagggatgggcagatcgtgttcgtatgcatctcctagactggactgcagagagaaagttggggcagatttccggct

SEQ ID NO: 74972 - DNA, 233 bp, Zea mays
  Clone ID: MRT4577_168379C.1
ttttgatgtcaaattcaacaaaagagatatgcacaccaggggtggggtatgaagtaaaccatccccatgcgcatccctctgatgaacaaagtgctgcacattgtagatgatgcgaggttggcggctttagctgttgggcaagacacaacacttccatcagggcatgtcattcttgaacgccgtgtgcaattgcaaaacgggcacttttatgttctccatggatggacagaggt

SEQ ID NO: 74973 - DNA, 347 bp, Zea mays
  Clone ID: MRT4577_16837C.1
ggaaagacccgccgacccaggttatgcccagaaaggggggccgattcccaggcccgtggtgaagggggcctaagggccccaatcccacccacaattgggcttcccgccccccaggcccggcccggggccggaagataacccaacccgcggggaacctcaccccttcaggcttcctttggcagcggggggaagggggccccggggagccccccccccggggggggaacccccgctccccaaaaccccggggggggccccccccgggggggccagccccccccggggccctttgggagccggcagccaaggatagcccccccttgctcccagaagcccgccgcccaggg

SEQ ID NO: 74974 - DNA, 810 bp, Zea mays
  unsure (1)..(810): unsure at all n locations
  Clone ID: MRT4577_168380C.1
gaccctgcctattctttctcccgttcacccgtgcacgctctttcccttcctcgtgccgacgaccgggcgaccgccgcgccccggcccgcgcccccttgtctcaggccactcgccggcaacgagcagccaccaggcgcagtcgcccgcttctcaccctggtgtcgccggcagcctggccgccgttcacccgattcgcgcttccacgagaccgccgttcacccgaatggccaactagtgaattccctcatcctttttctcagcctgctggatatagaggaagtctgcattgttttacttgcatgctttatgaaaaaagagagaattattccttgacattcgctcagctcccaattgatctatattattgttggagcataacagtcgcctcaatggtttatcaacatgtaaatttctttgaaatttaccactttaggaaatagtgaggagtgaatagataactgaaatatcttggcagtagatatattgggggctctagattacagacacatatggccgtgcctcacgccactgctcacagctaataccgtgattggggacgaaccgaaccgataggacataggagggaggccgacgtagatgggcacagcccacggacttatgaaacgtcgaanattggcctattttcttcccgagccaacccactcaagccaaaagcaggcccaaaggggtatagagtccatagaccgactcccaggcctcccgctctcctgtccagcgccgccacggagacgctctcctgcaacgcctgagcgacaggcgccgccgnccgacgcccctaacctcgacggt

SEQ ID NO: 74975 - DNA, 321 bp, Zea mays
  Clone ID: MRT4577_168381C.1
cgccgcgccatgactatgacgatagtcgccgtgctctgcctgctcctcttctctgggcggcgcgccgcggcggagaagactttccgcggaggtggatgcagatgctactgcgggttggaggccggtggcggaggcagcggcggctattccaccccgagcgaggcggcgccattcacgcctgccgctggggagacgactacccctccgtcaggcggcgggtacttcactcctagcgtggcggctccatccacgcctgccgcttaggagactacgacgactccttcgtcaggcggcagtggttacggcggtgcaaccggcaag

SEQ ID NO: 74976 - DNA, 463 bp, Zea mays
  Clone ID: MRT4577_168382C.1
gcgggagccggcgctgatcaaaccggaaacagacctgaccggaggaaagcaatgactgataccaagccatgggcacaacaggaggatttggatgagcatgctgagaatgcactgaccgtggctgacaacaccagcagtgataacaagctgatactctacgggctctacaaacatgccacggctggagatgggactaccgatggagcgggcgtattataccagaaggacagggccaagagggatgcccgaaaggctgctgtaggcaaagggaaagatgaggcgaagactgactacgtaacctaagtgaaacggtttcatgaggaggctgccgccccctaaaactctcttaatagcagttgccaaacagctatcttcctatatgagactctgcgccattgctctcattatatgtatcttacttcggtccatggaaggatctgtgaacgatgttcctggtggcgat

SEQ ID NO: 74977 - DNA, 238 bp, Zea mays
  Clone ID: MRT4577_168383C.1
atactaaaaggtcacctatttaaaagggggggtttggcacttgaacttttaaggggggcctaaattattaaaaccccctagcattaaaaggggcccttttcatggggttttatggaaaggtaattgggggcaagcccacgttaatccattaatccaacaccggagaatcaaatcaaacaaagcttggtgacgacggggcagtttttcctgatctcgccggccggtcgcgaactaaaac

SEQ ID NO: 74978 - DNA, 108 bp, Zea mays
  Clone ID: MRT4577_168384C.1
accacgcgtccgcccagaaatgccttggattgactttcgaggaccgctccgatcgaatgctctgggtgtaatctaaccaagagttgtgtaacatgatcaaaactatct

SEQ ID NO: 74979 - DNA, 361 bp, Zea mays
  Clone ID: MRT4577_168385C.1
gtgaacagcgcactggtaaacatgtataacaagtgtggctgtatcgaagatgcaactaaagcctttgtcgagatgtcgatacggactcttgtcacgtggacttctatgatctcagggtactcacagcatggccggccccaggaagctatatttctctttgtggacatgagatttgctggagtgagaccaaatgaaatcacatttgtatgcgtgctctcagcctgcagctatgctggtttagccgagaaggctgagcactacttcgatatgatgaaggaagagtacaaaatagagcctattgtggaccactatgggtgcatggttgacatgtttgtgcgcttgggccgactggacgatgcat

SEQ ID NO: 74980 - DNA, 440 bp, Zea mays
  Clone ID: MRT4577_168386C.1
ggtcgactctagaggataacacttaatggcccatcggtgatggtgtcaatcatgctactgaagatttttttactggcccgtagctgatgctctgctaagttttgttgggtaacatcggtttgaataccgatgaaattaaccaggaaattttgctggttatagatggcggaaaggtataaatgattccaaaaagatgcgccatccttgcgatagtttttcaaaactacttcacactcctggccgtgggcgatcgccgcgcggagtttttactaattgtttattttgttccccttggcggtcttcattgagtggaaaacgacagttttgcccaatcacttcctcccgattaaaaccggtaatagttacaaaaccttgggtagcatagactaccgcattgcctgagcccagggcatcggaggatcaaaatgccgttggagctg

SEQ ID NO: 74981 - DNA, 525 bp, Zea mays
  unsure (1)..(525): unsure at all n locations
  Clone ID: MRT4577_168387C.1
agcggaacaaacgaatattttcttattaatgtagtgggaaccaaagtatttctagcttccctttgtgcgccatggctatcattacaaaatactcgagtcttggtatcagtgtggaactggggacataccactgcacgcatgcaatgccattacatcgatggggaaccccgggccgaaccccaccatgaacccccactcgcagctcccttcctcgtgatcttgctggcgatgggctataacctgatcgaggacaaagatcagagtcgggcccaccatgttgccgtactcgctgaacacctgccggctgggcgccaacttcccgggctctagcctcaaagccgccgtgaagttgtccatgaccttggggccaccccggtgcaccgcccaaaagaggttattccagccaacactaccaatgccgagcggcgacagcgcgtcnatcagacaccgctcgatgttgtcgccgacccccgccgccagctctccaaactcgaggcgggactccatgccgaaattggtgagctc

SEQ ID NO: 74982 - DNA, 629 bp, Zea mays
  Clone ID: MRT4577_168388C.1
ctcgaggccggccacgcatctctttacctgctcgatcttcatatttgttcatttgtctccattcatacgatggacgactcgcctactagggacgagtgtttagctctgccgctgagcatgatcaccctgacttcgagggcgagccacatctccccgcacgacttccatgaacccgcacactcccgcgcgcgcggtcgtgtacgtcagaccgctgccgtggaatgagaacgtggccgccttctggtggagctacgccgcgcagagacagagcgcctggacgctgctgcactccgtaggagggaccaacctctacgtccacaacatcttctggatcaatcacatcgcctggaaggcgtcggacgcctgcgccttgtggatgccgcacaagtgaaactaccactacaacatgctcagctgtgcgagagcacaacgtgtgcggacactacacgcaagactgctgttgcaaatcgcccgccatcagatgcgacctcttgcgtctgcatatacgtccggaggagtgcttcatcacctgcaactacgacccgcacgccctacttccgcgttgccatacccgactacctacctatttacgtagtgccatgagctaccatacgcgtacatatactcta

SEQ ID NO: 74983 - DNA, 642 bp, Zea mays
  Clone ID: MRT4577_168389C.1
ttccccgatcgtttaaatattaatagagctcctgcagagatctggggggggggggggggggagtcccacccccgaccgctactgaacctgaacttgagttctcaccttcccacgttcccccatcctgtccgaacacccgctcggacctagcaacgcccgcgcggacgcagtaaagcgccacccggcacctcgactagcgttaccgagaactgcctacgagtggctgcttcatttttgtataacggcacgtgacagtaccacggctcagcagacactagcacacttgatacggttatgcatgatgcacctgcttgccaaggtacgaggaccatcacttagatacgtaagacctcgacgaaccacgaaacttttcccgtacatcggtaccaagacttggaactgaaaccttacattgacgagacatcgaaccacgcctctacggtaggaggatacgtggagttccaaccgggataccaccgtgagtagtttcagaagggaccggatgtcttaggtcctggtccccttttgttacttcctattaacgggttcctcatctgcggcttcgagatcctagatgaccctccgtttgttcacctataagaaactactgtacgagactcgggttttctcagttctgctaat

SEQ ID NO: 74984 - DNA, 282 bp, Zea mays
  Clone ID: MRT4577_16838C.1
acctcctcggagccgtgcgcgaaggtgcacccaccctaggacgcgcacttgcccgcctagaactattcgcacagcctggtcttgtaatacaccttatctggcggaatgcgggtccagtcacaaaaccacctacatcgcccccgggttctgctgctcccgctcccgctccatctcacgctttctctgctgggactggagctcctttcggcggccctgctgcggagccgacgacctcacgggcagcacgatcacacagtgcggtgcctaccatcgggcaggacc

SEQ ID NO: 74985 - DNA, 271 bp, Zea mays
  unsure (1)..(271): unsure at all n locations
  Clone ID: MRT4577_168390C.1
ctgagacgtgttttatggcctaactctgtggttattctggaaagtttaatatgcccttgagaagaaagtgcattctgcttgtgttagatggagtgttcttttttcccatttccgcttaataagtggaaagtgaagacgaaatgttctgtctatagctggctattaggtttaggtggcttacagagttgctcaagtgttctctttccttgttgatcttgggtctagctctatccatgattganagcagggtattgcagtcagtgattgtact

SEQ ID NO: 74986 - DNA, 277 bp, Zea mays
  Clone ID: MRT4577_168391C.1
attgggggggcccacaaaaattttttggtgggaccccctcccggaaagggaccttggggctcgtcccaacccaaacgggttggtaatccaaacctttccttaaaaaagggaaattacctttttaaaaaggtaaagaatgcccggccctttttttcccatgttttattaaccatttacccacgggccgcccggtgaaatttaaataattcataaaaaaccggcccttgggggtggaaacctttagtggaacaaaataaattttttattttacaagggg

SEQ ID NO: 74987 - DNA, 401 bp, Zea mays
  Clone ID: MRT4577_168392C.1
gaagaaccaacgcagtgagccatctctacctggaaaaaacaatctgagctcatagggtaagccagactacaagctctccatataatgcgggtattgatgcaccggtagtcaatcatgataactcagaagcgctgaagtgaagaccatagaggaagcctaaagctccggtgcatcgagatagcatatcacgcagatctgctggacaaatatgcagagagaccgggtgactccatatgggctcatatttttcttgcccctatcgggggtaaaattattctgtttgggctaatggaacaagagtcgtggacacatcgagatccatactacattggcttcagatgtgcatatccattcattcagtactatgtggctaatataacatgaacaattttatcttcaat

SEQ ID NO: 74988 - DNA, 159 bp, Zea mays
  Clone ID: MRT4577_168393C.1
catgggcggagcgagtgtcccaagaacctgcatgacaggctcgacccatggcgcgtgctcacgtcagatgaggcaatggctgaaatcgcaactggggtcatgacaacgccaaaatttgggaagatatcggtgctggcagagcaaatgctgagaaggggg

SEQ ID NO: 74989 - DNA, 273 bp, Zea mays
  Clone ID: MRT4577_168394C.1
attttccttccctctaccataaaaggtgacggggggctctatcactatgacgctgaggttgtccaaacaagccccgctaacgagcaactttgagtcggggaacacatgcacccctcacacccggataaacacacgaagctcaacgagatccagtccaacacgtcttaaggttttgtatctatctaattagaacacaatgcccactgaagatgtccacgctgccttactccatactgtgatttacaccatcggcgaggatgcatgtccatcaaa

SEQ ID NO: 74990 - DNA, 433 bp, Zea mays
  Clone ID: MRT4577_168395C.1
tcggagcacaaatcctcttcctcgagttctcctcaaccaaattcaaagtcacagcggcgaaactctcggcgatgtctggccgcggcaagggcgggaagggtctgggcaagggcggcgccaagcgccaccgcaaggtgctgcgtgacaacatccgggctcatctacgaggagacccgcggcgtgctcaagatcttcctcgagaacgtcatccgcgacgccgtcacctacaccgagcacgcccgccgcaagactgtgaccgccatggacgttgtctacgctctcaagcgccagggccgcaccctctacggtttcggcggttaggtcgcccctctcccggtggcgaattacgtggtggcggtggcggtcgtgttgtgttcttggtctagttagtctgtgttgtctttatcggtgctgctttctgcgccgcctgcac

SEQ ID NO: 74991 - DNA, 621 bp, Zea mays
  Clone ID: MRT4577_168397C.1
ggccgcttttttttttttttttttgtgtgatgttcttgcgactctaatgacaatacatattgcaccatatgctacatctcaaatggcctgtacatgtacgtgtgtacggtggtgctaatatttagcacgtacagtgaacgcaacagtacttttttttatgactggtggtgatgaggactattgctagctataggtgactagtccacaacatgcacagtaaatggaggtgtgggaagaatatgttccacaaacggaaaggcgatccaacgaaagaagggcaggaggccacgtcggtaataagacgttgatgcagaatctggtgcggattcatcacatatatggtacgtcttggatcggagatctaaacctgctgctgctgctggttagttcatctctatctctcggcatggcagcagaagttttcaatacatgtaattaagcagcaggcatgtgaattcatttcatgatcagaaaaaccccatgagtgcatgcgatagcactgtccgccgtgttcagatttaattaagagctcaaaagtttctagattgtgttctagctagatggattttggtgatacatatagatgctagctttgattgcccggccggcctcgggggtacc

SEQ ID NO: 74992 - DNA, 1741 bp, Zea mays
  Clone ID: MRT4577_16839C.1
gatataataaaaataatataaatgagtaccaatcaatatttcatacataagtgtactcttaatccaaaccaaaacactgaaataatcttgtaattagccaaacaatctttgcaagtgtggaatacaatgtacactagattgatttgcatcttgtcaaaaccagattgttcaagggatacatcggttgccgctgctgcactcctcctgccgatgttccatgactccattcttgctggcctctttctcccaagcatttcaccaaacagttaaagtgcaaatgttagctgtgtgatgactccaactatagaaatcaagcagcgttactactaagaacgccattgtatcttctcggaaggtcattgatataccacaatagttgcatacacaattcactgtaagtcaaaaccagcaaacaaaagtaataaacatgtaaagaaaaggtgaagttgtgtgagggaaagcacttgcttgtaacaaacttacaataatgggaaaaccctgacaccagtcagcatctatatagacttttgaagcattgattattaaaaaatacaagtagtacatttatgtagtacttacattaatgccttttatccctctatatctcacagtatttccagattggttctagtggcatctatatgctaagtgccaagctctcatttgagttacaatgatctcagtttccacaacctgtagatattaaaagaccataaacctgtcggtaaaaaattctatgttgagattaaattttcttccaaaacaaattacgacatcaaatgttatacactatgttaacaacaaaacaattgttctacactaatgaaactcttgataggctgccaattatcaaagcattatttcttacacatatcgtaaggccaaatgattcatctcattatatatagtattgtatatgaaattaatcctccttataatattattatgtaaagaatgttgattaggttagtctcaagaatacaaatctatacaaatataataatgagaaactaatgtagaggaaaaacaaatgccaaacaccagatcagagttgaatcaatgtaatcatgtttttatgtagagatcatcaatcttctagattggtccgctgacatcgcctctcgaagtaggccatcctttgcaccacttggggtcaacctagaccctggccttcgcatctcgatcattagcgtaccggggtgaacaacgtcgtgaccgaggctgcgcaagcgcgacgtgctgctcgacaaccaccaaggtgctgctgcagggagggaaagaacatttgcctgcaccgtggggaacagatcaccagcatccaggaggaacgccatggggagggagcaagggagccaagagggaggaaacaccatgggggttggacgagctgatacgcgcagaggtggaaaaagagggggcgcgagcaggaagatgggcttggccaccaagaagggctgcaggtcgtcgtgtccatggctgaggggaggggcgagctcagcgacggcgtggagaaagggctagagcacaggatgggcgagctcgactggggcgctcggggaagcggtgccaaggccgatgctagggagggcgatgcagcggcgctggccaccggcgaggacgcggccgggtggaggtccgagcaggggacggatgccgtggcaagagctggaggcgagggcctggggatccgagtgagaggatggtgtgctctgctgctgggcggagagggcggctggaagat

SEQ ID NO: 74993 - DNA, 469 bp, Zea mays
  unsure (1)..(469): unsure at all n locations
  Clone ID: MRT4577_1683C.1
ttcgccctttnnttttnnnnttttttttttctttcccccnnnnnnnnnnnnnnngggnnttgttaacagaaacaacgacagggcaangcccaagccggacacagaanncccccaacacagggagaagaaaaaannccccacacaaacaaggacaggctncgggnaacccagaacggggggggaaccaaacaccggcggnaacaanaaccagggggaaccaaacaacaacacccaaaggacaggccagcacggcgaaggaaagcgccgnngagagggcacacaacgaaggagcccagggaaaaaaacaacgcaacccccaaccgaacggccaaaggcgagggggccgggnnccagaaacaaaagcggcgccaccggactcagcgagaactcatcactgatctttgcggcaaagtccttattaaccttcatcctagcgcacaactttgggacggagaaaggctttgctact

SEQ ID NO: 74994 - DNA, 284 bp, Zea mays
  Clone ID: MRT4577_168400C.1
ataaaaaaaaccacttttttttttcctacccctaaaacccatcaaattaaattaatgaagccccctttaacaattaacaaaacccattaactagcaaggtttttttcaaaaacacttgcccatggccacctccccttttcactccccaccggaaaaatttttttttattcacaccttgggccattttttgcttttaaaacaaaaaccctctaactggaaacttcgagaaaaaaattgacttttttccttttccgggcttttttccccctttttttccggatcct

SEQ ID NO: 74995 - DNA, 271 bp, Zea mays
  Clone ID: MRT4577_168401C.1
gcattcaaacgttgtttctaatattacttgttgggggaggcccaaaccgaaggcttacattttccacaccgcaaaaaggtaaccgtccctttcacacacggtgttgaccacaccatgctaaacatctgtcccatttttgctaaccgcgtttctgttaacaatgtggcctaaaataaaacccgcacacactgggcgccgcccacccccccctgatagcaccttgataacgccatgaggttccggccgtcaaagctggaaccgcaattaaatt

SEQ ID NO: 74996 - DNA, 731 bp, Zea mays
  Clone ID: MRT4577_168404C.1
ggccgcttttttttttttttgttggccaagataactaagtatatactttcaatcaattgtacagaaaaccaaacagtatcattaatctctaaccaaaatcctaagtagtggctctgaacaaattcctagacttctgatgggtagtagctctaaagccgaatccttcgtagcctcataaaaacattagatatcgaccaaagatcaggatttgatcacaagtggcactacagtagccaaacagatgaatatcaaatcctcggctaatggctgtggattgtgccattggaatgcgatgtaaagccatcatgcagaacatccaactcatcagcttccaacaagaaaccattctcaaagaacgcggagtggagggcttgaacacactgttttgcctcactgtcatggaccaccaaggaaatgttcaccttggacgccccttgcgatatcatctggacattgacaccgtttcttcgtagaacattgaaagccttttcaagaatcaaagacgacctctgcacatttccaattaaagatattattgacctgttctgcagtagatgaacaactgctatcttctcaagctcttcaataacatcatcaagttcatttttgtgctgaaccaattcacaactccatagtttcgatggatccagtgtcaaagatatgctgacttcaccggtagcgtgggaatcaacagagatgcccaagtcttcaaatatcgaaaaaaccttagc

SEQ ID NO: 74997 - DNA, 487 bp, Zea mays
  Clone ID: MRT4577_168405C.1
cccacgcgtccgcccacgcgtccgggctcaccacaccaaccaacaagcaaaaattccccaatcctatcgtctacgcggcgaaaatgtcagggcgcggccagggcgggaagggcctgggcaagggtcggcgcgaagcgtcaccggaaggtgctgcgcgacaacatccagcggatcacgaagccggcgatccggatgctgtcgcggcggggctggcgtgaaacgcatctcgaggctcatctacgaggagacccgcagcgtgctcaagatctttactggagaacatcatgcgcgacgccgtcacctacaccgagcacgcgcgccgtaagaccgtcaccggcatggacgtcgactacacgcttaagcgccacggccgcaccctctacagattaaggggctaggcctgccgcgccgcgctttgccgtacctgcggttctggtgttgctgcagttcgcaagttgcatgtgtgggcggaaaaatgctagatact

SEQ ID NO: 74998 - DNA, 2385 bp, Zea mays
  Clone ID: MRT4577_168406C.1
ctcgagccgaatactctcctccgcggctctgccgtccgttctcctctcgccgccgccggccgcgcctccaccctcgcggcactcgcatggcggcgccggctctccgtatcactgcgcggctgggacttgcacttgacggtgccaccgccgcgagacggcgcgaggcctcggcgcctgtggcggtgccggccgcgccgtggctgaagaaggcggcggtccggtgtcagcgagccgtcggtgccgctgttgccgagaagaaggatgcgccggtatcggttgcgcaggagagaagcggcgacgggggcgcggcgccggagctcaccgtcgtgatgaagttcggcgggtcgtcagtggcctcggccgagcggatgcgggaggtggcagacctcatcctcagcttccccgaggagcacccggtcgtcgtgctctcagcgatgggaaagaccaccaacaaactcctcatggctggggaaaaggcagtgggctgtggtgcgaccaaggcgtccgaaatccctgagctcgctgtcatcaaggacctgcatcttaggacggttgatgagctcggtttagataggtcgattgtttgaggtttattggatgaactggagcaacttcttaaaggaattgctatgatgaaagagctgacccttaggacaagagattaccttgtttcctttggtgaatgtatgtcgacaagaatatttgctgcacatttaaacaaacttgggaaaaaagcacggcagtatgatgcatttgatattggctttataaccaccgatgatttcacaaatgcggatattcttgaagccacttaccctgctgttgcgaagaggctacatgtagactggatgaatgaccctgctattcctatagtcactggttttcttgggaagggatggagatcatgtgctgatcactactttaggcaggggtggtagtgacttgacagctacaaccattggcaaagcctttggtactaagagaattccggagttggaagggtgttcatgttgtgatgacttgtgattctaaaatatttgcaaatgctatacccgtgccctacttgacttttgatgaggctgctgagcttgcctactttggtgcacaggttttgcatccccagtcaatgcgaccggctagggatggtgatattccagtgagagtaaagaactcatacaatcgtcatgcacctggtactgtcatcactaaatccagagatatgagcaagagcatattgactagcattgtgttgaaatctaatgttaccatgctggatatagtgagcacaaggatgcttggccaatacgggtttttagcaaaggtattctcaatatttgaagatttgggcatctctgttgactgtgtggctactagtgaagtcagcatctcgttgactctagatccatcaaaactatggagtcgtgaattgatccagcaggaacttgatcatgtcgttgaagagcttaaaaaatttgcagttgttcatctgctgcaacgtagatcgatcatctcactgatagggaatgtacagcgatcgtcattgattcttgaaaaggcattcaacgttctgcgaagaaatggtgttaatgtccagatgatctcacaaggggcgtccaaggtgaacatttccttggtagtcaatgacagtgaggcaaaacagtgcgtacaagccctccattcagcgttctttgagaatggcttcttgtcggaggtagagggagctgaagttccccagaacggagcctctctgaactcaaatggcgctgtctatggaaactagtcgactctgcaactgctttcttcagaatttgtgtaccattggtaggttgaatggtggtgattcatagctatttatttagggcatcagtcatgttggtgcaaattttcttgatgtgttaagagcttactaccagaacagtctgcatggtagaacagtctgcatggtataccgtgcgattgggtgctaccaagtagtagccattgtcaatgtcttggggatttgccacatgtttaaggcatacccaggcttatatgtatctgagttgtattgtatgtgagaactattaagataattgcttgcaccctttgggtggtgatttagactgaactcggtggatggtccattatcatgcaagcgaatgtggtcttctgtttctgtttggcagctgtagtgccacttgtgatcaaatcctgatctttggtcgatatctaatgtttttatgaggctacgaaggattcggctttagagctacaacccatcagaagtctaggaatttgttcagagccactacttaggattttggttagagattaatgatactgtttggttttctgtacaattgattgaaagtatatacttagttatcttggccagccaaggagaaa

SEQ ID NO: 74999 - DNA, 267 bp, Zea mays
  Clone ID: MRT4577_16840C.1
aaaaaaaaaaaaaaataaaaaaaaaatataaaaaaaaaataaataccgcacaaataaaataaggcggagattacatacactgtgatgcgacctaaaatcactccactagccatccctaaacaaaatccactctccgaaaacctacaccttactcaatttaacccccctgccgtacacccccctattccccgctggcaaaatcccccatttgccagctcccttcatccttaccaacacttgcccattctgactttccaacagtacccc

SEQ ID NO: 75000 - DNA, 848 bp, Zea mays
  Clone ID: MRT4577_168410C.1
cgccgctccgtggcagaacggagagcgcaaggtcgacggaggagggcccggctccaacagccggcaggtcgcgccggacgacaccggcatcgtcggaagcgtcggcgacggtagtagcagagacgagactttctatgaagccaccgcctggttggaattagactgcgaagatgatttctacagcgtcaacggaggtaaactgaatccccaaccaaaagatctgacgcctgcgagatcgttcgcatcccgaaccagtggccggaacactccgacacctagaccccgcgatctaccgacgctggcggcgatcctcaaggccgaacccctgctgccgccggagacgcaggccccgactgcggacccgcaaaggaggctgggcgacctcctgcgggaggcgcaagacgtcgacgacgacgacaatgacaccggcgtcgacggcctctcgagagacgactccttgcgcatgggcgcggaggccaaccggtgctgcgtgccgcggctcgcgcgggccattagctgcaacgggaggacgcagcgcaagtgaagtgttgtaaatccgtgccttgttcaacagacaagtaagaaaagatttgccgcccaaatgtgtttgtacatagaccaaatgactgcaccggaacagtaaaaagaaaatgatttgatgcctgtatcacgtagattaaaggatttgatgcctgcttccagccggacagatgctacagggaaactcacccggatgaaaagaacattatttggatgtttgagcacgggaatatgaaaaaagaacacagaaaaaggggaaggaatagggtgacaaaccagatgattgaagaacacagaaaagtaataag

SEQ ID NO: 75001 - DNA, 417 bp, Zea mays
  Clone ID: MRT4577_168411C.1
tttaaattaaaggattgggacaaaatgaaggtttcttccgcggtcagtaagaaaaaaaaggttccttcaattgtctcttttgatgaggaatagaaacatagttagtatggagcttgtatcttgttgtccgttgctggtaaaacgtgttgagatgggtgtatgtgtattcaaattatcaattccacacctcactcacccttttctggagattttttttggttgcattgcatttgttctaaatctaaagaaaataggcatcctttattatactgagcattagcgagggatgtgaacaaaacaccagtatttagaactttaaagggtggtccttgtgatgtgtccaccatttttatccaatgttggtcgttgcctaccatcaaattgtactccttttcaaaaaaaaaaaaaaaaagaaaa

SEQ ID NO: 75002 - DNA, 397 bp, Zea mays
  Clone ID: MRT4577_168412C.1
atgttgagcattcagagacacaccaagcgaagctacctagcgacgacttagcagcaagggctaccgagatgtttgccttccttgggcttcgtgctgttagagcgagcgccacaaatgcagccattattccacagtgctcactagctcctagtgccgtgatacgacagtgtgcttcgaccagttacatcaatgggctgtgaacacctagctgagcgagcctacaggatacagcacgctcttgcggagtgcgttttacatcagccgatcaaccaacatggagatcacatggttggcacatgtaaccatacaaaccataagaacgcaacagtggccattgttattaccagcactgagccaacttgatgtgttgaaccctgccacctacttgcgacagcag

SEQ ID NO: 75003 - DNA, 199 bp, Zea mays
  Clone ID: MRT4577_168413C.1
ggaaaaaccgaacgaaactgacatggagggtggtggtcttgactatcacgggtggcctctaagggggcaccatggcccagaagctggacatcgccggcatgaagtttacctcgcgcactttcgccttcgcgacaaccaaactggtgccggcgtgtaccttcgttatcgtcctcatcttccactacgagaagtacggcat

SEQ ID NO: 75004 - DNA, 297 bp, Zea mays
  Clone ID: MRT4577_168414C.1
aaaaaaaaataaaaaaaaaaaaaaaaaaaaaaaaaaaaaaaaaaataaaaaaaaaaaaaacaaaaaaacaccggggaaaattaaatgggggggctgattgcaaatgctcgccctttctaattaatccacccttacttccccttccatgccactttatatctttttttttcaacaccactaacaacatgtactatgccacaccattctacggcggatctggatatccctccccctcccccctcaaacatctttcgctcaattccccttttctcacccttgtatattactaccccaaaa

SEQ ID NO: 75005 - DNA, 308 bp, Zea mays
  Clone ID: MRT4577_168415C.1
gggcccaattggtggaaacaacctaataaccctgaagtttgtttggccaacaaactgaaacctttgttgcaaccacaggtgggcaattttacaaacttattttagggggggaccttaataacttatacaatggtttttttcttcaaaaaattttaccgttaccaaaataatttggcgcaaattttttttggggggactgtggactggggttttttcattggaattgggggggcccagtttctttaagggaaacgaagcgaatttttttcagtttttgggtggggccattttctttttaataagctttt

SEQ ID NO: 75006 - DNA, 276 bp, Zea mays
  Clone ID: MRT4577_168416C.1
attcggctcgagcaggactttccactcccgtctgtggtgcacgagcaccaaccccttaagatggggtttttcaacaaccctggaggggctgtgaccctcctctgggtccggtttgtgcctaggattggtgacatcgtgctcgcgtccgtggagggtacccttgacttcacatacggtcacttcttatgacatgatctcgccaattacccttagaccgtggtgctattggactcgcattataagaccgtacatttgtcaagcgtcatgggcttcatc

SEQ ID NO: 75007 - DNA, 185 bp, Zea mays
  Clone ID: MRT4577_168417C.1
gaactgcccaatctactggttatacgaggcaccaggcagaggcttgtacatatttgatacaaaggactgctctgtgagcatcgtatgcatgaacagattggactcatcttcggaggtaatggaagaaactttaagctgctaaagctacactgttacctgcaaaagagtataatcattatgtagaa

SEQ ID NO: 75008 - DNA, 183 bp, Zea mays
  Clone ID: MRT4577_168418C.1
gggacccctcgagccggccgggccgggactcactaacggccgatcgcgaccctcgctccgcccccacacggccacgcaccgaaactgccccgcccccgcagaacaatcgtctttcccgcgccacctcggggacgtcccggcccgcgttatccgtaacaaccgagatgccagccgcatgcctgc

SEQ ID NO: 75009 - DNA, 593 bp, Zea mays
  unsure (1)..(593): unsure at all n locations
  Clone ID: MRT4577_168419C.1
ggccgcttttttttttttttttttaaggctcaacaggcgcaccaaccgtgccacgcttttcttgcaaacaacccctactgagagcaagccaagatgcacagcggtaggtaggggcataatactaaggacataatattgcaccaaacacggccctactgaattttgtcattacgcctagcactatgatcaaacttaagaccatgcagagaacataaatgaatgtaacgattagtaggccccatctccagcaatatgtgaataccaccgacccattatactttatgtactcaacaacacatactcgcaggaccttaaggtcgctccagcaaaactagaaaggaccctccctacactcagtcaacgaaaccgcttattctgggtccaacacagcattgagaccgttgatgcatgatcgagatgtaaaacacagataattactggtcaaaaggaggtggatgctgctcaccggatgtgtgatcaatatcaaccaccttgacactntgggtcatcaacgcttcacagcctcaccacaactaggaggatggattgttaccaatgcccacatgaacatgacctcagagagaaccacttta

SEQ ID NO: 75010 - DNA, 1890 bp, Zea mays
  Clone ID: MRT4577_16841C.1
catcttcaagccagccgtctccttatccctgcgacgccgctcacctaggctcatcttccagccgccctctccacccagcagcagagcacaccatcctctccactcggatccccaagccctcgcctccatctcttgccacgacatctgtcccctgctcgaacctccacccggccgcgtcctcgccggtggccagcgccgctgcatcgcccttcctagcgtcggccttggcaccgcttccccgagagcactagtcgagctcgcccatcctctgctctagccctttctccacgccgtagctgatctcgcccctctcctcagccatggacacgacgacctgcagcccttcttggtggccaagcccatcttcctgctcgcgccccctctttttccacctctgcgcgtatcagctcgtccaacccccatggtgtttcctccctctcggctcccttgctccctccccatggcgttccccctagatgctcgtgatctgttccccacggtgcaggcaaatgttctttccctccctgcagcagcaccttggtggttgtcgagcagcacgtcgcgcttgcgcagcctcggtcacgacgttgttcaccccgctaaccattggtgtcatacctcacgtgtcatgtgttcgccgaaatgcctaaacatgtagtctgtcgtcgttgtatccacagtcaattttagtcatggtacgctaatgatcgagatgcgaaggccagggtctaggttgaccccaagtggtgcaaaggatggcctacttcgagaggcgatgtcagcggaccaatctagaagattgatgatctctacataaaaataggattacattgattcaaatctgatctggtgtttggcatttgttttccccctacattagtttctcattattatatttgtatagattcatattcttgagactaacctaatcagcattctttacataataatattataaggaggattaatttcatatacaatactatatataatgagatgaatcatttggccttagatagataattggcagcctatcaaaaatttcataagtgtagaacaatttttttgccgttaacatagtgtataacatttgatgtcgtaatttgtttggaagaaaatttaatttcaacatagaattttttaccgataggtttatggtcttttaatatctacaggttgtggaaactgagatcattgtaactcaaatgagagcttggcacttagcatatagatgccactagaaccaatttggaattactgtgaggaaaaacggatatagagtgataaaaggcattaatgtaagtactacataaatgtactacttgtatttttcaataatcaatgcttcaaaagtctatatatatgctgactggtgtcagggttttcccattattgtaagtttgttacaagcaagtgctttccctcacacaacttcaccttttctttgcatgtttattacttttgtttgctggttttgacttacagcgaattgtgtatgcaactactgtggcatatcagtgaccttccgagaagatacaatggcgtttttagtagtaacgctgcttgatttctatagttggagtcatcacacagctaacatttgcacttgaactgtttagtgaaatgcttaggagaaagaggccagcaagaatggagtcatggaacatcggcagaaggagtgcagcagcggcaaccgatgtatcccttgaacaatctggttttgacaagatgcaaatcaatctagtgtacactggattccacacttgcaaagattgtttggctaattacaagattatctcattgttttggtttggattaagagtacacttatgtatgaaatattgattggtactcatttatattattttttattatattattattaaatat

SEQ ID NO: 75011 - DNA, 478 bp, Zea mays
  Clone ID: MRT4577_168420C.1
ttcactcatcgatagatagagcatagtcgatcatgaagggagtgaagaaggaagtggccgcggcggcggtggccatactgatgactgtgcagctcatgccagatccaccgacggccatgaccgcccgctcgacgagcgtaaccgtgtccgatgtctccctcgacacgacgacctaggtgaccatgatgacggccacgttgtgctacacgggagcagacatgccaatacactccactggttcactcctgcttgctcctgcagttttaaagatcgcctctgctaccccgatatatactactctgttgcattgagttgcaggccattaccgcgaagccacaactcttacatgcatgcgccggatcgaccactacacacactgcctctcgcgagctactggtccagcgatgactgttgcaacgcatccatggatgctatacgtatatgcggattaaataaccgagtccagaaaccgatacag

SEQ ID NO: 75012 - DNA, 563 bp, Zea mays
  Clone ID: MRT4577_168421C.1
tagtcggcacgaggctccggcggtgcagtgaatgaaccaaacagcgcactacacgaacacaccacgaaggactgctacacccccgccttacttctgcctgttccgcccgtacgaggtaatccatccaatcgccaaaagctttgctaaagagcacatgctctcacctagagttgcccctactgggacgaggccacgatctattcctaaaagaacccacagaatcctgactgatctgatggtggttaactgcgttttgccttctgccttaacaagactgtacgaaacgatgcgctaatacccacacacatctacagggaagttttttagcactggcctggggctctggacttcaacccccaccacttgagctgctgcaactggcctctcatgattggggtgcccggagccagtactcttgaaatgctaaccgccggagttcgctaccagagcggccaatgcgctgacatagctgcactagaggagccgagctcacagtgaggaacgatacaccgtcttaggtgcctcactaggtatccgcgtggatggaacgagagattgacact

SEQ ID NO: 75013 - DNA, 229 bp, Zea mays
  Clone ID: MRT4577_168422C.1
aaatttcaacgtgttatgagcaaaacaccagaattgccattttgcacgctaactactcatttctttgctaattatgctcttacttgaaaattatctacatttatatgtccacgataatattcacatggacctttcaaacatgtcatacagttatactacactcatacattgattatacttgtgatataacataattaagttaaaatgaccattactaaaatgcgtccaa

SEQ ID NO: 75014 - DNA, 439 bp, Zea mays
  Clone ID: MRT4577_168423C.1
aacctctcttcatgtcgtgggcatgccgcatgcagtaaaccacaattcttcaatccctacagcgatcaccaggacagacagagctggcagtgctcccttctatgacgcgttgttcctgcagcacgcattcatgccctatgtacaacagagacctttgaagcatttattgtgacgcaatatcaggacacagccactactacaacgcagcgctatcaaaccttgctgactactgtgagtgtctgcagattgttccattgctcacactagctagcttgatctctgcttcttatttgcgacgacgacaatctaccatgtcagccagctgtctgctgcctacccacagcaatatattgcattcaaccaactgacagcttttaactctactgcttatttacaggatgcacatctactaccatgctaacagctagctggtgcgagc

SEQ ID NO: 75015 - DNA, 1792 bp, Zea mays
  Clone ID: MRT4577_168424C.1
ataatacaatggtatcctgagccgccgggaatttaggccatctagggctattagaaaacgtgcaaggcttctttcctcccaaatcccctctgagcaagggcgccgtcggctagcgccgcagcgcattgccgtcgacgccgaccctctccggcagccgcttgcagcgcgtcccttccccgctcccggcgccatggactgcgcaaaggggagggcggtggcggacctctacaacgagctgatggtggagatcttctcgcgcgtgcccgtcaaagacctccgccgttgcacgtgcgtgtgcaaatcttggcgcaacctcatcaccgaccccctcaaccgcaagaagctgccccagaccctggaaggcttcttccacggcgtcgtcggagggcctcacagctacggccaattcaccagcctgtcggggagcggagaacgcgtgcctccggtcgacccttccttctccttcatcacggcaatgctgcctggcgtggagcgcatggtcctcttggattcttgcaacgggctcctgctctttgggtgcacccgggaggacaagttcgggtacatcgtgacaaaccctgcgaccaaggaattgatgactgtgcccgccagctccggctcttgtcctcctccacctccatttgaaagggacatggatgctggggaaagatacgcgcacacctttctgatgattaaccctgctgtctcctcgcacttccacttggtccagatctgggagaataaggcggtgaaggaggtggaaacggtacactcttactcgtctgaaaccaaggcatggagtgacaggtcaagcaagtgggggcgaggtgaaaagggcggtgaatgggagctgtggggtgaatccgtgattggagtcatgtgtggctggacattggtcgatggtctgctgcattttcttgccttcgatcttcagaaagaagagactgtgataattgcagtggatggggaaggggaaactcgtaggatcatcggctggcatggtaaggatgtgagagcaattgtttttattggtgaatcccaagaccatctacactgcatcggtgtgaatgtgcaattagatcaaggctcccaagtgcgcttcacgcaaatgtcgatctgggttcttgaggactatgatacagaagcatggatcctaaagcacaatgtgagctcttcgcagttctttgaattactgagtcacccaatcaaagacttccatattgtggccattcatccagatcacaattcgttcatccttgttcagcactggaaccagaaactggtatcatataacatggatactcaggaactgcatggtctctgcactcttggaaagggctatgtgattattaccccatatgttccctgtttcttggagtcatcggttcttgccaccaaacactgaggttgttgtttctggggacttctctgcatgttcaacaagagcctgatcatccaagtgtggggcaaggtgatctagtatgatggtgctttaatgtccttttgtaatgctttgagaaagctgtttacagggcaacatggttagttccatgatatatcagtgagaaagctgtttacaggacagcatggttagttctatgatatatcaaattagatcacacttaattgctggccaatataggtattagcttcgattttttgttgtgattattcaatattgaatgcgcacctatggtattaccctgtgtgttcagcttgttggcttttcccctctgttttcttttcttcttaatataatactccctccgctctaaaaaaaaaaaaaaaaaaa

SEQ ID NO: 75016 - DNA, 1772 bp, Zea mays
  unsure (1)..(1772): unsure at all n locations
  Clone ID: MRT4577_168425C.1
ttgggtacctcgaggccggccgggctccagaatcccccatctgagcaagggcgccgccgccgtcggctagcgccgcagcattgacgtggacgccgaccctctccggcagccgcttgcagcgcgtcccttccccgctcccgcggcatggactgcgcaaagaggagggcggtggcggacctccatgacgagctgatggtggagatcttctcgcgcgtgcccgtcaaagacctccgccgttgcacgtgcgtgtgcaaatcttggtgcaacatcatcaccgaccccctcaacggcaagaagctgccccagaccctggaaggcttcttccaaggcggcgtcggagggcctcacaactacggccaattcaccagcctgtcggggagcggagaacgcgtgcctccggtcgacccttccttctccttcatcacggcaatgctgcctggcgtggagcacatggtcctcttggattcttgcaacgggctcctgctctttgggtgcacccgggaggacaagttcgggtacatcgtgacaaaccctgcgaccgaggaattgatgactgtgcccaccagctcctgctcttgtcctcctccaccttcggttggtggggaaagatatgcgcacacctttctgatgtttaaccctgctgtctcctcgcacttccacttggtccagatctgggaggataatgcggtgaaggaggtggaaacggtacactcttactcgtctgaaaccaaggcatggagtgacaggtcaagcaagtgggggcgaggtgaagagggcggtgaatggaagctgtggggtgaatccgtgattggattcatgtgtggctgggctttggtcgatggtctgctgcattttcttgtcttcgatcttcagaaacaagagaatgtgataattgcagtggatggggaagggaaaacttgtaggatcatcggctggcatggtaaagatgtggaagcaattgtttttattggtcaatcccaagaccatctacactagcatcggtgtngaatgtgcaanttagatctagcgcttcacgcggatgtctatctgggttcttgaggactatgatacacaagcatggatcctaaagcacaatgtgagctctttgcagttctttgaattactgagtcacccaatcaaagacttcgatattatggccattcatccagatcacaattcgttcatccttgttcagcactggaaccagaaacttgtatcatataacatggatactcaggaactgcgtggtctctgcactcttgaaaagggctatgtggttattaccccttacataccctgtttcttggagtcatcggttcttgccaccaaacactgaggttgttgtttctgggggacttctctgcatgttcaacaagagcttgatcatccaagtgtttggcaaactagcagtgtgggtaaatctactagaattaggtggtgcaaagttggattacatgtctttaggtgatctagtctgatgatgctttaatgtcctttcgtaatgctttgagaaagctgtttacaggacaacatggttagttccatgatatatcagtgagaaagctgtttacaggacagcatggttagttctatgatatatcaaattagatcacacttaattgctggccaatataggtattagcttcggtttatattgtgattattcaatattgaatgcacacctatggtattaccctatgtgttcagcttgttggcttttcccctctgtttttttttcttcttaatataatacttcctctgctccaatttat

SEQ ID NO: 75017 - DNA, 387 bp, Zea mays
  Clone ID: MRT4577_168426C.1
tatgtataagaggacgaagaggacgacgacggttcctcccgtctgaaggccgcccaccttggaggcgccgccgctccccaccttggaggcgccgccgggaccggggcccatggagctggacgccccacctcctgccgccgccgtggcgattcctcccgccggcagcgacaagcacaagggcttcgagaggatgaagttcgcacgtgctggatctgaaccgctcgcaaaaatccagatgcatcattcgaagatgaatcctaggattatgcggatgggtcatcgaaggtatgatcctcaaatccatggaaaatccatggagatttgattccttcctggatcacgccaccccggggtgatgttgtcttgcctcaatttcgggaatctagg

SEQ ID NO: 75018 - DNA, 902 bp, Zea mays
  Clone ID: MRT4577_168427C.1
gaaaaaggcactacgccaaaaaaaaaaaaaaacattccaatatcccaaaggtctcatagagcaaagatgattatttgctcgttccgtttttttcttagaacatttataaaacgcaaaaaagaaagggaccccagcacatttatgccattgaatgtgctcaaggcttctttcctccagaatcccccatctgagcaagggcgccgtcggctagcgccgcagcattgacgtggacgccgaccctttccggcagccggttagttccgcgttcgccgcatttcgcactccccgtctttcgtgctcatccatcccgaacatcaccttcccaactcacagcttgcagcgcgtcccttccccgctcccgcggcatggactgcgcaaagaggagggcggtggcggacctccacaacgagctgatggtggagatcttctcgcgcgtgcccgtcaaagacctccgccgttgcacgtgcgtgtgcaaatcttggcgcaacctcatcaccgaccccctctaccgcaagaagctgccccagaccctggaaggcttcttccacggcggcgtcggagggcctcacagctacggccaattcaccagcctgtcggggagcggagaacgcgtgcctccggtcgacccttccttctccttcatcacggcaatgctgcctggcgtggagcacatggtcctcttggattcttgcaacgggctcctgctctttgggtgcacccgggaggacaagttcgggtacatcgtgtcaaaccctgcgaccaagaaattgttgactgtgcccgccagctccggctcttgtccgcctccacctttatttgcatttgaagcggaagtcgatgattatagtggggaaaaatatgcacacacctttctgatggttaacccggctgtgtcctgggac

SEQ ID NO: 75019 - DNA, 671 bp, Zea mays
  unsure (1)..(671): unsure at all n locations
  Clone ID: MRT4577_168428C.1
cacgaggtcaagaacctgtacgaggagaggaaagaacctggaagagaggagcttgaggagatggcgagcgccgagggcgagaggtgggtgggactggcgacggacttctcgcaggggagccgagaggcgctgcagtgggcggcgaccaacctgctccgcgccggcgaccacctgctgctgctgcacgtcatcaaggagcccgactacgagcagagcgaggccatcctctgggaatccaccggctcccgtacgcaccctttctccaatctccaccaccgcctcctcctaccctttgctatgcttggttcttgcaattgaaattcctagggtgctagtgctactgctactcctaggtggctaggtcctagctaggagctagccgttcctcaactttgtggctaacctgttttccctcccacaaacactagcgctagcatttgcggccattaaagatccgcaaaccctaggatacttggcacttgctgctccatgatccatgccgtgcataggtgtatgacatgtacaaggcgattgattggaacgactgatcttgcccatcaatctgcgcgcactggttatgattcctggctacttgccttaaggcatgtacaacctgagnatcagtataagtacaaaagacagttaaaagactgtacgatataaccttaact

SEQ ID NO: 75020 - DNA, 275 bp, Zea mays
  Clone ID: MRT4577_168429C.1
gcgaccatctcagagagtgcgttcagaagatccttgctgcctcaaaggcaaagaagcgcggatttgtggagtcgattgaactccaggtttcattgaagaactacgacccgcagaaggacaagcgtttctcaggaacataacgtcttccgccaccgactcgcaagatgagatgtgcattctgggcgacgtttcacgttgacatggcgaagaaggaaggattggcatggatggatgtggagatgctcaagaagctcaacaaggacaagaagctggtc

SEQ ID NO: 75021 - DNA, 276 bp, Zea mays
  Clone ID: MRT4577_16842C.1
ttgggtacctcgaggcggcgggccagcctgcagccaacgtggagttctggaaggctgtggtctccctatctagctacatgtctggagacgaagagtcagccgcgaggcaacgagccgagccgtcaagctcatcgcagaccacgagccatggcctccaccaacagctggactgttgagatcgcctcgcctgtcgccgcgccgcgcctcttccgcgccgccgcgacggactgctgccccccggcccccgtcctctcctcccccctccccctccccgcc

SEQ ID NO: 75022 - DNA, 551 bp, Zea mays
  Clone ID: MRT4577_168434C.1
ccggccgggagcgcaccgaatgattcagaattcagctacccgggagctgcggaacaccggcgcccacggcccacgagatctccggacgaaggcggaacctggagaagacatgcgcggagagatgagatgagagagcgagaagatccacctctacgacggcaccatggggcctctacatgcgtcgactggtagatagcgctgactattcaacataatgtcgctgatcctgctctggctcactctgcttcgacgcatcccgcttcgccactgatgcctacgaaagtcgacactgaaggcacggagtgtccaaggagccaattacggcatgtcaattggcatgccctccatcctacagccttcagacgcaaaacacataagcagcacaagctgctatctctggaatctgagctgggttccgacaagctgcacagatgtggatgatgcagcccccatatgtaacatgctcaagattattctttatgttacatagcacttagtgtaactgtgtgaactaatgattgagcgcacgatatcacatcctgagatctact

SEQ ID NO: 75023 - DNA, 654 bp, Zea mays
  Clone ID: MRT4577_168435C.1
ggtctcgagtcgcgcgcacgaccccgacgccggcccctgcgcgcgttactatcccgacgccgcgattcccgcgcgcgagccgaagattaataccgcacgcccgtttggaatctcgcgtcatggagcttaattccgtccgttccctctcccattaactctcctagtgaagaacgccattgatggtccatgaagaaccagcgacctctcctctccctcctgctctctataaaaggcagcagagcctccccattcctacctactcgagtttgcctctctctctagcactcctcgctcatcgctagtgccgttgctgttcgtcgccggagttcacggagcccgtagttcgccggagtgtgtcgtttgtcgccggagttcaccggagccacgcactcgccgtccgtagtcgagccttgctctccgtccggccgaaacccgtcgatccatccccgtcacacgcacgaacccgaggttgatgacgacccaattttatttcatgtattttataaagtgctttttgattcgattcatgagttgtatattttgtttgttgtaatatgaacgcatgtgattccgatttatgtatatgtgtgtgttatggaatttattagagacatgcgattaggaaaaaaaaaaaaaaaaaaggcccctagggcc

SEQ ID NO: 75024 - DNA, 131 bp, Zea mays
  Clone ID: MRT4577_168437C.1
ccacctattttcattaaacctctctatctgccagttcctacctctctatagggtggacaggcgtattgcttatttaatgctggctgttttaagaacctgaaatggacaaaggaattcaatcaagtgtttac

SEQ ID NO: 75025 - DNA, 268 bp, Zea mays
  Clone ID: MRT4577_16843C.1
ctccgagagggccctgtgttattagcccccagcaacctcaaatgaccgcgggggggtcgactctaacgaccaggcccggaggctgcgctgataaaagaaggcaccattgaatacctgtctgcctacccggtgatggatccaagtcaacggatccctcctctccgaccctctttgtggcacatgggtgtggaatgctgactatgaagctcaatgtgcaccggaggggacaacatcaacttgcattgcaaaaagccccacgacctgaaag

SEQ ID NO: 75026 - DNA, 325 bp, Zea mays
  Clone ID: MRT4577_168440C.1
ccttggaaacgaaagatgttatacagcccgttgttccaaacgattttaatcaattttccccctcacgcgtagacgctaactttttgaaccagtcctagtaagggcccaaagggtaccccaagtttgggggctggtttggggcccagtgaattgaaccccatgacccccttaaatttacggattagttgggcacccccattttttaaagagattttttttttttaggggaaaataaactttttttttttgaaaaaataggaaccccctgtaaaaagggggtggccaaactagcctaaaacaataaattatcccaggggacccgtgg

SEQ ID NO: 75027 - DNA, 166 bp, Zea mays
  Clone ID: MRT4577_168444C.1
acactaaaaatatgcctttagggggcgtgatatagttatacgtgctctgaacaaacacaggggttcatcgcgctttatatacccttaagttccaaaaatataatgcgggcggcacacagtgttataagatttgtccttgcacacatactttggaacagaaacttgc

SEQ ID NO: 75028 - DNA, 381 bp, Zea mays
  Clone ID: MRT4577_168445C.1
atggccgagattagatctgcggccgagggcgcgcgggcgggcgggcgagcgctgacaggcgggctagggggtgtcagcgacagagggggagggcgcactgaccgagcgggccgagcgccagggaacatgggcaggcgggccaggggcgtagagcgcgcgtacgcgaagcggtatccgcgatctgggtcgtgcgatcaagatcagacgcgggagatcagaccagggagggacgaacggctgcaggcggcgctgctcctctccgcggcggtgaggtcactggagttgaggcaggcatgtgctaggggggttctggggtcgccgggattgggcagagagggagagaatgccacgacgaactcaatggcggaaaaaaggccatga

SEQ ID NO: 75029 - DNA, 529 bp, Zea mays
  Clone ID: MRT4577_168446C.1
ccgggggggacccagagaaaggaaaacaaggaaaaagcaagagccgaaagacgacgacaggagcgagaaccgaaacgccaccaggcaagggagacacggcaagcacggccggaagacaagggacaacagcgcggacaccgcgggcgaggccccgaggacaggcggcacggcgggcaagaagcagcaaccagcagaggcgggaacgcccgggcacggggacgacgggcgccagaaaccggcccgccgggccgaacagggcgccagaaagcggaccacagaggcaaagagggacgacaggagggcaaccacagggtggcaacgaacaccaggagacaagaccaaaaaagcaagagcgggaggagaaacaaggccaagggcaaatgcggggagacgcaaggggaccaggacgacgagacgcccggccgcacagggataaagggcgcagagagggacgagtacaagaagaggaacaagaccgggaccgaggggaacggcaacaaccgcgacaacccgagaccgaacaacgcga

SEQ ID NO: 75030 - DNA, 497 bp, Zea mays
  Clone ID: MRT4577_168447C.1
ccacgcgtccggcgacggccaggaggaagcggtcaatagaagacaaaattttaccctaaaaaagactagaaaaaacatctccgactatgtcatcgtcggcgttcggcgacttcggtccgctcaccgagcgccgccgcgctgagaaggcgcggcagcagcgcaggcgcatcatgatcgccgtcgggactgtctccataatcgccatactcatcgtcattggctggtacgcggtcatgaacagcgggaagaagtcgtccagcgacggtgaccacaaccacaagtcttcgtcgtcgcgggccaaaggcaagtccagcggcggatcggactcggaagcggaagcggaaacggaaacggaatcggggtcggattcgaagacggatctgaaggctgtgtccaagagcatcaaagcgatgtgctcgcagacagactacacggacgcgtgcgagaagagcctttgcaggcccgcgaacgccaggctcgtcggcgcccaaggacat

SEQ ID NO: 75031 - DNA, 391 bp, Zea mays
  unsure (1)..(391): unsure at all n locations
  Clone ID: MRT4577_168448C.1
taagcagtggtaacaacgcagagtacttttttttttttttttttttttttttttttaattacacacccgngnacttttttttttttacatatgcttaagggcgattttaagctcactgtcgaattgttatttgtggacccaagcccattaacaagagaaacaaaaacgtgagtgagagggggacctaactatattttattaaatgagataaacaactgctgataggcactttaactatcagaatataaccgcttgatgatggaaataggaactcataaacattaattacttggtataatcatttaagatattaaaaaaacataaccaagggatactcggacctgtcacagaaaattaagctgaaacccaaactaatggcaacgaaataaaa

SEQ ID NO: 75032 - DNA, 357 bp, Zea mays
  Clone ID: MRT4577_168449C.1
atgtcgagaacgaggccttagcgttattgtggtctgtgtccaaccttatactaaaaactttattacttcaactatatactcatatagtaaatctaacagagggcaccaccaatgatgggttgttaggtatgaacgctgctgggtttgtcaaagcaagttggttgaatggcagcaattgttgcagttgtaagagggtgccagcgttaggcgcagcgtgctggtagaacggcaacaactgtggttgtatcaagaaggtagcagggctcacaccagctatctggctgaatggtaatagttggtgctgatgcaaataaacaatggagctcagtgggggcaatgggctatattgcagaagtt

SEQ ID NO: 75033 - DNA, 124 bp, Zea mays
  Clone ID: MRT4577_16844C.1
ctggatcgcgggcgaccggcggtggcgcataagaaatcgagggtgttcacgaagacacagacaattacgatgccctcctggactcctccgactcagacgaaaggccgtacgaactcaacaggcc

SEQ ID NO: 75034 - DNA, 675 bp, Zea mays
  Clone ID: MRT4577_168450C.1
ctcgagttttttttttttttttttttttttttttttttttttttttttttttttttttttttttttttttttttttttttttttttttaagcaggccggactttactttttttccccccgggcaaaacttgctttgggaaaaaaaatagaccagtcccacccaacccaactagtccctcttttttttttactgggggggggggccaatatatccccccctccataacaaagggaaaataaacgggggggaccccccccaaaacaaaaaccacaatccccaaccccaggtttttttttgggggggcccacctttaaaaaagccggcgggcgttttaaaaacccccagggcccccaaaacggggccttttaattggccatccttttcccccaattaaaggggggttgccccgggccccgcccttgaaaacccccccaaaaacggggggggatttggcctccccccccccaaaaagggtggcccccctccccttgggggccaggtttccccccggggggaaaaccctgccccacactttgccgggccccgggggggttttaaaaaaaaaaaaaaaaaacggggtccccggggttgtggggggcaacggaataaactgcccccccttgaaactcccccccccccctttttttttaataacaaacgaaccggcggggggg

SEQ ID NO: 75035 - DNA, 169 bp, Zea mays
  Clone ID: MRT4577_168451C.1
ggaagcaaaattcaggggcttattattaaaaggcccgaacgccccaaaatcagggcccttaggaatccaccagaacaaaacggccccacgaacaggggaaaaaaaaacattttttttccgacccaaactacaggggggcaaccagaaaataccacgggccggcacccgg

SEQ ID NO: 75036 - DNA, 326 bp, Zea mays
  Clone ID: MRT4577_168452C.1
acttcgccaacttcttttcccagccagcggattttaaaccaacgccgctcaccataatcatccccaaaaagaaccacaatgagatctgcaaatacctcttcaaggaggacctgctatatcccaagaaggactacaaccaggcgaaccacccgcaaatcgatgtgcccaacctccacgtgatcaagctcatgcagagctttaagtccaaagagtatgttagggagacctactcctggcagtactactactggtatctcaccaacgatggcattgagcacctactcaactacctgaacctcccgtctgagatcgtgcctgccacgctc

SEQ ID NO: 75037 - DNA, 444 bp, Zea mays
  Clone ID: MRT4577_168453C.1
gagtgcatagctgctctatactcttttaacgcctcttgtgtatgggtgcatgcgtatattagtgacacaggtcctcgtggtctgacatgcgcgctgtccctcgaatgtcattgacacggggtttccgcacttgtacttgtgattaacctcgtgtgctgtcctcggcctgggttgactaggcggtcttgagtatgctgtgccgaggtcctgtaaccgagcgagggttgagccaacggccatctggcgatctcttctgggttggggcatgttgggatgggctcgctggtgacacatcgtttcttccgggggcacatactgtcaaccttgctctgcctaaggtacaggcttgctaccactacttgtgttgttcctgcctgctcgcgttggactggcaaagacggtcgtcacgactggcttatcgattcggccctccttgggcgcgag

SEQ ID NO: 75038 - DNA, 1386 bp, Zea mays
  Clone ID: MRT4577_168454C.1
ttgggtacctcgaggccggccgggggtcctccacacacacaaccatctgccgactggtagcagagagaagagatagaccgagagagagagagagaatctgagactgagactggtagcagctgaagcatcggtgctagctagcttgggcagcaacatcacgatgtcgtccaactgcggcgaggatgagaaggagctggtgtgcgtgaccggcgccggcggcttcatcggctcgtgggtggtgaatgagctgctccagcggggttaccgcgtcaggggaacggcgagggaccctgcggacagcaagaacgcgcacctgctggctctggagggagccaaggagcgcctcaccctgtgccgcgccgacgtcctcgaccgcgcctccctgcgcgccgccttcgccggctgccacggcgtcttccacgtcgcctccccggtgtccaacgacccggagcttgtcccggtggcggtggagggcaccaggaacgtcatcaacgccgcggcggacgagggcgcgcgccgcatcgtcttcacctcctcctacggcgccgtgcacatggaccccagccggagccccgacgccgtcctcgacgagacctgctggagcgactacgacttctgcaagcgaaccgacaacctgtactgctgcgccaagatgatggcggaggtgacggcggcggcggaggcgggcgcgcggggcctgcagctggccgtggtgctgccctgcatgaccacgggccccatgctgcagcagacgctcaacttcagcaccaaccacgtcgcgcgctacctcatgggcaccaagcgctccatccccaacgccgtcgccgcctacgtcgacgtccgcgacgtcgcgcgcgcgcacgtgctcgcctacgagcgccccggagccaggggccggtacctctgcatcggcaccgtgctgcaccgcgccgacctcgtcgacatgctcagggacctcttcccgcagtaccccgtcacggccaagtgcgaggaggacggcaagccaatggcgaagccgttcaagttctccaaccagaggctcagggacctggggctggagttcactccgctgaggaagagcctgtacgagaccgtgctgtgcctgcagcagaagggccacctgcctgtcatccaaccacagcagcgcgcgtacctatgatgtgaaacaaccgacatatataaacatgcatgcaatgaggcaaacgacacacacgtcagtggaagaacgagaagatgacataaggaattcgacaactttttattaagtgtatattcatgttacttttcagtatctacgggtgtattacgttttacgttcttaaaacaaaagcttttgctgttgtacaattatgatgcacaacatatatagacaagtcacttatgaat

SEQ ID NO: 75039 - DNA, 164 bp, Zea mays
  Clone ID: MRT4577_168455C.1
gggcacagcctggctgctccatgataacgtggggaggacagaaacgagacgacaggcagtgcgatacgatcgtgcactgaaacagtcgagagacaaagcccccacgagagccttacttgcgcggctgtcgccatcaagtgtcccattggggggggggggcagac

SEQ ID NO: 75040 - DNA, 1730 bp, Zea mays
  Clone ID: MRT4577_168456C.1
cccacgcgtcccccaatgtgcaggtgtactacgtcctatcaacaatctatcgcgggcgtgtgcaaccttccctggcccaaatccaacttcttggtccaggtgttggatgactcggacgacccactcacacagactctgatcagagaagaggtggccaaatggcaacagcagggtgcccggattgtgtacaggcaccgtgtgctgagggatggttacagggctggaaacctcaagtcggccatgagctgcagctatgtgaaggagtacgagtttgttgccatctttgacgcagacttccaacctcatcccgactttctgaagcgcactgtgccacatttcaaggacaatgatgagcttgggctagtgcaagcaagatggtcctttgtcaataaggatgagaacctgctgactcggttgcaatatattaacctttgcttccactttgaggtggaacagcaggtgaatggagtgttcttaaacttctttgggttcaatggcactgctggggtgtggaggatcaaggcattggaggactcaggtggatggttggaacggacaaccgtggaggatatggacattgctgttagggcacatctccatggctggaagtttatattcctgaatgacgttgagtgccagtgcgaattgcccgagtcttatgaggcttacaggaagcagcagcatcggtggcattcgggtccaatgcagctattcaggctttgtttaccggacatcatcaaatgcaagattgcattttggaagaaggcgaacctgatattccttttcttcctgctccggaagctcatactgcctttctactccttcacgctgttctgcatcatcctcccgatgacgatgttcgtgccggaggccgagctccccgactgggtggtgtgctacgtcccggccctgatgtccctgctgaacatcctgccgtcccccaagtcgttccccttcatcatcccgtacctgctcttcgagaacaccatgtccgtgaccaagttcaacgcgatgatctccgggctgttccagctggggagcgcgtacgagtgggtggtgaccaagaagtcgggccgctcgtcggagggcgacctcatcgcgctggccccgcccaaggagcccgtgaagcttcacgcgacgaggacgggctccgcgccgaacctcgacgccgtcgccaaggaggagcacctggcggcggcatcgaggaaggacgccgccgccgccgccaccaccgtgaagaagaagaaggagaagcacaaccggatatacaagaaggagctggcgctgtcgatgctgctcctgaccgcggccgcccggagcctgctgtcgaagcagggcatacacttctacttcctcctgttccagggcgtctccttcttgctagtaggccttgacctcataggcgagcaggtcgagtgaaatgtgtaaaacaggaaattgataggtgtgggagaaaaaaaacggtgagtcaccatggctggaagtgctgggagaggagggggatgtgttatttctggctggctgccatggcacggcggcatggcatggcatggcagcagctcgtgggcgcttcttggctgagattcggaacatgcgtcgtgcggttgtgccttcccggatctgtcctggctgcacggcatggtatcccacacgtgagagagcaacctcctccgcctcggaggtgtaaaaaaaaaaaaaaaaaaaaaaactcgagggggggccccggtacc

SEQ ID NO: 75041 - DNA, 585 bp, Zea mays
  Clone ID: MRT4577_168457C.1
ctatccaggctttgtttttcgatcatcatcaaatgctagattgcattttgcaagaaggcgacactgatattccttttcttcctgctccggaagctcatactgcctttctactccttcacgctgttctgcatcatcctcccgatgacgatgttcgtgccggaggccgagctccccgactgggtggtgtgctacgtcccggccctgatgtccctgctgaacatcctgccgtcccccaagtcgttccccttcatcatcccgtacctgctcttcgagaacaccatgtccgtgaccaagttcaacgcgatgatctccgggctgttccagctggggagcgcgtacgagtgggtggtgaccaagaagtcgggccgctcgtcggagggcgacctcatcgcgctggccccgcccaaggagcctgtgaagcacgcgacgaggacgggctccgcgccgaacctcgacgccgtcgccaaggaggagcaacagcagcagcagctggcggcgtcgaggaaggacgccgccgcgaagaagaaggagaagcacaaccggatatacaagaaggagctggcgctgtcgatgctgctcctgacc

SEQ ID NO: 75042 - DNA, 864 bp, Zea mays
  Clone ID: MRT4577_168458C.1
cgggggtcccgcctactcctccccagtcacaggctgatcccgctcctctcccctctgcgtccatgtccctggctcctcgcgccctctgcctcttgccgccgcagctttttcaccgaggcaccctcctccgcccgctgctgcgcggcatggcccccgctgccgccaccgggtctcacgtcgctgcagaggcgccccctttcggtgtggggggatggggcgccagcgacccgcggtggctcgtcctggagaagctacccgcgggctacccgacaacctgcgatctgaaaccattccgcgggaggttctagcctgcctcctccttcccttacactcgccgctggcgtcattcaagcgcgctcgattagctgctccttcctcatgtttttgttaggctagcagctagcgcatcggcctgctgtgctgttgcaggtcctgcacgcctgttactccagggtgtttccttcttccaaaggggacaaccccacgctggttgcgacgcgtgggtccgtggccgatctactcgatctggatcacaaagagtgagcctgaaatccttagttgttacagttcccatttctagctgcttatctacaagcgggcatcctctgcaaagttgcaatggtctaagggatggcatttggcgaagcagggaacaactttatcacacgtttcttagatgcactgaaacgaagttgcttagtgttgacactactaaagccactcgaatttaaccccaaattgtatcctttgcagcgaacttcttcagttgtgtccttgtatgccaccgtggtagagtcctggctaatttaacacaccaaattgtcttgacattttaactcttaagatatcacctgtagccactga

SEQ ID NO: 75043 - DNA, 573 bp, Zea mays
  Clone ID: MRT4577_168459C.1
gaaagggcccctgcggaccgtaccgtgtgcctgcctagatccagctaccaccaggatcaccagtcacacacggtgtgcacgctgtcgaggaacagcccgggcgacgtcggtggccgatcagttaaccgttgtcaccgtgggtgacaactcgccctgacattgataaggctgcatgctctagttgctgccttagccaaaactacatcactggtactacacacttgtgctgttacgagaggacacatctccagactgcaactgaatgtatattcgcacgagatggccctatcgtgaaaaggaccatgtggctgtatctagctgatatattataatgcgcatgatctgttatagataggcttcactttgtatatcctggtgcatgtgggtccatgttcttgttctgctggtgtctccgccgtttaatttgacctatgttatggagtgggtgatatttttgccgatcctacttttatatagcatggagcgacttgttggtatgtgtattactgcactatattttattcattgcatgttttgtcacagcgtaatgaatggaaaaaccctgctgttacc

SEQ ID NO: 75044 - DNA, 372 bp, Zea mays
  Clone ID: MRT4577_16845C.1
tagaactaggccgggatggcccctaaatcggatcacgccggcgggagcgccggcggttcgggggccacgcaggcccacttcgacttcatggatcccctttttcaaggtcttcgggggctaccattcttctttctttgggcggcgggcacccggctgaaggtggcggcgaacctggcgcttcccttacccatgaacggcttcttccttattctaattacctaatttgggggcggcttcgggcttgtttaccaagttattggtgaaccccccgggattgggagggcccaagaacccgggaccggcgccggccggccaagcgtttttcttccaaggcgcgttaacgggcaatacattatcgaggggcttttcttc

SEQ ID NO: 75045 - DNA, 299 bp, Zea mays
  unsure (1)..(299): unsure at all n locations
  Clone ID: MRT4577_168460C.1
gcggcgcaaacttgagttcctaaaatatactgttttttatttaccaacagcngaatacacgtcaggggggnngggaaatttttatggtctgacaaccactcttactaaataaccggatactggtgaattctgtattgaggctgactccctgatgatatctgacaatggcgtttgttgtatccatgaatttgataaaatgtacatcaaggatcaagtctctatacatgaaacaattgaacatcaaacaattaccatatccaaatcaggaatacacgcaaccttgaatgcacgaacatcaa

SEQ ID NO: 75046 - DNA, 585 bp, Zea mays
  Clone ID: MRT4577_168461C.1
agtcgctgagcccagaagaacatagaagtccagagtttgaaccacttcttgtttgtttgaaggcaaaaattcaggagatgaaggaaaaggcccctgatcccctgagcgataaagatgggaactcacatgtttgcaaagtttgcttcgaatctgcaaccgctgcagtattgcttccttgccggcatttttgcttgtgcaagccttgctcgcttgcctgttcagagtgccctctgtgccgcacaagaatagcagacaggataatcacgttcacatgaacggcgtgctagcttcaggtgccaaacacttagatgcttgcatgttggtgctcatgccaacgctatccctctgaaatgtacctaatgatgtgctgtgtatctctgacaggccattttgaagcatggcgcactcttgtaaaatgggcggtggtatatgtttctcttttttccttagcaaagaaggtgccttttatgttccttctgtgttgtatcgccattctttgggttcccctatatggctatatagcttcaccttacgttctttatcaaggagctgcaaacgatgagaccccaaaaacccccccccaaa

SEQ ID NO: 75047 - DNA, 2271 bp, Zea mays
  Clone ID: MRT4577_168462C.1
aattcggcacgagggtcatgtctcactaatttgcacaattaccccagcatcaagtaacatggaagaaacccataatacattgaaatttgcaagcagagcaaaacgtgttgagatttacgcctctcgtaaccggataattgatgagaaatcattgatcaagaaatatcagaaagaaatatcctctctaaagcaagaactcgatcagctaaggagaggaattgttggtggtgccagccaggaagaaattatgagtttacgtcagcagttggaggagggtcaggtcaagatgcagtctcgtctggaggaggaagaggaagcgaaagctgctctaatgagcaggatacaacgcttgaccaagttgatacttgtttccaccaaaaacaatattcctgccttgacagatggtcatcagcggcataattctgtcagcgagcaagataagttaagcacttcacaagatagctctacacttgtccaaaatgagggcacaacaaaagaccacctaccagactccttagatgagatcaaccaattaagatctggcagtggtgaacattcttcagctacttgttctgctacagattcaatgcaggcaggattcacggcatcagatcatatggacctactgattgagcaaattaagatgctcgctggggaggttgcatttggtaccagttcgctgaaaaggctaatcgaacagtccatagatgatcctgaagggtcaaaggaccaaatagagaatttagagcgtgaaatccagcaaaagagaagacatatgcgagccttggaaaaacaaatcatggaaagtggcgaggcatcagttgctaatgcatccatggtggatatgcagcagactattacaaaactaactgctcagtgcagtgagaaggcttttgagttagagttaaagtcagctgataatcgtgttctccaggagcagctacaacagaagaatgcggaagtcaacgatttacaagaaaaagtttttcaccttgagcaacaactctccgcaaaagtgggtatatcccctgagcaggaaactgattgtgcacagcaggaggctattgatttgaaatctaaacttcagtccaaggaagctgaattcgaaaagctgaaattcgagcatctgaaaattactgaggaacagtgcgacttgatcaatcaaaaccataaattaagtgaggaagctgcatatgcaaaagaattggcatcttcggctgctgttgaactcaagaatttggctgaagaagttacaaagctatctgtactaaatgtgaagcaagcaaaggagttactagttgctcaggagatggcacattcaagggttcatggtagaaagggtcgtacaaccagtaggggtagggacgaggttgggacatggagccttgatttagaggacatgaaaatagagctacaggccagaagacagagggaggctgctttggaagctgctttggcagagaaggagcttctcgaagaggagtacaagaaaaagtttgacgaggcaaagaaaaaaggaactgtctttggaaaacgttctagcaggcatgtgggttcttgttgctaagttaaaaagaggggctttaggcatatccgattttaatgttgatgatcgaactgttaacctagctgatataactaatggcacaaaggaaaacaaaggtgaaaagaattttgctctagttgagaagcaagtttcagaagattctgtgaagtcgctgagcacagaagaacatagaagtccagagtttgaaccacttcttgttcgtctgaaggctaaaattcaggagatgaaggaaaaggacactgatcccctgagcgataaagatgggaactcacatgtctgcaaagtttgcttcgaatctgcaaccgctgcagtattgcttccttgccggcatttttgcttgtgcaagccttgctcgcttgcctgttcagagtgccctctgtgccgcacaagaatagcagacaggataatcacattcacatgaacggcgtgctagcttcaggctattctgaagcatggcgcactcttgtaaaatggtcggtggtatatgtttctcttttttccttagcaaagaaggtgccttttatgttccttctgtgttgtatcgccattctttgggttcccctatatggctatatagcttcaccttacgttctttatcaaggagttgcaaacgatgagaccccattggaatgcaggaattgtacaggaatttcacaaaagttcattttcatagaaaaaacacaacaaacaggcacaccccaaaa

SEQ ID NO: 75048 - DNA, 1298 bp, Zea mays
  Clone ID: MRT4577_168463C.1
ggagcctttttgtagaggacatgaaaatagagcttcaggtcagaagacatagggaggctgctttggaagctgctttggcagagaaggagcttctgcgaggaagaggacattgatccctgaccgataaagatgggaactcacatgtctgcaaagtttgtttcgaatcggcaaacgaaaaagaactgcctctggaaaaggatttatcaggcatgtgggttcttgttgctacgtggaaaagaggggctttaggcatatctgatttgaatgttgatgatcgaactgttaacctagctgatataactaatagcacaaaggaaaacaaaggtggaaagaattttgctctagttgagaagcaagcatcagaagattctgtgaagtcactgagttcagaagaacatacaagtccggagtttgaaccacttcttgttcgtctgaaggctaaaattcaggagatgaaggaaaaggacattgatcccctgaccgataaagatgggaactcacatgtctgcaaagtttgtttcgaatctgcagccgctgcagtattgcttccttgccggcatttctgcttgtgcaagccttgctcgcttgcctgctcggagtgccctctgtgccgcacaagaatcgcagacaggataatcaccttcacgtgagctgcgttctagcttcaggtcattctgaagcacacatcctcttgtaaaatcttcaatggtatatgtttctctttttccttagcaaagaaggtgccttttatgttccttctgtgttgtatcgccattctttgggttccccttcccctatagcttcacgccttcaccttacgttctttgttgtatcgaggagttacaaatgatgacttctcgctctgcaaatatgtatagatacgcaactcgacgctgtaacacattttgattctctactcctgaagaaaagcagcgaacgacatgatgacgtgtgtaaaaaaaaaaaaaaaaaaaaaaaaaaaaaaaaaaaaaaaaaaaaaaaaaaaaaaaaaaaaaaaaaaaaaaaaaaaaaaaaaaaacaaaaaagaaaaaaaaaaaaaataaagacaaaacatattaagaaaacctatctcaagaaaaaaaaaaaggtggggccgggtttataagggtccaaagtttactgccatgctccttgacaataaaatttttttttttggggacgcaaaataaaaatagaggggcggatatttaaaaaatgcgaagggggaaaaaccccgggtccccaaaaattaatcacctggacaaaaatcccttttttcaccgggtgttttaactaaa

SEQ ID NO: 75049 - DNA, 128 bp, Zea mays
  Clone ID: MRT4577_168465C.1
gacaaccaacctgaattttctgatgggtcttttggaatttacatgggaaaagcatggaacactgttacaaaacagatatacgaccacagaaacacattgtaataaaacatgtaacagcgaagggcatt

SEQ ID NO: 75050 - DNA, 2164 bp, Zea mays
  Clone ID: MRT4577_168466C.1
aaaaaaataaaagaagaagtagttctgtcaccaggacacgctctttcatttattgcagccggtgaagaacatcggcatgttggctctaacaacttcaacttatttagcagccgaagtcatactattttcacattgatgattgaaagcagcgcccgtggtgatgagtatgatggggccatgtattcacagcttaatttgattgatctagctggttctgagagctccaagacagagactacagggttaagaagaagggaagggtcatacattaataagagcctcttaactcttggaacagtcattggaaagctcagtgaagggagggcaacacatataccctatcgtgattctaagttgacccgtctactacagtcatcattgagtggccatggtcatgtctcactaatttgtacaattactccagcatcaagtaacatggaagaaacacataatacattgaagtttgcaagcagagcaaaacgtgttgaaatttacgcctctcgcaaccggataattgatgagaaatcattgatcaagaagtatcagaaagaaatatcctctctaaagcaagaactcgatcagctaaggagaggaatgattggtggtgccagccgggaagaaattttgagtttacgtcagcagttggaggcgggtcaggtcaagatgcagtctcgtctggaggaggaagaggaggcgaaagctgctctaatgagcaggatacaacgtttgaccaagttaatacttgtttccaccaaaaacaatattcctgccttgacagatgggcatcagagtcacaattctctcagtgagcaagataagttaatcacttcacaagatagttctacacttgtccaaactgagggcaccacaaaagaccccctatcatccgctttgccagactccttagatgagatcaatcagttaagatctggcaccggtgaacaatcttcagttaccggttctgcaacagattcaatgcaggtgggattcacggcatcagatcatatggatctactgattgaacaaattaagatgcttgctggggaggtcgcatttggtaccagttcactgaaaagactaatcgaacagtccatagatgatcctgaagcaacaaaagaccaaatcgagaatttagagcgtgaaatccagcaaaagaggagacatatgcgagccctggaaaaacaaatcatggaaagtggcgaggcatcagttgctaatgcatccatgatggatatgcagcagactatcacgaaactaacagctcaatgcagtgagaaggctttcgacttagagttaaagtcagctgataatcgtgtcctccaggagcagctacatcagaagaatttggaaatctacgatttacaagaaaaagttcttcgcgttgagcaacaactctcagcaaaagtggatatatcccctgagaaggaaactgattgtgcacagcaggagactattgatttgaaatctaaacttcagtccaaggaagctgaaatcgaaaagctgaaatatgagcatctgaaaatttctgaggaacattgcgatttaatcaaccagaaccataaattaagtgaggaagctgcatatgcaaaagaattggcttcttcggctgccgtcgaactcaagaatttggctgaagaagttacaaagctatctgtgctaaatgcaaagcaggcgaaggagttattagttgctcaggagatggcacattcaagggttcatggtagaaagggtcgtacagctagtaggggtagggatgaggttgggacatggagcctcgatttggaggacatgaaaatggagctacaggccacaagacagagggaggctgctttggaagctgctttggcagagaaggagcttctcgaagaagagtacaagaaaaagtttgacgaggcaaagaaaaaggaactatctctggagaatgatctagcaggcatgtgagttcttgttgctaagttaaaaagaggggctttagatatatctgatttgagtgttgatgatggaactaaagtgtaagggcgtagcgatcacaacactgttgtctcataattggtgttaatgaaaaataacatggtgctacacgaaacctctactttatcttgtaagaaggattgttatgtcggcataatttgatttgcaaaaaaaaaaaaaaaaaaggccccta

SEQ ID NO: 75051 - DNA, 689 bp, Zea mays
  Clone ID: MRT4577_168468C.1
aactggttgtctgtgagatcaagtgaatccacatttcatcatatttagaggttcagaacaaagaaatgcagtacaagtcgtatgctactactggaccaaggcactagagtctagagtgataagcctacgaaactaagcccatgggcaagaatactctcgaatcactccatttcgtgaccgcgacccaagacttctgccacgaccagcagcagctggcggacacccctgacccctcagccgccaaatccgtagagggtgcggccctgccgcttgagcgcgtagacgacgtccatggcggtgacggtcttacggctggcgagaaggggcggcgtgaagcgcatctcggggctcatctacgaggagacccgcggcgtgctcaagatcttcctcgagaacgtcatccgcgacgccgtcacctacacggagcacgcccgccgcaagaccgtcaccgccatggacgtcgtctacgccctcaagcgccagggtcgcaccctctacggattcggcggctgagaggcgctaccgccgctggtggccgtggcaaaagtcttgggtcgcggtcaagaaatcgagagtattctggatgacgtgctagtgcttattgttagcggttgttgggttcgaccactctaagccactgtcaaacagtaatatatgagtaccgcatttccgtgtttcgaacttctaat

SEQ ID NO: 75052 - DNA, 348 bp, Zea mays
  Clone ID: MRT4577_168469C.1
gcaacattgcaacatacaaaagacacaatttttgtatcaacaatagcaccaccaacaatgcgcggggatttatacatcgtcggcctctcctcaattgttgctaccgcaaccattaaaccacaatgctcacaagataatattaatttcctacttcccccatacctacaaccaaccttccatcaaatatttgaaaaccctattaacaaacacttcagcaaccatctaggcttcaacacaccatttaccattgagtcatatagttactacctacccacaaacaataattacatttaacccacttgcagcaatgaactctgatgattatttacacacaacacaactactacc

SEQ ID NO: 75053 - DNA, 434 bp, Zea mays
  Clone ID: MRT4577_16846C.1
gcattttatgctcgtgaagatgatgatctggaatcactcgagcgagatgttaatgaagaatccggttggaagctcgctcatggtgaggtgttccggccttctggcggccagttgtttctttctgtcctagttcgcattggcacttagctggcggctcttatcctgcttgcgattgtgctggccattgttgacattttatatgctggtcgagcagctatcatgacaaccttaattgagtgctacgctcttacatctgtgatctcttgatatgttagtgggggtctgtattcctggaatggtgaaaaaaactggatacaggctatgatcctgacagcgtcactatttccattcttgtcgtgttcgactggattgttgttgaacactattgctatattgtaccgatcattagcagctataccatgtggcacaatggt

SEQ ID NO: 75054 - DNA, 401 bp, Zea mays
  unsure (1)..(401): unsure at all n locations
  Clone ID: MRT4577_168472C.1
ccgggcgccgccgccgcagccgcggccggggaagcaggaggcccagcgcagncagccgcnnaaggaaccaccgccgccgcgcgccaagacgcnccggcggcggcggaagcagcagcagcaaccgcccacggagggcgacgggnccgaccacgacgacaacgacaaggggaagaagccgnccncgnccaccgcgccgccgaccaaggagcccacgaggcggaccaaggccaagaggacgagcggggacagttgtttttggctggccccccgcgtgagctccacctggaggaagctgatctttctctacaacgcgatgccagcttcgaatcccgcagtatgtcaccgaaggccatcacggaaacgctcccggaacagcccgaggacaagcagacaaaggagga

SEQ ID NO: 75055 - DNA, 191 bp, Zea mays
  unsure (1)..(191): unsure at all n locations
  Clone ID: MRT4577_168473C.1
cgcgaaggccancnccaccgccccccaccaccggccccgcncacagggcagggcgacgaggncacagcgggacgcggngcgcgcgaacgccaaagacanagccagggaccatggagggggggcancccnncaagccggcgccaagaagccgacaaacgccgacggagacacccacgaaccacaagggagga

SEQ ID NO: 75056 - DNA, 571 bp, Zea mays
  Clone ID: MRT4577_168478C.1
tcgcgatctagaactagtacagagccaacacagttatttagcttatgttaggaagctctggtgatgtttaagtcttgtggtaacactacgaggtcgagaattgaggttgacttcaaagtaaacttagggccaaatatcctacttccaaaaatagcaaggccattaagcattagctacaccgagaagaacagaacatttgtcacaaacaaatggaaggaaagttactactttcttttttaataaaaagatcaacttcagtggaattagcacatggtacacattttttcataagaatgcttgatgataataatagcttaaaggatctgtatataggagaaatcaggaaaatggttagaaaatttctgaatgaaaaacattggatctaagaaaaatataccaattctagagtaacaactttttttttgtgggcagcggaaacctatataatatatgggcatgctagttcatccaagggcacataattaaaaacagaaaaaaatactgacccacatgtcataagcatgctatttatttggtcggatatggaaatatcaaccatgaatcatcattt

SEQ ID NO: 75057 - DNA, 332 bp, Zea mays
  Clone ID: MRT4577_16847C.1
cccacgcgtccggtcgatatcaaagaggtcacttgacatggctatcaggcacatggacattcggcagaacttgggtggcattcgaggcgcatccctgtttccccagagcacccgctcggctgctgccaaggtccgtccagctcggacatcagacccagggcatggcatctcaaaaagcgaccagcaccgcactgacaatggaaacagcttgaacgggcacctctatgtctctggggactcgaacggagctctctcacgcaatggtggcagctcaaccggttcgccagacagggagagcatcatgaccaatgagaccctgatcgagctggaca

SEQ ID NO: 75058 - DNA, 403 bp, Zea mays
  Clone ID: MRT4577_168480C.1
aaaacgggatgccaaaagggcaattttttgaaacccgcctacgttttaaggggctgttttctgaatacagaaccctggaccaatctccgaaaacccagggtttataatgggcctaaaaaaaagggaaggccgacccaaaaggacagcgctcctagggcgaaggccaaattgggcaaggggggatttcactgatgagggcagggcaatggtcatgaaaccagggcacccccaaacctgtcctcggatccgggggatgtaggacccgcctaaatgggaccagaccatccctcacactttgatatgtacaagacctacatcccacgagccccttgtagactggctgagtcctaaaaggggcccatccaaattaagattacctgctccattttgggctggggggggg

SEQ ID NO: 75059 - DNA, 788 bp, Zea mays
  Clone ID: MRT4577_168481C.1
tcgaattcgagcacgcgtacgcgtacgcgtacgcggacgcgtgggccgtaccacagttcagctcccacccactcccaaaccctctcgccggagccccagcaacccgccagcaagcaagatggacggcagcaaggcgaagaaggtggcggcgaataagttcggcgggccgaggaagaagtcggtgaccaagtccatcaaggccgggctccagttccccgtcggccgcatcgggcgctacctcaagaagggccgctacgcccagcgcgtcggctccggcgcccccgtctacctcgccgccgtcctcgagtacctcgcagcagaggtgctggagctggccgggaacgccgccaaggacaacaagaagagccgcatcgtgcccaggcacctgctgctggccatccgcaacgaccaggagctcgggaggctgctgtccggcgtcaccatcgcccacggcggcgtcatccccaacatcaacccggtgctgctccccaagaaggccgccgagaaggctgagaaggccgagaagaccgccaccaagtcgcccaagaaggccaccaagtcccccaagaaggccaccaaggcgtagatctggctccgagcgcccgtgccggtgaactggactgatggtgctccgtcagccctcgtgtgcctagtgtctctgtgttaagttagctgtggtgtgttccagagtgtgttgaagcttgttcttttgctttgccccgccatgtaaccgtgaacgaagaggaagcgtcttgcttcctctgttctgctatatcaatctggtttct

SEQ ID NO: 75060 - DNA, 455 bp, Zea mays
  Clone ID: MRT4577_168482C.1
gggccgagccacgcgtccgaccaaacgtccgcaaatggtatggtatgttctgaacaattgtagtcaggttgacaaatatatgaaaaggttcaaaaatgatttacaaagaaatggaatgcctaacattgaaaaaacattgcaaaaaggattccagacttggttcaaaaccaatatcctaagaatgaagaatataaatcaagaagacgctgatgatgatctattttccttggcttgtggtcctgatttcagagttcgaaaatactcctcacgcatagtgaatggtgtgcggtttaacactagtgaccgtgacaagcatcgaaagacacaaaatagtggagtaatgacacaaggtactcataacggtcaagaaattgatttttttttggaaccttaagagagatcattcagttagagcataaccttgatgagagatcagtagttttgtttaaatgtga

SEQ ID NO: 75061 - DNA, 302 bp, Zea mays
  Clone ID: MRT4577_168483C.1
agcggtcaatgggggacgagccacacaataattggacatttcttgggacaaaaaagggcaattcaggttcaggtggaaccattattaattataagggcttgggaaaaatttaagtaccacacaaggttccggttccaggggggtgggaccattccaccccaccccaggcacccgcggaaaattttttatggcaaccgcccaaaggttgttgggcccaacccccaagttattttggaaccggttggaaaaggatcattctgggaacataattattgttggggcggggcctgtggggggggctg

SEQ ID NO: 75062 - DNA, 439 bp, Zea mays
  Clone ID: MRT4577_168484C.1
cttcttcttccccgccgccttaaacctcactcgccggaaccgctacaactcacatgtgctcgtgcacaaccaagcccaggacgcttgaggggtaggccgcaactgtatgccgctcgtgttcacacctcaggcggtgcacgcccgacggccatctttcaaatcttctcgttgtgacggctagcaggactcgagtgagagcacgcgtccgcgtctccatagcgtcagacgtgttggaaggaatccagatagctccgactacgtttatcatccaacggcttctgaggtgggcgctccataggcgttcattgacgcgacctgtcactaggtgcaatcaacggatgacataacctgcatcaaggaggcgaatccatggacgtgcgcccatgcaaatgaataggctggcagtgccacctagaccaggaggacggtgactactaaa

SEQ ID NO: 75063 - DNA, 1878 bp, Zea mays
  Clone ID: MRT4577_168485C.1
ccggccgggatgggcattggagttggacctgggcgtggatcacgacgagacgaccgtccccgccgtccgacccattcacccccactgtgccgcgccccgccccgccccgccccgcccacgccgccgtggcaacgccatggggaagcgatccggcggccggaagctgccgttcttcaccagatcctcctcgtcctcgtccaagcggaatcgctccgcccgccgcctcccttccctccccaagcaggacaacgcgacgagggctcttctcgcctccccctctgctgcctcgccgtccgcgaccccgggatcggcggcggcggggcagaccgcccagctgccccctcccctctcagttaccgcgggcggcggggttgccgtgtcggggaaggtcaacaagaagaaggccggcacgcgcctatggatgcggttggaccgctggagtgcctccgagatcgtcgagctcgacaaggcctccataatccgccgcgccggactgcccccgcgcgacctacgcatcctcggccccgttttctctcgctcctccagcatcctcgctagggagaaggcgatggtgatcaacctcgaattcatcagggcgatagttactgccgaggaggtgctcctgttggaccctctcatgcacgaagtgctccctttcgttgaccaattgaggcagcacctgcctctgaggagccgggtgggtgagaatggtgagtgtgcccctgatggcaatggggaaaaacagaagggctcgcttaatgaagcgaccggggcagagcatgagctgccattcgagttccatgtgctggaggtagcactcgaggttgtgtgctcatcgttggaccttagcgtgtctgaccttgagaggcatgctactccagtgcttgacgaactgaccaagaatgtaagcacaaggaaccttgagcgagtgcggaaccttaagagtcatcttacccgtttgcttgcccgtgtgcaaaaggtcagggatgaaatagaacatcttctagatgataatgaagacatggaacatctgtatctaacaaggaagcaagtacaaaaccaacaggttgaggctttaatgtcatctgctgcttccaacagcattgttcttgccggaacaggtgtgcccaggctgaactctagcttccggcgtagcctgagcattgctactagcatgcatttggataatgatgtggaggacctagagatgttacttgaggcctacttcatgcagctggatggaattcgcaacagaattttgtcggttcgggagtatattgatgacacagaagactacgtcaacattcaactcgacaaccagcgtaacgaactcattcaactccagcttacacttacgattgcatcctttggcatagctgccaacactttcattgctggagcttttgcgatgaacatcccgggctctctgttcaacaccgatggcagcctcttctggccatttgtcgggagcacctcatctggctgctttgtaatcaccgtcctcttgttggggtatgcctggtggaagaagttgctgggtccttgaacatgaagcaagatggcagagagccttgtcatgcttgcagaaaggaagaaggcgtcctatcctaaggatattagagaaccgtggggatagcatgaaaacctgtatataacatctcaacagtgttcataagatgagtacgtataatatatcattagcataaacgagatgatgtgatgatcgatatacttccttgttaacatcattagctggcaactgaaaaatgttgccatgaaactatattatccagcagcggctggctttgtgtacaaaaaaaaaatataaacttaaataaaaaataaaaaattaaaaaaatggttattccaatttggcgg

SEQ ID NO: 75064 - DNA, 266 bp, Zea mays
  Clone ID: MRT4577_168486C.1
accacgcgtccgaccccacttataagatctcgataggcttccctgcggtcttgacgctctacacgcgggcgctgggcttcttctgcggttcatttctccgttcctaggccaacaactaccctctcgacgacggcatcgccatctctatgtgcgtcacgatatggtccaagctggcaccaaccatcgggcacgtcgccaccaggctagcgggggctaggtacctcgacctgccgatgttttgcccgctcaaccctatggcctactgc

SEQ ID NO: 75065 - DNA, 348 bp, Zea mays
  Clone ID: MRT4577_168487C.1
gacgaatggaatagggcctgtatgaaacatgcagatgacgaacgcgatctaacttatgagggcatcatagagtctgtatcgggtgaactggaaaaggagctccacacatatggagaggacacgtgaaaagcacgctactacactggatcatctggaccgggttgataggcatgaagagtcacccctgattgagcaagctattcaaacacgcatagtggacgattaagaaccttgacgatcatgaggcactttcgcagatacaactcgataggcttcaccatgcctaacactgactcgagaaaaattgactttcacagacgttcgagcacaataatgctgtaccggaga

SEQ ID NO: 75066 - DNA, 290 bp, Zea mays
  Clone ID: MRT4577_168488C.1
cgtgttgatggatctttgatagttgattaaattctgcaacgttcctcagaagttggttatgatgctactaggctcggagatttggtgaatatggtgggaaaaggaatcattgaccctacgacggttgtgagaactgctttattggatgctgctggtgtggcctctctgttaactacagcagaagttgtagtcacagaaattcctaaagaagagaaggaccctggaatgggtgcaatgggtggaatgggaggtggtatgggaggtggcatgttctaactcctagactagtg

SEQ ID NO: 75067 - DNA, 236 bp, Zea mays
  Clone ID: MRT4577_168489C.1
gtcgtaagctcggaattcggctcgaggcgaggccccagcctgccatgccatccatggcgatcgccaccactacatcttactcctcgctggccattgggcctctccaccagcacgcgcaacactaaccgcgatgcacgatctatacaggtcctgaggagccggtggtgcgctcgagccgactgagccggaggactggagccttacagggctgctccacggggtgtcatgtggtcgat

SEQ ID NO: 75068 - DNA, 565 bp, Zea mays
  Clone ID: MRT4577_16848C.1
cccccgcagcgcctgctcccatgggtgcgcgacgcgagatcgggtccctttccttgcgcgaaggagatcgagcccacaaatcgcgctcccgtgtgccccgcgtggcccgctcccctcccccagtcgcgtcccgctcccccgcagctctgccccaccgggcacccgccgccgcaatccgcgcccgcatcccatgcaccatccctgtgcggccccttcgccgtgatgctcgcccacgcatgatagaaggcacgccgcatctcgattctcaccaaccccgccccgccaccgcaatcttcgcctctcgctgacttcgatggaaggcgtaccgctcgccctcacctgcccgcgacgctcactcctccccattgctggggccaggtaagtagaatttccaccggcgcaaatcgttgcgcttccatcacggcgtcgccatcccccgtcctgctcgtccctaaccaccgcccacagatggattcccctcccccaccgcgcacagctccacgcatctcgtgaacgcagcgtcccgccggcggataagcacgcagcggctcaccatgcctgtcgc

SEQ ID NO: 75069 - DNA, 1515 bp, Zea mays
  Clone ID: MRT4577_168490C.1
ggggcaacaagtttttctccattgctgggcataccaaagatccatctgaaggtgttacaggtttgctaaaattcagcttttaaggaatttgatccgcatacttgtacctggtctattgtcaggacttatggaaaatcaccggtttctcgcggaggtcagacagtgactcttgttggaacaacactagttttgttcggtggtgaagatgcaaaacggtgcctcttgaatgacttgcacattcttgatcttgaaaccatgacatgggatgatgtggatgcaataggcacccctcctccgagatcggatcatgctgctgcttgccatgctgaccgctatcttttgatttttggtgggggatctcatgcgacatgtttcaacgacctacatgtccttgatttgcagacgatggagtggtcaagacccaaacaacaaggcctgacgccaagcccaagagctggccatgctggtgcaactgtcggggagaactggtacatagttgggggtggcaataataaaagtggtgtctctgatactcttgttcttaacatgtcaactctgacatggtcagtggttagcactgcggaaggacgagttccccttgccagtgagggcatgactctagtgcatagcaattacaatggatacgattatctcatctcatttggaggatacaatggacgatacagcaatgaggtttatacacttagcctcaaatcagattttaagtccaccacaaaagaagaaactgtctcagatctagggtcgtcgaaccagaggttgaaatggtgattggcgtggacagtgctgattcagacctgaagaacagtagtacagtactgatgaagcaagtgaacagttcttagcagctctcaaagctgagaaagaggaactagaagcgacacttaacagggaacagctgcaaactgtacaacttaaagaatacattgctcaagcagaatccagaaatgtggaactcacaaaggaacttcaagccgtccgtggccaacttgctgctgagcagtcaagatgtttcaaacttgaggtcgatgttgcggaactacgacagaagcttcaaagtatggatgcattggaaaaggaggtcgagctgcttcgacgacacagagccgcgtcagagcaagcagcgctggacgcaaagcagcggcaaagttctgggggcatgtggagctggctcgttggtacccctcctgatgataaatctgaatcgtgatcgcgtcgtgagggcagcactttagttcatacaggccgtgattcatatattatacttgtaacatttatatacccgttgatattttttttacagttactgaattcgtgttcattttgaccacagaagataaggaaatcattagttttatgccttgttttggcgtattgcaatcactcaaatgtatcaggaagtttcaacattatttcttgaaaagctagatttcaacattgtcatcatgtattggtaaaaaatttgacgacatggttccaatatatgttattcgtttg

SEQ ID NO: 75070 - DNA, 529 bp, Zea mays
  Clone ID: MRT4577_168491C.1
agcagtggtaacaacgcagagcactttttttttttttttttttttttttttttttttttttttttttttttttttttttttttttttttttttttaaaaaaaaaagccaggggccggacaacgattaaaaaaggcccaagcttcgcccccaacacaacacacccgagggctaaggggaaaaacaaagccccgcgccccggagggggaaccccgggggggcaaaaactttatttgggggcatcagagcatttcatacccacccaaatcgcccctgctcattcgggccccccaggcccccggtgttcagctgacccatgggggcttggggggggccccccacccgcggggaaggatcgttgcccaggggctgaagggccccctgttaggggtcaaaaacattcccactggccccccggggccccccttcccccccggaaacccggggcgcgttcccgggcctggtttctggcgggggcttccttggggttttttggggcccccgcgtttgttgcgccttgtttttgggggc

SEQ ID NO: 75071 - DNA, 401 bp, Zea mays
  Clone ID: MRT4577_168492C.1
cgcacctgttctcttttccatgtacgatgatggaacgctcctcatcgaggtactctacatcctcaacaagcaagatgctacagctactgacgctatccatactatgagtacttgatccatgtagtgccggatgacggatactgcctcatgatgtggcaagccatgtcatgcctcaaggcgagcgacctatcaaccggcaacgctgcctgaaagcatgtctttccagtctgctgcgccatgcgactgagcacatcactaggatgaagcccttgggtgctggtgcaaccctagttgcccacactatcaaagactctgaagcccttcttcatggcaagtggtactcagagtatcctcagaccgcacgatcccacgactatgagggtgactattgaccatgcgat

SEQ ID NO: 75072 - DNA, 362 bp, Zea mays
  Clone ID: MRT4577_168493C.1
ctgccctttttttttttttttttttttttttttttttttttgggtttttttttttctttttttgttaaaaaaaagttttgggccccaaaaggaacgttttgggcccatttttacccaaccatggtaaaaggggggccgccctttttttagggcccccgttgggcatggtgctagtgctaaaaaaaaaaatggcgggccccggcggcaccaaaaatttctcggggcgcctatacacccggttttccccccaatttttaaccccccccttagaggggcccaagggttacccacccccccccccagaaaccctgttcggcaattcccgggttgaaccagaccaccctggggggcggtgccccaaa

SEQ ID NO: 75073 - DNA, 224 bp, Zea mays
  Clone ID: MRT4577_168494C.1
attttcgtgctaatggtgatatagcactggcatttggggtggactttgagaagtatgggatcggtgcaatgcctatgcagctaagtgctgcagattagtcggctccataccacatgcaactgatgatgatactctctactacaccaatcatcaaagaaatggatatctgtgaaatcctattcctatattcagcattgtattaagagttcacctataacacaact

SEQ ID NO: 75074 - DNA, 180 bp, Zea mays
  Clone ID: MRT4577_168495C.1
cacgcattctaggtaagttagaccattcataaacagatcatttttactgaaagccaacgcaatgcacgaagggtttcaacagatagggtgcaaggactacgatgtactctatatggacaagctttacagatagcactgcaagaataagtcgcacaaacacaactacacacaccacattaa

SEQ ID NO: 75075 - DNA, 403 bp, Zea mays
  Clone ID: MRT4577_168496C.1
gagatcgttaggtaccccgaagtggtgtcggtgttcccgaacaggggccgcaagctacacacgacgaggtcggggcagttcatggggctcgagagggaccgagatgtcccgcagtggtcggcctgggagaaggccacggtccgggaggacaccatgatacggtactctcacttaagcgtctggccggagtccgcgagctacaacgacggcgaaatggggcctatcccagactactggaaagggatctgccagaacgaccacggaagggcgttccaatgcaacaggaaggtcatttgtgcgcgctactttaacaagggctttgcgatgaggtgcagtgttcctgtacacgccgtgttcaagacgacttgcgtctagaacgggcacggtactcacacgctgtata

SEQ ID NO: 75076 - DNA, 289 bp, Zea mays
  Clone ID: MRT4577_168499C.1
ggccgttcttagatctcctcgtcagtttcaggcagcgtagctcgatagatgagagagatagcgagtcgcggatcgagcagcacaccatgaacagcctgctggctcgcctgagagaccccatcctccggctaacaagcgctagacagccatccataagcaacgcgtacttgctcaacaagtcgccgcacgactcggacgctggacgcgcactgagtagtacaccctcaccgccaccatgagacagagcagtgcgtcctctcctcactcgaagagcaagctactaccacct

SEQ ID NO: 75077 - DNA, 233 bp, Zea mays
  Clone ID: MRT4577_16849C.1
gttcggggaccaaattcggggccccaggacgaattcaggttccagaccgggccttaaacatttatcccaaaagtgctctgtttaaaggcaatgacccaaacctaaagcctaaaccaaccccaacgggggggcccgcccttcctaaccttgaaatcccacccaagcgggtttatactggggggcccaaccgggagcaacccccacttacctagggcggcccgccccagaatgtc

SEQ ID NO: 75078 - DNA, 1055 bp, Zea mays
  unsure (1)..(1055): unsure at all n locations
  Clone ID: MRT4577_1684C.1
ctcggccgggnggtctctctcactctctcttgtctccaagtttgtaaccctagccgccaagcttgaagctccagccgtgctcgtgtagggccgcaggccatccgggctccggcttccagcatctaccaggcgtccttagaatacggtgcagcgagcagcaagtcgccgagcagccgagccaccgccgaacacagggcgccgccgagcagccgagccgccgccgagcgccgagtcttctctgacgacaaactttctccacacataccgcgccactccgccactcactgtgctgacggatgggctggtgctccccatccgctccccggcagctgctatccaccgtcgcactctttgccttcggcgcggggctcctcacctacggcgctcacctctcctacgtccacatcgagccccagcgcgcgcgcacgctcgcccgcgatcaattcgtccgcgactacctacgcaggaagcacgacaagtaagcccgcaccccccacggcatccccctcccagtccgctcgatctctcgccgttcctgctcgtcggcgatggctttgtcccccgcgagcgtcgggccggtgatttcggaggtggagatgaacgccggcgccgatcagggtgccactaccgtgcgggccactgtcgtgcaggcctgcagcgtgttctacgacacccctgcaacgctcgataaagcagagaaattgatagcggaggctgctggatatggttcacagttggttctttttccagaagtctttgttggtggctaccctcatgggtctacctttggactgactattggcagtcgatctgccaaaggaaaagaagactttcggaagtatcatgcggctgccatagatgtgcctggcccagaggttagccgcttagctgcattggccggaaaatacaatgtcttcttggtgattggggttgttgaaagggcaggctacacactctacaatacagtgctctcctttgattctctgggaaagtacctaggaaagcaccgcaagctcatgcctaccgcactggaacgagtattctgggggggggga

SEQ ID NO: 75079 - DNA, 519 bp, Zea mays
  Clone ID: MRT4577_168500C.1
gatctgactaaagcatagcacacctggctatctatctagcgagagagagagaggaaagctgagatagatatggcatggatgtcgcgtgagcaagaaggcagcaggcggagcgctggcgctgctgcttctccagatggggtgagctccgacgacggcgacggtccgcctcctgcaggcggatacctccaccgtggatgacctggacatcatcgccgagggagtctggccatccagcgagaggcttcctctgcggtgaaacctgtgtcttcctaccatggtatacggcagccatgggttgccaatgcattgggcaaatctgcatgatgtgatatctggactaccgctatttgcaatttgtgttgggagaaacacaggacgggacggtggcgaccaacttattgtatgtggatgatgatctaacaagcagagtctattaacaagggagatgtctgctggtgcctataaagaaaacaagaaaactccaaaactccatctagccccacaatgtgcttgcttaaa

SEQ ID NO: 75080 - DNA, 561 bp, Zea mays
  Clone ID: MRT4577_168503C.1
agaatgcggcctttgcgtgaaaaaaaacaagagtgcttacttttttttttcttttactaagaacttggctccccgcgggattctcccgaaagggagccgccggtcggaggaccgtgaggtaaatatcttgtgcgctgcgtgccctccggggggggggggggcgtgttggttttgtctgttgtggggccgtgtccattgctgggctatatggtggctccgctctgcttttctgcctctctgggatactagatagccccgtgtcttgtcttgtcgaatgttggatatgcactttcgggggcttaagctacgcctggcttcacgcttgttggggactgtttctgtgaggtcttaaagattgccttctttattcttgcttgcgatgactatgtcattgacgtaggtgaagttgttgcgtcccatctggctctctagaatgcttttggttgccttgagaccgtggtgccgacgtttttaagccttctggcattcgcacaaagcattatgtgcctaagggtgttattaaacttgtctttggcttgtcctcctccttcatgttaatgt

SEQ ID NO: 75081 - DNA, 490 bp, Zea mays
  unsure (1)..(490): unsure at all n locations
  Clone ID: MRT4577_168505C.1
gtaccggcctcttccctcgagttttttttttttttttttttttttttttttttttttttttttttttttntttttttttttttttttttttttttttttttttnttttaaaaaaaggggcttcgggtttttaaaaccggctttgaggggtttaacagggcccaaaaaagttttaaaaccccttaaccgggttttttgggttcaaacccccggggccccaaggggaaaaggtgggggggggtttttttcctcaaaaaaaaaccccaacaagggtttaaccccggtcgggaggctcccccttaaaaaaccctccccccgcggtacttttggggggccctttttcctaaaaggggggggagggaaaacccgagcttaccccccataaaaacaattttcttgccggttaaaatacccatttgccaatttttttggggtttaaaccacagcttggaagggaaaggttttttattcctttggccccccccccaggg

SEQ ID NO: 75082 - DNA, 1042 bp, Zea mays
  unsure (1)..(1042): unsure at all n locations
  Clone ID: MRT4577_168506C.1
cataggcatgatcacgtagacaaagacgacgtagccgacgaagatgttgncggtggcgaagaagggcgagatgagggggctgaagaggaaggaggacacggtggaccagtcgagcgtgaaggcgaaaagaccaaggcccttcatgcctgaccccagctgctgcgccgtcacggacttggagaagacccagcacagccatgaggtggacgtcagcgtcgggaacaggtagcctggcacggcgtaccatgcgaagctgcacgcgagcaccaccacgaagaacttggagcgggagatctggcgtgaggctttcgcggattcgtccttcttctcgtgcaatgcctggaagagggagacctgcacgagcgtgcccggccaccacatgtgcgccggctgcaccacgtacttgcgcagcagccctgcccacccgtacccgagcacctgcgtggtgacgacgaggagccaggcggtgaggaaggagatgtggcggtggtagaaggcgcggatgatgtcgatgatggcgacggcgtaggcgctgccgttgccgaacgcgaagccggcgttgggcgaagatggagatgagcacgtgctccttgatgttgaagggccccgggttgaggctccactccccgccgcccagcagcgcgggcgcccggaacctggcgcgcggcagcgcgcgggccatgaagtggcccagcggcagcgacgccacctgcaccgtgatctgcgtcacgatcagcggctccgtccggtacgagaagaactggttgaggatgctcatgagcgcgcacgacagcagcccgatgctccacatccggaacgtccacaccggcagcgacgggtcgtccgtcgacggcaccgtcagccgcacctgctccaccggcgaagtctcctcctcctcctcctcgtcgccgaggaccatgccctcctccttgccgctgccgccggcctcggcctcggctaggccgcggtggtccgtgcctatctcgcccatttcttcgtgcttgctttgctttggggtgagcaataaggagaggcgcactct

SEQ ID NO: 75083 - DNA, 1084 bp, Zea mays
  unsure (1)..(1084): unsure at all n locations
  Clone ID: MRT4577_168507C.1
cctcctcctccccccctatcgtcttcctccccatctccggcgccgctccgcgactcctccgctccaaggaaagatggcatcccacattgttggataccctcgcatgggccccaagagggagctcaagtttgccttggagtctttctgggatgggaagagcagcgctgaggatttggagaaggttgccgccgacctcggggccagcatctggaagcagatgtcagaggctgggattaagtacattcccagcaacaccttctcatactatgaccaggtgcttgacacaacggccatgcttggtgccgtcccggaccgctactcatggactggcggagagattggccacagcacctacttctcaatggccaggggcaatgccactgtccctgctatggagatgaccaagtggtttgacaccaactaccacttcattgtgcctgaattgagcccagcaaccaagttctcatatgcttcacacaaggctgtctctgaatacaaggaggcaaaggcgctcggtgttgacactgttccagtgcttgttggaccagtctcatacttgctgctctccaaagcagcgaagggtgtggagaaatcattctctcttctttcacttcttgatagcattcttcccatctacaaggaggttgtgactgagctgaaggcagctggtgcttcatggattcagtttgatgagcccacccttgttaaggaccttgctgctcacgaattggctgcgttctcttcagcatatgctgcactcgaatcggcactctctggattgaatgtgcttattgagacatactttgctgatgttcctgctgaatcttacaagaccctcacatcattgagtggcgtgactgcctatggttttgatcttgttcgtggaaccaagacgcttgagcttatcaagagcgctggtatcccatctgngaagtacttatttgctggtgttgtagatggaaggaacatctgggctgatgatcttgctgcatctctcagcactcttcagtctcttgaggcggntgtcggcaggacaagcttgtggtgtccacctcctgctcactgatgcacactgctgttgatc

SEQ ID NO: 75084 - DNA, 1995 bp, Zea mays
  Clone ID: MRT4577_168508C.1
gaatcccagtcaatagtcgcctttatcgaagccgccgcagcaggaggaggcaggggaatcccaagcggaagggtctcctcgctctcctatctcccttccatcagctgcggcgggcggcgatgggggcgcggaggaggctgctggcggacacgccgccgccggagcatcgccacaggcagggcgcgccggcgtcggactggagcgcggggtacctcaacgggtggctgtcgcagccgacgccgatcttcggcctccgcctctgggttctcgtcggcatcgccgtcggcgccgccatcgtgctcgtgctcctcctcatcttcgtctgcctctcccaccgccgccgccgccgcggcggcgacctgctcgccgccaatctctaccccgccggcgacaccaagcttctcaagcagcacctccagcaccaggccacgcccaccaaggacatccaggagattgtccgccgccagcaggcggagacgccgcctccgccggcggtgcagctcgccaaggccgtggcggagccgaagacgcctcctccgccgccgccgccgcagcacaggcagccggcgcggaagacgcccggcagcggcgggagcgaacgggacggggccacgcctaggagcacgggaagcgcggggatgccggaggtttcgcatctcgggtggggccactggttcacgctccgtgagctggaggaggccaccgacggcctcaccgaggagaatgtcatcggggagggtggctacgggatcgtgtacaagggcacgctgcacgactccactttgatcgccgtcaagaatctcctcaataataggggccaggccgagaaggagttcaaggtggaggtcgaagcaattggtcgtgttcggcacaaaaatctcgtcaggttgcttggttactgcgtagaaggtgcttacaggatgcttgtgtacgagtatgtggacaatggtaatcttgaccagtggcttcatggtgatgttggagaagtaagcccactaacatgggacgtcaggatgaacattatgcttggaaccgccaaagggttggcttatcttcacgaggggctggaaccgaaggttgttcaccgtgacatcaaagctagcaacattcttcttgaccagcagtggaacgctagagtatccgattttgggcttgcaaagctattgtggtcagagaaaagctatgttacaacccgtgttatgggaacatttgggtacgtggcgcctgaatatgccagcaccggaatgctgaacgagaggagtgatgtatatagctttggcgtactcataatggagatcatcactggtagatctcctgtagactacacaagagcagctggagaggtcaacttggttgagtggctcaagaccatggttgccgagaggaaagcggaggaagttctggacccaaagatggctgaaaagccttctcccaaaacgctgaaacgggcgctcctggtcgcgcttcgctgtgtcgaccctgatgcgaacaagaggcctaaaatggggcatgtgattcacatgctcgagatggacgatctcctcttccgagatgataagaagcccgggagagacgttcatccccatggttcagacagatacagctccaaggaggaagggagcatcagcaagcgcgaacaccaccaccaccaccaccatcggcacagatgatacacagcaagcgcgagcatatgaggattgccattagagagtagcgacattaaccatgttccccgcttctttcccctcccgttcaatctcactggtctttgattgtattatatgtgagcatccatcattctgtgacgatacttgatacttcaatcgcacacacagacacacaatgacacgcaagtgtagggggaaaaaataggcatggtgtttgtgactgactaacatgcccagaccaggccaaaaccctgcagattttcaatgcaaggaatccagcaaacgcgagtatagtacggggtttttttagacccaaaactctagagcg

SEQ ID NO: 75085 - DNA, 452 bp, Zea mays
  unsure (1)..(452): unsure at all n locations
  Clone ID: MRT4577_168509C.1
cgttttccctctccccgcaactcgcaagcccgatattgtcggcgttctcgcacccaccgatttggcctgcctcccccaggattgccggcgttctcccccctccccgtcgcgccgcgcgatgccagccgtgattcccgcgtccgcccgccccacatctacaaacttgctctgcagatgtcctcccgcccatcgtcatccatcccctgccgccgccacggacgaccttcctcggccgccacaagggggcttctgtaagcgagcgtgcagggggagctataggcgagcgcgcagggggacccgcacacgacgacgcccgcgaggatgctggaggacgtcatcgccgtcgcgctcaacattagggcctccgacgcgctctttttggcctagaaacggaggaggcgatgncgcgccgtctcgcccgtcagccggtggccgcaccaatgagttccacg

SEQ ID NO: 75086 - DNA, 944 bp, Zea mays
  Clone ID: MRT4577_16850C.1
aaatttgggcctgctttcatttaggcccagcctttgtaaggatacggttcgtgaacctacccgagaggacaaaggtcacgcgtcctcatccacgcgaaaccctagcgccgaatcgcgatccccttccccacgccgtcaccacgatcccaccccgtgtgaccgccgatctgctgccgatgacgcagaagaagcgcccccgccgcaggaggtctcctcgcgaaggaccctcccgccgtcgccgcggtgaagaaggcgcatcgttgtctggatcccttgtcgaatcggatagcagcagcacgacatccagcgcgccgccgtccggatccttcgacaagccggccgggcggacttccagcgcgccgccgtccggatccttggacgagccgccggtcgcctggccggcccgccagtccaggtaccatgagatcctcgcctcgcgtctcgtccgattgcagttacaagcgggcgtcgccatcgacagcccaaatcttccttccgatcaaattgtccaagtcctcgctcgttctaatttctatgatgatgagctgcgggctgctctggtagaatatcaagtccaaaagttcttgagcgtaccccacggaccagatgttgaagatacatactttggagaggagtcgggcgatgatatcactgcagaggaattcgtcaagtactccggacagctaaagactcgcagacctgctgaaattgatactgagactggactggatcaagagcagttggacagcctccttgccaagtataaacgttatcgcttcaaagcttacctgttgttgttaggaaagcctgtcgacgagctagaagaagctgcattggaatccaagtaccctatggagcttgccttggagaatgacttcttctatccttgccatcatgatagcgcctttgggctggtattttgactccgacctctgtttacttgt

SEQ ID NO: 75087 - DNA, 1092 bp, Zea mays
  unsure (1)..(1092): unsure at all n locations
  Clone ID: MRT4577_168510C.1
aggcaattgccttggacttctacgaagttccaccaaaaattaaaaaggcattttctgacgagttttggatagaagactcgccaggcncaaaatatgatttggaggtcgtgcgacccgcacttcagggttacttcaccatagttacaccaacccaggaaattactcgattcatttcatggcaacaaaagtgtcgatgacggtccttcctgcaaaggccaccttcagcagtagaacatgaactgcttgacgctctccatcactttcggcagctgcttcaccggaacagcgccatctttcatgcgagagctcgccactgaagacgacccctggtcggagaggtcatcgtccatgtagtggcgcgcacggaaggccgccaggtgtgcgtagtatgccgggggaactatagagactgatcgagtgcatcgcgcatacgtgtagcacagtttgtaggtcaacgtttgcagtgcatcggcagtgaatttgttttcgtcaaacagaacatggtagtgtgctggccggctcgttccctgtatgccagagtggctacaaaggtagaagtcgaattcacttggatggcatatcttcgtgtcaacaacagttcctggcaaaatgtttccacttcgatccatctgtccatgtgcatgatgatcttcagggaaaagccgtgtgtgatggcgcttttgcaccacaatgaatgtaatgggaggaaggtagccctcttccaagctggcacacgcctttcgaattgcatccacttcataaagcaagacctggctaaactgcccctcactgacaccatctcgatagaaaattatcctgcttggtttgtacggctccaaagataattgtaggtaaatctgttaacaaatgtattctcctatttaaagcatcttcgagaactgtattacggccaccaaccttaacattaattttaagagccaggttttggagatattgtcggccacctttaaaaacattcttaggttgacaacattgagttactaaaccaagttcagtttcacaaagacgctttatcctaccataaaagacacttgcatttgcatctggcccacgcgtccgcccacgcgtccg

SEQ ID NO: 75088 - DNA, 1056 bp, Zea mays
  Clone ID: MRT4577_168511C.1
ccaacgaactgagaggctcactttatatataatgcatcaagtcaaagcagaaaatttcaaaagcaatgaccacaaggttgcaacttacaaatacccccaaaatcacaggcacttgccttggacttctacgaagtccaccaaaaataataggcattttctgacgagttttggatagaagactcgccaggcccaaaatatgatttggaggtcgtgcggcccgcccttcagggttacttcaccatagttacaccaacccagaattactcgattcatttcatggcaacaaaagtgtcgatgacggtccttcctgcaaaggccaccttcagcagtagaacatgaactgcttgacactctccatcactttcggcagctgcttcaccggaacagcgccatctttcatgcgagagctcgccactgaagacgacccctggtcggagaggtcatcgtccatgtagtggcgcgcacggaaggccgccaggtgtgcgtagtacgccgggggaactatagagactgatcgagtgcatcgcgcatacgtgtagcacagtttgtaggtcaacgtttgcagtgcatcggcagtgaatttgttttcgtcaaacagaacatggtagggtgctggccggctctttccctgtatgccagagtggctacaaaggtagaagtcgaattcacttggatggcatatcttcgtgtcaacaacaaggttcctggcaaaatgtttccacttcgatccatctgtccatgtgcatgatgatcttcagggaaaagccgtgtgtgatggcgcttttgcaccacaatgaatgtaatgggaggaaggtagccctcttccaagctggcacacgcctgagtacaaacataaacgtaactcaattaggagattgcaacaaaagagaataatattgtgaagaaaaccacctttcgaattgcatccacttcataaagcaagacctggctaaactgcccctcactgacaccatctcgatagaaaattatcctgcttggtttgcggctcccgtttgccttatagaatgacacgagtagttccctgatcattgtcgt

SEQ ID NO: 75089 - DNA, 700 bp, Zea mays
  unsure (1)..(700): unsure at all n locations
  Clone ID: MRT4577_168512C.1
ctcgagccggccgggacagatctacttcagctctacgactctctactctttcgttgatgggccgaactcgacttgtctctgacgaatagctctacatcttcttgagatcggtgacctgccgtgagatactcatgatgctccctttcgccgcgcaactagcaccacagcttctttcgaaacacttctacacaatgngcgcaacagaaacaatagagccgattcttcctcagaatgcgaaaccacacaataccccttctactttactgccactgatggtggcgctacacgtgttgccatcctttctggcgcttgaacactatgaatattgcgggtgataagtctaccgtataactgccggtgaaagatgtctacaccctacacagaatctgcggcttcataccaaatgaacaagagaatacgaccaccttgctcttctttgaggatctcgagctacatgatatgtgtgcgtctcctgacactctgtcaatctgattccataccctaagatagaggagtatgccccgtatagacaggttgtcacggatgttgacaacgatcaggataaccagtatcccaacgaccaacttaatattgaaaagcgagcccgcaagctctccgattatctatcaccttatactcaaacgatgaagctacccgtgctgtcaacaacaatgctctgcccacggatctgtcactgatg

SEQ ID NO: 75090 - DNA, 1383 bp, Zea mays
  Clone ID: MRT4577_168513C.1
cacgtccatcggagttgcacatccatgtgagttggcagaggtgtttgatgtgatgtgggcatttgtgttttatgtaatagatagcatcatcctcgctcgttgtgccgccttcgtccacacaagcgacggagctaaggttacgagaactagcccggtggcaccatgttggtctaccaggatctgctatctgacgacgacctccagtaggactccctcccctacaggcaactcaggaacggcgtcacagacgtcgaggacaagtgcactatcaaatacgcgatctttgccgagtgcatataatcttgccgagagcaaaataaagcaaaaggctatcggtaaggaggcagtattctgagtgtcgtcctctcggcagagatagacacctggtaaccggtggtggcacacggtgtgatcgcgaagggtgcatcaaggcgaagcaactccgtgtgaaggatgtggccgtcggatcgaaaacctaggagttgctccatttcgcccccagtggagtggataggctctatgtaaatagtagtagtttaggaagtgagaataaccctctataaatgtataggagggctgattagttcagcatatcttggctgccatttatttagagcactcattatagagctcctagttttctctctaggtagacaacagttgagccgagggttccacagcgattttgtacttcgactgtgttcttgattttcaagtttaatcaaaggaagggtcaccggtccagcccacagggctatttggcttcaaatctcagttttgtacccttgctgaaatttctgaagttttatagttttagtttctccttttccccattcttgtgttgttggtgaaaacccattgattcccttgagaggatttggtttggggattgattggtggtgagttgcactcctcggaccactgcatacacctagttgttgcagattttggtcgatatttgagaaaaactgagtttgaactcgttctagaaaaccccaacaaaaccccaatttctgctgtatttttaaatctgcgggtgagtcacaagtcagattaagctcaaattttggggagatcttggaaacatatttgctcaggtgtgtgtaaaatttcatatcaatcggagttcgtttagttcagttttaaactcaagaacagaatttcgtactgctgaaaacagcacatgttgacaatactgtattggaccgtttttttatttttttatttttttgtgtccgatttgcgatccgtttgctttgctgatctcatgtgagtattaagaacattttgtaatcatgagatcactcatgtgtttatggtttgagcacttgattcatctcaattaaaacaaagtgctaatttcctcagagctacaggcccacc

SEQ ID NO: 75091 - DNA, 2369 bp, Zea mays
  Clone ID: MRT4577_168514C.1
aaaccatcgtgtctcttgtgcttgttctcattgtgactattgtgttttacaagagcttggtccttagccacttgatttcattgtgctaacacttaatcaagttttgtggctttaagttttaagtttctataggatcacctattcaccccccctctaggtgctttcaccttccagcgacctctcctggatcgcccctgctacaacgacgcccggtgttggcagctggcacccctgcgtcacaatgccgtgtgcctaacccactagcagcccacctcgcgccaccttttgctctggccatgtttcctgctctagccagcaagatgctgccccaaggccggcctctcccctaccatggtcgtgcactatctcgcccctcgcctgaggcgtccttggagcgcctctctatccttcaaacttctctcatcgctggtgtcaacccccttgctaggcctagtgcaggcccttgccccgccgcccaacccttcttcgtagtcgccacagctggatccgtgtaggaccggtaaggcgaccagagggggggtgaataggagccaatcagatttttgtctccaaacactgaaaattaacactttacttcaattgagatgaagtaagtgcacaaacaataaacacatcagcaaacgactgatctcatgattacaaaatgttcctaatactcacatgagaccagcaaaagaaacggatcgcaaatcggacaccaaaaagtccaaaacggttaatacagtatcgtcaacaagtgctgttttcagcagtacgaaaatctgttcttgatttcaaagctgaactaaacaaactccgattgttatgaaattttacacacacctgagcaagtacctttgcaagatctccctaaattttgagctcaatccgacttgtgaatcacccgcagatttaaaaatacagcagaaattggggttttgttggggttttctagaaacgagttcaacctgagtttttctcaaatcgtgaccaaaatctgcaacaaataggtgtatgcagtggtccgaagagtgcaactcactaccaaacaatccccgaaccaaatcctctcaaaggaatcaaagtttttcaccaacaacacaagatcgggaaaaggagaaaccaagactataaaacttcagaaatttcagcaagggtaataaactgagatttgaagccaaatagccctgtgggccggaccggtgacccttcctttgattaaacttgaaaatcaagaacacagtcgaagtacaaaatcgctgtggaaccctcggctcaactgatgtctacctagagagaaaactaggagctctataatgagtgctctaaataaatggcagccaagatatgctgaactaatcagccctcctatacatttatagagggttattctcacttcctaaactactactatttacatagagcctatccactccactgggggcgaaatggagcaactcctaggttttcgatccgacggccacatccttcacacggagttgcttcgccttgatgcacccttcgcgatcacaccgtgtgccaccaccggttacctccagaatataaacgttttaggacaaaaataaaaatcttagcgagtgtcaaaaaggcactcgtcaaactatctctttgacgagtgccacgataaaacactcaacaaaattacggtagctcacggtcagcaaaagcatttttaccaggtgtctatctctgccgagaggacgacactcagaatactgcctccttaccgatagccttttgctttattttgctctcggcaagattatatgcactcggcaaagatcgcgtatttgatagtgcacttgtcctcgacgtctgtgacgccgttcctgagttgcctgtaggggagggagtcctactggaggtcgtcgtcagatagcagatcctggtagaccaacatggtgccaccgggctagttctcgtaaccttagctccgtcgcttgtgtggacgaaggcggcacaacgagcgaggatgatgctatctattacataaaacacaaatgcccacatcacatcaaacacctctgccaactcacatggatgtgcaactccgatggacgtggttcgagttcactctaataacccacacgatacatgccatatgcaaacacacgtgctcgctcctagaggccaaatctgctcacatataggtagactacacgtagacattattaagcgccatgtctgaagaaaaaattatagccacgactatgaatgtttggtcatgcgtgtccaccgatttgtatttctccaactctcacttttagagcctcatgaaagccaacaaagatgagtgcaaagaaaataactattcacaactggtccgcggacgcggggcggacgcgggg

SEQ ID NO: 75092 - DNA, 900 bp, Zea mays
  Clone ID: MRT4577_168515C.1
ctgggccgctcggcaccggccgggtatgatacaatctatgtcaatcgtgctcctaaatcaatcaactccagatgttgactcctgcttgtcaaccctactgctacctgtttgttataatcatttaaccaattgatcggtgtgattgttatctcatgtctatgaccacttggctttgatgatggaaactcttgggaagatgcctcggaagattgctagctcaggaactcgttccaaggattactttgatcggtatggagatttgaaaagggtcaggagactgaagttctggcccctagaccgtgtgctcgtagaaaggtacagtttcagcgaacccgacgccaaagggttcgctgactttcttcggccaatgttagatttcgctccggaggacaggccatctgccgcgcagtgcttgaaacactcttggcttaattgatccaacgcgacacgaaagtctgaccaatagatgtttacatacatcctacgtgcaaattcgctgccgaagactctttgtgactgtgattgcagatatccacggactttgatttgatgtaaccaaggctgagaatcaggagccactttttaggcgcagcctgatgagaacgggacatgagattcagctcggatgtagcaagcgtttcgctggtgtgtttgggggtgcagactgcagagctaatgtgatgttaacctgcatgtgtgttagtagggccaaaatattgatgtattattattttttggtaatgtgatctggccaacaaccttttcctttagctgagaagatgaactgctacagcactgcagtgtagtggttcagctagttatccaatggattgtgtgctgtaacctgtaacatttgtttgaaattgaccttatggatatcggaaaaaaaaaaaaaaaaaa

SEQ ID NO: 75093 - DNA, 524 bp, Zea mays
  Clone ID: MRT4577_168516C.1
atttctagaaaaaaaaaaaaaaaaaaaaaaaaaaaaaaaaaaaaaaaaaaaaaaaaaaaaaaaaaaaaaaaaaaaaaaaaaaaaaaaaaaaaaaaaaaaaaaaaaaaaaaaaaaaaaaaaaaaaaaaaattggttccttcccggcggtccccttaaaaggggaaatttttgaaattttccttcccattggcgccctttgggccttccttttaagggccccatttccccctttggggggtctaattaaatttaattggccaactttttacaatctccagcttgggaaaaaccttgggtttccccaatttaaccgctttgaaaaaaatccccttttccccacctggtttaattccaaaaaggccccccccgttccccttttcaaaaatttgcccaacctgaagggaaaagggaccccccctgtaagggttaataaaacctggcgggttggggtttccccccattgggccctttacctttgccttccccctatccccccctctttgcgtttttttcctttccttttc

SEQ ID NO: 75094 - DNA, 2435 bp, Zea mays
  Clone ID: MRT4577_168517C.1
gacgtgcgaaaccaggcaggcagggacgcggacccttcgtcgacctcaaagtacatccctcctcctcccttccaccggccccggcaacgaccggtcgctcggtctccgtcgtcgtcttcttacgttccttccgccccctctgcaacgcacaacttggactcgtactcctctgatccaccgtatacgcgcctagctagttcataccatatataggcgccctcacccgcggtgggggcagcacacgaggctgaacgcttgaacctgaacctccaaagcagcaaccccagcagctttagctcctcctcatcgcagccgcagcgccgtcccctactcttcctgcgaccaactgctgtctctccggcgacggcagaaccgtctctgcaggtgcagggagggacccgggagatgagtctggggctgctcaacacagagcgcaaccaccttctctccccaaagccgcagagcccgcgggatgccgccgtgtcgtcgctgctgaggtcacccagggcgtcctgcggctcctgcaccagagccccaagccgaagcccaccaagatggcgcacggcggcctggagcgctcgctcagcttcaagaactgggaggcggacgacagccggggcggcatcaacggagcgcgcccgggcgccctggcgctgcagcagcaggagagcccccggcgcgtggtctccgtgtccccgcaggcgcaggccatgatcgagtacatctcccctcgcccccgcgtggagctggaccaggcggccaccacgctgcagaagatgtacaagggcctgcgcacgcgccgcagcctcgccgacggcgccatcatcgccgaggagctgtggtggaagacggtcgactcggtgtacctcaacatcaagtccatctccttcttcgacgaggacaagcaggagaccgccgcgtcccgctggtccagggccgggcaagaggatcgccaaggtcggcaaggggctctccaaggacgacaaggcgcagaagctcgcgctccagcactggctcgaagctattgacccgcgccaccgctacggccacaacctgcatctctactacgacatctggtccgccagctccagctgcgagcccttcttctactggctggacgtcggcaacggcagggacttgcatcaccacaagtgtccacggagcaagctcaactcgcagctcatcatgtacctcggaccaaacgagagggcggcgtacgaagtcgtcgtggaggaagggcggctcgtgtacaggcagagcggggacccggtgagcacgaacgaggagtccaagtggatcttcgtgctgagcaccagcaggtcgctgtacgtggggcagaagcgcaagggcaagttccagcactcgagcttcctgtccggggccgccacctcggccgccgggaggctggtcgccaaggagggcgtcctcagggcgatatggccctacagcggccactacctcccgaccgaggagaacttcagggagttcatcgccttcctcgaggacaacaacgtcgacctcgccaacgtcaagcgatgctcggtggacgacgacgagttcccgtcgttcaagaagccggcggcgggtacagaagagaagcagcaggcagcagaggaggcagccccagtggcgacagaagaggagccacgacccgtgccggagctgcccgcggtggacatcgtgaaggagggcacgggcacggccgcggacgcggagccgccgaagacggcgatgggcaggcggccgtcgttcaagtggtcgacgcccacgggcgcgcgcatcggctgcctccagaactacccggccgacgtgcagagcatggccctggagcaggtgaacctgtcgccgagggtggcggcggtggcgccgtcgccgcgcctgcccatcccgtcgccgcgccccagccccaggatcaggctgtcgcccggcctgcactacatgggctgccccaccccgacgggcgccagcaggctcgcgaccccgaccccggcgtgcaggcgctcctcgcccaagcagcagcagcagcagcagcacttgatggggttccgcgcgccggccgtggcgctcacgctccccaagcacaaggccaagtgatctgcttgctgcccattgacacctcgccgcagcggcgttttccgaggtgttgctgcgttgcgccgggttaacaattttgttgattggtttgttgcgttctctgatcggctaccattctttcgtacgttagttcgttcctgggtcatcgtattttgacctcactctggtagtctggtagcactctggtgcttgcgctctgcgtgcaccactgctgtacaactctaaactacagcctgcaatgcaaggccctactgtaacctgaacctgcatcctgcagttcctcagacaaaatgactgcaggttccgttttgaataaaaggattcgttcatgaatgttcatg

SEQ ID NO: 75095 - DNA, 445 bp, Zea mays
  Clone ID: MRT4577_168518C.1
aggcaaaccaaaattaagtcccacccaaaggaaattacttaaaaaggggcaaaaaaacccaacccagggacccgaaatattaagggtcaaaaaccggggggggggcctaaagcaaaacaccatttcaggaaacggcctaaacaaaaacccttcatcaggacgggggggacacaaaccaacacgggaggggggccaaaatttctcagggggaaaaaaagcccatcgctttttggaaaccccaacgggctttccacccccaccaaaagtcttggggggctggccacggacccggaggccccagtagggacccaaaccacggggggtcctgatctttttgagcccctcaagggcgcccctgagcttcaaaacaagggcggtggaaaccacctgggaaaacccgccggccttggaaaccttcttcctggtgaggaacccggacccgggg

SEQ ID NO: 75096 - DNA, 425 bp, Zea mays
  Clone ID: MRT4577_168519C.1
aaaaaagaaaaagggcctaagaaaaaacggcaggattttggcaaaccccaggggcgaaaaatatggggggggaattctccccggggctataagggggggggcatacccgggggaaagaacaccgaaacataaccaaggaaccccacggggcggggggcggggccataacagaaaccagggggggggcttttgggggttttagttaaaaaacgggacatgggtttaacctcgggggccactgggacaaaacctgagaagtgaacatgaggccacggggggggatctaggggggggggggagattttgggagacggcacatggggacctctggggggtggaaggacctccgattttcctcgcccacagggaccaaattcggggaatacttggcgctgaatttggtgtttatgggggggaaagggggg

SEQ ID NO: 75097 - DNA, 266 bp, Zea mays
  Clone ID: MRT4577_16851C.1
agccttttgtgagcgagcacaagcgttgcttaaaagcatggcaagtgtgggcaaacgtgctaatctcaacaatcggactgtaggacaagccgaaccgttgaaacgagtaatgaccaagcatgttgtagggattattgacatacattagtttctgaccaatatattttatgataaacccttgatctcatgcaaagacgtaactgaccaggcaagagtggaaaactttgtggaggatgggggatagagtgggctgacaatctaccaga

SEQ ID NO: 75098 - DNA, 969 bp, Zea mays
  Clone ID: MRT4577_168520C.1
atggaggacgtgcgacatgacatggaggtcctgcagcaggccaacgtggtccggccgcggctcgaggaggatggtgatagctggtgcgtctacaacgacgcccgcgaggagctccccaccgacgtcgaggcagccgacttcgacaggttcatcatcttcgggagctgcaccggcacacacgacgacgagccctggatcctcggcctcgtcgaccttatccgcctcctccacgccgccggcaagcgcatcgtcgacatctgcttcggccaccagagggaggaagagttgcttgcgtactggtggagagaggatcctttggttgaaagtgatgtttctccaaatctttataaggttggggaagatcaggttagggttcctgtgaaacctggattgcacagctatggaggcctctggcacgcgacacgacagggacggtcgcacgaggaaggctatccgatatccgtaggtcgggcgtttttactgaggaaaatgcccggggtcccgacaggaaagttagctgccaaactgatcctttgtgttattggtctccctggggattctcgctcttattggccacggtggcgggttcttaggctccttggcagtgtcgaggcagggtctctgcccgcaccattgtcgtggcctcacgcggttacccgtgctcgacctacttcatcgaagcaccagcttattgaaaattctcttatatgtggtatggacaaatatgtaggtcactaccggaatcgcgttctttgccgagtgtctaagacactcggcaaaggctattttacactcggcaaaggctttgccgagtgtaacactcggcaaagaacactcggcaaagatttcatcggcaaagggttctttgccgagtgctttttttcggacactcggcaaagactttgccgagtgtcaaaaagcactcggcaaagaaaaacactcggcaaattaagaatcgaaaatttttaa

SEQ ID NO: 75099 - DNA, 411 bp, Zea mays
  unsure (1)..(411): unsure at all n locations
  Clone ID: MRT4577_168521C.1
atctcttgttccttctcccccatcaacaccaaccccccgccctcctcttcctgcaaacaccgcctcaattcaggagggggggggggcggcgacaacacccgcaaacaaaccgggcggcctactcccagcaacagcagattctggcaggcagccgacgagctgcggcgaactctgcctcttatgggcggcggcggcgactaccatcgcagccgcgtcctgctgcctacccccagcagttgctgcccttcaaccaactggcagcgttggactctcctgcttacgtacagcagncgcaactactaccattcagccagctagctggtgtgagccctgctaccttcgtgagacacccccagngggtgccgttctaccagcacgccgcgcctaacgctggcaccctcttacaactgc

SEQ ID NO: 75100 - DNA, 1196 bp, Zea mays
  Clone ID: MRT4577_168522C.1
atattacttataaccattacatatcacttagtatttggaattttccaaacttgtccgtgctgtaatcaatttatatacttcaattagctagttttcgtcaacttatgcatattttttattttaagttttgtgtaagtcattaaattcttcccctatatttctaagattcatcctaattacttgcatggtggccatacaaaattccacctgtagccggatcaactgaattttctgtttcgttcctcaggattgaggtttagcaatctgtactgtgaccctctaatcatccccggcggtcacaagatcacggcaaggcagcggtggcaaccaacaccgatgcagctgcagatcctggagagcatcttcgaccagggcaacgggacaccgagcaagcagaagataaaggagataacagcggagctctcgcagcacggccagatctcggagacgaacgtgtacaactggttccagaacaggcgggcacggtcgaagcggaagcaggccgctgcttccttaccgaacaacgccgaatccgaagccgaggcggacgaggagcctctcgccgacaagaagccgaagtcagacaggccgccgccgccgccgccgccgatccaggataataccaaggctacgggcgctctcagcgccgacagggtctctggtgggacgcgtcacttggacacgggtcatgaccagaccagtggcgtgatgtatgggtgcaacgacagtggcttgttgagatcgtccggcagttcgggccagatgtccttgtacgagaacttcatgtcgaatccaagaatcgatcgtttcccggcgaaggtggagagctcccggagcttcccccatctccaacaacacggggaaggctttggcatgtttggatgacatgcatgctgctgcgctgagttgccgtgtgaaaaatggaggtcgacacagcgtgcgttcgatttgctgacgtgaaagttttatcttggatggtacgtgttgcttatcacggtctggttgaccacctccgcggatggtagctagctagcttgaacgaacctgctcttttggagtagctgtaagaggttgatatatagtagtatttgcacgtagtctaattactctaaattatcagcatataattcttcatgtttgcagatttagcacgagaccagtcctacgctgctgctgctgagcagcaggttgtggtt

SEQ ID NO: 75101 - DNA, 283 bp, Zea mays
  Clone ID: MRT4577_168523C.1
caccaacaatctgactgggaatatcatggaggcatttaaagagtgcaagaaccttacggaacttaacctgcaaggaaaccatcttcatggtgagataccacattacttgtctgagctaccactagtaacagtggaattggcccaaaacaacttcacaggaaagctgccagagaaattgtgggaatcatcaactattctggagatcacactcagctacaatcagcttactggccctatacctgaaagcatcggtagactcaccagtttgcagaggctacagatc

SEQ ID NO: 75102 - DNA, 504 bp, Zea mays
  Clone ID: MRT4577_168524C.1
acgggcccctgcatactacgaactcagtgtacaatgatgcatgatagcatagatggactaagctatagacatgcccttttgtgcctgtatgcgcattcactctatccgccgatcgatccgaacgctctcattacgacacagtactgctacacactatatcactcacacgaaataatgagagttcttacctacatctattcgtctacgggggactccaataattcacataccgctaaagataatgcgattattaagacacactcttgttacacgactgttacaaagagagtgacaaattataagcacatactgtgctgcatagtatacattggagtcccacgtgacgataaatgtaggaagaactacattaaccgttagtgaactgagagcgacagtatgtcctaatgtaggatgagaatactattggattagagagcctcacgcaactgaggcgcatattacctgaaccatatactgacttgcttcacttaccactgaaaatgc

SEQ ID NO: 75103 - DNA, 489 bp, Zea mays
  Clone ID: MRT4577_168525C.1
ccacgcgtccgttttttttttttttttttttaaaaaaacatgtatatggattcgtgttcaaatataaaagcttcccaagttacatgtcgatccaataaatttatgttatttcgatgcatcgagcacgcgatagctaataacagatccagtagaataagtgccagatgagatccgagcccactgttattacaataataaactttttttgagactttttatataataatttacccttgaacctgttgatcttgaacgttgaacctgttgatcttgaagtgaccgagttccacgccggcctccactgcagtcctcgcctcgccgtcgatggccatctcagctaggagcctccccaccgccggccccatcttgaagccgtgcccagagaacccagccccgaccaccatgtcctccccgaattccccacccagccagtcgatcctcgtgcatcgatcacgaaatccttatctggcgtcatggagcatatgcatg

SEQ ID NO: 75104 - DNA, 284 bp, Zea mays
  Clone ID: MRT4577_168526C.1
ggcaggcctaggggtgccgttgccgtgtggtggtgcggctacctcgtcgatcacgaactcgaccaactcacgtacatacactgatatacacagacaatacagtagctagctagatagtgacgtggcaactcgattatttaccgtgtacgtagtacagtaatttgttcattattagagcagtagagggccgtgtgggactgatttttggggcagacgccggcccttaaaaaaaaaaaaaaaaaaaaaaaaaaaaaaaaaaggaggcccggggaaaaaaaagaaaa

SEQ ID NO: 75105 - DNA, 499 bp, Zea mays
  Clone ID: MRT4577_168527C.1
gcaagaacaaggtcattggtaaatttcaaaaaggggcaaccaccggccattggcctggagccaaaacatttaaaacatttcccccaccgggaaagggagcccccaaacgaaggcccccatttacttttaggaaccctaccacaaccggccgaacgacgggggcccaagccccctcgcccctgaggccccgggcgagcgggagggccctgggcccgaaagggacccccccgggggggaggggccaaagggggggggccccaaaaagccccaccagggacccctcggggggcccctgcagcgccccgacggggggggaccggaaccccaaaacaagcttgaagacctgcgcaaactcccggaccaagggctggaaggggaaaatggggacaaacaactcaaagcccttttgggacttggggatcccccggaacccaacagcgcccgggcggaaaccggggggctttttaacccccccggggggcggggcccacttgccccc

SEQ ID NO: 75106 - DNA, 374 bp, Zea mays
  Clone ID: MRT4577_168528C.1
ggggcggaccggggggaccccaaaaaagaagggtttttattccaccaaaaaaagggaaggcaattggggttggctttggctttttggctttttaaacattggccacacttttaacaacattgcacatgggtgtccaaggaacaacaaaagagaggaatgatgtcccttttcaacgggggggaacaaaaaatctaaacaatcattttggaaaaaaggggagccgaaaaaaatttgagccaccacctttttcacggaagaaaaaatttgacccggtttgttaagggggctttgaggctccattgttttaaataaaacccctttggggtttttccagggggggaatgggcaacctaaaattggggccccttcaaaag

SEQ ID NO: 75107 - DNA, 357 bp, Zea mays
  Clone ID: MRT4577_168529C.1
agctgaaaccgttattaatcacaaggcatgcactcctgggctcgaagttacttatggcatgacgctaggaacacgaccctaagctggacagtttcttgctgtatgggtacaaaaccaacgaccaaagcaacatgaattgagtacttaagcagctgaagaaaacggaagccatcagtgtgggggcccccaatgaagttaaacggctggaaaattaaaaaaaaaagggccccccctgggttttttggtttctagggggaaaaggaaaaaacatcgttgaccccactttcagaaggtaggcattcaagagaaataatattgaaattttacaggagttagttcatgtctactggaaaaaca

SEQ ID NO: 75108 - DNA, 439 bp, Zea mays
  Clone ID: MRT4577_16852C.1
gtttcacatataaacacaactgtgtccaacattggcagccaaatctttagactaattatgcttcttggaccttttgctagtgctgaattctgagaccatgctccccgcaatgactggcaagctgctataactctccttgtttcgccgaacctcgtaccatcagtggcttcagtttgtgaaaacccaatagtgtaaccctacatgatccaacatgctatcacaactggcatatcacctttatcatcattaatgctccaacactcataacacctatcacattaaatacctttggtgcatttattggcacaaaacatgaaggcacaacaactacaacaacttgaactaacaaaacttgctgcctactgtcagcaacagcaggttctttcattcaaccaactagctgcattgaacactgcttcttatttgcaacaaccaccac

SEQ ID NO: 75109 - DNA, 365 bp, Zea mays
  Clone ID: MRT4577_168530C.1
agcaaaaccaaagagattggctagcatgagaaaccggagtcagggcaggaataacgaatacacatttactgaaacaaacccatatcacgcgccacagtaactttacgcatcatacgaggaaaaacggccaacaaaatatgctgactttgatcaccctaaactaattaactcttgcctgacatttcaggcttcagcaatgagcgaacttcatacggcaggcagctttacttaccagccaggaccgcagagctcagcaatggactgcatatgtttgccggcattcttgacgaacggggcgctagtaacactatcttgaacaaaacgtacgccggatggtctaccaaaatggggcatgcctagagccg

SEQ ID NO: 75110 - DNA, 498 bp, Zea mays
  Clone ID: MRT4577_168531C.1
ggttggacctttgggctgatttagtgcttgtagagtcgttgagagcgcgtcgcgtcccgtctactcattgattgactgactctggtacggtggatcgggggttggcgtcgactgggtcggcgtctcctacttcgtctcttttgggttcgtctccttagacttttggtaagggttggactactgagcctggtaatccttagattagtggttctcttacttctacttatgttgctactcatcctgtttcttctgttactccttcttctgttgctggtgcttatacccattctggtcagtctgctgttggtgggtcgagtgaggtcagttgtcgtcggtatgtggtggtttggtttggttcggtcgcacccgatactaactcgggcggtcggaccaggcatcgtgcggcgtggaggtacacatcatcacacatacccatacgcctactctgactcgtccgtcagtcgtacgccgacccacccagtcatcatcccactaatg

SEQ ID NO: 75111 - DNA, 384 bp, Zea mays
  unsure (1)..(384): unsure at all n locations
  Clone ID: MRT4577_168532C.1
ccggccgggaaaaactccgaatgcccctcaccaccgctgttggacgggcgtccggtgcaaccgtacctcaccgaccagaccgccaccatggcaccgccgtcgtggcaagggcacgcagccgccgtcctttccgtgcccctgctcatcctcgtcgtagcagcgtccaccaccgctatcggcgtcaactacggcaccaagggcgacaacctcccgccgccggcaacggtggcctcgttcctggccaaccgcacccgcatcgaccgcgtgaagctattcgacacaaacccggacatggtccgcgccttcgccggccggngcatcgcggtcatggtgaccgcgggcaacggcgacatccccaagctcgcgaccaaggacggcgcggcc

SEQ ID NO: 75112 - DNA, 320 bp, Zea mays
  Clone ID: MRT4577_168533C.1
acaataaaacaggaaacctcaaattaagtactgagttattacataaatcggagtttctgagccgcaaataaagttcacaaaataaagtgcagcggataatcgatgttgccggtactgaggaaatgggcacggcctagcccacttccccttgtgcggccgacactgctcggagcaacattcaagtcgcccgtccaactccgtgtcaaggtggccggccttgtcacacaccccaccattttcccgaatggtgcacaaaatggctgcggctgctgcgagatacatcataccagccttttttgaccgcccctgctccaacccct

SEQ ID NO: 75113 - DNA, 369 bp, Zea mays
  Clone ID: MRT4577_168534C.1
ccccgcgtccgagatcgagagatgcatccgaccactccgcgcgcagtcatatgcaggttacagggtctatggcctctctagcaaaggaactacttaggctcaggactgatgggagactaacagaatatggcatgcaccatctcttggcctgacatcccaggcagaagatggccttacataggaaaactgtggaatcagctggtcgctcataaagatagagagacttgctgaaggcaaaaaagtcatcctgatacatatatggcagtgccaatggcactaggatgcaggcctgacacctagctgtagacgatgacctgtaactgactgacagagcacacgaatgacgctcatattactagcgacaaatgc

SEQ ID NO: 75114 - DNA, 425 bp, Zea mays
  Clone ID: MRT4577_168535C.1
ctcttaccatccgacaacctcccatgggtgggtacttaacatcatacaaattcgccttgtacacaataatttgggacgatatccctgaaccatatatacgctcacaaagctaacaacacataatcatgcacgttgtacacgatattttggtccaagacaacatactctccctgtacggatatagtaaaattgttgtagaggtatttaacgcctaaacctactctaccatctgcacaatcagttatatttactaaatatacaatgttgcgttgtaaaaggaaggcaaccggagctatccagcagtgatttacatactttggacatgtttggttctttacctcacttgccacattttgcctaactctgctgcctaaagttagttatttaattcaaacgactaaccttacgcaaagtgtggcacattt

SEQ ID NO: 75115 - DNA, 810 bp, Zea mays
  unsure (1)..(810): unsure at all n locations
  Clone ID: MRT4577_168536C.1
aagctcgagtgggatatgatccccgagctcagcatcgccgtccgctttgctgaatctcgccttgctgacctcatcggccagaacgagtttgagtgtctcgactttggtgcctacggcaagaactttatgacaagcatgggcttctcccccgacgctttcgtccagatggctttccaggctgcgtactatggtctctatggccgggttgaatgtacatacgagcccgccatgaccaaggtattcctacatggccgcacggaggcaattcgcagtgtttcggaagaatcggtcaactttgtgcagacgttttgggcggacaaccaagccgagcacaaggtcgaggctctacgccgcgcgtgccaacgccacacgaacaccacccgtgagtgtgccaaggcagagggctgcgaccgccacctgtacgcactttactccctctggcagcgcctcaccgatgacgagttgagcagcacgaccacgggtatggacagtaacagctacggcagcccgtacgggtcggaccgcgctttcagcccgccgccgcgtgtcggcagtcccggcacggatggcgacaactcgacaatgcgggcccgtggcgacagcagctcgtcacgccacaacagccaacagcacatgccttcgatcttcatggatgcgggttgggaccgcttgacaacacgatcctgtcgacctncaactgcggtaacccatctttgcgccagttcggtttcggccccgtgtcagccgacggctttggcattggctacattatcaaagatgacggtatcagcattttgtgtttcgagcaag

SEQ ID NO: 75116 - DNA, 396 bp, Zea mays
  Clone ID: MRT4577_168537C.1
cgaggtttaaagctagattatggtcttccatcctcacaaaggacgagtgccttattcttggaggcagcccgactgggatctaggcagcaacgaggaggaatggaggatgcacctgagaattccaagcaattggcagctgaaacccaaggctcaccaagtttcaagaataataatgcctcaaacagcaacaataagggttttaggcattgagtaatgttctgttgtgtgggactatgacatgctttaagctctttttagagcgcgtctgtgaaaaaatattcaaactgttgtctcttcatattctgttgtgtggtttgcatagtttggattaagctaacataacaatcaataattctaaaaaaaaaaaaaaaaaaaaaaaaaaaaaaaaaaaaaaaa

SEQ ID NO: 75117 - DNA, 526 bp, Zea mays
  Clone ID: MRT4577_168538C.1
ccggccggggagaactatctaactatcagtgtcgctacgaagtagtgctatagaaaaagctgccgtgatgtgcgaccaggagcatgggcctctcctccacggtcttcgtcggaaaggccgtgaatagtgtaggtatcgtcctacttcggggatgcctgagtgacgatgcacaagacggcggcgaaggtcaatgcagtgggggagtgcggtagaccgcggctcggtccccaccgagtgctgtagctgggcccactgtccggccagccaccgtgctacctgccgcgtgagcttccgggcgactacggctgggacaccgggtgactggcggaggacccggagacgttcgccaacaaccgggaggtggatgcgatccactcccgatgggccatggtgggggcggacgggtgtgtcttccctcaggtggtcgaccgcgacggcctacaggtcggcgaagccgagggtgataatgacggctcccagattttcacagaaggtctgctggactatcctgttcaagctaacgttg

SEQ ID NO: 75118 - DNA, 333 bp, Zea mays
  Clone ID: MRT4577_168539C.1
gactagttctatgctctccccaaaaaaaaaaaaaaaaaaaaaaaaaaaaaaaaaataaagggggggaaaaaaaaaaagggggggttataagttaaaaaaacttaaaattaaggggcggcagttttcaaagtgggggccttttttaagggtccctggattccgttttctttccttggggggccaaaaacttatatgggggggcccttttttaaattccgtggctattgttttacaccgtgggggtttgggaatttttttgggggggcccaaattaaaactttttggggctggttttattttggctgggggggggaatcccgggggttccccccc

SEQ ID NO: 75119 - DNA, 712 bp, Zea mays
  Clone ID: MRT4577_16853C.1
aattcggcacgaggcattctaactcctttttgatccattccagttgtattaaattcatattaatattgtttatcccctggtaactttattttgttatgaaacataaattaaaattatgcacttaatttgttctatatctaacacctaaatcttcagaaaatcataactctttaaccgtaactccgaatttagtgattcttgaacctgcgaccttgttgtggtacgtagaatattcttacgctgtttgttctcatgtttgatgtactgttatttttaagtacttcttgtctatttgtatgtattgctacgagtagcggcgaggttacgagtcacttgaagaccaagttggtacctgggaatcacgagtctaaggcaagttgtgcccttgatcactcctttttacctaataatgtttgttgttaatcactgtgccctagcattgtttatcccccaccttgcaaacagatgaattattgagtagatttgctattgttctacctggttttgggaaactaatgttttattatgatcatgttccaattatgttgtttaattattggttatgataagaacatattgttaattggaacatgaagaaccacccggtaaaacagtgctaccacaagggtggaatgggacggttcttggccaagtaattaggaaagcatggtagagattaccttaccccggaaggggaaagcggggaggcgtt

SEQ ID NO: 75120 - DNA, 253 bp, Zea mays
  Clone ID: MRT4577_168540C.1
aattcggcacgaggcgaagcctctcctcctccgttctctgaactaaatacagactaggacctgcttgcattggcctgagagcaagagctagaggagagagggggagctatgccggtccagctggtgctgcatgcatgctgatgctcatcaatgaaatcatgcttgcacacccccgaggccggattcctgagtgagcacggtgatcgatgctcgcaccacccagcacagcacctgtgaacttggaagcgaccac

SEQ ID NO: 75121 - DNA, 874 bp, Zea mays
  Clone ID: MRT4577_168541C.1
atctatccacccacccacccagggccgcacaccgccgcctcacctcctttgtccccctcccgccagctccacgagaaaaaggtagaccacgccaccgccgccgccgccgccgctgtcatcgccggctccgcctccttcccgccgccgactgtcccgacaactcccgcaagaatggggagcaccgacgagactgggactccctatggcgagtacacctatgctgagctggagagggagctgtactggccatccgagaagctgaggatctcggttactggagctggtggtttcattggatcccatatcgctcgccgcctgaagagtgaggggcactacatcattgcctctgactggaagaagaacgagcatatgaccgaggacatgttctgccatgagttccaccttgctgacctcagggtcatggacaactgccttaaggtcaccaccaacgtcgaccatgtcttcaatctcgctgctgatatgggaggcatgggcttcattcagtccaaccactctgttatcatgtacaacaacaccatgatcagcttcaacatgcttgaggccgggcgtatcaacggcgtgaagaggttcttctatgcctcgagcgcatgcatctaccctgaattcaaacagcttgagacaaatgtgagcttgaaggaagctgatgcctggcctgctgagccacaagatgcctatggcttggagaagctcgcgaccgaggagctgtgcaagcactacaccaaggactttgacatcgagtgccgtattggccgttttcacacatttacggtccctttggaacatggaaaggcgtcgcgagaaggcacagctgccttctgtagaaagctcagacctccaccgaacagttcgagat

SEQ ID NO: 75122 - DNA, 196 bp, Zea mays
  Clone ID: MRT4577_168542C.1
gctacccgagagcaacgatgggcaatttagctggatcaaagatgccaaaccgggcccaatgtatttttaaaagggattgcccaatgaataccggtcaatctctttgttaccaacaaaagcagggtgctaatggacaccaagggacattcagcaccaaacctgaagagatgcctaaattttattagatactaacggg

SEQ ID NO: 75123 - DNA, 460 bp, Zea mays
  Clone ID: MRT4577_168543C.1
acgcaaatccttttcttatctataatattgttgcttgataaaagatcgacatcaaatttcatacacatatataatttaaaaatattattaaacttgttctaacaattcggatatcaacattcgtccctaaatgtggtaggatatacatgcataccctatccataaaataaaggaaagttacgaggatgacactgacgactgtggcggggacgacgaccctggcatgaatgacgactgtggctcgaacgacgggtgtggcggggatgattagcggtgtcccttgatcttcatcgtggaacaatcttttaagtagatccaaattcttaggtggttcatttatcatatgcttaaatacgttcgcacatttctttgtcctttttatgtacatcctgcggcttttcaactctcccatatttgatgagtggatacgaaacagaacataactgtcatagagctgttt

SEQ ID NO: 75124 - DNA, 994 bp, Zea mays
  Clone ID: MRT4577_168544C.1
cacgcgtgcacaccaccccaacaacccacacaccgcaaccatggtcttcaccatcgatctctccggcaagacgattgtcgtctcgggcggcaaccgcggcatcggactggccatgtccgaggcctgcgccaacgccggcgccaacgtggccattctcttccactcgcaccccaaggcgcacgaggcggccgagaacgtggccaagcagttcaacgtcaagtgcaaggcgtaccagtgcgacgtcggcgacgccaagctcgtcaaggacacggtggcgcagatcgagggcgacctcggcacgcccatccacggcctctgcgccaacgccggtgtctcggtcgtcaagcctgctctggagctcaccaccgaggacttccacaaggtcttcaacgcaaacgtcctcggcgccttcaacacgtgccaggccctcgcgcagcactgggtcgagaagggctacaagacgggctccatcgtcatcaccagctccatgtcgtcgagcctgtacaaccagaagggcctcaacgaccctctgacgcagatcttctacaacgcctccaagggcgccgtgacgaacatggtcaagggtcttgccaccgagtgggtcaagcacggcatccgcgtcaacgccctcgagccgggcttctgcgagacggagcagacgagcggcatggaccccaagattcgcgagtggcaggccgcctcggtgcccatgggccgcttcagccagccgcacgagcaggccgacccggccatcctgctgctgtccgacaaggcgtcgtacatcaccggcacgcagctgcggcccgacggcggcttcagcgcctactaagcgctgcgccgcgacatgtactgcgcacgctccggcctcgatacctgtctactccgggccgggagctgcgcagcagaagggacatacacgcacacacacacacacacgcacaaccgttttgtagttgagcgcaacctgatgaactcacgatactagcacctaaaa

SEQ ID NO: 75125 - DNA, 2751 bp, Zea mays
  Clone ID: MRT4577_168545C.1
gcgtgctgtgctccattggtgagttccggtagcgttcataagctggcaggcatggttttccttacaagaacttgaagcacataaaaggggaactctttcctcaaagggagtcgatcagatatattatcgcatgactgatggagaacaatatggctgcaatttttcatgtaaagatatataacctatatggaaaaaacgatactactttaccttgttcctctctagcaggttcttgcagagacttgcaataggcaagcaaggaaaagggagttgcgtcgagcgtgagcgataggggggggggggtaaagtggtttaatagctgcccgactcgctagacaccttttagtgttcacatgtgttgtaggatataaaggtttttgcctagcttctaagttctgaattttcatcatgtaggtcatatccgtcctctgctgaagacaaaattcgtgaggtgtaataactttcaacaatgttgttcacgcctattgcagaattggatcttaaaagtacaaatgctgcaataagagtgcgtatcattagaaagtgggaattccgaggcgcaacaaatgatgggcctttgcgccatgtcaacctcatcttagctgatgaacagggcacagccatccacgctgagattcaagcccccctagtagctgacaaaggctcactaatccaaattgacaaagtctatgagctcaaacgctttcgtgtcactccatccagaaactattacaaacctgttgacaacagtatgatgatacaattcactctttacactcaagcaaagttagtccaagatccaccacccacctttccaagatacgcctacaaactcacatctttcgaaaatataggcaacaatgttgacaataaaacgtacttgatcgatgttctaggaatcttgacagaaattggctctttacaccatgttggttacaacaactcaaatatcatcagagacatatttctcaaagacataaacaatacctctacaaaagtgacgctttggggacaccaagcatctagcttctctgtcgacaacaactgcgacgagaatgataacaaacctgttgtcgtactgtttgttggatgccttgctaaacgattcaaaggagaagcatatctaagtgccacggcagcatgtacatggtacttcaacccagacattcctgaagcccaggtgtattacagcaagttgctaaacactaagcttcaaatgatacgccctcaagcgactgagcaagaattccaggcttctcaaacactcaacatcgaagacaggaccattgaacaactacttcagctagatccggatatgttccctgaacaaggtttcaaatgcactgtcactatatcacgcctcgtacaagatggtagatggtggttcccatcctgtatcaagtgcaacaagtcttcatcccagacatctactgggtaccaatgcacaacatgcaatgggacagaaactgagttcagatacaaactcagcttcattgccactgatggaacatccgaagcagaattcttttgctttgatactatagctaaacgaatagtaggaaaatcttgtcaaaccctttttagcacatcagatgtttctcggggtcctcctccagacctagctgccattgtctccctcaaattcacatttgcagttaccatcaacatgtctgcattctctgtcacaaatcgagtcttttctatcctttctgtcctaacaaatcatggaagacaagcatcgataccatatgccacacaaaacctttcccaacaacagatgttaacacaagacaacacacttgatgtcaaaaccacacaagaatctccagcaacatcgtttgccaaactatccacttctaccaaacaagaaaatgtgccacgacgcagacttacgtattctgagatgctacaggacacaaatgttgatgaacaggtttcagctgaactcaataaagacagcctcgcgtcacctcctaagaagatcaagagtgcacagctaggttctacatcaacgatctgatgatgttctcatgaaggtattatgacgagaatcattacttttggagcgaatcatcacttttggagcgcaaatgcttttgtgtatatataaccaaactgctgaaactttagcagtgctgtagatattgaacagatctccggtcgttgaaccgctaatgatgtaatatataaatttgtacaaacctacgaacaagtcggttgactatgcaactaccgtacctgctataattatcacctctgcattggttttactcttatatcctaatttactctttgttaatcatataatcatcatacattatatgataacactaaacgggttgccatgcgcgcatatgcgcgcttcatacactagtagtataaccactaggaagcccaattttctcaaccaaaaccttcataacagcttttgtaggcatcccagtagcaacgtactgatgctcagagtgggaaatacttgcatcattgaaaaccatactttccaaacaggtaatcttcattgacagccatactttctaaacaggtggtgacccaggcagaagcctgacttgaacaccatcacccagtatcacacacttcacaggtgctggccatgattgcctatgcgacaccgcatcccatcttggcatccttgcggaggaggtactggatggtggggatggtggcccgaatgcgggtgtcgtcagtgctgcgctggtgcccgtcgagtggcacgttgaggtcacagcgcac

SEQ ID NO: 75126 - DNA, 685 bp, Zea mays
  unsure (1)..(685): unsure at all n locations
  Clone ID: MRT4577_168546C.1
agcaaccctgctggcaacactctcattactggttctggcgatgggactattggcttatttgacatccgtacttgttctgcaattagccactcgtcagtgggatctagttgtgaggttacatctgtttcatttagcaactgtggcacctatttttctgcttctagcacatcaaataatactttggtatgggatacaagacttgtcccaataaatcaaagcaaggatgttttgcgaagcagagacatgcgattttttcggccttacattgctttagccatggaagtcagatgcctactgcagaatacacaagtcaactgccaggtcatgttgacgagggtgatcagggggtaaatgccacacagtggctgcataacgaacctgtacttgttactgtaagtggtgatggcagtgttggaatgtgggacgttactttaggtcaaccttgtgtcagacatatcgttgcccatactcgatgtgctaatgcggttgctgcggcccctaatgacanatacctctgcacaggaggaagcgatcagaaagttggtttatatcataacagaagtggggcgacacatcttaattgggcgtctttcacatccctctgcaggaaatgattgatatgctgcccgaaatatagaattgttccgctaacatgcaggnaaagttctctataggagggcagttg

SEQ ID NO: 75127 - DNA, 338 bp, Zea mays
  Clone ID: MRT4577_168547C.1
ttccctctcatcctctcgacctggctttctccctcccaccgtgccctgccttttgcttacgacctagacgccacgctcgcgtatcgccgttgattgcggtcccccatggaaccgtcgtcctctcaatacgtccgccggtccattgtcttgctgtatttgtgccagcgatatgtgtcactcgtgtttctccacgtgaaggcggacgagcacgcggccgagatggaggcgacggaggtcgtcccggctgccgaggaggcccacgaggaggaggctgctagtgctgcggcttaaacaccccaacgggctgggaggaaaccggcccccgcgactgggagtgg

SEQ ID NO: 75128 - DNA, 2688 bp, Zea mays
  Clone ID: MRT4577_168548C.1
gcttttcattcgatgatctctgttagtacttcggcaccgaaataacattttaatgaatcatacataaataaatatatgaatatggtgtaagctgcatacaaacatatttttcttcacttatctaatagattaagggggctgttgcaacttcacgtcaggcagacaaatttctgtagaaatttaaagtgagaaaaaattaaattggtgaaatgtcttgcttcactgtggagacttctgctttatcttcatgagagattgaacagcttctgttatttcccaaaatgccctgcatacctctgttcctaattatttttgcacgcatatctttttcagctggggagttctctgagtcaggcagctgaacttttgcagaaacttggctgctccagatggatgtggagccaggactcgtattgaagcctctgcttgatggacggctgaagcttgtgttgggccttaacattattgaattctcatgcctctttacaagtagagtctgtatctttttattctcccgttgcctgtatttctcttcttctttttctttgagcgtgaacatgtagtctttcagcattgctagaagcgggagctcatcatagtagaagatcttgtttctctcctgttcccagaattgtgtcttgaccattaactgttctaccaagcctggaattttgctaactataattcgagcacgctctgcccttttcaagtgcttgtgcgctcctctgcttactgagtaccttcggtcatccttatccattatgtctttccggcttgtggcctcctcttttgctctgtatatatattcatccatggtggctcagctgtggtccaattatgggatattgattctccagagtcttatttatctttctctgcaagtgactcttacattacttcccttaaagtcaaccctgctggcaacactctcattactggttctggcgatgggactattggcttatttgacatccgtacttgttctgcaattagccacttgtcagtgggatctagttgtgaggttacatctgtttcatttagcaactgtggcacctatttttctgcttctagcacatcaaataatactttggtatgggatacaagacttgtcccaataaatcaaagcaaggatgttttgcgaagcagagacatgcgattttttcggccttctacattgctttagccatggaagtcagatgcctactgcagaatacacaagtcaaatgccaggtcatgttgacgagggtgatcagggggtaaatgccacacagtgtgctgcataacgaacctgtacttgttactgtaagtggtgatggcagtgttggaatgtgggacgttactttaggtcttgcttctctgcgacgtcttctgctttatcttcatgagagattgaacggcttcgggtatctccctgaaagccctcgatacccttgagccaaagttcttttgcatgcatagcgtcatcaccaccggcgttctctcaagcgattacaggagctattccatatgcttcagtctgaaactccacgatctgctttactctggcatcctttctcatctgcatttctcgtaggaagggcgtgatggaattcagctgctccttcagggtgcctgccattttctcgggtcgtgccgggaacgatctttctccgagggatagcagcaggttggtgaattcagcctcggattcagctaaggcttggtgcagctggatcctggacatgttggcactgtttacttttcttcggtaaacttcctggcactcctgctcgagctcttcgagtattctctccctttcactctgctcttgcccaacttcatcccatatcatcttgagttcttgaagcaagtatgcacatgaagactctggcagcgcagcgccgggagctttttcagccatactactgagtgatcccatctcacggacctgacaaactcagagcagaaattgctcggccgagttcagctgcgcgaggtacgttacatgcttagagttagaggtggtggccgtgagggcatacaaccttgtgtcagacatatcgttgcccatactcgatgtgctaatgcggttgctgtggcccctaatgacaaatacctctgcacaggaggaagcgatcagaaagttgttttatatcataacagaagtgggcgtacacatcttaattggcgtctttcacatcctctgcaaggaaatgattgatatgctgccagaaatcatagaattgttccgctaacatgcagggaagttctctaaggcaggcagttgaactttggcagaaacttggttgctccagatggatgtggagccaggacttgtattgaagcttctgcttgatggacggctgaagcttgtgttggcccttgacattattgaattctcgtgcctctttacaagtagagtctgtatctttttgttctcctataaagaaatgttcatgaaatcaatgtcattctgactggtagtaggtctctattcttagattctgtttggataagggggatggaatccaaatccttaggatttagttcaactttgaactaaatttctagagcaacccccttatttgagcacccatgtatgagccagattatgtgattccctgtaccatcaaccagttgactaataaatactcacctgttgcctgtaaaaaaaaaaaaaaaaaaaaaaaaaaaaactcgaggaggggc

SEQ ID NO: 75129 - DNA, 394 bp, Zea mays
  Clone ID: MRT4577_168549C.1
gtgagctgaagccgggtgagccacttttttttggctcatgccctctagttcattttggaaaagcacgtcactggtgaagccatttgaaaaagaggtgtttggcacaacttttgcatgagccagagccgaagctgaaaaataagccctaccaaagggccctaaatgattaaagcttaaactcacattatcatgcaagcttttctttcttgtctactgaacatgcatgcatgcatgcatggacggaataagcagtagataaaagaaatgcacaaccagtctgttctgttgaattgaattgaatgttcactactacgactaagcaaagaaaacctgcagtcgtcttcagctactaaccagcggcggcgggtccaaggcatgggctggcaagttcaag

SEQ ID NO: 75130 - DNA, 471 bp, Zea mays
  Clone ID: MRT4577_16854C.1
ccggccgggctctcaccttaccaccgataattgctgcgacacgcacaccaccatcgatcgtatccctccacaaccatgtgcatccgacctgagcagccccgcaagacgcctgcctacgttgcttttccgcggcctccctcacgggtcgcgatcgaccacataccgacgcggaggtacctgcggacaaggtgcgcatcgtggaacatagcgcccatacccagggcagactgcacgctgaaggcacctacaacgagaagccgaacacgccagaggatcacgctgaactgcagggggcacacgaccaacccctactaccaccgcctcaccatctgcgaggcgacctaccctatccgtggcgccggcaaggatgcgcctcccgcgaccatgacggagtccgcgtgtatcggcaccagtgggtccaccgcgatgtagatcaccgccaaggtgccctacgacgtcctcttctccctc

SEQ ID NO: 75131 - DNA, 435 bp, Zea mays
  Clone ID: MRT4577_168550C.1
gctggacctttgggctgatttatgtgcttgggctcccctaacgcctttaaacgctctcctggatcctaccgacgagccaactaaggtagacgaccccgatacgaactcgatcgccgacacgtcccacgagtcgaatctataagacacggcctacgacgacctcgaggccactaactacccctacgacgacctcgaggtcattaacgattcctacgacggtaagggtgcattcggcgtcgaccattataagatcgcggcgtttgagagcagtagtaatacgaactaagattcgtagaatgaggagctagtaataatcctcgacgcgaaactcgcgtcgttaaagcctctatagactaacccgtcctataacgattcgagttcgttcgacgacgacaagctagtggcgatcctcaccgtaaaccgactccctacact

SEQ ID NO: 75132 - DNA, 370 bp, Zea mays
  Clone ID: MRT4577_168551C.1
ggggggaaaaaaaagaggcatgcttcatgtaaaatccccccctaggacatgtaacatggggaaaacatttgcaagaacctgcctaatgaaagtattatcgggtcaatggctggcataagaataatatatttcaacctggcctggcaatagatcaatagcaaagggataaccaaataaaaaagggtatcatcattggtaattgcttgaagaagggctttttaaatcttttttccaggcatattagcaaaatcgacaatcctttttttggaaggggcagcctaccgttttcaccatagtcaaatggggcccccatggcaaaagttccttgacccgggctggaccttttgtgcaaacaggattggccccatgc

SEQ ID NO: 75133 - DNA, 578 bp, Zea mays
  Clone ID: MRT4577_168552C.1
cccagcgtccggccgtccgacccgctctacaccgtctacgtcgccaccaaggcgtatgtcgaccaattctcgaggtgcctatatgtcgaatacaagagcaaaggcatagacgtacaatgccaggtacccatacaggtggcgacgaagttggcgtccatcaggaaacccaccttcctggcaccgtcgccggagacgtacgcccgcgccgccgtccgctacatcgggtacgagccgcggtgcacgccgtactgggggcatgcactggtgtggctcctcatctcccttgtgcccgagcctatcgccgacaggatgttcctaaacaggtccgtcaccatccgcgccaagggccgcgccaaagaagctaagaagaaggcgcagtgactgtgatgagggttctacgtgttggtcagtggatttgcagtagcctctagcgtgaatggtcacatttcgtacacgtttgtatctcctctcagtatgtacgttgctacactttgcatgtcgatgagtttgtaatacatgcacaatgcatttttcttattatctttggaaaatcagttctcaaagcaagtgattggcat

SEQ ID NO: 75134 - DNA, 144 bp, Zea mays
  Clone ID: MRT4577_168553C.1
tacaacaaaagctatatatataatcttaaacaaaccctgagataaaacataataccatattccacttcttatcttgcacatatactctatatatttcaccacctgatgatcaataaccactctacatatcactataataaatta

SEQ ID NO: 75135 - DNA, 180 bp, Zea mays
  Clone ID: MRT4577_168554C.1
ctccattcctggctcgcctttgcctttcctcccttgagccgcgcgctccctcccagccatggtgctcgtcggtctgcagctcgccccagccccggtcgctcctcctgctagcgcatgcccagctgagctcctacctcgtctccatggccatgcgctcgctcagctcgtagcccggctctg

SEQ ID NO: 75136 - DNA, 425 bp, Zea mays
  Clone ID: MRT4577_168555C.1
cccacgcgtccgctcacgccttcgggcttcgacccgtacaccgcctgcgatctcaaggtgaaggatctcaagaacgggcggcttgccatgttctccatgttcggcttattcgtgcaagccatcttgaccggcaagggccctatcgagaacctattcgaccacgtcgccgaccccgtctgcaacaactcctgggcatacgccacgaactttgtgccctgcaactaactgactgagcaacgccacacatgtgcactaccatcagacccatgcattcgtccgtccgtccgttcgtccgtagagtgaacagtacggtcttggctgtactctatatgatcagatcgttggcgtatagtatgctcaccagccggcgtttgctcatgatctacgtgagtgcttatgaatcaatcgtaatggttgccttctgt

SEQ ID NO: 75137 - DNA, 579 bp, Zea mays
  unsure (1)..(579): unsure at all n locations
  Clone ID: MRT4577_168556C.1
cttttcctccggtcgacgcgagggagcgggaggttggcctctaggcagggtggcgggcgaagatgttggacatacagaagcggcgcgtgcggctgctgctcttcatcacggccgtcctcgcgctcagcatcaccggttagttttccggtggcagaatcctttccttcctgtgcaatttcacgtgttagtttccgacggagatctgtaggtactgttttttccagcctctactgttggggaatgattttttttctttgtgaaacgcaaatttgactggtccttgttgtgagtagtgatgcgtttaagctaaacctagggataatttcttctgccagagtttgactggtttagattgatcatatcgatggtgggacttagattcccttttgctaagtttttcgctgccgtacttgtaattgtggggctgctattctgcaaagaagtcctgtgtagagttgttcagaaaggcataaatttgtcagaaagatctgactatgtttgctcataatacatttttgctgcaatttatcagaattacttaaattcggaagcttactagttactacnagtgtcaacagc

SEQ ID NO: 75138 - DNA, 936 bp, Zea mays
  Clone ID: MRT4577_168557C.1
gctcccacattgaggctgagaaggttcggtgcccattagattagagtgacggatgcaagttcaaacaatctccacctaataacctgggcaacacggctgcaatccatgttgggtcatcttcaccaatcacttgtcatcctactcccttgtgacattccaaacacaaacctacgtacactcctcaacccacaccaccaatcaggaacagaagttattgttgacgacatggaaggcaccacagccaacaagaccatgatcagtgcccggaagccgcgggtgatgctctactcctccccactcatggggcacctcgtccccatgatcgagctcgccaagctcttcgccgcccgtgggctagccatcacggtcgtcctcatggacccgccgtacgataccggcgctacgggccccttcctcgccggtgtctccgcagccaacccctccatttctttccatcgcctgcaacaggtcaagctcctggagtctgacgactccgtgatgccagccttggcattcgcccgcctctccaacccgcacctacgtgacttcctcgctggcgcttctccggacttcctcgtggtggacttcttctgcagtgccgccatggacgtagccgcggaactcgacatccccgcctacttcttctccacctccggcgcccagatcctggctttctttatgcacctcacggttctgcacgggaaaagcacgaggagcttccgggaaatgggcgaagaactcgtgcacgtcccggggatcaccccgtttccggcgacgcactccatccagccactcatggatcgtgacggtgcgtcctaccaggcattactaaatgtgagcctcgacctgttccgatcacagggcatcttcatcaacaccttccgctcgctggagcctcgtgccatggaccccatcctcgccgggctctccgcccca

SEQ ID NO: 75139 - DNA, 512 bp, Zea mays
  Clone ID: MRT4577_168558C.1
actcctgggcatggggcatgctgaaaacccaattctttattcttgcaggatccatcatgcgatctctgctggaggtctcacctttatgacccttggtcctccaacagttgttaggcctgttacagcaggttccttgggtgggtttattggctcaaaacatcagggggcaccagcttcagcagcttgggcttgcaaaccttgctgcctactgtgcagaacagcaatgtcttccgttccaccccctatctgcattggactgtgcttcttatttgctgcatgcgcatctcccgttcagccagccccctgttgtcttcccccggcatttttttctcttcggcgccctggcggcattgggctctcctgcttatttcctgttgcctcttctacttccatttcagtcggcttgctggtgtgggccctgctacctttttgtcccgtcccctggcgttggggttctccctgccccgctgcgcttttcgctggcccccctgtttgactgccccagttggtgc

SEQ ID NO: 75140 - DNA, 266 bp, Zea mays
  Clone ID: MRT4577_168559C.1
gcgacaaaagctaaacctatccgccgggggaccatccgaggacctggcgtgccaactgatgagtgccgaccgacgttgcgcccgttgtttcgactcgacgatcgttggacctcacctcgaaacgcgatggaagatggacattggaccgagtcgacaccatatagcctacttggacgagacaccgatggccaatcaacagagtctgtgcctcaaagccacagtgagatgtgagaatacaagatcgttcttttaggaaagctataatt

SEQ ID NO: 75141 - DNA, 827 bp, Zea mays
  Clone ID: MRT4577_16855C.1
ggggggaggagacccgatgatccgggagggcaagcgagcggtgagccgggagctaacccggatcttggagttcgtggacaaggtgctgatcaaagagcatcagcagatggttatgggtgatgcattggaaacccacgagtaccatgacggctgcaatgctacattcgtggcagctcgcccgtctgtgagcaaaaaggtgagtttctctggtaatgatcaggttcgcacgctcaatggaaagatagagaatagaaatgaggttgatgagggctctgaaggctccagctctgctgagtctgatgaactgaagcctaacaagagaggtgcctatggtaagcctgggcttgcagcaccaatgcctgtgcacatggaatcgaggccggttgctggtgaaaggagatgacttgtcatcggcatcatgccatgccatttcaggtttataatcttgtggtttgtcatcttgctgctacatttccactgatgtttcatgatggaagtttttttcccctcaaattgtagaagatgtacaactgtggactctagaactagggcagttgtatattcagacgacctctcgggtaattgcactttgttgcagaattgtactactgtactagtaccatcttttagaactgagaattttagcttggatcatttctttcaactgaaatgtttaggatctttgataatcccatatttcttgtcagccatgctcactatgatcgttgatcgatgagtcacgaggctaccatagtctggttgaaaattcctccttaaatgataaaaacatcgtgttctttggccaactcatgctggtataatatttt

SEQ ID NO: 75142 - DNA, 515 bp, Zea mays
  Clone ID: MRT4577_168560C.1
aaaggaaacccagccctatactttaataaaaatctaacggaaaaaaaaaacatcctacaggacataaccacaaaaatataggagcatgtccctaaaacaacggcattatatattcaaaaaaaaacgggttggaaaacccgaaaaaaccatgttggtttttcccctcactgaaaatggattcaaagcgccaaaaaaaagaaacctttacagaataccggaaacaaaaaaaatccggggttttaaaaggaaacaagtttgttctttgcgtaaaaaattaggcaaaagtccccaatagggggaacttaacgtcacctcaccaaaaattaaaccttggaacggaaaaccccccgttaaagtgggaaataaaaaaaagaaaaaatatttttcggcaccgccctttttttccaaacttcccttgaaacttgcaaacctaaggggaaggaccctgcccccttttttgccgcctggtttggaaaatgctttcccgtaccatataattccaaaaacggccaaaa

SEQ ID NO: 75143 - DNA, 197 bp, Zea mays
  Clone ID: MRT4577_168561C.1
gttttcgagccaagagtgtacaaaaaaaccctagctccacctgaggatcccctatctgagctcccaaccggataactcaactagtgatagcctgacaaacctaaggatagctgtaaccagggccaaaacaagaacccagaacaaaaggcggccgaacaacgaaacgagtgcatgatccgcagaccacgatgtgtgat

SEQ ID NO: 75144 - DNA, 371 bp, Zea mays
  Clone ID: MRT4577_168562C.1
ggaagcaacaacggagacagccataattattctcaataacccggatgcaatgcaggggaattaacaactcttacaacatgaggtgttgtaaaccacacaatacttcagaacagacacacataacacgatagcatgagcaactctcggctgatcacgggataagggcagcacactggcctgatgctgcactcatcagcaaacttttctagtactaggcacccttgcctccatgctgggcctcatcgtacttagcaccgacctgcttgtagtccttttcgagcgccggcaggtgctgacgggcctgagagaactgaccttgctccataccctcaacgacataccaacgcacgaaggcacgcttggagtcatga

SEQ ID NO: 75145 - DNA, 178 bp, Zea mays
  Clone ID: MRT4577_168563C.1
tgcatgcatggtctacttaggccacccttgccgttagccaaggaggcagatgtggagactatccccttcgcgatccccacccttgccagagtgcgagtgctgccatgggccaaggccaacataaaccccgccgggcaggggcataatgcctacaaactaggtgggattgactacatta

SEQ ID NO: 75146 - DNA, 572 bp, Zea mays
  Clone ID: MRT4577_168564C.1
ttttttttttttttttttttttttttttttttttttttttttttttttttttttttttttttttttttttttttttttttttttttcaggaaccacattagcaaattcatccaggatggacggacggacagaccccaggaaggctggggattatgggacaagccaaggaataagcccaagggggaacgagatctggggcggggaaaaatcgggggggggggctccttaagcggccgccggggggctaaagcggcccacttccagggggggggggggctggggcaggggaaaaagctaaaaaacggcctgggggatccccggccccagggggagaaggacccggttaactcccaggggggggggaaggaacaccgcctcgggaacggggttaaaggtcccaaaggtaaacagggaaaggtaagcctccttgatcttgggcacggggggagggggcctgaaaaccccgggggctttgaaaacaattcctgggaggccaccggaaaggaaaaattggacggcctcctcaagggagttcctcctcacgggggggaaaagctccgcccctccgttcg

SEQ ID NO: 75147 - DNA, 270 bp, Zea mays
  Clone ID: MRT4577_168565C.1
aacaaaaccgggcgacgcgggggtggatctcaagggatcgggggaaaaaggccactttgccacttaaaaagccccggggggttttaaggcgtctgcaaaggattcaacacccccccccttgggaagggagctttgagggggccccccccggggcgttggccgggcgggcttaaccaaaggcacgggcccttggggggcgaaccccctaacgggggtcggggcgggcgggaaaaaaaggcccccgttgctaacttggattctgacttaaag

SEQ ID NO: 75148 - DNA, 746 bp, Zea mays
  Clone ID: MRT4577_168566C.1
agatgaactgaagaaacattgtgagtccaacaacagatctatcctgaacatgcatgataaggatgcatatccattcgcagccaaagttgaaagcttatatggatacaccaactctcttctaaggccctgcatatttccacagggaaggctgtgatatgattcttgaaagatgacgactcagttcctgttgtcgatgattggggaggttgtgttggtattgttcaccgtgatgattgtaccttgattgtaccaagctggatgcacctcttcttgtgcctacttcaaccaccgtggagcacgtcattgacctactcctcagggagaaatccgagatggtggtggtgaagagcggtaacatgtacgaaggcagctcaagacccttgggtattttctccctcgccatgctgtggagtttcaccagcgactactcgtcggaatcagatgtcctcgacccaggcgtctcctgggcaaccaaaccaaaacaagatgtcgacacctacaatcacggctgattcagcagctagtttggtgtcctttactcagcttatagcaattgtagtttagatggttagctggtctgagtatgttcgagttgtcttatctgtatgtcagagtttttttctttttcttttttcttatagcaagtccgcatcgtgatgccgcgcaaaccagtaatgtaatggtcctccaattcgacaaggagggggcgaaatggttttttgtcaaaggaagccgctaggctgatc

SEQ ID NO: 75149 - DNA, 106 bp, Zea mays
  Clone ID: MRT4577_168567C.1
gtatgatccaggcctctgagctgcatcacggaatcacggtctatctacctgttgagcgagagcgacagatcaatcgctggcagttttgttcctctcgcaagcagcg

SEQ ID NO: 75150 - DNA, 372 bp, Zea mays
  Clone ID: MRT4577_168568C.1
aatcggggtcgaccccgttttgcgcgagccatcatccccccccggggcgggtgcaccaatagccattcacccaccaccaccaccccggccgcttggcttggccgtgcccctgcgtgggtgtgctgttgcgcatctgatgctgtgtgtgtgtctccctctctttttttttttggcggtcggcgtggctccgggggcgcgaagcgcgggctcggcggggcgactggccggcggcgacctgcaggtttgggtatgagaggggtcacccacgcggggcccaccgcaggcgccccccggccccggggacgcctggtgggcgggctgctgatgtgggggttgtgcctgtgggtggcctcccgtgccggccgggaccac

SEQ ID NO: 75151 - DNA, 212 bp, Zea mays
  Clone ID: MRT4577_168569C.1
aacaataaacacatttattcctttttttttgaacaggggggggcaaaaagaaaaaaaccgaaaactattgtgccctaacattctttcagacacctaaaggccactcggaggcgcctccctcacttttaggggacaaacaaagagtctttggcccaaccggggaaccttaccttttcccctatgcgaatagaaaggtcccccaccccggccct

SEQ ID NO: 75152 - DNA, 304 bp, Zea mays
  Clone ID: MRT4577_16856C.1
tcggccacggccggggccggagccggagccgagccagccaagtccgtcaaggccgaggcgtccgggtcgccggcgtcgtcgctgtctcccgcgacaacgaccaccccggcctcgacggtgacgacgtgctctccttcgtcggacgctggagccggccacgagatgtttcccgtgacgccgtcgagctggacgtgggagcagctggagggcgtgttcgggatcctgtcgccgctctcgccacacccgcagctcggcttcccggaggtcaccgttaactaaggggacatcggtcagtaagcatcaa

SEQ ID NO: 75153 - DNA, 768 bp, Zea mays
  Clone ID: MRT4577_168570C.1
aattcggcacgaggcctcgtgcggtcgactgtcgacgccttcttcgccctctccgtccggcttccgcctcagctgaactcatgcgctactttcccaggccgccacttcccaactagggttttcggattattaggtttctagaacctttcttcgccgccccccccccccccccagaccccatgcacgctccgccgctggtcgcgttcgcagggggcgcctgccccgcttccgctgcctcctcgctgtcgccctggttggcctcgctgcggcccgccatcgttgctgcgccggcgaggctgctatggttccgccgcggggcactccggctggaagccaaggccgcgtggagggctaccggagggggacggggcccgcgggtcccggccaagggcgctgtgctcgcctcctatatgggtgccgaggaggtggtgggacccttgtcgctgctcgacgaggaagagctcattttgcacataagaaaggaacgggataatggaaaacttcctgcagatgttgccattaacttggaggagctgtattataattacaggaatgcagtcctgcaaaatggtgatcctaatgcatatgagatcatgctttcaaatatgacagctttgtttgatcgtgttctactggatgtacagaatccatttacctttccaccgtatcacaaagctgtgcgggaaccatttgactattacatgtttggccagaactacattaggcctctggtagatttccggaactcctatgttggcaacatttccc

SEQ ID NO: 75154 - DNA, 1004 bp, Zea mays
  unsure (1)..(1004): unsure at all n locations
  Clone ID: MRT4577_168571C.1
gagttcggcttggcacagatcatgaccactccacagacgtccctgccacagcttgtcggataccgagcaccagaagtcctcgagacgaaaaaaacgatccagaagtccgacgtctacagctttggtgtcttgctccttgaaatgctaaccggaaaagcccctctcaggtctcccggtcgcaaggattccgtagagcacctcccaaaatgggtgcggtctgtggttcgcgaggagtggaccgcggaggtcttcgacgtggacctgctgaggcaccccaacgtcgaggacgagatggtacagatgctccagatcgcgatggcgtgtgtggccgccgaccccgagcagcggcctaggatggacgaggtgatcaggaggatcacggagatccggaattcttactcttcttcttctgggacaaggacgcccctggaggacaggccagagaccgcgcaagcaccgtgatagtagtttagcaagagatgttagctaggttgcacagtgaattggttatagagcttcggcaaagttgatagccacctgcatagcgcagtttccgtcggttccatgtcgtttccagtaaatctgttgtgcattttcttttttctttttctttttcggattctagcaatctgattgacagtccatgccattgtattgctaagttaaatcagtagctcttctgattttcataggatagtgttgttctgtaatttgacataatctcctgaggcgtgattaatgaattgaatttcccttcaaaaaaaaaaaaaaaaaaaaaaaaaaaaaaaaaaaaaaaaaaaaaaaaaaaaaaaaaaaaaaaaaaaaaaaaaaaaaaaaaaaaaaaaaaaaaaaaaaaaaaaaaaaaaaaaaaaaaaaaaaaaaanaaaaaaaaaaaaaaaaaaaaaannnnnnggggggggggggttttataaaaggaaaggggcccttttaaaaaaataaattttaagggggggagaatttgaaaagtttttgatttttttttt

SEQ ID NO: 75155 - DNA, 759 bp, Zea mays
  unsure (1)..(759): unsure at all n locations
  Clone ID: MRT4577_168572C.1
ggccgggnatgcccgctggngtccgccagcaccgggccccacttaattggcttctctcctcctcggctctgccccacaccgccgttcccttcggtcagggagttgtcccctcccccgcttccctttccttctcggaagagacgggcagacgaccatggccatggaggacgacgcctcgaagatcagcgactgggaggtgctctctgccacctcttcccgcgggggcggcgacgacgatgaggtattaactgtctccggcgggggcggtgacgtcgtcctccttgaccacttcgtcctcacccccgaccccgcagcctcctgtcccggcgacggcgagggcttgtggtcggacgaccggggcgcctggcaagggttagaattattggatggattcgatccgattccggaagcaagtttcgatcttgcggttggtgttaggagccaacaactgctgataagcgccgtggatgatgcccgcgaagaaggctcgattgttcaagccaccgtggcgcgcggtgcgacccgtagcgcagaaggaaatcaagaggatgtggtagaggtcgagattgagcaggagagcagttccgtgattagccgcggtgcattgtgcccggtgctgcaggtggcggcgcgtcatggcgtggaagaaactctggattctgaggcagttacacctacaggtgcctcgctccaaagccaggtatcagagagttcccttgtgcaattggatgatggaggaaatggtgctggtgtaaaaag

SEQ ID NO: 75156 - DNA, 362 bp, Zea mays
  Clone ID: MRT4577_168573C.1
acgactcgtcctggcactcgtcgtaaatttttaagctttatgtattgccatgtttttgagatgcaacgaagcataatgaggagtttatatgatctgaagtatctatgtttgttgatatatccatgtgaagagatcaaagttgtgtgattgctgagtccatctattgagcaaatgctgcattgtatctattcaaatcatacttctgaatattgattgttctgcatgtattgctatagcatgacaggatatgttagataggattgaacaaattgcattggtatttaatatgtcaccagaagcgaattgaggaggctgtgttatctgaactgtcacttgatgatacatcgttcatggacttcaaa

SEQ ID NO: 75157 - DNA, 421 bp, Zea mays
  Clone ID: MRT4577_168574C.1
ctcaccacaccaaaatcaaacctttgctgtgcattatatgccaaccccacacccttaaccaaaaatccgatctggggggggggggggggccggcccaaaaaataatatatcttcaaactaaaatttaatgccttccctacaccaaattgaatgttatatcatgtaagggaaaggaatgttggctatgcttttaaacttcaaataaaacgctacatttgaaaagacgttaataacataactggtctcgcctaaactaaaagaatgggtcaagaaaaaaggctttcccctatcagataggtaaacataacatctctggttaccctaccctttaatggaaagcagtttaataattgaactcaataccagaccttccaattcatatttgattgcggggacacaacatattgttcgctcctctgac

SEQ ID NO: 75158 - DNA, 516 bp, Zea mays
  Clone ID: MRT4577_168575C.1
ccgggccggaatttttggggcgacccaagagtccgcccaaggtcgtcgacgcgttgagggaggagcacgacgcgatcgccaagaacaggaagggcccggatgcccccgtcacgtgggccgagtacagatcgatgaccttcaccaatcaggtcatcatggagatggtgaggcttgcgaacatcgtgccggggatatttcgaaaggccctgcaagacgttgagatcaaaggctatacgattccggcgggatggggcgtcatggtgtgcccaccggcagtgcacttaaaccccgacatctatgaagaccctctggcgttcaacccgtggagatggcagggcaaacctgaaatcaccggtgggacgaaacacttcatggcgtttggaggtggcctcaggttttgcgttggcactgatcttagcagggtcttgattggcaacattcatccacagctgggttacaaaatacaagctggaggacggtaaaaggaggcaacatagtccggacccccggtctcgg

SEQ ID NO: 75159 - DNA, 1326 bp, Zea mays
  Clone ID: MRT4577_168576C.1
gggacagtctgtcggcgattggcagcctggctgcaaggggtctagctccttgcggaagcctccccctctcgcagatcccccaccccccctgccccccgcccccgcgtccctcccctccggcgccacggcgtcagaagccccgccggactccccagacccgcgcctcccgccgccatacgccgtcgaaaccatcaacgagcacccccccccgaaagcgcccaccggcggctccgccgccgtcgccgctcacccttcgcctcgcccgccagagagcctgaatgctcaccccggccggcgagagcgcctctccctgctgcagccagaatggcagatcctcccctggttcaccctcgtggccgctcaacacggtgctctcatcgtcgacactgtaccatcctcgcaccaaccagatcacggcgtcgacgtgatcagcgccctcactttccatcatggccttgtggactttcgcatgagcggtgatttgccatctgttcacaatcgttttcttcctttggatgttatgtagaatgcacttctattcctgtagctgtttgccgatttaataaaagcgctccgataagctattttattagttctttaaatcatgttatatgttttcggttgcgtcaggtcagcctccctctccggatcccccacctgctccgccgccggccaacgcatcgctccccttggcagccaggatgacagaagcaccatttctgccacgtgagaggctcttcaagctgcaacatcatttccagaacatgaccaagcacacctacctgaaagggcgctacgatgtgatcacctccgttgccatccctcttgcacttgctgcctccagcatgttcatgattgggcgtggagtttacaacatgtctcatggaattgggaaaaaggagtgatctaccacgggttaactagtttttctacttggcatggaagtaccatccagactatgaagtcttctttgcttgctaaataatactgtcaaagaacaagtcgactacatttttgcatcatatttctgtttgtatttgtggatatgaaatgccatcaacttgaagatcagcattgttactattttggttaaaaaaaaaaaaaaaaaagagccctagggacgagtagccattatagttgtatatactatcttggtttagttaggaggcacatagagatacgtgacaaagtcaccttggctgatcagagcggcacatcaagcatttgttggatttttttttttttttgaaaaaccttacattgtaaaaaaaaaaaaaaaaaagcggccctcggtgggaacccctctgtgcccgctttttttaaaat

SEQ ID NO: 75160 - DNA, 1160 bp, Zea mays
  Clone ID: MRT4577_168577C.1
ccccgcgtccggttcccaaaggaaagccccacaaaacctcggttgctccccttggcccttgccatcctcgttcctatcgccagttcgccacctcctttgctctcgcctcgcgcgcgctcccccccgcgcatcgtgccgttcgccaccgcaccgcgccgatggaggtcgccgccgtgcccagatccgccgcggcctgccgtgcggcgcccctgctcccggccgtccgagccgctgcgtgccacctggccctgccccggcgcgcgttctccgcatccgtcgcggcggcaccggcgccgcgccgcctcgccgctcgtcgcgctgcggatggtgacagcgtggagacggcgccggaggcggtccccattgagaaaaggttccctcccttcccgagcgtcatggacatcaaccagatccgcgagatcctcccccacaggttcccattccttttggttgatagagtaattgaatacaaggctggagaatatgcagtggggatcaagaatgttacaataaatgataatttcttcccaggacattttcctgaacgccccataatgcccggtgtcctcatggtcgaggctatggcccaggttgggggtctggtgatgctgcaacctgaagttggtggatctcgagacaacttctttttcgccgggattgacaaagttaggttcaggaagccagtgattgctggcgatacactgatcatgaggatgacactgactaagtatcagaagaggtttggactcgccaagatggaaggaaaagcttatgttggtggtgacctagtttgtgaaggggagttcctcctagtcagcgcaaccgagtagtgcaaagacacttcatgattctctgggaagaatcattggttggaatcagatctggttggatgtttgaaagaaccgagttttgaactaattatacaatcggcagttgaggcgatcctttacctgttcttaagcatgttgttgagtccatgtggtgatttctatcggttaccaagggcccaaggctgaatccacgccatgttatgttgcaattgaggattacaatatattgggtaattgtttgatggaataaacgataatgcttttgtagttacttgcacaaaaaaaaaaaaaaaaaaaaaaaaaaaaaaaaaaaaaaaaaaaaaaaaaaat

SEQ ID NO: 75161 - DNA, 280 bp, Zea mays
  Clone ID: MRT4577_168578C.1
gcagctctgaggtaaacttttatctcttggctgacaggacttccacacccatgctcctccaagcaccttttactctgcccaagcagtggcagcccagtccaaaaggtgcctgccatggccaaaggggttggggagtcacttcacattccaggctggacgagtagaggacttcggggtagtcctcacaccccattgccagccagaggccatcactcacctcaaccccaagtcctgcatcctggtcggaagtgacaatgcctcctcccagctctccatacct

SEQ ID NO: 75162 - DNA, 204 bp, Zea mays
  unsure (1)..(204): unsure at all n locations
  Clone ID: MRT4577_168579C.1
catggcactagtagatctcattgctgtattttncttgggnggaaagatcacagggaccctgggacggcacgttatggtatacaccgcaattatcctctatgcgctctctacgtcatcacttgcaatatggacttgagacatgaccttgactaaatatcatataaaatgtgaagcaatgtccatataaaatttcaggtgcatatg

SEQ ID NO: 75163 - DNA, 677 bp, Zea mays
  Clone ID: MRT4577_16857C.1
ccggccgggaaacgctcgacttctctgaatcacagcatcagcccgaccaacatgggaaaagagttcgagttgatagactctatcctattagattccatgtcgacaacatcatccaacatggacggaactgccaccccgacacacaccgtcatgtcagagacactcttagactacactgaatctgttccttatcctggcgctcacttcatcattcgccagcgcgacacaggcaaagtcatcactctcatcgctggcgaacttcagcttgccgagggtctgaaccccaagggtggttatcactgggaatgcatcgagaaaaacagatggcttggtttccgcaactgcgtgtcagggaccatcatcggccacaacaacaacaagaagttcgttgcaagagcagaaaagcaccagtcttacgaatacattacactcagaccgaatccccacggtggctacgagcttatgacgaaacacaaccatgatgagctatggagcatgaacgtggcagatgatggacagcagctggttgagaccaaaggacaaggcgccttgtgggactttttgaaagtctagtcccggaagtgtgaagcaaggaaacacacaatcattttatgttgatagcatcataataccactccttctgcagtaggaaaaaaaaaaaaaaaaaacccgcggcc

SEQ ID NO: 75164 - DNA, 153 bp, Zea mays
  Clone ID: MRT4577_168580C.1
tctttctgggggggtcattttaactcttgaggcgctaaacacatcccataatccaattaatcaacaccccttacctacttaccactctatgcctatcaatatgacttcatcatcccactcctctcacaatctgtatatcggcttacatcatat

SEQ ID NO: 75165 - DNA, 165 bp, Zea mays
  unsure (1)..(165): unsure at all n locations
  Clone ID: MRT4577_168581C.1
ggcgtccggnaacccccgtggggacgtacgggggggnagaccaaanacccngccaggaaggcccgcgtgtggctcggcaccttcgacaccgccgaggccgcggcgcgcgcctacnacgccgccgcgctccacttccgcgggcccaaggcggaagaccaacttccc

SEQ ID NO: 75166 - DNA, 182 bp, Zea mays
  Clone ID: MRT4577_168582C.1
atgcgacagccaaaattcatcatgcaagcctctacatatacacgctcagccttattaaatttctcaagatatactaccacttttctctcctactatatcagattcaattctacctcaaaaaaactcatgagacaccctaacctctatcctcctatatatatccgcttctctactcaacactc

SEQ ID NO: 75167 - DNA, 439 bp, Zea mays
  Clone ID: MRT4577_168583C.1
ggacccgtaatatgccccccttgaagacattgatgagggaatgagatttaacaacagaatgcttttcgaaacaagctggtgggttgaacaatgcaagacatatttaccgggatcggccctcgggagtttattaaaaaaaacccttttttacatgcggggcgggtatataaatgctgccacccacgtcgacggatgggcttcccacaaattcaacagctggccccggggggcgagcggggcggtggtcctccacccgacagttgcacgggcgcgtaagtttttgggggggaacctgtaggacccgtaggaaagcggggcgttggcccaacactgggggatctgctccccctttgcgccgcccccgggggggccgagcgcgacgtgcagggggtaaaagtggtccggccacgggtgccccaccctcccgggcggggttttt

SEQ ID NO: 75168 - DNA, 520 bp, Zea mays
  unsure (1)..(520): unsure at all n locations
  Clone ID: MRT4577_168584C.1
cggccgctcgagcgccggccggnacatcatccggcgtcttcacaacgccggctctcccccgctccgtctccctcccccctcctcccccgttccgctccttccgtagctagattctggggagtcccaccgaatgtcgagggcaaagatgatggagtgcatctgccatcgcacatccgagatggcggtattgagcgccacaaccggggctgacgcatgttactgcatcgaaggcgtgtccaagaatgacgaccagatcaacccgaagaagatcatcagaagagatgatgagctctcctgcaactacatcaccgacagcggaacccccagggacgtgacctgcgagaagctctgccatatcgagtgcgtcgtgatctgcccagtctgcaagacctactgaatctgtgacttctaccccgaggagctatgcagagagctacactacgcggtcaacaacttcaacagcttccactaccacagcaagaaggatatggatttatgcttcgtctctcacatcgacctg

SEQ ID NO: 75169 - DNA, 269 bp, Zea mays
  Clone ID: MRT4577_168585C.1
aaccaaagatttaaagaacatataccactttggaacataggaccacaaggctacatgactgggccggtcaatcccggggttttggaaaaaacaacggggggcccgagcgtccagccatgaggaaaatccgggagatcactaggacaggcggccaaattaaggacgagaccaacaccagcgcgagataaaccagtgagagggcgaccctggtggaagggaagcctaccccaaaccaccgggaaaaaccatgttggacgcgaaaacccatt

SEQ ID NO: 75170 - DNA, 448 bp, Zea mays
  Clone ID: MRT4577_168586C.1
gtgttgtgtggggttttttttttttttttttttttttttttttttttttttttgggacggggaacgaagaccaagggatatagtcattcggggaaggaaaaggcctacatagctacctttacagagctgtcgctatttatgtatggagaggtggagggggggtgtatctgggactggtatactactctcgggagacaaagctatttacaagtttcacgagctcaacaggctcgcaacaggcgttgtctttgctgccggcacggggctgttccccgtcgtcgtcgagttgctcttgctctttttgccccagggccacagaatgctctcccagaagcagaacttttcgaagcaggtttttagcctcgggagcgttacgttccgcttccaatgccccgccgtgaagttgggctttttgggctggcggcgtcccactccagcccgggcttca

SEQ ID NO: 75171 - DNA, 153 bp, Zea mays
  Clone ID: MRT4577_168587C.1
atcaacaattagcttggtcaacattccctttacccacgccactggtatatccaaaggaggggagctactcacattagaaggtttacactatgctctccagtgtctctccagcttcaatccagacaccgattcatgtggataaaaaataatgtt

SEQ ID NO: 75172 - DNA, 770 bp, Zea mays
  unsure (1)..(770): unsure at all n locations
  Clone ID: MRT4577_168588C.1
cctcacccatctatcgagttaggactgctagatcctcacctgcccgactctcgctcgtcggttcgatctttcccataggaacgcacggtgctagtttcgagtgtagcgcggcaatatggaggcaaagagcgcggccgcggaggtgctcaggaagaccgacgctggcggagacaatgagaggtataggcatggggagctggggcgcgaggctgtggaggaggaggaggtaaaaccgcgaagggtggcggatgcgccgctgccggagaggaagaggaagcgcgcggcggacccggaggacgacggcagcgtgagcgacagcggcagcggcagcgaagggcctccgcagcagcaggtgaagccgtgcctttccccggtgccgcctctccaacggctcctgagtgcgtgccgcgccctgctcactggctcctcctccccgccgacgccttccgctgtcgccttgatccgtggcattatggacaagattgggccagacgacgtcgggctcagggacgagatccgcttcttcaacaagatgaacgccgctggtcttcaaaaccctcctatcgtcacatgcaaacctatttacgagggcgccaacttnttcgatcgcgggtgttcttcttgccactgggaagcggtcatgcctctccacgaccacccgggcaatgacggtcttcacgaaagtgctcatcgggtcagcgcgcctggaggcctacgactggggtccgtcccccgtgtcttggccggctgctgctcgggcttccgtcgcc

SEQ ID NO: 75173 - DNA, 237 bp, Zea mays
  Clone ID: MRT4577_168589C.1
ctcaacaaccattcgccgtcctccccctgtcgtgtgtctgccgtctcaacggctcaacggacgccgcgacttgagttcgtgtctgcgcgggcgccggctcgccgtacgtgcggcaagcctgccgaagcacgagagacagcggccggcggttcgggagttcggccatgcgcgcgtcagagtggcaggaccggtggaatcgggacccggaagcagcgaggtccaaaggggtgtggccgt

SEQ ID NO: 75174 - DNA, 1111 bp, Zea mays
  Clone ID: MRT4577_16858C.1
ctcaacttcgccgcagggatgagtctccaaagctgccgctgccgtctcctcgtgccagtggcagcctcactaggagcgggagcggctcactggaaggtggtgctgtcgcgctgtttgacatggagttctccaatggagagtttactgagtccgagaagaagaaaatcatggcgaatgagcggcttgctgagatagctttgacggatcctaagagggtcaagaggattctggcaaatcggcagtcagcagcaaggtcaaaggagcgcaagatgaggtacattcaggagcttgagcataaggtgcaagtgctgcagacagaggctacgacactctcagcacagttgacaatgctgcagagggactcagctggactggctactcagaacaacgagttgaaaattaggctgcaagccatggagcaacaagcacagctgagagatgccctgaatgaagcgttaacgggcgaggtccagcgtctgaaactcgcaactggggagatgaccgatgggcctatgccgaagggcctgcagcagcagatgaactcccagatgctgcagctccagcagctgcagatccagcagcaggcgcccccacaacagacgcagcagcaaggccagcgacaacagccgcagaagtcggcgtaaagaccgtggctgagaggaggacgcggaagcgaattgagcattggccaaggccaactgaaggatgccgggtgggaaaagaaagaaccccaatcttttgccgtatatatatattatcagacaggttgtaggatagcagcaacagcagtagggcgggcgagggaccccgttggccccgcgcgatttgagttgttttcgccggataccgtaaccttagctggagtctgtcgtcgtcttggtgtcgtgcctgcctgcctagtgttgatgaggcgtcttggtagcgtcccttggaacgccctctcggagccggaggtgcttcttttgcttcttttgtctatatagataattatatgtgcatgggaacctgcgtagtactgcagttattattattatcattgttaatttattaaaaaaaaaaaaaaaaaaaaaaaaaaaaaaaaaaaaaaaaaaaaaaaaaaaaaaaaaaaaaa

SEQ ID NO: 75175 - DNA, 468 bp, Zea mays
  Clone ID: MRT4577_168590C.1
ccaacccgccaacaaggggggcaaggtttaaaagctttttaaaaaaaaaattccagctgggggggggggggggggtggccacaagcatccccggttcgcaatttcataagcccaaaacaaccccccaaattggggcgcaaactttttttacgaggcaggtttttcgtaattccaacaaaatttttaaaggcatctcgtggctttttttcacatataaggaataaacaaggccaaataaatgcccgattcaaagcctaaaagcagcaatagcttcaggcctgaagtaaatcctaagtccaaacactctccgcacctttgcaggggtaaacagccacctaaaatggccagcattgccaccccaaaaatcaatatctccgatcccccctcaaagttaaaaaggggcaacatttgcaaaagcctaaaaaacttgtttttgactggtctctgggacatctctgaaaaatggtt

SEQ ID NO: 75176 - DNA, 708 bp, Zea mays
  Clone ID: MRT4577_168591C.1
ccggccgggttggtagttaccagagttacaaaaaaatacaagcaagcagttgcgggtgtagctcgcaacaatggcgacgaaccccggcctcttcaccgagtggccgtggaagaagctcggcaacttcaagccgtcatccatccatttgctgagctcgtggcgtatgaactattgttctcaatcccattgattgtgtgcaccttgaacggaactgcttcaattattgcatttgagatttacgtgatctacatcgacttcatgaacaacatgggccactgcaactttgaattggtgcccaattggctcttcaaatggttccctcctctcaagtatctcatgtacacaccctcgtttcattctcttcaccacactcagttcaggacaaactactccctgttcatgccattctatgactacatatataacaccatggacaagtcatcggacacgttgtatgagaagtcactcaagggaaaagaagaaacggcagatgtggttcaccttacccaccttaccagcctgcactccatctatcatatgaggcccgggtttgcagaatatgcttctagaccttacactgccaagtggtatgtgcggatgatgtggccgatgtcatggctctccatggttctgacatggtcatatggttcttcatttactggtgagaggaacgtcatgaagaaactcaaaatgcaatcatgggtcatc

SEQ ID NO: 75177 - DNA, 467 bp, Zea mays
  Clone ID: MRT4577_168592C.1
cccaaagggaaccaaccccgggcaggccagaagtaagcccaaaaaacaaaaccccaggcggggggatatacagaggatccggaaaaaacgatctttaccctaaacccccccttaaggtaagggacaaaccagccactcctaagccctggctcccttaaaaccaggcaggcatggaaacacggcccgaattggccccccccagaaggataaacccccccaaccgggcccaaaagggaacttaggggttaaagggtggtcttccagcccaaataagctaaccagggagggatggttttcctcctggacctgaactaaaccggaaaaggtctggaaaaaggggttggcccaggggaaaaacaggggctgaaaaaggttgtaaaagggccccttgccggggacgttgggctggataaggaagcccagaaaccccagaattgccagcctcccggggggaagctccttttcct

SEQ ID NO: 75178 - DNA, 2688 bp, Zea mays
  Clone ID: MRT4577_168593C.1
aacaacagcagcagccgtggcagcgaagaagtataaatctctatgcgagaatatcgagaagggatacccaacagttctggcttctcgcatcacatattatatcccataatcccatgagttcgcattcacatctgcggcagtgtgatgaataaaatgatccatgttaaatctcttggctcgaggccggttggcacctctcccggccggccgggagttagtagttcaccagagttcacaaaaaaatcacaagcaagcagtcgcgtgtgtagctcgcaacaatggcgacgaaccccggcctcttcaccgagtggccgtggaagaagctcggcaacttcaagtacctgctgctggcgccgtgggtggcgcacggcggctacctagcggcgaccaaggggtggagggcggccgacctggggtacgtggccatcctcccgtcgctgctcctccgggcgctgcacaaccaggcgtggatcaccgcgtcccgcctgcagagcgcgcgcggccggcggcaggtcgtggaccgcggcatcgagttcgagcaggtggaccgcgagcgcaactgggacgaccagatcctgctcagcggcatcctcctgtacctgggctccacctacctgccggggggccagcacctgccgctgtggcgcgcggacggcgccgcgctcatcgcgctgctgcacgccggccccgtcgagctcgtctactactggctgcaccgcgcgctgcaccaccacttcctctactcccgctaccactcccaccaccacgcctccatcgtcaccgagccaatcacctccgtcatccatccatttgctgagctcgtggcgtatgaactattgttctcaatcccattgattgtgtgcaccttgaacggaactgcttcaattattgcatttgagatttacgtgatctacatcgacttcatgaacaacatgggccactgcaactttgaattggtgcccaattggctcttcaaatggttccctcctctcaagtatctcatgtacacaccctcgtttcattctcttcaccacactcagttcaggacaaactactccctgttcatgccattctatgactacatatataacaccatggacaagtcatcggacacgttgtatgagaagtcactcaagggaaaagaagaaacggcagatgtggttcaccttacccaccttaccagcctgcactccatctatcatatgaggcccgggtttgcagaatatgcttctagaccttacactgccaagtggtatgtgcggatgatgtggccgatgtcatggctctccatggttctgacatggtcatatggttcttcatttactgttgagaggaacgtcatgaagaaactcaaaatgcaatcatgggtcatcccaagatacagtttccattatggattgagttgggagaaggaagcaatcaatagcctcgttgagaaggcaatatgtgaagctgacaagaaaggagctaaagttgttaccctcggactccttaaccaggcacataacctcaacagaaatggagaactttatcttcagaagtgcccaaagttgggagtaagactcgtagatggcaccagcttagctgctgcagtagttgtgaatagtgttcctcaaggcacagatcaagttgttctcgcagggaatatttccaaagttgctcgtgctgttgccgcagcattgtgtaggaagaatatcaaggtagtaatgaccaacaagcaggattaccattttcttaagcctaacatggcagaagatgcagctgagaaccttttgttttcaaagacaactactgcaaaggtgtggttaattggggatggtctagatgcttctgagcagtttaaggcacagaaagggacccagtttatcccatattcacagtttccaccaagaatggcacgcaaggacacctgcacctactcgacaactcctgcaatggttgtacctaaaacactacagaatgtgcactcctgtgagaattggctgccaaggagggtcatgagtgcatggcgcattgctggaatggttcatgcattggagggatggaacgagcatgagtgtggggacatcgtgctagacatggagaaaatgtggtctggtgctcttctgcatggtttccgccctgtggctcaagtttgattctccagttgcaaatgcaaggcagcacaataagttattgaaagttataacataatgctcgcgagaactatgctacatacatatcagtatgttggtgttctgtacttctgtttgtccatgctctgcctcttatcacttaagacatctgctatctatgaagttaagatgaactcatgtagtgtaaaaaccattctgcagaagcagggtgaaaaatagcatctctacaatggtaagaggggatgggatgtagtatataagtgagtctgatctactgctagatgtttactactttattcacaccctacgctcaaagatcaacgatgaattaattatgcgtcgatatttctccatgcatcaatgcatatttcaacaaggaaaagtatgagaaatgctattcattctccatgtagagatgtggatgaaagatctgcttcaatgcttcattttgttcatgatccagagaaagtagagatgtcatgtaagatgtaacagtggcccatattgcccatgacgaaaggcaataaaacgtgaccaacatatgctctgctgg

SEQ ID NO: 75179 - DNA, 318 bp, Zea mays
  Clone ID: MRT4577_168594C.1
gattacagaacctgtgactgtgaacgcaatgaatgatgttggtattgagatgaacaattcacaaacatggaaagatgattctactgtggatatcgagacactggtaacatctgtgtctgctgctgtgaacagcatacgaggcaaaataaataatttgctagacagtacaagtcatataacacctaatagaggcagatctcggcgccgggggcattagcagtataattatttcccggtatgaagatgaccttccgtcgtctagctgctcagactgcaacacatctgtctgtggtccagttccaaggcgtgaccaggaga

SEQ ID NO: 75180 - DNA, 709 bp, Zea mays
  Clone ID: MRT4577_168595C.1
ccctgccgtgcacctcaacggcttcggcgccggcgccctcttgcacgacgaggaccggaagcacctcccgtttctgaccaaccacaacaatggatgccagccattcaccgtcaccacgacggcttcctcagagagcagcagcaagcacagcaacggcgattgggctctctcgaggccggccgggtcttctgtcagacaacccgacaccggcacaggcacagacggccatgatccctaccgcgcagcccctcgtcgccacggcatcgcagtacggcaggctccctggcggcgacgtctccctcaccgggatgtcgtacatgagggtgggagacagacggcaggcttccaatctgacaacgtcctcacccggtcctgccactgcagctgtaacacagcagcacctgcagtaccaccatggctactactaccatgtgagcggtggcgagcagggcaacaacagcccagatggcgccgccattcaggccctccccttctcgtcgtggtagacgcgcgactttctgatgaagatcatgtgctaggataggcaggcagtcgctcttgttgttcaccaaacacatgggttgtaacactaggctcggtcatactgaaaaaccatgacaaaaaatgtccatttttcagcttgttctgataggtctaatctatggaaaattcttccctaagttataaaaaaaaaaaaaaaaaagcggcc

SEQ ID NO: 75181 - DNA, 445 bp, Zea mays
  Clone ID: MRT4577_168596C.1
ggacctttgggctgatttatgtgcttgtggctgtgcgggactaggaaggagtacccgaagacgatacctgctaaactttaagacatgaaaccctggtggatggacgagttcgagaagtaagacgccgattttacgggcttccccggcggaacaacgacagagcgtggaattaactaattcaccgagaaagcgtccgtagtcgaagacgtagagcgccgcacccgttcactggtccacgacgatagcgtagagccgtgtgaatcttttcgcgggtattacccttatcgtattcgcactgacaagcggtcctatactaacgtaatacgtttttcgcgtaagcataatacctggaaaagtagtagcagtagcggaagcgaagaagcacgaacgtagctcgtccgataacgtaaactcggcctaatcctcgcctttgcgtcaacgcaat

SEQ ID NO: 75182 - DNA, 280 bp, Zea mays
  unsure (1)..(280): unsure at all n locations
  Clone ID: MRT4577_168597C.1
gggagattcacagtcaacactatattgttatgttaacattacaagtactagaaagaacaatccacacgatacatatgttagaccatcctgatataatacacacagcatagaacagatcaaatattaatagtcactgtgttgttgagacacaaccaagaattattgaattgtgtgccgaacagacgagcctntttctggctatgaaagcaagggagcagcgatcattgatctatcttcaagacgcggacatagagttgtgcgccgatcccttggcgagcag

SEQ ID NO: 75183 - DNA, 504 bp, Zea mays
  Clone ID: MRT4577_168598C.1
cgagcccaattttttttgtataaaaataagggggggcccaaaaaaaattggccccaaaaaaattgttcgaatgtccacaagcaaaacaaatttcctaataatgggcaactcgaatcctaaatggggaaaataactggattgaaaaaaaagtcaggtttgggggttaatttttcgcgttcaagtttgagggatcttggaccgtttttcccgatgttccctgagcttgggccaaaaaatcctccagttcggttaaaatgtccaaaaaagcaggccggtcggatggatctgtttcccaacatttttgaataaagtccaacagttttgggggcgtttttttgggaagtcctgggcgcaacccctgtttaaaacctacagccgtttggaaaggggtcatggtataatatgggaatcttggacgttatcagctcccaaaaaacaatggcaaagctgaacacatctgctttgctatcaaagggtggggggttaataacctaaggcgccatc

SEQ ID NO: 75184 - DNA, 256 bp, Zea mays
  Clone ID: MRT4577_168599C.1
cgacctacgcgtccggccacccatacgaccaacgtttttgatcgcaacaaggacgacatcatcggcggggctacattttaacctgtgtcgagcgccccaaccgcaacgacgatatcctcaaggacttctgtctcaagcataacatcaagtacttgtatgatatcactgaactaatcaataccagggctaatacagactacacggttgtttcgcacatttcacttgctcaagaaagtgaatcgccaccaagctaagt

SEQ ID NO: 75185 - DNA, 614 bp, Zea mays
  Clone ID: MRT4577_16859C.1
ccggccgggaacgactgatgaaaagtctacgtgactcatgggtcatgacgctgtcaccttctcgctgagtaacaagcacttctagaggtatatctgttgcttgttattacctcggcgaccacaatagtgaccagaagtataccgattcttgttccaccaccttaccggtgttgcaccttgcggctggcggacggggcttgaactggcaccgttacttgatgtatcgcgccaagttcaccacctacacaggttctgatgagagatattgaatgggagaattacatggaacttactttatctgcgaaacgagtcttgagctctaaccgggactatgaccacaaacacgtagagccagcgagctctatttggttgaggaggatggcccagcgtatatccgagctttgctgaatatcctgcagagcatctacagagaagagacttgaggaatacgcgcttgtactcattggtgaaatgcttgcaacaaatcctagactggcattactgcaatatgatcaacgtttgccgcatgaagatattcatgaagcgctcttaaaggtggcatagaaaggcaattggtttggaccagaaagaagcagaaacatattgactgtgat

SEQ ID NO: 75186 - DNA, 382 bp, Zea mays
  Clone ID: MRT4577_1685C.1
gtttgtaaccctagccgccaagcttgaagctccagccgtgctcgtgtaggggcgcaggccatccgggctgcggcttccagcatctaccaggcgtccttagaatacggtgcagcgagcagcaagtcgccgagcagccgagccaccgccgaacacagggcgccgccgagcagccgagccgccgccgagcgccgagtcttctctgataaagcggagaaattggtagcagaagcagctgggtatggttcacagttggttttgtttccggaagtctttgttggtggctacccacatggatctacctttggactggttgtcggcaatcgcactgccaagggaaaggaagactttcagaagtatcacgcatctgccatagatgtgcctg

SEQ ID NO: 75187 - DNA, 302 bp, Zea mays
  Clone ID: MRT4577_168600C.1
accttatatttcttttttttttatatttttagtatggaacacaacatgggggggggatgtggacactgaatttttgggccaaaacgattattttgtttctgtaggaaaaaatagaaatttgtgtaaaggtttttaacgctttaaatatttgactgtagtttgaattagttttttttactataaattaaaatgcggggtagaaaaagggaggtaaattgagctttttctgtcaatgatttatcagaatttggggcgggtttggttttttactctaattgtcaaattttggctaatttttatgg

SEQ ID NO: 75188 - DNA, 212 bp, Zea mays
  Clone ID: MRT4577_168601C.1
ttttggggtttttaaaggaacttagggggtaccaaactccccgatcacataactcacaagctatacgaagttgcttgcactctacgggccctaggtacactaacataccggagacctttctcacccacacgtataaatacaatgcataccctgggtttccatatccgagcatcactatacagtattaaaccacactctcactctgcaacgca

SEQ ID NO: 75189 - DNA, 451 bp, Zea mays
  unsure (1)..(451): unsure at all n locations
  Clone ID: MRT4577_168602C.1
cccacgcgtacgnggacgcgtgggcggacgcgtgggcggacgcgtgggttgaggcgtgggacctgctgtgggtacctgctgtcgttattgcgagtcgcttaagtgatatgtctaagaggaaatagtgaatttgagtattaatgttcgctgtgattgattaatgggtttgagagatgcatagagttgactgacagggtatggtgatgtggacggtgctaagtcctgatataatgagcgggtgcggttgtcttgaagtagtgtttctgatgtttgaattttatggagggggtctttggatgtttgctatgtgtttggctcttgaggccgggcaatattttgtgtagtgtttgctatttgtgtatctngcaaaggtgcttggtggtgatgtatatgtctgtcgaaagcttgtgggcgctggactgtgtggtcaagctgttgtcatatatggggt

SEQ ID NO: 75190 - DNA, 337 bp, Zea mays
  Clone ID: MRT4577_168603C.1
ggcctcgaccggctcatggccgcgcacatctccggcgacctcgtccccatactcaaggacgccggcgcgctgtggctctgacacgagcagccaccaagctagccgccctctgattgcctctccgtcgtcagctgctttgctttgaattaaacgatggtggtgttgtcaactcgtttttatttactcattgactagagatagacatgcacataggacttcaattcttgtacttgtactactagggaaaagagagtgaattatagtactttaatattatttgttacttgtattttccatcctgtgaatacgaaataccgactccaaaaaaaaaaaataa

SEQ ID NO: 75191 - DNA, 1203 bp, Zea mays
  Clone ID: MRT4577_168604C.1
ccggccggggccgagctcagttgcgcgggcttgtaacccatgtgggggtattaaggtggtgtggatgctagccgccaaccccccaaacaaaaccctaggccaccattctgaccaccaggcacaagcagagcagaagcagacatggccaccattccgaccaccgattctggcctcgtcctcagttcctccgctctcctccggaggactaggagggccgcctcatccgtcaccgccaggctgccagccgtcgcccgccgtcgcccgcagctcctcgtgcgtgcctccgccaaggagatcgcctttgaccagggctccagagccgcccttcaggccggcgtcgagaagctcgccgccgcggtcggcgtcaccctcggacccagaggaaggaatgttgtcttggatgagtttggaacccccaaagtggtcaatgatggagttaccattgcccgcgctattgagcttgctgatcccatggagaatgctggtgcttccttgattcgtgaagttgctagcaagacgaatgactcggctggtgatggaaccacaactgcctctgttctcgctagggagatcatcaaattgggcatgttgagcattacttcaggggcaaatccagtgtccgttaagaagggcattgataagactgttcagaaattggtggaggaacttgagaagaaatcaaggccggtcaagggtagtggggatattaaagctgttgctgccatatcagctggaaatgatgaatttgttgggactatgatcgccgaagctattgacaaggttggccctgatggtgtcctctcaattgagtcgtcatcgtcgtttgagaccacagttgaagttgaagaagggatggagcttgacagaggatatatctcccctcagtttgtcactaaccttgaaaaatctattgttgagttcgaaaatgctcggattcttgtcactgatcagaagatatcatcgataaaagaaattattcctctgttggagcagacaacacagttaagagcaccacttcttataattgcagaggatgtaagtggcgaggcgctggcaacattagtcataaattgagtcaggaattgcatggattttgggccaggacgatttgcaaattggttggattagagtgtggatggctgattggacattgtatcctatctgcattctgttcactcagttggctaattcacatttctctcc

SEQ ID NO: 75192 - DNA, 2562 bp, Zea mays
  unsure (1)..(2562): unsure at all n locations
  Clone ID: MRT4577_168605C.1
ctcttcattcacatgcccgccgtcgcctccgctcggtttcttctccttcctccgaggttcagccatgggcaaggagaagactcacatcaacatcgtggccattggccatgccgactctggcaagtcgaccaccactggccatctgatctacaagcttggaggcattgacaagcgtgtgatcgagaggcttgacaaggaagccgctgacatgaacaggaggtctttgaaggacgcctgggtgcttgtcgagttgaaggacgagcgctgagagggcacccccattgatattgccctgtgtaagcgccagaccaccaagtcctactgcancctcgatgacggccgggccggggaaaataccctctagaagcctccgggtcgctcggtgtgggttgctaactactcgcagcagccagaggccagatccagccgccaaccccccaaacaaaaccctaggccaccattctgaccaccaggcacaagcagagcagaagcagacatggccaccattccgaccaccgattctggcctcgtcctcagttcctccgctctcctccggaggactaggagggccgcctcatccgtcaccgccaggctgccagccgtcgcccgccgtcgcccgcagctcctcgtgcgtgcctccgccaaggagatcgcctttgaccagggctccagagccgcccttcaggccggcgtcgagaagctcgccgccgcggtcggcgtcaccctcggacccagaggaaggaatgttgtcttggatgagtttggaacccccaaagtggtcaatgatggagttaccattgcccgcgctattgagcttgctgatcccatggagaatgctggtgcttccttgattcgtgaagttgctagcaagacgaatgactcggctggtgatggaaccacaactgcctctgttctcgctagggagatcatcaaattgggcatgttgagcattacttcaggggcaaatccagtgtccgttaagaagggcattgataagactgttcagaaattggtggaggaacttgagaagaaatcaaggccggtcaagggtagtggggatattaaagctgttgctgccatatcagctggaaatgatgaatttgttgggactatgatcgccgaagctattgacaaggttggccctgatggtgtcctctcaattgagtcgtcatcgtcgtttgagaccacagttgaagttgaagaagggatggagcttgacagaggatatatctcccctcagtttgtcactaaccttgaaaaatctattgttgagttcgaaaatgctcggattcttgtcactgatcagaagatatcatcgataaaagaaattattcctctgttggagcagacaacacagttaagagcaccacttcttataattgcagaggatgtaagtggcgaggcgctggcaacattagtcataaacaagcttagaggaattttaaatgtggctgcaatcaaagctcctggttttggtgagaggcgtaaagctcttcttcaggacattgccattgttacaggtgctgaatatcaatccaaagatcttggtctactagttgaggatacaacagtggagcagcttggcatagctcggaaagttacaatctcaagttcctcgacgaccattatagcagatgctgctagcaaagacgatatccaggccagaatcgcgcagctgaagagagagctttctcagacggactcgacgtatgactctgagaagttggcagagagaattgcaaagctttctggtggagttgctgtggttaaggttggagcatcgaccgaggcagagctagaggaccgcaagctccgcatagaggacgcgaagaatgcgacttttgcagcaatagaggaaggtattgttccaggaggcggtgcagcatatgttcatctatcgacattcgtaccggctatcaaggagacgttggatgatcctgaggagcgcctaggtgctgatatcattcagaaggctttggtggcacctgcagcgctgatagcccataatgctggggtggaaggtgaggtgattgtggataaaatccgggaaagcgagtgggagttcggttacaacgccatggcggacaagcacgagaacctggtggaggctggtgtgatcgaccctgccaaagtgactaggtgcgccctgcagaacgctgcctccgtggctggaatggtgctgactacccaagcaatcgttgtggagaagcccaagaaggctccagcagcagctgctgcagcggcaccatagggttctttcaccatgtaataatactttctagtgaaaaacaattttactaggcatggaacaggcacgttagagtgacgaggagaaaaaactatttttgtcatgcgtgggccggaataaattgagtcaggaattgcatggattttgggccaggacgatttgcaaattggttggattagagtgtggatggctgattggacattgtatcctatctgcattctgttcactcagttggctaattcacatttctctccagtccgccaaaaaaaaaaaaaaaaaaaaaaaaaaaagtaaactgcgttgttaccaatact

SEQ ID NO: 75193 - DNA, 259 bp, Zea mays
  Clone ID: MRT4577_168606C.1
caacctgcaagcacggcaaacattcctgaggttgaggttataaccgaagcaccttctggatttcaaactcctgtggagatcaatctggacatctctgatgccattgcagatactactgatggaaacacaggaacagatgaactagttaaagcagaaggtgttatccatcctgaaaacaaagagagttttctagaagatacatctaccacagaacctttagaagaggtggccaatgtagaagatcagcacaaccagcaag

SEQ ID NO: 75194 - DNA, 3237 bp, Zea mays
  Clone ID: MRT4577_168607C.1
atgtcctcatcacaacctcgaccaggacatcgctgcaagggatgcccgaatccagaccggtgtccagttggtcggcgtagactgtgccgcactagcggatcatctccgcgcggcgacttggccacccaagttccggccacacctgctggagaagtacgacggtacgacaaacctgtcagaattcttgcaggtctacgtcaccgccattacagcagctggtggaaacactgctgtaatggcaagctacttccatgtagccttgaccaggccgacctagacctggctcatgaaccttaccccggcgtcgatctactcctgggaaagctctgttcacggttcacagcgaacttcgccagtgtttatcagcagcatggcatggaggctcatctccatgtagtgaggcaggaacccggggagactctccgggcttttatctcccgcttcaccatggtacgggggactatacctcgcatctccaatgcctccattatcactgctttccgacagggggtgcgtgataagaaaatgttggagaaattggctatgcatgacgtggaaatcgtcactacgctcttcactctggccgacaaatgtgccagagctgctgagggctgtgcatggcactcggcgtcgcaaaccggagttacccagatgggcggctcagtcgctgtagctgcgactgggggccgggacgagcgcgacaagcgtccgcggcaacaaggaagtgatagtgggtcatgccttgtccacccaaacagtcaccacagcgccttggaatgccgagagatcctgaagctcgcgaagcgcatcagcgagcggcgcgagcaggcccttagggatggctcgccgcctcggcgccggcctggcaaggagaaggtcgatgaaggtgacgtagccgcgggagaacgggacctcgggtatcaggcccccgagcaagtcctcaaggacatccttactagagactccgactccggtgatgacaacgaccgccgcaagaagttgtacgttatgtatggcggaagctgtgagctcaccttctgtaggaacgtgaagtccctacgccgcgaggtcctttcgacgacctcgggggtctcgaaggcagccccacatcaacggtggcggagtaccactatctccttcggggcatccgactgccccaaaaacatggcatgggctattatactaccactcatcaccgcccctgtcatcgccaacatgaagctacatcttgtgctgattgatggtggagctgggctcaatatgccgtcccctgctagggtcctcaccgtgcggggtgaccgccccgctgcgcttgcagctgtcgagaagttgcatgccctggcggcagaagccgctcgcccagatgacgaggggagggacccctcgacttcctgcaccaaggcgcctgctaaggtgcctaaggaaaatgtcgacgtattcgcatgggaatcatcgcagatgcctgggatccccagggaggtgatcgagcaccatctgaagatccaccctgacaccaaaccggtgagtcagaagcctcggagacagtccattgagcggcaggatttcattcgaaaggaggtccagaagctgctagacgctggcttcatcgatgaggtccatcacccagtatggctggccaatccagtcatcattcccaaggctaacgggaagcttcggatctgcatcgactacaccaacctcaataaggcctgtcccaaggacccatatccacttccacgaatatatcaaatcgtggattctatctccgggtgcgacctcctgtccttcctagatgcttattctggtttccatcagatccagatgtttaggcaagataggaagcatacctcttttgtaactgtggatgggctttactgttatattgtaatgccttacggtatgaaaaatgccttgccaacatttgtacgggcgatgagtaagactttcggggacctaattagggacaagatggaggtatacgtcgatgacatcgtggtcaagactaagagaggatcgaccctagtggaagacttaaccctggtttttgacaagctgcgggcaacatgcacgaagctgaacccggacaactgcgtctttggtgtctctgcagggaagttgctgggattcctggtttctcactggggcattgaagcaaacccagagaagatcaaggcaattgagacaatgaggcctctggcccgcatcaaggacgtccaaaagcttacggggtcactagccgctcttagccgcttcatctcaagactggctgagagggcgctacccttcttcaagctattgcggaagtccgagccattctcttggactaaagaggcagaacgagcctttcaagagttgaagcagcaccttgtgtccctaccaatactggtagctccagagccaggggagccattgtacttatatattgcagcggctacaaaggcgaagccagtctactacgtcagtgaagtcctccatgtggcaaaggccaagtaccttgagaagcacaagcttatctatgctatacttgctgcgtctaggaagttgtgccactattttcaggcacacagagttgtggtggtgacctccttcccgttaagggccattctccacaactctaacgccacaggcaacattgccaagtgggccgcggagcttgctgagttccatctagacttccagcctcgccacgctgtcaagagccagggtggcggcgctggagtggtcctcatcgacccaagcagagatcaagtgaagtacatggtgcaccttgagttcaaggccaccaacaacatggcggactgcaatgagcccaggctcgcagcttatctcctccatgtaaggaagctggaaaaggacttcattgccctggaactgcaacatgttcctcgggctaacaactcagcggcagatgaactctccacgagggcaccaacttgggcacccgtgcccgagggcgtcttcgaaagacggctgctgagatctaccgcccagcctgccaaaccgggcgaagggggtgagactagcacctcgaagctagcggtcccggtggcgatccatctgcagaacccaccaaggattgtgtgtgcagcagagggtcctgccaacctcgtagcaccacagccagtagctcagagtggtcccgatgcatggatctctgaggtctgggactacctgaaagaaaatatccttcctaaagaccatgtgtccgcagagtgcatagtgcgattggctaaatga

SEQ ID NO: 75195 - DNA, 408 bp, Zea mays
  Clone ID: MRT4577_168608C.1
gaggacatgggcaagatctagttcgttttctggtcttcgcttcatgagcgtgtatggcttactgtgtaaactagcgggggtaaatgaaccggcatagagctaaggttctgtacctcttacgatattgactaatcacatccaatacagtataggactacaacatacgtgagatcacgactcgactcgacaaacacttgttgtaggcatactgtgtactgggagatacagttgactgcggcaaattgtgctcggatgagaagtgcaagctagagcatactatgcgatgagctgtgaataactgtttgtaaattacctggccaccagcgtatatgcgattggaaggatcctgtacagggctactttagatggaaaacggtgcgaacaccagatgcattacttctgggtgat

SEQ ID NO: 75196 - DNA, 168 bp, Zea mays
  Clone ID: MRT4577_16860C.1
atggcgcaccggacagtccggtgcgccaccggtgcgccaacggtgcgccaccggggagagtctctgccgtggaccagcctggccccacctggcagagggtgcaccggacagtcggtgcacatcggacagtccggtgccccaaagccagaaactctaactctagagtga

SEQ ID NO: 75197 - DNA, 136 bp, Zea mays
  Clone ID: MRT4577_168610C.1
gggaaattgtagtagtaccagggaagggtaccctgatactaccatttgagtatcttagagatgcagacaaacgtgatcccgtcagcgtccatgacactcccaccctgttagactgctgtcagtagcttccacacaa

SEQ ID NO: 75198 - DNA, 322 bp, Zea mays
  Clone ID: MRT4577_168611C.1
agaaggaacaaaaaagcaccttcagacacctccccaaaacccccgattcaaactttttgttttatcaaacccatttactcactttcacgggcacatattatatccgttcggtcatctaaattacacatcttctatacatactactccaaaccttcattgctacacacaaaacaatatcttcatcagtactaatcttatcctttctcatatcactcctattatatctatccacctaaaaattcatgaacaccatccttactttcacctctttacatccctatctcatcaccttctacactatatacctcaccttttcacccat

SEQ ID NO: 75199 - DNA, 304 bp, Zea mays
  Clone ID: MRT4577_168612C.1
tgggtggatagacctatagacgcacgcttcgaattccggaggtcgctcgtgagaacgtctgatcaagctttgtgtaggtctccaccgccgggtgcttcggctgtccagcgtgtctgatacagcttcctctccgtcctcttgaaagctagctgatctagcaagccaaccactttacctagctagtgttccggctgattccacaggtcatacgaccgagggaaggtatttgctagtagccaagatcaccaacatcaagtctctatcgagcttgcatctgcaaccatattaagataatgaagtattg

SEQ ID NO: 75200 - DNA, 760 bp, Zea mays
  Clone ID: MRT4577_168613C.1
ggctggggtttaaatcacatccccatcactccacaccccgtcaatggcgttctcctccgccgcctcgtcggcggcggccgcggcagcgtaccccagaactacgcttccactgcggcggcggccgggcctcttggccctcctcctccttctcctttgcttcctctccttccaggtcgtgatccatgtgccctccgccagatcagcggtgtcgctgtggctcttctcgggtcaccgagccgaacgcgggactcgcgagaactgccctggctgcagcaagttacaggatgtggataaagctgaaaagactatcgcgtacactgaccagcatggtcggatcaagctattcaaagttaccgccagagaattcggttcgtcctctatctgggagaacccgtggttgcccagagatagccagccggtagccagaacacaagaggttgccggggatcatctactcgccagtggatcagaaaccaccaatctttcaagtgctgaaactctggcaactacaattgtcgatccgattaaattacggcgacaggtatttcgccgtagaagaaaggagcggagggttcaggagctgcttcagatggataagaagattgaacttcagatgcggaatgcagcaataaatagctcaaggaactttaacaataaagttagaggaagctacaacatatggaggcaggagttccgccttgttaatacagactcaacactaaggctcatgaaagatcagataataatggccaagttgtat

SEQ ID NO: 75201 - DNA, 594 bp, Zea mays
  unsure (1)..(594): unsure at all n locations
  Clone ID: MRT4577_168614C.1
aattcggcacgaggccacaacgcgcactctccggcaccaccgccgtcctcgcgccgtcacatagtacgcattacgcactcgcgcgcgcgcgtacattgatttacgcagcgatgagctcgagaacgcaccacccctgctttgcgtctgtggagtcatgggagcaagcggcgatggcgcacgacggcttcctcggcgatcttgcctgcccgctcccgctcgctcacgctgcaaccgcggcgccgttcgacccgctgcgggtacatgtggcgcaagcgctcacgggcgccggcgcggggtgggaacacgacgccgcgacgggcgcgctcgtgccgtcgcggccgcgaccgctgtcgccgtcgtcgctcgcggcggcaccgccgtagtagttggaggaggaggagacgccgtggaggccgccctgatggagcagcttgcgagcaggctcggcgtcagcgtgccttcgccgccgcattcgcggtacgcgtcctgccacggcacgccggcgggctcccccttcaagccgggggcgccgnggggtgctggccggngacgcggcgcctgcggagcgcgccacagggctcccgtgcttcccgg

SEQ ID NO: 75202 - DNA, 376 bp, Zea mays
  Clone ID: MRT4577_168615C.1
gacaccaaacaattatcccggtatgtagcaactaggggaaggatatgttgacccatctttggccggatcaaacgagcacaaaacagagacgtctggaggatccgtctattgagacggagaccgagtttcgttgcggctgcggccacaacaagaacaggcggggttggatgaaaacacggaacaataatgggacaagcacgctttagacacattttgtttagtacgtgacaggagcaaacccaccactgctttttttttctatgtggccacacacgttttaggtctcaacaaacaaacgatatgacgtgcaaaggatctggagttaacaccgggattgactagagagcgaaatttatacattcccatttgggttgac

SEQ ID NO: 75203 - DNA, 2535 bp, Zea mays
  Clone ID: MRT4577_168616C.1
tcctccctccttcctggtcgcccatggattattccatagatacgacctagctgcgctgctacagcccccgcatttcccttcccccaatcctctcctccacgaacacgccctcccttttgcccgttcccagcctcgaacggcaaatcaaaaggcagatatttgagcttttggtcatcgtctccacgccccattggtagccgcctctgaaattcctataaaaaaagatatatgggtggagacatcacccacgccgccaagatcctgtcttcttgcgcggccagctcgtagctccacgccggatagatagaagaggctaacctttacctcccgcttgctccccccttttattttggcaggattgcacatcttccccaagtaacacctgacaaagggcgaggagagcatagatttcttctttcccttgccgcttccgtttctcgcttccattcctctctgctcgtgggtttgtcgaagataaacctcgcataaagcttcgttcgtcggcttttggtatcaatcggcagggctcccccgtttcctctctccaagatcttccccccttttcttctgtctccaacccgcggaaatccttggaggagttgcggaaatttgtagcaagaggttttccttcagctttcctgctgcggcggcctccgcacggtttttgatccggggagcgcacctggggcgcgccaatgcagccggacccgagcgggaacgccaatgcgaagacgaaactgccgcagctggtgacggcgccggctccgtcgtcggggcgtccggcgtccgtgcttccgtacaagacggcgaacgtgcgggaccactaccgcatcggcaagaaactggggcaggggcagttcggcaccacgtaccagtgcgtgggcaaggcggacggcgctgagtacgcatgcaagtccatccccaagcgcaagctgctgtgccgggaggactacgaggacgtctaccgcgagatccagatcatgcaccacctctccgagcaccccaacgtcgtccgcatccgcggcgcctacgaggacgcgctcttcgtgcacatcgtcatggagctctgcgccggcggcgagctcttcgaccgcatcgtcgccaagggccactacagtgagcgcgcggctgcgaagctcatcaagaccattgtcggggtcgtggagggatgccactcgctcggcgtcatgcaccgggacctcaagccggagaactttctctttgccagcaccgctgaggaagccccactcaaggccactgactttgggctttccatgttctacaagcccggtgataaattctctgatgtcgttggaagcccttattatgttgcaccagaggtgcttcagaaatgttatggcccagaagctgatgtgtggagcgcaggagtaattctgtacattttgctttgtggtgtccccccattttgggcagaaactgaagcagggatcttcaggcagattttgcgaggcaaacttgatttggaatctgaaccatggccaagtatctctgatagtgctaaggatctagtccgtaatatgcttatccgcgatcctacaaagagatttagtgctcatgaggttctatgtcacccatggattgttgatgatgccgtggcacctgataagcctattgattctgctgttctctcaaggctgaagcatttttcggcaatgaacaagctcaagaagatggcattaagggttattgctgaaagcctgtctgaggaagagattggaggcctcaaggagttgttcaagatgattgatactgacaatagtgggactataacatttgatgagctgaaagatggcttgaaaagggtaggctctgaattaacagagaacgaaatccaggctctaatggaagcagctgatattgataacagcggaaccatcgactatggcgaattcattgcagctactttgcacatgaataaactggagagggaggagaacttggtttcggcattctcattttttgacaaagacggaagatggcatttataaccatcgatgaactgtcacaagcatgtcatgaattcggtcttgatgacgtccacctcgaggatatgattaaagatgttgaccagaacaatgatggccaaatcgactacagcgagttcacagcgatgatgaggaagggcaatgctggtgcaacaggaaggagaaccatgaggaacagcttgcacttgaatctcggcgaactcttgaatcccagcaaaacctagcgtgcattggaaggtcttgtcgggtacattcccatggcatatgaagattttggatgcgttgtcgatcggctggcctattctgagatgttgagcggttgtcctgtggtattactaagatgctgaagaattttcctagaagtacaactgccctgcggcatatatgtataactgtcgatgtaatgtagattgaacatggtctaaacattacttccctagaagtacaacttctctgctgtcaagtgtgtgtttagttgatattgaatagcaatttctttctctaatttcattgatgatgactctttttt

SEQ ID NO: 75204 - DNA, 241 bp, Zea mays
  Clone ID: MRT4577_168617C.1
gggcgttcggcttaccgtgggggcaattacaaggggcggaaccgtggggtgcttacttaccatgttgcgcggggaaccccggccgtgccggccaagcccaaagtcggagagggtagctgccgcaaggacctccggcgggggccaattcttttaaggggggccaacaaggcgccgaattgaaggtcaaagaagttttctcatccatgcgccggggaaaacccctaacattagcaaggaggcc

SEQ ID NO: 75205 - DNA, 882 bp, Zea mays
  Clone ID: MRT4577_168618C.1
gactcgagggccggccgcaccatccccgacgccatcggcgggctacggccctacggtgctcgacctgtccacaccagcgtcggcggcggcttccctgcgtccctctacaactgcgccgccatcgcgcgcctcgacctctcccacaaccagctcgccggggacctcccggccgacatcgaccggctcggcgccaacctgacctacctcgccctggaccacaacaacttcaccggcgcgataccggcggcggtgtccaggctcaccaacctcacgtacctcgctctcggcggaagccagctcaccggcaccatcccgccggagctcggccagctggttaaccttcggacgcttaagctcgagaggacccccttcagtgccggcacgctgccggagtcgttcaagaacttgaccaagctaacgaccgtctggctggccaagtgcaacctcaccggcgagatcccgagctatgtcacggagctggcggagatggagtggctcgacctgtccatgaatggactcaccggaaacataccgtccgggatatggaacctccagaagctgacgaatctgtatctgtacaccaacaacctctccggcgacatcgtcatcaacaacgggacgataggagcggcaggtttggtagaggttgacctgtccgagaacatgctgactgggaccatcccaggaagcttcggaagcttgacgaagctaaggctcctcattttgcacgacaacaatctcgtcggcgagataccggcaagcatagcccagctaccgtccttggtatacttggggctgtggagcaacagcctcagcggagaagctccggcggggctcggaaaggagacccggtgctgagagatatcagatcgacgacaacac

SEQ ID NO: 75206 - DNA, 400 bp, Zea mays
  Clone ID: MRT4577_168619C.1
atccgaaaataaataggttgattatgttgcatgggtttgcgatcaggatgcttatgcttgtagcggtcagaaatgctctgctcagtctgttctattcatgcacaaggtaaagactgtcaaatgtgtgttactttgctaattatctaggattgttattgtggactgttcatcgctgatgaagcatataatgttcctggttggttgatctatgacttgtgatcggtcctttggtgttttattttctagtaagttggtcaatctcctagggttgttacctctctaatcatattgatctaaaagttttggatcattatatatctgctcaagaggattagaaaagaaaagaaaaaggcatcgatcgctggtactgggagcgggtgacagttattgtgaatgcatg

SEQ ID NO: 75207 - DNA, 1444 bp, Zea mays
  Clone ID: MRT4577_16861C.1
cattggtacctcgagccggcacccgccgctcgcagagcgacatcccgttcggcttcgcgcagctcagcccgccgctgcccccgccggcgccggtcaagcgcgaggtcaccgctgcggccgacggctgcagatcggacggcggcggcggtgatgacgccgccctctacgacctcgtcaacgcgtacatggacctggacgggctggacccgctcaactcgtctgaggaccgccacgacgaccgcgacagtcgtgccagcggcacgcgcgcggggagcgcggccgagagcagcgagaacgaggcggagagccagtccacgtccgcggacaggaaggacgggggcaagtcccgccattgtcgcagcctgtccatagacagcttcatgggcaagctcagcttcgccgcaggggaggagtctccgaagctgccgctgccgtctcctggtggcagcctcaccaggagcgggagtggctcactggaaggtggtgctgtcgcgctgttcaatatggagtttaccaacggagagtttaccgactccgagaagaagaaaattatggcgaatgagcgacttgctgagatagctctgacggatcctaagagggtcaagaggattctggcgaatcggcagtcagcagccaggtcaaaggagcgcaagatgaggtacattcaggagcttgagcataaggtgcaagtgctgcagacagaggctacgacactctcagcacagttgacaatgctgcagagggactcagctggattggctactcagaacaacgagttgaaaataaggcttcaagcaatggagcaacaagcacagctgagagatgcactgaacgaagcgttaactgccgaggtccagcgtctgaaactcgcgactggggaggtaaccgatggccggatgccgaagggcctacagcagcagatgaactcccagatgctccagatccagcagctgcaggttcagcagcaggcgccccaggcacagcagcagggccagcgacagcagcagcagcagcctcagaaatcggcatagatcaggtcaggtcgagagaaggacgctgaagctaattgagcttgagcatggccaattgaaggatgctgggtggggagaaaaaacccgagtcttttgcgtatatcagacatgttgtaggatagctgcaatagtagggcgacaggcgccgtggtgccgctgtttcagttggtttcgccgagtcaagtaccttagctggagtatgtcgtcttggtgtcgtagtaccatacatgattgcctgcctgcctgcctattgttgaggcgtcttggtagcgtccctgaacgttctctcggaggtgcttcttctgttcttttgtctaagagggctagggtgtcacaaatgtacctgcgtaatagtgtaattattatctatagcgcaccttcagcgtttgtactgtggaggggttcccaagttc

SEQ ID NO: 75208 - DNA, 757 bp, Zea mays
  unsure (1)..(757): unsure at all n locations
  Clone ID: MRT4577_168620C.1
ccggccgggagcatcctcgtgcttcttcgagagatacctcttcacattccaagatgcagcaaaatcatataacaaaccccaatgagcccttcccaaagccacaggctctggcatcggctacgacgacacattctcaaggtcggtttcgcatctcgacgcgcaagctacccatctccaaggccggtaccatcgatgcactcaccgaacagattggcatcccgatgcccgagatgatctttggtgaaaacttcgtcggaattgagcacataccttcgggctggtccctgaacttcaacactccggacgcactcgatgccgtcgacaagacagatcgtcatatgctcaaggttgcatacgctcgagattgggagagcacccgagaaggcactacacaaggcatcaaggagatcatgaagccttacgactggagttattcaacaacgtataccggaagtgtcgacccctcggccaagcagttcgcacctacagagaatatgattccaatcgagctgttgaagcgccgcgaccccatccttttccttcgacgaggttatgctattcgagagcgagttggacgataacggcataagcattttcagcgcccaaggttcgtgttcacgagaagcgcatgcttttgctgtgccggctattcatgcgactcgataatgtcatccctgcggatacgtgacacctcgggtctatggtgactntgaagacgatgaagtcattcgtgatatttcagcgcagaggagactta

SEQ ID NO: 75209 - DNA, 583 bp, Zea mays
  unsure (1)..(583): unsure at all n locations
  Clone ID: MRT4577_168621C.1
tcagtgaacgagggtaggatccagtgcccttaccatggttgggagtactctactgatgggaaatgtgaaaaaatgccatcaacaaatatgctcaacgtgcacatccagtcattgccatgctttgagcaggaaggaacggtctggatttggcctaaggatgacccaccaaaggctacaatcctttctcttctgcctcgttcaggatttacatgctcactgttgatgcagggggtgcatggcctanggggaggatggcgactaggttcatcgatggcggcaagcagctcgtgttcgaccacgcgacacagttcttcaccgcgagcatccgcaccgctgcaggtgctgcatatcatcggcagagaggatcgagttcagatcgatgatgcaaggcggctgcatcgtcgagctgtaacacctgcagcgatgatgcctccttatgggacaccaccaccatatgcagcaatgtatgcacaaggtacaccataacagcaggcaccaatgccaccgggttcacacccatacagttcttatcctatgcagtcaccaaacggacagttcaaactccaataagaatctcttggct

SEQ ID NO: 75210 - DNA, 271 bp, Zea mays
  Clone ID: MRT4577_168622C.1
ggggctaaaacttaaagcccattaccacctttaaaggcaagttagccaatctaccctggtggtctgaatttttaaatcaaatacccacaacatattcgggcccccgaaacagtttacagcaaaaatcaaatgccgctccctagggttcaagggaaaacagcacgggtttgggatcctttgggcacatttacaaaacagaccttttttgagaatgaatacccctcgtcactaaaaatgggggggttcaagaatgaatatgcgcccagggcac

SEQ ID NO: 75211 - DNA, 264 bp, Zea mays
  Clone ID: MRT4577_168623C.1
gttctagatcgcgagcggctgccctttcttgattaggccctgaaccagttcggataattttgggggatacgataacgcgtcaaaatacatgttagcggtttacaaagtgccccctgagaaaattgcaacccaaccgataattccaactgaaaggatgggacctacttgtgcctaactgggcctttttgatgacacccttgtggctcacataggacccttccaaaaacttccggaatccttcttctagaagggatttcgggtaac

SEQ ID NO: 75212 - DNA, 464 bp, Zea mays
  Clone ID: MRT4577_168624C.1
ctcgagccggcgggatatactgaccagtgagctttagatctcctccgatgcatcattgatcgcgccctgcttgctgtggcacatgattgctaggtattcctctcatccaatgtgtcgtagtcttgtgccctccgtactattctgtgctgtatacatcaaggcatgaatgactctgcgtgccttcagagacaagagatcgacgacgcctagccatcaatgggctacttctcctggatcacgcagctggtgttctgatgccgctcctcctgctcaagcatgacgatttatctgaccatgcgctcacgtaggctacgtggtttttgccctgggatgttatctcgaactggtggccctgttctgcctgcttgcgctactacgaccagctggacaaagaacgctcacaaaagtgtccagaaggtaaactactgaggactcgcagtctaaccattctacgtattatcatc

SEQ ID NO: 75213 - DNA, 236 bp, Zea mays
  Clone ID: MRT4577_168625C.1
ttgcagacctgagggaagagattacttgcgaacgagaacgttccactcagatgtacgcagagagatcgtttcagcagggaggatttcgagagcgacttcatcttctgtgttgcatcgtctgcttaccagatcgaccgtggcagaggtcgtggacttaacgtttgggatgggttcactcaccgatacgcacagaagggtggagctgagttgggcaatggcgagaggaattgtgactc

SEQ ID NO: 75214 - DNA, 691 bp, Zea mays
  Clone ID: MRT4577_168626C.1
gggtacctcgaggccggccgggccgggcttcgacttgatcacgccaggcctaagccacttgccgcctaccttttcaccaagaacaagaagctgcaggaggagtttgtggctgacgtacctgcaggagggatgcttgtgaacgacaccgtgcttcatcggggggtcttcttctaacttcgcccccgtccctgatccttggcccagctcgccaacccgtacatgcccttcggcggcgtcggcgacagcgggatggggtgctaccacggcaagttcgggttcgactgcttcagccacaagaagggggtcctggtccgcggctttggcggcgaggcgaacgccaggtacccgccctacacgacggagaagcagaagattctgagggggctcatcaacggcagcttcatcgcgctcatccttgccctcctgggcttcccgagggagaagcgttagatgggccttctaactgggcccagtacaagcgttttgttcgtgttcgatggatggcacagccgcacagtatatacactgccatgtgctgccaaatagatgcaaaccgtgcttgtgctacacggctgtgtaatgcattatattgttgcattgacttgtgggttaccgaattgtacgtaagggaattgcattaaataagtgtggtctgcctgccaaaaaaaaaaaaaaaaaggcccctagggcc

SEQ ID NO: 75215 - DNA, 425 bp, Zea mays
  Clone ID: MRT4577_168627C.1
gtgatctcgggggttgccttggtggaaatgggcgacatgcactgcgagtgctcgggacaagaacggttatactgtcaccgatggagtccatctaggaaccaagactctagacgcttaataaaacctccttatggcgcgtagaggactgctacagttgatactcaaagagctctaacagagaggatcatgaaccacatacagcgtatgtaacagggatgaccgatgtctcacagtggcaactcaagcttggtcgtgatcaggataagaaacttcagacggttcatcgtgaagcaagcataatttatgcggatctgtatgaaggtgctataggatatataccttctccctgatatatataccagcgaatactccctagtgatccgatgaggcgcagaatgacattacggagtgtccctgacttcaag

SEQ ID NO: 75216 - DNA, 824 bp, Zea mays
  Clone ID: MRT4577_168628C.1
tcgcggactaggaactagtttttttttttttttttttttttttttttttttttttttgccacatccatgcatgaatgcatgatgcatccgtcgaagtatccattgtgaacacttgataattgacaggcagaccacacttattaatgcaactcccttacgtacaattcggtaacccacatgtcaatgcaacaatataatgcattacacagccgtgtaacacaagcacggtttgcatctatttggcagcacatggcagtgtatatactgtgccatccatcgaacacgaacaaaacgcttgtactgggcccagttagaaggcccatctaacgcttctccctcgggaagcccaggagggcaaggatgagcgcgatgaagctgccgttgatgagccccctcaggatcttctgcttctccgtcgtgtagggcgggtacctggcgttcgcctcgccgccaaagccgcggaccaggacccccttcttgtggctgaagcagtcgaacccgaacttgccgtggtagcaccccatcccgctgtcgccgacgccgccgaagggcatgtacgggttggcgagatgtagcacggtgtcgttcacaagcatccctcctgcaggcacgtccgccacaaactcctcctgcacccacgcgtccgtggtgaaaaggtaggcggcaagcggcttaggcctggcgttgatcaagtcgaagctctcctcgatcttttccaccgtcacgataggaagcaagggcccaaattccccggtcatcccggccggctcgagaaaaaatgtagaacaagcacggtttgcatctatttggcagcacccacgcgt

SEQ ID NO: 75217 - DNA, 577 bp, Zea mays
  Clone ID: MRT4577_168629C.1
tcgaagccggccgggacatcagcccagccttccattccgtctagcttctgtcgtggctccgagcccacctcgcctcgacgacacatccgtcttccccaggctaccggcaggcaggatgtcacagcctgggtgcccggagctttggccaatggagacagctgccatggcttcgaccaactcggctatggaagaagagctgcagcgcctgaccgcatactccgtggtggcctgcctgtgtagagagaaggacgacgtcgggccgacagtagttgcccgggctctctgtgcgaggctcggcgttctagaggaggacatcaaggtgtcgtgccaccgtcctgaagacttccccatcacgttcgtgcaccagcaccatcgtagcgcagctctggagttgggacacttcggggtcggccgcaccgacatcgacatccgcatctgcctggaggggatcccagcgcacgcctggaacaaaagcatcgccaagaggacggtcgcgagagcttgcaccgttgattacgttgagcgaggcccctgcgccgggatgactctagggcgctctgcctctggccctggacgt

SEQ ID NO: 75218 - DNA, 129 bp, Zea mays
  Clone ID: MRT4577_16862C.1
gctaatcattaagacctgcttgaatgggcagaatgagaaattgtggcccttgctttataagcttaatgttaccatgaatgctgatgagaatgagttgattggcaaatctcttatgaatcgtgttttgca

SEQ ID NO: 75219 - DNA, 705 bp, Zea mays
  unsure (1)..(705): unsure at all n locations
  Clone ID: MRT4577_168630C.1
ccggccggggatacctgtgtacgcgagtggagggaaaacagtcggattggcgcgactcccgaccccgaccgatcctctcctgctgaaatcatggggacctccgtcggacgctctccaccgccgccaattacacccagctctaccggacccgggcttctctgaacaagccgtcgaacgggcttggacatgatgatgggacgcgagcgcgcccagcggagcattgcgcgtcaggcgacgagcagcatctccgccgaccgcgtccccgacatggagaaacgaaagatgatgaaccatcgctcctctctgcgacgccatctcggtgcccaccgacgtcatggtcgacccctacggagactatcttctaccctgccggttccgtgaacgacaagccacaggacctacgccaaggacaagctgagcaactacatcacggcggatgcgtgattcaacacgcacggtgccaatgatctcacgctcgcgcaagggatcaagggtgatcccgcgtacctggaggcggaggaggacaagacgctggccagctacgtgatcaacgacgcgtgcactcacctcggatgcgtattgccgtgaaacggcggcgagaaggatttcattctgccaatgccacggatcccagtacaacaaccagggcaaggtggtccgtggaccggcgcctctgtcgctggacctggntcacgccgacgtcaa

SEQ ID NO: 75220 - DNA, 333 bp, Zea mays
  Clone ID: MRT4577_168631C.1
tcggctcaagcttatcgagtctgcacaaccattgatcggatcacgtcttaacagctacaaggccggctggagatatggggcgccaacacgctcgtatacgtcatctaaagcttcatcccctccctcgacatgatacatacaacagggtccatacaataaccgaaggcattaacttccaccttccacacgtacaaggcggagcgccagccatacccggagtgaggcatgtaggcctatatatattcaagtccatgccttatgatgatgccactatcatgaagtggcttctgacgacttggacctacgacaagtgcacggccatgactagaaact

SEQ ID NO: 75221 - DNA, 329 bp, Zea mays
  Clone ID: MRT4577_168632C.1
aacaggcgggccggatgcatatcagcgtaaggtggcatgcgccgacccgacaccccaaagctgtatttatgaataatcacctctgactccatctatggcggctgatgctgttctctccggcaggtttttgctgtcccgtctcgcctcttcgcggcgtatctccgtcgtcgactatgaaggcatcgttctgcggagacggcgagctccatacctccatacaattaaggggcccccagccagctgcggttcacgttcaagcagaccctctcctatctgaacggcacgctgaccgacaagtagcgcttagacaccgattgggctatccgacc

SEQ ID NO: 75222 - DNA, 705 bp, Zea mays
  unsure (1)..(705): unsure at all n locations
  Clone ID: MRT4577_168633C.1
ccggccggggtcctccgtttcgtagccttgccgtttcacgactcagagagagcgagaggagaaaagaagagtcatcgcagacagaagagggtgctccagcgtgcatctcgtcgccgcccgccggtgccggtgtgattggcagcaggatggaggaggccacgcggcggcggatcacgccgacgacgacgctgctgctggctctggcggtgctggcggcgagcgttcccgccggcttcggcgccatcaaccctcaggacgcttctgctctcaacgccatccagagccaatggacgaacgcccccttgaactggtcctcggcgagcgacccctgcgacgggggctgggacggaatcatgtgcagcaacggcagggtcacgtcgctgctgctgtcaactttcaacatccagggcacgctcagcgacagcgtcggacagctcacccagctcatgtacctggacgtttccttcaacctcggtctcaacggccgaatgcctgctacaatcgggaacctggcgcagctcaccaagctgatcctggcaggctgtagcttcaccggaggcatcccacagcaactcggcaatctgcagcagctctcgttcctggcgttgaattcgaacaagtttaccggcacaatacctnctacgctcggtttactctccaacctcttctggctggatctgagtgacaatcagctcaccggatcta

SEQ ID NO: 75223 - DNA, 154 bp, Zea mays
  Clone ID: MRT4577_168634C.1
accacccgttcaatttcagatactgcaccgttcgccaccagcctgaaggtggctgtttccacttttaattctctacgctcaacatgatattcacaaacacgcaaacccaccacaaatcacgattaaagaatctgcaatccatatccgaacttga

SEQ ID NO: 75224 - DNA, 227 bp, Zea mays
  Clone ID: MRT4577_168635C.1
gctcggcccgtggaacgccctgaccctacgccttatcgaccctccatcgacttcaccgcagggcatatagcccgtcggccagccgacctagcgccttcggctccggccacaggccccgcctgaccgcccccaggctgcagcaccccgccgccggccgccgaacaagccccggcgggcgcacaaatctggttcgatggtctggcctgaagcccggagcgcctgcgtgc

SEQ ID NO: 75225 - DNA, 329 bp, Zea mays
  Clone ID: MRT4577_168636C.1
aggaagcgccgtgcatccatcgacatctttttattagcctcaacaactcatctgcgtcatcagtctatacgtaggcacgagactttgggtccactcaccatcaacacgcaactcctatcaccttgggctcaacgtgaagacccactctggccatgccaacatcccggggtgcacgggctatatggtgttacacatatgagaacggacttgtggacatactgaaagagcatgctgatatcccaatgtacaaagcacacaacggttggacaacagagggctgggtcagtattaccaacccgttcaacgacacgtttgcttgggctcatttt

SEQ ID NO: 75226 - DNA, 538 bp, Zea mays
  unsure (1)..(538): unsure at all n locations
  Clone ID: MRT4577_168637C.1
cacgctcgctgctcttcactgcgatctatggcgtcgtcgagtcgtcctccgtcgcggtgtttggtcccacagttgggacactggtcgataacctcacgtaccttcaggcctccgcggcggctctggcgttgtggaacgtcgcctcggtggggctggagtactggctcttcgtttctgtgtacaatggcgtgcctgcgctcgctgagagcagccggctgagaacagctggtgcaaatgcaagtgaggccatggtgctgccatcgtnnncgtcgtcggagaacgcggtgccggccgataaggagctggattggagggttaggatgacggagcagctatccatcataccatgctgggagtcatgggtggtgtacctgacgcaggacgtggcgctcccaggcgtctccctcacattcctctactttagcgttctgagcttcggcacgctgatgacggcgaccctggactgggaaggcttaccagcgtacgttatcatgttggcaaggggcttcagcgccatcgttggcatcggcgcaacgct

SEQ ID NO: 75227 - DNA, 262 bp, Zea mays
  Clone ID: MRT4577_168638C.1
tcttttacgcgtgggcaggaataagcgtaagatgaagtcatgaatgcagagggctcttttgtgaagcagctcattggggatggcgtccgatggaatcagtgctgatggtgcttctatcggtgtggctgtagtaacattcccaaagaggggaggcgactcacagcaatctattgatgcacttacacaggaaattgcactcgatcgacagattgaacacgaagatatagcacagcgttatcgaactgacaggggagactcgaaa

SEQ ID NO: 75228 - DNA, 2581 bp, Zea mays
  Clone ID: MRT4577_168639C.1
taaatccctaaccccgcgcgtctctcttcctatctcctttccggcttcccacctgtgctcgcacccgccgccggccgccagcccgagcacactacgcgcccgcccgccgccacccagcgcgctgcgccgcgccaccaccccgctcgctgcgccgcgccgcccgctcatggagagcttcccttcccatctcatggagacggaggacttcttctaaccggcgctctcctcggtttctcttctctcggtgatttttgctttcttgcttggggacccaataagccaagtaattctgcttcttctctcggtttcgcgggagtaaggcgtttcttggttttcctttcctgagatgggtctgagaaagagaaacgccatggttggtgaggcagccatgttcgccacatcttggtagccctcactcggcattggcatcctctcgttcttggacttgaagttaactcagccatgaggaagcatgggtggcagctgtcgtaccaccctctccaggtggttgcgatagccgtgttctcggcactggggttcaccttctacgtcttctttgtgccgttcgtggggacgaagccgttccaaattgtggccatggctatctacactccattgattacatgtgttgttgtgttatacatatggtgtgcggcaacaaatcctggagacccaggcattttcgattcaacgaagaatttgaagttagataagaatgaaaagcactcctatgtgaattcggatcaggggattaatcatggaggaaggccattaagtgagacttttggtactgctgataacagtgagaagctgagcagcatgcttgagaggaacgattcgccttcttggcccagattttctggaattatctccctggtttgtctcccattctcttgcctttgcaaacggtgcctccattcagacagtctatcttcagaacacaaaatgtgtgaagaaggcatgtttttctgcagcttatgcgaagcagaggttttgaagaacagtaagcattgtagagtatgtgacaaatgtgttgatggctttgaccatcactgcaggtggcttaacaattgcatagggaaaaggaactacaaaggtttctttgttctaatggcttctgcagttatcctgcttgtgatgcagtggttgtcggggggacttgtgttgattctctgtattgtgaagcgaggagaattctccaggcaggttgtcacaaagttgggaagcagcttctcaacagtggcttttgtaattgttgtggcaacttgcaccattttagcaatggttgcaaccgtaccacttgcccagcttttatgttttcatgtccttcttgtgaaaaagggaattagcacatatgattacatcatagctttgagggagcaggaggaacaacaagaggttcctggacaccaaagcccgcagatgtctattgttagttctgttactggttttagcacagccagttcttttgggcctcttcatcgtggttcatggtgcactccaccaagattattcctggaagaccagtttgatgccattcctccagagattggcatttcacggaattcaggcagtaagaaaactaaggaagaggaaggagcaaggagaaaagctggagcagtgaaaatcagtacatggacattggcgcggcttaatgcagaggaagtctcaaaggcagccgcggaggcaaggaagaaatccaaaatcctgaaaccagttggaaaacatggcgccccagagaacagcagcaaaccagaccatttgcctagctacaagagacggctagacaggagaggtttccctgctgaactctctcttgacccacttgcaactctatccgcaagcggcaccgaaagcaactacagcgacgcagcaacagaaatctgtggcagtctagccccgttacagctcgaagcgagaagtgctttccaaccgagtactgcagcgtccacaagaaatgttgcttcatcgcctgaaagtagctttgactcaccaaatctccaccccttccgcacttcctcggccacagctgatgagatgcagggagccatgatgcatacagctcacaggggcatcgagtttaaaagatcgtcaagcgatggttatgaagcatcaggaggtgaagatagcgaccgcatcccttcaaggatcgtgcacaggtcgtcaaactgggccagtgtctttctgaattctggtcagggagaccctccagctgatctgctgacgacatcagctgaaggttttgtagctaacgactctggttcctagagcaggcattgctgggtatggcagagcaatgttgacaagacattgactagtatctggcattaggtttaggtttaggcgcttaatttgtctgattacatgcggggatttggattagttctaggggccgattacatgtctgtaaaactgccttcttgctggtgccacttttttggcattccattgtcgccttcggcaaaatgtgaatttgacgccattgtgcttgctgagcttgatccaaagtactgtcgctgagtagtcttttgtaaaaaaaaaaaaaaaaaaaaaaaaaaaaaaaaaaaaaggcaaaaaaaaa

SEQ ID NO: 75229 - DNA, 336 bp, Zea mays
  Clone ID: MRT4577_16863C.1
aaaaaaaaaggtgacacggccattcttgttggaataccaaaatagttcagcacaaaatttcgggacatttttttttgcttacgcggaaattttacattttggaaataccaatgggaaatcccaaccctttgttaacgaccaccattattattggggttttttgggaaacctttgcaagggctttgggagttcacctatccgctgtttgttgtgagggcgcccatccaccttattaaattgctccaggaagggccttttggcctttaaaaccttttcctttttttttttgggtcccttgctcgggttgcttcctcccttgggcttttttttgggctt

SEQ ID NO: 75230 - DNA, 417 bp, Zea mays
  Clone ID: MRT4577_168640C.1
atgggcaggggattcgagcggccgcccgcgcagttactactgggctaaccctgttgcatggaccttgtatggtttgggggcgggacaattatgagacatccaaacgacactatctgataatgaaactgtggaacaattcttgagacattactttgggtttaagcatgattttcttggagttgttgcaactgtgctcactgcatatgtctttgtgtttgcctttacatttgcttttgccatcaaggcggtcaattttcagataagataaatgaatttaatcgactgattagcttttaggaagcaatacttacaaaattagtatgtataggttactatttgagaaagacttttcttttcaactcctgaatactaggtgtttgttcttgtaatatccattggaaatacaaactttctttt

SEQ ID NO: 75231 - DNA, 592 bp, Zea mays
  unsure (1)..(592): unsure at all n locations
  Clone ID: MRT4577_168641C.1
cactgcctcttctaactgtcagacacactgagactgtcaaatcactaaccgtggggctcgagtgtagctattgaaatcatgtcatggcaggacaggagnagacatgtgccagcctagagtaacatcaggaacatcgacacacggaacttatcttcgtatcgatgctaagcgaaaacacggacattatgctggatggtgcgctctcacgcatacacttgtctcatggtaccgtgacaggctgatactgattcacatgaacagctcctgcgcagaacgagcggcgcccccctcatctgtgggggcttagaggttacacataggtccctctggtcgagttgtcactacatcaaacgggacatacgctgatgctccacccaatgagactatcgagatcctcactcaagcgggaactctaaccggatccaaatctttgattatgagctttacggcgacccaacagataacattctaaacagctatccttccccctaacatagatggtcagctgtagccttctactatacacgcttaagaaggctctgatggtgagcgagagcacgtctatcgggaaccacgcaggctgacccctgac

SEQ ID NO: 75232 - DNA, 279 bp, Zea mays
  unsure (1)..(279): unsure at all n locations
  Clone ID: MRT4577_168642C.1
acangtcattattacccncatngtcanctcaannnaggcatgntcataaggntnggttataanaagtagaaggnacttcggcanntgcttancccgcctgtttaccnanaacatcancttctagcntcaccagtattagaggcaccgcntgctccngnganacangtttnacggccgcngtacnctaancgtgtaaaggtagcatnatcacctgttcctaaatagggacctgtgtgaatngctccacgagggntcagtgtgtcttactttaaccagtga

SEQ ID NO: 75233 - DNA, 329 bp, Zea mays
  Clone ID: MRT4577_168643C.1
cccactcgtccgagcaaagcggcagtgcgtatagaggatcgtcgaacagaacagcatgcatatgggcagggttctcgtcgtgtgcctagctctgtcagctgccatcgcctctgcaatgcacatgccctgcccctgcacggtgctgcactgctagtactgcgctggcgccggcctgactaccatgatggacgcctgcagtctgtacccatacacgtagtacctgatgcagcctcagtgcagccctctgaccgcggcgcactactacaccagccgtggtcagtcaaccgccatgttccatacgctccgggcacagttctgtccacaccata

SEQ ID NO: 75234 - DNA, 832 bp, Zea mays
  unsure (1)..(832): unsure at all n locations
  Clone ID: MRT4577_168645C.1
cattgggaccctcgaggccggccgggactaaccatcgccatcacttctgttaactacattcgcagcggcagcgggagggaggaccagcggcagcgtcgacctggtggtggtgcgcttcgggttcggcgaagggcgacatggagagcacgctcaaggggatacgcggcagcgatgcgccgtgcgttctggacctggacgacgcggccaccgtggcgggcggcgtcgaggacacctacggcgaggatcgcgccaccgaggagcagctcgtcacgccctggaccgtctccgtcgccagcggttacaatctgcttagggatccccgttacaacaagggacttgcgttcacagagagggaacgtgagacgcactacctccgtggccttctgccaccagctattgtatcccaggagctccaggagagaaagatcatgaataatattcgacaataccagttgcctttgcagcgctacatggcactcatggatctccaggaagggaacgagaggcttttctacaagttgctcattgacaacgtcgaggagttacttccaatcgtgtacactccaaccgttggcgaggcctgccaaaagggaaagatccttgaggtgttgaagaactggccagagaggagcattcaggttatagttgttactgatggtgaacgtattttggggcttggagatctcggatgccaggggatggggattcctgttggtaactttccctttacactgcctgngaggagttcgtccatctgcttgcttgccgatcacattggatgttggtacaaataacgaggaactgctntatggacgaatttacattggcttga

SEQ ID NO: 75235 - DNA, 365 bp, Zea mays
  Clone ID: MRT4577_168646C.1
attcggctcgagggcgggcctacatgtgccccttttggacgaccggtataactgcttccccgtgtggcctcaccaacagcactcacggggagtgcataggcttgaagcacggtccgtggggacaccgtgacgccaacagctgattgatgacacctgctgagaagctcattcttacgcacaggcatgcatgcatggccatacctgcatgtactttatatcgaaacggcgacgcactttctggaactaagaaggggtattggatatatgatatgggggctaggctcataaattgctgctatttagatcagtacggtggcggccacaaacgccttcttgatatcgaggtctggaagtgatggtattac

SEQ ID NO: 75236 - DNA, 445 bp, Zea mays
  Clone ID: MRT4577_168647C.1
ggcgttttctggttatagtcgttactgatggtgaacggattggggggcttggagatctcggatgccaggggatggggattcctgttggtaaactttgcctttacactgccctgggaggagttcgtccatctgctggcttgccgatcacattgcacgttggtacaaataacgaggaactgcttaatgacgaattttacattggcttgagacatgagcataaaccactcagcaacctcttagatgctgttaatgctatcaaaccaacagtgttgattggcacatccgggaaggggcaaactttcacaaaagacgttggtgaagcaatctcctcatttaacgagagaccaatcattcttgccctatcgaacccaacatcacaatctgaatgcacagctgagcaagcttacacatggagcaagggacaagcagtgtttgcgactgggag

SEQ ID NO: 75237 - DNA, 2368 bp, Zea mays
  Clone ID: MRT4577_168648C.1
aaaaaagaagaacctttcctggtgttacctacttaccttcacgcatacaaccaagcacttgttgaaaacaacagcaactgcgtgaagcaaaaaaacgttcaggtgaacacgcagtaccgagggaggaatcgtcgactcaaactttattccaaatttatccttgtccggaaggacggcaccagcaccatgactgactagcatccaaaaggctaaccggagctgatttacatgacatcgcaagagataaacgctgcggaatagctgctgctgatttgcacataactggagttgatccgaattcaacggtagttgcggtagatggggctgtacatgcaactctctgcatatttcaccaggtcctttggccgagggcgcctacttgccaaaccaagttcatatgcctttgctgcaacgctggctgcaatgtgggcagagatcttcctgatgtttgagaagggaggataaatcagccccttctcaaaattttcttctgtgacctgctgggccagagcctccgatgctgccagaagcatgtcgtcatgaacgcggatagctccagacatcaccacgccgaggccaaaccctgggaagatataggcattgtttgcctgtccgggaacatgtatcttgccattgtactccacaggatcaaatggactcccagtcgcaaacactgcttgtcccttgctccatgtgtaagcttgctcagctgtgcattcagattgtgatgttgggttcgatagggcaagaatgattggtctctcgttaaatgaggagattgcttcaacaacgtcttttgtgaaagtttgccccttcccggatgtgccaatcaacactgttggtttgatagcattaacagcatctaagaggttgctgagtggtttatgctcatgagcccatggtttcttgaagtgttgaagggactcctttcgtgtactgacaatcaagccctttgaatcaacaagccagattttcttgcggcactcctctataggagctttcgtctgacgtgagatctcaagagctataagttcagcgatacctgtcccagcctctccagcaccaaggaaaaggtaagtgtgatctgccaatgaaccaccaagtaatgtttgtgctgcaataagcccagcaagaaccacagaagctgttccctgaatatcatcattgaatacaaggtgagtggtgccatatcttgcaagaagatcaaaagcattatggttggcaaaatcctcaaactgaataagaactttctccccatagttttgtttcacagcactcataaattcttgcagaaaatcagtgtactcctggccagtggctcttctttgtctcaagccaatgtaaaattcgtcattaagcagttcctcgttatttgtaccaacatccaatgtgatcggcaagcaagcagatggacgaactcctcccagggcagtgtaaagggaaagtttaccaacaggaatccccatcccctggcatccgagatctccaagccccaaaatacgttcaccatcagtaacaactataacctgaatgctcctctctggccagttcttcaacacctcaaggatctttcccttctccttcaaactaatataaagaccctgagggcgactaaatatggatccatacttttggcaggcctcgccaacggttggagtgtacacgattggaagtaactcctcgacgttgtcaatgagcaacttgtagaaaagcctctcgttcccttcctggagatccatgagtgccatgtagcgctgcaaaggcaactggtattgtcgaatattattcatgatctttctctcctggagctcctgggatacaatagctggtggcagaaggccacggaggtagtgcgtctcacgttccctctctgtgaacgcaagtcccttgttgtaacggggatccctaagcagattgtaaccgctggcgacggagacggtccagggcgtgacgagctgctcctcggtggcgcgatcctcgccgtaggtgtcctcgacgccgcccgccacggtggccgcgtcgtccaggtccagaacgcacggcgcatcgctgccgcgtatccccttgagcgtgctctccatgtcgcccttcgccgaacccgaagcgcaccaccaccaggtcgacgctgccgctggtcctccctcccgctgccgcgagaggaagcgagcgcgaagggcgcgcatggccacatgacgagcggggcccccgcccatggcctgaggggtgactggtgagggcaacgagcagccgacgcgcgtctcgcccggcggcggaagagggttggatggagacatggagcaagtggaggctgccgctgcctgctggcaacgtggttggtggaagccgactgtctgcgcccgcgcgattg

SEQ ID NO: 75238 - DNA, 409 bp, Zea mays
  Clone ID: MRT4577_168649C.1
gcgggagggaggacctgcggcagcgtcgacctggtggaggtgcgcttctggttcggcgaagggcgacatggagagcacgctcaaggggatacgcggcagcgatgcgccgtgcgttctggacctggacgacgcggccaccgtggcgggcggcgtcgaggacacctacggcgaggatcgcgccaccgaggagcagctcgtcacgccctggaccgtctccgtcgccagcggttacaatctgcttagggatccccgttacaacaagggacttgcgttcacagagagggaacgtgagatttttatctccgtggccttctgccaccagctattgtatcccaggagctccaggagagaaagatcatgaataatattctacaataccagctgcctttgcagcgctacatgtcactca

SEQ ID NO: 75239 - DNA, 157 bp, Zea mays
  unsure (1)..(157): unsure at all n locations
  Clone ID: MRT4577_16864C.1
attgttacatataacccggcgggggacaggtctatgctttgctcaggaccagcaagcctgagacttctcaggccgcttttcatgcncatgtgctactgcattttatcantgctncgcatgctagccggggtgcncggtggcgcgcgagctccactct

SEQ ID NO: 75240 - DNA, 345 bp, Zea mays
  Clone ID: MRT4577_168650C.1
ataaaatcaaggtttttttgatttaggatctcatgcgcaacgggtacaggttcatacacataaaaggttccagataagagatgatacactggagccacttgttaaacacataacagcagtaacctaaactagaacctgagtgatcaaagcgcacatagttgggtaggggtaatacactcagaaattgtggcctcactggttccgcctaatggaaagaccctgaaggaaatgttggacaaagagacgttttaaccagagggaacaggaatccccatggcagggggtatatactgaatgacccgtgaacccattgatccacaaaaataaccccttgttgaccaagga

SEQ ID NO: 75241 - DNA, 506 bp, Zea mays
  Clone ID: MRT4577_168651C.1
gggccccaaaacacgcagtaccgagggggaatcggcgactcaaactttattccaaatttatccttgtccggaaccggaagggcgggagcagccccatgactgactagcatccaaaagcctaaccggggctgatttacatgacatcgcaagagataaaccctgcggaatttgtgggggcagaaaagggcgtgaaacagcttttgctagagggcttagggttttacagtttgaaagactgaaacgagtttttttcttaggaaatcttgcagttgacccaagggtgctgctgatttgcacataactggagttgatcccaattcaacggtagttgcggtagatggggctgtacatgcaactttttgcatatttcaccaggtcctttggccgagggcgcctacttgccaaaccaagttcatatgcctttgctgcaacgctggctgcaatgtgggcaaaaatcttccttatgtttgagaagggaggataaatcagccccttctcaaaatttt

SEQ ID NO: 75242 - DNA, 337 bp, Zea mays
  Clone ID: MRT4577_168652C.1
cgttggctagagaagcgcaaacccgcacaaacattaagccctgatgccttttctcacagcctcgcaaggtttacggggaacccagcaaaggacacacctatgctcgtggaggccaactccaagaccattcacgcgcggggttgttccatacaaggggggcgtttttaaacacgattggtgagcgcaattcccccacacaacaggttaaacgcccttcaaaaggggagcgcccatataaagggcgtgatgctcctccactggtccagggatgaaggcttacctcatttcactccaaaaggctcaatctttagtacttacacaggggggagcctccacc

SEQ ID NO: 75243 - DNA, 1777 bp, Zea mays
  Clone ID: MRT4577_168653C.1
agcggccgcccaataaatttttttttttttttttttttttggaggaagaagaagaacctttcctggggttaccttcacgcatacaaccaagcacttgttgaaaacagcagcaactgtgtgaagcaaaaaaaacgtccaggtgaacacgcagtaacgagggaggaatcgtcgactcaaactttattccaaatttatccttgtccggaaccggaaggacggcagcagcaccatgactgactagcatccaaaagcctaaccggagctgatttacatgacatcgcaagagataaacgctgcggaatatgtaggggcagaaaaggacgtgaaacagctattgctagagagcttagggtattacagtatgaaagactgaaacgagttatattcttaggaaatcttgcagttgacgcaaggctgctgctgatttgcacataactggagttgatccgaattcaacggtagttgcggtagatggggctgtacatgcagctctctgcatatttcaccaggtcctttggccgagggcgcctacttgccaaaccaagttcatatgcctttgctgcaacgctggctgcaatgtgggcagagatcttccttatgtttgagaagggaggataaatcagccccttctcaaaattttcttctgtgacctgctgggccagagcctccgatgctgccagaagcatgtcatcatgaacgcggatagctccagacatcaccacgccgaggccaaaccctgggaagatataggcattgtttgcctgtccgggaacatgtatcttgccattgtactccacaggatcaaatggactcccagtcgcaaacactgcttgtcccttgctccatgtgtaagcttgctcagctgtgcattcagattgtgatgttgggttcgatagggcaagaatgattggtctctcgttaaatgaggagattgcttcaacaacgtcttttgtgaaagtttgccccttcccggatgtgccaatcaacactgttggtttgatagcattaacagcatctaagaggttgctgagtggtttatgctcatgagcccatggtttcttgaagtgttgaagggactcctttcgtgtactgacaatcaagccctttgaatcaacaagccagattttcttgcggcactcctctataggagctttcgtctgacgtgagatctcaagagctataagttcagcgatacctgtcccagcctctccagcaccaaggaaaaggtaagtgtgatgtgccaatgaaccaccaagtaatgtttgtgctgcaataagcccagcaagaaccacagaagctgttccctgaatatcatcattgaatacaaggtgagtggtgccacctcttccaagaagatcaaaagcattatggaaggcaaagtcctcaaagtgaataagcactttctccccatagttttgtttcacagcactcataaattcttgcagaaaatcagtgtactcctggccagtggctcttctttgtctcaagccaatgtaaaattcgtcattaagcagctcctcgttatttgtaccaacatccaatgtgatcggcaagcaagcagatggacgaactcctcccagggcagtgtaaagggaaagtttaccaacaggaatccccatcccctggcatccgagcggctcgagctcgagccgtcaagctagcgtgcagcgctgcagcgctgccgtggacttcctcagcaaggaccgtcctttcttcccgccgaccatcaacagccccgagctccacgacttcttcgtgaacgtggccggcgagatgg

SEQ ID NO: 75244 - DNA, 370 bp, Zea mays
  Clone ID: MRT4577_168654C.1
agaaccctaacctgctcgacgaagaaaccactactctcacaccatgaacggaaacgcctccgggaagctataccagaccgcggggtccatcatactctccgcttctcaacgctcctacttctccgtactcgccgccgagggccgaaccgccgcactcgacaactatgacacgaagaacctacccaccgcctgctcctaccacaggcacagatcccacaccgcgtcaagatggggagccatcgctgtcgcagaccccgccgcacattacatgctccaagaccagcaagctcatgctgcagagatagaacacactttcattgacatcaaacccaacggcgtccaaagaggcctgatatcagagattgtgaac

SEQ ID NO: 75245 - DNA, 275 bp, Zea mays
  Clone ID: MRT4577_168655C.1
gcgatcgacgtgagtctaatcatcactgtctactgtatgcccgcaatgtcacggtacgatctgctcatgcgagtgaacgggtcctcatgatgtataagacatatgatcatgcttcatgtcagctgcgaacgcgactgcccgcgtcatcttgcgctcgcaagatcgggcggtagagttgttcctaaagccatcgaaccattcctgccttgccaaactcaagtgacacgcgctgaagccgcagcagcacacttagaccaacacgcgtcatgcccacg

SEQ ID NO: 75246 - DNA, 327 bp, Zea mays
  Clone ID: MRT4577_168656C.1
cgcctcgcgcgcgaccagctgctcgcctgctcctcctgcgggggcggcgccgccgtccgccgccggtaccgtcgcctcggcccgcccgccagcgccagcgccggtcccgtgctgtcacccgtcgacagggacgactactgcgcctcggacgccgaggccgcggcccctcgcgactcggccgacgactaatacaacgtcgtcagcctcaaggtcagcctgctcggcgactgccagattggcaagaccagcttcatggttaagtatgtgggagatgactgtgtttagcataacggcttgcatatgacaggcctgaatctcatggacaag

SEQ ID NO: 75247 - DNA, 238 bp, Zea mays
  Clone ID: MRT4577_168657C.1
gccgagcgcgtcgcctcatgcgtgtaccgctctctccctcatgtgccttctctgccggcgctctctcctgctcgcgttcatggccgagcacccgggcggagctccctccagctcgcccatgacagtgcgcccatctccctagcggagctcgcccagctcgcgcccagcacaatctgctcgcactcctcatctgcatggccgccaaatctgctcctccgttcaaggaccacacaacata

SEQ ID NO: 75248 - DNA, 265 bp, Zea mays
  Clone ID: MRT4577_168658C.1
cctttgccattgtttggggagggagcctgttacatttgtttgccgttgcgccctgccgtcttgttttcgcggaggactcgtcgcgcgacgatatggagcttgtctaggcgccggctcccgtgcccgaccaggacgggctgaaccaacgcggaatggccctgcacctcccgaggctgctggccggcgccgtcttcggcgccctcactggcatcttcgctctcactggagctctgaccggggcagtcaccggcgccgtggcaggcag

SEQ ID NO: 75249 - DNA, 608 bp, Zea mays
  Clone ID: MRT4577_168659C.1
ggcgggggccttcgtctttcttggctgctggtttctcgaccactgccgccgcgtcttcctccctcgttgctgctgctgcggcggtattgcgcgttggagctggccactggtgtccgcccctcttcccccggcttgtttgctgaattcaatctgcggggttgcgaaggcggcgatgcggccgcgggtgtggatggggtggtggtggtggtggcgcctgccggtcgctgctctgctcgccgcgatcctgccgtcgtccgacgccacgctctcccctgccggcatcaactacgaagtggtggcactgatggccatcaagacggagctggaggacccctacaacgtgctcgacaactgggacattaactccgtcgacccctgcagctggaggatggtcacctgctcctccgacggctacgtctccgccttagggctgcctagccagaccttgtccgggaagctatcacccggcatcggcaacctcaccaggctgcaatctgtgctgttgcagaacaatgggatttccggccctattcccggtacgataggaaggttggggatgctgaagactcttgacatgtcagataaccagctcacggggactatcccaa

SEQ ID NO: 75250 - DNA, 220 bp, Zea mays
  Clone ID: MRT4577_16865C.1
ctcgcagagttgtcgcgccatctcggtacgaaggcgcaggccccggcgacgccggcgttcaggattgggatctcagcgacgacgtcagaggcttcccatcccgacccccgccacgcgcctcgcgccctcgactccggcatccgcccctccgcacactgcccggctacccctgagcccgaacctgctatacaaatcatacacatgcccgcccccgacgcca

SEQ ID NO: 75251 - DNA, 2116 bp, Zea mays
  Clone ID: MRT4577_168660C.1
agccgatccgtagacgcagcagcacacgcggttagccgccctcaagctcgctcgacgctcgttcccctgccccgcgtccgccccgcgtcccgaaaattccccctctttttcctacttcccgtcccacggctcctacgccccgcgggcccaaaaccctagccggctaatccaatcctgcttcccgcccatggcctccgcggacgctgccaagcccgcgtccccgcccgccgcggatccgcccgtcgacgaccccatggacgccgaccccgcgccccccgcgggggaggaggagcaggccacgccgcagaagcagcagccggagaagaagcggggcggccggaggaagaagggcgaggcggcggagaagacgccgccgtcgtccaagaagtcggcgggccccacggtggagcgcccgtccagggagaggaagacggtcgagaggtacgcggagctcgcgccgcgcgccacacccgccaaaaagtcccccgctattctccagggttctggaacgaagctcaaggacatacccaatgtttcatttaaactatcaaagagaaaggtggatgagaatctccagagcctccatactgtattgtatgggagaaaatcaaataaccattttctgaagagaaacatatctcaattttctgggtttgtttggacagacaatcaagaaaaacagaggaacagaataaaggaaaagcttgagaaatttaacaaggagaagttgctagatttttgtgaaatactggacgttattgtaaaagtaactatgaagaaggaagaagtttctgccaagctcttggaatttttggagtctccttgtgttaccagggatgttattctcactgataaaaagaaggggaagaaacgcggaaggaaatctaaagtaagtcgtgaggtaacttctgaaggtgcttctgcagagaagaaaaggaaaagagttcagaaacaagcagctgaagatggtaaagagaatgatgatggggatgatgctgatcctgctggttctgaggatgcatcaacaggagaggaagctgatggggactctgaggcaaatgatcatgctttgagtgatgatgaacatgatgagcctgcagcaaagaaaaagtcttcagatgttaaacaaaagaaagaaacaggttctgatgcaaaggaaaaggatgcaccaggaaaaaaaggttctacgaaacgtgcatcaaagccttctcaaaacagtaaaaatgagcctgaggtagagataaaaaaggttggcaagagagaaaagagttcaaaagaaactgacgtgtcaccagattcaaataagtcaaacaagaagatttctaaatccaaaaagggtgatggaaaagaaacccaaaacaataaagctgccaggtcatccaataagagtaaaggtaaagtcaaaggtgggtcagtggctgggactgccccaaccactgaacagcttcatgctgttgttagtggcattttgaaggaagttgacttcaacacagcaactttggctgatattctcaggcaattagggacccattttgaaatggacctcatggacagaaaagcagaagtgaagcgcattatagaagatgtaattaatagtatgtctgatgatgaaggtgaggaaggctcagaagatgaagctgaagacgatggtaaggcggataatttaaagagtgaacccgatggaggtgaagagaagtgattctgtggactggatgtggattgaacatcgaagggtcatttttcatggcagtctcctgtttggaggtttggctctgtacaattcgggcaccgcaagaacgagccggtgacctgggtactgcttacatgattgttaaccatttcaacagccatacgcatctagctgagcttgacttggtagtgaatgtagtctagtcgcttgtcatgtaatagctttgcgattgatagtttgctagcttaggtagctagcctgactgtaatatgcagaataattcttgtcttgtttccgtccattttatccatgtaaaactatgagttctgaatctttctgaacctccgtgcttttcttgttaacccttgtcttgtttccgtccattttatccatgtaaaactatgagttctgaatctttctgaagct

SEQ ID NO: 75252 - DNA, 458 bp, Zea mays
  Clone ID: MRT4577_168661C.1
ctaaaaaaaaaaaaaaaaaaaaaaaaaaaaaaaaaaaaaaaaaaaaaaaaaaaaaacattaaaaaactcaaaaaaaaaaaaaaaataaaaaaaatatttttgccccttggccggccccccccttggggcgatttttgtggttttccttccccttgccgtttggggcaatcttgcttttattgggcccccccttggccttttaatgggggcgttttccattaaccctgcccttccttttttaaggactgttttgggaaacccttgcttttccccatctgagtggcttggggggactcccctttttctccccttggtttgactttgaaggggcccccccctttcgcccttcccatcattgccctaccttcattggcatatggcccccccctttcgcggcgctttttgtttgttggggggggcgttttcctccaggttttttgttccgtttgccagggcct

SEQ ID NO: 75253 - DNA, 1771 bp, Zea mays
  Clone ID: MRT4577_168662C.1
ggcagacaagaagacgccgccgtccaagaagtcggcgggccccgcgctcgagcgcccgtccagggagaggaagacggtcgagaggtactcggagctcgcgccgcgcgccacgcccgccaagaagtcccccgctattctccagggctccggaacgaagctcaaggacatacccaatgtttcattcaaactatcaaagagaaaggctgatgagagtctacagagccttcatactgtattgtatgggagaaaatcaaataaccattttttgaagagaaacatatctcaattttccgggtttgtttggacagacaatcaagaaaagcacaggaccaaaataaaggaaaagcttgagaaatttaacaaggagaagttgctagatttttgtgaaattctggacgttattgtaaaagtaactacaaagaaggaagaagtttctgccaagctcttggaatttttagagtctccttgtgttaccagggatgttattctcactgataaaaagaaggggaagaaacgcggaaggaaatctaaagtaagtcgtgaggtaacttctgaaggtgcttctgcagagaagaaaaggaaaagagttcagaaacaagcagctgaagatggtaaagagaatgatgatggggatgatgctgatcttgctggttctgaggatgcatcaacaggagacgaagctgatgtgggctctgactctgaggcaaatgatcatgctgtgagtgatgctgaacctgatgagcctccagcaaagaaaaagtctacagatgtaaaacaggttaaagaaactggtactgatgcaaaggaaaaggatgcaccaggaaaaaagggttctatgaaacctgcaaaacgtgcatcaaagccttctcaaaacagtaaaaatgagcctgaggtagagataaaaaaggttggcaagagagcaaagagctcaaaagaaactgatgcgccaccagattcaaataagccaaacaagaaggtttctaaatccaagaaggataatggaaaagaagcccaaaacaacaaagctgccaggaataagaataaaggaaaaggcaagggtggcccaggtgctgggactgccccaaccaatgaacagcttcatgctgttgttagcagcattctgaaggaagttgacttcaacacagcaactttggctgatattctcagacaattagggacccatttcgaaatggacctcatggacagaaaagcagaagtgaaacgcatcatagaagatgtaataaatagcatgtctgatgatgaaggtgaagaaggctcggaagatgaagcagaagacaacggcaaggtggagaagtcaaagagtgatcccgatggaggagaagagaagtgattctgtggaccggatgtgccagtggtggtttggattgaacctggaaggactattttccggccaattctcccgtgtttggaggtttttggctctgtacaattgggggcaccgcgagaacgagccggtgacctgggtactggttacaaagattgttaaccatttcacagccatacacacctagttgtgcttgacttggtagtggatgtagtctctagtgtatggtcatgtacgatagtttggttgcgtaggtagctagcgtgactgtaatatgcagaacaattctgggcttgtttcatctatttatccatgtaaacctctgtatccgagttctgaatcgttcctgctccttgcatttgttgtttacctagccatcgcaatgttagcgcagtgatttttgctatgtgagctttttgttgggtc

SEQ ID NO: 75254 - DNA, 331 bp, Zea mays
  Clone ID: MRT4577_168663C.1
ggcttaaagaagggagggggccaggaaaaaaccaaagattaaacaacaccccaaggggggtcgacagggggaaccacaaaaacaaccccaggggcacccccccgcaaaaaggggtttaaaacagccttccccccccccccccccgaccaaagcggcgacccaagcagggaatttccccccggggtccccggaagacgggcggccccatgggggcccccacggaaagcccccccccaagggcccctggcccaaggggggcccgaaaaaacccccggcaaaaaagccccccgacggtgacgggggagaaaaagaacatctgggaagacagggg

SEQ ID NO: 75255 - DNA, 1643 bp, Zea mays
  Clone ID: MRT4577_168664C.1
ggccggccggggtaaagtgcaatcagcttgaaacgaaagacaaaggagttgagattcacgtctttcgccacgctgtcgcggccattcccggcctccgttgtcggtgcccgaaccctccactccatccctccacggctgaggtaccattcccgtcgcagcgaattgcgccaatgagggtggctcttgtcgaggcctgatccggaggcctaaccaccgggactttttgtcggcgccgtcgggttcgagcggcggcggcgatgttttggaaggatagcggcagccggagcagcagtggcagcggtcgggatcagaacggcgtcggccccttcggccaagtgcgcgtcctcatcgtcggtgattcaggtgttgggaaatcttcattggtgcatctcattttgaaaagttctgccattgctcgaccatctcaaacagtaggatgcactgtgggcattaaacatgttacttacggaagtgcgggcggttcatctaataacatcagtgacgctgaaaggaacttctttgttgagctttgggatgtctcaggacacgaacggtacaaggcatgccggtcgattttctatacacaaataaatggtgtcatatttgtttacgatctctcccagaggaagaccaagacgaatctgaataaatgggcagttgaagttgctgaaactggcaccttttcagctccattgggatctggtggaccaggaggacttccagtgccctatctggtaattgctaataaagtggatattgttccaagggatggggcaagagcaagcagggggaatcttgttgatcttgctcgccaatgggctgagaagcagggccttcttcggtgcagcgaagaacttccactcacagagagctttcctggcaactccggtcttgtgtcggctgctaaacaagcaagatatgacaaagaagccgtgatcaagtttttccgcttgcttattagaagaagatacttctcaaacgaacctcctgccccaagtccctggtcccttgctccaagagaagataccatccttcctatggagactcttggagatggcgcagatagcttccaaaggaaaagccttagcggcgagggttttttgtacaacggactggtcccactcccagcgcagaggaacctgacgccgccaccgactctgaatccgcagcagcccgtgtcgcccttggataactacagatatcatcgattctcctcctcgtcgcttccggacgtgagcagcagcagaacaagccgagaagatattattaatctatgatgtggtaggcatctgagagaggtcatacgccacaacattacctgcaaaacgtgggaagcatatggtgcctgggaattgtgttcctgtggcatcttgaactgcttaaagcctttgcttgcagcatttggaatgctgccagggtgagctttttgttctgttttaaatgtcatgtcgttgtcagatcactaggaagtggttctttctccttttcgtttcctttccatcctccacctgcattcatttagaatacgtgttgactgggatggaggcaatacatgatacgccagtataccttcaaaggcaaatgtaagtttttttatgtactgtttcttttacttgatctggtctaacttggcaagcttgatg

SEQ ID NO: 75256 - DNA, 355 bp, Zea mays
  Clone ID: MRT4577_168665C.1
ttttggggctggttaatttttttttgggtttttatataaacacgcgggctgataaaacgccgccgggcagtcaaaaagaccacagcaaaaggaagcaggccaaggggaacaaaaaaggggaaacaaaggaccaggccacaacccgggcccaaaaacccagggccaaaaaggacggaaacaactggggggtgaaaacccaggggaaggaaggacaccccgggcaaacaaatggggccccccgggcaccaccccaaagcaagggcagccgtgggggacaaaccggccaccattgtgcccacaaccggccgtgggccccacaaaaaaaaaacaacccgaaaaaaactttggggggggg

SEQ ID NO: 75257 - DNA, 849 bp, Zea mays
  unsure (1)..(849): unsure at all n locations
  Clone ID: MRT4577_168666C.1
cctcgagccggcgggagaggcataaccatgatccttgcgctgttcgccgcatcggtcctgtcgacggggcctccgccagcgatggcggcggcgatgcagccgagcgcgacgtgcctgcggcggtgcggcgacatcgacatcccgtacccgttcggcgtcggccccgggtgccacctcgagacgggggactggacgttcatcctctcctgcaaccgcagcgaggacggacggctccggctatacaactaccagatcgaggtgctgaacatgtcggtgcgcctggggcagctgcgcatctacaacagcatcaacccatggtgctacaacgccacgacgcgggcgatgaacgagcagagcaactggtggtacaacatgtccatcaccaacttccgcatcaacgacgcgcagaacaggttcaccgtcatgggctgcaactcgctcgcctacatccggtggcccaacgacagcgccgccgcgtacatgaccgggtgcatggccatgtgccccggcgtggggcggctgaataacggcgcctgcaacggcttcgggtgctgccagaccgccatccccagcgacctgaacgcgtactcggtctccttcgaggagaagttcaacacctcccggatcgccaacttcagcccgtgcagctacgccgtcctcatggaggccgccgccttcaacttccgcaccacgtacgtgacgaccgacgcgttcatggcagacaacgacggncaggtgccgctcgtgctcgactgggncatcgggaacatgacgtgcgaggaggccaagcggagcgcgtctgcgtatgcgtgcgccagtagcaacagcgagtgcatagactccaagtac

SEQ ID NO: 75258 - DNA, 205 bp, Zea mays
  Clone ID: MRT4577_168667C.1
cacgcctgcggtgtaccgggccgctattacacggccgacccacgcgttcgcaacaaccctcagaggcggtgccctactttagatttcttgtgaggcctcgttcattaataaagaaacttatctgatgaactgtggcttcctcagaaataataaaagtacgtctcctccattcaatgggttgatgcagaacgcgtgggcgcgccgc

SEQ ID NO: 75259 - DNA, 217 bp, Zea mays
  Clone ID: MRT4577_168668C.1
gcttgttaagaatggcaagaagattgctgccttcgtgccacatgatcgtttgtctaactacattgaggaaaatgatgaggtcttgattgctggatttggtcgtaaggtggacgctgtggtagatattcctggtgtccggttcaaggtcgtcaaggtttccgaataatcactgcttgccctattcaaggagaagaagagaagccaaggtcttagattt

SEQ ID NO: 75260 - DNA, 499 bp, Zea mays
  Clone ID: MRT4577_168669C.1
ttttttttggatcgaatgtcacatctttactatttaacaggagttctatacaaaataaataagtaattacattataaggagacaacggtccagcaacccaaagttgactgggagacgacggcctagaccactcacgaactcatcacagcatcctccacgcgcctcatcctgtggtacctgctcttgacctcccgtacgacaaagcgacgccctgctccacatccctggtgatgatgatatcaacaacctcatcgacggacacgcgtaatcaaaatagctattttcttgaagtcgatggaggcagaggctgatcgagttgggagcggtggcggcgtagtgctggggcaatggtgactgctagataggatggtcgacggcgattgcaggctctgggcgtggtgtctgtgtctctctcctacatatacgctctctcgcggctacctcatcctttctctgaatccgctcgacaatggtgcactctgttcaatctcccggccgg

SEQ ID NO: 75261 - DNA, 1396 bp, Zea mays
  Clone ID: MRT4577_16866C.1
cccacgcgtccgcccacgcgtccggaccagcccacggtcagtagccatcggccactaccagcctcgggcgctggctgtggcctgtgggctgggcggggcccctttaaatgccggccatacgcgcggcctaaagcctccagagccacgctgcttcccggccgaagcctccgtccgcgcccacggtttccattccatcccccaggcttgcgccgactcgccacttgcaccgccggccggtttcgccgaacgcctcgcgcccacccgcgcgcggagacctgcatataagccggccgcgtgtcgtccggcgctcccgggacaggcgatccgttcgtcatccgctgcaaaccaccaggcaccagctccgcgcgcagaggccggaggactacgaccgacgagggcgacgaacaccaaggctccgaagtccgaggaggcaggaagcgggagacgtcgggaatgggcgctgctcgtgactccacggcggcgggccagaagcgcggcaccggcacgcggtgcgagctctgcgggggcgcggcggccgtgcactgcgccgcggactcggcgttcctctgcctgcgctgcgacgccaaggtgcacggcgccaacttcctggcgtccaggcacgtgaggcggcgcctggtgccgcgccgggccgccgaccccgaggcgtcgtcggccgcgtccagcggctcctcctgcgtgtccacggccgactccgcggagtcggccgccacggcaccggctccgtgcccttcgaggacggcggggaggagggctccggctcgggcgcggcggccgcgcgcggaggcggtcctggaggggtgggccaagcggatggggttcgcggcggggccggcgcgccggcgcgccgcggcggcggccgccgcgctccgggcgctcggccggggcgtggccgctgcccgcgtgccgctccgcgtcgggatggccggcgcgctctggtcggaggtcgccgccgggtgccgaggcaatggaggggaggaggcctcgctgctccagcggctggaggccgccgcgcacgtgccggcgcggctggtgctgaccgccgcgtcgtggatggcgcgccggccggacgcccggcaggaggaccacgaggagggatgggccgagtgctcctgagttcctgatccagacgggcccacgtccgttgctgccgtgccgccgctgcacctgcactgtgtaccgagccggacctccgagatagactcgggagaaaaatgtaacaacgtgtggggctgtgggcgacgtttgtttgtttgttcattttcttcttaatcaaataaatatatcgtaggcgtacgagcgagggtccaagggattgatcgtgtggctggttggctgcctctcgtcaagccgatttgatttgacttgattacacaac

SEQ ID NO: 75262 - DNA, 363 bp, Zea mays
  Clone ID: MRT4577_168670C.1
acccggggagcccggcgggcgccggcgcgccccgccgcgcgcgcgcgcgtgcgcggcgccgggtgccgggcggcggaaggacggaagcgaaggtaacgaaatccatcccttcattcagctaattatagagcagcacctaaaattccaataaagtaaaaaaagaaatttaattttagagataagtattaaaaaaaaattgccaaaaatatctgaattatcaataaaattcagatggaaaggacaccataattcagtgataaataagacaacttttgcttggtaaagaaattgattttttaaaaattctgggttgagaggaaaaactccattgttttataaaccttaaccttaagaaaatattgc

SEQ ID NO: 75263 - DNA, 297 bp, Zea mays
  Clone ID: MRT4577_168671C.1
gcgcggtacgggggtaccggaagccctgtgcgctcacgaataggtattgatgaactacgtcagcgccaagaagatttctcaaaaagcatactgataacgatgctatgaaacaaaaccacttttgctggaaaagactataccacctacaaaacatatcattccgactcatgtatatgctttaccaacttttgacgttatagaatggtcggcaaagagtattatgtaagaaaggggctgaaggattctcctgtgggtttgatcatgatcatataaaatgagttgtataccagagacatt

SEQ ID NO: 75264 - DNA, 1328 bp, Zea mays
  Clone ID: MRT4577_168672C.1
cgattgggtacctcgaggccggccggggtgttctctgcgcggtcggcccggcgaacttcctctggttcctgatgatggatgtatcgcaagttgccgcagccgtggcgctgatggcgttcgcggtcgcgtttccggcgtcggccttcccgtccggcttcccgcctgggacaccatcagcgttcccgaatccgtgggcggcattccagaacctgtctggctgtcacatgggggaggagcggcagggcctggccgggctcaaggactacctcagccacttcggctacctcccgccggcgccgccgtcgtcccccttcagcgacgcgttcgaccagaacctggaggcggccatcgcgacgtaccagcgcaacttcggtctcaacgccaccggcgctctggacccgtccaccgtctcgcagatggtcgcgcctcgctgcggcgtggccgacgtcatcaacggcacgtccaccatggcgaggagctcctccgccgacgcccacgcccacggcaggcacctgtacgcctacttccccggcgggccgacgtggccgccgttccggcgggacctcaagtacgcgatcaccgcgacctcggccgcgtccatcgaccggtccacgctgagcgacgtcttcgcgcgcgccttctcccggtgggccgccgccaccaacctgcggttcgcggagaccgcgtcggagtccgacgccgacatcaccatcggcttctactcgggctcgcacggcgacggcgagccgttcgacgggcccctgggcaccctcgcgcacgccttctcgcccacggacggccggttccacctggacgccgcggaggcgtgggtggccggcagcgacgtgtcacgctcgtcggcgaccggggcggtggacctagagtccgtggcggtgcacgagatcggccacctcctggggctcggccactcctcggtgccggacgccatcatgtacccgacgatccggacggggacgaggaaggtggagctggaggccgacgacgtccaggggatacagagcctgtacgggagcaaccccaacttcaagggcgcgaccccgacttcgccggcgacgagcagccgcgagatggacagtagcgccggcgcgggatgccgaccagatagagtcttcgtcggagtagttgcggcagttggcctgctcctcctagtcctctagtgccgtagacctctagtgtttgccattttttttcggccacgtccttccttgtatcgatttgttgctcgattagctgattcttggatagattcttgtgtacataatatggttatcactattacagaataatataatatctgataccaaaaa

SEQ ID NO: 75265 - DNA, 1115 bp, Zea mays
  unsure (1)..(1115): unsure at all n locations
  Clone ID: MRT4577_168673C.1
ggccgcgcaggtgcgatcgatatgcaaacccctgnaagcctcttgggattcattcagtgagcttgcatcctggcgcatccattgaacaccagatctctgggtcattgatggactgaaatgtttcgtagaccacaatgttagtgacaaaatattttctattagagacgccatatcaaacaatcttcagattactatcttcaccgatccatctgataaaaatattgcaacaatggctaaaaatctactccgtggaagaattacaaagctttctatcaatgattctgtttcttcacgaagtgcatttatagcccagcatgtacacttctgtccatcggaggagctgaaaacaacaaaggttaaggaaattcttgagcagatattgcaagatcatcctaaaaagacatcaaaggtgcttctagtagctgcaagcgataaaaaagcacggctcatgtcactgtcgctgaagctggaaaattgcacagtgattgatgactcatgtggcaactcctttacaatatgcagcagtgtggggctgatgaatgtcattgtgaaagaccgggagaacatgtcagtgacagatgtagaggcattcgaaaccgtgctggtggtggatctgcctccttcagtcgacgaatacattgagatcctcactggggctgctcttcatgtgattgngagcgaagtgcatagcatattctgtaacactgatgcttctgttgcaaaacctctggctcagcttcttgcagactgcggtcaggtggtgcctgaattcctgaaaagcctgaagtcttcatagcagagactttgtgtacgcaatcagagtagtcagatcacaccgtggcgattcagatcatatcggagcgattttccttgtggaatgtgaatgccttgaggcccttttcctgggagaagttgaagttcatagggcggctgcctttattgtttattgtcaattgtgtcaaaggaactgagtcagtcacccctttgctccctccccagcttcctttgtccaaaggcaagcagaaacagggacctccactgagagatcttggcaccttcaaagagcatcaaccaaaatgtcaaagacacagcttcttttaatcaagttatttttc

SEQ ID NO: 75266 - DNA, 849 bp, Zea mays
  Clone ID: MRT4577_168674C.1
ttcggggctccgctgcggcctgtaggtgacggtgacggcgtcaggctcagctcgctcgcccccccacgaaaaccctaatggcgtcccgcctccttcacctccgccgcctcattactcctccctccaccgtccccgccgcttccttctccaccgccgtcagcgcgaccccgcgcgtctccgcgctcgtcgacgagatctgcgggctcaccctcctcgaggcctcgtccctggccgatgccctgcgcggccgcctcggcgtcgaccagttgccgccactagctatcctcacgggcggcgccgcaccgctcgtcggcggcggagtaggtcccggcgcggccggcgaggaggcgaaggccaaggaggagaagatggcgttcgacgtgaagctggaggggttcgacgccgcggcgaagctcaagatcatcaaggagctgagggcgttcacgaatctgggtctgaaggaggccaaggatctcgtggagaaggcgcccgccgtgctgaaggctggagttcccaaggaggaggcggagagtatcgccgagaagatgcgggcgctcggcgccaagattgttctcgagtgaacgacgagagctgtgtatgccctcgtttcttgatttgtttcgtgtttcttgtatgaaaaaagagagaattttggaacaaggagataataattagtaaatttgactagagatcttttcactgcgagtgcagacaccaattgggcttcggtgaatacgaacttagacttagtgatcaactttcgagttctatatcaatgttttttatgatatgtatgacatatagcgaactctagcatcagagtaccatcttctgctgactttgtttacc

SEQ ID NO: 75267 - DNA, 2096 bp, Zea mays
  Clone ID: MRT4577_168675C.1
gggaagagaggattttggtacctcgtttctggccgggaccgccaactgcgcgtgctcctgccgacctcccacccctccactccccggcggttggcggctgtctcgccgaagcgacccagccggcgcagccgatatggcgaagggcgacgacgcgctggcgcggaagcgcaaccgtgtgcgccgcaagcgcctccgtagcagcgagaacgctgtttccgcgcgtgtcgcggcgatcatcgcctccaagcaccgccgcaagtcggggaagcgccgcgcctgcgagggcatgtgcttctcgctccccacgcccgacgacccgttcaacgagcgccatggcaggaagcacaagctcgatgacgagccggccgacgacacagccgccgacgccgctgaggacagcggcaaccccaagaagaagggcgcgaacaccaaaaagcagcagccggtggcaaagtatggcgccgaggcgaagtcgaaggcggttcgcgagagggagacgggtgcggaggtggtccgcggggacttcgaccggccgtccaagttcctggtggtctgtctcaacgctatccgggatgcggtggcgcccgaggaaggcggtggcagcatccacggcgccggcgactggggcgtggagctctggcggtgctgctccgcccaggcgccgtccgacgtgctcgacgctagcggcgcgtgcgccacggtggcgcagaccgcgtggctcgtctccaccgcctgcgacatcgtcgctaggaaagagaggcatgggatggtcgtgtcttgccccttcctgctgtacctcgtctcgtcgcaggataaggccgcgcaggtgcgatcgatatgcaaacccctgaagcctcttgggattcattcagtgagcttgcatcctggcgcatccattgaacaccagatctctggactgaaaacttgtgagccggagtttcttattgctacccccgagaggcttcttgaacttgtttcgttaaaggcgattgacatatcaggtgtatcaatgttggtcattgatggactgaaatgtttcgtagaccacaatgttagtgacaaaatattttctattagagacgccatatcaaacaatcttcagattactatcttcaccgatccatctgataaaaatattgcaacaatggctaaaaatctactccgtggaagaattacaaagctttctatcaatgattctgtttcttcacgaagtgcatttatagcccagcatgtacacttctgtccatcggaggagctgaaaacaacaaaggttaaggaaattcttgagcagatattgcaagatcatcctaaaaagacatcaaaggtgcttctagtagctgcaagcgataaaaaagcacggctcatgtcactgtcgctgaagctggaaaattgcacagtgattgatgactcatgtggcaactcctttacaatatgcagcagtgtggggctgatgaatgtcattgtgaaagaccgggagaacatgtcagtgacagatgtagaggcattcgaaaccgtgctggtggtggatctgcctccttcagtcgacgaatacattgagatcctcactggggctgctcttcatgtgattggaggcgaagtgcatagcatattctgtaacactgatgcttctgttgcaaaacctctggctcagcttcttgcagactgcggtcaggtggtgcctgaattcctcaaaagcctgaagtcttcatagcagagacttgtgtacgcaatcagagtagtcagatcacaccgtggcgattcagatcatatcggagcagtgtgtgttctacatgttattctcatttatcagcacagcattggtattcaggcctcgtccttggtatgtactattatgtcgtgcattgtgaaatgtgaatgccttgaggcccttttcctgggagttgtttattgtcaattgtgtcaaaggaactgagtcagtcatccctttgctccctccccagcttcctttgtccaaaggcaagcagaaacagggacctccactgagagatcttggcaccttcaaagtgcatcaaccaaaatgtcaaagacacagcttcttttaatcaagttatttttcacaaaaaaaaagaatagaa

SEQ ID NO: 75268 - DNA, 596 bp, Zea mays
  Clone ID: MRT4577_168676C.1
atcttctcgactcaaggcggatcccacgtgcacgcgtacgtggtcttgtgcctgagctgtgaggactcatccgacgcatctacaggtgcgtggggacgaacggaaaggaggaaggaaggccctctatcgctgacctcttcttagacgagacctcctcgccgacggcctactttcgtatgccggcgggggcggattccgcgcgttaccggcaggagaggacgagcgagccgtcgacatcacagacgactacgacgacgaccacttcgggggcctctgcggtgtcgcgaacacggtcttcgatgaggtgcccgactgacagacgaagccccagtctcactgagaccgtgactcaatgactgaacgaagatagctgacctcgacgcaaacaaaataaaagtactctgaggtgtgtctggtgatgtcctcacctagtgatatgctagcttgtgtgtatacgtactatgcaagatgatgctgagcaatggagagaattagccacgagacatctgcgagtaagtgtacataaagtatacatcgctgtgtaatgaggtgatctgatgtgcactggaatgcacgtatgttggcgagaagtactc

SEQ ID NO: 75269 - DNA, 685 bp, Zea mays
  Clone ID: MRT4577_168677C.1
ggtcgcttgagctgagctctggtgatggggaggccaagcaacagccacgggggcgggggcgacgaggagcggctgcccctccgcggcgtgctggagacgtccccgtcccatcacgccgcggtgcagcccaaggacaaggaggcgaggcgcgggggcagcaggctctggcgcgcgtccgtgcgcgcggggctgctgctctgcctgctgaccgtcccggccgtcctgctgctgctgtggtggcaggccgactcctcgccgcagtgggtcttcgacttcgagccacccgaggaagacgacgaccaagatatacaagacgacatgtccgacgatctgtctccgtcgccacaaatagagtacgatcggcttctgggcggccttctcgtcgagggtttcgatgacaaatcatgcagaagcaggtaccgtttcgcacgctaccacaattcaccgagcataccttctccgtacctcatagagaggctaaggaaacaagaagctctgcagaagaagtgcggcccaggcaccagagcatacagggaagcttcaaagcagctgaaatccggtcagagcatgaggatcaatgccacagacgactgcaactacctgttccttatcatccacgccggcttagggaacccgatgctcgagatcacttcggcgttcctctacgcgctgctcacgaaccgga

SEQ ID NO: 75270 - DNA, 861 bp, Zea mays
  unsure (1)..(861): unsure at all n locations
  Clone ID: MRT4577_168678C.1
ccggccgggacccacccagtgcgctcgcgagaacgcgtctggccatcgtgccgggcccccgcatgggcgagcgttgtgcctgccctagcgccgccgggcccaccggccaccctaagcaactgtgcatcttctttaggcactcttcgtgatgtgcgctcccattccgccaagaaccgcccaactgctcgtgctcctgtcgacctcccacccctccactccccgacggttggcggctatctcgccgaagcgacctagccagcacagccgagatggcgaagggcgacgggcgtggatgagggccacggggacttcgaccggctgtccaagttcctggtggtctgcctcaacgctatccgggatgcggtggcgcccgagaaaggcggcggcagcatccatggcgccggtgaccggggcatggagctctggaggtgttgctccacccaggcaccgtccgacgtgctcgacgctagcggcgcgtgcgccacggtgacgcagaccgcgtggctcgtctccactgcctgcgacatcgtcgctaggaaagagaggcatgggatggtcgtgtcttgccccttcctgctgtacctcgtctcgtcacaggataaggccgcgcaagtgcgatcgatatgcaaacccctgaagcctcttgggattcattcagtgagcttgcatcctggcgcatccattgaacactagatctctggactgaaaacttgtgagccggagtttcttattgctacccccgagaggcttcttattcttggttcgnttaaggcgattgacatatcaggtgtatcaatgctggtcatggatggactgaaatgttaataacccacatattatgacaaatatatcctattaaga

SEQ ID NO: 75271 - DNA, 157 bp, Zea mays
  Clone ID: MRT4577_168679C.1
aacaaggccccttttgggcgtggtttcaaatccctgtcagccaaaccccggtggccccggcgatggggggaatttcggactcccacacgcaattgttaaagaaacacaaatcttacttcgggggcacctttaagttttttgaaagaggcacactgaa

SEQ ID NO: 75272 - DNA, 452 bp, Zea mays
  Clone ID: MRT4577_16867C.1
ttttggacattggtggaaccgaccgcacaagcggggttgatgagaagcgtgagctatacatagcgggtgctcaagatggaagcagcaagacgatgaatgaagagatcgtatcttcaggtgcctatctgaattcaggaagagagcgtttccagcttaaggacctggtcgccgaggcaagaatggagaaccgagagaagatacccacaactaaggaacgtatgctggggcaccagagtcaggtgacgaaggacaacaacttgctagagaaatctagggcacgcaaatctggcacctgaggaccaccatcggagctccgcagccaaactgccacataaggactgtgagaagatctcaagagaatagaggcagacaggtatgccactaatatgctgccactgcggcgctgatagtatatgatgcattagttgacaactatacatacatgagctgct

SEQ ID NO: 75273 - DNA, 375 bp, Zea mays
  Clone ID: MRT4577_168680C.1
atggcgagtcccgacgactcttggttggactgccagacgaagtgcaccccgggctcatcagcgagtgcccagaacaacccgagagtcgcagacgttggcgacaaccatgaggttcccctatttgatgatggacagcgtggtgcagcccctctggacagcgtccaagcggtggctacaccggagcttgtcatccacagcggcgcatgcggccatgaaggactgcttccagaggtcgaactggcagtcaccaagcttcttctcgtcgtcgaggagcgacgccaacgcgagcgcctcctgctagtggtgtttgttcgggatttccaagtaagaaacatagaatcatccttggtgctggtttatgaaaatgactcataa

SEQ ID NO: 75274 - DNA, 414 bp, Zea mays
  Clone ID: MRT4577_168681C.1
tcctgtatgagtgtaatattacctatccattagcctgaagtggaggtgattggtaattcgtggtggagacgctaggtaggggtaagggtggtaaggggtctgggaagggtggtgtgaagtgctattggaaggcgtcgtgtgataatacttaggggactatgaagttggtgacttggaggtcggtgaggaggggcggtgcgaagtgtactcttgggtcgactcatgaggagatttgtggtgcgtctaagactccctctgagaacgctacttgtgatgtcgcgattcatatggagtatgtttgctgtaaaattgctattgtcacggatgctgcgcatgtttctaaatgttagggttgtatctctcacggtcctggtggtcaggccaggcgcgggcaaccgttcgcttaggcgctct

SEQ ID NO: 75275 - DNA, 854 bp, Zea mays
  Clone ID: MRT4577_168682C.1
gccggccggtccgggaaccacaatgccatcacgaatgtggaacctcaacaaagccctggtcacctcactactctgcatctcggcgttgtcgtcgtcgccatggccatgcacggcagccggtcagctgggcggcaagcccctggtcaccgccgtcaccaaggacgcgtccacctccctctacacggcgccgctcaaggacggccacccgctcgtcctcgacctcactagcccggtcatctcgctggccacgtgcgccagctcctccaagaacaacaacggcacgctcaccgccacgctatccgccaacgccaccgacggccagaacccgctgttcccggtctccttctcggcggtggccacgtgcgcgccgtcgtcgaggctgcccgccggcgccgtcggcgtcgcggggctcgcgccctcctccagcagccagcagtcgccgttcgaccggtgctacgactccaccaagctcccgcagagtctgctcggctacgccgtgccgcagatcgacgtgatgctggagggcgggcagaacttcacggtgctcggcggcaactccatggtgcaggtgaacgccaacacggcttgcctcggcttcgtccaggcgccggggcaagcgccggcggccgtcatcggtgggttccagctggagaaccacctgctgctgctcgacgtggacaagaagcagctcggattcaccactttcctcaacgcaatcgggctttcctgcagcagcttcaatttcactcttgctagctagtgtgctgctgcatgtatacttaactgtaaacacttgtactgccgtgtattacaataaataataagtgggaataattgattggaggttcagctcc

SEQ ID NO: 75276 - DNA, 1354 bp, Zea mays
  Clone ID: MRT4577_168683C.1
tgggtacctcccggccggccggagccggcagcacgagggcgtgcccgaaggggaaaaaaaaaaaaaaaaaaaaagaaaacacccaatgccatcacgaatgtggaacctcaacaagccctggtcacctcactactctgcatctcggcgttgtcgtcgtcgccatggccatgcacggcagccggtcagctgggcggcaagcccctggtcaccgccgtcaccaaggacgcgtccacctccctctacacggcgccgctcaaggacggccacccgctcgtcctcgacctcagtagcccggtcatctcgctggccacgtgcgccagctcctccaagaacaacaacggcacgctcaccgccacgctatccgccaacgccaccgacggccagaacccgctgttcccggtctccttctcggcggtggccacgtgcgcgccgtcgtcgaggctgcccgccggcgccggcgccgtcggcgtcgcggggctcgcgccctcctccagcagccagcagtcgctcccggcgcaggtggcgcgcacgcagaaggtcgccgacaaggtcgcgctgtgcctgcccagcgacggcaggtccacgtcgggcgacagcgtcggcgtggccatcttcggcggcggcccgctgttcttcgtcccgccggaccgcggcgacttcaccacgatgctggccggcacggcgccgctccacgccggagccggagccggtgcccccgggtactacgtctcctccaccggcatcgccgtggagcaggcccgcgtgggcggccccgccggggcgctcgtcgtggcgctgagctccacggtcccgtacacggcgctccggcccgacgtgtacgctccgttcgtcaaggcgttcgacgcggcggcggccgggcccaacttcccctggatgtccagggtcgccgcggtggcgccgttcgaccggtgctacgactccaccaagctcccgcagagtctgctcggctacgccgtgccgcagatcgacgtgatgctggagggcgggcagaacttcacggtgctcggcggcaactccatggtgcaggtgaacgccaacacggcctgcctcggcttcgtccaggcgccggggcaagcgccggcggccgtcatcggtgggttccagctggagaaccacctgctgctgctcgacgtggacaagaagcagctcggattcaccactttcctcaacgcaatcgggctttcctgcagcagcttcaatttcactcttgctagctagtgtgctgcatcggcatgtatacttaactgtaacaacttgtactgccgtgtattacaaataaataaataaataaataataaagtgggaagaaaaaaaaacaaaaaaaaggccccta

SEQ ID NO: 75277 - DNA, 398 bp, Zea mays
  Clone ID: MRT4577_168684C.1
cggacgcgtggggaggggataggggaccccataccaattcacatctcatagtctgatgacacaacatcgctccacgtgacaccgtggcagtacacgccgtcgtggtcagtgctctgtgaatgcgctgtgtgggagcctgctactattacggcaatgtggtagcgatacgaggacgctgccgcgatcacggtagcctgcaagatatacggggactcccctgtgtgcgtgtgcacagctcggggactgggcatgcatcaaggagatgccggtggtgcacgacggcccgccggcgggcggtttcacgcccgggcgcttcgcccggcggaaccacacttcggggcccagcgccaccgacatcttactcacgacctgtggtgctttgcgcatatgggatgttc

SEQ ID NO: 75278 - DNA, 340 bp, Zea mays
  Clone ID: MRT4577_168685C.1
ccccgcgtccgcccagcgtccgcccacgcgtccgggtgcacaagagaatggacagacacaaattacagagctggccggtcaaatgacaggcatggacctcctcaccaatgccgctggcacacaatcatcgattcataccattaacaggatgaggagtgtcatgtcagcgatccggcgtaggtttggcaatcctctgccaccatgatgtgagatggaaactaatgaactgttatttacagcttttatctaatcacacattcatgttccctaagcttatttcattgcaatgtttcttcatgatgcttttattgggctaatcccatcagcattagttttaccc

SEQ ID NO: 75279 - DNA, 432 bp, Zea mays
  Clone ID: MRT4577_168686C.1
cggcacgaggttcccttcactctattcctgcgcatgaaggagttacccagatgagaagttccccaggcgctgcagcaacaggagaggaggagcacggttcgtcgtgcgcagattgcgatgtattcctgagcttcaaggagtcgacgatcaagttttggcgaccaagtgatcaggctcttcgagttttacgaggctgaagatcctgagcatctgtttagtgaaggttgtccatgttgcaaccgctgctcaggagaagatgaagccatggaggaagacttccaggagttccaagagtacgacgagttttaggcgtgggttagcggcaacccctagttggctgcctatgaaggccgcatgtatctacgtttcattttcacattttgattattgttaaagactatgtggatgtctcagacatcatgatgtaatcga

SEQ ID NO: 75280 - DNA, 373 bp, Zea mays
  Clone ID: MRT4577_168687C.1
ccgtgcttagcggcggtcgatcgtgtgcgcgcggatacaatcgagccgactcggccgcgggtcctgccgagactgtgctcatgagggctcgcgtgtgctcctgcgctcgaggggccgcgcgctctgcgatcctgctaaccctgggtcatgatctgaattttgaacgacaagaacgctgattgactgatgctcctgaaccaatcgcacatttgcgcagagacgcccgacggtactgcgcgcgggctgctctgaccgagattctattacatgggactgcaccaataccactggcggcacatcctgcacggaatgcagtccagttgtcactagactcgataaaacacacctcatattgaggacagggctggacaca

SEQ ID NO: 75281 - DNA, 188 bp, Zea mays
  Clone ID: MRT4577_168688C.1
ctgtcgcgtgagcactcacgtgcagggggatagtgtaatacactattctacttactgatctgcacatgctaacgactggggagtgaaagtcatatgtgaaacaaatcgggatgacgcgatggataaatagaaatattttgcattgaaacatgatgatttttgagatcagctctatgattgaatatctc

SEQ ID NO: 75282 - DNA, 298 bp, Zea mays
  Clone ID: MRT4577_168689C.1
ggaaaagaatcaaataaatcatctcattggtaacccgaaaaccccccaggggagtccatgatccccggggcaaacaggggccccttgaaacacgtaccaccaccaccacgcgcacaccttctccggcgccgggggcgactccatacatacacacgcccgccggccccttacacagggacccccacgacccgggctggacttaccccccccagaccagacgaatcatattttggggcaggaaccacgtttcccgcccggatctagcaaaaaaggtaccccaaggcgggggacccctggg

SEQ ID NO: 75283 - DNA, 807 bp, Zea mays
  Clone ID: MRT4577_16868C.1
aatcgtaaaccctaatcgtatccagccaccattccccttcacaacaggtagccaccccctcgcccaccacatcttcaccgcaatccacgattgagtcggacgcactctgccatgacgaaacgggagaggaaggatccaggtcgcatgacaagcttgggatccctgaccaagcagccgaatctatcatgggttccgcccgggtatagaggattctgcaaagcaaagaagtgcaattggaggatccatgcatcacaattgcctgatggtaaaacttggcaggtaaagaagatgtcaaagaggcactactgcaggagcagaagcaagatggagaagaattgcatggccaatcagtattgggttagagacaaggtagtgccgatgcttagggaaaatcctaacctaggtgttgggtccatgcttcgttgcgccgaaggtcttgcgtgaagaagcagcttcggctgaaatcgtccccaggaaatagccgaaggttcctttttatagagcttcggcgttgcaaaccgacataaagatagaatgacctttttatccatagaggtctaagataatgttgtaaacttttgtaaagggcataattgtaattcgtcacaggctgcgtcctgtgtctataaatagatgaacagtacccccgtactgttcacacgctgacttggcatttgctttcgcgtcacgcttgtactttttaccttctctcaggaccgaaggtacatttgtaatttgaaatcatttctatttttccatgttaataaaatagaaatgattctatgatgatgcttatatttataaaaa

SEQ ID NO: 75284 - DNA, 226 bp, Zea mays
  Clone ID: MRT4577_168690C.1
cctccgcgccccatccctgtaggtgcgatcctatcctcgaaatcctctccctccgagccagatctttgttcccatccgtgtccatgctgaaatccttccatgggaaaggcaccggcgaagacgcgattcccgctgaggtaacccctcacgcggcggtgaaaatgcaggcaaagacgccagacgcgactcctgcagagataagcacccttcgcaacatgtggatctc

SEQ ID NO: 75285 - DNA, 440 bp, Zea mays
  unsure (1)..(440): unsure at all n locations
  Clone ID: MRT4577_168691C.1
tagcttaatacaattntcacataagaagcaagcactgggtacattttgtttatttgcttatgttcactttgattatagaggatactgctatccatgccatgcgcgcgttcgctctgcaacatggacatagttttgagcagcctgtccgcgacgccgccatggaacagtttactggccgtcgtggagagccgagtccagctgtttgagcaggggggcgcaaacggggaggggcacgtccttgaagaagcccagcgggttggcggcgggcaggctgtcggagatgccgacattcctggagagcaggacaccggttcggtccctgagcgcctggacctagtaacataccttgcggggactggccaccagcaccacctggcaaatgccccccgtggggccgcccttgagctcgatcgggaacgggcccgccgcatgggttaccc

SEQ ID NO: 75286 - DNA, 294 bp, Zea mays
  Clone ID: MRT4577_168692C.1
acgacccaaagtagtcaccccacatagttgccgacaagagccatctaaacattgttatagtttaatggtggtcacgtgccctagcaaccctttgcgtcgtagtaccgcccttgcccccgtggccgtaactgcccgccacgccaaattgccagcagtaccctaggcacccgctgcgtttacttccctaacggacagggaaggacgggtcatcgggacggacttggcactccccccccctccagcccgcgtcgcactatctaccaccccacctacagctccagtaagcaatagcga

SEQ ID NO: 75287 - DNA, 849 bp, Zea mays
  Clone ID: MRT4577_168693C.1
ggctactgtgcccacacggagcaccggttctggtgctgcggaagcagccatccgcgcccaggctcgccctcgctccatctcttccctgacgcgcgtcctccctgcatcgcgcgtcgtgctccgtgcgcgcgctcatctccctccgcgccgcgcgtctgggtgcctgcacgcgcctggagtctcctcgccgtgcgccgttgctccatggccggctccttgagcttggcccctggcttctctgctacgcgcgcgcggtttcctctctcctcccttcatttctcttcagccgtcgcgccctggttctctgctcggccatggaggtcgcggttccctgatctcctgctcgcctggccacgccgagctccatccagggccggagtctcctctttgctcggatttcgtcgggcccacgagctcccctacgcgctcgtactctatctcggttttccttcaccacggctctccctctccaagctccctcccccagcttctctctccccatggccgcggcacccctgctccctggtacagcgcgcagcttgcctgctcggctgtagccgccgcgcgttcccctgccctcggcttcctgcatcgcgtggtcgcgcccctcccttgcttctccagctcgaccgttcctcctctattttcctgctaatttgcgcgccgtggtgtttctctgtgcgtgccccaagctcccggcttccccgacgtttccccctgtgccgcgcctgcctgcccggcgtttttccctgacgcgcgcttccgccttgacgtctccctggcgcgccgtgggtatcccggctcttcctagctcggaccgcgctcagtcccagctcgccacgtccggtc

SEQ ID NO: 75288 - DNA, 616 bp, Zea mays
  Clone ID: MRT4577_168694C.1
gggagaactcaagggagcgaacgaatgcgcatggtagcttcgacagcacgcatgagtgaagccgtcaggttccactccaggcatcatttcagacgaacgatgggtttgagcccactcatcggcaccggtcggatctgatcttgggacatggcgtggtgccgcccggtccgggtgtctgtgaataaggctctctctcttgccctcatgtggcgaatgcaattctcctcatgtccatcccttccgaaggcgatgcttccggcgacggggagcctgaggagcctcctgtaggattcagtcagaggtagacaggtcagtgaagaaaaaggatgcgcggagtcacattggcgagtgtgtgtttttggtggctagagctgagtattttcagctgcatgtatccttttttgtgtatgggtaagagcaaccgtgtcaggtttggctacctgagagacctttgaagctagccagctgctgttgctgctgcttctgcttcttcctccccccttttgggagttcagagctggaatgtaggtaggataggcgatgatgttgagtacagcaactgttttacacccttccatgttggaacagtttgcatatatatatatatatgtatata

SEQ ID NO: 75289 - DNA, 333 bp, Zea mays
  Clone ID: MRT4577_168695C.1
tattgggggggctgctgctcctgctggtgctgccgcggcgttattggggggtcccacccgtccgccgaccatttttgcggttgtcacatagctcatcgcttcttgtgacggatccgaataccagggtcccaatagatgtagaattggggcaccctaggctgagccgactctcgtcaccactatatgatgatgacgtgggagataccaacgggactcctgccgagtgactggtcatgcaatgtctgcgctatcatctctagatggtaggataggggccttccatggtggtgactgatgacggatcactaggcttcgattccatagagggagcct

SEQ ID NO: 75290 - DNA, 822 bp, Zea mays
  unsure (1)..(822): unsure at all n locations
  Clone ID: MRT4577_168696C.1
agccgatcgatcgccaccatctagccccccctccggcttccagaagcttctcgacggcgccatgcgtccggccatcctcgccgccctcctcctccttctcgccgccgcggcctccccggcggccgcactctactccgccggctccccggtcctccagctcaaccccaacaacttcaagaaggtgttgaacgcgaacggggtggtgctggtggagttcttcgcgccgtggtgcgggcactgtaagcagctgacgccgatttgggagaaggccgccggcgtcctcaagggcgtcgccacagtcgccgcgctcgacgccgacgcccacaaggagctcgcgcagcaatatggaatacggggattcccaaccataaaagtgtttctccctggcaagccaccagtggattatgaaggcgcaagagatgtaaagccaattgtaaattttgctctgtcgcaggtcaaaggtcttctcagagataggttggatggtaagacatcaggaggttcaagtggaaaaacctctggtggctcaagtgagaagaaacatgaaccaaatgaatcagtagaattgaattcgagtaactttgacgaacttgtcgtcaaaagcaaggatctttggattgtggagttctttgcaccgtggtgtgggcactgcaagaaattggctcctgaatggaaaagggctgcaaagaacttgaaaggtcaagtgaaattaggccatgttgattgtgactctgataagtccttgatgagcaagtacaaggtagaaggctttccaactattttggtatttggtgccgataagngagagccgtttccctacca

SEQ ID NO: 75291 - DNA, 368 bp, Zea mays
  Clone ID: MRT4577_168697C.1
tagcaagtcgcagcaggtttccgcgagttccatcaggcactcgttgcaggacaggttgagtaaggtttccggcaaggggcggccggatgagatcactgtgaaattgtgcactagcacagcccctccattaaaactaattgacataccgggcgttgaccaacggagcacggatgaatcaataagcaactatgctgcacgcaacgatgcaattctactagttatcattccagctcttcaagcgcccgatgtggcatcttctcgagctctaaggattgccagagaattggactcagaaggtactagaaccattggtgttctaagcaaaatcgatcaagcttctggagaacagaaagccctgggtgctgttc

SEQ ID NO: 75292 - DNA, 306 bp, Zea mays
  Clone ID: MRT4577_168698C.1
ctaatctcctactctggtccgcatagaggatcagcttgtcttccatggacaccagatcacgggcacgggcgcaacggcagcgcgaacctcctccactaccctgttctatcggatccaacagcgaagcatacaggaggaaggcaagagcatcgccctcaaactagagatcccccagtggaagtacaacgtcattccgatcgtcgaccagcccgctgtaccgcacgtacgccagtgggtggagccaccgcgaccccactagaggcgttgggctcgtcatcctggcggtgctggaggcctatggcccgt

SEQ ID NO: 75293 - DNA, 272 bp, Zea mays
  Clone ID: MRT4577_168699C.1
cggaaaaaaaaaaaaaaaaaaaaaaaaaaaaaaaaaaaaaaaaataaaaaaaaaaaaaaaaaaaaaaatcgcgattggtcggacgacttgaaaatagagttactgcagcttgagcacaatgtttccttcgtactgggctactggcatatttaacacacttattcttctggatttgacataattgttcagttggctgaatcatttgttcttttttatcaatagttgacatttcttgtacagtattggtagtagtgtacaggttcgttgataat

SEQ ID NO: 75294 - DNA, 311 bp, Zea mays
  unsure (1)..(311): unsure at all n locations
  Clone ID: MRT4577_16869C.1
aaggntcaacccttcaaatacatgtatcataacccgaggacatgatttgattgttcaaacgtacattcattaccaacatttcgtatagtcttttaccgtctcgcttagtattagaatagagcaatgatacgatagtaaaatactcaaaggatatacagcatacttctcttcatacgatgttaaatttatttaagggatctagatcaatcagacaatcatcatcaccacctcataagcaagatagttcaaaacttaagacacacagacttcggccaaagttggtgtttctaacttggtagttggtaccccgg

SEQ ID NO: 75295 - DNA, 571 bp, Zea mays
  Clone ID: MRT4577_1686C.1
caccggactgtccggtgtgactgcggagcaacggctacttcgcgcaacggtcgtctgcaaaagctaaagatcagagctacagtgaagaacagtgcgcgtagagtcagagccgctcgtcagaggcgcaccggacactgaacagtgcctgtccggtgcggcaccggactgtccagtgccactagaagacaaagcctccaacggttgatagctctcaaactctaacggttgggtgacgtggctggcgtaccggacagtgtccggtggcgcaccggactgtacgttgcgcccatcgatagcagccacccccaacggttctttggtggttgagggctataaattctccccaaccatcaccactccaagcatccaagtttccagcactttacattcaatacaagagctagtgcattcactccaagacacatttccaaaagattaaagcctctccaagtctagaattcattccaaccacctagtgacttgagagaaaagttgctcctgttcttttacgctcttgttgcttggatcgttttcttccttcctcattcttattcctaagtgaaattgtatc

SEQ ID NO: 75296 - DNA, 536 bp, Zea mays
  Clone ID: MRT4577_168700C.1
cgcctcctgtcccctcgcgcgttccgcctcccagttgcggctccggtcgttcccctcctcctcggttgctgagatggccggtcgtgggaaggcaatcggcgccggcgcggccaagaaggcgacgtcaaggagctccaaggctgggctgcagttccccgtgggaaggatcgccaggttcctcaaggccggcaagtacgccgagcgcgtcggagccggcgcccccgtctacctcgccgccgtccttgagtacctcgccgctgaggtgcgtttctcgcagatctcatccttgcccctgttctcgcggtattctattccttgatccggttccgtcgcgggatccgacaaatcgggctattcttagatctgtttagaaccgtgccgtatgttaatagcaatgcgtcgaaatccaagtaattttttgtccaaattcgtcaagataaggtttcttgggtgcggaatcgatgtgctttcctatgtatccattgcattggttgctgcttgttctaatctggtcgtccttcccctttgatccaggt

SEQ ID NO: 75297 - DNA, 367 bp, Zea mays
  Clone ID: MRT4577_168701C.1
atgcatgctctatatctttaactagaaatcaagcccgcaagatcggagcaaaggccatcgacccgcgagcgcgagcaataaggcacatagcttggccgacgacgaggacttcaccgatctccccgaaagagcacgcctaagacgtgtcggagtcatctgaactctctatgacatgctacttccgcgggatatatactgtctacgatgcctctccagatccaaaatgcgcactggctgccattgctcctgttgaagagctactccaactactcctcgagctctagcgtggactacctcatcagagagttgaaagccacgagccatcccgtgtagaacaagagcactggcctcatctactccgggagca

SEQ ID NO: 75298 - DNA, 206 bp, Zea mays
  Clone ID: MRT4577_168702C.1
gagctctctagtcggcggccgcccttctttttttttttgttttatcgaatatatgcaatgctgcattctaaatgcacaacactgccattaacccgttaaggctgtaatgcacccaagagctgagttacattacacacgttccaagtaagcctcacacccaacagggagaattattagctctacccaaattccaacttagcatgaaa

SEQ ID NO: 75299 - DNA, 321 bp, Zea mays
  Clone ID: MRT4577_168703C.1
accaacccgggcgggcccatgaaaggggcaattccctgacagaggggggcatcccttgagaatcccaacaacataccaaaccgggaggaaaaagggaaaaactggggtcccgaaggaaagagctaacccacaaaaattgcaaaaaaaataacagcccgaattaaaaaggggaaacccggggggccccaaggaggaaagaaacccacaataatcggggagaggccacttgcccatttcaacgtggaaaacctgctggcccactgacttaaaaaaaacggccaacccgcggggagagagcggatgagtttagggaaatgttcc

SEQ ID NO: 75300 - DNA, 362 bp, Zea mays
  unsure (1)..(362): unsure at all n locations
  Clone ID: MRT4577_168704C.1
aancttaagtaaatcatcctcaatatttttttttttttgggggggttttttgaggggtttttggcgtttttagcaaaaaaaaaaaggaacaaaacaaaacatcggggaccaaaaaaaaaatgggaaccgcaaacccaatcggaacaaccaaaaggcatggagacccacggccatgagcacaaagactggccccaaacatgccgaggggggaagcaaaccgaaaaaccctggttttctttcttttacacacaccccacacaaaacccatggaggggagccagcccggccccgattaaaatgggccaaccccccccccaggccagaaagaaaaaaaaaatatccatgggcggcgaacgaaggga

SEQ ID NO: 75301 - DNA, 143 bp, Zea mays
  Clone ID: MRT4577_168705C.1
actcttaatattacccgcccacccagcagagcgtaggttgggatcattttacggtcgcacgcaggcctcagaaatacaaaacaattatccagaaacggattggaatacctaaggtcccccaccaatcaattttggagatctac

SEQ ID NO: 75302 - DNA, 228 bp, Zea mays
  Clone ID: MRT4577_168706C.1
gggcccaaggttttttttttttatcacttttcccccttaacaacaaacaaaaaaagggggacatccctttttaattataaacaaaaacacccaccccccagggcttacccccggactgccctgggacaggcccaataaaaataacagaccggaccgtggcccaaaccagaaatttccgacccctaccctaagactgcaactttacctcatgagctggcaacacatggg

SEQ ID NO: 75303 - DNA, 368 bp, Zea mays
  Clone ID: MRT4577_168707C.1
gaggcttcacacctcacgatctcaatccaactttttatggttaaaactaaattggggctgcatactcaatagactcttaactaataccactacccaatcttatcgacgactgaggcgcccaggcctcacatattattttcatcactccataacttcaataccaacctctcctaaacatccacttaaaaaaccattaaaatcctattagattcacacgcccaaccgaaagctctccaaggacctccctaccttactctaactaactaacttactgattcactcatgactctaacagccttcactcaacctcatcgttcactttctgcctgcccatctcatatgcttcactcaactcctatattcacggc

SEQ ID NO: 75304 - DNA, 566 bp, Zea mays
  unsure (1)..(566): unsure at all n locations
  Clone ID: MRT4577_168708C.1
gcgttcgcccagcgtccgcccagcgtccgcccacgcgtccngaaaaaaaaaaaaaaaaaaaaaaaaaaaaaaaaaaaaaaaaaaaaaaagaaaaaaaaaaaaaaaaaaaaaaaaaataaaaaaaaaaaaaaaataaaaaaaaaaaaaaaaataatatagaagaaaaataaaaaaaaatgggtgggccgttttttggggggggggtttttggacaaatccttgtcgttaccttaattttttttttgtgggggcacataatttatttcgtggggtgggtttttaaaaatgaggtttgggaaaaacgttttttttaacaaattttaatcctttttggaaaatgggattttccctgtggggggaaattaaaaagggggggtgtggtgtttactttcaaaaagtttgggtaatttgattgggaattggggcccccttttttgggtttttttaattcgtttgtgggggggtttttaggttttnttggtcttgttttatgtggggggctttatgaagggttcttttgtagtgttttatggtttttgggccctttaaagttgttttgggtgatg

SEQ ID NO: 75305 - DNA, 259 bp, Zea mays
  Clone ID: MRT4577_168709C.1
atgctcggtgaacgtgcacaatatccaataattatagatatttggtaaacaagcccccacacccatgtttcaatgtgatttgaaattttgcacgaaacagactagccttgcaaatgccacagattcagagattccataaaagagctgtcccgttatctttacattttttggctacattattttgttggtatgttcagtttgcttgtctgtctctttgtttcagcaaatggaggagcaattcaaggtattgatagttctt

SEQ ID NO: 75306 - DNA, 993 bp, Zea mays
  Clone ID: MRT4577_16870C.1
gccgaagcccactctatccaacccaattgctgaagcgaaggaccacgaggacaaagaggagctgaagcatcgatgcataggacaggaaattattcagaaagaagaaagaccgaggaacacaggaagctcgtcttcctcctctggctgtgagatcctatccccctctcgatttcccctgcaattactcacgctcccggattgatctcgccggtgtagccacgggtattacaaggcgcgagcctgatcatcccgtactgcctcacgaaccctaactaacagcccgccctgccgaccgcggctttggaggtactactggattcaacaacaaccggtagcgtgacaaggttgaaagcggacgcagtggaacatgcaaagcgggtgaagaaatttggtcagagaggcgaagttcccaggcaaaaccggctaggcctggctaggccgaggtggaaggccagccgtgttgcagcggtgctgttgcagcggcggcggtgctctccacctcgtcttcgctggtgttcctgggcacgggttgctcgagcgccgttccgacgcgcggtgccctgatccagccccgacccgccctgccccatctgctcccttcttcccgtgctccagcaagcccaaccctagtcggcggcgctgcgggccccactcgccggcgacgcatctctccggcctcgattcggccggcggtgcatcttctccggcctccccgcacacggatccgacgcgggcgcgcgcggatcggccctcctcgcggcgattggaggcgcatgcggcggttccagaggtccggttcggctcgggcgccgtttcgttccgcggcaacgactccccggtgctgcagtgactcctgtcggccctctctcgggtggcgggcccgcgagtacgaaagacagtgagcgaaggcggcgctgcactcctccagttcgcacgcaccgcaaatgcccatcagagacgtcgatccgcagcatgggtcgagttgagctcgac

SEQ ID NO: 75307 - DNA, 1485 bp, Zea mays
  unsure (1)..(1485): unsure at all n locations
  Clone ID: MRT4577_168710C.1
acccctgggttgcgagacgatatgatccatcgaccgatcgatcatcctctctggtccaatccaaccatatatccgcccggcgcgagctataaataccgcggctcggtcgcctctgcgtcgtcgtcgtcgcatcgcgcacgcaccatcgtcctgccgatcgatcgcagtcagccagtcttgctgagagacgaactgaagccggaagtgaaccgatcgatcgatcgagcgagcgagcgagctcccatgaagacgttggttctggcggcggtgctgctgctgcagcacgggggagccgcgagcgccggcggcaacttctaccaggacgtggacatcacctggggcgacggccgcggcaagatcctcgacaacggccagctcctgacgctgtccatggacaggtcctccggctcgggcttccagtccaaggcccagtacctctacggccgcttcgacatgcagctcaagctcgtcccgggggactccgccggcaccgtcgccaccttctatctttcgtcgcagggttcgcagcacgacgagatcgacttcgagttcctggggaacgcgagcggggagccgtacacggtgcacacgaacgtgtacagccaggggaagggcgggcgggagcagcagttccggatgtggttcgaccccacggcggccttccacgcctactccgtgctgtggaaccccgcccacgtcgtcttctacgtggacggcgtccccatccgggagttccggcgccgcggcgacgggaccgtgccgttcccgacgtcgcagccgatgcgggtgtacgccagcgtgtgggacgcggaggagtgggccacgcagggggggcgcgtccggaccgactggtccaaggcgcccttcgtcgcgtcgtaccgcgggtacgccgccgccgggtgcaccgcgccggacgccgccgcctgcgcgcgctccaacggcgcatggatgtcgcaggagctcgacagcgccggccaggagcagctccgccgggcgcaggccagctacatgatctacaactactgcaccgataagtaccggttcccgcagggcccgccgcccgagtgctcgtcgccggccaagtagtagatgagtagaattgatcggatacagagagcaatcaattaattaaatcgacccgtcgcttggtttttggtttacacattgtactacggcataagttcggcggatatatgtatacgtagacggctagacgccatgcatgtgtcttggcatgtatcgtattcgtatatatcgtaattcgtatgtacctcagtatacctgcatcgtacatttacatgcatatatatctccctatatataaatatatatggttttattacacgggaaaaaaaaaaaaaaaaaaaaaaaaaaaaaaaaaaaaaaaaaaaaaaaaaaaaaaaaaaaaaaaaaaaaaaaaaaaaaaaaaaaaaaaaaaaaaaaaaaaaaaaaaaaaaaaaaaaaaaaaangggggggggcccttt

SEQ ID NO: 75308 - DNA, 620 bp, Zea mays
  unsure (1)..(620): unsure at all n locations
  Clone ID: MRT4577_168711C.1
acgcacgcaccatcgtcctgccgatcgatcgcagccagtcagtcttgctgagagacgaactgaagcctgaagtgaaccgatcgatcgagcgagcgagcgagctcccatgaagacgttggttctggcggcggtgctgctgctgctgctgcagcagcagcacgggggagccgcgagcgccggcggcaacttctaccaggacgtggacatcacctggggcgacggccgcggcaagatcctcgacaacggccagctcctgacgctgtccatggacaggtcctccggctcgggcttccagtccaaggcccagtacctctacggccgcttcgacatgcagctcaagctcgtcccgggggactccgccggcaccgtcgccaccttctatgtacgtactactacgtacatactacaccgccgccgcctcctcgtcctagcttcgtatatattcgctgtcgtctctctctctcgcgcgctgaacacatgtcggcggncacgcacgcacgcgcacagntttcgtcgcagggttcgcagcacgacgagatcgacttcgagttcctggggaacgcgagcggggagccgtacacggggcacacgaacgtgtccagccaggggaagggccggcg

SEQ ID NO: 75309 - DNA, 555 bp, Zea mays
  Clone ID: MRT4577_168712C.1
aaactatatatatatatttacgtacatgtacactgcacgtacatacaatacattacatgacaagtcatcatgcacacggcgtctacgtatatatgtatatccgccgaacttatgccgtacgtcgtataacaatgtaaccaaccgatcgatcgaattgtatacgcgcgattctagctatactctacttggccggcgacgagcactcgggcggcggtccctgcgggaagcggtacttatcggtgcagtagttgtagatcatgtagctggcctgcgcccggcggagctgcccctgcgcggcgctgtcgagctcctgcgacatccaggcgccgttggacctggcgcacgcggcggcgtcgggcgcggtgcagccggcggcggcgtacccctggtacgacgcgacgaagggcgccttggaccagtccgtcttgacacgcccgccctgcgtggcccactcctcggcgtcccacacgctggcgtacacccgcatcggctgcgacgtcgggaacggcaccgcgccgtcgtttcggcggcggaactcgcggatggggacgccgt

SEQ ID NO: 75310 - DNA, 2863 bp, Zea mays
  Clone ID: MRT4577_168713C.1
ggatgacttggtggtgccaaggtcgccctacttcccagtggagtccgcggcggggcaggagcgtgggccgtcgcccatggtgatggagcggttccagagcgtcgtcagtcagcttttccagcacgtacgacggcactggattgtgtaaagtgtttgacctccttagggcttgtttggttggatacttggatctggattggaggggattccctccctagtcaaaattgaatagaaggggatttaatctcccctcaaccgaacaaagccttaccaggaagggttttactggattgtattgtgaggtttgtgtgactatatatctgtctctatgcagagaattattcggtgcggaggccccgttgaggatgatatggccaacatcattgtagcacaactgctctacctcgacgctattgatcccaataaggtgaaaacgaacgggacaaccgtttgctgctgtaattcccatgtgaatagaacatgcttgcgctttaaataaacctttgtttgttgataccagacagtgaaccaacattgtagtactaaactttgtacagtgcttctttaactttctgtgttgcggaattgggttatacaattgtaaccactgaacttgtaggtttatccaatgttgccatttcatctagctagggactcgaatacatggcaattatatattcaaaacgtggtttcttccatctagtgcatgatccttgtcaaccttcctgtaggatatcattatgtatgtgaattcgccaggagggtcagtgacagctggtaatagctcatttagaacatagtatgtttgctttagctgcttcgattaaattctaatgcattttcgttttctgttaggaatggctatatttgatacaatgaagcacatcaggcctgatgtatccactgtttgtatcggactagctgcaaggtactgaacacaaattctgctgaacgatcatcaattgattcagttctttgcatgttataggatcttaatgttcatgtttgactttcagtctgggtttattttccctatgtagtccattctgttctcaatgtgggaagcgcaattgatcctttgtgtttgcagtaattggaaggttcagttcatgtaacctatagtctgggatttgggattgtagtaactagatttttttttggctttggttgtgctagtatagttcttgtttgcagacaggacttgcatggcatgagtttttaaaactaccgtagtaccatagtttcagttaacaaattacacaattgtcaactccagatggatgccaaaagcagcaatgtccttttactttgcatacttgccctgtgttggggttattattcagcaaattcaccttttgcagcgagcttgctcaatgattatctgcacagaaatgcctacttgcctagtaatttaattttcgttataacttggtacatgtagttctgctatgaatgaaaggtaggaattaagtatgctttcacgaaataagaattatgtattcctgcttttcgtatttaatattttagtgtaactagccatacataattaaataaaggatgttagagatctaatttgtgtttcagttttacagtttgttagtgtgaacatgtttattatttattactgagattctgtggccatttcttgttattgtttaactccaaattatgtcatgcctcatgcaatgttatcttttattacctggatgattctgacactctttctgctgtttgatgtttctgtttgacagcatgggagcttttctacttagtgctgggaccaaaggtaccagtagtgattgctaataaaatacatgtaggtgtagcttacatatccaagcttcgttaatagaagtcataaaaccggtgaaaatataatgcaggaaagcgatacagcttaccaaactcaaggataatgatccatcaacctcttggaggggcccaaggacaggagactgatcttgagattcaggtaaactcgcaatgtggggctatggaaagtatcatgctttctagaccagtacagtatcttaaccaaagatattctcagttctcgtttcttctcaacaaagatccttattttctgattttcatactcagctgagcttacggttgttatattttgcatattatttttttatctctacatattgcgtattgttacaagccaatgagcccctcttttggcaaccgagtaagaattacagttgtttacaccagcagttgctgatcctcaagttctgattattttattcaggccaatgagatgctgcaccacaaggcgaacttaaatggataccttgcataccacactgggcagcccctggataagatcaacgtagatactgaccgtgactacttcatgagcgcgaaagaagcaaaggagtatggccttattgatggagtaatcatgaatcccctcaaggcccttcaaccacttccagcttccagttagtcatgaagtgtgctagaactccgtcaaacatttttgttgtatcaatgtgtctgttggaagccctggctacgtaatattctacgtccaaatgcatcaaagattgtacaaaacaagatatgcggttaggatatccatccttggtgatggatattggaactaaattaacagtattagggttagtttgggaactccattttcccttgggattcctattttcccaagggaaaatgaactaattttccttgggaaaatgaaattcccttgggaaaaatgtggtttccaaactaacctaacccttagagttaatttgtcaactctatttttctaaggaaattcctctcataaggcttggtttcaaattaaataatcattattttctaattattctcttcttaatttattaatctt

SEQ ID NO: 75311 - DNA, 257 bp, Zea mays
  unsure (1)..(257): unsure at all n locations
  Clone ID: MRT4577_168714C.1
gcgagtgttcttggggggtgttagtgagtgagcctgcccgtgctttgcgcctgcgctcgcggacatgggatcgggggttggtggacgacnactgtatatagtagggagcatcggcatgtgtacgtactgggtgggtcctggtacaggagcatagcatggtctggttctggatcctggtgggctcttcttcttggtgggggggggggggatggatatataaatatatggttacgatgaggtatgagagggaggttatt

SEQ ID NO: 75312 - DNA, 751 bp, Zea mays
  Clone ID: MRT4577_168715C.1
ggccgcttttttttttttttttttgagaataaacccgtggcattaagactttattgcaaatggccacatgaccaaggacatgctcaggcggattccctacagggcttcttcgaaagcaagggaattgcacggggtcgcatccatacatgccatgttagggttcacatgaagcaaacacactggtcacaaacatatagtccacattgactctgaagccggacataaggatagatcgccttgtatgctccaccactataatctgagacatcctgccctgagagtcatacgagacgggggaggatgaacattgaacagagcccgttatcctttttctcctgaggagatggatggatgaatcgcgtccaaactgtgccaagttaggaccaaaacacacacaccacggaacgaagagcttggagcagaatgcaaatgcagcgccggcgcgggaacagaacgagagctggcgaaaccgcccaatagagctgaatgcatgctgaaagcctgaaatcgtataaggcgttcatgcatggctgctatggccatcggtgggttcatgccaggatggttttgaaaactctatattcgcgtggagcccgcagataacagtatcttgagctacggacaaactgacactggctaagagctcaaacaccctctggagagtgaaatcctagatcgcataccacgttcgcctcatcaatcctcctgaacccctgcgatggcagctggtatcagtattcactctggccat

SEQ ID NO: 75313 - DNA, 247 bp, Zea mays
  Clone ID: MRT4577_168716C.1
ggtttgaggatgaccgtctcatgcaagggaactggaccaaggagccaaattcttccacaattctactcttcttcaggatacttgctctgtgtcacacagcgataccagagataaatgaagcaactggttctattgcctatgaagcagaatcacctgatgagggggcttttctcgtggcagccagggaatttggatttgaatttttcaaacgaacacaatcaagtgtctttgtcagggagaaacacac

SEQ ID NO: 75314 - DNA, 853 bp, Zea mays
  unsure (1)..(853): unsure at all n locations
  Clone ID: MRT4577_168717C.1
gggtacctcgaggccggccggggtaatcatcttcttcctaaactgaaaccggggtgcgcggcggtctccgcttcctgcgcggcggtctccgcttcctgcgcggcggtctccgctggctgcgtggcttcagcggctccacgcgcatgaccaggcggatgcgcactcgcgaacccggtctgtcccagcgcagcgaaagcgtgtgggccaatggtgtcgggctcgccccgtcctcgggttattctaatcccgcgccgcaaactccgtcttcctcggcaacagattcggcaaccggggtataagaatcgggcctcccctgaccatctatccagtgtgccgccgagattccaaaggagggagagaaataggagctcttgccggtgtggcgccagtagattttgacgactcccatcgcccgtcgtgcaagcacttcttgggaatctgtgtgcggtcggggtggtgcgcctggagttggtgatcgtgggcgacgcctgcgctggcagtggtggtggtggntgggngtgggaccgtggcttctgcaattcctcaacggagctctgaacttccaatcgagcggctgctcatcggggaccagcttctctgcaacatctttgacgtgaggacaccgtgtcatctgaagagcaagttggtacctggaatctcaagtgccaggtcaagaacatgtaccgcaggatgaggcgcatgggaggatgggtgtgacgtgttcgtgagaagtataggncgtcgcctcccgtcaactttggggtgctggatcgttgtctccttatgatggaatttatttatttattttatacagaactcctattatnaagaaaaaaaaaaaaaaaaagcggcc

SEQ ID NO: 75315 - DNA, 606 bp, Zea mays
  Clone ID: MRT4577_168718C.1
gcggccgtccgggatcatattcaccatctcatctccaacttgcctctcgcgttcctactccgtccatgccgcctcccaataagcgtctctgcgcagcactgactattgcgctcgtcgtcttctcatcgctgcacactccacctgatacttctgtagccggcggtgacacgcttgcggaagggcaacgacctcgcctgcgatgaacacctctcctcccgaaacgagaagctcgcgctaggtttcttacagatccccatcaaccggtcatcctcctgtgcaaccagtacgatcgaagacgtctccacatcttcccccggttgcaacctcagaggatgatacaacgagatccctgacggcactccactcgggattgccaaccgacacagggccaacaccacacccggtgtcgaagcatcccagatcaaagtcatagacactgacacgaacatacctctggtcgctatcaaccatggaaacactaacaataatggccatcatatccttctgaactgacaactgctcctaacatcacagtccaacagcgaccaggtaatggtcactaacaccgcaaatctagaactcctggcgcaaaatgaatgcccacca

SEQ ID NO: 75316 - DNA, 193 bp, Zea mays
  Clone ID: MRT4577_168719C.1
tttttgggagaataaaattttatttgtttccctaccactagaatatctaactgtatctaaccaaatacaaaaaatataaatacccacaacctaattcgaaaattccaaattttcgtttgtttttaggccgtcaccgtaaatccgggagacttaggactccaagaatatattccttctcctcggggattattat

SEQ ID NO: 75317 - DNA, 305 bp, Zea mays
  Clone ID: MRT4577_16871C.1
ttgtgagacgctctctgttatctcagcaataacgtaccacggtggcgtgaaccctccaggaggtgtatggtctgatgatagctcacccaggggtaaaccagaaaacccattctttaagacaaccaattcacaacgctctgaatgttttattattcaaactcactctcatatttgggatatgtagttataacaatactgtttgtgaacacagaatactgcgagcatgttatctaaagctatacgctcatagagtgttttgtggtgggctttgtgagcctcttgattgcctactctgcaggaagctc

SEQ ID NO: 75318 - DNA, 350 bp, Zea mays
  Clone ID: MRT4577_168720C.1
ccctcggggggggggggggggctaaaaatttattgttggggcgggcgttttttttttttcgggctttcttgtgggttgtgtggggtttttttggaaccctttccgtgttgatttgcccttcccttaaatctctcttttggaaaatttcgagggggggggggggggggttttttatctttttctccccgaaccccccccggtttttggggggcccccccccggggaaaatggcctcgcggtttacccgggggtgcccctcctcccacggggccccccccttgatgttccccccctatgggccccttttctcctccttgggggcgcccttcgcgccggagttttttttttcg

SEQ ID NO: 75319 - DNA, 335 bp, Zea mays
  Clone ID: MRT4577_168721C.1
ggaccaaccaaaatggatggagacccacgtacatgagcccaaagactgtccccaaaaatgcaaagggggatagcaaactgaaaaactttgttttttttttttttaaacacacaccaaaaaatacctttttttgggagccagtttgggcttttttttttttggttaaccccccccccaaggttgaaagaaaataatcatatccatgggcgccgatcgaagggaacaacaattgcaggggttgaacttgtaaccctttccccaattgtagccgggggggggctttccggacttccccgggggctttaaaaaatcgggggcgggcttttttttcgggg

SEQ ID NO: 75320 - DNA, 431 bp, Zea mays
  unsure (1)..(431): unsure at all n locations
  Clone ID: MRT4577_168722C.1
tacttgtatatttgattgatcaagtattgtgttttcagctagagactntcttgtccagggggggcaactnntactaatcctattcanattagggggggggttcaaaaaaactaaacactagttgagaactaagcaacttccccaacaaagggggggatagtgaaaaaaaagatatttctgcagttaatgctggcaacaactatgaaattgggtaacatggataggcagagggccatggagcaagggtcgatccaaaaggcgttgtcaccctttaagaggtgaaggggttcttagaactttctctatgttatggagataagcaattttaccgtggttacatctctccctactttgtaacagacaattaaaaaattactacagagtacgagaacttcaagttaactttaaaatatgagatatcaattcttttt

SEQ ID NO: 75321 - DNA, 260 bp, Zea mays
  Clone ID: MRT4577_168723C.1
tcgtctcgtatcatcatgcgccatatcatataatgggactccgtggtatgaatgcttcatcggcgatcaggacgttgccgtatttggcgtgtactcgtatgcattgcattaactgtagctgttcgtaggactacctattgtgacttgctgtatcgtaattaatatatatatatttggatgtctatgtaaataaaataaataaataaaaaataataaaaaaaaataaaaataaaataaaaataaaaaagaaaaataaaata

SEQ ID NO: 75322 - DNA, 222 bp, Zea mays
  unsure (1)..(222): unsure at all n locations
  Clone ID: MRT4577_168724C.1
acaaaaactannatcctctaaaatcnacccactcatcctctgctttttcctcactctctacacctctcgcgcaatttttaatgcccgcccggccccaaaccaatcatatcacatccatattcttatcttatattactcactctatacatcttcatcttctttctccctacatcattttttatttccttccaccttttattattaatacttttaacccctttt

SEQ ID NO: 75323 - DNA, 398 bp, Zea mays
  unsure (1)..(398): unsure at all n locations
  Clone ID: MRT4577_168725C.1
ggttggaacctttgggctgatttatgtgcttggtgagtggttgtctgtgactcagaatccgatgtgcggggtagacgtagttaggtgcgaggctcatctatggggcgcgacctgccctatacgacgagattcggaacttcgcgattgcgacggtgatgtgagatggtcaggtgaggtgtttcttaacttaagaatgggaaatttgcgctgttcgccggcatgtgggtagaagactgggcctgttacccttaagtccggcgttctgttgttcgggctctctgctctgggtcttgaagttgtttgtgtcggctcaccagggcaacccggcctagctcacctggacncacgaaaccctggggctcgaaaaacgagaattgaaacccttaaaaacaccccag

SEQ ID NO: 75324 - DNA, 282 bp, Zea mays
  unsure (1)..(282): unsure at all n locations
  Clone ID: MRT4577_168726C.1
cggacgcgtgggaaaaaatgcnncttcngctgcatggtcagcactaaaacaattagtacgcgaggtagtgaattcatccaatgagacagaaatcagtgattagcacgagcagatcatgattgccaaatcgtaggtaactatatgtatgaatgataagatagaaatggccaattatccttatgttannccataccctaattaatatcccaagcagccagagaggaagcctttttttaggtcaatctttttagtccagctactcaaagattctgcctaaatacc

SEQ ID NO: 75325 - DNA, 295 bp, Zea mays
  Clone ID: MRT4577_168727C.1
ccagggctaaataacccaaacccaaccattttttccccggggaaaaacatttgttagtccaaggggagccgggctaatttgcttttcaacacacggaaccctcagatggtaaagacaggggcagcccagacctttaagaattttttaggggaacaaaaaattcggaccccccattggatcccctgatattcgttgttttaacaacaaaccattgatattacaaggcttcatttaaaggttagaaactccggtttattcctttttcaccaaaaattctcaccccaccccttccatg

SEQ ID NO: 75326 - DNA, 435 bp, Zea mays
  unsure (1)..(435): unsure at all n locations
  Clone ID: MRT4577_168728C.1
ttttagaatttgcacacataactagaggccatctacattaaatcatgcattacatagggacatataggaatcaacttgggagacaatatgacagaaccatgaatgatgcaatgatgaagcatgaatccacacatcaaagtaatcagcaattgcttgcacaatccagtacacatacatattgtcactagaagaaaggaagtcctcaatgaaacaatacctctgcatatggcatttgatacaaaaagaacattaattcattattttctagattaaaccattctttcagaaatctcctctgaagcttctgcaattaattccccattctaagntataaatattaggaaatagcataaatcaagacactaattctatattggtaccaagggtttagaagntgcatttggcatacaacatattacatatacccaaacactc

SEQ ID NO: 75327 - DNA, 401 bp, Zea mays
  Clone ID: MRT4577_168729C.1
aaaaaagggcaacctttattctggaatttaaagggatctaaaaaaaacagggcccccccggaacaacggccgggcatttccctaaaaaaaaaaaaaaaccccccggggggcacccaaagtggggggggagcggaaacgggaggggccccccccactgcccggggaggccggggatggcgcccgcgttaaccgggtggaaattggcccccccctgtttgacccactcacacccctgccgccgttccgccgggccggacggaatggccctgacccgtttaaccccggggcaaaactgggggggcggggccccctccttgcccgtaacgaaacccacccaggggcccaggcttgcctccacgtccgcgcagttaacgtccgccctaaccgccgccgccgccagg

SEQ ID NO: 75328 - DNA, 268 bp, Zea mays
  Clone ID: MRT4577_16872C.1
gcaaaacagcaagagaaaggcaaccccaagacgagcaagacagcgacggacgacaagggccacataccaacgcgcacggacaatgacggaagcacaggtaacgcaaccagtaggccagactactcacacgacgcaatagctgcccgactgaactcagaacagcaatcacacagacctacagtatgggaaaaaccagggcgccagccataacgaaaccgtacaggacaaggaccacgaaaccgaaaagtgtcacacagaccacaacaac

SEQ ID NO: 75329 - DNA, 408 bp, Zea mays
  Clone ID: MRT4577_168730C.1
gtaaggttaaaagaatttttcagagttttggaggatggatgcaggatataacagggggaaacaaaaccaaaaaaccccaaaaaaggaaccaagagaagaggaaaaggagggacaggggcagcggaagaaaaccgggggggacgggagcaaaagaaaaggcaaaccgagaaaaaggggaccaaaaaaaaaggcctcagaaggaaaagggcacaaaaacgaaagtttcccaaccggagcccgacgcagaaaagatcccaaagcctgagaacaccggaggccagcccccgcaaaccccggaaaaaaccagggacaaccaaagcgacgggcacggcaagaccgcgcagcaacaaacggaaaagaaacccaaggaaaaccagggcaaaccccggcgggcgcggggcggaaacc

SEQ ID NO: 75330 - DNA, 247 bp, Zea mays
  unsure (1)..(247): unsure at all n locations
  Clone ID: MRT4577_168731C.1
ctcattcttcccttttactttccttactgcatcatcaanaactnccggtgcttttacaataggtatagctcatacaacaatatatccatnttatccaactttctcaacaacttcttcctttacttcattctctctaccttnctctcattttttttttttttactattacactataaatcatcctttataatttccatttcatttattttacaactactttcccttctattaaaccattttacctttt

SEQ ID NO: 75331 - DNA, 569 bp, Zea mays
  unsure (1)..(569): unsure at all n locations
  Clone ID: MRT4577_168732C.1
gagcaatatgtttngaagaatattttataaacagcgacaagaaacgcttcatgccccaattctgtgcacaatagcaatactcactatacaggaggacatgccaccacataaaatttacattttcaaggaaacaaaaacaactaagtgcccccacagaacctgatctgctgtgccccaggggcttcaatggtgccgtagacgctgggacctcacgcatcctctacttgagagttgaacataaagcttggaaatgttgtggtgatatccctgttgaaaaattaatccacgataagaacaatgtttcaataaaagatgttactccatcaaacatacacagattcataatatgaaacttaaagcaccatagttttcacccattgaggatcaatgacagcaaattccgagaccatggacaaatatagagaaatacagggagcagatggcatacgttttgtgtgtttaacaaatatagagtcaacaatactgagctagtgagctttacataggattataggaacccaagtattcaggaagaaaactcaaattgttaagaaaacggcaaactcatc

SEQ ID NO: 75332 - DNA, 463 bp, Zea mays
  Clone ID: MRT4577_168733C.1
tggccccagccgcacaagaggaggaggcgctggagcgtggtgccggggtgcaggggtacagtgcctgcctgaacctatcacagtaagtcatatgccgggataacaaggtggcttgctggcacgaacagatactaacgaacaatacatactctcgcaggcactgtacatactgacgaaacagctacttgcgcatcaactacgtaacaaggcgctcttgaaacacaacctgctgcaaacacataccttggtcaacatgctggaacagtagaaagaatggcataaacatgcgaccattaccatggaagcaaaaggatatgaaccaagaaattcacttgatgatgatgctcatgagtgagaggtatttctgaaccatcgctaaccaacctaactatcaataacgaaataggtgaaggcaagcaaccagagactgcacctgatatactgaataacgctgatctttcta

SEQ ID NO: 75333 - DNA, 327 bp, Zea mays
  Clone ID: MRT4577_168734C.1
gggggaaaaaaaaggggttaagggggctgccccaaggagggaaaaaccgggccatgctttgccgggtttttacacaaccttacaaggggcatagatccccagggggatggaggggcatttcccaagggtaaaatatccctaaaataccccctccgatgttttttatttgtcggggcttaatttaaaaaaaaactaggtaaccccaaaaattccaaaccggggggggctcaagctccccccgggtttttaaaccggcatacccgtaaacctttccttttcctgggggcatcccccccgaagggggggggtgaaccccccatctaaaaa

SEQ ID NO: 75334 - DNA, 287 bp, Zea mays
  Clone ID: MRT4577_168735C.1
acgggggggatttttttaaaaaggggggggttttgcataacatcttataacagtcaaacaaatagttgccgaaagatggcaccaaaggtaacaacatgcggggatatcctggagagcccaaacatggatttcatctttatacgaggggttcgggattcattagctgcgggacatatgaaaacagataccaagcgcttctggtgaaatttggcacaccattatcaaatctttgcacaacaaatctcttgggtacacccaagttaggcacagtcagcaggctttggctc

SEQ ID NO: 75335 - DNA, 447 bp, Zea mays
  Clone ID: MRT4577_168737C.1
ggggccccaaggaccaaaaaaactaaaaaaaaaagccagggccccgagggccccaagggtacaaaccagcaaccccagggtcccctggggcgcgaggggggggaaaggggggccccagggggcccaccgggtttaaaagatcaaaaagatcaaaaaccccgggccccccccccccaagggcgaaaaggggaaaaccgggggccggggcggggggaaccaggggggccaccccgggggccgaaatggggggaaaaaggggcaccggggggaaagggggaaacggggaaaacgccccccatcccaccacccggaagccccaggggcaaaaccgggggagcccgggggggggacagaccgacccaaaccgcgttaagcgcccggccccctccgcccggtggaaacccgggaaacccggcgggccaatgaattttccaaaccccccaaagc

SEQ ID NO: 75336 - DNA, 619 bp, Zea mays
  Clone ID: MRT4577_168738C.1
cggacctcccattaatgtggaatttgcggacctgaattatatattgcaagttgacatcgtcaattaatccacaactcttctctttgactcggtgaaacaagaatctcgctggctaaaccaaccgtactgatcgcttactttaccctttatttctttagtgatatgtcttccttagagattcatccattgtagatccccacttcccttctttttgatttcccttctatttatatatgatatagacctaaggtgttatactaagaaaactctttcggcttatctatgtctcactttatttagaatctctggaataaaaaattgctctaccctttatgtaatgatacccagagactattaaatactaaagaatatactaactactaattgtattaaaacctacttaagataggatgattaatatatcttaatacaggctgactaatatatacattctaatgaggagtcatactcctaaaacgaactctctctcagaactatgaatcagaatatcctgcactatgattgactctttcttttgcttttttatttccattttttctattttattgaaagtggatcgatttacagaacgtatatgatactcatatactccagataa

SEQ ID NO: 75337 - DNA, 326 bp, Zea mays
  Clone ID: MRT4577_168739C.1
cccacgcgtccgcccacgcgtccgggtaatgcttttaaaataatccagtaaaatttttaagcgggaacgatgatttgttgggggacattaataaggtttgagcagggaagggatccaaaatttgtggttgggggagggtaaccatatttggttgggtccatatgttaggttttggttggttccataataaagatttttatggtggtttcctggcttccatccactccacaattaaggtgggcaaaggatttatgtccatgcttgccagttttttgccaggggtgtgaagtttttgtttggccatattttaaaaaagggggatggaa

SEQ ID NO: 75338 - DNA, 352 bp, Zea mays
  Clone ID: MRT4577_16873C.1
ttacataaatattatactagcatttaccatctcacttctaggaatactagtatatcgctcacacctcatatcctccctactatgcctagaaggaataatactatcgctgttcattatagctactctcataaccctcaacacccactccctcttagccaatattgtgcctattgccatactagtctttgccgcctgcgaagagcggtgggcctagccctactagtctcaatctccaacacatatggcctagactacgtacataacctaaacctactccaatgctaaaactaatcgtcccaacaatatatactaccactgacatgatttccaaaaaacacataatttgaatcac

SEQ ID NO: 75339 - DNA, 164 bp, Zea mays
  Clone ID: MRT4577_168740C.1
cgttagtttgctcttgttgtgctgatgctgctttggccctatcaagctctcgtgtgagggccgtggccacttccagcgttcctttgtatacatagagagacgacatatccttagtgctgccaaagccatggaggttaccctcctctccttctagaactgaaact

SEQ ID NO: 75340 - DNA, 638 bp, Zea mays
  Clone ID: MRT4577_168741C.1
ccgggcgaggcgatgaccatctccactccctctcctccctagtagtgtataaaaagccggcgccggccgtcgtcccctacccacccacccaccccgggcccctcctcccgctccatccatggccgccaacctcccggacgccgacgccgcggggttcaagctgttcggcaaggtcatccagccccccgacgcgcaaaaacgcggggcggacgagggcgacgacccgacgccacagacggcccttcctcctcctcctccccctcccccgcccccgcccccgcagcaggcgcccgcggctgggggtcccggcgccgagccgctgccgtgcccgcggtgcggcagccgggagaccaagttctgctacttcaacaactacaacgtgcggcagccgcgccacctctgccgcgcctgccgccgctactggacggccggcggcgcgctccgccgcgtggcctccgcgtccccgggccgccgcaggccgcgccccaccgcccgatcggcgcccgtcgctgccgccgcgtcgtccgcccccgcagccgccgaggaggtgggcgggccgcgttgactcggcggtcgtaggggggcgcggggtagggctccgccttccttcccgcgtgatgccggacggccggaagctt

SEQ ID NO: 75341 - DNA, 166 bp, Zea mays
  Clone ID: MRT4577_168742C.1
gtacctcgaaggccggccgggtaaattttttgccgccgctgccgctccagtaccagtctgctccggcgcagcacctcagcccaggcgcccatcgcttcgccagtctcatacggtcatggaccgcgtaggtcacgcggtgctgctgatgctgctcctggcgctggcg

SEQ ID NO: 75342 - DNA, 559 bp, Zea mays
  Clone ID: MRT4577_168743C.1
tacctcgagggacggccgggacctctcctcccgattcggtccgattgctttcctctatgtcgccggcctcatgatgtagcaccgcattgctcagcgcttccgtctcaacgtttgcaatgaggaccactgccatccgcgctggaacgagattaagcgcagagctgtgctgcaatgctaagtctgcaagccactgtccatctatgaggtcggcggtcgtgtctccgcacgacatggacgaccgtgtcaagatcctcttcacctcggtctgccacaccgacgtctacttctggcctgccaaggggcagactcccatgttccctcggttctttggccacgaggttggaggtatcatacaaagtgccggagagcgtgtgactgacgtatatccgggcgaccatgtctttcctgagttcactgcggagcgcaccgaccgtgcccactgcaagtcaccacataggtacacgtctgatctgatcaggatctacaccaaccgccgcgagatgattgcccaccgccaatcacgtccttcccatccctgcaaaacccatctaccactttg

SEQ ID NO: 75343 - DNA, 189 bp, Zea mays
  Clone ID: MRT4577_168745C.1
ctcctcgcattgtccttgcatccgattgtctatctttcttccaaccaaagaccgatggcgcccagggccgttaagaagcgcgtggggatgaagccggtggaggaggagcccgcggtcgatatgacgaccgccgggaagaagcccatggctgataagcgggttctcgttggcatgttcgtcggctaggat

SEQ ID NO: 75344 - DNA, 179 bp, Zea mays
  Clone ID: MRT4577_168746C.1
tcgatccagaccaggagaatgcctcgtatgaggagggtctttaatacacgctgtatgttgaagattgtctccccacccgtctcgtgacctaaatacctttagaaatatggaaaattcagagtggagttgagcgtgactatgcatcatgaattagcgcccccggatgctatgatcacagt

SEQ ID NO: 75345 - DNA, 173 bp, Zea mays
  Clone ID: MRT4577_168747C.1
gccgggtcgaccgactcttacgatcataaacaatatgtcatcatttttgacttttctgtcaagcaaccttctcaggaattggtcaacataactcaggccactggtaaatgtacaatgaacatcttgatcaagccattaaccttttggagcatactaatctttgcagtaccaac

SEQ ID NO: 75346 - DNA, 746 bp, Zea mays
  Clone ID: MRT4577_168748C.1
ggatcacatcctcaagtcgcctactctcccactgtccccgaatctctcacccgaggggggaaaacccaaaactacaaaaatctcgccgccgaccaccgccacagcgacggccatgtcggtggacgcccccgtcccgacgctgcgtccggaggagcgggcaggcctcctggcgctgctcgcatccgctgcgcgcccgctggccgacgttgtagccgacttcctcgcgcgcttcccccgcgagcgccgcctccgcgtcggcgctacgctctgcttcctcctagaggacaagaaaatgcttcatgcaaccggtcgtctaatcgcatttgcaattcttcatcagagctattcctcacagccagtaaatccctatgttcctctgctgttaaatgcagcttgtgatgaatcatcagataaatcagaacaagcatttgtccaacttttgttgacttcagccagcggagacaataacaatgaggtgctgcaaaagtcagctgtagattacgtaaatgggcctgttgctgcatcacaggccttattgccacgggaacagcttgagaagcaattctgcaggagtattgtacagcctcagcctcaagttagtagtttcagaagcgctactgttagatgcgctataccagatccagatatacctcagagtcgtgccaattcatcagagatatcagcgcctggaagcaaacaaaagtctacttctgatgatagagattctgctcttgttgctttactcc

SEQ ID NO: 75347 - DNA, 492 bp, Zea mays
  unsure (1)..(492): unsure at all n locations
  Clone ID: MRT4577_168749C.1
gcgtccgcanaaaaaaaaaaaaaaaaaaaaaaaaaaaaaaaaaaagaaaaaaaaaaaataaaaaaaaaaaggggagaaaaaaaaaaaaaataaaaaaaaagtgagaatattcttttaagagaacctaaatttcaattcactggtccggcgttctttacatcgcccgtgattggggggaacccttggcgccactccacttgtggggggggggggggggtatcccccctcggcgccagctgtgcggggtgcccgccgaggcccgccccgtttcgctctgtcccttcagttcctttgcctgcgtggcgttttgggcccgccccctgtcgggggggccttagggtgcggccccctttgttggtttcttggcaccctgccccgtttctgtcggttttggccgtgacggcccgatgcctttcccctttcttccctttcctttctttgttgcccgcgcctgtgtgtccctgtcctgcccctttttgcggggtctttttg

SEQ ID NO: 75348 - DNA, 410 bp, Zea mays
  Clone ID: MRT4577_16874C.1
aaaaaaaaaaaaaaaaaaaaaaaaaaaaaaaaaaaaaaaaaaaaaaaacacaacctaggtgaagaaaaacaaactaacatacacatacatacatacatcatatctcttttttcgtttcacctaaattctcttcacttcccccccttttccatcacccgtaactgttttttttccttccctttcccattttattccccttccatcacatccccctttctccatctaccttactttctaaaaaccccattctcttcgtccttaccaacatttcttctttcctgattttgaaaataaaacacacccctccagcccgctctttcatctcttgatggtttccttgcttcccaccaaaaccccccttccctttcctcctcccatacccccccttcctttttttttctatccttcct

SEQ ID NO: 75349 - DNA, 1158 bp, Zea mays
  Clone ID: MRT4577_168750C.1
gctcgagggtcgtggtcgacagaaatgcgatcaccagccagggtccaggaaccgcggtcgagtttgctcttgctttggtggagaagctgtatggcaaagagaagatggaggaggttgctggacctttgtacttgcgtcctcaacatggagttgaatataccatagaagaacttaattcggttgaatggaaatgtggcagcacacctcaggttcttgttccagttgctaatggttcagaggaaattgaagctgtcaatttgatagacgtgttgcgtagagcaggagcaaatgttatcgttgcgtcggtggaggagaagttacaaattgtgacccgtcgccataagtttaatctaattgctgatatgatgttggatgaagccattaaaatgcaatttgatttgattgtcatgccgggaggtttgcaaggtgctcagaagtttgctagtacaaagcaacttgttgacttactcaagaaacaagcagaatccaataaaccttatggtgcaatatgtgcctctccagctcatgtgcttgagccgcacggtttactgaagggcaagaaggcaacagcatttccacctatgtcacacctgctcacagaccagagcgcatgtgagcatagggttgttgtagatggtaaccttatcaccagtagagccccaggcactgcgacagagttcggcctagccattgttgaaaaactatttggtcgagataaagctgtcagtatagcaaaggagttgatctttatgtgagattgcactaatctggcggtatgagaagtatcataatgtggataaacataccatgaacctgatagtggttgcttctgtttctatgcctgaactggtaataggcttatagctgcctgaggattgcagttgaatgatactattacatcacactgtaaattgtgagccaagaatgtacgtcttgcatttggtaagaccgtaagagaaaggttattgtgactcgttacttgtaaatacgtgcactgactgttcaaagaaactaagaaagacaaggtggaggtgctaccttcccactacccaaaaaaaaaaaaaaaaaaaaaaaaataaaaaaaaaaaataaaaaaaaataataaaccaatttaaaaataaaaaaaaaaacaaaatatataaagtttactctaattat

SEQ ID NO: 75350 - DNA, 648 bp, Zea mays
  Clone ID: MRT4577_168751C.1
cggggatccctgtggactcgagggtcgtggtcgacagaattgtcgatcaccagccagggtccaggaaccgcagtcgagtttgctcttgctttggtggagaagctgtatggcaaagagaagatggaggaggttgctggacctttggtaagctacattacaagccatgactaagagcatgggggatccaaatggcttattgtatgccttaatggttattgttcacagcgaagctgttttttttttctctaaaatatatcttagttattttgtgtcaagcaggtatgttactgatccgtggtttcatccaacaagttgcagaattggccacattagaacttttttttaaaatctgacattatctactatacaattacttttattacctgatgattgtgtaattgctatccttcagtacttgcgtcctcaacatggagttgaatataccatagaagaacttaattcggttgaatggaaatgtggcagcacacctcaggttcttgttccagttgctaatgggtcagaggaaattgaagctgtcaatttgatagacgtgttgcgtagagcaggagcaaatgttatcgttgcggcggtggaggagagttacaaattgtgacccgtcgccattagtttaatctaattgctgatatg

SEQ ID NO: 75351 - DNA, 617 bp, Zea mays
  Clone ID: MRT4577_168752C.1
cccacgcgtccgcccacgcgtctgcccacgcggacgtgatctttatgtgagattgcactaatctggtggtagagaagtatcataatgtggataaacataccagaaacctgatagtggtgcttctgtttctatgcctgaactggtaataggcttatagctgcctgaggatttcagttgaatgatactattacatcacactgtaaattgtgagccaagaatgtacatcttgcattcggtaagaccataagagaaaggttattgtgactcgttacttgtaaatacgtgcactgttcaaagaaactaagaaagacaaggtggtggtgctaccttcccaccacccacctactctgcgtctgatcatcatggatttacacggggttaagaagctgtttggcaaaagagagagcgcaggacactgccagaaatcaggtcttcatgtcatggtaaactgtactgtatgctattgattttggccagaattgtactccttttcgacgcacgaactcttttttaccatcgttagtacagctcttcctttttattgctgttatgtgcatttttagatgttggattccgatagggaaccattacaacaaatatatgcacgaattccaacg

SEQ ID NO: 75352 - DNA, 432 bp, Zea mays
  unsure (1)..(432): unsure at all n locations
  Clone ID: MRT4577_168753C.1
caagagagccaaggagacgagggagaaaggagaggcgaagaagaaggagaaggcggngaacgngncgggcaagccgcggcactcgaacgacgncaaccgccccanagacaannaagncncgnggcggcccggccgggggcngnagccngnccncggcnaccgngcggcggcncaagaagnacaagacgcggcccaagaaggaccgcgccgggaaggngcncaggaacgannnncagncnaaagagcnccccaacacccgcancgagcccgaccgccggnggnncggcaaaacgcgcggngngggccagccacagcnnngaaaggnccgggaggaaccccagaggcggcnnnccgacaaccccagngncanccngaaagaacggaagcngccacnancgcgccngcaagaacancaaaagcaagcgaaggcac

SEQ ID NO: 75353 - DNA, 430 bp, Zea mays
  Clone ID: MRT4577_168754C.1
cataaggagatacatatcatctgacttgaattagttacaaaggtcaaggacccatggcacaaacaatgactcgtagtctggtactccatagtaaaactgtacaaaggaacaccaaacttgtgttggactcaataaatccacaacctcttaagatgatctgaggctgagcggcttcaagcaaacatgcttaaatttactttaaggccaccttaaaaggagttttatagtcagttcacaacaatggtaaaatttgcctagtacctaggttaaggtccctcaaacagatcatgaaaaactgtacaggtggtacagtagccccataaaattattgtacgtagcagtgactgtatccctgttataatgttgcacctatggatgcacatttttgaacatttgatggattaatgatgtactgttgcccctctgaatg

SEQ ID NO: 75354 - DNA, 380 bp, Zea mays
  Clone ID: MRT4577_168755C.1
acaacagcagggatatttttacacatgatggtgaaaaaaatttctttttgaagactcttctaaacaacaaaattttatttacgccttttggagcaaaattttgtgatgcagccattggctaaaacctttaccccgaacatccccaaatatttcaaataaagtttttcttaaaaaggaccccactttttgttttgggcctcaattcggtctattaaatcttccacttgggcctttttgggaaggtccctaaaatgaccgtcttggggccccatctcccccgttttcttttcttgaaaaaacccattaattttttggccacacccctcttagcacaactttgggattttggttccgtcctgagcctctagaaaccgcaccgg

SEQ ID NO: 75355 - DNA, 234 bp, Zea mays
  unsure (1)..(234): unsure at all n locations
  Clone ID: MRT4577_168756C.1
ccaccacctcgccggccacactcgttttttctactagccacaggcacaggcaggctctggggctcagtccacccatcgtgggggatggcttcntccttcgccgtggcaacggtcccttcgctggcggccccggcggccaaaaagcggtccgtcggcgtcacgtacttggagggcatgaacgcctacagcggcctcaaggggctcaacatggtgaacatgctcggggtgcgcaag

SEQ ID NO: 75356 - DNA, 280 bp, Zea mays
  Clone ID: MRT4577_168757C.1
gtttccagtttgatgttgctgggtggttgagtgagtgaattttcatgtggctgggtgggtttttgcctttttctcttgccctgttcctggtgccttctgatggggctggaatagttgaggtggatggttctaccctttctgccttctgtttgggacccagctggtgttctttggtttgctttcttcaggctctagggctgtgctatccaatacagtaaacaacatgcggctgtttaaagttaagccaattaaaatcacataagattaaaattccttcctc

SEQ ID NO: 75357 - DNA, 509 bp, Zea mays
  Clone ID: MRT4577_168758C.1
ctagctgccgcaactgccgccgccactcccgcgctcggagacgtgccgcccaagctcgacccgtcgcaggaggtcgtatgagttcctccgagtgagcggccgcgacgactgcgcacggccttccctggcccccagatcagcccgctcggcctttccccctggaagatcggtataggacactcgccgaggcataacgtctcaatgtactgagaagggcctccgcggtcaccatgaagctcaccgtccataaccaggcaaggcaaggtctcacggctgcccctccgacgcgaagctcgtcatctaggcgctctaggagccacagaggtaccgcaagaaggacaagaacatgcaagcacagcagtgctcatcagcctcaacgacgtcctctatatcgccaggaccataaagtgcagctccatgtcctaggaactggccgccaccgccgaggatatcctcgctaccagcgccttcgtgcgttgcaccgacgacggtgagaaccccaaggacct

SEQ ID NO: 75358 - DNA, 263 bp, Zea mays
  Clone ID: MRT4577_168759C.1
cagtcgcgacttagagatgattttttctttttcgagccagcttgctggtgcaccatctcataaagggcggggcggccgcatatgatccgctcccggctgaagagtcacgcggcggcaagatcaacgagctccagggccacttggcagactacgcctgtcaacaccgaaagcacgggcactatgcgctgctccgcatgcttgacgggttcacgctcgtatcctgccttctgctgctgcttcctggcaaacccgtctccgccacc

SEQ ID NO: 75359 - DNA, 588 bp, Zea mays
  Clone ID: MRT4577_16875C.1
aaaccataaggccatcttttttttatattacgattttattttatatgatagtaacatatgaaaaactgtatgtcatcatatacaggtaaattttacaagatgaagacaatagacacaacgcatcatattcaggtaccataggtacaagagcccccagaaggggatctgtagacccaagcgacgagttgttcttcattgagcactgcctctattcgagttttttgccactagagatctgtagaagctcaggaaccttacggtgaattcttcaatttttatgaagcattggatggtttcaccatggtcatgagcctcagcggtaaaaccttctatgttcatatacctcgttttaaagtttgcctcccgtgatttgtttcctttgcactgccctttggaatatggttcaagtccgaggccaattcatcaacgctgtgctggaagtcttcatccttgtcccttttcagttccgcgaccaggtgagagaaaatgaaatgaggtgacacatcatgttcaatcatttttctgatctttccccggacaagaaacagttgctttggacttggctcctccatgatattgctggccaca

SEQ ID NO: 75360 - DNA, 257 bp, Zea mays
  Clone ID: MRT4577_168760C.1
tcgttctcgcgtgccaacttatcgatctgctggggcatcaaaaaggcacttgggctctaatctcaaccacagcttcaaaatcgaaggacacagcaccaacgaatgcatagcgaagcacctaatcatgccacgtgatcaagatctcactcgtagtcagaggtatatgctacaaggaattcatgttgaccaacacgtcttacataatatagactcccaggatccagaaggctacatggccctctaggcgagtcgtgtac

SEQ ID NO: 75361 - DNA, 372 bp, Zea mays
  Clone ID: MRT4577_168761C.1
ccaggcctcgggcgagccggaggtgtgtccgccgtaaaatggggagcctcgggcgagacggaagtctctcgaggtcggctgcccttggccgaggctaggctcgggtgaagcgtgatcgagtcactcgtgtggactgatccctgacttaatcgtacccatcaggcctttgcagctttatgctgatgggggttaccagatgagaattaggcgtcttaagggtacccctaattatggtccccgacacttatagttcaaatctgaattatatgaagaaattcaattaaacgaactaaatctaatatttatagcaaacaatttgataattgtaccaaaattttatatactataggaacacactacaaaactttgggg

SEQ ID NO: 75362 - DNA, 379 bp, Zea mays
  Clone ID: MRT4577_168762C.1
ttgaaagatctttgtggggggttaataaatgaggcctgccgttctttccccacgagctcgatgtaaggtctaatcattcctccgctgtctatgttagctttcaattcgagtcatcttagttgtggaatgacgcaccgttttaacgactaattcaattgatgaatagattaatagttatattagtcacgatggtttcttttatataggcggtgtgcgaggtattgatctctaggttttttgacatgtctgagtgctgtcccttcggagtgcagggatgcattctcttgtttgttttttaatggtgataattgtgggtatgtctaggtgatgttaaagtgttttcttacttaagatgtggttattgtgttaataagtatga

SEQ ID NO: 75363 - DNA, 300 bp, Zea mays
  Clone ID: MRT4577_168763C.1
caacaaggaccagatcgccaaggatgtgaagcagttctatgaccaggccctacagcaggccgtggtggatgatgacgccaacaacgccaaggctgtggtgaagaccttccacgagacgcttgactactgtggctccagcacactgactgctttgaccacctcagtgctcaagaacaatttgtgtccctcgggcagcaacatcatcagcaacctcttcaaggaggactgccaccagaagatcgatgatctcttctccgggaagctgtacctcatcggcattgctgccatcgtggtcgctgt

SEQ ID NO: 75364 - DNA, 185 bp, Zea mays
  Clone ID: MRT4577_168764C.1
ggcgggtgaaacacacacatgttggcttaggaaacacaggggccggatggtatcatcatctacagggcagggttgcaggtccgaaagaaaggggcctcctttagcggtctctctcgcgggcctaggccgcgctaggcgcgccacagctcaggggcacggcgggtggcccggccctggggcgtggg

SEQ ID NO: 75365 - DNA, 169 bp, Zea mays
  Clone ID: MRT4577_168765C.1
accacttcaattgtgagacaaatatttaagttgcggtacaaacaccatatactctggtatgcatattgtaccgagaacccctgagggtcataataggatcatataatctgaatgaacatgccattttatgctacctagtttcaaacactgatcccatcagtcatcacga

SEQ ID NO: 75366 - DNA, 271 bp, Zea mays
  Clone ID: MRT4577_168766C.1
gtgttataaaaaattatttgttttgtttgtaaaattttcatcgggggacaaaaaaaacagtggtggttaagttaaacattttaaagaaaaagaaaacactcacgcctaacataagaacctaatttccaccccggttattaaagtcttacccccaaagttttgaaccgcgcaaggaccgatttttaagaaccggaagaaacctaaccccacacgattctatccgggccgatcccggggggggaatgggtcccaagagcgtgggtggcacccc

SEQ ID NO: 75367 - DNA, 232 bp, Zea mays
  Clone ID: MRT4577_168767C.1
ggggacgcgcgctcactagcaaaaagcaggcctcttccctccggcgagccctgcttgtgcggggaccgagaggcgcccagctcttccccattcccgtaggcaacaagcgccgtgccttctcctacgcgttccccggtgcagcgcgctctctcaaagacgcttataatgcgccgtcgccgattatgccgacgctgccgtgaggtgatgcgcttgcagtcacgcagagcacctt

SEQ ID NO: 75368 - DNA, 204 bp, Zea mays
  unsure (1)..(204): unsure at all n locations
  Clone ID: MRT4577_168768C.1
gaacaacgaanacaatcggcacgcgcacctcttatccgctggtcgacacacctacagctccgggaccctactacggcggcgatggcgtcatccggcgccccgggcccggcggcggcaatggccagtgacgacacggaggacgaccagctcgcctccatgtacacggaagatatcatccgggcctaccgccttcacgacaacaac

SEQ ID NO: 75369 - DNA, 234 bp, Zea mays
  Clone ID: MRT4577_168769C.1
ttgcctccgcctagccctcctactgctgctcctttgggtaacccaaagcgagcagcccacccacagacgcgcatactccttccgataggccctgccatcggcgggcaagcgcatcgcaattccgctgcatactgtcgcggaacacctcatgaaggtcacgaaacgcatgagaccatatatgctccctcgcaagctatcttacttaaccccaccggactgcaaagacctgtacaa

SEQ ID NO: 75370 - DNA, 303 bp, Zea mays
  Clone ID: MRT4577_16876C.1
gaagccgaacatgggccgcgtgcgcagcaagactgtgaagaaggcggcccgggtcatcatcgagaagtactacagcgcgcctgaggtgaatgactttcacacgaacaagcgcgtgtgcgaggagatcgccatcatccccagcaaaaaccttcggaacaagatagccggctatgtcacgcatctgatgaagcggattcagagaggtcctgtgagaggcatctccatcaagttgcaggaagaagagagggagaggagagataattatgttcctgaggtctcagccctagatcaggagatcattga

SEQ ID NO: 75371 - DNA, 323 bp, Zea mays
  unsure (1)..(323): unsure at all n locations
  Clone ID: MRT4577_168770C.1
aactggtggtacaggcttccgctttccattttctgatgttagtcgcaagccacatatatacnggcagtngggtgcagttaccgaactggcggtccacgctcccgctttacatttcctgatgggagccgtgtaaagtaatcctggggtgtgtacttgtgtcatcaaccatgcctgccgctttgacaaaacttaatcaaaaataaaaactcaaaaatctacaaaacaaactgaaactaaaaaaatcaattgaagcaaccaaagggggggccgattctagagatctcaatctaacgtccgcccccttggaatgttaaaattttttt

SEQ ID NO: 75372 - DNA, 416 bp, Zea mays
  Clone ID: MRT4577_168771C.1
atcatagaagggtcggcaagaaccgaagtgtgcgtcgcgcgagggctcatactgctgtctctgcagctcatggaaggtccaccgacgggcatgagcgcccgctcgccgcgcgtaagcgcgccacatggctccctcgccacgacacccaaggtgacgatgctgtcgcagcacgctgtgctacaacgcgggagacatgcgaagacactcccatgcttcactcctgattgctcctgcagattgagagatcggctctgctacgtcatattgtactgcctgatgcttgagccgaggccattacgcgaagccacaactcttacatgtgatgcgacgaccgacgacgactacgctgcgtctcgagagcttctgctcaagggaaacgtgcttcaaggtatccaagtgagccttacggatatgcg

SEQ ID NO: 75373 - DNA, 273 bp, Zea mays
  Clone ID: MRT4577_168772C.1
tttttctttttaaggggttgccacttattcaggggggggacatcatccaagaggggcgccctataatacaaaaacatgatcgaggccatgatcttgtagcatcatcttatgcacttggtgagattccattttttgacgtgacctaatcacattacttcgccagctttgtcacctaacttgagattttttggattttttagatcctgagacaccttaagtagcaaagatcataattcatatgcgcttttatattctttggatgtaaaaaagaat

SEQ ID NO: 75374 - DNA, 423 bp, Zea mays
  Clone ID: MRT4577_168773C.1
atggactctaaaggcaaggggaaggtgttcgacgagaaggagatgatccccatcgacgacgagcccaagggagaaaagatcgtcgactcgagatcagaaaagtggaaggagggcaagaagaagtgcataaagaagataatctactatgacagtgccacttcttcttcttcgcaaaaggacgataacgcctctccttccaaacaaaaggcgagaagagtacaacaaggtaaatggcttgcaaaatgccaagtaaacggtatcaaggtcctttgggttaaatccccaagatttcccatttcttttgactttcatttgcatttttggatcacctattcaccccctttaggtgctctcacctgcaacagcggcacccacgagaggagcggtggcggtggtcatacaaagagcggcagtggcaactga

SEQ ID NO: 75375 - DNA, 441 bp, Zea mays
  Clone ID: MRT4577_168774C.1
aaatgaaccaacgatctcattcagacagaaatgcatcaaacattgcacccaaaggtgcgtaataccgtaccattccagacattcaaatccccctatatatcgaaaccatcactctagcaaatgccacaaacagaagttaaaaggttcccagctatgcctgggtggcattctttatgttgcagcaaacaaggatacatttctcgcttgcgaggttgattgagcttactattgcccagttcggtgacagcagatccagagatcactcccatgctttaagggcaccacccctgccaattgtcttgatgatagcctgcttactgttgcacgcactgcactctctgggctccgcccggaatctggtggttctactcgtacgcctcctgggcagcgggagcttgctatctgcgcatttcttgctagatgctggtcacatcatgcata

SEQ ID NO: 75376 - DNA, 749 bp, Zea mays
  Clone ID: MRT4577_168775C.1
cattgggtacctcgaggccggccgggatacattctcaatggtatttgctcgctccgccatcaacctcgcccgccccgccggctcgctgttcgctcagcgcgccgcgccctccagtgccttttccaagatcggtgcggtcagaacactgacagcctcttcctcgcgacagggcaaggttcttctttgcttgtacaatggcaaggagcacgccaagcaggagcctcgtctcctcggtaccacagagaacgagctcggtatccgcaagtggctcgaggaccagggacacactctcgttactacctctgacaaggagggcgagagcagcgtgttcaagaaggagatggttgacgctgaagtcattatcaccactcccttccaccccggttacctcaccgccgaccgcctgaagaagtgcaagaacctcaagatcgccgtcaccgccggtattggttctgaccacgtcgacctgaacgaggccaacaaaaccaacggcggcatcacccgtcgccgaggtcaccggctccaacgtcgtctccgtcgccgagcacgtcgtcatgaccatcctcactctcgtccgcaacttcggtcccgctcgcgagcagatcgcccgcggtgactgggacgtcgccgaggccgccaagaacgagttcgatctcgagggcaaggttgtcggtaccgttgccgttggccgtattggcgagcgtgtccttcgccctctgaaggccttcgattgcaaagagctcctctac

SEQ ID NO: 75377 - DNA, 309 bp, Zea mays
  Clone ID: MRT4577_168776C.1
tcggactcgtgggtcctgacgcttgtgctgtctcttggggttctagatcgctagcgccttccttttttttttttttttttttttttttttttttttttttttttttttttttttttttttttttttttttttttttttttttttttaaaggaattctaacatcgttcgtgtatacctttctttttacccctcaagggaaaaaactaaagttttgttcatctcccaccaaatcttttccattattcttggggtgacttgattttttacccatcccttgaactttgctgggccgaaatccgaaacctttgg

SEQ ID NO: 75378 - DNA, 651 bp, Zea mays
  Clone ID: MRT4577_168777C.1
cccacgcgtccgcaacgagggatcggacaacagatcctgcggtggcgtctgtctgtggagggcttgggggtcctcgtccccgattccggtggacggaggcgtatcgtctagctcggagtaggagatcatctattcgactggaggagaatcaagtggcaagacatttgttttcaaggcgatgcgataatttttatcgtcgtcttgttggctgccatgctaggcccgagttcattgcttccagttcgccggaagttctcgacgatctccggcatgcatccatggaggtgggcttctcgacagatgaaagggaggtataccaggattcagcgtcgaaactgcagataaaggaaaaaagcgtcgtgaagagctatgctgcgaaatttgtgaagctgatcacatcctagatgagtgtccgatgtttaatggtccaaagccacaggcagctctctgtgggtttgcgggaggagagtctggtttcttccaaatcccaacttggggagcaaagggtgtaattccgaggtctgatggggtcactgctttcataacagtaaaggaaggtaatgtttctgctgacctcgttaaatctgaactttctcgactcattcctgtaaagtggaattggtcagtacagaagcatgcatacggttttct

SEQ ID NO: 75379 - DNA, 494 bp, Zea mays
  Clone ID: MRT4577_168778C.1
gttccattcccagccaagcccaccttcaagctaggtcatatcacccgcgtttggaactttccatagcacctacagcggagtggggagctgatacaattccggcatacacacacagatgcccgtaatgctagacgggtctcaggagctcaccgatcggcgactgggcatgagcgattcacatgcgagataatggccagggacataggccactcactaataattctgaccgctgatcgctagagcgggagcatggccggtgagcttcatcagatcaccgaggcggattttcctgttaataagcctatcataagctgcgtagatagagtagaccacctcattaatcgtgcgcgagcactaagagcacaatttcaggtacgacatgaagaggcatgcctatctattccattagaaacacatgctgcagactgggtgaggacgaaaccggtagccttcacacaggaattgacacattgctaggcgacgaattgtccatg

SEQ ID NO: 75380 - DNA, 1019 bp, Zea mays
  Clone ID: MRT4577_168779C.1
cctcgaggccggccgggagtacaacgcgcgactccatacaacaatacaaacaaagctgtaacgtactgtaaaagtaagatatggaggccgccggcggcggcggcgaggttcacaaggctagcaacgacaaggaggagcatttcgtgctcgtgcacggcgccggccacggcgcctggtgctggttcaagctggcgtgcctgctccggggctccggccgccaccgcgtctcctgcgtcgacctcgccggggccgccggcagcctcgtcgacccggacgacgtccgctcgttcgacgagtacgacgcgccgctcctcgacttgatggccgccttgccggacgacggccgcaaggtggttctggtagggcatagcgcaggaggactgagcgtcacccacgcgatgcatctgttcagagacaagatcaagcaggccatcttcgtagcagcgaccatgctcccgttcgggtaccagtcggagcaagatatcaaagatggagcacctgatctatccgagttcggcgacgacgtttacgacctcaagttcagtctgggagacgaccgccctccgacgagcgtggcgctgagagaggagcaccagcgcgcgatcctgtaccagcaatgcacccacgaggactccacgctcgcatccattctgctgcgcccgtggccggcagctctgggcgccgccaggttcggccgcgccgacgacggcgccgtgaacactgtgcgtcgggtgtacgtgaagacggccaacgaccgcatgctgaagccggagcagcaggaggcgatggtccgccggtggccgccgagcgaggtggcggcgatggacaccgaccacagccctttcttctccgcgccagagcgcctcttcgagctgatcatcaagtcattgtgaatctctcatctgtattaatcgcttgtgttcttccagactccagtgcctggtgctgtcctgtatgccatgccaaccaataagttatcatttatttatcaataaattatctcaaccaagttatcattt

SEQ ID NO: 75381 - DNA, 457 bp, Zea mays
  Clone ID: MRT4577_16877C.1
gggcccataaactttttactcgcgcgtccaattaatttgattggttcagcttacgggcaagtataaactttggcggggggggggggatttttagcataaatagccagcaggggggcccccgaatttaaaagggttgtctaatggcaaagtcaacaacctactgtttttgacagttttttattccattttagcaagtggccccccatttggacttttttttagacacaccaacaaggaacttttgggtcccctcaaaagccaaaatgagccacctcctcattttttctttgggtttaatttttataatccttaaaaaacccaaaatattccaagggttcctttttttgctcctcatcagcaccatccattatgtttgaaacaaattttttttccttaaaaccaggggggagcaccacaactgggcctttggatttaataatatttttttggaattttt

SEQ ID NO: 75382 - DNA, 1097 bp, Zea mays
  Clone ID: MRT4577_168780C.1
taacccttttttttttttttttttttaaatgataacttggttgagataatttattgataaataaatgataacttattggttggcatggcatacaggacagcaccaggcactggagtctggaagaacacaagcgattaatacagatgagagattcacaatgacttgatgatcagctcgaagaggcgctctggcgcggagaagaaagggctgtggtcggtgtccatcgccgccacctcgctcggcggccaccggcggaccatcgcctcctgctgctccggcttcagcatgcggtcgttggccgtcttcacgtacacccgacgcacagtgttcacggcgccgtcgtcggcgcggccgaacctggcggcgcccagagctgccggccacgggcgcagcagaatggatgcgagcgtggagtcctcgtgggtgcattgctggtacaggatcgcgcgctggtgctcctctctcagcgccacgctcgtcggagggcggtcgtctcccagactgaacttgaggtcgtaaacgtcgtcgccgaactcggatagatcaggtgctccatctttgatatcttgctccgactggtacccgaacgggagcatggtcgctgctacgaagatggcctgcttgatcttgtctctgaacagatgcatcgcgtgggtgacgctcagtcctcctgcgctatgccctaccagaaccacctgccaaaacacagcatgaacttgcaccatgcatgtatggcaaggcaacagagctagctggcacagctaccttgcggccgtcgtccggcaaggcggccatcaagtcgaggagcggcgcgtcgtactcgtcgaacgagcggacgtcgtccgggtcgacgaggctgccggcggccccggcgaggtcgacgcaggagacgcggtggcggccggagccccggagcaggcacgccagcttgaaccagcaccaggcgccgtggccggcgccgtgcacgagcacgaaatgctcctccttgtcgttgctagccttgtgaacctcgccgccgccgccggcggcctccatatcttacttttacagtacgttacagctttgtttgtattgttgtatggagtcgcgccgcgtcc

SEQ ID NO: 75383 - DNA, 895 bp, Zea mays
  Clone ID: MRT4577_168781C.1
gggagatactctgcacatttcagagggcaagctcatttctttggtacgaaggaagatgcggccttcctactaattttgattctaactattgctatgcattaggctatggcgctggtgcccttctccaaagtgggaagacaggacttatttcctcggttggcaaccttgcggctccagttgaagaatggactgttggtggaacagcattaacatcactgatggatgttgagaggaggcacggcaagttcaagccagtgatcaagaaggctatggtcgaacttgatgctgcacctttcaagaaatatgcatcgatgcgtgatgagtgggccctcaagaacagatacatcagccctggccccatccagttcagtggccctggaagtaatgactcgaaccatactttgatgctggaactcggtgctgcgctatagagatgcgtcctttactttgttcttacagtttttgggagtggagactggccactggagcagcctgcaggtctccatattgtgtgtgaaattgtttaataagaggtttgatgggagttttttgcgtagccgactggatgtagtagcaaaataagaacagggttttttagttttttttgtatgatttacgcaccaactgaccggtcttgtagctccgattctgttccccctggttggctggttgcaatctcttgagaatgaacaaaatgaagttgaaccatgagactgattcagttcgcttgcttccagtagcaggttattacacattgtcgtttctgaggtccagagatagtacgtgtcctactcttgaataatgtattcactctgttttaagttataagtcgagacttcactttacattatggaactagttgcatagtaaagcattgcaatctgaagctcacagt

SEQ ID NO: 75384 - DNA, 133 bp, Zea mays
  Clone ID: MRT4577_168782C.1
ccctctcgtgctgttcttcctcaacttcgccatccgttactcgctctcctgcatcgcctgtcacaatatcaacatcattactgtctttactatcttcacggcttacggggttggtcatctattctctcagtcg

SEQ ID NO: 75385 - DNA, 539 bp, Zea mays
  Clone ID: MRT4577_168783C.1
ctcgagcggcggcgagatttctatcatcaccccctcctattccacgaatccagagagtctgcgagagggcgcgcgtctcatggctgctgtgaccgggatcgagaccgtgccggtctaagtgaccaacgaggaggacccgatcaccgagatcttcttcgacgccaagtggcggattccgctcccgagaagacgaacgagacgcggaaccttagctccactacacgagactgccagaataggagacgaaagggagtcgaatgctgagcccctcggaaatcccacaaagggactggctcccctctgacttcaccttcggtgccgccacttcagcgtatcaatcgtttgcgcccgcaccgaagatggaaagggggaaagcaactgggatcacttctgccacaatcatccggaaaggatactggacgggagcaattcagacattggagcgaattcccaccatatgcacaaaacgcacgtcagattgttcaaggaaatgggcatgggacgatataggacctctatctcttgacacacaacactgc

SEQ ID NO: 75386 - DNA, 735 bp, Zea mays
  Clone ID: MRT4577_168784C.1
aagctccactgatgcgcgcgcggggccgcaaagcaatggccgccgcagcggcagcagcaggcgcggcatcctcccttgtcccctccacttcccagcgccgcctccccttccgtcccaccccgacccgccaacccctcctagccgccaacaagaccctgacgctctccccgaagccaccccgcctcctgcaccccctcgccgcgtccccctcctctccgcctccgcctgaggatgctgagccaaccgaccccgtcaagctcgccttcgcccgcgccgccgcctacaagaaggagagggctgatcccaagccaccgccaccgccaccgtcgcctccccctccgccgcagccttccgcgaaggagtccagcggcagcaaggaggccttcgagcgggcgctggagtacaggaacggcaacgggggaggactggacggcggctcctcgcttctcaatccgtcgccgactttcggccaaagcacgtttactagtaaagagggtgcatttggcaaagtggcaaagaaaaagggagggtatgcgtacgatgagaccgactttttgggcctcggtttctttgagaaaaacgttatcaaggtccaccaccagggctgtctcaaggaattgatcctttttcaaatgaagattctcctgaggtggagatagtagttggcgaccctaggaaatttgggaagcctcgtcgttccactgaaaatcaacctgaagatgctagcgagtctga

SEQ ID NO: 75387 - DNA, 2526 bp, Zea mays
  Clone ID: MRT4577_168785C.1
gttcgccccacgcgtccgcacacgctgccacgcacccacggtccgcggaccgcgacccacccgacccgcgatcgccatcgcctcacgcactcgcatcctcccggactacccataaaaccaccgcgacggcgacggcgacgggtcctcccggggcttcgcctacggcatattcccccgaggccccgaaccaaaccaaaccaaaccaaaccaaaccagcccagatcagcgaaacacactccgctctcccgagaccggacacatggcggcggcggcggtgacgtccaacggcggcgcagtggccgcaaatgggccggcgcccggccggctggcctccgtgtacagcgaggtgcagacgaaccggctcctgcacgcccttcccctcccctccgtcctccgctccaacttctcggtcgtcgtcggccccgccagctccgccgcgggcaaccccgatgagatcgccaagctcttccccaacctgttcggccagccctcggcgtcgctggtgccgtcggccgagcccgcggcgaccaggccgctcaagatcggcgttgtgctctccggtggacaggcgccgggcggccacaatgtcatctgcggcatctttgactatctacaggagcgtgcaaaaggcagcaccttgtatggatttaagggaggcccagctgggatcatgaagtgcaagtatgtagaactcacttcagactttgtgtatccctacagaaatcagggtggatttgatatgatctgcagtggaagggacaagattgaaacaccggagcagtttaagcaagctgaagacacggccaacaagcttgatttggatggacttgttgtcattggtggtgatgattcaaacaccaatgcctgcctccttggtgaatactttaggtcaaggaacatgaaaacccgtgttattggttgcccaaagactatcgatggggatctgaaatgtaaggaggttccaacaagctttggatttgatacagcttgcaagatatactctgaaatgattggcaatgttatgactgatgcaagatccactggaaaatactaccactttgtgaggcttatgggtcgtgctgcttctcacattacgctggaatgcgctttgcaaacacaccccaatgctgcactcattggggaagaggttgctgcaaagaagcaaacccttaagaatgtcacaaactacattactgatatcatctgcaagcgtgcagatcttggttacaactatggtgttatccttataccagaaggcctgattgatttcatcccagaggttcaaaaactcatcgcggaattgaatgaaattttagcacatgatgttgttgatgaggcaggggcctggaaaagcaagcttcaggctgaatcaagggagctgtttgagtttttgcccaaaactattcaggagcaacttatgcttgaaagagatccccatggcaatgttcaggttgcaaaaattgaaactgagaaaatgcttattagcatggtggaaactgaactggagaagagaaaagctgaggggagatactctgcacatttcagagggcaagctcatttctttgggtacgaaggaagatgcggccttcctactaattttgattctaactattgctatgcattaggctatggtgctggtgcccttctccaaagtgggaagacaggacttatttcgtcggttggcaaccttgcggctccagtagaagaatggactgttggtggaacagcattgacatcactgatggatgttgagaggaggcacggcaagttcaagccagtgatcaagaaggctatggtggaactcgatgctgcacctttcaagaaatatgcatcgttgagggatgagtgggccatcaagaacagatacatcagccctggccccatccagttcagcggccctggaagcgatgactcgaaccacaccttgatgctggaactcggtgctgagttatagagacgcgtccttcactttgttcttacagttttgggagtggagactggacactggagcagcctgcaggtctccatattgtgaattgtctaataagaggttcgatgggagttttttgggtaaccgactggatgtggtagaaaataagaactggggttctagttttttttgggtatgatttatgcagcaactgacttgtcttgtagccctgattctgttcccatgtttgcaatctcgtgagaacgaacaaattgtacactgtcgattgcttgcttccgttagcagattattgtacacggtcgtttgtccaaaaaaaaagacaaaaaaaaaaaaaaaaaaatagtgtttcatgtgacagttcctgctggatctgtggggcccgttgcctgtatgtggtcgtctaaaagaaccgcttcaggtttttttgggtattatttaagcgtcttgtagcccttctgttcccttgtttgcaatctcgggttattaaaaaaaaaaaaaaaaaaaaaaaaaagtactctgcgttgttaccgctgctgtatgaggaggcaagcagcctgtccccggggagcatgcgt

SEQ ID NO: 75388 - DNA, 268 bp, Zea mays
  Clone ID: MRT4577_168786C.1
attcggctcgagatgagattaagaacagtagttgatcttttccaactgtgattctacgggggaaaggacttcccacagaccacctgtagatcttgcattcgttgcggcgcgctattcatagtaaggtgccctgatgcaaaattactctgtgattaaggggcgcacacggatgggtcgaccttctgggtggcccatcataacaactagctacgactatgaggcaaccatggtttcatctagacttctgacatttacgaaagtgtcacat

SEQ ID NO: 75389 - DNA, 973 bp, Zea mays
  Clone ID: MRT4577_168787C.1
cattgggtacctcgaggccggccgggaaaaatttctcggggccccacgcactcgcacccttgggctaccccataaaaacgcccacgacggcgactggcctttcgattcgcccagggcaatattccccccggaccaaactagatcagcgaaacccactccgctctcccgagatcggacacatggcggcggcggcagtgacgtccaacggcggcgcagtggccgcgaacgggccggcgcccggcaggctggcctccgtgtacagcgaggtgcagacgagccggctcctgcacacgctgcccctcccctccgtcctccgctccaacttctcggtcgtcgacggccccgccagctccgccgcgggtaaccccgatgagatcgccaagctcttccccaacctgttcggccagccctcggcgtcgctggtgccttcggccgagcccgcggcgaccaggccgctaaaggtcggtgtcgtgctctctggtggacaggcgcccggcgggcacaatgtcatctgcggcatctttgattacctacaggagcgtgcaaaaggtagcaccttgcttggattcaagggaggccctgctgggatcatgaagtgcaaatatgtggagctcacttcagactttgtgtatccctacagaaaccagggcggattcgatatgatctgcagtggaagggacaagattgaaacaccggagcagttcaagcaagctgaagacacagccaacaagcttgatttggatggacttgttgtcattggtggtgatgattcaaacaccaatgcctgccttcttggtgaatactttaggtcaaggaacctgaagactcgtgttattggttgcccaaagactatcgatggagatctgaaatgtaaggaggtaccaacaagctttggatttgatactgcttgcaagatatactccgaaatgattggcaatgttatgactgatgcaagatccacaggaaatactac

SEQ ID NO: 75390 - DNA, 483 bp, Zea mays
  Clone ID: MRT4577_168788C.1
gctctgcccgtcccgcgccctgctactctgctactactcgcctatgtctgcttcgcacgcttgttgctgctgccgcgacgagtaccatcgcctgcactcgtcatcatcgtcgtaaggaagatccgcccgtgtgcctagttcatcctatgctatcgccataccttgtcgtcgtttgctgctcttcatcatgttatcgacgacgcttcgttcgccagtgaagctagctggtctgcgccctcgtcaacgccccctgcgtccgaagctcttctttcatgtgcctgtgacgccagcgtcaagtgattgatctaatagttgagaatcaagtgctattccgtggaagaacctcaaattttcaataagcaaggcaagtggacttctccctctgcatactctgtttgatcccaaataatacatttaataaagtttattcttttggatatatatgcataatttgacgggttacctattcagataacctttccc

SEQ ID NO: 75391 - DNA, 383 bp, Zea mays
  Clone ID: MRT4577_168789C.1
cttaggtcatctttgctaagaatgcctaaaccctggctcgacgcaggagattaattattgccgtggatacagcctttggaactggaatagcttgcttatgaaaaacattgtgcactgtgacttgaagaagcgacattttgcttgtgaattcaagggaccctcagtgcgcattatgcaagggtggtgatcttggactttcgaaagtgaaacgacagaccctcatctgtggaggcggccgaggaacacttgcctgggtggcccctgatcttctgaatggatgcaccctctgtgcgcctcagataaggcgcatgtgttctgttttgggattgggctgtggcttctgataccatgaggagatcgttttgccgctggccttggtgggt

SEQ ID NO: 75392 - DNA, 3131 bp, Zea mays
  Clone ID: MRT4577_16878C.1
tcttttttttttttttttttttttttttttttttttttttacttccaatatcgcttgcatttgacaagtcctggtaaaaacgtacagagaacagaaggaaacctctgtgctttttccaatttcgcttgcactcctgataaaaccacactgtacagagaataaaaaggaaccttccagcccaaaccaaagaagcccactctctctctctttttttccctgtttggcggacaaaatagaaaacgaagcccacttattaaaccccaacagcggcactttgcgctttgcactccaagaaaaagcttggcctatatttcatacgtgatgccaaccttgagcagctggtctttgggaatggccagcgccttgtggccctcggtcaggttcttcctcaggaacgtgtagatgtagttgaccactatcttcttgaggacggacgagttgggccccgccgacacgttggcctcccccatcaggtacaccacccctcgctccacctcccggtcgatgagctgcttctcctcctccgccgtctggctggcgtggaaggtgatccggcccgagtgcgtgctccccctcgactggatcgcctcctcgctgtgcacgacagagcccgtggaccgcctcggcctcggcggcgcctggtggtccgtcgccgcctcgtcgtcgttctccgcgtcgttctgcgcgaacgcgacctcctcctggatgaacatcttgagcctgtcggccaggaaggacgcgaagtccttgggctcctccagcgcgtcgctgtagccgtagcgcgcgacgcagcggaagatgcgctgctctctgggcccgacctgccggaacaggaacctctccgcgggcagcacgtgcgggatgggcaggtgcttgatggacatgaagaggaagatggagtgcacggacgggatcttcttgatgagtcgggggaacacgggcgggatgccctggaccagctccgtgtacaggagccccaccccggggatccgccgcacgtcgttcttctccagcagcgccgtcatctggttggtgggcacgatgtggtccagctcgtaccagtaccgcttcacgtggacgtagtgccacgtcgccatcagcgtcatgaggaccagcgcgaagcagaaggggaggtagccgccctggatgaacttggacaggatggacgagaggtagatcatctccgtgaggccgaacaccacgtagaagaggaggacgtagacgatgtgcttcttccatatgacgagcatcaccacggtcatcaggtgggtggtgatggagaacgtggtcaccacgcagatcccgtatgcgttgccaatgctggtggtggtcctgaaggcaatggtgacgatgatgctggccagccccatcatgaagttcacctccgggatgtacacctgcccttcgtacttcttggaggtgtggatcacttgcaccctggggagacagcccagcgacaaggccttggagaggatggcgaacgcgccagagagcatcgcctggcttgcgatgatggcagcaaggattgcgatgatgaaggttggccagaacagaggtgctgggatggatttgtagaaggtgtctccgacgttctccgggaatttccgcaggtacgccgcttggccgatgtaacacagtaccaccgatgggaacaagatgccgttgaagctgatctgaacggcccggatgttgaagtgtcctaggtcagcaaacatgccttccgtgcctgtgacacacaagatgacaccgccaagcgaaacccacccttccttcccgttccgtttgaagtactgcacgatgtaccacgggttgaaggcccgcagcacgccgacgtcgtggacgacgaggttgtagagcccgatgccggcgatgaggacgaaccacaccgagatgaccggggcgaaggtgtagccaaccttgtcggtgccgaagcgctggacggagaagagcaggaagagaatcgccacggagatccagaccacttgcgtctgagtcaggtttggcgccttctccttgatcccgctcaccgcagacagcacagatattgacggcgtaagggtgccgtcgcccatgaccatggacgtgccgaggatcgtgagggtgaagagcaggatcttggctgccctgctggactcgagcttctgcttgaaccactgcgccctcttcagctgcgaggtcggcgcttcgatgctgtagttggacaccatggcgtcctccgcctgctggttggggatcagcctgatcttggcgtaccgcgagatgagcgagtagagcgcgaacgtgccgccgtctccgttgtcgttggcgtagagcacgacgaagacgtacttgagcatggggatgatgatgagggtgtagatgatgagcgacagcacgcccagcaggtcgtcgttgtacttgatgccgtcggggaaggtgctggagtagacgtagagcggcgacgtcccgatgtcgccgtagatgatgcccacgctctggaaggccaggtgcagcgtccgggcccagctgccctcggacccgtggtacttgccgccggacaccttctccgcgtcgccgaagagcgagtcgtggcgcttcaggctgagccggttggccgactcgccgccgccgcctgctcctccagctgggttgtccacctccagcgacattatcgcccgcctcggttgggtgggtctccctctccccaagtacgtcccaacgccttggaacgacggatcgagtagtctgtctgctctctccggagagtccccacgcgccctaatcaatcaagccgcgccagctgattcccaaggctgtttggtggcgtgactgctgatccctatgtagccagggaatgctttgctagctgacgaagaggacgacgccgccgaggtggtgcagggttcagcagcagcagcaggcgaccgtccgccctggctggccggcgaccttgttggtcgtccgccgaggcgaggctgtgacgaaaggaggcagagcagagcagggggacgctagttagctgtgacacgaagccctcctgccgccgagggaggagtcggccttaaatagaggagcacgcacgcaaagagacgacgagcggaagatagagagagagagagagtggcgagcgcagcgcagcctcgtgccgaatt

SEQ ID NO: 75393 - DNA, 637 bp, Zea mays
  Clone ID: MRT4577_168790C.1
cggacgcgtgggggcagccagtgagccagaaagaagaagaggccattcgaagctgccacgcacgccacgcggaaaccattcgagtccacgaggacgaggagcagcagcagaagaaagggcaaggaacatcctccggtggccgccgccatggccggctgctgcgtgttcctccggtggccgtcggcctcgccgtcgcgcatcggctaccgctccctcgtcgacgcggcggccgacgacgccgccccgccgtcgacggtgacggtcgtggtcgggaaggagcggcgggcgttcgcggtggaccgcctcgtgctcgactcctacccgctccggctgctcctggagacggcggcgcgcagggaggagcgcagggccgggggcggcgccggcgccatcttcgtggacgtcgacgccatcctcttcgagcacatcctctggctcgcctgcgacgcccgctccgtctcccagatcctgcacctcgacctcaaggagatcatcgacttctacgcccaggacgcgtgactggtccatgcacccgcagctcctcctccctggacacgtactccgcaccacctgcgcgtttcttccatggatggatattcttttttctttctttcttcctttcgtcctctcttgcgct

SEQ ID NO: 75394 - DNA, 824 bp, Zea mays
  Clone ID: MRT4577_168791C.1
cattgggaccctcgaggccggccgggctgcaacacacccaaggcagccagtgagccagaaagaagaagaggccattcgaagctgccacgcacgccacgcggaaaccattcgagtccacgaggacgaggagcagcagcagaagaaagggcaagggccaggccccaccgagaagcgagaagcagagcgaggaacatcctccggtggccgccgccatggccggctgctgcgtgttcctccggtggccgtcggcctcgccgtcgcgcatcggctaccgctccctcgtcgacgcggcggccgacgacgccgccccgccgtcgacggtgacggtcgtggtcgggaaggagcggcgggcgttcgcggtggaccgcctcgtgctcgactcctacccgctccggctgctcctggagacggcggcgcgcagggaggagcgcagggccgggggcggcgccggcgccatcttcgtggacgtcgacgccatcctcttcgagcacatcctctggctcgcctgcgacgcccgctccgtctcccagatcctgcacctcgacctcaaggagatcatcgacttctacgcccaggacgcgtgactggtccgccgccctcagctgcgcggctccggcatgcccgagcccggctcctcctcctcctcctccctggacacgtactccgcaccacctgcacgtttcttccatggatggatattcttttttttctttcttcctttcgtcctctcttacgctaatgcgcgtattgatgcgcgggatactattggaaattaatacagaacagaaacggttatgaaaaaaaaaaaaaaaaaagcccctagg

SEQ ID NO: 75395 - DNA, 792 bp, Zea mays
  Clone ID: MRT4577_168792C.1
gccggcctttccgaaccaccccaaggcagccagtgttccagaaagaagaagaggccattcgattcgaagctgccacgcacgccacgcggaaaccatccgagtccgcgaggagcagcagcagaagaaagggcaagggccaggccccaccaccgagaagcgagaaggagagcgaggaacatcctccggtggccgccgccatggccggctgctgcgtgttcctccggtggccgtcggcctcgccgtcgcgcatcggctaccgctccctcgtcgacgcggcggccgacgacgccgccccgccgtcgacggtgacggtcgtggtcgggaaggagcggcgggcgttcgcggtggaccgcctcgtgctcgactcctacccgctccggctgctcctggagacggcggcgcgcagggaggagcgcagggccgggggcggcgccggcgccatcttcgtggacgtcgacgccatcctcttcgagcacatcctctggctcgcctgcgacgcccgctccgtctcccagatcctgcacctcgacctcaaggagatcatcgacttctacgcccaggacgcgtgactggtccatgcacccgcagctcctcctccctggacacgtactccgcaccacctgcgcgtttcttccatggatggatattcttttttctttctttcttcctttcgtcctctcttgcgctaatgcgcgtgatactattggaaatacagaacagaaacgattaggaagttctcttgcaaaaaaaaaaaaaaaaaaaaaaacgaaaaaaaaaaaaaaaaaagcggcc

SEQ ID NO: 75396 - DNA, 1139 bp, Zea mays
  Clone ID: MRT4577_168793C.1
cattgggtacctcgaagccggccgggaagcattcttagagccccgatcgagctgagccccatccccaacccctcatccccgcgggctccctcaccgtcttcctcatcggctccatcctgctcaccgtgcccgtctacgaccgcctcctcgcgcccctcgcccgccgcctcacgggcaacccgcacggcctcaccccgctgcagcgcgtcttcgtcggcctcctcctctccgtcgccggcatggccgtggccgcgctcgtcgagcgccaccgccaggtggcctccggccacggcgccacgctcacggtgttcctgctcatgccgcagttcgtgctcgtcggcgcgggcgaggcattcacgtacatgggccagctcgccttcttcctgcgcgagtgccccaagggcatgaagaccatgagcacgggcctgttcctcagcacctgcgcgctcgggttcttcttcagcaccctgctcgtcaccatcgtgcacaaggtcacggcccacgccggccgtgacggttggctcgccgacaacctcgacgacgggaggctcgactacttctactggctgctcgccgtcatcagcgccatcaacctcgtcctcttcacgttcgccgccaggggctacgtctataaggagaagcgcctggccgacgccggcatcgagctcgccgacgaggagtctattgccgtcggccactgatgctgctgccagtgccacaacgaccctgcatgcatgcgtctttccttctctctctcttttttttatatatgttttgatgacttgttttggcctgaaatcggtggggccgccaagaggggccatgcgtgatgtattttggcacacggtgtgaccccgtcgtacagacgcaggtcgagctaattaacgtgtacctaaggggtgaaacaaatgtagatacaaatatacggcctaataagtacgtacctaatagtggtatacgtacgttgtattctgcttcttgaaatgaatgacagctagcgttgctgcgcttgtattacatgaattagatagttcctcgtcatatgagtaagttgttgacgcaattattcatgtggtggacctgacacatatgtccagtggccaaggtttatgtgcatgccaagtattcaaaggctaaaa

SEQ ID NO: 75397 - DNA, 389 bp, Zea mays
  Clone ID: MRT4577_168794C.1
aaaagcagtagattgattatgggggagggggtagtacaactgtacatatagccatatacgtaacgatgatttaaggctagcttataaaagtatgattactattgaatattttattattaccagttttttattcgagattaatcctttattacacttatatttgttatgattctcacatttatttgatttgaaaattgaaccaaactcagttaaatctaataaagagtagatatcttattattgttggcacgccgcacgcacgagtataatgcaataaattgtatcttttattgaaaaatacatgaatatattactaatatatatttttttaaaagaaatgatgaccggcactttattcgtcgcgtaacgtcacccgtttccaatcccca

SEQ ID NO: 75398 - DNA, 416 bp, Zea mays
  unsure (1)..(416): unsure at all n locations
  Clone ID: MRT4577_168795C.1
gggaccctcgaggccggccggggcgatcctcccttcacnctcgacttagagntcgccncttactccacaacacgaaggcaaaagctcccacccgccgacgacgacaacagcagaagttgtacccccgcacaaaggagaccgaaccgcaagtccacgggcaggcaaggccccccgcgggcagaaggacagcaaggcgacgaggaagccagggacgacaaccagcgccacgaagacgccccacacggagaggccaggaacaggggcgccgcgcaaaaccccaaagaagcacaaaagaacggagcggctgagccgaaagcagcagacacgattgctggcgcgcgagagagcggagagacccacgacagattttttgtttaacaccccccccccccgcggggaggaagagggaaaggagg

SEQ ID NO: 75399 - DNA, 290 bp, Zea mays
  Clone ID: MRT4577_168796C.1
atggccaaataaaaacaaacatttttacatttatgcaggcggcgttacacttggacttgggatatataccactatgtttatactgggggggggggggcagtataatgcccgcaaccccccaaaaattagccccgaaggggacaggggccgacgaatcaatgaaacattggtcacaattcagggggacaaacttaacccattccacaccacaaacggggttggggattcattcatacatacggggggccagaattgacatgggggtttcataaaatgaccggacccgtggg

SEQ ID NO: 75400 - DNA, 459 bp, Zea mays
  Clone ID: MRT4577_168797C.1
tccggaatcccgggtaatcataacctcattgactaacaaagtccatatcatcctggcaagctttaaattgtgcctctttccttgcggcaaagatgctaacatagactgcaacactgaatgtctatagctcttgttaaataacattacacaaggattttctcacatgccacagcttggaatctctcaagaaacttctggcactgctcttcctctctcaagatatagcccactactgaatgacagtccttatcgcacatgcacttcgtggggattaaccttcacatgcgcatctaaatgacaacatcgtagccccatggacattttccatgcaagcaccatctttatcgagcaacaagaacttttaatatcctaaagcgacctgctacccacatcgacacactaaggtgtgaaccacaataacctactgctaaaaatgcttgtctcttctaagtaccttct

SEQ ID NO: 75401 - DNA, 532 bp, Zea mays
  Clone ID: MRT4577_168798C.1
aaaaaagaacgggctttttttttcaggcaaaaaaaaaaacccgctctttggccgggggattaaccccccccaaccaaccctggaaaaagtttggcaaaatcaacacaggttcaacaagaggggttttggctaaggaaccacgggaagggcaaaaaaccaccctaagttttttaagggcttcccaccaccgccgcccaattgggggccctgggaaccctttgggaccgcccccttggggggggttttgggggactggcccacccccccctttttggcttttttccaaccctggggcttctgggggccccccttgaacccaaaaaaagcagtttttttaacaaaatgggggccccggggcttctaaacttttttttttgggattacccccaaggaagcccccccaatggaccgggagaagggcttttggggggggcgggcccttttttttaccggttaaaaagggaaacccctttggggggggtcccggaacatggggggccaagaaagctttcgaggcctcaggggggggggg

SEQ ID NO: 75402 - DNA, 177 bp, Zea mays
  Clone ID: MRT4577_168799C.1
aataaagacccaccggcagacgcacgcaggggggaatagacgaaacggccgacatggttcctccgcaacatggcgcatcggccgtcgaggtggccgccgtgctgcagctgcttaaacggcggcgaccacctcggaggcgcgctaggacctgaggacaggtgagcctccagaatcggg

SEQ ID NO: 75403 - DNA, 563 bp, Zea mays
  Clone ID: MRT4577_16879C.1
tcgcgataagcatgcacggcctccgagagaactcctcgactcctacggggccgtcgtccaccaaccgccaagcgtcgaaaccagtggcgtactacactgacgcggaccactggtcgaagaacccgtaaggagagtccgctctcggctccctgcggcacacacgtaaaacaccaacacaaatccggccttgagaaagcatgggcggactagcagaatactgctccgctccaacacacccacacaagaatgggaacctgtcttgtaaactattgaggatgctgcttgcacacacgaacatgaacaatcgactgctgaaccaggtagatacgcgagcgcatggagagactacatcgacagagatagctgagacgcccggtgtccgatatcgaatgccgatcgaggttgtctgcgtgcgttatggatggctgcgtgtgactggtttgacatgtgcatcgtacttggctatcatacgggcacgcactcagctcgtgtacgagttacgacgataagctcgtgacctgaacaaaacttcttcgtaatactagtacccacatcaccaaaaa

SEQ ID NO: 75404 - DNA, 797 bp, Zea mays
  unsure (1)..(797): unsure at all n locations
  Clone ID: MRT4577_1687C.1
ctgtcactctctcttgtctccaagtttgtaaccctagccgccaagcttgaagctccaggcgtgctcgtgtagggccgcaggccatccgggctccggcttccagcatccaccaggcgtccttagaatacggtgcagcgagcagcaagtcgccgagcagccgagccaccgccgaacacagggcgccgccgagcagccgagccgccgccgagcgccgagtcttctctgtgtctatggcgtctccatgcaagtacacactacactggcaccgcgattgacagtcagaactttgattgcccgtccaataggtaccgagtgacttcggtacagacgacaaactttctccacacataccgcgccactccgccactcactgtgctgacggatggggtggtgctccccgtccacttcccggcagcttctctccacgacctcactcttcaccttcggcgcgggtctccttaccttcggcatccacctctcctacgtccacatcgagccccagcgcgctcgcacgctcgctcgggaccaattcgtccgtgactacctccgcaagaagcacgacaagtagcccgccttctgcggtccccaggtgattgcttggtagtcggagacgatggccctggtcccatcgaggtccgacagcgaggccttgatcccggaggtggagatgaatgccggcgccgaccagaccgcancaacggcgcgggtcaccgtcgttcaggcgtcgtccgtgttctacgacacccctgcgactctcgataaagcggagaaattggtagcagaagcagctgggtatg

SEQ ID NO: 75405 - DNA, 232 bp, Zea mays
  Clone ID: MRT4577_168800C.1
ttgataggagaacccatcaccgacactagaggagacactggatggcaacatacgtctccttcctgtgcgcgtgggtctttggacacatgccgctaacgcgacaattgaccctgaatgctcacaagctcctatagccgcccttctctgcgcagaccgaccatcaatcatagcttcagtatgtgaaaacccagctcttcaaccatataggcttcaacaagcaatcgcagcaagc

SEQ ID NO: 75406 - DNA, 1280 bp, Zea mays
  Clone ID: MRT4577_168801C.1
ggccggccgggccgggagccatagccactctcctctcctggagctatagctagagagcaagagagaggggggtagatctatatctgtaccgggcgggcggcgcgatgatgccctacggcacggcggcggaggcagaggcggcgctggggcgctccatgacctgggcagaggccctgtggttccggtactcagcggggatgccggacctgtgtctgacgtggcacgtctccctcgtctacctcgtcttgtacgcgttggttccgctgccggtcatggttatccagaagctcgcgccggggtacgccctgcggcacaagctgcagcccggggtgccggagccctcgccggtttccacctacgtcgaatacataagggacagcaggggcgtcaccctggccgccttgggcccgttcccgctcatctactccatcgcattcaagctgttcggggtccggacgggactccctttgccgtcggtctgggagactgcgacgcacctggcggtgtattcgctggtggaggactacacgtcgtactggctccaccgcttcctgcacaccaggtgggggtacgagaagatccaccgcgtccaccacgagaagacggcgccgtccgggttcgccgccgcctacgccacgggcactgagctcagcttgtacctcaccacgctcttccttgggccggcgatcgtgcccagccacgtcaccacgcactggctcttgttctccatccgcataatggaggccttcgacacacacagcgggtaccacttcccgttcagcctcgcgaggttcatcccgttctacggtggcgcggaattccacgactaccatcactacgccggagagaagaccaggagcaatttcagttccgtgttcacgtactgtgattatatatatgggacaaacaaaggctacatgtaccacaagagaagcctagccgagctgaagacgaaggaggccgaacacagcgggaaagaagactgagattacgtactctcaacattttatgcacgaataagttggatactgcataaagcgtccatcatatacagtagttgctcgctccgttctgttccgttgcctagagattgagatgtccagcaaatatataatagtccatatgtgtactactaccacagggtttgtcgtcccgtcccccatgtgtaccctcagtccacatcgatttgattagtggagacaggagtggatttgaacaggtcgtcctcatgtgaacgtacacctgtaatctatatatatgtccactagctacctaagaaa

SEQ ID NO: 75407 - DNA, 363 bp, Zea mays
  unsure (1)..(363): unsure at all n locations
  Clone ID: MRT4577_168802C.1
gggagggagctgtagtaataatgtaatggagccgctgactagctacctagctcgctagtttactcatttagcggcgatgagtaacgtagtgtcacccatcaccatgggtggcagtgtgagcaatgacctgaatgaaccattgaagggggggttagtaaggggagaaccaaaaaacatnattgncacaaaggggggggggggggggggagactcttcctgggggatgctccaagttcagagctcgttggcctgccccgaattcgttttgcggatcgggtggttcattctcccgtggggttggccccgacgttccctgggggggggacgaccctgctcttgttgttgggttgctacctacgtttt

SEQ ID NO: 75408 - DNA, 392 bp, Zea mays
  Clone ID: MRT4577_168803C.1
cacccttccgaacccaactggttaattggttcctggaaattttttacctcctttggaaccacaaggacaaggaggtttttcaactgcggataaggctcaacttgcggttaaggctcaaaggccggaaagaggtaccctgacctggaggaaactggcaccgccggccaggcaacggtggtcctaggtttggccccgaatagtgaaggccagccccgatttctttatggcctcgaaggattcctgccaggcctccaattcttgcggttggggtggcagctgcaagtgcgccccccgcacctgttgtccacatgaatcgacgccctgggatatgataattacttatctagctggggggggaggtggaccattaatagggggggccgggctggctg

SEQ ID NO: 75409 - DNA, 368 bp, Zea mays
  Clone ID: MRT4577_168804C.1
cccactcatacgcggatttaaagaggaatacccaatcttccacaacgcgggcgtggagcgcacacatgcttcgccggtttacccagtcagagagctcgccagcctggtttggtcgggttatgatggatcaaatagcacgttaccatgcatgaggagcacaaacatgtggaggtagactactagcatctgcgcattgagagttattattctaggtgctatagacatgcaacaggccctagaaggattgtgattgtgagcgagagtcgagcgatacaccacacaatgcgcagctactatgggaactacctggaatattgcgtcgacatcatatttagaccggacggcatattttatctgtcatagaattc

SEQ ID NO: 75410 - DNA, 259 bp, Zea mays
  Clone ID: MRT4577_168805C.1
acgatacagagaagattagcatggcccctgcgcaaggatgacacgcacaaatcgagaaatggtccaaatttttttgcggattcgcacatatgccctcggagatcgcattttgatccttctgcgccagttttcattaacaattcagtcctcgccaattcttgccggctctgtaccagaaccttttgttcgctgtttgccgattggcccttgcccttgcaaacatgggatttcgcgcactgtccctcttattatcattttc

SEQ ID NO: 75411 - DNA, 295 bp, Zea mays
  Clone ID: MRT4577_168806C.1
agggtctcccgatcgaggaggtggagaagatgctcgtagcgccggtagctcatgcttatgttctgggccccgtggcacacataatacaacggcgaggatagtggcaagaatgccgttgtctgagactgtctgctccaattctacgctaaaattgctgctcacaatctaccctttatttttgttcaaactggaaaaaacttgattagttgctaatgcctcaattccggtctctgattttttttgaggaaaaaattaaaaaaaagggcatgcggtctagaggattgcaagcctacct

SEQ ID NO: 75412 - DNA, 131 bp, Zea mays
  Clone ID: MRT4577_168807C.1
aacgcatgtacggttgtttgatggtgttgcatattttgcacgcaacgagggtgctccctgaaaaaaaccctcgggtggttcagaacggaggggtttgtacctgggcaggcacacccgcacagggtttaagg

SEQ ID NO: 75413 - DNA, 380 bp, Zea mays
  Clone ID: MRT4577_168808C.1
actgtctctacctcttgctacttgtgccgtttcctcgtccgggctcctccgctcaagtccaggagtgcagtgcgctgtccaagcgccgccccaccaggtgctagcggtgccacctccacctccaaggtaaacccacacctactacctgtgtgcttcgtaaggcctatctacacctgcaggctgcagccaccagcacagggatatgtaccagcctgctcgtttcagctggaacagtattctccagttttggattggaacatgcagccacagccaaaagtagctgaagcgattggagttgtagcttttcggggataatcaaatgatatgagagtggatgttgcggatcatgtataagctttagactgccgactgattcactt

SEQ ID NO: 75414 - DNA, 263 bp, Zea mays
  unsure (1)..(263): unsure at all n locations
  Clone ID: MRT4577_168809C.1
cccacgcgtccggatcctgccaatatttttgttactccaactgtcnatacccccaaatcaccctatctcaaatgctatcttatacaagatactggggccctcctttcaactgctccaaacatcaacaaaaccttacatcttctcctactacaatcacatcattaactacacccacatccttaacaaatcctccgataacatcaaacatgactacgctactactaatcacaccattattattcctacaccatcttatataactc

SEQ ID NO: 75415 - DNA, 265 bp, Zea mays
  unsure (1)..(265): unsure at all n locations
  Clone ID: MRT4577_16880C.1
ggtcgacccatcgcgtccgcccacgcgtncgccctcgcgtccgcccacgcgtccgagatagagtacatatttgtagtccccaaaatgcacataaagtcttgagcttgttagatgtgtgttatattggctttggctatggatgcagcaggcgtcgagaatttgtcaatttggctaagggtttggtaaaccttattcagattttgagctagaggaacgtcgnccctcgtccatatcttcatgttagtatgtacttttggaagattgc

SEQ ID NO: 75416 - DNA, 828 bp, Zea mays
  unsure (1)..(828): unsure at all n locations
  Clone ID: MRT4577_168810C.1
ccggaaggaccgcctagcaccagttcaacaatgtcggccttgttcaactcttcccgcgtcgccgttcgcgctgcctcggccgctccttccgctgcccgagccttctcgtcgacccctgctcctcaagccactcttcgtgaactcgagtcccgtatcaagtcggttggtaacattnggaaagatcaccaagtcaatgaagatggttgccgcttcccgtctcgctcgcgctcaacgtgctatggaaggtgccaaaacctacggtgctgccaaccaagccgtcttcgatcaatccgaggcttcgaaatccgaatccaaggtcgagaagatcctctacattgtcgcctcttctgaccgggtctctgcggtggtatccactcttcggtcgccaaggctgccaggaaggatatcgaacacggagagggtcaaggaaaggagatccgtgtcgtcgctctcggagagaagcccaagcaacaaatggctcgtggaaacggtgccaacgacctcgacctctccttctctcaanatcggaaagtcggtcccttaaccttcggtgacgctctcgccatcgccgacaagatcgaggctaccaagttcgaattcgacaaggtcaagatcatcttcaacaaattcgtttccgtcatctcctacgaagcttccgctctcgaaatctactccaccaaggccctccaaggttcccccgcttnacgccgcttacgaagttgacggagaggagctctcgggtgacctcgcttccttcgcatggncaagccatctacgctgntctcgtagaggatacgccgctgagatctctgctcgtcgtacgctatg

SEQ ID NO: 75417 - DNA, 728 bp, Zea mays
  Clone ID: MRT4577_168811C.1
ggggtcgttgtagcatagtggtgagtattcccgccatataagatgactttgcccctacgtctctctcttttcctcgttcgtggttacgcgatggacctgtgcgtgaatcggtgagcgtgatcaatctgctagcgagtcaaaaacgctgcagggcgacggagacacgtctctgtttcgttgaaacaatggattgtgttggagagaatcgaagaacaaatacacgagtgcttcaaattatatatagttgttgcgtcattgcatatgtgtttcaatgtcaatgtgtgaagtcaaatttggaatacagagtaagaaagtagaggagtctagtctagacttctagtccggttgaaaagtaattgggttcaatttccttttcgggtgtaataattaattaataaaaattgtagacgatggtgaaacgtgctcacgttattcacgagcgcactttgatagttctgctgatggtgcacaaaagagaacatccgtttgtcgtacgaaatatatattctgaagccatggggttttctccttcgcgttgtaagttctagtttaggttgttgttgttattattgttgttatttcttcgaaagattatgtactatcatctggattaatggttgagacttgagagggatggccaatagaggtgttcttgacttctggcacgagcgtgaatgatatggctgacgtgcagatgcaagcgacgagagcaagaaagtaaaagcagc

SEQ ID NO: 75418 - DNA, 439 bp, Zea mays
  unsure (1)..(439): unsure at all n locations
  Clone ID: MRT4577_168812C.1
ggccgccccttttttttttttttttttgtttttttaagatttctatatcttctcacccattgaaaatatggcatgtggcagcttctttacactcattacaaacactcgttacagttacaggtaaatctatttttacagggtgtcccttaaatactcgcattttacacgcacaaaccgacctacctctgtaggggaggggagagctgctagcatggcccattggtccaccacaaccacgataggggcagctgaacttattgcgtggttcagccgaggaaattattcctatggcaggcacgaggcgtggagatttcggatctcatgggctcatggccctgtccttcttcccacagcggnngacagtngcaacagcatcagnctactacatggnctgctgctccaccgttggacggccaggccacgccaatggngctcgtgt

SEQ ID NO: 75419 - DNA, 307 bp, Zea mays
  Clone ID: MRT4577_168813C.1
gtacctgcacgagtacgcgcgcccggcgtgggtgctcatggacgtcagcagcggcagaggcagcttgccggagacgggccccgcgccaagctccagagcttcggcgccgcgagggccatcacgggcgccaccgccggagtcgacgagtattagggcgccgaggaagcgctattcacgatgacgagccgcatagaggggacgcgcgggtacatctctccggagtccctggagcacggcgtggtgtcgcctaaggccaacgtcttctcgctcggcgtcgtgctcctggagctcgttactggcatggaca

SEQ ID NO: 75420 - DNA, 697 bp, Zea mays
  Clone ID: MRT4577_168814C.1
cattgggaccctcgaggccggccgggcatagtatccctcaccttttctgatgagagaggtgccctgacaagctgaggagagtgttccgatcccatctaggaccactacgcgatgttgaatcgacgatcctgaacgggcagagtctcaacctgacacccactgacaactccactaacggcggcttcctgacgattaccaagctctggaacaatgacaccttgaccctccatttccccattacccttaatatactggaagcaatcaaccgatgacctgcccgcagtacacacccatacaagcgttggtgtgcgaaccacacctcctctccgccctgacacacctttatatgacatggacacacagaagccactccaacgacggtctgaccgcaccgcatctgggaagaggacgacaacatgccgtccgtctccgacaacaggtgtgtcacgcccgatccactccgatacgatcaactcacattctcgacaccctgtaaacagagcaattctcgggagcgcccgtcctcttgttctgtcgaacatcaatgactctaagctcgatatgaaggctatgccctacccacaaacgctaccgcagtgtgcacgccacgcaccgcatactacgaccaggaggctgctataagccatctgctgcacaagcccaacgtgacgatcgaaccgctcgactgatctttcat

SEQ ID NO: 75421 - DNA, 304 bp, Zea mays
  unsure (1)..(304): unsure at all n locations
  Clone ID: MRT4577_168815C.1
ggggccacccccgcccacaggtttgggtcactaaccatttttgggccggttccccagccgaattggcaatgggtcaggacatttgccccgtggggggcttttaacatttgttcaagggccggttccccaaggggcaaaattgggaaatgccccccaacccagccaaaggttttggtttgctggggacaaggttggcgggggccggttccaagcccccgacaggggggtcaggggggggggggaaggggggggggctggttgcgcttcccgggggctctccgggggggcccggtnttgggggggg

SEQ ID NO: 75422 - DNA, 476 bp, Zea mays
  Clone ID: MRT4577_168816C.1
aaaacgagcacgtttccttggggcattattaaacacatcatcgacatgttttaaacaaaattttttccgagatccatagcaggggcggtcccaaaacaaaaatagcttaaagggttcccgatccaacaaatggccaactaaaggggccactatgcggggggcccggcccctaaaagcggagcttggaaaaaaaccacctgttcttgccggtcttgaacctttcctcgaggccccccttgggggccttgcaggcttcaacctttttgtcccggggggaaagcgcgtcggccccccccgaggcgacttttttaaaatcaacctcaagggtgtaccggggggccatgaggggagtgaaattgacaagcttgataaaacacttgacgcgggactttttggccgtttttttgggggggtccttgcggatcaccttcttggggtacttggccaggccggcaacaaggcattgcccataggga

SEQ ID NO: 75423 - DNA, 266 bp, Zea mays
  Clone ID: MRT4577_168817C.1
gatcatcatattctcaagggcagggcagagatggagcagctacctgacgatatgcttgtggaaatcctgagccgactcccgcccagcagcctagcgacgtcacgctgcgtctccacgcacttgtgctccatcgtggacgcacgacgtctactgcgcaccggccacctccttcctctccgactcgacgccttctactgcatcagcctggcctcggtcgatcgcgagacatatcttttcgcacggccatcggtagcgcgtcagatccc

SEQ ID NO: 75424 - DNA, 1397 bp, Zea mays
  Clone ID: MRT4577_168818C.1
ccaggactttggcgcccgctcgccacgcctctgtggttggtgctggtgatccagcaattatctctactgagaaaacatcaagcttcaatactccggccaccatttggaatgcaaaggtactattgatgagtggcatgagcaaaggtgcctttgctaacataacttcattgagaagtactgaggaacgagttgtgcacttgaacaatatcttaaaatttgctgtattcaagaaggatcgttctctttttgcaattggaggcccttggaatgcagatatagatggtggtgacccatcagctgactgttcttgcttgattcgaactgccatcagatgcgttaaggaaacggttcacgttgatctatctagttgcacccactggaaccggtttgtcgaggtacattacaatagaataggcaaagatggactgttcagtcataaagaaattactgttctgtttgtgccaaacttgttggaatgcttgccttcagtggatatatggaagaataactggattctgtacaaaaaatcaaaggcagaaagggatgagcaaactgttaaaaagaaaaagagccctggtgatccaaaagagcagatgcaaggggagctgaacgatggtaaaaatttagatgctgatcaattaaaagaggctgatgttggttgcagtgatatgaaaaatgagaaagacgatgttgatatcaaacagcaaggcaatgatggagagggtacgggtaaagttgaggaacctgttcagaagatgggtggggatgttgaaggaaaaagtacgggtgactcctctattgaccatgcaacaactggggataaaaagcccacaaaaaagaaaataataaaaaaggttgtgaaagttgttcgaaaaaaaaataactggaccttcagttgataaatcttctgaggacaagattgttgtagcagaatctgcaaacaaaactgcagaaggggggcaaagtcaacaaaagaatgatgatgctggaaaacaacaggagggagctggtataagtcaacaaccagaagcaaagaaaactgtgaagaagaaaataattcgaaggattgttaaaaggaaagtttctggttcaggttctcagttgaatacccctactacacctgctgaaactagtaggcaagaagcagaagttcagccagaaaaaaatgttgagagttcggccgacgttggaaactctcagactaagctacaagaagggtccaaaattccatctgaagatatctcaaatcagaagaaagaggagaaaccagcggaaaaggaacacccattgactgatctcagtttaaatgcagataagggcaatcacaaggaagcttttgaacaaaaagacatgaaaacacgatggaacgaaggataaacacaaacgcgacagcaacg

SEQ ID NO: 75425 - DNA, 697 bp, Zea mays
  Clone ID: MRT4577_168819C.1
gactacaatccctcattcccttcctaaaaaaaataaaagctcctcattcccgcaccaacgcgttcccctttacctcgccgccggcgccgccgcgccgccgcgccgccatgctctgcctccgcctccgcctccgatgtcgcgccctctcccagctcctctcatcgtccccctccgcctctcccatctcccagctcctcggctaccacagccgcctcctctcagcggccgcgcccgtcgtctccccgaaccctagcttcgccgtcgaggagtacctcgtctccgcctgcggcctcacccgagcgcaggcactcaaggcctccgccaagctctcccacctcaagtcccccgccaaccccgacgccgtcctcgccttcctcgccggcctcggcctctccggcgccgatgtggccgccctggtcgccaggaacccccaggtgctctgctccggcgtggagaggaccctggcccccaacgtcgccgcgctcaccggcctcggcctctcgcgctccgacatcgcgcgcctcgtctcggttgccggcaaccacttctgctgtagatccatcgtcgccaatatacagtactgcctgtgcctgctcgggtcctacgagaatctcctctctgctatcaagcgcaatttctacattctctcgtccgaccttgagagagtggatcagcccaatgtcgcagtcctgcgaga

SEQ ID NO: 75426 - DNA, 227 bp, Zea mays
  unsure (1)..(227): unsure at all n locations
  Clone ID: MRT4577_16881C.1
cgggtaaaattaaagggttggggaataagccttaggccgggacttaanaccgtcctttaagggnccaggggtgnccngtgccttggggggaattgggctttagtaggcgaaaatggcctttggattccaatgtattaggaaaaagcccccggagccgacataactgggtaactaatactagaattaacgtaaggccttttttagaaaaaacggaaaccgtttgttat

SEQ ID NO: 75427 - DNA, 171 bp, Zea mays
  Clone ID: MRT4577_168820C.1
cggacgcgtggggcagcgcccaattaagctcgtgcacgtgatgcggggccggcggcgtgatacactgttgaggcagtttcgtttgtaacaagctattatgcaaagacaaatgcagtttgagaggcccaccatgtaacacacgtgatgacaccatagagcgcagctagaaat

SEQ ID NO: 75428 - DNA, 119 bp, Zea mays
  Clone ID: MRT4577_168821C.1
cattcgcataggacaaactggcggttctactatctcgggggccactcaaccacacctgcctgcttgccattactccacgctgtgttcaatcaattcttaactaggctccctttacatct

SEQ ID NO: 75429 - DNA, 425 bp, Zea mays
  Clone ID: MRT4577_168822C.1
cccacgcgtccgcccacgcgtccgtccacgcgtccgctgctgtccagcagttatatatctgtcattttcatgtgcacactatcaagctatatcagtcattcagtactggggtttaagcagcaatgcagcatcctgaatcatgtgttaaatgataacaacaataatgatttaaaaaataagaccttgtcgtccccaccaggccacagacctgggttatcaatgcttaagattccaattgattctactgaaaataccttttctattgataggtatgggcttctacgaggaaccctcagggctccagccctgggctggatgatgtacaatgttctggtgagcaatgaaaagtcgatccagtctcagtacaagtcccacgtctacgccaaccctgacaacgtgacgccagatatcatcgagagccgata

SEQ ID NO: 75430 - DNA, 215 bp, Zea mays
  Clone ID: MRT4577_168823C.1
cccacgcgtccggaagagggcgagggtgccaaaccaatcccaggacctggctgtgggttggttgcgcatatctagcgatggcggcgggcggtgagttagcgtggggggaggatcccgtggcgcggcgcccatctaagaccaacatcgtgtgcacgcttggcccggcttcctgatcctgtgaaatgatctcccgcctgctgcgcgccgggatgtgc

SEQ ID NO: 75431 - DNA, 671 bp, Zea mays
  Clone ID: MRT4577_168824C.1
tcgaggccggccgggaaaccctaagaagcctcaccctcctgcgcctccaccctcctcgccgcctcactccctctgcagaggtcgcagatccgtccggttagacgaaaccgcccgcccccatggcctccggtgagctcgcatgcacctacgccgccctcatcctcagcgacgacggcatcgccatcaccgccgagaagatcgccaccatcgtgaaggcggccaacatcaaggtcgagtcctactggccggcgctcttcgctaagctcctggagaagcgcagcgttgaggacctaatcctctccgttggatctggtggtggcgctgctccagttgctgctgccgccccagctggtggtgctgcagcagctgctgcccctgctgcagaggagaagaaggaagagcccaaggaggagtctgatgacgacatgggcttcagcctgttcgactgaggccctcgctacccagccattagcaaattcgcttatgctgtccaagacttatcttacgttatgtctgtaggcttttgttattacaagtactcaagttttgagtttttgagatgtggctatgacaatgtgatgaagaaccccaaaccatcatattagactgaaacttgtttctatatagttctaagtttcttgagcctcaaaaaaaaaaaaaaaaaagcggcc

SEQ ID NO: 75432 - DNA, 300 bp, Zea mays
  Clone ID: MRT4577_168825C.1
tttattcgctcgttatgactgccggcgtcgtctcctctctctcttcacgagcctggaggtcgatgcgaacatctgctcaccactgatcatctcccaacgaagaatctgtgatgaagatctggacaagcacctacgttcaagagagaggtcgttgctgggactgttgaagcagaggacgtacacactcgtggcgcatagcacgccctcaggatccgcatgacggcactcaccatgccatggacgatactcagtatcatggcatcagaatttcataccacaatggtagtactgtgtactgcg

SEQ ID NO: 75433 - DNA, 760 bp, Zea mays
  unsure (1)..(760): unsure at all n locations
  Clone ID: MRT4577_168826C.1
tgggacctcgaggccggccgggaaaccctagaagcctccaccctcctgcgcctccaccctcctcgccgcctcactccctctgaggtcgcagatccgtccggttagacgaaaccgcccgcccccatggcctccggtgagctcgcatgcacctacgccgccctcatcctcagcgacgacggcatcgccatcaccgccgagaagatcgccaccatcgtgaaggcggccaacatcaaggtcgagtcctactggccggcgctcttcgctaagctcctggagaagcgcagcgttgaggacctaatcctctccgttggatctggtggtggcgctgctccagttgctgctgccgccccagctggtggtgctgcagcagctgctgcccctgctgcagaggagaagaaggaagagcccaaggaggagtctgatgacgacatgggcttcagcctgttcgactgaggccctcgctacccagccattagcaaattcgcttatgctgtccaagacttatcttacgttatgtctgtaggcttttgttattacaagtactcaagttttgagtttttgagatgtggctatgacaatgtgatgaagaaccccaaaccatcatattagactgaaacttgtttctatatagttctaagtttcttgagcctcaaacttgctctggttgatgctctgatgttttcagtcggtgctttttaatcgaagtcagccgatttttgaattgaaanaaaanaagaaaaaaaaaaaaaaaaaagcggcc

SEQ ID NO: 75434 - DNA, 641 bp, Zea mays
  Clone ID: MRT4577_168827C.1
gttgctgtcgagcgcctccaccctcctcgccgcctcactccctctgaggtcgcagatccgtccggttagacgaagccgcccgcacccatggcctccggtgagctcgcctgcacctacgccgccctcatcctcagcgacgacggcatcgccatcaccgccgagaagatcgccaccatcgtgaaggcggccaacatcaagctcgagtcctactggccggcgcttttcgctaagctcctggagaagcgcagcgttgaggatctaatcctctccgttggatctggtggtggcgctgctccagttgctgcttccgccccagctgggggtgctgcagctgctgctgcccctgctgcagaggagaagaaggaagagcccaaggaggagtctgatgacgacatgggcttcagcctgttcgactgagagtctgagaccctcgctacccagccattagcaaattcgcttatgctgtccaagacttatcttacgttatgtctgtaggcttttgttattacaagtactcaagttttgagtttttgagatgtggctatgacaatgtgatgaagaatcctaaaccatcgtattagagtgaaacttgtttctatatagagttccaagtttcttgaacctcaaaaaaaaaaaaaaaa

SEQ ID NO: 75435 - DNA, 707 bp, Zea mays
  Clone ID: MRT4577_168828C.1
gccggccgggtcggcctagaagcctccaccctccagcgcctccaccctcctcgccgcctcactccctctgaggtcgcagatccgtccggttagacgaagccgcccgcacccatggcctccggtgagctcgcctgcacctacgccgccctcatcctcagcgacgacggcatcgccatcaccgccgagaagatcgccaccatcgtgaaggcggccaacatcaaggtcgagtcctactggccggcgctcttcgctaagctcctggagaagcgcagcgttgaggacctaatcctctccgttggatctggtggtggcgctgctccagttgctgctgccgccccagctggtggtgctgcagctgctgctgcccctgctgcagaggagaagaaggaagagcccaaggaggagtctgatgacgacatgggcttcagcctgttcgactgaggccctcgctacccagccattagcaaattcgcttatgctgtccaagacttatcttacgttatgtctgtaggcttttgttattacaagtactcaagttttgagtttttgagatgtggctatgacaatgtgatgaaccccaaaccatcgtattagagtgaaacttgtttctatatagagttccaagtttcttgaacccaaacttgctctggttgatgctctgatgttttcagtcggtacttttttttatcgaagttaaccgatttttg

SEQ ID NO: 75436 - DNA, 222 bp, Zea mays
  Clone ID: MRT4577_168829C.1
accacgcgcacggagatctccaacatgttggttgagagcacaaagcacgcggacgcggcgagggcggacgaccagaagggcgacgccgaccgcaccgcgagcgggaacgaggaggaggaacgcagggccgcggccaggcacacccgcgacaggctgaagggcaccaacgccaacgacccggtcgaggagagcagcaaggacaaacgggactcccaggagagc

SEQ ID NO: 75437 - DNA, 446 bp, Zea mays
  Clone ID: MRT4577_16882C.1
gtgtttgttttttttttttttttttttttttttttttttttttttttttttttttttttttttttttttttttttttttttttttttttttttttttttgggttggaaaaagttttttttttaaaaaaaaaattttttttttccgaaaaaggggggggggaaaaaaggccttatttatgggccaaaaaacacccaaaaagcgttttatttaccaactaccccaccccccaaaaaaaaaaaaatcccaacttttattttttgggaaaaagggaaccaaggggccctttttgcaaactcaaaaagcatgggccttaatctttcaaacattgggctcaagggcaaaacacaaatttttatttgaaaccctttggccaagaaaaagggcttttcttgccccccttggcgaaacttaaggccccccgccccaaccttttaaaaaaccttaa

SEQ ID NO: 75438 - DNA, 621 bp, Zea mays
  Clone ID: MRT4577_168830C.1
agtctggccggggaaaaccctaccagccttcaccctgctgcgcctgcaccctcctcgtcgactaactcgctctgagggcgccgatacgggcgggtagaccaagccgcccgcacccatgggactccggtgagctcggctgcacctacgcggccctcatacctcagtgacgacggcatcgccatcaccggcgagaagatcgccaccatcgtgaaggcggccaacatcaagggcgaggcctactggccggcgctcttcgctaagctcctggagaagcgcagtgttgaggatctaatcctctccgttggatctgggggtggcgctgctccaggtgctgctgccggcccagctggaggtgctgcagctgctgctgcccctgctgcagaggagaagaaggaagagcccaaggaggagtctgatgacgacctgggcttcagcctggtcgactgaggagggcctcgctacccagccattagcaaattcccttatgctggccaagacttatcttacgctatggctggagccttttggtattaccagtacctcaagtttgagctcttgagatgtggctatgaccatgtgatgaagaaccccaaaccctcgtattagagtgaaactcgtttc

SEQ ID NO: 75439 - DNA, 873 bp, Zea mays
  Clone ID: MRT4577_168831C.1
aatcctagaagctcaccctccagcgcctccaccctcctcgccgcctcactccctctgcagaggtcgcagatccgtccggttagacgaagccgcccgcacccatggcctccggtgagctcgcctgcacctacgccgccctcatcctcagcgacgacggcatcgccatcaccgtgtgttctctcgcgctgcagttttcttttaatcgagttttctttttttgagcggtcgagttgttatgtggggggtgtttcttgtttgcaggccgagaagatcgccaccatcgtgaaggcggccaacatcaaggtcgagtcctactggccggcgctcttcgctaagctcctggagaagcgcagtgttgaggatctaatcctctccgttggatctggtggtggcgctgctccagttgctgctgccgccccagctggaggtgctgcagctgctgctgcccctgctgcagaggagaagaaggaagagcccaaggaggagtctgatgacgacatgggcttcagcctgttcgactgaggaggccctcgctacccagccattagcaaattcccttatgctgtccaagacttatcttacgctatgtctgtagccttttgttattacaagtactcaagttttgagtttttgagatgtggctatgacaatgtgatgaagaaccctaaaccatcgtattagagtgaaacttgtttctatatagagttccaagtttcttgaacctcaaacttgctctggttgatgctctgatgttttcagtcggtgctttttaatggaagtcaaccgatttttgaattgtttgctgaattgcacggtgtctttttagccacattggctattggaaacaacggcaactcctgccggattgcatct

SEQ ID NO: 75440 - DNA, 1956 bp, Zea mays
  Clone ID: MRT4577_168832C.1
ccccgcgtccgagcagctccgttcttcagcagcacagctagctagccatggggagcaagggggtggcgctcgcgctgctgctctgccttagcggcgcggccgtgggcgcgtgggctcgcccggtcgccaccaaggacgctgctgccgacgagaagttcctgtggcttaagaagcactttggcaagggtggtggcggcttgggaggcggcggcggtggcggatatggcgggggcggtgggtatggtggaggaggtggcggcgggctgggtggtggtgttggccacggcttcggaaaaggtggcggccttggcggtggcatcggccatggtcttggtggtggctatggtaaaggtggaggtcttggtggtgggatcggccatggcattggcggagggtatggtaagggtggtggctttggaggaggaatcggccacgacattggtggaggctatggaaagggtggtgggcttggcggaggcattggccatggcatgggcggtggctacggcaaaggtggagggattgaccatggcatcagcggtggctatggaaaaggcgatggccttggtggtggatatggcaaaggtggcggactcggaggcgacattggccatggcatgggtggaggccatggcaaaggtggtggaattgggcatgacatgggtggtggattcggcaaaggcggtggtggtcttggcggcggtagtggctacggtgctggtggcggcgggggccttggtggtggaagtggacatggcatgggtgccggattcggcaagggtggtggtcttggcggcggcgatggccttggcggtggaagtgggcatggcatgggtgccggattcggcaagggtggtggtcttggtggcggcggcggcggaggtggtggcggcggcggcggtgggtttggcaaaggatttggctttgggtttggcaaaggcagcgggttcggtggtggtggcggcggtgggggcggcggcggcatcggtgatcaccattgatacgtcagcatgcagcatacgtctcctatggttctatcacttacttttgtattcgttcatgcttcgtaccttgtcatgcctatgggtgatggtgacatccttcacagtagtattatgtacgtactccatgtaatgctcgctctctaaaagattcgagaaatataaatgaagttaaagcttcgtttgaaaaaaaaaaaaaaaaaaaaaaaagaagcctccaccctccagcgcctccaccttcctcgccgcctcactccctctgcagaggtcgcagatccgtccggttagacgaagccgcccgcacccatggcctccggtgagctcgcctgcacctacgccgccctcatcctcagcgacgacggcatcgccatcaccgccgagaagatcgccaccatcgtgaaggcggccaacatcaaggtcgagtcctactggccggcgctcttcgctaagctcctggagaagcgcagcgttgaggatctaatcctctccgtgggatctggtggtggcgctgctccagttgctgcttccgccccagctgggggtgctgcagctgctgctgcccctgctgcagaggagaagaaggaagagcccaaggaggagtctgatgacgacatgggcttcagcctgttcgactgagaccctcgctacccagccattagcaaattcgcttatgctgtccaagacttatcttacgttatgtctgtaggcttttgttattacaagtactcaagttttgagtttttgagatgtggctatgacaatgtgatgaagaaccctaaaccatcgtattagagtgaaacttgtttctatatagagttccaagtttcttgaacctcaaacttgctctggttgatgctctgatgttttcagtcggtgctttttaatcgaagtcaaccgattttcgaaaaaaaaaaaaaaaaaagcggccctcgagctccaggtgttttcccttagc

SEQ ID NO: 75441 - DNA, 441 bp, Zea mays
  Clone ID: MRT4577_168833C.1
gggaaaaatatggaaggtttaaaaaattttttagggtggctttgaacgatttttttatttatgaaaaaaaaactgggtttttggtttttttccgccacacccaaaacttattagggggggggggccccccccgggcggggtcgatcggggggcccccccatgcacacccaaagggggggggacccccaatggagggaggcggggtttttggctttacttgggagccccgtcgggggggaggaaagggccctggcccttgaccttgcccgggggggcgtagctgcaaaacaaaaaaacaccccggggtgggggggaaaaaaaaccgcgccccacccatggggggggacctggcccacaccacctggggggggggggcgaaaaccttgccgggggcccaggggttgtttttcaggggggaatttctttttttggccacccaca

SEQ ID NO: 75442 - DNA, 904 bp, Zea mays
  Clone ID: MRT4577_168834C.1
gccggccgggttcgggaaaacttctgccactggcaaagccctaccaacccaagcacctatattatgtccacccacgccgcctccctccgaaaccctagaagcctccaccctcctgcgcctccaccctcctcgccgcctcactccctctgcagaggtcgcagatccgtccggttagacgaagccgcccgcacccatggcctccggtgagctcgcctgcacctacgccgccctcatcctcagcgacgacggcatcgccatcaccgccgagaagatcgccaccatcgtgaaggcggccaacatcaaggtcgagtcctactggccggcgctcttcgctaagctcctggagaagcgcagtgttgaggatctaatcctctccgttggatctggtggtggcgctgctccagttgctgctgccgccccagctggaggtgctgcagctgctgctgcccctgctgcagaggagaagaaggaagagcccaaggaggagtctgatgacgacatgggcttcagcctgttcgactgaggaggccctcgctacccagccattagcaaattcccttatgctgtccaagacttatcttacgctatgtctgtagccttttgttattacaagtactcaagttttgagtttttgagatgtggctatgacaatgtgatgaagaaccctaaaccatcgtattagagtgaaacttgtttctatatagagttccaagtttcttgaacctcaaacttgctctggttgatgctctgatgttttcagtcggtgctttttaatcgaagtcaaccgatttttgaaaaaaaaaaaaaaaaaaaaaaaaaaaaaaaaaaaaaaaaaaaaaaaaaaaaaaaaaaaaaaaaaaaaaaaaaaaaaaaaaaaaaaaaaaagggttgttcctggggcgga

SEQ ID NO: 75443 - DNA, 280 bp, Zea mays
  Clone ID: MRT4577_168835C.1
gggccccaaatttaaaacatgtttttattttgaatggaattatacacccacactcttaaaatgaataaaaaagttcccaaattgccaaaagcctaaaaaaaaacttgccaaagttaaaaaaaaaaaggtgaccaaaaatgagtgatggattcaaattggttcaaacccaagcgaactcctttgccatgccaaaggacttgcccatggcgttctttcaaaccgacattgtctttttttccgacccgttgtactttatttccacctttaagaacttcacccc

SEQ ID NO: 75444 - DNA, 355 bp, Zea mays
  unsure (1)..(355): unsure at all n locations
  Clone ID: MRT4577_168836C.1
cagtgcctgtactcttcacgtcggcgtcggccgtctattggtattcccactgcgccgtcgtccgctcgactgggtcctcgccgccgctgggcttgttccgcccgatcccggcttgctaggcgatttcgcggcgacgatcgccggaccaccacggtactaccgcgnacctccgtcggcggcgccgcggtggcggcggactccctatgacagggcggcggcccacggcgtgaggcgggggttcagcgggaggctcctggcctgtcgggcggccggtgcccgtgcccgggctggggccctgcccgcaggggggacggaggcgtgcaaggcctttaggtcggtacacaaggctggctta

SEQ ID NO: 75445 - DNA, 405 bp, Zea mays
  Clone ID: MRT4577_168837C.1
cacccccaaccaaaattttttaggggaaagttaacccattacagccttgtttcgttcccaaaaacaccaacccccaaggttttaaaaaaaaaaggggccgccttttaacattgacaatttttccaaacccgcttggatttcccatgcttaacctttatgggcccgaaggggcccgggatttatttggcccccatgctttttcttaagggacccaagtggccccgcaacttttttggccccattctttgccttggagggggcctgcaaagccctttcacttttggaggccttgctgcataatttgcaagggccttcccccccaaattttggggacccctttggggatttggcaattgttgcggggggcccgccttttggggggggggggagccccccccggggggc

SEQ ID NO: 75446 - DNA, 484 bp, Zea mays
  Clone ID: MRT4577_168838C.1
aaagctttttcttttttttattttttttttttttttttttttttttttttttttttttttttttttttttttttacccgcccggggggcccctccaaagggggaaccccaccacacggggggccgggacaagggaaccccagcgcggcccccagcggggaaaaatcaagggcaaaaaagccccccgggaaaaaagggtaccccctaaaaattccaaacaaaaaacgacccaaaagaaaaaaaagaaaaaccgggggggccaaaaaaaggacccaacccaaaataaagaagcggggcccaccgcccgctttaaagaaggaaaacccgcccggccagcggcataaaaaaaacggcccacccccggggaaaggcggttaccgaataggggccctttccccttccccggaaaaaaacccgttgagctcggccaatgggggggggccagcggttccagctaacccaaaggcgcgcatccgggtaccccc

SEQ ID NO: 75447 - DNA, 412 bp, Zea mays
  Clone ID: MRT4577_168839C.1
attcggctcgtggttgggtaatggtttttcaggaagcgtccagggcacctgtacggggggttctttgaagtatgtcaccttatgcaacggctactgtgattgacacggcacatgaactctcccagggctttcctggcctgacatgactgaagagtgctacagcttcctgcctgccagcgtggatagcagctgcctggaatgaccaaatctatgactgctgtttgtgtccttctgaaagcacaaaaaatagctgacgaaatagttctgctactaagaccatcctcggtcagccttccttatgcaaatagctccatcgacttattgaatgaaggagttgcatacaggaccaaacatgttccgtataacatcctgatgacagatgcgagtgctgtgattaacagattgataaaaa

SEQ ID NO: 75448 - DNA, 256 bp, Zea mays
  Clone ID: MRT4577_16883C.1
gtcactgggtagtgactagcatcaatcgagtcgtctctttttattgtatttgcggaccaccacgaccagagatgcaacacaacgcgctgactgatgaggatcatatgaataacataatccccagacaaagcagcaaccattacagcccgacacagatgcataatgcttgctgggtttgcttgatcactctataaaccgtccgttcatagtataagcggctgaatcaaaatcacacgagaagggcgagcacggcgtt

SEQ ID NO: 75449 - DNA, 362 bp, Zea mays
  Clone ID: MRT4577_168840C.1
agcgttgatactcctgatgaatttggctccgttgctgctcgatttcttgatacttatcgtgggtcacttagatcatagatccaatggccatggtgtgtactcggttctgattataacaactatgatttaattctgggctacaagatttagattctactgatgatgcgttaagataccctttggccgcgactaaaatataaaagaacccatgtgcttttcttaaattaacccgccgttcacacttgaggtaaagttattaaatctaggttaaaatatttgtaaattaaacccttaactttctgaaattgaaacacgcggtctgatggttattaaaaagatgtatattaaatatttaatgattt

SEQ ID NO: 75450 - DNA, 338 bp, Zea mays
  Clone ID: MRT4577_168841C.1
tggaacagctgggtctaggggattaataggattggccaaactcgggaatacgtgctttatgaccagttcaattcaatgtttggctcacacagcaatccgtgatgaatacttccttggtgattatgcacaaattatatgccgggctactccattcggactgaatggtcgacttgccttgacgtttggagaactgttgaggagattaagcgataccgatcgggaaccagttccaccacagcagttcaaggaataacttgcacgttttgctccgcaacttggtggctttaatcaacacgattcatatgcacttcgtgcttttttaccggatggtctccaat

SEQ ID NO: 75451 - DNA, 386 bp, Zea mays
  Clone ID: MRT4577_168842C.1
ttattttttttttttttttttttttagcctttggacgacctatgtatgcgtttattccagtacacagcataattagtatgaacgtggatctctgaacatgggggggtacgatacacaacacaaaaagggccttttacaatgtaggtgcatacaaactgtccgttgttttgtattaaggggcgtctagttgtaaaataaactagggggcaacaactattggagaaaccgggggtggaggtagtccaacgaatacgtagagcggagcccattcacggcgtttttggagctccggatgggggacggccaaccctcaaaaagaacagtggttgggatcaatacagggatatcatgggggacggacctcccttgtaaaggaactggggggg

SEQ ID NO: 75452 - DNA, 400 bp, Zea mays
  Clone ID: MRT4577_168843C.1
ggggccaaacccttcaaaaaacaatcagcttttacggggccaaggccaaccaaccaagccaagcaggggggacaaaacattggacaaaccagggggcccaaaaaaaagggggcccccccaggggcccccaacaaacaaagggggggggggcctacctgggtaaaggacccccccccggcaaattcgccacccggttttggaaaaagggaggggacaaaactggaaaccaggccccgggggggaccttggaaaccccaaaaacacctccggggaacaatgggggggccagacccacgggacccccccctaaaaatcccccctcgtgggaaggggcccccggggggtgggagggcccccccgatcccgaccctatactgcctcgtggggggggggggcggcc

SEQ ID NO: 75453 - DNA, 1727 bp, Zea mays
  unsure (1)..(1727): unsure at all n locations
  Clone ID: MRT4577_168844C.1
cattgggtacctcgaggccggccgggaggaccgccggtgatgcgctgctaaccacctcgttcgtggaagcgcccgcggatccggcgcacgtttcgctctgtcggcctgacgaggacgcgcctcggccaggccaacatcgctgccatgattgggtgttccaacgacgagacagagttctctacgccacacgtccccctataagtgcaagcttgaaaatagctatcgacacgaactcagtgtgctcataggttcctgacgtacgtatctcagttgcgttcgagcgttgtggacttgtggtggtttccttcctgcgccggagaaggtagacgatgggaaggggaagcgatgcagtgccggacgcccgtcgagctgcgctgctcttgatcgtctgcttggcggctcgagcggcttctgcaatccaggatggcctgttgccgaacggcaacttcgaggaggcgccgcccaagtcgcagctcaacggcacgagggtgatggggcgcaacgcgataccgcactgggagatctccgggtacgtggagtacatcgggtcgggccagaagcagggcgacatgctgctgccggtgccggagggcgcctacgccgtgcggctggggaacgaggcatccatccagcagcgcctcgccgtgacgccgggcgcgcgctactccatcaccttcagcgcggcgcgcacctgcgcccaggccgagcagctcaacgtgacggtcgcccccgagtcggacgtactcccgatccagacggtctacaccagcagcggctgggactcctactcctgggccttccaggccgcgggcagcgtcgtgaccctgatcgtccacaaccccggcgtcgccgaggacgcagcctgcggccccctcatcgatctgtttgccattaagaccatgccgactcctcggagcagcaagaataatatgctgaagaacggggacttcgaggacggcccgtacatcttccccaacacgcagtggggggtgctggtgccgccgatggacgaggacgactactccccgctggccccgtggatggtcctgtcgtccaccaagtcggtgaagtacgttgacgcgccgcaccacgccgtgccgcacggcgcccgcgccgtggagctggtgtccggcatggagacggcgctggtgcagaacgtgaccaccgttcccggacagctctacaggctccagttctcggccggggacgccggcaacggctgcgtgggctccatgaccgtccaggcgtacgccgcgcggggcagcgtcaaggtgccgtaccagtcccagggcaagggcggccacacgcgcggcgtgctggacttcgcggcggtcgcggaccagaccagggtggtgttcgtcagcatgggctacatcatgaagcccgacggcacgctgtgcggacccgtcgtcgacgacgtctcgcttgtctccacgcggaaccatcctgctcgccgcttgcttctgtgatgctaccgacaagattcgttcatgggttaatgtgaatggctgtgagtgtgctcgaactcgaatgctcgggcttcatttaaccagatctgggtagagtccccggccatcacatgtatttgcatcgttgttttgtctttcttggccaaatgtacttgcttcgttgtagttgtatagactatgtatgcttcgacgggtgtcccccaggccgtgtttnctggttnngnngaaaaaaaaaanaaaannctcgagactagtctc

SEQ ID NO: 75454 - DNA, 337 bp, Zea mays
  Clone ID: MRT4577_168845C.1
ctcgagccggccggcaaacatttttcattgctgtggacgcaggtccagatgtatagatgtcaatgacctgcttgctagcccaaacgagattcgatccactcacatctactgcactcactcacatcgctgaggtgcttgactgcatcccttacacattgcatgacaatgctgcactcaacccaatctccattggcaccgaactcacaaatcgccatgccacaggtgataagaacactggcatcacatagacagaaaaggccacgatcacatacatcatggatgagacatgtcctgacagaccgctacttctgagcacgaatgacattaccttagcctg

SEQ ID NO: 75455 - DNA, 232 bp, Zea mays
  Clone ID: MRT4577_168846C.1
tcgagccggccggatgtcttctctgatgcagcctcgcgtctcgtccctgtccccgtccgcgtccgcgccgccttttcgtccccgcgtcggcgtcgcggctccactgggcgtgcgcgtcaccggcgggaggcgagggcaggcggtggtcgcgatggcgtccgccgacgagagcttgccgaggattgcctcctccattcgcaagatcgccgactttcccaatgacctcaacatg

SEQ ID NO: 75456 - DNA, 314 bp, Zea mays
  Clone ID: MRT4577_168847C.1
ggggggaagcaaggttacattagggtacccggttttacccaaaaaaacaaagggggggcaaaggacatacaagccaacgccaacactggggggggatatattattttacaggtttttccaaatttagaaaaaccccgggggccttaaaaaagcatccaacggtgtgggctcaaatccaggggcatccatgaataccggaggccccccccccctttttttttatgacattattacgccaagccacgcgggggccccacacacatacatttttgtggggaaaaatatatggttaggccaggggcaattttacgggt

SEQ ID NO: 75457 - DNA, 582 bp, Zea mays
  Clone ID: MRT4577_168848C.1
gtaactactaacgagcgagtaacgactaatgttacgagcatattgacgaatagaaagacgaatataaccggtagttcctcattggattagcgaggggtacttgacttccagtaggaaccgtggaatgccttaggcactcgtatcgtatcattggactggcctaaaacgaaagatacagtgaagtctggactgggtgtgaactcctctatattcccaaagcaaggcttgtcccggataggagatacgctttcttggaattgttggggttgacttgggcttgggagaagcattttaagtgtgtaatatcggagttgatatgattgtctactcttgatgagattggactgcccgaagatcagaagaaagtgttagctgtatttcatttcatttccacagaatggtaagttcataggttgtagttcactggtttggttcgaaagaagcacgtatcgccaatagagcggtgtcgtcacctggataatagcattctttcattggactaaactaattagtgtcgccatgggaataataatctctttattcggaattcctggtcaataatgacccttcgggacagatgtg

SEQ ID NO: 75458 - DNA, 564 bp, Zea mays
  unsure (1)..(564): unsure at all n locations
  Clone ID: MRT4577_168849C.1
cgggacgagcaagggcggcgccggccgcggcggcggggggaaccgggccncgcncnccccaacncnccgancacnncngnccngngaaanaggcgngagaaccacgcncaacgncngngggncagaagnnccangggcagnccgngccgnngagcagggggggggggannccgccangaacaacccngnanncaacaangccnanncngcnnacaangngccccagaggncanancangggangaangcaacngcnggacncncaacngncanggcaccancnccnggcnnngcnncngccccaaaagagaaaggcnnnncnggannaaagancgacnnnangangggnggagnnncngcngcngncnccaagacagcngcagcnccgaaggagcgngncaagcnnnnganncagaaccaggangaaaggcncaagacnggcaggcnnncngaaccgnacaagggnannggggaccggcnnggccggacaaccagaagagagggnnnngncccaccggggagaggaaacacaacnaanggcagccggaacgnccccacacaggc

SEQ ID NO: 75459 - DNA, 268 bp, Zea mays
  Clone ID: MRT4577_16884C.1
gttcaaagcatgctgcttgattccaagatgttgttgtgatgaggcggcgaataaatccatacttaactgggggaccatacccaaacaaataatcggagactaaacaattctgtggggcagggctacaaaatagtattaccttttaaactgcaaaattttattgataccctattttagaaaggggaacggaagagccacaggattcattttcttgaatgttatttctggctagtgacataaagcaacaacagtcttatttattataaac

SEQ ID NO: 75460 - DNA, 344 bp, Zea mays
  Clone ID: MRT4577_168850C.1
cagcaacttattaattacctcttaaatttcgaaaactctaaaccaataatatggctaagtcatacttctggatgccaggatattatgcattatatgcacacaaactttgactcattcaaaaacgtttatagtgtcatcttgcatactcaactaactgacagtcagtataaagacactcttccggaaacatattaaatgatacaccttgcacgcaaactaattaaccactgtccacgaacctatctcatgcctagaaaagcaaactcatatgctcctattactgcctacagataccactacctttgttcatatataactcatgattacatcttcaattcacatct

SEQ ID NO: 75461 - DNA, 804 bp, Zea mays
  unsure (1)..(804): unsure at all n locations
  Clone ID: MRT4577_168851C.1
gccggccgggcctggatcttctccagagcgcctagccaaggtccctcccacgagcgctcctcatctccccctcccatggccacgccggtgctcctgcaccatcgcgcgcgccggcttggagctcaccggtgacggcagagctggccgtccttgctccctcggcggcctccctgctcccctctcccttatctcccatggcgcctggccgcagctcggatctcgcccgaccccaagctgagctccatccatagccgtcggtcagcccctgctccatgtcccacgcgcgctcctcctcaagctcatccccatggccgccgcaccctcccctgcatgcagccgagctccctacccggctgcgcccctagtactcctcgacgtcggcgtcttctccctctcctcgccatggcgctgagccgacctggaagatccgcgctcgccaggtcatgcgccgttgcccagctcaccccagctccttgcttccatggccacctctccctgcccctccccagcgtccagacgagccagctcgctccagactcgacctcgccgtcgtcttggtcatcgacaccacgcaatcgtccacgcgttgttgtcctcgcggacgccgcttcacaccatcaccctgttttcaccatccgtggcatcggtgtcgtgatgtcttggctgcagcaccaacgtcctcgacctcgccaaatacgttcgctgctaggncctatgtcgttaggctagtcgaccatggtcgttgccacacgcgcttgtccctgatgcacatcgcgtagtaattcggatctcgtcgattgactc

SEQ ID NO: 75462 - DNA, 341 bp, Zea mays
  Clone ID: MRT4577_168852C.1
agaaccgagacggcttgcggccggtggcggcgagcgccacgcggatcgtgatctacatccaccggaggaggaaggggaaaaaagagaggctcaccgggtgattgccgttgatgccgaggcgagcaaggcgagacgatcggtacaattagctcataggcctatgtaagttaggatttttttttttgcaggtaaagaattgcatagaggcgtgtagatcatatagcgtagatagatggcactggtagccatgccgatgaagatcttttgtgctgaactagaacaaaattaaagaggatgcattaagtcttgtgggtgtataaactagaggtgtctatatggtg

SEQ ID NO: 75463 - DNA, 362 bp, Zea mays
  Clone ID: MRT4577_168853C.1
cgaatttcccggttcaaccggagccttccggttaccttaaggtccacggcattattcttgaccccccctgagcaaatggccacgggttttgcccaatagttggcctgccctacctgatacatggctgccaagtttccggacctatttacaaaaatggataggttttttggcaaaaagctggaaaaggaccccaaattcttcaaaactgggaatgctggttgggcaaaaatggtgccaactaaccccatggagttggaaaccttttctaaaaatcctcctttggggcgctttgctgtccgtagcatgagccaaacgttggctgccgaagtcttaaaaagggtggagagaagggatccacctgg

SEQ ID NO: 75464 - DNA, 245 bp, Zea mays
  Clone ID: MRT4577_168854C.1
aacacccaacataacattttcaaatcgccacacatccctgggaggagcttacaacaagggagggaagtccacaaccaccacaaataaacaaaaataaactagtcaatacacccttttcttcatcaaataataagaatattcatatacatacatatcatacaaactattaaaacaatcatacatagaacaataaatataattaaaatgttaaaaaatataatatctacactactaataataatcca

SEQ ID NO: 75465 - DNA, 299 bp, Zea mays
  Clone ID: MRT4577_168855C.1
tgcaaagtagttcacatgacgtgtatcatatgtgaagtgtggtttttctcaaaatcattgactttaaggagctcatttctgagcaaaaaggtttgctctgtggaaaaatcaatcactgccaggattctttgatttctgtactattttgtataattgaatttgttcacttctctcacgccagcaagtgttttacaggtgccttggattaaaacaaaatgtgattttacgatttttatgtaagtcattgtgtctatgatgccactggtaaaaggcatatgcaattgcataatggcttatat

SEQ ID NO: 75466 - DNA, 315 bp, Zea mays
  Clone ID: MRT4577_168856C.1
aacaggaagcttggtttggaaaactggccatgggaattagatttctttaaactgattttggacaaccatagggtttgggttggtggaccaccgtaaccccaaaatttaaaaaaaaattgctaaaacgagacaaaaactgggaatgttttttatttactgggaaacccaaaaaccctggaacacaacttttattaaatataaaggcggtcaaaatttaaatattcagggggaacactttttggattaaatacaaaatgttagggctcccagaaacgggtaacaaattttcaaggggaaaaaaggctttttagggaa

SEQ ID NO: 75467 - DNA, 420 bp, Zea mays
  Clone ID: MRT4577_168857C.1
gcacgagctttcatataaatttgatagaaactccttaggagaatcaatggaatatgcttttgttcaattcgagatggatgaatctgctcagtcgtccttcgataaactcaatggcatgcttctcaatgacaagaaagtgactattagaccttttgttcgcaagcaggactgggaaaaagtttggaatagtatcacattctcatcctctgtccttcctggaaaaatgtctggacagtggtcgatcgggcaccttctagcatctgaaaacttgcggttggtcattccagtgcttcaaagtttaggaaatcctgtaattggtgatggttacatggttgattcaatcctaattgttgggaacagtgtcacagatcaagtcttatcaagtcttatcaagcgtttgaagagtgacaataaggttct

SEQ ID NO: 75468 - DNA, 980 bp, Zea mays
  unsure (1)..(980): unsure at all n locations
  Clone ID: MRT4577_168858C.1
ctgctgcagtccattctggttggtgggtgtgttggagctatgccagtcatcaggatgatccccacatcggtcctctgnggttactttgcctacatggccatcgacagtctaccagggaatcagttctgggagaggatacagcttctgttcattacagaaagccgacgctacaaggttcttgaaggtccccatgcatcgtntgtggagtcagtggttcccaaaacagtaaccatcttcacgatcttccagttggtttacctcctaatatgcttcggcataacgtggataccgatagccgggatcctgttcccagtgcctttcttcctcatgatcgtcatcaggcagtatctcctcccaaaattttttgatcccgtcgtcttgagggagctcgatgcagctgagtacgaagaacttgacggggtcccccttgaacacaaactggaagatgaagcatctgaagtaggaagttgtcctagccgtcctgatgcggagatattggatgaactcacgaccaaccgcggagagctgaagcacagaagttctagcctgcgtgaagaaagaccaattcaagtgacagtgagcacgcatatggttgcttcaagtgcggttcagccaagcctgtgaagacggcgaagtgttctttttatccgtagaattatgatcctcaagctgcactccgttgatgtgaatactgttgctatgtaatgtactgctactactagtgttgtacttgggtttttgacccaaacgcgtctgttggtaaggggtgatttgtaagaacagggacttacgtaaactacgtaggatcgattggtaagaagagagggagagaggagatgcaatacaagtcttcttggatatgaaagggggaatgccgaaggggcatggagtagaataatatcatatattgtcattagttcaaatagacggtagtaaccaagtttgccctcaaaaaaaaaaaaaaaaaaccacaccccccc

SEQ ID NO: 75469 - DNA, 237 bp, Zea mays
  Clone ID: MRT4577_168859C.1
ggggaggaaaaaaggttttttttttgccaaccaatttcacacatttttgggtttccacacccaccccatccaattggccattatacccccatttattagcccccgctttatatttataaccaattttggagtttggactagcaagcaacccaaatttattataccaagaaagattcactggttggcctgagcatgactttttggccacccctattgttcacccccatccaccaaccc

SEQ ID NO: 75470 - DNA, 203 bp, Zea mays
  Clone ID: MRT4577_16885C.1
agaagatattcggagggcgtgaccgcgttgggtttctcgaaatatccgggctggtgaacccccacttccagaaatgattgggctttttttttgtgttgagttaggttggttaggagaacacatctctgttgtgctctctgtggctgttgttcaacacgcgcatttttctgctaaacctgggctataagtgggctctatctctt

SEQ ID NO: 75471 - DNA, 2891 bp, Zea mays
  Clone ID: MRT4577_168860C.1
ccggccgggacctccggccgggaaaagcccccccgcgccctcgccctcgccctcgcccccctgcctagggctccgcgccgccccgaggagaggagaacgcgcgcgcgcgcgcgcgccattgcggatccaaacgctccgccgcctcaactccctcgtcaattcacctccgccgccgccgccgcgccgcttcgaacacgatggatctactgagacaccccttcaagggagttgtcactgatatcaaaggaagggccacttggtacaagcatgattgggttgcaggactccactctggctttaggatattggcacctaccatgtatatcttctttgcctctgctctccctgtcattgccttcggagcacaactgagcacggcaacaaatggaatactctcaacagttgaaacactggcatcgactgcgatatgtggcatcatacattcaattcttggagggcagcctttgttgattgttggagttgccgaaccaactattatcatgtacacttatctctacaattttgccaagaatcatcaagctctgggtgagcagctatatttggcgtggacaggatgggtctgcatctggactgccatcatgttgtttcttttggcaacgttcaatgcttccaacgttattagcagatttacaaggattgcaggagaactttttggcatgttaatcactgttctcttcttgcaagaagctatcaaggggatgataagtgaatttagtgtgcccgaagacgctgacagcagttcaccaatataccaattccagtggctctatgtcaatggcctactcggtgtcatattttcaattggcttgctgtacactgcattgaggaccaggcgagcaaggtcatggctctatggcacagggtggtttagaagcttcatagctgattacggcgtcccacttatggtgattgtgtggacaggattgtcgtatttacatccaggcaaggtgccttcaggagtccccaggaggctttcttctccacttccctgggagtcaagttcactgggacactggaccacagcaagggatttgttttctgtccctccagcatatatatttggagccattctgcctgcttttatggttgcaggactttacttctttgatcacagcgtagcttcacagttggcacagcaaaaagagtataatttgaagaagccttctgcctaccactatgacattttggtccttggattcgtggtcctgctctgcggtttgcttggtatccctccatctaatggagtgcttcctcagtctcccatgcacacaaaaagtcttgctgtccttaagaggcagttgctaagcaaaaagatggttgatactgccaaggagagcataggaggaagtgctaccagtttggaaatatatggcaagatggaagaagttttcatcaaaatggatagcgaacagaatactgattctgttgacagggagttgaagaacttcaaggatgctgttctgcaagaaggcgacgaagaagggagattggctagagaatttgaccctcgcaaacatatagaagcccacttgcctgtccgagtgaacgaacagagactgagcaatctgctgcagtccatactggttggtgggtgtgttggagctatgccagtcatcaggatgatacccacatcggtcctctggggttactttgcctacatggccatcgacagtctaccagggaatcagttctgggagaggatacagcttctgttcattacagaaagccgacgctacaaggttcttgaaggtccccatgcatcgtttgtggagtcagtggttcccaaaacagtaaccatcttcacgatcttccagttggtttacctcctaatatgcttcggcataacgtggataccgatagccgggatcctgttcccagtgcctttcttcctcatgatcgtcatcaggcagtatctcctcccaaaattttttgatcccgtcgtcttgagggagctcgatgcagctgagtacgaagaacttgacggggtcccccttgaacacaaactggaagatgaagcatctgaagtaggaagttgtcctagccgtcctgatgcggagatattggatgaactcacgaccaaccgcggagagctgaagcacagaagttctagcctgcgtgaagaaagaccaattcaagtgacagtgagcacgcatatggtactgcaacaatatatgatttgaagatggctcgtcgatttactctctgaccttttttttttcctgctggccttcaataggagccaaccggttgaattttttgggctcttttcttttctctgggataacaagtagtcaagtacgcaccacgcatgtcagtggctgctttccgcctaacataggaagattttcacaggctagttcgagttaagcacattccacgcctttctctttctttttctttccttggagagagagagagggggctttggatttcgagtttattgtttaacagcttcatctccacactacaggttgcttcaagtgcggttcagccaagcctgtgaagacggcgaagtgttctttttatccgtagaattatgatcctcaagctgcactccgttgatgtgaatactgttgctatgtaatgtactgctactactagtgttgtacttgggtttttgacccaaacgcgtctgttggtaaggggtgatttgtaagaacagggacttacgtaaactacgtaggatcgattggtaagaagagagggagagaggagatgcaatacaagtcttcttggatatgaaagggggaatgccgaaggggcatggagtagaataatatcatatattgtcattagttcaaaaagactgtagtaaccaagtttgcactctttgactgcaatcgcgtcagtgaagctgacggtgaacggtt

SEQ ID NO: 75472 - DNA, 384 bp, Zea mays
  Clone ID: MRT4577_168861C.1
attccaattccacaattttcaagaattagggcggcagaactgttgatagatgaattggaattatctgttgtcttattaagcctatcctgaagccacatgaaatgagatcggaattcctcggtgaattccaattccacattttcaagaaataacgaggcaaaaatgttcatatatgaattggaattatttgttttcttattacgcctatcctgaagccaaaagaaatgatgatcggaattccttggagaattccaattctacattttcaagacataatgaggcataaatgttcatatatgaattgtaattatctgctttattattaggcctatcctgaagccaaaggacatgagatcggaattcctcgggggtaccgagctcgaa

SEQ ID NO: 75473 - DNA, 375 bp, Zea mays
  Clone ID: MRT4577_168862C.1
attttatcagtgctcaagtattactttctttaaattgtacgagttgtttagtgcctgtgttttgatttaatttgtacaatttgtgacactctccttattctgtactttttcattttaaaccagtctgcatcattctcttttctgtcgtttcattgtgcttttgtattgttttgaatcttatttgcacgactgtttgctgtttggccaggtgaattagtagaattagtctgaaaatcgcattattcagtcaaaaagcaggtgttttcgagtattaaccactttcgctgtaaaataaacggtaaaattgcgttaagctcttgaccggcaaatcatatttattgaatttgcaatctattcaacgatggctcaaattgt

SEQ ID NO: 75474 - DNA, 257 bp, Zea mays
  Clone ID: MRT4577_168863C.1
gtactatcaaatgcgctaattagcgcgattgagggcacaaagacagagaagtgttcatatagtgacacacacacacatggggatgctatcacgggttttagcgtatatcagaggtgtttacgacgatactacacatgtgtagcggaccacagaacacagggtgattgcgggtcatcagagtatgcgtgtgtagcagtctgataaagactgaagacacactctcagacgcgggccttaatatcgtcgaggggcggaga

SEQ ID NO: 75475 - DNA, 278 bp, Zea mays
  Clone ID: MRT4577_168864C.1
attcaaatcataaaccccccaaactacattaaaaccattgaaaggaaaacaaccctctactgacatcgatcaccacaatgactactatatcaaaacactagcaccccctcatttctttgaccgaactctaatctaacctatttccattccccgagttccccaccccaatacgatagaattcacaaccacaaccatttacattcacctgggaaactccaaatcagcctgacaataagtaagggcgaactacacccaaagctaattaatttgaaacccgc

SEQ ID NO: 75476 - DNA, 322 bp, Zea mays
  unsure (1)..(322): unsure at all n locations
  Clone ID: MRT4577_168865C.1
cccgggttgaatttaaanngngcagactcttttgatnataactttgtagtaaagaagcatcataaaaaatncnnatatccatgttagaacttcangggagtgtcgagtcaggcttatcagtgcctaaacttgttgatacgagctaaaagtttgctgaagcatctttcctgtgaggacctgacaactttctttcacaaaaggagttgggtaaaatnctnatccactctnnntaaaaacaaannttctctatattnttttccaatntccaaacatctnanatnnnaaaaaataactnnccattnataataatnaaataatccac

SEQ ID NO: 75477 - DNA, 3052 bp, Zea mays
  Clone ID: MRT4577_168866C.1
agatgaggtatctttctctggtgcaagccatcctgccaatatgtacacacaagaagaccttcccaaacaagtttctcgtacccttaatcagggttctaatgttatgagcctggatttccaccccgttcaacaaaccattcttttagttggaacaaatgttggtgacattgcggtgtgggaagttggttcacgggaaaggatagctcacaagactttcaaagtttgggatattggttcctgtaccttgcctttgcaggcttcgctgatgaaagatgctgcagtatctgtcaatagatgtctgtggagccctgatggaactattctaggtgttgctttctcgaagcatattgttcagacatatacttttgtacctaatggagatttacggcagcaagcagagattgacgcacacatcggtggggttaatgatatagccttctctcaccctaataaaactctatctatcatcacatgtggtgatgataaactcatcaaggtgtgggatgctcaaacaggacagaagcagtacacatttgaaggccatgaagctcctgtgtattctgtatgccctcactacaaggagtccattcagtttatcttctctactgccattgatggaaaaatcaaggcatggttgtatgattgcttgggctcaagagttgactatgatgctcctggacattggtgtactaccatggcttacagtgctgatgggacaagattattctcttgtggtactagtaaagaaggtgattcacacttggttgagtggaatgaaactgaaggggcaattaagagaacatacaatggcttcaggaaacgttcactcggtgttgttcagtttgacacaactaggaatcgcttcttggctgctggagatgaatttcttgttaaattctgggatatggataacaataacatactaacaacaacagactgtgacggtggactgccagcaagccctcgtttgagattcaatagagaaggttcattacttgcagttaccacaagtgataatggaataaaaatacttgccaacactgatggacaacgcttgcttaggatgcttgagagtagagcatttgagggctctagaggacctcctcaacaaataaacaccaagcctccaattgtcgcccttggtcctgtttcaaatgtcagcagtcctatagcagtaaatgccgagcgacctgatcggatcttgcctgcagtgtcgacaagtggcttggcacctatggatgctagcagaactccagatgttaagccaagaataacagatgaatccgaaaaggtcaaaacctggaagttggctgacattgttgataatggacatcttcgagccctgcatttgacagacacagacactaatccaagcaaaattgtccgtttgttatatacaaataatggggttgcactcttggctcttggctccaatgctgttcataagttgtggaaatggcaacggagcgacagaaatcctagcggcaagtctactgcatctgttgcacctcacctgtggcaacctgcaaatgggattctgatgacaaatgacacgaatgatggcaacccagaagaagcaaccgcctgcattgcattgtcaaaaaatgactcctatgttatgtctgcatctggtggcaaagtctcgttgttcaatatgatgacattcaaggtcatgactactttcatggcacctccacctgctgcaactttccttgcattccacccacaagataataatatcatcgccattggaatggaggactctaccatccaaatctacaatgtccgcattgatgatgtcaaaagtaagctcaagggacatcagaagaagattacggggctggccttttctcaatcaatgaacgtgctagtatcatcaggtgctgatgctcagctatgtgtgtggagtattgatggctgggaaaaaaagaaatcaagatatatccaacccccagcaaaccgacctggcactttggttggtgacacaagggtgcagtttcacaatgaccaaacacatcttttggtcgtccatgagagccagttgggaatctatgatgggaatcttgactgtttgcgcttgtggtctccaagagatgcactcccagctccgatatcgagtgcgatatactcgtgcgacggtctcttggtttacgctgggttctgcgatggtgctatcggagtcttcgaagcagaatctcttaggctgcgctgccggattgctccttccgcttacattccaccttcaatactagcctgtgctggacgggtctacccgttggtagtcgctgcacaccccatggagcctaaccagatcgcgatcggcatgagcgacggcaaggtccatgtggtggagccattagacggggacccgaagtggggatcggcacctccacaggacaatggagcgcacccgcacccgcatccagcgatatcagcggcaccgtcgaccgccaccaaccaggcatctgatcagccaacaaggtgactctggcctgcagcactggaggagattcgttagcgcagagactggtaggacctgtaggagatagggagaaaaggtaaacgattagatgacgagaggatgatgctatatttatcaagtccgcagcgccctgcctctcttgtgacggcccgcgacacaagtgtggtgattgacagtgacatcgctcactctaagttaggttttggttcttccctggcccccggaaatcatcacctggcgccgccacattcgaatggagatggatctgctggcatcatcttgcttcctcttttgtaaagcttttcctgctgagtttagtggtaccttagattgtcgtccatttctgccctgttctccgggcagctatttgtagtgtaaaaatatggtggcgtgctggatggtgttatttatgcgtgcgtggcctgtcatgacgaattccaccatgtttggggctatttgatggatgtttactgatcatggctcgaaattatttttttcttcgtgccatttgcaattgtagaccgtggacgcggtgtgagttgatgagatttgctggtgagctgtttctgg

SEQ ID NO: 75478 - DNA, 738 bp, Zea mays
  Clone ID: MRT4577_168867C.1
ccggccggggtaagtgttgctaattaataacctttaattgcagctaagcagagagtgttcagctcgtttaatttcttctgtaaacataatgacatgcgtatgtatgtctcttcaggtgagcgcgatgcaggaggagatggagaagatgaaggaggagaaccggatgctccggcgagtcgtcgaccggaccatgcgtgactacgacgaactgaagaagaaagtagaagcctgctatcagcagcaacaggcagatgagcctaaggagcccgaggtgttcctttccctcggcgccaccgccgccgggactggcggcggattcgcggagccgaagcgcaaggagcggcaaacagtgcgtcggccatctgcggggagcgatgacaccgacgacgacaccaaggaggaccgtcttgggctgtccctgagcctggcagcatcgtcgtacgaggaagagaagctgggagccgggccagccggccacgacttggaagaagcctccgtggccggcgccgaccgcaaggcgaagggctacgcgctgctggagagtagcaagctcgaggcaccggcaccgccggccgccgccggagaccttgccgcggccgggatcacgagccagagcgtcaacccggccaaccgcaaaactagggtttccgtgcgcgtccgatgccaaggccccactatgaacgacgggggccagtggagaaagtatgggcagaaagtcgccaagggcaacccttgccc

SEQ ID NO: 75479 - DNA, 768 bp, Zea mays
  Clone ID: MRT4577_168868C.1
actgaatgctgttgatcttttaaagctactagatcaggaggcgccccttcgggcgccctatcccgcacaaggtaaacaactggatgctggattgaaatgattgtatcctaagggacatgcgacttactgctagtaaataaaattgttgtgtgcctatgctcctaatatcatacagtggcatagtaggatgcagtgtagtagttagtagccgtgtagtgaacatttgcctctgccatgcatgtgccatccgtgttcaacaggagagaaaaaatgtgagatgaggcaggagcaaacagagggactggacggatacacaatagcagcatgacaatttccaacaggactgaaagcaatatgtgaggtgaggcaggagcaagaagaggtggggactggacggacacacaacagcaacatggcaattcctagcatcactaaaagcaacagacctgagcaattccatgttgccttctaatttaccctcagttatgagtatacctgaaaagcataattttgaacgacagattaattgattttcagtagattctgtggcaaaaggcaagtgtaatgagtgtaagccatcaaccatgtttttactaaaattacacctactacatcagtagtaatatatctctactttagtatcatttcttgttattatcatgtacattgaacattgagatagaaaaaaaaaatttttataaattaacaaaaaaaaatgatcaaaaacaaaaaaaaaaaaatttacacatgccaaagccctaaaaggtc

SEQ ID NO: 75480 - DNA, 374 bp, Zea mays
  Clone ID: MRT4577_168869C.1
aaatcatctatttataatggaattgaattctcccttgcttttgtaacacaagaaatctattaatcacaaatctcattggcagcttccgaaactaaaaaggaactggagaagatttaccaaaacacataaacaaacattagctaaaccctgaagccgcagagatggtgctccgtgagcaggagtttgagctctagacggacacatggatgcccaatgacgtgggaatacagccatctcccattcattttctcctcgatgtgctgttgatcatactatacagattcagggtttagctaatgttaggttatgtgttttggtaaatcttctccagttcctttttagtttcggaagctgcccatgagattggcgattaa

SEQ ID NO: 75481 - DNA, 503 bp, Zea mays
  Clone ID: MRT4577_16886C.1
gcgaagaccaccaccaaaattaacccaagggggaatcaattggggtaccccgggccaaggaaattgcccccccaaaataactccaacatgaagaaaggggggaacccactcttgaaaaagtgggcaactaagccaaccccctggatgagggatcccttaacccccattacggatctacaaaggggtaagcggaaaattctaccgacaaatggaaaaggatccaagaaacccgcccgcaaaaaggttatcaaaaagacgacccgacgatcgatcgaacggcccaccaactaatcctccttgggcaacggggaaatgaccaatttggggaaggggaccccggggggggaaaaaacccccgggaacaccctgggggggaacaaggggttgggggcccccgggaaaggcaccccccccccactgaagaaaagcggggcccccgcccaaaagtggatttccccccaaaaggaccccctgaaaagggtggaaattgaaaggggcccccc

SEQ ID NO: 75482 - DNA, 410 bp, Zea mays
  Clone ID: MRT4577_168870C.1
cggcgagcagtctcctctcctgctgcaactgcagccatgccgtcgtccacgatgcgcctgctgtccaggcgcaccgtcacgcctccaccgcgcccacgccaccgcattccgctcaccacctgggacatctcctttctctccgccgactacatccagaagggcctcctctacgccaagccgccctttcccaccgaccgcctcctcgaccacctccaggcctcgctcgcccaggcgctcgacgcctactaccccgtcgccggccgcttcgtcacggaccagcaccgcgacgccaacggtcacgtcctcggctgctcggtctccatcgactgtgacggccagggggtcgacatcctccacgccgtcgccgacggcgtagccgtggccgacgtcatcccgccgacagcaacgga

SEQ ID NO: 75483 - DNA, 590 bp, Zea mays
  unsure (1)..(590): unsure at all n locations
  Clone ID: MRT4577_168871C.1
gcgacccgcgccgcgccgcgcgcagtggctcggcacgttcgacaccgccgaggacgccgcccgcgcctacgacgccgccgcggtcagttaccggggccgccgcgccaagctcaacttcccggacgccgccgccgccgctgcggcgcgggatgtgcagccgcgccgcccgttgcccggtcagagcctccgcgagaactgtgggtccaacgccgcgtcgccgctgcacgtggcggtggcgcgggcgccgaccacgctgcagggaacagggccggcgccgcccaaggaccaggacatctgggacggcttgaacgagatcatgacgatggatgaccgcagcttctggtccatgccgtgatcctgctacttcggccgtccatctccggatcttcctcttgttgttgtgcgtttatttttatgatgaccagattctacggttgttttttaggggaagagaatcctacgcttagctcagacgatcgtaaattgaattttggagccatgtggccaccagctcactggctgtgctgtaaatctgtaactcgtcagtcagccatggctntcgtacgagttttacaccaccgtcatccctc

SEQ ID NO: 75484 - DNA, 295 bp, Zea mays
  unsure (1)..(295): unsure at all n locations
  Clone ID: MRT4577_168872C.1
gtgtggatggnatactctagcagaaaattcgnncccttagcgtgggccgggccagggacatctctttcatatcatatcagttttttgctgttttacctgttctttttgtttaacgttggtaccctttttacaactgtaacaattggtggacattcaaccaacttgcttggaacaacccaacagtggtctaccaacaaaccatcattggtggggccctgttttagattgcttatgagttataggacaagtaatgaagttttttggatgatgttggtggcttcccagaaataagaaa

SEQ ID NO: 75485 - DNA, 396 bp, Zea mays
  unsure (1)..(396): unsure at all n locations
  Clone ID: MRT4577_168873C.1
ccggccgggccgggattcaaagagcacgcagngcagcactgaatttccacttcctgcactcactgtgctagctgctcaaaccgtagtagtaacagtccatcaccaccaatggctcccaaggttgcgctcttccttgccctgagcctcctgtctgctgccaccgcgcatcgctgctaacccaactgttctggaccagccgacccaacgccgccagtcgcgcccgactccgtcgccccacagtcactcccgctgccccatcgacgcgctcaagctcaaggtgtgcgtcaacgcgctacgcctcgtcaaggccggcctaccccagaacaagcaacgctcgcccgccgctgcagcgcatgccgcacctcgaccgcacattgcgactctgcaccgccatca

SEQ ID NO: 75486 - DNA, 1329 bp, Zea mays
  Clone ID: MRT4577_168874C.1
cccacgcgtccgtccgcattcccatcccatccactccaccaccagatccccgcgagcgtagcctctcctcctcccctctcacgtcccaccgcatgcgcaacacgcgcctgccttcccggtccagccccctgcccccaggtgttgcgtcccccgtcgatcgccactcgaccctgctggtggagtgagtgccggtgatccatccggagttggatttgtcctcggcaaggaggttttgcaccatacaagatcgtcaaaattgccgaaatgggaggtataattagtggggactcgcctaggcacagctcaccagcatcgaagttagagaaaaagatggttgacgctatgcaacagagggcattaaaaggaacctctgtgaaatcattcaatagtgtcatcatgaaatttcctaaaatcgacgagagtttgagaaactgcaggactatcttccaggaatttgatgaagattccaatggtgaaatagatcaactggaactcaagcgttgtttccaaaatttgggtatcgaatcaactgatgaggagataaaagatctttttgaggcatgtgacatatatgaacatatgggcatgaagttcaacgagtttattgtcttcctgtgccttggttatcttctaaatgaccctgcagtgtctgaagcaagaaaaagaatggggttagggaaccttgaaccaacatttgaaacattggttgagtcatttgtcttcttggacaagaacaaagatggatatgtcagtaagagtgagatgatacaggcaataaatgagaccattggaggagagcgctcttcagggcgcataggcatgagaagatttgaggaaatggattgggacaagaatggcacagtgaccttcaaggaattcctttttgcttttactcgctgggtggggatcgataatgaagacgatgatgatgaagataaagaagaatgagtgtgccaactaaggattaggcgttatgaattggccaggttgactggaggcctccagcagcttcctcctaccgttgttcagaagcagtagttcatgttttttgtgtgccgagctgatgaatatgtttatgttcgtataaacaggatgaacactagctatgttaaggatttgcttataaaaagttacaccgggtcagatgctgttctgttagcgtacattgtctttaaaaactatttgcattctgtatgacaatgtaaacttgtgaacggtagtagtgctttactttgtttcaatttggttgtttgctgcttctgttcattttgtagaaacacctgcccatccctaatggtgcaggcatggaactatggttcctgtgaacac

SEQ ID NO: 75487 - DNA, 455 bp, Zea mays
  Clone ID: MRT4577_168875C.1
gtgcggcgctcgagccggccgggtcccgggaccgcatatcttactcttctactcttcatattggcacgttgttacgcctgcgtggtctgctcggctgctccctgcctccctcgatccctacctccaccgtcgtcagcccgccactgctcgtctcctccgttgggtgctgccgcgaaggtgcctccgccgctgctgcaatcggctcctcggtgcgacccgctgctcctctgcccgagtgcggctagctcgccggcggcccggcttgttgcttttctacttgagcgcggcaggcgactggtgctccctcagtccggcaacctcccggctccctgcctgcgcactgccgacctccacgtatccttcgcggcactgcacactactcccattttctgctttcacctcttctttctctctcgtccctctccctacttcttcttccccctttctcctccccc

SEQ ID NO: 75488 - DNA, 735 bp, Zea mays
  Clone ID: MRT4577_168876C.1
cgggcataattactcctcttatctgtttgctcaaataaaacaatcttcaaacaactcattatgaaggcctgagtagtagatatcatttgatctattgccacttaaataacctcccgattaaaactttgaaataagttcctgctcatttaattcaacctcactacaatttctttgaccttttttccataccctacagttcctgctccttcaatgcatctacaactgtttcgtgttttcccataccctataatttccttcactatccgaaaaactacagtttccaccctctatagcttaaatgcatctaagtttttgttttccactatcatgtgagttcgataaacatttaaatgcatttatgtacaactcactcattccaatttaacaactacagaaaactgataaaggtaaaaaaaagtcaatgctcctcttcagtctcctcaaaaaaggtaaccttctacgtagttatcttgtatccatcatcaatgtctactgttcgtactcatgcatttacaggccgtatgtttgtactccattacataacgatcaggaagattattaatattctacattttatttagcaggctcaaacaaggacccctaaaaaaatcaatgattccacagaccaaaaggacccccaagacatatgaatcacatcagactaattgagattcaactattctatacattttttggtcaactctttgtatcagtttgatcaacccttttgtaact

SEQ ID NO: 75489 - DNA, 227 bp, Zea mays
  Clone ID: MRT4577_168877C.1
ggccgcttttttttttttttttttgagagcagcttactcagggagtaggaggtccatggaacaactatgaatgacaactatagcacgaggcttatgcgtgaatcaccgattaattagtcctaaggagaacgagcctgaaccagcctatgatgaagcgaggattcctggatcctatctgagtggagtagcagggctccacgccttacatctctctaggcggaaacatc

SEQ ID NO: 75490 - DNA, 309 bp, Zea mays
  Clone ID: MRT4577_168878C.1
gagaagacggtgcgcaaggcgcaggttgagccccgaaagcagacgtcggataacttcgacccgaagaacccgcaagacgacccgctggcgatgctcgagcaccgcgaacacctgccgcgagagaactggatccagatccagaccgcccacatcatccgggagagcctacgggggagcgaccgcaccgagggaatcaatcaccctcggaagtgccgccccctcgtcgaccaatacactaaaggctacccgcggcgtggggtggggcaaggatgcccgcccgcctgaagccgccgagcctaagaagaccgt

SEQ ID NO: 75491 - DNA, 472 bp, Zea mays
  Clone ID: MRT4577_168879C.1
gccggattcccggtcgactccacgcgttcgcggactcgtgggcggacgcgtgggcgcagcagccgcgagccgtagcagtagcgcaaaggccggcccactttatttactgctcgtctagtgcagcctgcagctcagcaaagccaggggcgcagtgactaaaggccacaggttgttccccttgctccttattcatcatgtgatgcgctctctgccggcgacacctgacaggatgctagctgatgcctgtaccacccgagcatggcgattctatcccaggcagactcctccgcggcccagcgcccgctgctgcctgccgcctagactgctggcggtaagggcgatggatgcgctactcttcggacatcactagccggctgcccaaggaccccattctaggagtaaacgaggatttcctcgtcgacccctatggcgacagagtgaatcgtcagagacggagcctaccgggacgaca

SEQ ID NO: 75492 - DNA, 270 bp, Zea mays
  Clone ID: MRT4577_16887C.1
atgggtggagattttgtcccatatccatacccatggggacaattttcgtcccatacccataacctaataggggaattccccacgggttggcgggaggcgctcacgttggcgtcgctcatcgacgacgagaagaagcttggtgactgccagttcgacctctggaagcagtactacgtggccacatgcgtcgctgtgttcggcaagctccggtgcagccaccgcttggacgcggtccagagcggctgcaccgcgctgtccatcttcaaatag

SEQ ID NO: 75493 - DNA, 465 bp, Zea mays
  Clone ID: MRT4577_168880C.1
aaaagaacagttgatccatcacctcgctcctaatattaccaccaaccaagccaagaacaagtgtttgagttcgcagttgaccccccacctgcagctgcaatgcaaactctctaacaaagagaggtcgagatgctgctctctttcccttcctcactactacaatatgtactaacaccaatttgccctgttctacaacctcaaatcttcctaagtagtaggcaggaggctagcagtagtacggtaaatacaacatgaatgaaacaaagcagcaatctttttcggcagcgttactgtaactgtactacaagcagttccacacagtatacggcggtcatctctgcaccatggcgtcggcacgcccgtcctcgagcctccagctggtgctccggctcctggacccacggctgaaggcggcgctgtggtcagacgccacgtcgtcgtcgttgagctcaggcatggcgcgca

SEQ ID NO: 75494 - DNA, 467 bp, Zea mays
  unsure (1)..(467): unsure at all n locations
  Clone ID: MRT4577_168881C.1
gttttnttttttttttttttttttttttttttttgtttttttacgaacagagttcatggttttaaacggatagaagcagatacaaacagggtttatgttttcaaacggatacaaacacataccaacattggtcacaaacggatacaaacagatacaactggtcgcatttagctacattggtcacaaacagaattttcttaaacgactggaaacagaattttgggccgttctactccctttgcacatcacgcttaattttcttcctcggagtaatttttttcgcaagccacttcaaacttttacggggagaactagggggggtttcaacacgaactagttctccatcagggtttatatcttcatgaccacctggtgggatgtcttcctgaagaccggttatgatgtcttcctggggactgggagggatgtcttcatggtaaccggttgagaagtcttcatggttaacc

SEQ ID NO: 75495 - DNA, 457 bp, Zea mays
  Clone ID: MRT4577_168882C.1
cggacgcgtgggcggacgcgtgggcggacgcgtgggtgagatctgcggtggggccaggaatctgatgtaaatagattattcaggtttttttttcccttttgagccaccccccggaagggcctttggaagtttttgtccagggacaagttaaccccttttggttgattatttggttggtggcacaaaagttaatgggccttttttcgccttatggaggaggatttattccagtgggggggtggccttcccttgccttttggcaggttagggaagggggccttaaaggaaaggggcttgtttgaaagcattgaaattgcagggggctaaaatcccttttgtttttaaaaattaaataaaagaggattttagcctctcgaatcccttcatttcccttgtatcccaaacaaaccttgaagtgttttctacagctttaggaaatgtggtttacttctatggt

SEQ ID NO: 75496 - DNA, 564 bp, Zea mays
  Clone ID: MRT4577_168883C.1
ggccgcttttttttttttttttttcttaacgagcaattctggaatccaataccccaaactcttgaaaacacaatcctagaaatcccgaaatccctttttcaaccatgaccaccaccaggcttcttcaacgctcccccaaggatactcggatccaacatcttagcctccggcacctcgaccccacaccggacaaacatgctcttccaaagcgcacccacggccctttcctccggcataaaaacaacagtattgatatacgcgctagtagtattcaagcaatccccttcattaaaaagctgcgcctcgcaattatcccctttattcgaaaaaaatacgccgcagcgcgcttcgcccggcaaattgatgcaagttccgtttttccatttttcaagcggaggcgggaagtatgactttttgaggagtttgccgcggcagtgtttggggccgccggagccggcgtatgtgagggcgaggatggggatttgcggggctggaggggcgacgggtttgggggctggagcccgtgatggtgtgggtttgggtgtgagtttagggcctaggact

SEQ ID NO: 75497 - DNA, 431 bp, Zea mays
  unsure (1)..(431): unsure at all n locations
  Clone ID: MRT4577_168884C.1
cttggcgcatggatgggtactggcgaagtatgccctcgcaggatgccgtcattgggcgatcagttggtgcgaagtcctgccttcgccttggatctgcggggtcggaacccggccgcgtttgtgcgtgaagtggaggccgaggcctcaaggattgtagggcgatacgtgccgaagaagaaaaccttgcggagttgggatattcgcggttctaatgttcgtttgaaccgtgttttcgagttgaaccgtctgccatatggcggttacccgggagacgacgatgctggtgttgtcgaccgccggggaaaagggcggctgctgcggtcgacgagggcccttcgcggggagttgtgccggccgcgaccactaaaaagaggaaactaggtactgcagttgangggttgggggtctccgaccgttttgctgtcgatttg

SEQ ID NO: 75498 - DNA, 410 bp, Zea mays
  Clone ID: MRT4577_168885C.1
ccacgcgtgcgctttttgttcgtggtcgacgacaccctgcatccggggctggttcggcgacatgcagattctgactacaacgatgccttgagcaagaccatcatattcctggcggcgcatggctgcgggaagctggcgagcagtaacagcggcaagagacgcggcaactacagactatactactgaaagctcgctgacgtggagctgaccggcggatactacgacaccgtccacaacgtaaagtacagactcccgctggcgataacggtgactacgctggcgaggacagcgctggcgacaacgcacgagctggacgctgacctacgagcatcaagcacgtgcgccaggccatgaagggtagcactgagtacatgattgaacgcggcatcctgaagaacaagctgggtgtg

SEQ ID NO: 75499 - DNA, 368 bp, Zea mays
  unsure (1)..(368): unsure at all n locations
  Clone ID: MRT4577_168886C.1
tgctcccggccggcatgggcgtgggattagcgcggtcgccgccgangtactgcaatataaaaaccaactacgatcttaatgtcagtggaggggagggggcaccctatccagactgcgggggtaaaaagaccacattcagtgtcagtgcatccacacgtcacaatcttactggccgaaagctgggggttgatgtgaactattcgtccttccatgtgcaccacgaggccatccacctttgttactagacatcttgcccaacttcccggagatttaggacttcccactcacaagagttgactggattgacttcacctggttcatacactcttacaatgataatggtggttgacacgaatcattctctgtcc

SEQ ID NO: 75500 - DNA, 404 bp, Zea mays
  Clone ID: MRT4577_168887C.1
accggtcgaaggtgcctgggtatgctaacttatgtgagccttgctctgcgggtgggctggtgtctgatgaggcgccactgttgacatactcagttagactctttgctgatatagggatagcacaccctgctgtcttattcatgatgcttgaaattgtggaagatgggataaagactgacagcaaaggctggaccgtggacgtttaataacacactcctgatcatgacctgaaatagagagcgatgggctattgagtaggctagaagagtaagcggataagaccttgactatgatgagaaggagctgtagatacatccaagatcaagagcccgtgcatggaagagattaagcacttttatacgaccagcgttaactcaaccgactggacgagatgatacaactca

SEQ ID NO: 75501 - DNA, 374 bp, Zea mays
  Clone ID: MRT4577_168888C.1
gccggctactagagctgcaataggctgttcatactaaggctcatcttcggcagcagaaggtgctccacgaggacagccaagctattgcacacaaccttcatagcaaggtggaaatggaccgcgcacatatgggcagcctcatccacacggtgagaaaccatctgcatgaagaccacagggacaagcaacgcctacgggatctgctgaaggcggtgaagcacaatatggcagcagacaaccttcatacggggcaccaccaacttaccctggtgcacccactgatgccacccgggcgattgacaacagcaaccataaagcaaaacttatggttgggaaggctttggacagcccacatcctacactactgaagcagg

SEQ ID NO: 75502 - DNA, 826 bp, Zea mays
  Clone ID: MRT4577_168889C.1
actggcttttttttttttttttttaacagagtgtatagagataaatgtcacaataatcagagtacttattacatagcggaagtcttacaaaataaaagataaatatagcgggatctaaaatccatccttggcgccagaaagtcaactgggagacgccacctagatcgaatcgaactcctcattaagcggctccacttgaaccacatgtacttctccttcaatgagctcctgctcagctacttctatctgctgctcaccaggatcctcgggcacgggctcttcgtgaatctgggcgcaatcgacgtggttcacgcagagccgcggcacggcggtggcgtaaagaaaccgacaatgaattccgcccgtcgcggttgctccaggtgttagctggtggtacgtgcacccttgccaaggtcaggaccagactccttctgcccaggcgccccctccggtgctgtcacgaggagcgagacgccggcaagaaggccaattcgcggtgatacgtagttgtgcggcgatgtcgaagttcggcgagaaattgcggctcgccgatcgtcgcacacgcccgagatgctagacgagaacccccacggcgacccaaggaagctccggcccacggaccttccgatggtgtatgggcgcaatcgatggtggcgcctgcccctgatttctccgctcgcgctcccttccgctgtcaatggtggtggccaggtctcagttggtacacggcaccgcggtcaaggccccggggtttatatcctacagcgcaagagagcatgagttttttcaacaactcccggagtctgcggccccggccggcctcgag

SEQ ID NO: 75503 - DNA, 255 bp, Zea mays
  Clone ID: MRT4577_16888C.1
tttccatatacacatatcatctctctgctgggagtcttaaaaaatctcgaccactaccataatctttatctctttcatctaccctattctcttctcctacctcttccttctcttaatctaccaaatattcatttaatttataaattacatttataccttcttctaataccttttatccaaatttcaattctttcttcaatcttttttccaaaaatatcttatacttttcttcctcatattgatataaaaactttc

SEQ ID NO: 75504 - DNA, 210 bp, Zea mays
  unsure (1)..(210): unsure at all n locations
  Clone ID: MRT4577_168890C.1
cccgggcccgacccacgcgaggcnctcccgccgtttncgaagaaggagggcgggggcggggcccnctcgggccaagcctgcctccggcaccgggccgctgcagctgggagcgtgtggagctggaagctcccagccatggcgtgccatccccaaagaagctacgtgattgctgggggaccggggcgcttgtgggaagaacctcgtctccat

SEQ ID NO: 75505 - DNA, 391 bp, Zea mays
  Clone ID: MRT4577_168891C.1
cagctcgcgcgagctccatcggggacaaggccatacctcaacggagtgcaaggtcggccgggccgttcgggagcgatggatgcgcatagctggtggtgcgggcatgggtaccggcacacggcgcaactctcttttttcttgtgataacagatcaataacatatcataccttccaattgcatagctgaatcgaaacatgtcgcgtaggatagttcggctaggccggagacctgctgttggggacttgttctcaaatgctatgagttaagaacaaggcaacacaaaaatgttaatggttaaagtccttcgtccttcgaagcattatctcccttaggatataatgatcttcagacgaaggtcatgaaggatgtaccttcatcatcacagtatat

SEQ ID NO: 75506 - DNA, 994 bp, Zea mays
  Clone ID: MRT4577_168892C.1
cccagcgtccgtttttttttttttttttttcataaatgtttatttcagcactatgaatagcaaaaatacaacatggttaataagaaaatatacaatggaagaattataattcatttacaattgatgtacaataagttttatttacttatgtatgggacttgccaaaatttagctccgtggtttgcatgtacctccatatacatatcttcaccggttgatcttactgcagctgagtctaatctccccctgcatcccgtgtggcggtggtattttacccatcttcacaattgccttggcgaaatccttggcgaacgcctcgccgttcgtgctgtacattttcaccagatggtccaggggtccaccgtagccgtagagcgcctggtcggatgtgaggaggccgcgccgccctaccaggtcccggtagtatgcgttgtcaaaccgcattggggtctgctcgtcgaatggagccggcgcgtcgtaagcggactggcatgtctgccggcgcagctccgcaaacgagggatcgatgtcggcgccgccctctccgttgtagccgtagactcggtccctgtagtggtggcaccgcgccgtgccgatggtgtgggcgccggagagcgccgccatgtcgcgtgcatcgaggtcgtactgcttgaacaggttaatgagctcggcgagcgtggagttgggagctgggagaccgtattcggcaccggtcctgttggcgacgcgcgagtccttgcggccgagctgcactttccaggatgggcccccgagcagggcgacagcgtcgcgggaggcgagcgcgaggatgtcggcgcaggagaccgtggccgggcaggcatgctcgacgtaagacttgatctcgtcgatgacgtcgaagccgtggagcgagttggcgttgggcgtggcgtccttctcgctctcgaaaaagggcgtctcgtccaggaggacggagccgtcgcatccctacatgccactagttcctagatcgcga

SEQ ID NO: 75507 - DNA, 353 bp, Zea mays
  Clone ID: MRT4577_168893C.1
cttgcaatgtaaaaacgcaacaacaaaagggcgaaaacaaaaaaagaacccccagaaaaaacaaaacagcggaagagaaaaaaccccgcaaaaaacccccccacaaaccgaagaaaaacacggcaccccaaaaaaagtcctcccccataacgcccgggagagtccaacacttcgcggaagcccaaaacgggcccaccaagccagaccgcccccctacacgtgcccccccacacccaaccacctccaggggtccttgcaggcggagccggggggacctcgcccgattcaacatctccggacggacaaaaccgcaccctttccttcgtggcctcgtcctgtaactgccccacccc

SEQ ID NO: 75508 - DNA, 434 bp, Zea mays
  Clone ID: MRT4577_168894C.1
gtctccccctctcctccgccactaaccaaggaggcgaagacgataaccaccgacgtgccttcgtccgacatgccctagcgatccgttctcatttgcagacccaatccaagcccagagcaatcaccaagcctggcagattagatttccaccctcacatggaggaaaaatccaaccttcgcatgtgacctctatttaaatccccgcaagaatcgatcaatcaatccaaaagggtgcaggaaaacagagcaatcccgttgcttagcgtgttcgccttgccgttggcgtctcttctccgttcctcggcacgcgtaggcccataaacctccgctaaagctcctttgtacacaccgtccgttcggttacggttcttgatccggcgagggaccgccgctgccgaaggcaatgcagccggacccgcaaggcccgggcagggg

SEQ ID NO: 75509 - DNA, 2890 bp, Zea mays
  Clone ID: MRT4577_168895C.1
attgggtacctcgaggccggccctgtctccccctctcctccgccactaaccaaggaggcgaagacgataaccaccgacgtgccttcctccccacatgccctagcgatccgttctcatttgcagacccaatccaagcccagagcaatcaccaagcctggcagattagatttccaccctcacatggaggaaaaatccaaccttcgcatgtgacctctatttaaatccccgcaagaatcgatcaatcaatccaaaagggtgcaggaaaacagagcaatcccgttgcttagcgtgttcgccttgccgttggcgtctcttctccgttcctcggcacgcgtaggcccataaacctccgctaaagctcctttgtcgcgcccatttcgtcagccatttcccagattccccataggcgagggttcccgggctgagatccaatcttttcagttgttcggtttcaatcggtgtaaattcctccagaaagaaacctagaatcgcccccccatagttggaaaaggtttccatttctgaccggttgtcgagcctggctacgttttgccgagcaaaggcagggcgtccgttcggttacggttcttgatccggcgagggaccgccgctgccgaaggcaatgcagccggacccgcaaggcccgggcagggggaaggcgggcggcgccaatgcgcacccgcggctgccgccgccggtgacggcggggtcggctgggcggccggcgtcggtgctgccgcacaagacggacaacgtgcgcgaccactaccgcatcgggaagaagctggggcaggggcagttcggcaccacgtaccagtgcgtgggcaaggcggacggcggcgagtacgcgtgcaagtccatccccaagcgcaagctgctgtgccgcgaggactacgaggacgtgtggcgcgagatccagatcatgcaccacctctccgagcaccccaacgtcgtccgcatccgcggcgcgtacgaggacgcgctcttcgtccacctcgtcatggagctctgcgccggcggcgagctcttcgaccgcatcgtcgccaagggccactacaccgagcgcgccgccgcgcagctcatcaagacgattgtcggggtggtgcaggggtgccactcgcttggcgtcatgcaccgggacctgaaaccggagaacttcctcttcgcgagcacccctgaggatgccccgctcaaggccactgattttgggctttccgtgttctacaagcccggtgataaattttctgacgttgttgggagcccctattatgttgcccctgaggtgcttcaaaaatgttatggcccagaatctgatgtatggagtgctggagtgattttgtacattttgctatgtggtgtacccccattttgggcagagagtgaagcagggatcttcaggcagattttgcgaggcaaacttgatttggaatctgaaccatggccaagtatctctgatagtgctaaggatttagtccgtaagatgcttatccgcgatcctacaaagaggttcactgctcatgaggttttatgtcatccatggattgttgatgatgctgtcgcacctgataagcctattgattctgctgttttgtcaaggctgaaaaacttttctgcaatgaacaagctcaagaagatggcattgagggtgattgctgaaagtctatctgaggaggagattgggggtttgaaggagttgttcaaaatgatcgatactgacaacagcgggacgataacttatgatgaactgaaggatggtctgaaaagggttggctcggacctgatggaacctgaaatccaggctttaatggatgcagctgatatcgacaacagcggaaccattgactatggagagttcttggcggctacgttgcacatgaataaactggagagggaggaaagcttggtgtcggcgtttgcgttcttcgataaggacgggagtggcttcataacgatcgacgagctctcacaagcatgcgaacagttcggtctttctgatgtccatctcgaggatatgatcaaagatgtggaccaaaacaatgacggtcagattgattatagtgagtttgccgcgatgatgagaaagggcaatgctggcggagcaggacggcggaccatgaggaacagcttgcatgtgaatcttggcgagctcctgaagcccaccgagacctagttttttttaaccagaggatcctgcttcccagatgcgccccatctgaaacttaccgtgtgcctcatccgctttcacagatcgattagttgatctctagtagcagcgccaaaagcagtttaagattttctcagtggtactagtagtgaggggaaaatagcatcctgtggtgccagtgagagattttaggcgctgaagacgacgtgctatgctactccggagtcctgttgtcttcttcttcttcttgttgttgttgatttcaggtttgtactattactgatctttgttgtaaaatgcgctgttgtcccatgaggtaggcacctaggtctcctccatttgaattatatcaaacggatttgtaaacacgttctcatgcatgaaaccatttcttaatgatgatttattgttgcttttttcaaaaaaaaaaaaaaaatttttaagtactctgcgttgttaccacaaggcgcgtaactggaaggccttgtcaggtacattcccatggcatctgaagtttttggatgcgttgtcggtctgctggcctattctgagatgttgagtggttatcctgtggtattactaagatgctggacaattttcgtagtgctggtggtatcagctagagaagagggatggctggcacaatgtggctactatggccaactgcttttgtatgtgtaactatcgatgtagattgactatggtctaaacatcagtttagttgat

SEQ ID NO: 75510 - DNA, 646 bp, Zea mays
  Clone ID: MRT4577_168896C.1
gccgggccgggcatcctactattgaccaatactacctaacgtaatatctactaaccatgacccctcggcctcgaccatcacgacctcttgctccttccgcgtgcaacaccccgctgctcggagctacccggttgacttgccaatgccgctgctaagctcgcgcctcgccgcgcgctgcgtctgctctgctcgctgctcgccgccaacatacctccagcatcctcgcacagtcaagaacgtacgccggagatctctcaagcccgccctgtttcgcacttctcgcctctcccgtgcgacttccgagttccatccgtgtgcttctgctccaaagaaccggcgcttctcaagaggtaccgcgaggctgcagctgatccacccgacggtcgttcgatgcgcgtgcgtcgctgcgcatctatccagccgcaggcgtgaagacatatcacctggttcgaggccgatggcgcaccccatggctcatcgctatacttctcacttcgtatctctgctggacacactagctgctgcctgatgcgatgcgtgcagtcgaatcgatgtgtgagactacttcaatccgaactcccagatcatgtgaatgggacactacctaggcccgcactgactataacttcgataactataccaggga

SEQ ID NO: 75511 - DNA, 441 bp, Zea mays
  Clone ID: MRT4577_168897C.1
gaaaaaaaaaaaaaaaaaaaaaaaaaaaaaaaaaaataaaaaaaaaaaaaaaaaaaaaaaaaaaaaaaaaaaaaaaattaaatggacttgtggtggggataaaaaaggttaaatacaaaaaattttttttttttcccgggcgggcctttttaatggtggggttttcgctccccctttgggggccgttttttgggggttcccgggcttgggccccaatcttgtggtgttttttgggcccttacttttttccctggggcaaatttgtttttcggtttccttttcccccccctttccggcccggggccttaatgtgtaagccctggggggcttttgggggggcctccctccctttattcgggtgggcttcctggcccgttttccagtcggaaacccgttgggtcccctttgttttttttttggccccccccctggggggggggg

SEQ ID NO: 75512 - DNA, 315 bp, Zea mays
  Clone ID: MRT4577_168898C.1
cccgggcggttcatccgttgcgcccttttaccaaagccatgttagcacaatcactcttctcacacctccacagtgcctttcgagcaacttcttgagaggtttgctcatttgctttttcacggtgcatggcttggtgacatgatctgtgatgcggtctagtttggttccggagttgttcttgggggggagggtggggacccatgctggacttcttgctgagattgcttgtgggtctggttgtgattctggtgtgcattttcatttgggtgctggtgcgtgcgtttgtggtgacgtgtctgcccttttgtctggcct

SEQ ID NO: 75513 - DNA, 366 bp, Zea mays
  Clone ID: MRT4577_168899C.1
ggccaagggaaccaaaaaaagggggcttattaaaaacccttttctttttttaaagccccccaacggggggccccttaaaaaaaattaaggctttcctaaaaagggtttttaaaaagggggtgaaccaaacttgttttaaccacccccattaataaagggtgcccggcccccggggttaacatattttggggggggatttaaaagattttaccgttttgcttcccaaaaccccaaaaactttaaggggggaaggaaaaggggttttttaaaattttaaattcagggcagggggagttttgtaacccccacaaatattttttaatcttttggggggggggataaaccccccggttccccccctttttt

SEQ ID NO: 75514 - DNA, 396 bp, Zea mays
  Clone ID: MRT4577_16889C.1
attcccggccgacccactcttcctcccactcttcctaaaacatagatattatttcacactctaatactaatgaaccaagggctgcttctttctatcggtgcgactaaccacatcctgttcacatcattcacccatcacagaatattatcccatatcacacccaccatagtatatatatacatgcatacacccctcttcgtcatcattaattactaacaaaccctctacatcactattcacctaccacctattccaactcaccatacaatttcgctactaccactgatcattcatcttctttattctaacctacaatccacgacaacacacctctaaatcctatatcaccctcatacataatataaaacaccctaccatacttcacttctcatcctt

SEQ ID NO: 75515 - DNA, 926 bp, Zea mays
  Clone ID: MRT4577_1688C.1
aggccggccgggggtggaggctcgaagcgatacatgtctccctgtcgagacgagacgtcgtcggtgccattaaacggaaataaacctttcccggcatatatgagcagctagccttcctcttccacccacgtcctcctccatatatataaaaagtcccacaccctcctccactccacctccaaggccgtgattgcagtagagcatctccttttctttatttgctatatatatatgcatgttgtgatcttcaagcagctcggccgatcaagctcatcaaacccatagcatcgccaccaaattaaaggtcttctctagatcattacatacacatatatatggggcctcagcaagacgggcggtcgtccacggcgaacggcggcacggcggcgaggcgcaaggaggccgccgcgaagcaggtggtgcggtaccgcgagtgccagcgcaaccacgcggcgtccgtcggcgggcacgccgtggacgggtgccgcgagttcatggcgtccagcgcggacggcacggcggcggcgctcacgtgcgccgcctgcgggtgccaccgcagcttccacaggcgcgaggtggcgacggcgacggagacggccgccgactgccgcgaccgcgcctccaccacctccgggtgaactcgacgatgagtcgtgatgggcattggaatggttgttacagtagttgttcttggatgatttttgagtggatttttattgcgtgtactatatgctcgatgcaattaacagcatgcgtgtggatcgtcgttcgtatatatatacgtacggtgcttgtaactgatgattgtggaccgtggacgtgtatataaataaagtgagtggttcttccaaaaaaaaaaaaaaaaaagcggcctcttgccttcttctctatagaaatatggaagaacatgcatgttgctttttttt

SEQ ID NO: 75516 - DNA, 331 bp, Zea mays
  Clone ID: MRT4577_168900C.1
cccttgcccccttccttaggctgggatcctttaaaccggcccccctgggttttttttttttttttttttatttttttttttttcttttttcaagaaggaccttcccccaaaccaaaaaccctttgctacctttacaaatggcgggtttgaaggccataatacgggggccttccaaaaaaccacaaacccaaattttttttcccaacataacgctgaaaccccacccacccgaggttttaaaaacgcgacccaaacgtggcagcgttgatcaaaacacccctctaggacttaaacctcagatcagcccttcttaataaggaaagtttcccta

SEQ ID NO: 75517 - DNA, 383 bp, Zea mays
  unsure (1)..(383): unsure at all n locations
  Clone ID: MRT4577_168901C.1
taataatgaggccggaaaaagagaaataccgctgagaagcgaatgcgagcatagacaccaaacccagacgtgttcaggatcaaggggaaaaaactacactattggacgtcttttgacgagaggcggaagagagcaccctggactatnagagcaggcaaaaaacgaagagatgggttagggggcctaaagtatagagagatagatcaaaacaccgaccaccagaaaagagaagaacgagcgcacgaatatttacagagatattaatgcgtcagagatacaaacaacaacatacgatggaaccccattagtaacgagacagaaaaacacgcaggggcatttagatacggtacgtgcgcagccatacaggcaggaaggacatctaa

SEQ ID NO: 75518 - DNA, 428 bp, Zea mays
  Clone ID: MRT4577_168902C.1
ggccgctttttttttttttttttttattgtgttttttgttttttcatgttttttttgttttttatagtgtttttttggttttcaacttttttctactgcacatacctgtagtgtaatatagaaacacgcagcccccgctttgcgcgcacaaaagcaattaaatattccacatcatcatattttattcagcaaacacacataaaattggactctcccgaccagctcattacaaaaaaaaagcatttggtgaacagagcccagccatcacccggacacgcagtgacatgaagaagaatttttcctcatgcactgctgtgcacttattcctaattaaggcaaaggcccaactaggcacaactatcgcccggcctaaccagtttgtagaaacgctgccgcgaaacaatagacccaaaccttgaaacaagctc

SEQ ID NO: 75519 - DNA, 482 bp, Zea mays
  Clone ID: MRT4577_168903C.1
gatatgatatcaaagctcacttacaagataaaagcactatgcaatctcttttcttttctaggacacaattgaaacatgcttttttcaaacgaacacaattatcatatgacttattgaccacgtagaagtcctgctcaaattctacagatccaatcctccgcacatcaaattcaaaccaggtggaccaaaatcagctacaactccggccagggatcgcttactgctacaagtcagaaatcgcaacaaacagctgccgccgtctcacgagtaacaccgtccacccttactggttagccaagggggctcgcgcgagcataagggtaacctgccagtgcacgacgccagaaagccgggccgagcattgaagcccacccggccgagaggacaccagatccgggaaaggtaggactcggatccgcacttggaggcgccggatccacacagccgtcgaccggatggcgcccatgctgccagaggttcaa

SEQ ID NO: 75520 - DNA, 1862 bp, Zea mays
  Clone ID: MRT4577_168904C.1
ttggacctggcacctaggcggggctgtcaaccttttacaagtaaaaggcggtggagcacgctcacgctccggaactagtgatggtcgcagcgggggcgggcgacctgatggatgcggtagcagtttgaatggaagtgggagccgggggttatacattcgccattgaggctcatgtcggtatgctcgaggcgattggggagattgaggcagcactggatttggagttcttaccaagaagcggcgacgccgggcaactactcgtgcaaggcggaggcggagatggaggcggcggaggtggagatggaggcggcggaggtggagatggagatggaggtggaggcggagaggaagagcgacggcgacggggaatacgaagctaggaagaagactccgatgcggtggttgcgggggaatgtagagcattctgatgcggaggttgcggagcggcagaagaggatgaagcaaacccatggtcatctggatgacaaggagggggaggaggcacggaaaggagacattaagagagaagggcaatcggagagcgcaaagtccaggtcagaatccaatgaccagaaaaacaaactgatgtatgagaggtacttggagtggaagaggaggaacgaggagaaggaggaggaagagcgtaggcggtaccccgataaggtaaatgaccctgaagcctatcaagctatgttgttcaggcagagctgggacaactgctatttgaagaagtacggtagcttcgataagaagactaatatcccttgcaagcgatttacacataatcttccgccacgcggtggcactgctaagcaaactgtacaagtattttatgtcaaagttggaggaataactggaggtctacagtggccgcttgacggtgtttggtttggttgccctacgtgactcattagattataatcgtaatattatctttgagcgcaaaagggataaatgtcagatactcaccgatcagaatccgtatttagaactgacaggccctgtgcgtgctgtcctcctatctggtcatgtgatatttgaggcttcattgtatgtgaaaggtgctactagatctgatgacaaagaattgagccttctagctattacttcattgggggaattcgatgatgctcactcatacttggttgagcactcttacactagcagacttagcacacttgaactgatgcttggttatcttacttattctgtggaagctacaatcgaagtgcgagtcatttgcgggacatggccagctgatggttttcgtttcatctttgaggccaatgccggtataggacaatggattgtgttgcttgagactgcagagactgcagatgttggtgataagatcagccttgcacggcaggttgtttctgttgactatcatagagatagagagctgaaggttgtggccaccattacgaatggttctgctacctatacagatgaaaagggcttcaaacctctgaaaatgggtgcaagctccaaggaacttagtatcggtggcttagggttgcaagtcactgtttattggtcctgcttcccatttgcaccggtttagttagtttcgttgaaagtgctttttatgctcaaaaaaaaaaaaaaaaaaaaaaaaaaaaaaaaaaaaaaaaaaaaaaaaaaaaaaaaaaaaaaaaaaaaaaaaaaaaaaaaaaaccaaaaaaaaaaaaaaaaagggggccttgaaccccaagtttttgtccctttaagggggggtaaatggccccctgggggaaatatgggcaaaagttgtttcctggggaaaatggttttccgttccaatttccacaaaaaatacaaccggaaaccataaggggaaaacccggggggccttaaggggg

SEQ ID NO: 75521 - DNA, 601 bp, Zea mays
  Clone ID: MRT4577_168905C.1
ttgaactgatgcttggttatcttacttattctgtggaagctacaatcgaagtgctagtcatttgcgggacatggccagctgatggttttcgtttcatctttgaggccaatgccggtatagtacaatggattgtgttgcttgagactgcagagactgcagatgttggtgataagatcagccttgcacggcaggttgtttctgttgactatcataaagatagagagctgaaggttgtggccaccattacgaatggttctgctacctatacagatgaaaagggcttcaaacctctgaaaatgggtgcaagctccaaggaacttagtatcggtggcttagggttgcaagtcactgtttattggtcctgcttcccatttgcaccggtttagttagtttaaatattttttatttattcccatttgctccagatgaaatgttttttctgctgtttgttttcttctcttaaatagtttctatttatttatttatgttagggattttcttgagatctttatttcggtatgtatctatatgtaaagaagcaacaagcagcttgtttctctaaagtgcttgtaccgtagagagagaaaaaaaaaaaaaatat

SEQ ID NO: 75522 - DNA, 236 bp, Zea mays
  Clone ID: MRT4577_168906C.1
ttccggggccaccacgcgtccgaatactgcgccatcacaatcccaacagctaccagccgcctcctcgccaagcacttctcctctcaatctcgccacaacatcctcctccggtccaaactccgtcatcttcatctgagcgtctgggacgacaacaacgcagcgaagaccatcatggcgatctgtgccggacgaagcagtggacacatcgatcacaccaagggtgagcgcgctgcggc

SEQ ID NO: 75523 - DNA, 303 bp, Zea mays
  Clone ID: MRT4577_168907C.1
attcgtctcgaggggatccagttgatccaggttttttacctactgcggggccgatgctggcgcgagggggccctgggcttcaactgcgcgtttcacctctggctgttcaacaaacagctcataggttgaaccagtatcatctactacaaaaaccacccgctggacaagctgactataacctactcaattggcacctgttgcaccaccaccgtactgaaacccttattccccagctaccgtgtgaggcccttgcaggggctgatcatgaccacctacaccggctgggacatggccgtcaccttg

SEQ ID NO: 75524 - DNA, 368 bp, Zea mays
  Clone ID: MRT4577_168908C.1
gggatctgggcaagttgtactagtactagtagttagtggtagagtcagggtgctcttcacattttccatgtttcgtgttcgtcgttagcttagaccactcgcactgtactgtgtgccataccgattgctgtataaggcagcacggagcagattagaggacccagcagcagttgttgtgccagccaagaattagagtagtaccggtcaaattcaacagggcccagtagatgttgcagcatctcttgtctctctgggtttaccgaaactaaaacactgccttagttttcagccgcttcagatgtttgtactcatgtactgacaagtatgttgccataagcatgcagaacaaatatattatatatttatat

SEQ ID NO: 75525 - DNA, 156 bp, Zea mays
  Clone ID: MRT4577_168909C.1
ctttcgatcaatcatgcatccacgcgatctcaatctatcggtgaaccctgccagaccaacaaaagtctaacgggatcctctacatactattcacgctatccccacacagtgtactccgggccctaacgagggcggcaccgaaagacccccatcgat

SEQ ID NO: 75526 - DNA, 457 bp, Zea mays
  unsure (1)..(457): unsure at all n locations
  Clone ID: MRT4577_16890C.1
gggaccctcgaggccggccnnnnnnaatntccnntcttcctccccgtccgtcgcattcatccgatccgccccctcctctcccatggcccatcacccttgctccaccaatctctagcgccttgcgcaccagcaaccttccaaatctctgctctactcttggacggacggagaaagggaggggacccaaaccagatcttggcaacaccactgctccacccaaacacaggtagagtagagtagagtagggctgtggtggttcaactccctcccatgttcatgggctcataggtgaaccaccgccgcccacccagggcattggggctccccttcaaaagctccctgctttcttgggggttttggttcccgcacaaggtcggagccacggagggggaggggtcttgctgttacaacatgggcctgggaggacgaatctatcttggcaacaggtgaaggaagc

SEQ ID NO: 75527 - DNA, 318 bp, Zea mays
  unsure (1)..(318): unsure at all n locations
  Clone ID: MRT4577_168910C.1
ggttgtnttataaaaaggtattgcgtgttttacaacncaagaacagtgtgaaagtgaaagatacaactctagatgagactggacatgccccttgacgcgcgaggcacactctatggctattgccaatcacgtttctgccgcatctgattggcatactcactgcgatagtaaactcgggggcattttacccgggcaccgtctctttgctatggtcgaacctacaatgctatagaaacatgtcatccctgaaaaatacgtactaaaaaataaagccaagtcgaccggtgctcaacaagtatcggatgcctttgtgtgact

SEQ ID NO: 75528 - DNA, 1089 bp, Zea mays
  Clone ID: MRT4577_168911C.1
gaattcgggacgagaattcggcacgagcccaaaaccaatggaggccacgacagcgctcgcgctctcctcctcgtccctcgccaccgcacgccgctcgccggagaaggcgaccgctgcgtccctcagcctccgccgtttctcagctaccacctcgctccacctccgcgctgcacggagcccagcgcttcgctcgcaccagtcacccttccagggatggaggcggcgggggagggcgggcgggctggtggttcgggcggagatgtttggccagctcaccaccggcctcgagtccgcctggaacaagctgaggggagtcgatgtattgacaaaggaaaacatagctgaaccaatgcgggatatcagaagagcacttttggaggccgatgtaagtttgccagtagtaagaagatttattgagtctgtaagtgaaaaggctgtaggcactgatgtgatccgaggtgtccgacctgaccagcagttggtgaaggttgtgagtgatgaactggtacaactgatgggcggggaggtatcagatttggtgtttgcaaaatctggaccaactattatattattggcaggtctgcaaggtgttggaaaaactactgtttgtgcgaagcttgccttctatctcaaaaaactgggcaagagctgtatgctagttgctgcagatgtttacaggcctgctgctattgatcaactcactattctgggtaaaaagaaaacatttgaatgttgataggttggtgtaccagtttactcagaaggaactgaagcaaaaccttcacaaatagccaaaaacggcttgaaggaggcaaaagtcaataaggctgatgtaattatagtggacacggctggaagactgcaggtcatacacatgttgcttcgatatttgttccattgatctgtttcatctgtgagtataaatgataaagggcaactatgtaagatcttggatccaggtcataatcatactgaaatttgaaaatgttaggctgtactttacatatgtggttaaattgcactatttgttttcgtgtaaggaatcaagttggtggcaacatgaaaaatggtctgaaatgttgactttga

SEQ ID NO: 75529 - DNA, 694 bp, Zea mays
  unsure (1)..(694): unsure at all n locations
  Clone ID: MRT4577_168912C.1
ccggccgggtctaccccacgacccttactcgcctcgagtaccccgccaaaaagttctactgctcgtcacccccactacaacaacttcaactacaacttcaacctacacctacagacctcatctttttcgacatattttgccaaaatgagattgactaccgaaaacatcaaccagcgcgtagtcgccgccaagtatgccgtccgtggcgaacttgctgtcaagtccgaagagtaccgggccaagatcgcaaagggcgataccggcgaccttcctttcaacgagatcatttctgccaacattggcaaccctcagcagctcgaccagaagcccatcactttcttccgacaggtcgctagtcttctcgagaaccccatcctgctcgagaacgaggaggcccttaccaaacactttggctaccagaccgatgtcattgagcgcgccaagttcctcctgagtagatngggctctgtcggcgcctacagcgccagcactggagttcctgctatccgtgaaagcatcgcacagtttatcgagcgccgcgatggcttccccgctgaccctgaacacatttacctgtctgctggtgcctcttccggtgtcaacactctccttaacgttatctgcgcctctcctaagaccggaattctcattcctattcctcagtaccctctctacaccgccaccctgtctctcc

SEQ ID NO: 75530 - DNA, 267 bp, Zea mays
  Clone ID: MRT4577_168913C.1
ggcgtgaacggacggctgcccgcccatgttctccccggcccaagaggcgcttctcatggtgcaccgccggatcctcgagactgacgctgacgacggcgacgaggacggcgagtatgggcccaggggcaaggatgccagggacagggggaagaccactacacgactcatcgtgcctaagcagcacgtaggatgcctgctcggcaaaggcggcaagatcatagagccaatgaggatggaaaccaagacgcacatcaggatcctgtcgcg

SEQ ID NO: 75531 - DNA, 219 bp, Zea mays
  unsure (1)..(219): unsure at all n locations
  Clone ID: MRT4577_168914C.1
gcggggtagtgctngaccgctgggacggcgtggnagtgggcgactgcgcgccgtcccccgcggtgctgcgtctctcgcccgacctgcgctgggaggaggcgcgggagccgntgcacgccggcattgacgccgncaaccacgccgtcggggtgggccccgggatggcgtttgccaacgcgctgttgggtttgggcccggcggggggggccgggggggggg

SEQ ID NO: 75532 - DNA, 241 bp, Zea mays
  unsure (1)..(241): unsure at all n locations
  Clone ID: MRT4577_168915C.1
ccagcgtttcttgtaggttgctctagatccgttcctgctggtggttttgtgnggtcgntgcggcgagcgaattataagatgctggacaagctgtgggacgacgtggtggccgggcctcgcccggagacgggcctcgngaagctccgcaaggcctcttttctttccgcccgctcgtcttcaactaaagacgcggacggtttcngcttcnatcggtctcagtcgacgccttctttcccgttga

SEQ ID NO: 75533 - DNA, 300 bp, Zea mays
  Clone ID: MRT4577_168916C.1
tacacatatagaccaagccaaaaacagcgatgtccggttaccaccatacagttccagtgacagcaacaagtagagcatatagcaagctccgatctgctgcgatcaaccatatacatgcatacagcaagctaaactcctataacaccgcggccactcacctcctgtcgtcctgttcgtgccctccgccgccgactgggccgagccggcgccggtcgaagccgccaccgccctcctccctacgcttcttgtgcgggccgggtggcgggggcccgggcggcggcggcggaagcacctcgtgcc

SEQ ID NO: 75534 - DNA, 855 bp, Zea mays
  unsure (1)..(855): unsure at all n locations
  Clone ID: MRT4577_168917C.1
cattgggtacctcgaggccggccgggagtgccagtgccagtgccggtccctccctctcttggctggtgctggcctggatcctccacgcgacgccgccgcggctcccttctcgtctcgtcgtccagtggtgggtggtggcggtggtggtggagtgcagatccgcgcatccgtacgtggattgccttccgtctttgcccattgctgttggccagtcggcgtggatttgagagctgcgtgtgtgtgtgtgcatccgtggtttggttacttctccggcactcaagatcgaagtcgcaggacttgtttgggttcaactgaactcccgtgtcctgcgccaggaccgccactgatgagacactcagatttaggatggctttcatccgccgccattgctgagcttctccagtaaagactggaatttttcgccgcgccaacctttaactgtatttcatgatacaaaaaaatgtcatcagactccagtctaaccgaatccctacatgagagaacaattgtctttggccttaaactttgggttgtgattgggatcgctgttggagcgtccctcttgggtattcttctcgttcttctcatatgccttaccattcaaagttgtatcaagaggtcacgcaagccactcaatgaccgtcgactgcaccagatccctccagcgtacaaagatatcaaggaagtggggatggtagaccaatttcctgccaaagattttgttgtacatgatgggcttctactcactattcagaatgggcctgagcctgntgaaccagttgatagagatgcgattcagntggctcaggagggaaaagtgaacaaagagaagagaccatgtctctgcttcttttc

SEQ ID NO: 75535 - DNA, 275 bp, Zea mays
  Clone ID: MRT4577_168918C.1
ccccgacagttctcaaatgccgcttggcatcaatctctcgcgggtgctcaggcacagcgccgagctctgcctggacttacagtgatgaaagctcgggcttgccaaagcaggcccagtcttagcatcattgctttttggctgcttgcttgggcaccgaggggtctgctgtccttgttgcgcgccatctggtggaggcgcctacactactgagttttctagtgggcccggcggtgaccatgctgagggtgggctacctggaagatgggccagtccca

SEQ ID NO: 75536 - DNA, 414 bp, Zea mays
  Clone ID: MRT4577_168919C.1
aaaaaaaaaaaaaaaaaaaaaaaaaaaaataaaaaaaaaaaaaaaaaaaaaaaaaaaaaaaaaaaaaaagaaaaaaaaaaaaaaaaaaaaggttttttcttttggccgtgaccccgctttggggcggattttgggggatttctatcacactggggggggggtcggccttgcttttagggggcccatttggcctttttggggggcgttttacatttccttggccggttttttacaccttggggtgtgggaaaaccttggggttccccactttatttgctttgcagaacatcccctttttgcaagttggggtattggcgaagtggcccgccccgttggcctttccaagcggtgtggcgccctgattggggaagggccccgccttgtgggggctctttaaccccggcgggtgtgggg

SEQ ID NO: 75537 - DNA, 219 bp, Zea mays
  Clone ID: MRT4577_16891C.1
ggcatccatgggttcttgcgtgtcggtgtcgtcgacgaggcaccggcggcggcggtcgaggaagctgtcggtcgcggcgaggaagttccggcggaagctgtccacggcgatcgccgccgacgcgccgatcgtccgcagcgccggcagcgcggcgacctgcctcgcccggcacggtgtcgtccacttggaggcgccggactccaacgtcaccctgcgcct

SEQ ID NO: 75538 - DNA, 185 bp, Zea mays
  Clone ID: MRT4577_168920C.1
agctagaggtgcaaacagcaactccagatgatagagtctccctcgccgccgaaacctcgacctgcccgcctgcctggtggacagcctcgtgtttatcgtgagcatttcgacgggtaccgccgatgttccccccaacgcgcctatgcacatccagcggctggcgcgccatgtacactcattaccca

SEQ ID NO: 75539 - DNA, 346 bp, Zea mays
  unsure (1)..(346): unsure at all n locations
  Clone ID: MRT4577_168921C.1
aatatttccctncaccccaaacggaataaatatcggggaatatcatacttttctaaacatctctatctataggaagcattaggcactatttataataaagttatgagaaaaaatggaaagaactaattcagaatagttagattataaacatattaaagaaagattcagacataattagacataaaggatattttatggatttacataattccatctaattataacttatcaaagttcggtttacttcttttgaaatactttatcaattaatttggagacaatcttcataaattcctcgaggcctgcgccgtatggaccccaatgacccagcattatttttccaacc

SEQ ID NO: 75540 - DNA, 765 bp, Zea mays
  unsure (1)..(765): unsure at all n locations
  Clone ID: MRT4577_168922C.1
gtgatcggcacgaggctgtgacgtgctgctcctcgccctcctccgaccagtgccgcgtcttgaagcttagcgaactcgcgcgctggttcgctcgctcttcatcattcttgactctgtcatcgtctccagctccggccgtcgtgagttcttgaatccgtgctgccacaaggtacgcaaccgctgttcctgaatcctggtacaacgcatcaacaagtggataaactcctctccttcacacgacaacgcagaggcaaccgcatcagcggtgcggtggtccggtaccaacatcgtaggattaggcgttccgaagacttccaatggctttttccgaccgagctgaacaccaccaggagcctcgtcccctccatcgcctcttctcaccaagcaacacgacgttaggagccctgttcccccctccccctaaaacaacattgctacgtccgtgtggtctgtcgattggagcaaccttgcagccaccaccatcagtagccccttcctccctaaaacggcagagcacgagttcagtctcatcctatcgcatatctccttcatccatcaccggccacatgcccacatccaccggcatcactattctgatttccctacattacaggccaggtgtgtactgtgctgcaatctacttccatgccattntcgtcaatttttgttttcatccataatattactgctgcctagaactccatgacagcgaacaagttcctcccgatgggcagcctcagataagtgtgacaagttggccgacat

SEQ ID NO: 75541 - DNA, 375 bp, Zea mays
  Clone ID: MRT4577_168923C.1
caagacacacaggaaccgtagaagggcctctctatctactttccgtcttgcgtattctgcctctgtgtgatcgtgtcttgaaaaggaagtgagtgagattagtgcatacaagcctacaacagctgaagaggcgagtgatagacataggcatgagccgtatagacttgcaaggtgttgggaatatatggttcgccaaatatagaccggacagagcgccgatgtttcttcagcctggttataataacatgtaatgttctggaacaacatctgattgacacaacctgtttccctcttttgtttgagaggtaggttgggctttgagttaaagcgttagtttcttctatgttaaactggtagtggactaaggtttagtgt

SEQ ID NO: 75542 - DNA, 354 bp, Zea mays
  Clone ID: MRT4577_168924C.1
tcgaggccggcagaatagaagatatgcttgtctgcgtatgcgcagcagtgtgcactcaacgatgaataaatttcagctaccgcagtattcatcatcctcgtgatttgcctcctctacgtacctaactgagatggcctcgacatcggatgagagcacgacacctcaagccgaatcacccgccgacctggccggcagcgacgacagcgagttctccgaccccaggggtgacgctgaggcagctgccgccggcgccactgaagatgatgtcatccgtgcctataagaaacagagtgggttctaagtcatccgtgtgccaactcaccaggtccaccggcaccaccacctctgtatgaa

SEQ ID NO: 75543 - DNA, 740 bp, Zea mays
  unsure (1)..(740): unsure at all n locations
  Clone ID: MRT4577_168925C.1
nnaggccggccgggaatgcgcatgaccatgcgcggaagcattgttctcgtcctctcctgtgatattcatctccgcctccgcgcgtacctgacgcaatgcgactccgggtatcctttcctcctactcctggcgatgcccgccgatgggcgcgtggccccgtccagtgcgaaagtccctcctcctctacaccgacccacacatggaccccacgccgcccggtgggcccagaggaccggggctatcccgacacagcgccccgggagccacctcattaccaacaagcatcgtaaatgagatatggcaatgacctgcactcacttcaagtcgcgacatggagacatctcgttcttgcatcacaccagtgcctactggactattaatgacaactacgactcttatgtgcacgatgacactgaataatttcttaacaccattgttccagaggatccatctgcgtccatggcactacaccatagagaggacctgatgacatgacagcacatatctgatcatcaatgtttggctgctacctgatgattcctatcatcaatggacgtttcaacatgggaacttggcaggctatttagatctgtaaacatctagattatgctactcctctacatatagagatcactctcaatgacatctagcctaatgcgatctatgaatagagctggcaatgcaatgcatcgacatcttactgtgataatcatatgcactgacatattaactgtcttttt

SEQ ID NO: 75544 - DNA, 676 bp, Zea mays
  Clone ID: MRT4577_168926C.1
gggccgggctccccaaacttggacccgcctcctcgccgccaccgccgctcccgtccgtccgtcctcgccgcccctccgccgtccccccgggtttccaggtcgccggccttcgccccgtcagccagccgtcgcgtccatggcggaggtagcgcccgtcgatcaggggaagaaggaggaggaggagttcagcacggggccgctgtccattctcatgctcagcgtcaagaacaacacccaggtgcttatcaactgcaggaacaacaagaagttgcttggtcgcgtgagggcatttgatcgtcattgcaacatggttcttgagaatgtcagggagatgtggactgaggttccaaagactggtaaaggcaagaagaaggctctcccggtgaacaaggacaggttcataagcaagatgttcctccgcggggattcggtcatcatcgtcctcaggaacccgaaatgagtttgacgactcggcgtaaaccagaagagtctcttttcgctatgctgctgttagtttgtatgccgaatgctctggatcagggagtgtgtaagacagttatcaagcaagcattgcctgtactgattaatggtttggtgctgtggtctggatgttacgaattcacgtcttttgtagtatctaatctaacaacgtgcactggtagcctctgttcggatc

SEQ ID NO: 75545 - DNA, 336 bp, Zea mays
  Clone ID: MRT4577_168927C.1
gggaaacaaccaaaaaatttccagcacaaaaaggtggcaccccagttgcaaattaattacttatagcgggggaaaaccggttaaaaccgttatattgaaaacaacattttcccacaaccttgaaaccccagggggtcccaaaacccaatgtttgtttttttggcaacaaaaaaggtggggttcccctggggggcgaaaccaccctcacaaaatttcaccaaggaaaggggggcccctcccccttggccccctatcttaaagaaaaaagctgtgggacggaggaaaccccgtggcggggccgggcccccaggggatggcccggggttgcttaccccc

SEQ ID NO: 75546 - DNA, 134 bp, Zea mays
  Clone ID: MRT4577_168928C.1
ctttagacgctacaaatcacaggcattattaataggatcggcgggccacggcggctctattaacattacattgaaagccaaattatcataaagggtctaacaactaacttgaactacaaagacacaaatcaccc

SEQ ID NO: 75547 - DNA, 543 bp, Zea mays
  Clone ID: MRT4577_168929C.1
accactcccaggttcaaagcagagggcagggaggaggaggaggaggggagcttgcgagccggggcaaggcggcggcgcgagcgtggccgtgctgcgacagctgcggcgggtgcaccaagtcggagccgcggcggtgccagtgcctggacgcggtgccccgcgggtgccacccggcgtgcagggactgcgtcaagtccagtctcagcgccgacccgccggtgtaccagtgcatggaccgcgtccccaacttctgccagcgccgctgcaccgcgcccgccgccgcgcactgaccgcccgcccggccgtgctgacgactgatttctgctttgctctttgacccaccaaccgctcccaccgcccacccgccgccggatcctgtgtctcaaggccagctgtggattaggatttttgtgtgtgtaaaaactacatagagatgaagaatctgtaatcttggacgctgcagtggtgtcctttttttttttctgtgtatgtgtatggttgactcttgttgtctgtgaggagatgagcacggtgaatcaccga

SEQ ID NO: 75548 - DNA, 465 bp, Zea mays
  Clone ID: MRT4577_16892C.1
aaaagcattcaacagccgtatactggtgcacaacacaaaattgtacttctggggaaaacagagctgaaattcttattcccgcatataaacaacacacgcaggcgttcgaatggactcactggaagttatggactatgggaccctctcttttctaaacctctggtgaggctatttcatacttgttgaccaatccatgggtcatatgatttagttgccggctgtgaagagtctttttttgcgtattttcccgatcatggtacctgatgttgcaatcaagacggatgcctggggtgcaccaatattgacaccgcctgcagtttttatcgtcccaccaatgttcgctaatgccgctaccaaaccaactagggcggctcgcataatgtaccatggcacactgacctccatgaggtatttcgctgatggggcgctcaggggccggtataatgtttccccaacctgaacacc

SEQ ID NO: 75549 - DNA, 650 bp, Zea mays
  unsure (1)..(650): unsure at all n locations
  Clone ID: MRT4577_168930C.1
gccggccgggtccaanagcggtgagcctcccctcccctcttttaaaatctccatcggcatgggctggcacatacagtaacagtagcctagcctccagtccacctctctctctctctttctctggagagagacgcgcaagagaaagaggggggaggacggagggaaaagaagcagaaaaaaaagtaacaaacaagtagcagtagtgaagaagcagaaccgaagggatcggatcggaggaggaagtggtggtgagtggtgacagacagccagacagaagagaagaagaagaagaaggagctgatgacgcaaagagatggggaggaaggatgcagcgcaggcggtgtcnctagtttgaccacccgccgtctgcgtgcagcaggaccacagctgatcgagccaagaaagcagctgctgcgtcggtggcagtcgccgaagcagcaggtgccaaagcgatcgagctgctctctgtccgtgctggtccccgtccccctcgcctctctagtctccactccacctcctctcatccattcatccacccacccaattcgggagcagcctccgccgccacactagctagcactagcagtaccaccccgcgccgctagtcgctaccagctagcgactgaatcccccccaagggggggaccggg

SEQ ID NO: 75550 - DNA, 323 bp, Zea mays
  Clone ID: MRT4577_168931C.1
gatccatctactacttttttttactacctcctctttgactggccctctgacaaagattactacggtattattcgcctgtacgcatacagccctaccgacaggcattggcttttgctccagtgatcatactccgtgatcttgtggaatcctgtcatcctggtgaataactgagctgtactttctgaggtacgccaccatagctatgactatgctcgatgggctaactggcaccccgagccgccctagaacacacgggctatacctacacgtgagctggcggggcaactgacatttgaagacagcgtacacatacctactctgat

SEQ ID NO: 75551 - DNA, 215 bp, Zea mays
  Clone ID: MRT4577_168932C.1
tttttgttgagaagaatataactctcattagtgcggtttttatacagtgaccgggggtgatctacactcaccaccaattacaagtaacatataccgtgaacttcacactgtattcaaaatcctccaccgatgcatatgcattggtactcttgacgcttacaaatgatctaattcatggactttatcctgaggctctcacaatgtataaaaatttt

SEQ ID NO: 75552 - DNA, 1462 bp, Zea mays
  unsure (1)..(1462): unsure at all n locations
  Clone ID: MRT4577_168933C.1
ccaagccagaccagagatgggcaatgtgagcggtcgagcggaagacctcgtggacgccgacattgatgacggcaacaacatgcgacgtgcctcttcctcctctgcgggctacgtccggggcggtgggtcatcatcatccccgccggcgagcccgccgaggccgcattcaccgcggatgttcgtgccccagagtcctgtaactccattgcaaagagctacagaagtgcctcctccggtgttcaaccagatattgatgaatcaacaacatgaggattctgatggcccgcctcaaaagaaaattcccacgttgctcacgtggactcttggagggaggaatatctacgtagaaggatcatgggacaactggacatcaaagaaactcgttgagaaatccggaaaagatcacaccattcttttgatgctttcatctggagttcaccgttatagattcattgtagatggagaaagaagatttatacccgaccttccctgcgaaactgacaatatgggtcagattgtgaacctagtagatgtccatgacttcgttcctgacagcgtggaaagtgtatctgagctgatggcccctccctccccggactccagctacggtttccatgttcccggcgagaaggagttctccaaggagcctcctcagctgccgtcccagctctatctcggcgtgctgaattcccggagcaccgaagaaggctgcgcgaggccgaggcacgtcgtcctcgaccatctctacatcgagaagggctggggcgcacagccgctggtggccctcggctacacccacaggttccgctccaagttcgtcacctgcgtcctgtacaaggccatcgagcggtagcctagctaaccattgctgtgctgttgtgggccggcaactatagctagccgtggtggacttggcagttcattcaggtttagaagtctctcctgcataattcgttcatctgctaaactaaagaggtgggtgcaaatccatgtgaatcttgttttttttttagctgccagagcttacatattcttattattcgattgttttgttgggggataatggtaaattcgacggcttagtgccggacagtaaggatgccagtctcaggcctgctttattggtcttgtgggccggcaactatagctagatgtggtggacttagcatttcattcaggtttagaagtctctcctgcataattcgttcatctgctaaactaaagaggtgggtgcaaatccatgtgaatcttgtttttaaactgctagagcttgcatattgttattattattcgattgttttcttgggagataattgtaaactagtgactagcgtgcgcctagcgcgcgtagtttgcatgattttgtcaggggtgtgcgtgtaaaataagagaaaattacctcccaagaaagtgctgggcggccgcagngaggtaagctcgtcaacccaagaattaattccgg

SEQ ID NO: 75553 - DNA, 601 bp, Zea mays
  Clone ID: MRT4577_168934C.1
ccgcggacgcgtgggttaaaaaaaaaaaaaaaaaaaaattatataaatttataaaaaaaaaaaaaaaaaaaaagagctccttaggaaaaataatttttcccgttttttcccttccaacctttcttccccttccttgcaactttttattttttctattgggtcaccttaatttatttaactggtcttcccttttccatcttttcttacttggtaacccttgcctttccccaccttaatctccttgcaccacatccccctttctccaatttgcgtaatacccaaaagcccctttccgatcgccctttccaataatttctcatctttattgtccattggaacccccctttttccttcctcttaagcgcggcgggggtgtattttccccccatttttacctgttcatttgccctatccttagacttcccttcctttcttggttttctttttttttcgcccttttctcttttttccccctaatctctaaactgggccttctttcaggttccctattattttttacggcccctttcccccaatacttcttttgggtgatttttcctttttggccttttgcctctataccgttttttcccttttccct

SEQ ID NO: 75554 - DNA, 531 bp, Zea mays
  Clone ID: MRT4577_168935C.1
gctctacctcggcgtgctgaattctcggagcactgaagaaggctgcgcgaggccgaggcacgtcgtcctagaccatctctacatcgagaagggctggggcgcacatccgttggtggccctcagctacacccacaggttccgctccaagtacgtgacctgcgtcctgtacaaggccatcgagcggtagcctgaccattgctgtgttgtgggccggcaactatagctagatgtggtggacttagcatttcattcaggtttagaagtctctcctgcataattcgttcatctgctaaactaaagaggtgggtgcaaatccatgtgaatcttgttttttagctgctagagcttacatattgttattattattcgattgttttcttgggagataattgtaaactagtgactaacgtgcgcctagcgcgcgtagtttgcatgattttgtcaaagttgtgcgtataaaataagagagtattatatataaaaaaaaaaaaagggcggcccccgaaaaatgaccttgccaacccggaataa

SEQ ID NO: 75555 - DNA, 158 bp, Zea mays
  Clone ID: MRT4577_168936C.1
tctcttatgcgttcgcgcacgcgtgcggccaagaacatctcattagcgttagctaaagtggcaattggacactaggacttaaccgggctggtcacggggttctactcgatagatcttaccagctgcggccctggtgccgaccaactacacgggagaag

SEQ ID NO: 75556 - DNA, 298 bp, Zea mays
  Clone ID: MRT4577_168937C.1
gttggccaacgtgaacccaaccgcccacatagcaaaacatatccatgtccgggttatggtccgggaccaacactgtgatagcaaatctggccagaaaactgggtcctaagcccacattcaggtgcatgaaggagaccactctcgtaacataggaacaactgccacatatacacacaggagattaaatcgtttcccataaggaccctgtgactggacaaatgaaacctgtaggggtcacaaaaaatgtctcaacctaggggccgatggctctatatgctataggatattcaagggccgc

SEQ ID NO: 75557 - DNA, 208 bp, Zea mays
  Clone ID: MRT4577_168938C.1
tgccgcgctgttataccagcggtagctgcaacgattcatctagttgtggcaaattttggcacatccccaacactcgagagatcaagaaagcaaaggcatgccaaccttcaaaatgcattgagaattttggaccttgtaccatccaagcatcatcatgaccaagaggaagttccgtcacaccaccgccttataatggctgtatgggtga

SEQ ID NO: 75558 - DNA, 224 bp, Zea mays
  Clone ID: MRT4577_168939C.1
aggcacgcgtccgacggatccaacactccatccgggatgggatgttaccttcattagcgctgttgctgcaacagtcatgagacctattacagtagctacctgcggtgcactgactggcactaatcatcagggcactacgtcttcaacaacttgtgctaacaaaacttgcagcctactctcagcaacagcagtttctttcattgaaccaactagctcgattgaac

SEQ ID NO: 75559 - DNA, 1047 bp, Zea mays
  Clone ID: MRT4577_16893C.1
cattgggtacctcgaggccggccgggcgacacgtctctcggcaacggatatctcggctctcgcatcgatgaagaacgtagcaaaatgcgatacctggtgtgaattgcagaatcccgcgaaccatcgagtttttgagcgcaagttacgcccgaagccttctggcggagggcacgtctgccggaagtccattctgttggcaccgccgggcctcccttgaaccctttcgcccacaccacagcaccgctgccgaaggtgggaaagaaggcggcggcggaggcaccggcaccggcaccgcctaggaaaggaaaccgaggaaactacagccatggtggtacggatccgtctggcgcggttcgggtgccggaatcggcccttctaccgggtgatggccgccgatagccgctcccctcgagacggcaagcacctcgaggtcctcggctactataacccgctcccagggaaggatggaggcaagaggatgggcctgaaattcgaccgggtgaagtattggctgtcagttggggcacagccatcagatcctgtgcagagtattctctttcgtgccggacttctgccaccacctccattgctagctatggcacggaagggtgggccacgtgataggcgccccattcatccaatgactgggcgccctctggatctcgagggtgtcgcaattattgataattccaatgctcctgaaggcgatactgaagtgcctacagatgaggtggctcaataagccttttgtattagcatagcatatgtagcggtgctgcaaaagaaaacttgtttgatgtgcttgtggcaagactttgggtactcgtacaatgtggcaaacttttaaacaggtaactttcatccatttctcttcttaaaaatatgtcagttcccgctgtttgttcttaaaaaaaatggtgctgtgtgcatcagtagcttttgttctgcagcaccatcaatttgtggtatctagtattctctgcacttgcctgataaggtttgtctgtgaaatggaataaaaaaaacaacacaagccggacgcgcggg

SEQ ID NO: 75560 - DNA, 1173 bp, Zea mays
  Clone ID: MRT4577_168940C.1
ggccattgggtacctcgaggccggccggggactccgtcccactgcccagccgctgtgcgttcgcgctctctcccactctgtctgcgacgactgcgtgggtgggcgggctaccgccgccgcccgtcgccaggtgccgatctcttcacacccttgaccccctcctctcgcgtctgccgtgcgagaacgtaccgccacgacgagcgatggggaggccgagcagggggcggcagcgcatcgagatccgccgcatcgaggaaggcggccggctgcaggtgaccttctcgaagcgcaagtccggcctgcaaaagaaggccgccgagctctccctgctctgcggctcgccggtcgccgtcatcgtcttctcccccggcaggaaggtgttcgcgctgggcagtccctcggtcgaccacgtcctccgccgccacgctcctccgatccccagcgaaggagaggaggacgggctccttccggcgctccaggacggagacgtgatgagcagcagcgctatcgctgaccgcgcggaggtggagaacatcgtgcggcgtacggaggagaccaaggcgcgttcggtggcggagaaggcgcggatggacgccgtcgggaaggccgtgaggcaggccgcggcaaaggccggaaggaggttctggtgggaggcggactccggcgtgctcggggacgctgagctgccaggattcgccaaggcgctccgtcggctcagggtcaacctgcagcgccatttggactcgctgtcggcgtctgctaataagcaactgcagtaggagcggctgtgcaaactggctcatttcatttggtgttgcttaggcacttagggtatattactaatatttacaacgttaatatcatgctaaaagctaggtcttcacgcgtagaggcacgcccacggtgcatctcttaacactaaaagcgctactccttctcactccgcaagaagttttgttagcactttaagagcctgtttggttcgtgattaactgtgtcacactttgtctaaggttagtcgtctaaattgaagaactaaccttagtcataaaagttaggcaaagtgtggtaacttagtcatcaaaccaaacatgccctaaagctcgtgttgtgtaaggaaatcggcctgtaatcttcaactgaagagggtgagttggttttgggatcaggatc

SEQ ID NO: 75561 - DNA, 293 bp, Zea mays
  unsure (1)..(293): unsure at all n locations
  Clone ID: MRT4577_168941C.1
aagctctaattcnnctcatacttttttanacgcctaacaaanccgggtcaataacaatttatcgtggtcaaaaatattnaantcaatattcatttccaaataccaatctcctnaacccatcgactttcaccttttttattttntcataactatactacaaacaattttcatatcttcctcaatttcttcaaccattnttacaatccaaaccccatattaatttactncattaatttctatttaaaatatttctttctttcaatttcacttaatattttctcttcttttcaccc

SEQ ID NO: 75562 - DNA, 791 bp, Zea mays
  Clone ID: MRT4577_168942C.1
gggtacctcgaggccggccgagcgtcccactgcccagccgctgtgcgttcgcgctctctcccacactgtctgcgacgactgcgtgggtgggtgggtgggctaccgccgccgcccgtcgccaggtgccgatctcttcaccggcgaagagcgtctgctagcgactcccacacccttgaccctcctctcgcgtctgccgtgcgagaacgtaccgccacgacgaacgatggggaagccgagcagggggcggcaacgcatcgagatccgtcgcatcgaagaaggcggccggctgcaggtgaccttctcgaagcgcaagtccggcctgcaaaagaaggccgccgagctctccatgctctgcggctcgccggtcgccgtcgtcatcttctcccccggcaggaaggtgttcgcgctgggcaccccctcggtcgaccacgtcctccgccgccacgctcctccgatccccggcgaaggagaggaggacgggctccttccggtgctccaggacggaaacgtcgtgatgagcagcagcgccatcgccgaccgcgcggaggtggagaacatcgtgcggcgtacggaggagaccaaggcgcgttcggtggcggagaaggcgcggatggacgccgtcgggaaggccgtgtggcaggccgcggcaaaggccggaaggaggttctggtgtgaggcggactccggtgagctcggggacgccgagctggcaggattcgccaaggcgctccatcggttcagggtcaacctgcagcgccatttggactcgctgtcggcgtctgctaataagc

SEQ ID NO: 75563 - DNA, 272 bp, Zea mays
  Clone ID: MRT4577_168943C.1
caacaagcatcatataatgccgaatccattttcaacattagaacaacaatggcgaccaagatagggcccgtgcttatactccatgcggcttctacatgcgatgctcactcgacacttatccctcaatgctcacaagctcctatagcttctcttattcccccataccttacatcaatgatagcttcactatatgaaaaccctgctcttcatccctataggcttcaacacgcaatcgcagcaagcaacatacctttatcacacttgtcatatca

SEQ ID NO: 75564 - DNA, 633 bp, Zea mays
  unsure (1)..(633): unsure at all n locations
  Clone ID: MRT4577_168944C.1
ggtcccgggtccccccctcgggtcgacccagcgtccggnaaaaggtgaggcccacacctctgcctcgcaccagtaccacaacgccacgacacgccggcgaggtggacgagcggcggcgatggcgggcggcgaccgggagcgagacgcggacgaggagacgaggaatcagatgatgcagaaccttttcggggaccagtcggaggacgaggacgatgcggacgacgacgacgtcgccgagatggtcgatgaggacgacggccaccagccgcagtcgcccccgcagtcgcccccgcagcgccaccaggagctggacgacgatgcctacgacgatgaggaggaggacgcccgcagccacgcgcccgcccgcgcaagcggataccactccgaggaagtggatggtgaggcagagaatggaggggaaggggaaggggaaggcgaaagtgaagggcaagttgtaatcgaagaggaaagtgaaggtgaagctcatggtgccgatcttgatcaaggagaaagtgatggggacaaagtccatagctccccagaaagagaactcgatgaccagaggatggaacctgatgcaagaggaatggacagtgaagatgaaggctaccagcagaggacagtatctggcag

SEQ ID NO: 75565 - DNA, 472 bp, Zea mays
  Clone ID: MRT4577_168945C.1
ggggaaccaaaaacctattttagattctagaaaaagaaaactgaaaacgatgcaaaagcgcgagaaccactgattagctcaaccttttaaaaccttttcaactaaaaaggaaaaaaaaaaggccctggagcaaacaaaaaaaacggggtcagcccaatttcaggccctaaaaaaagttccaaaacgacaaaggggcaccaaaaactttttaacatccttccaaaaaaaacatcagttcagctaaaaaaatggggaggtcgccgctatttggtaaaaaaaccttgctttttgggtgcccgctttgccggccctaaatttccaccttggacacaaaatccattccaaacaacaccttgccaaaaaaaaaatggttcccggccaaccagtttggtggcacgggggggaagaaaaactgaaaaccggtggtatctctcccaacattggccatggacaaaaggcctgggccaggggg

SEQ ID NO: 75566 - DNA, 731 bp, Zea mays
  Clone ID: MRT4577_168946C.1
gccggccggtccagaatccgcccttcctctttctttcttctccctcttgcggcttctctctggactcacccctccctccgtctcggctcccacctcatggcaaagctggaacacccgcggatatatcaaggggaagataatcaggaatagctaggccgaatactaaatacaagtactagcagaacgaaaagagtcagtccgcccgagactacgagtgaatttgttgggagaggtgtatgatgatgacaccatgatgggaggcgttatgcctgcacgtatcagaacgagatgtgccctgtcgtccactacttccgggatctcctgcaacataacggagaccacaacctgggcttcagctctctgatgccgaacacgacctctgaccaccagtgcgtgatgggggagggcgatctcctgtacccgcctccatatagcttccccgacgccgcggaggactacagcgacgatgacgtcaaggacatcgaggacctggatcgccgcatgtgcagcgaccgcatgaatctgaagctgctcaagtaactgcagaagacaggcgcgaaggactctcctgactagcgctgagccactgtgtgatgtgtcaaccaagactaggcagacgcagtagcaagtccggcgcaagaatatgtcgcgcgcgccggacggcatcctcaagtacctgctctagatgatgcacgtgtgcctcgcgcaaagagatgtgtatgggatcattc

SEQ ID NO: 75567 - DNA, 259 bp, Zea mays
  Clone ID: MRT4577_168947C.1
gttggagaactgcagtgtttgtgactatattcaacacagtgaacactagtctgaatgtataccgatataaagatgccttaagccattttgtaattgctcgagctgtcacgggaagtctttttatgatagacgtatgcctgcgtggcctcgtggctggtggcataattggaggcttgctgggcactcctgtaggaggcctgctgatggcatttcagaagtactctggtgagactgttcatgaaataaaacagaaggatcg

SEQ ID NO: 75568 - DNA, 590 bp, Zea mays
  Clone ID: MRT4577_168948C.1
gcccgggttcgcggaaaaaaaaaaaaaaaagatcacacacaccaccaaaggccaaagcgggacgggagccacagagatagctagcaagaaaccacagatggcggcgatagcggcggccacccaggcggcggcgacggtgctactgctcgcggcttcttcgtcgccgcggccgtcgtcgctggcttcgccgcgtgatccgaagctagcttcggtaccgtttgtgcgcgtaggaatcgcagcggagtttgtgttgtttgtttcatcggtggtggtggtgcatttgtgattcgttcagtggccgtgagagagagccgtctcttattcatcgatcgactcgattcgtcacagcaatcgcgcatcgctctgaataaagacatcgcctgtctcggttttttctttattgcttctcatttggctatgagaaaatttaagctactccctaataaggggtgattataatctcccaaacaaacactccctaaatcattaatagctggtgagctggtttggtgataatacaattagagttgattgaggagattttgaatagtaagagatttccttctaaaaaaaaaaaaaaaaaagcggcc

SEQ ID NO: 75569 - DNA, 901 bp, Zea mays
  Clone ID: MRT4577_168949C.1
aggaaaaaaataaaaagacacacacaccaccaaaggccaaagcgggacgggagccacagagatagctagcaagaaaccacagatggcggcgatagcggcggccacccaggcggcggcgacggtgctactgctcgcggcgctggtgctggcggcgggaccgggcggggcgcgggcgcagtcggcgtcgccgtcgagccagtgcacgtcggcgctggtgagcctgtcgccgtgcctcagctacatctccgggaacgtgtcggcggcgccgccgtcgtgctgcgcgcagctgggcaaggtggtgcagtcggacccgcagtgcctgtgcgtggcgctcagcgcggacccggcgtcgctgggcctcaccgtcaaccgcacccgcgcgctgggcctccccgacgcgtgcaaggtcacgacgcccgacgtcagcaactgcaagggcgccgccgccgccgccgcggggggagcgcctgtggcgacgcccgcggggcagacggcgccggccacggggtctaagacgacgcccgccacgtcgtccgtgcccggtgccgccgcgtcgacgcgtggctccgctgcccgtctcgtcgccggcttcttcgtcgccgcggccgtcgtcgctggcttcgccgcgtgatccggcgctagcttcggtaccgtttgtgcgcgtaggaatcgcagcggagtttgtgttgtttgtttcatcggtggtggtggtggtgcatttgtgattcgttcagtggccgtgagagagagccgtctcttattcatcgatcgactcgattcgtcacagcaatcgcgcatcgctctgaataaagacatcgcctgtctcggttttttcttttggttttttcttactagtgaattgctcgcgccctgcgcgagtctggtcgatatgttcccaccc

SEQ ID NO: 75570 - DNA, 634 bp, Zea mays
  Clone ID: MRT4577_16894C.1
gaaaagatgagcacattgttgcttgttcacacagaagatggcaggctttcaggttgagccgccgcaatagccgtatgcactcaatagattggactttattttcatctgctcataacgatccaatggcatctgatgtcattgcaccttctccatggacaatatttggctgtacaaacgggttacgtttgtttaccgaggcaaacgatggtggctctcatgggaagtattgggatgatcatccggctataatggcagttggtgtggttgatgcgaattccgaggctgtctttcagactctaatgtcccttggccaatcaagatctgaatgggacttctgtttgcgggaaggaaaggtaatcgagcatcttgatgggcatacagacataatccaaaagaaattaagaagcgactggttaccatggggaatgagaaagagagatctattacttagacgatattggaggcgagaagatgatggaacttatggctacatccgtgcatgtcttaaaagtggaggttatgtaatatcaccagtcaatcaaggaagacaatcagttgtaaagcacattgcttgccatagattggaaattctggaagtcttatctgtttacattatctgccaaatatatcacta

SEQ ID NO: 75571 - DNA, 252 bp, Zea mays
  Clone ID: MRT4577_168950C.1
ctgcgactgattcgccatcgtcatctggaagccgacgttctagctcaataattacagctccgacctctggacgtaatcccgcctctagtcgaactgctgggacctcacagagggctgccagccaggaaggccgtccaggcagtgcatcatattctgaggatgaattgagagacgaatctgatttggccattcgggaatattaccatgctgatgatgaacatgatgttgcattgtgtattgaggagctgcatg

SEQ ID NO: 75572 - DNA, 495 bp, Zea mays
  unsure (1)..(495): unsure at all n locations
  Clone ID: MRT4577_168952C.1
ccggtcccggaccaccccgggtccgacccagcctgtccggccggcccacctccacacactctgcgcccgcgcgctgggctccacacgctccaggaccgagcatcggcctctccgagttcgaggcgctgtgtcgcgtatagcgcgtcgtgtgtcagacgccgcgtcctaccacatgcgtggcgccgccctcctccttccatgcagtcagcgcaacgcagcttgcttcaatggcgcagtaaggtgcgatcgtcgtagcgtttgcgcaggtagcactctgcactgtccgggctggaactctgtcacgtgcaagaagtatgcaagctacctcccgcgtatcctcacgcaaagtcggcatgacacactccacgcccgtcaccaacgtgcgcgccattccacatctccggcgcccgcccgcgcaagaagtcccttgtggcggcatccattcccgcgggggatggatctccggnatcaatcacccaagtagggggggggagg

SEQ ID NO: 75573 - DNA, 672 bp, Zea mays
  Clone ID: MRT4577_168953C.1
cattgggtacctcgaggccggccgggatctatctctctccaacagacttatgcgcctgcattttggtctccgtcccttgccagtataatgtcacgtccaatgatggttacagagaagcaccagatcaacattgtgtttattgcgcatgtggactctgggaaggcgagcaccacacgacacctcatctaccagcttcggaggcattgagcatctcgtgctcgagatcctcgagaaggacgctgctgaaatgaacaaggggtcctataagcacgagggggtgcttgacacgctcaatggtgaacgcgagagaggcaatcaccattgatatcactctgcgtgaccttcacaccaccaagtactacatgtatcgagtcgattgatgccccatggacaccagagacttcatcaagaatatgatcactggaacctcccaggcatgagtgcgctgaccttatcaatgactgccacgcactgcgagcattcgacgctggaatctacaatgatgagcagacgcacgaacatgctcttcttgcgttcacccttatagtgaagatcatgatttgatgctgctacaagatggatgcaactcactcccagatactccaatgcacgccatgaagagattgtgcaggaagtctcatcctacctcaagacagctcggtacaatcctga

SEQ ID NO: 75574 - DNA, 105 bp, Zea mays
  Clone ID: MRT4577_168954C.1
tgagatgactgtcgtgagcatcatgtggtcattagtgcaggtgtaggtgctggtagcggtggcactatcatgtctagtaggcggtgccaggtgtggtcctcacaa

SEQ ID NO: 75575 - DNA, 273 bp, Zea mays
  Clone ID: MRT4577_168955C.1
acactctggctcagttttctcatctgtaaaatgagacatcccctcattgtgtggcctggccttgtctcagggagcgcccgccgagtgctgctgggttgggcagtttttctgcccagtggctctgatgggggctcagagccctggcctcccctgggaggacacgctgtgcagccaggacagctgccgggagtgtgccaggtcactgctatagccttcgcagggtgactggcaggtatcaaatcagcccatgaaggacgatggctgatttccttt

SEQ ID NO: 75576 - DNA, 265 bp, Zea mays
  Clone ID: MRT4577_168956C.1
tcgttatgcttcaggcccctctattaattggctcatgtggaaagagggtgtgatgatcttttgttgcttctggagtgagaagctcaaagaaggggaagacatctacatctatcaggggtgacaaatccttttgctatgaagatgaccacagggttcttgtttgcgagttcatcctctagaatgtattgggttgtcgccacgaaaaaacacacgaatacataaattcaaataatttctggtgcttgtggagtatccataaattgcg

SEQ ID NO: 75577 - DNA, 598 bp, Zea mays
  Clone ID: MRT4577_168957C.1
tcgaggccggccgggaaatcgtcctactctgccccctctaaccgagttctttccttttgctcctctgcgtgcttaagcaccatgatagaccggatacacgatcgactcatgtcgacttgcatgacacaccctcgctatgttacggaccgtgcatcataatgcgggccatgcatcataacgtctcctacccacaacgcacgatgcctgagtagggctgacattgtcgacgacaagaacggtccacgagcgtgctcctaaaggtcgctggtgaacttcacatgcgctctctgtccaatacatggaagatctataaactgcaagatatgatgaatgactgtgtttgccgaagagctacggcatcaacgacatcacatgacttcctgcccacccttgtgccgcaagaggaaggacagctgattcccaccagacgctgaaggagatgttaattatgtgcaacatggatggcaatgccatcatatcaggcgtgaacttccaccacgtgaggacctatctacggaagatgtctacacacgactccgtagaagagataatcccgtcgactgacgttgatggggaggcatagatctagtactaggag

SEQ ID NO: 75578 - DNA, 340 bp, Zea mays
  Clone ID: MRT4577_168958C.1
ccggttcgcttacgcgtccgggatgtgtcatagggcatcgacgcgaaagcggccgggcctggtgggtccttcgacatcaccaaggtgggcgccccccgcaacggcaagacagacagcacgaaggctgtgcaagaggcacgggcatcggagagcggcggcactgggaagcagacaatccttatacccaagggcgactttcttggcggacaacttaacctaacaggcccttgcaagggtgaagggaccatgcatgcggatggcaatctgcgggcgaccacgggcctaagccagtacaaggaccatggtaactggaacgagaatcttacgcggggataaccct

SEQ ID NO: 75579 - DNA, 423 bp, Zea mays
  Clone ID: MRT4577_168959C.1
tcagcgttcggtggatcattctttattgtgtcgttatgcgagaactggtaatgacacgcattagtgccggatcttaaaaacatgttaggcgtgtgaatcttagaggttgtgcaagttgcactgacaatcaggtgcggatactgaaatcttttagctgctggtaggacaaaaggccacttgtacaacagcctggagtgatgaaactggttacacagatctcatggaaaaccccgggggccgcagccacaatgcaagatttcatcgaagagatgacaaatgctggcgtgatggaagaaatggtcaacgtatgctttagatatcaactctggaagaacaggacattgatgtaggaaattgaataggagggtgacatggtcctaagtggaatcactggggagaccgcctttgagctcccggatgctg

SEQ ID NO: 75580 - DNA, 459 bp, Zea mays
  Clone ID: MRT4577_16895C.1
aacaccctatagctaagtcgtactagtgctctgtagcctctcagcactagttcgttgcttccttggtgttcccactgttcacgagtttctttcgctgctgctgaaggaactttgttgcgtctgttctcgctccccagccctccctgcttcctggtcaatgtcctcgtactttttccagaacggaaagcacattggtcgcgacgttgacatatcgttctctgcccagtaccagtaccagtagcccactgccacccgctgcagtctagccataccatcccgtcccatcctcttgtccgtatctcgctgtatcattatcaccctccttccttttctttctgctgcgtgtattatccgatcaaaccaaaaacctaatcttttgtgactgtctgcactatggatgtcgttagaatcacccaagccttgagacagcagcagcatgcccccgcccgattgaactcg

SEQ ID NO: 75581 - DNA, 821 bp, Zea mays
  Clone ID: MRT4577_168960C.1
ctcccgcatagacgtcgacaactctctctaccgtccgataccccaagcacgggtgcgcttctcgctactgtgcttgacgcaatgaacaacagtatcgccctgagaaagaacgtaggaaagaccaagaccgacaaccctttctctaacaacgtggcgatgacatctccgcaccgtcggtgttcaaggtgcgccacatcgtttaactactctcgcatgcaggacacaggataccaggattgcttccgagggtctgaacgctcagagactttgagggttgccgagctgatctctcgagttcgactatgcgatcgacctcacttcaaaatcacgctccgtgctgaattatgagcggggaaggaatgtgctcacgaacttgtgatctatgcagtctaccactgataaactgaaatccctactgaagaagtgccaagcattaatcgaattccatgctgatgtccagaccaccgaccactacgtgctgcgattggtctgcgtccgcttctcgaatatctatcccttgcaccacaagactgcctgctatgctcaggcatcccagaatcgtcccatccgccgtaagatgctacagattacgcattcaacttgctgctacatgacgaccatgagagacattttgtatcgaatttcctctggaatgtacctctagcgctaataagagagtacagctgccttcctatataacagtcataagaccattgtacgaagattacacatacttctgctaacgcgagctcttgataactcaggctactgagtggatcaattggatgaacctttaatgagccccagacatttacttcctt

SEQ ID NO: 75582 - DNA, 325 bp, Zea mays
  unsure (1)..(325): unsure at all n locations
  Clone ID: MRT4577_168961C.1
caacaaaccccgacnnccgggaggggcgcannaaaaagaaaaaaggcggacgcgggcncngcccgccganccganganncaagannaacagacggaacgcacggccttcgngccggcgacgcancanncaaannncngccctaacaacnnncganggnaggaaaggggccaaccanggnggngacgggngacggagaacagggncaacngccggagagngaannaannannnannacagccacgnnganngcannngcncnnggggnagnggaaaagcgngcaaaaanngcaaagaggcagagaagaanngaaanggagccnaag

SEQ ID NO: 75583 - DNA, 714 bp, Zea mays
  Clone ID: MRT4577_168962C.1
ccgctagctcgcctctccaaccaaacgcaaagcaaagaacagaacccaattccatcgtatcgttccccactcgggctcccggtctcctccaccctcctccctcgcctcgcggccttccggcatttgctccagctcggaactgagccgcgcgacacgaggctgacggaggggatggagtcggacgcgtccacctccccgcggcggcgcagcacgagctgctacagcgacagcggcgattcctcctgctccgagcccttcagcgagtgcggcagcgacgacctctccttcacgcccgccgccgccgcgggcatccaccgcctgctgctctcctgcgcggccgaggcgtcggaggacgcaatctcctcgctcgtggccgagctggaatgcccgtcgcagtcgctggactcgctccgccgcgcggcgatggagctccggctgctggccaagcacaacccggacaaccgggtccgcatcgccgcggcgggcggcgtccgcccgctcgtcaggctgctgtcgcacgcggacccgctgctgcaggagcacggcgtcacggcgctgctcaacctctccatctgcgacgagaacaaggcgaccatcgtcgaggcgggagcgatacggccgctggtgcacgcgctcaagtccgcggcgtcgcccgcggcgcgggagaacgccgcgtgcgcgctgctccggctgtcccagctcgacggcgcctcc

SEQ ID NO: 75584 - DNA, 346 bp, Zea mays
  Clone ID: MRT4577_168963C.1
taggaactcatcaattacctaataaattttgcaacttctgaatgagtaatacggcttagtcataatactacatgccagaatattatgcattatactctcacaaactttgcctgttctaaagcggcttctgaggtcatcttacaaaccccagttagctacaacaagcatatcaccactcctagccacacagctaacatgatcaacctttcaaccaaaattattagccaagatcatctaattcatgtgatgcctacaatagcaaactcatatgcttctattactgcctacaaattccacttcctttgatcatatatcagtgatgatgacatcttcagctcatatctaa

SEQ ID NO: 75585 - DNA, 273 bp, Zea mays
  Clone ID: MRT4577_168964C.1
ggggggaaattcacaaacccaccgggggaaagacgtaaagttacccctaccctaaagacagggctacgggggcacaaaacaacatatacaggggggccaaacaacgaaataagcggtgggtaccaacccaagagggagcccaaatttaccatcccgtaataaacaaatccgccgtgaaacagaacccaccttggggggcagaaacgttgcccaacgggcaacagactggccctagaaggtggacaccctgattccctaaagaatagaacccct

SEQ ID NO: 75586 - DNA, 272 bp, Zea mays
  Clone ID: MRT4577_168965C.1
ctagcatcatttttctatcctgtttaaatacagcagcttcaacggctaccttggaaccttctaactcttgtgagccctactaccttcttgacacaaccacagctgttgccattctaccatcacgttccgcctaacgctgtcaccctattacaactgcaacaattgctgacattcaaccaacttgctttgacaaacccatcactgttctaccaacaacccatcattagtagtaccctcttttagatttcttatgagttataattcaataataa

SEQ ID NO: 75587 - DNA, 301 bp, Zea mays
  Clone ID: MRT4577_168966C.1
cccacgcgtccgcgacgaggacgagatcaccgaaaaaaaaaacataaagaaaaagtttataaaaaaaaaaaaaaaaataaaaaaaaaaaaaaaaaaatatatggaccggcgctaaaaaagtggggggcgctttttttagaggtccgggtggcttcccgtgtcatggttccaacttcccgttcttttgcttccccccgttttttttgctttgccgtcgttttaccccggttccgggggatatccctgactggttcggattgaaacaccttcgcatatttcatctttttgtcgttgggctttt

SEQ ID NO: 75588 - DNA, 753 bp, Zea mays
  Clone ID: MRT4577_168967C.1
tcggggcaaaacacaaaccctagctcgctctccccaagccccaacccgcgccgccgccgctggctctccgctcggagcctcggacgctcggtcggcagctcggtgctcgctctcccaaaaccccaagcgccagtcgcccaatccccaactccccatgctgattgctgagtcgctgagcgcctgaacggcggaggcatcctgctcctgcatccatggcggtgaccaatgacaccacaaacgacgacggccggtgatgcttcttcttgaacctcgttcctcttcctcgtcttaaccttgtagctccgcatgaccgcatcttcgtctcgccctttgctgacgccccgccgtcccaaagggacgccgctgccacttcgaccgagcaccggctgccggatccgaaggacaagagcagtaacggcgacggagacccaaaagcacctgctatttcttcttcgtctcctgcgcttcctactccggcaaaggacggcgcgggtgtgggcaagccaaagggtgtcacattcgctcctggaggtcgacacaacgtaaaggctggtgctagtcggcctcatcgactgagaaaaatgtctacaactagtgggagtgatggaagcaaccagagtcagcgtccagcatctgaagcacctatgcaagtctaaactctaacagcctattgcctgcttgctgcaacgtcgatgatgtgattggcgtcatggtcacatgtttttttgtggatgaaaaactaattcttttggt

SEQ ID NO: 75589 - DNA, 303 bp, Zea mays
  Clone ID: MRT4577_168968C.1
cttgccggtccctaataaagagcatcatcgcaagaagtcggtggagctagaagaatggggtgtgtggctagagcgtttcttttcaccttggagtccgtgaacgaggggcacccctacaaggtgtgcgaccaggtgtttgacgccgtgcttgacgcatgccttgcgcaggaccctgacaggaaggtggcctgctagacctgctccaagaccaacatggtgatggtgtttggcgagatcacgaccaaggggaccgtggactacgagaagatcgtgcgcgacaccttgcgttagatcgggttcacc

SEQ ID NO: 75590 - DNA, 316 bp, Zea mays
  Clone ID: MRT4577_168969C.1
gacactcgtgcggtggattgtacgggttcgatcatagggtaacaacaacgaggtggtgtcaacaaataggagatcaactagacatagtgtcggcttaagcatgcctagtagtagtacgtaacagtgacacttagtgatagtgaaaggatactgctgatgtgaagattaatattgatggatgagacatagcgctgtagaagctgtcaagcccgcagagcgaatatgatgtgcagacattgaatcatatccatgagatttctgcacatgaataatattaagattaatgagacagctactggttctatatgaatctaac

SEQ ID NO: 75591 - DNA, 2133 bp, Zea mays
  Clone ID: MRT4577_16896C.1
attgggtccctcgaggccggccgggaggttgagccgccgcaatacccgtatgcactcaatagattggactttattttcatctgctcataacgatccaatggcatctgatgtcattgcaccttctccatggacaatatttggctgtacaaacgggttacgtttgtttaccgaggcaaacgatggtggctctcatgggaagtattgggatgatcatccggctataatggcagttggtgtggttgatgcgaattccgaggctgtctttcagactctaatgtcccttggccaatcaagatctgaatgggacttctgtttgcgggaaggaaaggtaatcgagcatcttgatgggcatacagacataatccaaaagaaattaagaagcgactggttaccatggggaatgagaaagagagatctattacttagacgatattggaggcgagaagatgatggaacttatgtaattctataccactctgttttccactacaaatgtcgtcccgagaaaggctacatccgtgcatgtcttaaaagtggaggttatgtaatatcaccagtcaatcaaggaagacaatcagttgtaaagcacatgcttgccatagattggaaattctggaagtcttatctgtttacatcatctgccaaatatatcactatacgaatgttaggcagagtagcagcactacgagaattcttccgagcgaaaaatggtaattgttcttgcatggagttctcatctggagagttgaccagggacacgggattacctcaaggtgaaaatcagcgaataaatttggaaatgcagcaagaaaatgagaacggaagacttgaaggtcctactgaaggatcactgggtggttctaacaggcacttaagcagtactggttcctttgttcaactcaatgatgcagcagatgagttctttgacgtgccagacgaatcagaatatgatcagagagaagttatgtttccttctgatgagagcttgcatgctgcggaccagcgtcacgctaaactgtccactgctgctgtttttgtaaaaaggttgcatgatcttgcagttcagaaaagaggatacattgacttacagggagctgcagatgctgataatgggccatgttgctatggatatactcttcccaaagattcgagctatacagtgccttctacttgggcaatgacagatcctacaacattcttaatccggggagagacttatttgcacgatcgtataaagatcaaggcaaatagtaccctgatgcaaatggtaggtgctgactggataaaatctgataagcgtgaggatgatctagctggtcgccctggggggctagtccagaaatgtgcagcacaagggggcacccgattcttcttcattgtaaacattcaggttcctggttcaaccacatacagcttagctttgtattatatgatggatacaccattagaaaaggtccctctgcttgaaagatttgtaaatggagatgatgcattcagaaattcaaggttcaagctcattccttacatctcaaagggatcttggattgttaaacagagtgtgggcaagaaagcttgcttggttggacaagcattagaaatcaattattttcgtggaagaaactatttggagcttggagttgatattggttcatcaacggtggcacgaggtgtggtgagcctagtgcttggctacttgaacaatcttgtgatcgaaatggccttcttggtacagggaaacacaaatgaagaactcccggaattcctcctaggtacctgccgactgaattacctggatgcctccaaggcagtgtccatagacgagtgctaggaccccaactgacctcattttttaaagccaagtacaccaaaagacaaaaaaaaaaggctgaatccccattccttgctgccgacacaatcggcaaccctagcccagatgcccattttattgcctcaccgcaaaagtgggggatccattgcaaccgttgtacattctcttcttgccgactgctcaggtattgtgttgtaatgatgatagcaatccatgataaaagccccctcattctttggcatcttatcaccacggcaaaaacggaaaaaaaaagtgtattctaccatgccgtctctttttgcccg

SEQ ID NO: 75592 - DNA, 250 bp, Zea mays
  Clone ID: MRT4577_168970C.1
gggaggtcatccccaaacagttcacagaccgcgttgggaccttgattagagaattctgagctcacaccgactctatggtcaagatgctagccgacctctcatactctaaccgtgtcacttccgtcatgtggggaagctactctgcaagtggttcctccaaggcttggctggccgacaagatgcatcacatttgcaccgcctgagaaactagcttagaacggctacactgctcttctataccgggcaggct

SEQ ID NO: 75593 - DNA, 3070 bp, Zea mays
  Clone ID: MRT4577_168971C.1
attgggtacctcgaggccggccgtttttcccacctccggaccgcacaaacgcgcacaccccacttggcgctccacctcttcgctctccgacgacagccagcgagcgtgcgacgggcgatcaatcggggcaggcattcgaattccgacgacggccatggagcagaggagcctgctggtgtcggccctgggcgtcggcgtcggcgtgggtctggggcttgcgtcggccaagtgggcagtacagccggcgccgaacggtggcgacggtctcggagccggcgccgcggagttggaggccgagctgcggcggctggtcctggacggccccgagagcgacgtcaccttcgacgagttcccctactacctcagcgatcagacgagggaggtgctcatcagcgcggctttcgtccacctcaagaacgcggagctactgaagcacgtccggaacctctccgccgccagccacgccatcctgctctccggccccacagaggcctacctgcagtcgctcgcgaaagctctgtcccactacttcaaggcgcgcttactaattctggacgccaccgacttctctcttcggatccagagcaaatacgggggctccacaaaagccacggcccgcaatcaatctgtggctgagaccacgttcgggaggatgtctgatctcattggatcctttatggcatatcctaagaaggatgggcctatagaaaaatcgcttcgtcgtcagacaagcagcacggatttaaggacaagaggctctgacggttctagcagtacgccttcgcttaagaaaaacgcctcggtatcatccgacatgagcgaccttgcctcacaagtttcaggaaatccagtgaggcgaactggtagctggtgtttcgacgagaaagttctgattcagtcactctacaaggttatggtttctgtatctgaaaacggtccgattattctttacataagggatgtggaccatttcctctggaaatcgcaaaaaattcactcgatgttccagaaaatgttggccaagttatccggtcaagttttgatacttggttctcgactactcaatcctgacgctgataacagggatgccgatgagaggattagtaccctgtttccttaccatgttgacatcaaagctcccgaggaggagacccatctagactgctggaaaagccagattgaggaagacaagagaaaaatccagatgcaagataacagaaaccacatcatagaggtactctcggcaaatgatctagactgtgacgatctgagctcaatctgtgaagcagacactatggttctcagcaattacatagaggagatcatcgtatcagctgtctcctaccacttgattcacaacaaggaccctgaatacaggaatggaaagctcatgctatcatctaaaagtttgtcccatggtctaagcattttccaaggtagccatggtgggaaagacactctgaagttggaagaaacgaaggatggtttgaaaggagctcttgggtctaagaaaactgagacacttccggttggcgaaggtccagtaccgctgccaaaaccagaagttccagacaatgagtttgaaaagcgtatcagaccagaggtcattccggcaagtgagataggagtgacattcgatgacatcggagccctggcagatatcaaagagtctctccaggagctggtcatgcttcctcttcgacggcccgatctcttcaaaggagggctcctgaagccgtgcagagggattctgctgtttgggccacctggaaccgggaagaccatgcttgccaaggctatagcgaacgacgccggcgccagcttcatcaacgtatccatgtccaccatcacatcgaaatggttcggggaggacgagaaaaatgtccgggcgctgttcagtttggccgccaaggtagctcccaccattatttttgtggacgaggtagacagcatgctggggcagcgcgctcgctacggcgagcatgaggcgatgcggaagatcaagaacgagttcatgagccactgggacggtctcttgtcaaaaacaggcgaaaaaatcctcgttctcgccgcgacgaataggcctttcgaccttgatgaagccatcatcaggagattcgagcgcaggatcatggttgggcttccaactctggagagcagagagctgatcttgaggacgctgctttcaaaggagaaagttgatgaagatattgatttcaaggaacttgcggccatgacggaaggatacagcggcagtgatctcaagaatctctgtgtgactgctgcttaccgccctgttagggagctcctgaagatagaaagagagagggaactggagcgaagggaaaaggagtcaaaagacaaggcggcggcggcggagaattcagaagccccggagagtgagaagaaggagagctcagaaaccaaagaagctcggaagagcacgcagagtccagaaggcggcggcaaaggcgacgagggtccagacagcaaggcggagggcgagaaggaagcggccgttgttgaccttaggccactgacgatggaagacctgaggcaggcaaagaaccaggttgcagcgagcttcgccgccgagggtgccgtgatgaacgagctcaggcagtggaacgacctgtacggcgaaggggggtccaggaagaaacagcagctgacctacttcttgtagaggtgaagcatttggcaggtggtggagaggaacagagctgggcagacggtggacccatacttgatgaaccgagcatggtttcttcaagacgtgacgtgggcatgacgcatagtactagtctttgaggttccaggatccatgagatgagatgaggtcgatggtcaatttgtaggatcatgaactattattcttttacatgcatttgtacatgagcgctagactggttatgtatatctggattgattgaacagctcttgtgtttgagggtcattttagcttctcgtagactgctgtaattatatcatatatagtgagtatatatattcatagcgcaatgagcacaatatttgagaacctaaaggcccccccccggctagtgagctc

SEQ ID NO: 75594 - DNA, 715 bp, Zea mays
  unsure (1)..(715): unsure at all n locations
  Clone ID: MRT4577_168972C.1
aaacgacggagaagaccgcgccgaggatccctttccggaggagggcgggtgggcgtgactgtcgctgatcgacggcagaggcgatggcatcaacgtcacggatcttcgagtacttcgtggtatgcgggctgggaccggagatccgggcgctggatggcctcaagggcttccatggcgccgaagaaatgtacatgcctgccttcatcgaccagttcccgcactcggccacgcgctctaccctcccccgcccccgcagctccccacctgtgttttgccagcgggtgtaagaatatactcttctaggttggatgccaatgacgtctccacctatccaaggagctatcccatagttttgacagagggagatggttcaaaaatttacgtcagttgtattgcatttcgggatccaatttgtgaagatattattgaagcctaccaaattccggtgaattcttttgctgataaatgcatctgctttgtgtcccattctccttgtttccaagtcctccgcgatgctctagaggaaatatttgtcctttgtttttctcctgccggttgtagcaagcctttgtgggatataatatcccatgtggtgtcaaatgttccattaccaacaccggngaaaggatcgtgtcnttgtttgccattgataattgccttctttctgcggaaactcctccaaaagaatggcttcctcacgctgatatatccttcc

SEQ ID NO: 75595 - DNA, 902 bp, Zea mays
  Clone ID: MRT4577_168973C.1
cggacgcgtgggttccaactctggagagcagagagctgatcttgaggacgctgctttcaaaggagaaagttgatgaagatattgatttcaaggaacttgcggccatgacggaaggatacagcggcagtgatctcaagaatctctgtgtgactgctgcttaccgccctgttagggagctcctgaagatagaaagagagagggaactggtaacagctctgtcttgttgctctaaccgaatatccctgtactgatcctgcaatacacgtcgaatgaacttgatgggtgtctcaggagcgaagggaaaaggagtcaaaagacaaggcggcggcggcggagaattcagaagccccggagagtgagaagaaggagagctcagaaaccaaagaagctccgaagagcacgcagagtccagaaggcggcggcaaaggcgacgagggtccagacagcaaggcggagggcgagaaggaagcggccgttgttgaccttaggccactgacgatggaagacctgaggcaggcaaagaaccaggttgcagctgacctacttcttgtagaggtgaagcatttggcaggtggtgggtggagaggtacagagctgggcagacggtggacccattacttgatgaacagagcatggtttcttcaagacgtgacgttgggcatagacgcatagtactagtctttgaggttccaggatccatgagatgagatgaggtcgatggtcaatttgtaggatcgtcatgaactattcttttacatgcatttgcatttgtacatgagcgctagactggttatgtatatctggattgattgaacagctcttgtgtttgagggtcgttttagcttctcgtagactgctgtaattatatcatatatagtgagtatattcatagcgcaatgagc

SEQ ID NO: 75596 - DNA, 261 bp, Zea mays
  Clone ID: MRT4577_168974C.1
ggccgggaagtattttttttttaagctcaaaaggccaggaaggggtcccacaatcagattatttagaatgggggaaaaaaaagatttccccaaccagcgatgctggtccacatgaaaagaattcattcccgtcaatagttgaaagcagaaatggcagggacaagaactgctggggaacctgcagcccctgggctttaagctttgagggaaaggggatcccaaaaccgaacaggggggttcccctgttttagactcattggg

SEQ ID NO: 75597 - DNA, 456 bp, Zea mays
  Clone ID: MRT4577_168975C.1
tgaacttgatgggtgtctcaggagcgaagggaaaaggagtcaaaagacaaggcggcggcggcggagaattcagaagccccggagagtgagaagaaggagagctcagaaaccaaagaagctccgaagagcacgcagagtccagaaggcggcggcaaaggcgacaagggtccagacagcaaggcggatggctcagaggcgaaggctgagggcgagaaggaagcggcctttattgaccttaggccactgacgatggaagacctgaggcaggcaaagaaccaggttgcagcgagcttcgccgccgagggtgccgtgatgaacgagctcaggcagtggaacgacctgtacggcgaaggggggtccaggaagaaacagcagctgacctacttcttgtagaggtgaagcatttggcaggtggtggagaggaacagagctgggcagacggtggacccattactt

SEQ ID NO: 75598 - DNA, 313 bp, Zea mays
  Clone ID: MRT4577_168976C.1
gcggcaagcccaagatcctgaagaagtgcaacctgccgctcaccgcccagggctgcgtgaaccgcatcatcaccgagatggccgtgttcgatgtggacaagagcgggctacgctgatcgaggtggccgagggcgtcaccgtggacgacgtcaagaagtacaccgaacccgagttcaaggtgtcccccaacctcaagaagatcgcctacccctaaggcaaaaaagccagcgagggccctcgctgcaaatcatgatttgcgtctgtagtggccgatgggcaacccacatcacacatcacaaagtaggcttagcgg

SEQ ID NO: 75599 - DNA, 742 bp, Zea mays
  unsure (1)..(742): unsure at all n locations
  Clone ID: MRT4577_168977C.1
gccggccggtccgggattgctcgctgcgccgccgcctccgacatcgtcccttcgtccccacgagcaaccgataatccgtcgggatgttggtttatcaggatctcctatctggagacgaggtcctgtgcggattcattcacctacaaggagctcgagaacggagtcctgcgagaggtcgagggaaagtggatcacccaagggcctgttgatgtagacattgatgccaatccatctgctgaggacgatgaggatgaaagcgttgatgacacagtcgtgaaggaggttgatattgatgacacattccacctacaggagcaacctccttttgacgagaaatcatttgtctcttacataaaaaaatacatcaagaatctcactgctgtgctggagccagagaaagcgcatgatctctaaaagggtgtcgagactgcaaccaagtttctccttagcaagctgaaggaccttcaagtttttggtggtgagagcatgaaggacgaagcttccgtggtattcgccaattacaaggatggtgccactaatgcgacattcctctatttctctcatggccttaaagagatcaagtgctagattacatacaccatgctgggtactatatatggtcgattggtatagccacaactatagctgtactgcctgaactgaactcaggttatttttaacacaaaactgtccaagattggattgcttgttatagctacatattgatattgacgtgttgnca

SEQ ID NO: 75600 - DNA, 345 bp, Zea mays
  Clone ID: MRT4577_168978C.1
tttcatacgtggacaccctcgaattccaaatcatagataattatagaagcctccgggatacttgaaaacgcggaattgaaattccccgatgcatgccgacctcattttctttgacttcgtgctacggcccgtaataataccaaaaagcccaatggacaatggaaccctgaggccatcaaataacttgaagaagcacaactggtaccattccgacgaataccgcggggatatccataactgcaaccataggggtgccaccaaaacacttcaacccacctcatacatgtgcattcttgcctccttagaaaaagaatatgtgcaaaggtgattcgccgaccagctcct

SEQ ID NO: 75601 - DNA, 381 bp, Zea mays
  Clone ID: MRT4577_168979C.1
cgccggcaagcgcaagaaggccaccacgagcggcaagcccaagcgcccgccctccgccttcttcgtcttcatgtctgaattcaggcaggagtatcaagttcaacaccctggcaacaagagcattacggctgttagtcaccttgcactctgctctccctttattttttggtgcgtttgcagatgtgattctttgttcgtattggtggatcaggtgagcaaggcagcaggggagaagtggcatgctatgacagattaagttgcattgtacaatcatatatggaagcagctcaaggatgcaccaaaatgatcaacttccaaacgtatggaacatgtgaaacctgtagtctgtagatgcaaaaatgatctgatgataccataatt

SEQ ID NO: 75602 - DNA, 889 bp, Zea mays
  unsure (1)..(889): unsure at all n locations
  Clone ID: MRT4577_16897C.1
cattgggtacctcgaggccggccgggttggctcctcgcctccacccgcacgtggaggcccgcgtcctcgacgacgtcgcccgcggcggcggcgacgtcagcgccatggactacctccacgcggccctgaccgagtccatgcgcctgtacccgccggtgcccgtcgacttcaaggaggccctggaggacgacgtgctcccggacggcacgctggtgcgcgcgcggcagcgggtgatctactacacgtacgccatgggacgggacaaggccacctggggccccgactgcctggagttccgcccggagcgctggctgagcaagagcggcgcgttcgcgggcggcgccgagagcccctacaagtacgtggtgttcaatgcggggccgaggctgtgcgtcggcaagcgcttcgcgtacatgcagatgaagacggcggcggcggcggtgctggcgcggttccgggtggaggtgctgccggggcaggaggtgaagcccaagctcaacaccacgctctatatgaagaacgggctcatggtgcgcttcgtccgcagggagcagcggcacgagctcggccaccctctgcctgctgcagctgcagatgcaggggaagattgaagaagatcagttggaggcccctttttcacgggatgaagcgcaacatcaccattcacccgggaaagaaccaaactccgggcggaagacgtccaatgcgcaaatattaatatgaatatatgaatgggtgaatgagcccatgcatggatatatattgtggcatacttgtgctatgtacttcctgttcctctgtgtgtacgtgtatcgtagtaaaagcgtccagatcccgatgaaaaatcactnttgtcgtgtgtttcaaaaaaaaaaaaaaaaaagcggcc

SEQ ID NO: 75603 - DNA, 2368 bp, Zea mays
  Clone ID: MRT4577_168980C.1
gccggccgggtcggggtggggcgctactgtttccatcctcctgctctgacttctctgcttcgtccgatcccctctcccccacctgccagactccccgccgtccaccgctcgccgcccccggccgccatccagccgccggtacagggctcatcctcccggtcgcagccgtgtccacttccttcacgaagagaggcgcgtagactggggagctggagcgaggacaaggagacgagggaaaggatgcagcagctgcaaccgaagcagatgcactgggtgagggccgactcctccgacttcgggggcgaccgtcccgccccccgcagcgggcacactgcggttatcattggcaagtccaaggtggtcgtcttcggcggattcgccgacaagcgcttcctcgctgatgtttccgtctacgacgtcgagaataagctatggtacacacctgagtgcactggtaatgggtcggatgggcaggccggcccaagcccaagggcttttcacatagctgttgtcattgactgcaacatgttcatctttggtggccgatctgggggcaagcgtttaggtgatttctggatgctagacactgacttatggcaatggtcggagatgactggctttggtgatttaccatcaccacgagagtttgctgctgcttcagccataggaaacagaaagattgttatgtatggtggatgggatggcaaaaaatggctttcagatgtatacatcatggacacaatgtcactagagtggacagaattagctgttaccggatctgtgccacctccaagatgtgggcattcggcaaccatgattgagaagagactccttatatttggaggcagaggtggagcaggaccaataatgggtgatttatgggctttaaagggtattactgaagaagacaatgaggcgccaggttggacacagttgaaacttccagggcaatctccctcaccacgatgcggtcattcagtaacatctggtggaccttatctcttgctgtttggaggacatggaactggcggttggctaagtagatatgatgtgtactataatgaatgcattattttagacagggtatctgttcaatggaagcgcttaccaacaagcaatgaaccacctcctcctcgggcatatcattccataacttccatagggtctcgatttcttttatttggtggctttgatggaaagaatacatttggtgatttgtggtggcttgttcctgaagatgatcctattgcaaaacgagacttagttcctagcatcgattcaaacagcaaacctagcactgtgactgatgataaccagcaattgaacctaaaggagtcacaagctctagaaaatccaataacagaattggccaaacgtctggggattgcactttctgaagaagtttcagcaagttttgttgacgaagccaatgataaagaacttgtggaattgtcatctagacttgctggtcaatcgcttccagctagtgaccaggttgcatcaattcaggtacttcgtgatcattggaaaagttctccagcaagctcactacaactgcaggaactaggacctttgctgagggactatcaacgcctcatcttgcgacactatacgggaaattcattgccagcttttcgtgaaatggaagctctccgttttttccatctaaaaagtgcttcacagttgcgcatggatgacattcccgtcctgttgagcgagtatggaaggctgctttcaacatgagatggtgtcttgcaagctgtgccctcctgcttggtcctaacagaacttctgctccatgtaatttgcggagaactttctgcctgacaaaagcacacccgtggagccattccttgccatcagttggtctgttagtgcaagtcatagtcgtagcagcgatagcgcactgagctgaattcctttttcttttgaggactggacgcagacgcacacatatttcgtgcagcctggctgggcgctggaatggggtcatggtcatgggctcatggccatccacacgtggttaggcctagcttaggcgaggagctgggcggcgtggcaaacttggcaggccgcccatggtcgcgtggaattccaagaaaacggggttttgtgtgatgtgaggctggaatggaacctggggggtcagcagcacatgtttccagtctattgcactccctctgaccgaaagggcgctgcactgcaattttattttgctacctttgttcaaaaataatgggcgtctccttttcagatgtcaatcaatttcaactttgattagatttagtaaaaaaatctaacatttgttggatcgtattaaatattagtacttttatgtgtataaaaaaaaaaaaaaaaaaaaaaaaaa

SEQ ID NO: 75604 - DNA, 498 bp, Zea mays
  Clone ID: MRT4577_168981C.1
cgggccgcctttgtttttttttttttttttttttttttttttttttttttttttttttttttaaaattttcttgggggcaaccttagaccctttcaaatgggaggggttgattttttcccgggcaaccgggttcctttgcccagttttaggggggtttaatccatctttcctcctaggccaaggaaaaatttttgttggggggaaaaaaaaaactgcccccagttttaagcgggcctataaaaaactatttcccacaccaagataaaccaagccaaaatttatttccaataacggcccaactttcccaataaaaaaaaaacgttttataggatacttattttcaacacaaggaaaaaaaccgccggttttctccagaactaaggaaaattaagaaaaatttggttaacgaaccttaacttcaaattaattggggggggacattttcctaagcctttgaaaaatatctgggaaggacggtttttccgttgaataaatga

SEQ ID NO: 75605 - DNA, 517 bp, Zea mays
  Clone ID: MRT4577_168982C.1
accattcaatatatcataaataagcattgtcaaacaacacatacataagtaggagaaaactagacatagcaaaaagttctaagcagcacgtggatggtctcgaagctgcccttgtgcttctccctgttcttgatcactcctacacgccttgtgttcctcccaccggtcatcatgaccatgttgccgatgtcaaacttgatgaagtccatgatcttgttggtctccagaccgatcttgatggtgccatttctgcaaacttttagctagtggaatgacatctcacaaagtgtgttttcaggaagagaccgtcgaggtcaaatctctggtggaaattgacagcttctttaattgtgttgaaaacaccctgatcctccatctcctcccaggagtcccagttggcaatagcgtcagccaatgtagctaccagctcaaagaccttcagactttcagtttcttccatgcaagtgacagaactcatgacaaactcaagtaaaacagaagcatcgtttacgcatga

SEQ ID NO: 75606 - DNA, 407 bp, Zea mays
  Clone ID: MRT4577_168983C.1
aggggaagtaaatggtaaattgttttttttaaaatggtaggtaattatggcatttaagaagtgtttttgatgttaaaaaaaacactggatagaaaacgtggagctttgatagataagggattaatattaaagaggaaaaaatattagaagggactaatatattgtaggtgaagaacatacattttccaaaaaatgtaaaaaaaagcctgataaaaggcgaaaaaaacagtgtaaaaaaaaacatgactttaagggctgaaaaaaaatttaaaaatgaagggaaaattcagaccgggaacataggaggcgtaccaacaatccctatagtgagtagaaaaaaatctagggaggaaatatgggaaaaggtgttttatgggggaaaatagggagccgatcagaagaacaca

SEQ ID NO: 75607 - DNA, 153 bp, Zea mays
  Clone ID: MRT4577_168984C.1
ttcaagcatcccaacacactgtacaactttggttccttgacagcgaggtagttcatggggcaacagaacatacagaggcaagtgcgcgactaatctaatgaagactcttggctgccctcgcacccttttacacgctacactctaaccatataa

SEQ ID NO: 75608 - DNA, 155 bp, Zea mays
  Clone ID: MRT4577_168985C.1
ccggtcgcctcctccccacactccgccagacggcatcccctgtcgtccagccccgggcatctgagccagatcttgtgccgcgtcgcgatggcgaatgcctggccgtccgcgaaggcgcacggcgcgcatggctcccgggacccccagaggcatga

SEQ ID NO: 75609 - DNA, 529 bp, Zea mays
  Clone ID: MRT4577_168986C.1
tcgagcggccgcccgggcaggtacaagctttttttttttttttttttttttttttgttttttttttttttttttttttttttttttttttttttttttttttttttttttttttttttaaaaaaaaacaattttttttgaaaacttttcaaacatcccaaaaaaaaagaggaacacttcccccactacactaaaaattcggatttacaacaaaaaacaactagcccaaattctacaatctaaaacaaatgaaacaacaaaaggaaaaaaaaagctttaaccccctaaaaaaacccccttaaaaatgaggttgcggaaaaaaaaaaaccatttaaaccccactactttgggggcgtaattaaaacccttttggcaagggctaaaaaaacccccctttaagcaccaaaaataccttcgtttttaccccaccccctgtgcccctcctggaagcaaaagactatgcaaaaagatcttcatccttcccatgcatattttaaacaaaaaggacggttctcaccaccccaatttaa

SEQ ID NO: 75610 - DNA, 471 bp, Zea mays
  Clone ID: MRT4577_168987C.1
gacaaattcagtagcagacatgggcagaaaggtgtctgtggtacgattgttcagcaagaagacttccccttctctgagagaggaatctgtcctgatttaatcatgaatccacatggtttcccaaggttcttgataagatgcatgctcgagctagtggaccgcgggtgttactgacgaggcaaccaactgaggggcgaagccgtgatggaggcttgcgtcttggtgagatggaacgtgattgtctaattgcatatggcgcgagcatgctaatatttgaacgtctactgttatcaagtgatccttatcaagtccaggtttgcagaaaatgtggcttgttaggctactacaatcacaaactgaagacttcatactgttcaatgtgcaagaatggggaaaacatggccaagatgaggctgccatacgcttgcaagcttctattccaggagttgcatgcaatgaatgtagtaccac

SEQ ID NO: 75611 - DNA, 130 bp, Zea mays
  Clone ID: MRT4577_168988C.1
tttttgggcatggtcaacacaacattcaaagaaaacgtcatcaaagacgttggtctataaacggttggagtaggcggtgagccactaacgtgacaacccatttttaagctatgcggtctgagcagcatat

SEQ ID NO: 75612 - DNA, 692 bp, Zea mays
  Clone ID: MRT4577_168989C.1
tcagttggttgcctcgtcagtaacacccgcggtccactagctcgagcatgcatcttatcaagaaccatgtgctttagtttctgatagtagattggtcccatgaagatgtatgcctcaagaggctgaccaagaatgcctgagtacaagaaatcttttccattatagctgaaaccatgcttgattagagtagagcttatgtctgcaaccttgtcagcattaccacttggctcaccaaatgcactgccatagtgaaaccgtccacaagaaacaccagcctttccaccaagaagttcaatcattttacctattgtcatacgacttgggaaaccatgtggattcatgattaaatcaggacagattcctctctcagagaaggggaagtcttcttgctgaacaatcgtaccacagacacctttctgcccatgtctgctactgaatttgtcaccaacctctggccttctagtgtgacgaataatacacttaatggataacttatcatttgtatctgagcacagcattacacgatctaccacagtagtctcaccatcaacacctttgtacaaggcaggtgagtccttgtagtcactttctctcaatgccctaccaataccttttgaagtgtttttgggagttcgcttgtttacatagatatcatgattgcgaataatttgaccaggtccagcaattccatc

SEQ ID NO: 75613 - DNA, 467 bp, Zea mays
  Clone ID: MRT4577_16898C.1
gaaacgggcaagggagtttttttattttcctaccccaaatacatttgtacacaaacaggtaaattatacaagtacttaactggcttttaacgggggatgcaaaaacaaagggtctttttaaagggacgaggttttagcacaaccaattccgaagggccaaactggggaaaaacactgggggggccccacaaccaaacaacagccaaacataacaggatgaaaaaagggggcatcacgggatcaaacacgagcagcatttccagcaaaaaccccccccctgtctttttaattatttcggaaacctacggggcaacaaacgatctgagcaccactgatgaaacacattgcctcgctgctggaaaaaaaaaaacacaatttccccactggtttccaggtaaaaaacggtatctgagtccagggcgcccatgtaatcgtcaagggaaaggccctcgttcaagaactgattg

SEQ ID NO: 75614 - DNA, 318 bp, Zea mays
  Clone ID: MRT4577_168990C.1
gttcaactaacacaaacgcatgcttcacaacatgcgcggagtcacgtacatctgcgcttaggggatggacatgatcacaaaggtgaccgagaacgagaagatcgacaacgagttggtgacgaagaaggtggacgagtactacgggttgggggcagaagatcagaggaagctcaacgagtactgcgaggtgttctgcagattcatataatgcaatatagtgaccctagactacatcgcgaacatgaagggctgcgtaataaacggagcttacgggaacgatattaagcgacgtgtcaacaatggacatgtgcacaaaga

SEQ ID NO: 75615 - DNA, 2669 bp, Zea mays
  Clone ID: MRT4577_168991C.1
taggggccttttttttttttttttttcttttttttttttatcgagtgactctagaataataatggcacatgccaatgattcagcattcaaagatcgtaatctagccctgcagggcgttcagcgatcatctaaacaaagaggtccagattccttcatatatgacatcgggaaaagactatatatacaacaattgcccggcgatagcttgtatacctccgcgggagaagagaagcccgcgaagagactagctagacggctgaaaccacacacctaaacgtggtttctctcgaaccagttaacaaaaaaaaaagccctatgcccctatcaaagagggctttaatttattatatagctctaaacacatttcgaatccagcatctctctcattgtacagtcccagcatctgtcatacttcggttaacttcaagcgtggtactacattcattgcatgcaattcctggaatagaagcttgcaagcgtatggcagcctcatcttggccatgttttccccattcttgcacattgaacagtatgaagtcttcagtttgtgattgtagtagcctaacaagccacattttctgcaaacctggacttgataaggatcacttgataacagtagacgttcaaatattagcatgctcgcgccatatgcaattagacaatcacgttccatctcaccaagacgcaagcctccatcacggcttcgcccctcagttggttgcctcgtcagtaacacccgcggtccactagctcgagcatgcatcttatcaagaaccatgtgctttagtttctgatagtagattggtcccatgaagatgtatgcctcaagaggctgaccaagaatgcctgagtacaagaaatcttttccattactagctgaaaccatgcttgattagagtagagcttatgtctgcacccttgtcagcattaccactaggctcaccaaatgcaatcccatagccaaaccgtccacaagaaacaccagcctttccaccaagagctgttcttgaattagaatgaccttctctgttcctttgacaacaaagtagccgccaggatcaagagggcactcaccatattttgctagttcagcttcatccttttcatacagaatacaggcatggcttcttagcataataggcatgtagccaatgataaagttattctttcttctcacttcatgctgctttccgacagtgtattcgatatgaacttttatgggagcagagtaagtgcggtcagtaaggcggcaaaaatgtggtgtgatattttcaacgttatactctacatgtaccgagggcatgccaacatgcaccacgtagccaatgataaagttggtcggtccgttgtgcgcttcctgctttccgacagtgtattcgatatgaacttttatgggagcagaataagtgcggtaagtaaggcggcgctcctgtggtgtgattctaaccttgaggaaggccgggaggagcgcgaacttgtcgacaggcttcctcaccggcgctgctaacgaacggtatgtcgggaatggcactgtgttggccaccttgccgctttggctgtcgtctttggtgggcacggtcatggcagaggggcttgaaagcagagtgcggaagagaagccaggcgacgcggaaatttaacggcaagagaggcgccgctttcacaggtgcgctgccctcctgctgttgtcgtctttggggtccgaggccgacgatggcaaagaaaggagccggcgccggcgggcaagaggagagtggaatacagcagacgcgccggaggtggtgggcacaacggcgctgaagggcagaggggcgtgttgcaaccccagaaccttcgccgtcacaggcgctcaaggccggcgagcctgtggccgtggaagatagggaagaatagaggaggagggctgagaaggcgagaaccgagagagaagggaagagcgcttgcgctgcgtggtgcgcgaaccggaactggcggcggcaacggagttcgagcattttacctattgtcatacgacttgggaaaccatgtggatccatgattaaatcaggacagattcctctctcagagaaggggaagtcttcttgctgaacaatcgtaccacagacacctttctgcccatgtctgctactgaatttgtcaccaacctctggccttctagtgtgacgaataatacacttaatggataacttatcatttgtatctgagcacagcattacacgatctaccacagtagtctcaccatcaacacctttgtacaaggcaggtgagtccttgtagtcactttctctcaatgccctaccaataccttttgaagtgtttttgggagttcgcttgtttacatagatatcatgattgcgaataatttgaccaggtccagcaattccatcttcatccaacgctctcatattctgtttaatcaaaacaccattatctctttggggttcaacaatcatatcggatacaccatctccatagttatcctttaaaactgtgtactttttcaatgctatgcaacggccaaatcctcgatcaagggatgacttgttcatcacaattgcatcttcaatatcataaccactatatcccatgacagcaacagtggcgttctgcccagcgccaagtttatcataccccaccaactcaatagtttttgccggccaggccctcgag

SEQ ID NO: 75616 - DNA, 532 bp, Zea mays
  Clone ID: MRT4577_168992C.1
gccctcctcgagttttttttttttttttttttttttttttggttttttttttttttttttttttttttttttttttttttttttttttttttttttttttttttggggggaaattgcctcgttttatgaatagcaaaagggagtttcgatcgaacaacaacgaacgggcgcgttttaaccaaggggcatcggtttacaaaatgactggtctacaaatttttgcaaatcccaaaaggaaagatcataggcaacaaatctttgggttttttaactacgactgggagcaggcccaggccccttaccctgaactacgggggccccccgaacaatggggaagtaaaccctaaaaacaggatggatccattttttccacagaacccggacgtcctttttggtagagtttgattggacggggaagtcaatacccgaaccatccccccttggataggggggaccccttttttttcctttcagtttgagccccccccggcaagggaagtctgaggggcgtttttgactcccccctaacatt

SEQ ID NO: 75617 - DNA, 273 bp, Zea mays
  Clone ID: MRT4577_168993C.1
atcccctttaacgttatcagtgcgggactcaagcccgtgttgagaaaggtgttggacaccttcttgggtgaagaagactcggcgaggattgagattgtggcgaatgaggcttctatcaacgaagatggatcggaatggaaacccatctggcgccatgacactgaggtcggacacgacaaggctctgagcgtcaacgaggctcgcattcaggcccgcgacaactgcggagatgacgaatcccgctcatcgtcttcatcggtgatggtgtgtccg

SEQ ID NO: 75618 - DNA, 667 bp, Zea mays
  Clone ID: MRT4577_168994C.1
ctactggaaaaaacatgagctggcagcaaggagggaacaaagtgttgttagttcaggaacagtctgctgcacaagagccgaaccaatctaactctccaatggtgatttggactgcctcattcttatgcgacatagctgtggcgtagatatgtttctctcaagctccactgggaatactggtacaatatatttccatcagccttcgtagaaggtgaattcagcttggtcctggtatagctggatggacatgacccttgcccatcataaaagaacttgagcttgttttcatttggttggaagaatcctctccatgctcttgaacggtctctgcttgtgaagtattgaattggactaaaggcggagcatgtaagcttatatgggcagtgatcatgcccattgatgtagaagtcgatgctgttgatctggaatggaccaaacttactatcaaaagatgcttttttttgtatttttgtggctgcttccgagtaaccttaggccttgttgtttggttagaagaggattgagggggatttgttacttcgcgctgttaaaaaacataatactttgcgctctactgaaagggcagcaaacaaagacgtcgtgtatgccatatgctccttgcctgtgaaaaaagaaaataaagtttgtacggtccattgttttaaaa

SEQ ID NO: 75619 - DNA, 240 bp, Zea mays
  Clone ID: MRT4577_168995C.1
ctatgctggggtacacagtgagagtactcacttttcacttgtcttgctcttagattgggccatggctttcatcctgtgtcccctgacctgtccaggtgagtgtgagggcagcactgggaagctggagtgctgcttgtgcctcccttcccagtgggctgtgttgactgctgctccccacccctaccgatggtcccaggaagcagggagagttggggaaggcaagattggaaagacaggaag

SEQ ID NO: 75620 - DNA, 342 bp, Zea mays
  Clone ID: MRT4577_168996C.1
acgggcgcgcgggaaatgggctgggatttgggctagagctgcctgatggtgggccgcaaaaaagccggcatggggagtcggtacaatctaatgatcgcctcgaaacacgccctaggatggtgccaccttgagacgcggctgcctaatctacttcccggaggtggacaacaactcgagaatctttctagtgtacgtggtcattggggcttcgcgcgcctacccgtccacctcagctggcgcgccatgggcctggtcggcgccgtgccgaccgtcttactgggcgtcgccgagctagccatgccggagacgccccggtggctcgtcatgcggtgccgaatcgac

SEQ ID NO: 75621 - DNA, 140 bp, Zea mays
  unsure (1)..(140): unsure at all n locations
  Clone ID: MRT4577_168997C.1
actcgccaatttttagcgagcggcggcgatcggcttcggatcggcgcagcgcggcggagcggagatggatgccgtggcggcggatggcctgatccgagcagcgcacggcgcgccccctgcgcaaccggcanccaacgcag

SEQ ID NO: 75622 - DNA, 231 bp, Zea mays
  unsure (1)..(231): unsure at all n locations
  Clone ID: MRT4577_168998C.1
ctagaagcgcccctctccctctctctctctctcttcgccgnccgaagctccgcaccccaaggtaatcgacacctcgccgagatgggccggaaggtctttgtccgtgggcactgggaatgccatggaaccacagatcaagtcgagaagattgtcaaaaccctgaatgaaggacagggtcccccttcagaagttgtggaggtcgttgtcagccctccttatgtcttccttcct

SEQ ID NO: 75623 - DNA, 340 bp, Zea mays
  Clone ID: MRT4577_168999C.1
cccacacccgcaccccctactgggggatattttgactctttcccggccttttaaccttttctcattcttccttctgagaaaaatggcgagccaattcctcagccaaaaaacattttccatgcaacaacataccgggtcgcccaaagggaaacaggcatccccataggggaaaaataaagggggttttggcaaacacagaaaacagcacccccccccagagggggccagcttcataatgggccccccccaagagcccacaaaagggcccccaaaaaaacccctacagacttcttcccctccaaccggcctttatgcaagggctgccccgggggaccggggt

SEQ ID NO: 75624 - DNA, 599 bp, Zea mays
  Clone ID: MRT4577_16899C.1
ggtaattgctcagggagcagcagatgcatagtttgtataatataattagcatagctaaatcatgatcgtttgggatttaaagctgagttgaagatctgatttaagtactattcgttgaaaggtttaacgcatgaacctaggacgcgcaatgacaagcctgatagcctgaaagctaaaaggaatggtctctgcaccatttataaggtccatcccatcttgtttacaggccgcagatgctttattcctgcctatgctagactgtgaggcacctagaatgctcaggagtcgccaactgatggccttccgctttctccatcggtacaattgcgagctaatgctttggattaaactaatcacggtggtttgttcggggtatttgtgcgcctggctgtagttaatcatggactaaaagcctgtgctgtgcacctctgcccgcccccagatcgacactttgggggtatggctacatgtatagtcctaccagatcgtcggcatattgtgttctctttttgctgtatactagtactttgtaacatgcaagcggaggctacttattcagcgccgttcgctaattgtgtttatgaaatgttttgagctgt

SEQ ID NO: 75625 - DNA, 208 bp, Zea mays
  unsure (1)..(208): unsure at all n locations
  Clone ID: MRT4577_1689C.1
ttcttgcgttgcatantcatcgatccgcgagaaacatcagttggcaattggcatcatagtccgtgtgggcgtgcatgccaattgccaactgatgtttcttgcgttgcatatcatcgatccgcgagttctgtggctattgtatactgatgtgtccgtatgtggctctcaacttctcatggttaatgtgatatataagtacagtgacaac

SEQ ID NO: 75626 - DNA, 884 bp, Zea mays
  unsure (1)..(884): unsure at all n locations
  Clone ID: MRT4577_168C.1
cccccttgcctgctcgcctccacggccacacgaagccccctgtggtgctctcggaatgcgctgccatcgctggcgtagccggagctggccgaacacgcaaccctgccgcgggagggcggggcattgatgctggagctcacaaggatgtcgctgctggagcagcggacaacgacaaaggctctggggcagcacctgacgctagcgctacactactactgaattttgtgatgaagcaataccatccttttattttgttttttggggtgatgcaaaaaaaccaaactcaaaagtctactaaaggccataaattgagcaatgttgctgcttcaagaaacaaattatcagcttattcccatctaacctttgatgggatttggtttagcattaaggaattctcaaaatcaaaatagcaggtacttgtcacgatctctactgtgtttctttgaggtattcacttttctatttgaagaacaccactaatcgagtttatttttcttagtttcaagtgccagatgatgcaaggctttcagctagaagtgtagctgttctctgaaatctttgccaaaaggttaatttcattctaccttgcatgctacctgtttagcatgatcgttagtttattcgctaacaaaaaactttgccgaatggatgacttccttctgagaagactgaactgaataattatgtcaaagttgtttcagtagtttggcctaatcagtattgatctatggtgtatagtctacaggttgtactatatggttgattgttctgatttcgagcttggttagtctaatgttcttaattatggatgatgatcctttgaagttcatgcacgaagacttgccgttctgaaggccttacttnctgttccactagtagttctg

SEQ ID NO: 75627 - DNA, 614 bp, Zea mays
  Clone ID: MRT4577_169000C.1
ggtacacctccgaggtcctgccggggcagggcggtcgcgtacccgctgcccagcatctccgaacccctaccgccctcgggggtgccagtaccgggagccggggcttgccacctggggaccacgcggctgttccttctgcactaggactgccggcaggctggaagcccagcgcggagtctaggcagtgctgaaatgaccaccatacgatatagactgcatgtggaagaggtggattccactatccctgcaattggatagaaagcttagacggttcagcccagcaacatcatattacaagtacggtacctcagttgagaaaacatagcattatgccatactggtggcgcttacttaccaacactcacagctctcataatatagtaagtccgatgtcaagcgatacagatagacgtcggacatcgaaagatgaatagcacgcgcatccttgatgaggaagaacttaaaggtgcgaaggatccttgcgtatgcaagaaactcaggattcttgcagacacacgtcatacgatgcgtgccatcacagattcataacaaactacacgagatatgacagccggcacatgggcgattctcaaaacatctgctgtaaagggaga

SEQ ID NO: 75628 - DNA, 279 bp, Zea mays
  unsure (1)..(279): unsure at all n locations
  Clone ID: MRT4577_169001C.1
gggcgagcagngnaacaaaanccnncagccaagggcaaggagaagacncacancaacanngnggacaaaggacaagncgacacnggcaagncgaccaccacnggccaccngancacaagcgggacgcggggacaaccgttttttttagaggnncgagaaagaggccgnggagaggaacaagcggncanncaaggangcccgggngcccgacaagcncaaggccgagcgngagagaggnaacacaanngacanngcaangaggaagcacgagaccaccaa

SEQ ID NO: 75629 - DNA, 698 bp, Zea mays
  unsure (1)..(698): unsure at all n locations
  Clone ID: MRT4577_169002C.1
ccggtccggaacccccgggctggcaattaataaagcggnaaaagnatgggcaagnaaagcaaaccagcagcagctcggcacgagggcgccgtgccggaaaacagctcctcgcctctctcccccattccccggtacctgaataaacagtgtgctggtgcagtgcgactgcgagcgcgtgggtttagtcagagcttcgcgggtttcgcgggtgcttcgtcggtcgttggactctgatggccgcggcgcggcggcaggcggcggtgctggttctggtgctggcgttggtgatgggcgcggggttggcgccgggtccccgcggatgcgctgcgcagggggaggctgtggtggtgtccagctacgggcagggccacctctcgctcaagccctacgactggacctacctgcgcgttgagctcccgccgtcgttctcttctgtcaccatggatttcgctgctgacatagaccttcagagggagcgcttgaaaggcattccaagaaacaagcttgctattatctgtttgatgaattccaacccccctattcctgatatatctgattcttatctggacaatttatgaagaaactttattgcagtatcaaactctctcccagatggaccttnttggtaatagcaatataattaatcagccaaatctggtgcaatgcataccatttcagaaaacacancggtagtgcta

SEQ ID NO: 75630 - DNA, 363 bp, Zea mays
  unsure (1)..(363): unsure at all n locations
  Clone ID: MRT4577_169003C.1
aagggatccagcactccacccgttgggattgtagcttcgggggggacgtccttgaaggatgaccaaagaatcattcccttatgcaactgaccgtcggggtcgaccccataatcccctggagggttgatcttggtgaacaagaacaacaacatggcttgactggaggagaatacccagaaagtgctgtttgagctgaccggcggtgactccaccagcgaccggaccgagcttgacctgctggtcgtgctggacatgagcggcagcatgcatggcgagaanancgagaagatgaagactgccatgaagttcgaggtgaagaagctcatctacatccaccgcctctccatcgttaccttcctggac

SEQ ID NO: 75631 - DNA, 196 bp, Zea mays
  Clone ID: MRT4577_169004C.1
agccccgaaaaagaggattgtttcattgttcatagcaaaaacaagggctgactcattgacagacatacaatccattcaacatgataattcagggggggggggacttggctaacttagtacagtttcacaaaatgaaagtggctttgcatatttccatttctttgttttttaccattttattcattccattattacc

SEQ ID NO: 75632 - DNA, 215 bp, Zea mays
  Clone ID: MRT4577_169005C.1
cccatttttacgtttaaccacacccacaggcgccccacgaccatgggggggagacggagcacaaaaacaacgggaccgaactcctccagccagaaaaacagcccaaggcggccaccttggtcagcaaacgcgaggccggcacaaaagctcctgggaggccccataatggacgaggaaaacccgcaacagagggcgccccgcggcaaacgcccacc

SEQ ID NO: 75633 - DNA, 527 bp, Zea mays
  Clone ID: MRT4577_169006C.1
aaactaaactgttcatgattcagcattaagaaccagacgacagctccctcctacaaaaatatatggacatgcccaaattgttaatacatataacactgttggatcttatagtgacttgaacaaatccgctacgcacggcctggatgctaaagtttttttttaagcccacgtgggaatcaaggagtttcagtgaaccatgtcacacatttcgggcgccttgtgatactccggccctatgtctaggccctcatattgtttaccggggcccttgcctacgacgcaagaacaggctacaaccttccttgccttgccctcacagtcaagcttgcaaaggccgcaccactcatcgagagtcttaccggcaagaacagagcccagcctaacattgtgcctaatgcaccaatgccttcaccaacttagagttagtctggctggtcacaatcctcagcaagcacgcaaagatgagcatcctgctatcttgatggacttggtaggctcacggagacccttgacaagaccgtgatgag

SEQ ID NO: 75634 - DNA, 462 bp, Zea mays
  Clone ID: MRT4577_169007C.1
taattcggcacgaggcaccgggcccctacaccgtctccgactccgcctcgacacgagcacacaccgcgcctgcctgaacccgaccctttcccctccttctagagacagcgagcgactgcagcccgccctccgccgccggcctcgccgcgacgtgcttcgtctgaacccgaccctactccgtgaacgccatgattttttttttgaaacagcacacgctcctgacgcgtccgtggctgcgacccttccttatgcgctctccgttaccttcactgatacaagctcttcactggatccacagccaggcctttagcgaccagttttatcatctaccttcagatcatggagtcacagacgcagactgtcgacaccagccccaactgctgcggacaagtgcacatacatacaccactctcgagacgcacatcttggagatccgcaccaatgtcggctactgagcaggca

SEQ ID NO: 75635 - DNA, 345 bp, Zea mays
  Clone ID: MRT4577_169008C.1
ggaacagcacgatatgctagtgtaaacacccatcttggagtaggtgagtatcgttatttaacggtggtgctaagaggtttaaataatgtttaattatacagaacagcaagttttaggtttttatgggtacacaatctagtacaaaaacagggccttttagtcccaattaagttggggtaggctagagatgagaccctacggaaaggaaaactcatataaaatataaaaaggcattaacactcccccatcacataatataaggcgtatgtttcattgtgacgagcctttgaccaacaattattatatatattttttcgcgaaaacgcatgagagctgcgcgtcatt

SEQ ID NO: 75636 - DNA, 425 bp, Zea mays
  Clone ID: MRT4577_169009C.1
cggacgcgtgggtggaaaccacaaatagcttcaagctacaacgagtgattcctatagtgtttgtagagctgagaaagttgtaaccaatttcatataaggagagattcctatataagtgttgtgtgtattgagtgtttgtgataatcacttacgtgagagggagagatttccaacaattggtatcagagcctgttgatcttggaggagatttttgctgcccggtgcgatgtatagattggcgacgtcggttgtcaaggcagcggtgcaacgctacagcaatattgcaagttttgcgtgacgagatgctatggtgttatggcaaggcccagccataagaagatgttgccatgaactatggtgtgaagccgtgttcatgcaaattgttgtgtgaagctgcatggtgatgggaagtcttacttggagga

SEQ ID NO: 75637 - DNA, 649 bp, Zea mays
  unsure (1)..(649): unsure at all n locations
  Clone ID: MRT4577_16900C.1
atttacacggcgctccctccctcctcggngcgtgtatgcgcagctgcagctccgcaggcagatgttgctgactcgtctgtccagcgtttcttgctcgtcaacagcgcagcagttgcatgcgggcgtcggcaagttcgccgccgccgcatgctggagctggaagaagaagcgcgaggagctcccctgctttatgttcagactggccggcaagccgccgcgcgcctcaccggcgaagggcggcattgtcccggccagcgacgatgacgacggcgttagcctcggcaccgtgaagctgccgggcaacatcgacaccgctcggttggagtccttgctcttccagatttcttcacctgatgcgatcgaccaggtggacaaggttgagggcgggatcaggctagggttcgtcgcggtcgaggacggcgcgacgcggacgctggtgtacatcgattgcctggtctctccggccccggatggctctggtccggtgttccgagcgatcaggaacggtcctatgaaggacaaggagccacctggggagcccaggatcatgagaagcctccttcaggctctcgaaaagctattcagatcgctcgtgtttgaccgtgtaaacgccacacgatcaagcgctgcatctctgtaactattaatt

SEQ ID NO: 75638 - DNA, 153 bp, Zea mays
  Clone ID: MRT4577_169010C.1
gaagtttcataaagagagagaagcgaggttgcaatttccctgcgcgtatcttcacgcgatcggcgaaacgaagccgccacatacactagagttttttaccaggtagtcagccactgggcttggctagagagagtgagcatcgggggctcttgc

SEQ ID NO: 75639 - DNA, 2791 bp, Zea mays
  Clone ID: MRT4577_169011C.1
ggaaaaggggaaaccgagcgtcgtgtctatggggaaacggacgactgtgaggaggaggtgcacagtccctaccgttttttccgttgacgcctcgcctcgcctcgccttgctgccccctcctcccgttctcgaacaggtcaagccgcgcctcctctcgcctgcctgcgtccttgctcttcctcctcctccctttgcccgtcgtccgctccgcttcgttgtctcatccgctgccgttctagcaagcggggcagcgtcgcgcctcggcctgatgctccaccacgctccagtccacagcctccccggtccttctcgttcccgttctcggtgagagcggcggcttgcccggcccccgggtcctcttcacctcacctaaccttgtttctagtttcggtccgtcggttggtgcctcgtcggctgcctctcgctgcttggcccgtttcttcctggggtcgcgggcctcgagtacacaagtatataatcttcccggccgtcgtcttctctttctcgacctgcctctcttcgcattggcccgttcccgttcctcgctccctgctgctccttccgagatggactgcctgggatcgaagcacacgataggagagacctcctctgtcgtctgtgcctgggtgagaggtcgggtggtggtggcagtgcttggatgcttcacgcgaggccttggatggtggatgctgcgtgctgctggtctctgcgctgcgcctgaggtactctagagattagtttggccgcatcctccgtatcttctacttcttgaccagggatggagcttgtatacatggaaaggagaaacggatcgtacgacgatggcgcggttccagagttcagtggaaggggggctggaggggatcaggatcaggacccgcccgctgctgcatccgaggtccagtctgactcgcgtcagacaccggacgagaagaagagcaagggctgccaatcatgccgtgacccattctgttcatgcagcggcggcacgccccactcggaactgttccccccacatcccgccaagatgatgatcctggagttcctcatcgcgagcctcaggcacccgacaagaacccacaacgtcagtgatctcgacgacctgatcgccgacggggtcagccaagggagcgtggtaaacctcggcccttctgagaagaaggtgctggaatctctgcacgccatggtaaacgccaagacgaggccgaagagcccgtcgccgttcatggcgggatctaagctgaggaaaatccggtccaagtcccacgtcataacgcagtcggaaatactgaagctcatctctcctgagacgtgggaagcctcctccttccctggggcgtctccgatgatcggcggaggcacggctgaggacggcgtccatgggaacaagccgccgccgccgtgctgctcgtctgtgagctcaaaccagcatgttctgtcacggtgcccgtcgtccctcagcgcatgccttctacagtgcatatggaaggatggcctgcctcattttgagctgtcactggacgatcatcccattgcggtgtacgctgcaagtccagtcagggtgctggagaaggacagggccttcgactacgtctacatgatccattcgggagagcaaggaagaaaagactggatgggccactcgagcaacgtgtccagacttgtgggcaaggtgaaggtgtcaagttctcttgttcttaacccagacaagtcaggtcttttggaaaccgagtttgttctgtatggttctccggacgactatcttaggcagatgcgcagtccctacagcgtgccgaaagggaagggccttgtcaggagggtgacagagatcatgagagcaggcaatgtttccgctagcccgagacatccctggaagctgggcaaatcttcctctcatcagttcgacgacttggctggagtacttgaaggtgaaatgatcagtgctggaggatcagacctggtgagtctcaaggccgacgatctgccgtccaaccaagaattagcagcgattgtggtgagggaacagcggcgcagacgacggaaagagcctgtttcgggtggctggggcctcaagttccttgagaaagcaggactgaatcgcccacaaggcactgaagaaactgatgttcagaacagtgatggtgccacacattgtgtaactgttgttgtccccagaggctaccacggcggcgtggtatcaaagagtagtcgcccgtcaggcctcgtcgagagatggagatctggaggacgctgtgactgcggcggatgggatcttggctgccccatcagagtgctcaacggtgatggctgtggctccttgcctgaaggagagtcacgggacagaagatcggtagagatatcgatcaagggtgcaaagaatgagacgatgttgaagctcgtgaatatcacggaggacttgtacatcctctacttcgactcgagtatttcaccattgcagtgcttctcaacagggatagcgattgtgcacagccgagcgccagagctttgccccaaactgtgaattgcgcacagccaggcacgcacccgagctttgccccccaaactgtgaattgcaaagcttggtgtagctgaattacaaagattcgtgaagcactatgtacatgtagatagtagaatgggaataattcttgttatttttaacttatataattttgagagagaaaagcaggcagctgttttcagactgcttttaaatcatcaatctgttggtttggccgattgagcggaagctcagaaagatgaatttacaaatcatgtttcgtttaccaac

SEQ ID NO: 75640 - DNA, 953 bp, Zea mays
  Clone ID: MRT4577_169012C.1
gggcactgtttctttagcttccatgcgtagtaggcgtaggcaggcagccgggcatggaaagggaactccggaactgtagcgcccacgcgttaccgaccgagagtccgagagagagagagagagagtcgagcgagtcctccacgtccgcctccgccccccaaaccaaaggcatacaagccgtcgtgtgttaatggaaacggacaagtgtgaggaggaggagcaaagccagcagccttttttcccttgacgcctcgcctcgccttgctgcctgccccctcccgttctcgaacaggccgcgcctcctctcgcctgcctgtctgccccgcccgcccgcccgcctacgtccttggtcttcctcctcctccctttgcccgtcgtccgctttgttgtctcatccgctgccgttctagcaagcggggcagcgtcgcgctcgcgcctcggcctgatgctccaccacgctccagtccacagcctccccggtccttctcgttcccgttcccgttcccgttgagagcggcggcttgcccggcccccgggtcctcctcacctcacctaaccttgtttctagtttcggtcggttggtgcctcgtcggctgcctctcgctgcttctgcttggcccggttcttcctgggtcgcgggcctcgagtacaagtatataatcttcccggccgtcgtcttctctttctcgacctgcctctcttcgcattggcccgttcccgttcctcgctccctgctgctccttccgagttggactgcctgggatcgaagcacacgataggagagacctcctctgtcgtctgtgcctgggtgagaggtcgggtgttggtggcagtgcttggatgcttcacgcgaggccttggatggtggatgctgcgtgctgctggtctctgcgctgcgcctgaggtagtctagagattagattggctgcatcctccgtatcttctactttctt

SEQ ID NO: 75641 - DNA, 190 bp, Zea mays
  unsure (1)..(190): unsure at all n locations
  Clone ID: MRT4577_169013C.1
gtccgtactcccggggngcatcacgtgtagaggtcgccatgnagccgcccacactgatccgtcgcaggctgcctcagccgtagcagcagcacatcgtcgcggttgctgtttcatctgttcttccagtctcgtcttcgtctactgtgtgccgggcaggccttgatttgaggcttttagcttcccctatttg

SEQ ID NO: 75642 - DNA, 399 bp, Zea mays
  Clone ID: MRT4577_169014C.1
aattattaatgttcacattttatactttcttttaatatcttttgttttttttgtgttcaccagtactaaatagcctgggggggccccgcaaacaaaaaaaccgggccattttaaaaccagaagtttcccgaagcggatgtccttctaaaaacctccatttggggggggacctccaagaaggcggaagtattacttgtttaaaaaacccatgattttctgaccaccagagtccctggcccaatgggggggggggcgcactttttgggaacttgaaagggaaggaggggccgcaattctacaaatgcttccggggaaacaaaagccgcctttgcaaggggggatccccctattgctccggattttccactttacatgacagggggtggcccgcctccaaaa

SEQ ID NO: 75643 - DNA, 599 bp, Zea mays
  Clone ID: MRT4577_169015C.1
gtctacccacaggaaaaaagcatgttttttccaatgacactggaacaggctacagactattgggaacacaatgtacttgttccttacatgtgcctacaaacataatgcgaaggccgtgtaatgccgtcttaaccatgggacggaaaacacattagggtctgttcatttatccaaaaaattccaccaaaaatcgttttaaccgctcataactcatatcaattagacaattaatgcgaccattattttttccaaactaccattcaaagtgaaccgaacgtgccaatggtatatcaagtacataaaattcagacacttgagcatttgactgtacaatccttagttggccccatactccagaggaatacacggaatagaatgtgctataaatgccttaacttttggatagcatcaggcaccctggggggcgcctgctaccagggggaggctcaagtgatgaggcattgaggactggctattcgtatggtccgatgactggtggaaaattatcacagcgatggaccttaagataggatttgtctgtgactcgatgctccgatgatcgacgaatttgcgcaaaaattctgcattctgtagatcct

SEQ ID NO: 75644 - DNA, 441 bp, Zea mays
  Clone ID: MRT4577_169016C.1
gcacgactcgatatgtatattgacgtttgctgggcctatgtcaaacaatgctctcttggctgaacgaacacctacactcaaagactcgggcgtggggcgcgagttatttggcataaaaacagcgaccatccacggacgcgcacccagtgccgactgccgaggtcttacgatccatcgccttgcacctgacgctcctgacgccttgtccttacagtaagggcgcatgcctggacctgaaagcttctaaagggcccgggacggaacctgtttaaggtactgaaatggaacaattgctaggccacaacggacactgtactaataaatcctcactgtgtgcgttgtgagaaagatactgcatacatgacatggtatctgtactgtgacttatgccataaccggctcgcacgcactgggcatacacgtacatacacacgcactcca

SEQ ID NO: 75645 - DNA, 1427 bp, Zea mays
  Clone ID: MRT4577_169017C.1
ctaaagtcagagaagggggggaacgcgagtggggtagggtggctagcaaattagcagcagcaagacagggagcgagggatggtagaaagcacagataccaattccccattgctcgccgtgtattaaacatactcgcactccagctccccatttctctcctcccctccccttccctaatcatctcagcgaatccaatcgaggcgatggaccagcagggtgcgggcggggacgcggaggtgccggcggggctgggtctgacggcggcggagtacgagcagctgcggtcgacggtggacgcgcaccaccgctacgccgtgggggagggtcaatgctcctcgctgctggcgcagcgcatccacgcgccgccggaggccgtctgggccgtcgtccgccgcttcgactgcccgcaggtgtacaagcacttcatccggagctgcgcgctccgcccagaccccgaagccggcgacgccctctgccccggccgcctccgcgaggtcagcgtcatctcgggcctgcccgctagcaccagcaccgagcgcctcgacctactcgacgacgccgctagggtcttcggcttctccatcaccggaggcgagcaccgccttcggaactaccgctccgtcaccaccgtctccgagctcgcagaccccgcgatctgcaccgtcgtgctcgagtcctacgtcgttgacgtccccgacggcaacaccgaggacgacacccgcctcttcgccgacaccgtcatcaggctcaacctccagaagctcaagtccgtcgccgaggccaacgccgccgaggccgccgcaaccaccaattccgtccttctgccgcggccggcggagtagcggcggctgccatcggcaagggaagaaagcaacagcaagttttgtgcgtttctgttatttcaattctctgggaaagggtttctctgaattaaatctgatcatggatggatttggactggacaaggaggggccgggtcagcctaaattaggtgtgattgcaagggcgcgacctgtaataatctctctttcatctcctagattccttcttttcatctttacttcttccagaatttggttaattcctgctttatgtgattggaatcattccttaggaattgctgcttctcatatgtctttgcattgcatgtttgatgtggctatcttgaggcatgtgatccatgcctaattcgatcctcttagattgctagccttgaatcaggtgtcacgttgccagggtggcgacctgtaataacctctccttcatctcctagattccttcctttcatctcctagattcattcctttcatctctgcttcttccagaatttggttaatttcagctttatgcgagtggaatgattccttagaattgcaaaaaaaaaaaaaaaaaaaaaaaaaaaaaaaaataaatataagtaattatta

SEQ ID NO: 75646 - DNA, 216 bp, Zea mays
  unsure (1)..(216): unsure at all n locations
  Clone ID: MRT4577_169018C.1
atttcggcacgaggacaacgcgggnacagccngcagccagccatattgagcatagcatcagcagcttatataccgtgccgcgccacatccgagtgctagaagatcagaagaagcccgggccgggcagtacctatagctgcctagcgggcggggcgaacgaagcanagatatggcnagancgcggccgctggttctttcggcntccntcctgctggg

SEQ ID NO: 75647 - DNA, 756 bp, Zea mays
  unsure (1)..(756): unsure at all n locations
  Clone ID: MRT4577_169019C.1
ggccctaggtgcctttttttttttttttttntgacataaaaccatacacacattccagagagcacacaagtatttacgccgagtttcagtttcagggcatctgtgtatgcatacgaagagggatcgcgtcagtagtagtcagcgtcaggtgttgtgtttagctgcaagtaaccaccattcatcggtcctgttatttatgtactagtgcgcacgcaacacctgctacaactggtctctcctgctgccggcttccaacgcgtccagttcgtggctcgtgcgcgccccggcggtttcggtggaccgctgcgttcggctctcctcctcctccaccatctcgctgacgaacctcaagtgcgcgtgcggccagaatcctttctcatctgacggggctgggaagaactggaggtagcagactgaagcgaccaccaatccgaggacgccgccagtgcagacgtcttgccagtggtgccagtagtcgtccacccgcgagacggcgaccaacgcggcgacgagcagaggcaggaggaccacgcagagcttggcgacgtgccctctccggtcgaacgccgtcatcttcccggccaggtaccacgacaggaagcctagccccgcaaatgaccaggaggtgtggccgctggggaagcccttgtagccttccttgatcacgctaggatcgccatggcatacgactcccgttgtgatgttgttgtacaccgcttctccatcggggaagcaacgccagtagaagttggggcg

SEQ ID NO: 75648 - DNA, 600 bp, Zea mays
  Clone ID: MRT4577_16901C.1
ttcccccccccccccccccccccccccccccccccccccccccccccccccccccccccccccccccttttggtaacggaaaaagttttttcccgggcccttgccctttggactgggcgttttcaaaaggttacaaacagcacccgtccttaagcctaaaacaagggggggccttttttcccttttgggtttaaaaggctgggagaaaaaagttatacccccggtttttaaaggtttggggcccaggcacctaaccggacctaaggaaaaaagggccgttaggggtggccaacacggaaccgcttcccccaacccggtttttttggaaccgggcccctttgggttttaaaaccttttgggaaccccgcccattgtttggggtgggccttgggaaaaaacaaccccccggggcccccttggggggggccctggcccaggtggggcaaccctgttacccccaagggggcccccaccccgaacctgaaaaaagccggcccatccccgttcccaacgtgggggccaacaaccccgccgaatccaaaggggttcccgggaacaaagggccccaggggggcaaccaccctttgggggctgccaagg

SEQ ID NO: 75649 - DNA, 1735 bp, Zea mays
  Clone ID: MRT4577_169020C.1
ctcgagccggccagaaccggatgcgcacgaaggtcattcacgtccgcaataccacgaatttccggatcaatgattaagcgcacgagcacgaggaagaagcttgtgccagcagctaagaagatttcagcggctgctagcactgcaccttcatcatccacatcttgttggtgctgtctctgtatctatagaaaagcaacttgatgttgtgatggaggaggggcaaggggaggaattggaggttatgttgtcggaatcagatgacagtgaatttgatcttgatgacgagtttccaccttccactgatggaactcccaattccccatctcgcttgctgtgtactcgcgctccagctcaccatttctcctctcccttcccttccctaagcatctcagcgaatccaatcgatccgaaggcgatggaccagcagggtgcgggcggggacgtggaggtgccggcggggctggggctgacggcggcggagtacgagcagctgcgtccgacggtggacgcgcaccaccgctacgccgtgggggagggccaatgctcctcgctgctggcgcagcgcatccacgcgcccgccggccgccgtctgggccatcgtccgccgcttcgactgcccgcaggtgtacaagcacttcatccgcagctgcgcgggtccggccgggaccccggacgcccggcgacgccctccgccccggccgcctccgcgaggtgtgcgtcatctcgggcctccccgccagcaccagcaccgagcgcctggaccacctcgacgacgccgccagggtgttcggcttctccatcaccgggggcgagcaccgcctccggaactaccgctccgtcaccaccgtctccgagctcgcggggcccgggatctgcaccgtcgtgctcgagtcctacgccgtcgacgtccccgacggcaacaccgaggacgacacccgcctcttcgccgacaccgtcatcaggctcaacctccagaagctcaagtccgtcgccgaggccagcacctccagttccgcacccccgccgccgtcggagtagcgggcggccggaatcggcaaggggagaaacgcagcagcaagttttgggcgtttttctgttatttcacttctctgggaaatggtctctctgaattaaatctgatcgtggatggatttggactggacgagaggagaggaggggtcgggtcagcttgaatcaggtgtcgcgttgccagggtggcgacctgtaataacctctccttcatctcctagattccttcctttcatctcctagattcattcctttcatctctgcttcttccagaatttggttaatttcagctttatgcgagtggaatgattccttagaattgctgcttctcataaaaaaaaaaaaaaaaaaaaaaaaaaaaaccctccagttccgcacccccgccgccgtcggagtagcgggcggccggaatcggcaaggggagaaacgcagcagcaagttttgggcgtttttctgttatttcacttctctgggaaatggtctctctgaattaaatctgatcgtggatggatttggactgcacgagaggagaggaggggtcggctcagcttgaatcaggtgtcgcgttgccagggtggcgacctgtaataacctctccttcatctccaagattccttcctttcatctcctagattcattcctttcatctctgcttcttccagaatttggttaatttcagctttatgcgagtggaatgattccttag

SEQ ID NO: 75650 - DNA, 143 bp, Zea mays
  Clone ID: MRT4577_169021C.1
tcgctagcggtagagcgtaaagaggggcgtggttcagaacagcatgacgatggtcatcgatctcctcgtgtgcctggctctgtcagttgacagcacctctccaatgcagatgccctgcccttgcgctatgctgcacgtcttgt

SEQ ID NO: 75651 - DNA, 486 bp, Zea mays
  Clone ID: MRT4577_169022C.1
gagccggccgggaaacgccgacaccgctgtccccgtcgacaccgagacccccccgcgcgatttaacccctcgcctcgatcgctgccttcggtttcttacaacgcgcacaccacacgcgcacgcgggagcccgctcgtcgctcgttctccctacccgcgctcttcttcctccacagatctccgaggaccgagaggtatcttgcttcgccttctccggggctgcctgctctcggcgacgcgtggcgatgggcacctgctgagtagcaccggacggagccgcctaccccgacggcgggaagaagaccagggagccggagcacactaaggcaaacaagccgaacgccttcgagatcgagtacaaccaccctacgccggtgaacgctcccaggctgatggtgctggataagcccacgcgtcgatacatggatggagtggtccagcttgaaggggagctccgaccgctgagattccatggtcacctatttct

SEQ ID NO: 75652 - DNA, 251 bp, Zea mays
  Clone ID: MRT4577_169023C.1
accactctcactcgctctccttctcttctatccactcctcttccttcttggacttcttcttccacccatcatcattcatatctacacgcgcgccactcctccttccacactccacatgtgcgtttaagcgacgtccgatacgacacctatttgccatcaacctgcaagacagggaaaagtgaactgttccaccagcgagcctctgaaggtcatgatatcaggtgcacctgcatcgggcaaaggcacgcaat

SEQ ID NO: 75653 - DNA, 403 bp, Zea mays
  Clone ID: MRT4577_169024C.1
gtccatttggctaaccgagtcttgatgtaggacgaacaacacaacctccgaactaaggcgttggctattgtgtatgttgacagatcacaggatgctaacaggattggactaacacactgaagatgcaacgacctctaatgaatacataacacgagcttacaagtccaagactccagaccaacagatgccactaatgaaatacataagacctacaagatgggttgtaaagtgggagcaccattgacacacagttggatcaccgacggctcacagatgtcgcaccgctggaacacaggtggctcactgcgggcacacagttggcgcaccggcggcacacagttggctaaccggaggtacacagattgcgcacaggacatccaacacagttttctgacagaatgca

SEQ ID NO: 75654 - DNA, 482 bp, Zea mays
  Clone ID: MRT4577_169025C.1
cccgtccgcccacgcgttcggagacgagggatgtgtaatctgattttcgaataaccgaccaaaccaaccttggacgctgtcgggtccgtctgtggtgtggtgtggtgtgttgtgttgtcctttttcttgttcttctgttttcttttgtttttaatccgacttcacactgcataaaaaaaaaaaaaaaaaaaaaaaaaaaaaaaaaaaaaaaaaaaaaaaaaaaaataaaaaaaaaaaaaaaaaaaaaaaaaaaaaaaaaaaaaaaaaaaaaaaaaataaaaaaaaaaaaataaaaaaaaaaaaaggggggccctttttaaagatcccaattttacttcccctgggggggggggggagggttttttttttgtgtcccttaattttaattattgggccgccttttaaaaacggtgtaattgggaaaaaccttgggttacccaaattatatccctttggaaaatattccctttttccaattggga

SEQ ID NO: 75655 - DNA, 587 bp, Zea mays
  unsure (1)..(587): unsure at all n locations
  Clone ID: MRT4577_169026C.1
catatatatagcaaaggaaaatacatgcgcatgagcgcttctcacgttccaccgatgaccacgtccatccccatggccgtagaacgtgtctcccgttcatgcccagcgactcggacgcctcgcctcacattatggcacgacttccacacaagtcgtggcctcgtgcgttcctgcgttctaattactggacacactaactgaactgaaaacaaggaatggaaagactgacggagcacaaggttaattgctaacaattctacccctaagcttatgctccaaaatcactcatgccaatttgtgttcgcaccatctgaaaacgatcatgtggaaatggtttcgtcagaacatccgcgagttgccctccagtgcagatgtaatctggtttgacatcaccattctcggcagcttctctaatgaagtggtaccttgtctgaatatgcttgcttctatcatgaaagacagggtttttgatgagggccaatgtagacttattatccaccttaagatcaatagtttcagctgctgcattntctgagatcactcagcagccgttttcagtcagatgctctggcaagcggctgtggctg

SEQ ID NO: 75656 - DNA, 583 bp, Zea mays
  unsure (1)..(583): unsure at all n locations
  Clone ID: MRT4577_169027C.1
ggtacccttgtgtgtccggccggnaaaagtgcccgcggtagctagtgtacggtctgctctaactgccgttcatcctggtggttttgtgaggctcgaaagcgtgagcgatttagaagatgctggacaagctgtgggacgacgtggtggccgggcctcgcccggagacgggcctcgagaagctccgctatggtcaccaccgcccggccggtcgtgatgaacaaatccctgacggcggccagctatcaaacggggcgcatgtcgcatgcacgtcggaccccagacgacggccggtggacgccttggcaacgggcggttgctgacgctgtcgctggaccgcacgtccggctccgggttccagtcccggcacgagtacctgttcggcaagatcgacatgcagctgcggctggtgccgggcaactccgccggcaccgtcaccgcctactacctgttgtcgcagggcggcgcgcacgacgagatcgacttcgagttcctggtcaacgtgtccggcgagggcctacgcgctgcacaccatcgtgttcacgcggggggcaggggcctgcgggagccagcattttccatctct

SEQ ID NO: 75657 - DNA, 493 bp, Zea mays
  Clone ID: MRT4577_169028C.1
tccctcgggcctgccgggctctcgaaaccctagtcctctgttacttctccctcctccgccctcccctcccattaccgccaccgccattcctaccgtcctccgccacctctgctgagagcgagaagagatggcaggcaagggtgatgggccggcaatcggcatcgatctcggcacgacgtactcttgcgtcggcgtctggcagcacgaccgtgtcgagatcatcgccaacgaccagggtaaccgcacctcatccctcgtacgtcgccttcaccgactccgagcgcctcatcggagatgcggccaagaaccaggtcgccatgaaccccatcaacaccgtctttgatgccaagcgtcttattggcaggagggttagggatgcctttggccaaaaggatattaagctggggcccttcaagggcattccagggcccggggagaagcccatggttggttgtcaacaacagggggaagaaaaaccatttggcagccaaaa

SEQ ID NO: 75658 - DNA, 813 bp, Zea mays
  unsure (1)..(813): unsure at all n locations
  Clone ID: MRT4577_169029C.1
agtcctctggttatcttctcccggccggccgccaattccccttcccgtttctcgcgccaccggccaattccccttcccggtcctcgcgccaccttctgctagagagcgagaaagagatgggccggcaagggtggatgggccggcaatcgggcatcgatctccggcacgacctactcttggcgtcggtgtgtggcagcacgaccgtgtcgagatcatcgccaacgaccagggtaaccgcaccacaccctcgtacgtcgccttcaccgactccgagcgcctcatcggagatgcggccaagaaccaggtcgccatgaaccccatcaacaccgtctttgatgccaagcgtctcattggcagggggtttagtgatgcctctgtccagagtgatattaagctgtggcccttcaaggtcattcctgggcccggtgagaagccaatgatagttgttcagcacaagagggaggagaaacagtttgcagccgaagagatctcctccatggttctcatcaagatgcgtgagatcgctgaagcttaccttggcagcacgatcaaggaatgctggttgtcacggtccctgcctacttcaacgactcacagaggcaggccacgaagggatggctgggggtgattggctggcctcaatggtgctgcgtatcatcaatgagccaaccgctgctgctattgcctatggtcttgacaagaaggaaccagcgtcggtgagaagatgtcctcattttgaccttggaggggnaaccttcgatgtctccctcctaactattgaggaaggtatctttgaggtcaagggcacagctg

SEQ ID NO: 75659 - DNA, 996 bp, Zea mays
  Clone ID: MRT4577_16902C.1
ccccgcgtccgcacggcgctccctccctcctcgagagcgtgtatgcgcagctgcagctccgcaaggcagatgttgctgactcgtctgtccagcgtttcttgctcgtcaacagcgcagcagttgcatgcgggcgtcggcaagttcgccgccgccgcatgctggagctggaagaagaagcgcgaggagctcccctgcttcagggccagactggccggcaagccgccgcgcgcctcaccggcgaagggcggcattgtcccggccagcgacgatgacgacggcgttagcctcggcaccgtgaagctgccgggcaacatcaacaccgctcggttggagtccttgctcttccaggttagcgctgttcgtgtcgtgcgtgcgtgcctgagagagtacgagctccgtgcatcttttttctgcgttttctagcgtgcgtaattgacactgatggtatttgacttgacgctggcagtgggggaacagcctctgccaaggcgccaacctgccacttccggtgcctctcaaggtaggggagcaaaaaaatagagcgacctgctacaattctgatatggcttgttgatccagatttcttcacctgatgcgatcgaccaggtggacaaggttgagggcgggatcaggctagggttcgtcgcggtcgaggacggcgcgacgcggacgctggtgtacatcgattgcctggtctctccggccccggatggctctggtccggtgttccgagcgatcaggaacggtcctatgaaggacaaggagccacctggggagcccaggatcatgagaagcctccttcaggctctcgaaaagtctattcagatcgctcgtgtttgaccgtgtaaacgccacacgatcaagcgctgcatctctgtaactattaattaagagccctctaaaccctgctattctagttgtctcttgagtcttgaccattccagggaaaaaaataaaccaagaaagttacaggaaccaaaaaaaaaaaaaaaaaaa

SEQ ID NO: 75660 - DNA, 888 bp, Zea mays
  Clone ID: MRT4577_169030C.1
gccggccgggtcgggctctcgaaaccctagtcctctgttacttctccctccgccgccactcccctcccattcaccgccaccgccaattccataccgtgctccgccacctctgctgagagcgagaagagatggcaggcaagggtgatgggccggcaatcggcatcgatctcggcacgacgtactcttgcgtcggcgtctggcagcacgaccgtgtcgagatcatcgccaacgaccagggtaaccgcaccacaccctcgtacgtcgccttcaccgactccgagcgcctcatcggagatgcggccaagaaccaggtcgccatgaaccccatcaacaccgtctttgatgccaagcgtctcattggcaggaggtttagtgatgcctctgtccagagtgatattaagctgtggcccttcaaggtcattccagggcccggtgagaagccaatgatagttgttcagcacaagggggaggagaaacagtttgcagccgaagagatctcctctatggttctcatcaagatgcgtgagatcgctgaagcttaccttggcagcacgatcaagaatgctgttgtcacggtccctgcctatttcaacgactcgcagaggcaggccacaaaggatgctggggtgattgctggcctcaatgtgctgcgtatcatcaatgagccaaccgctgctgctattgcctatggtcttgacaagaaggcaaccagtgtcggtgggaagaatgtcctcatttttgaccttggaggtggtaccttcgatgtctccctccttacaattgaggaaggtatctttgaaagtcaaggcacagctggcgacacccatctttggtgggtgagactttgacacaggatgggtaaccactttgttcagagtcaagagaaga

SEQ ID NO: 75661 - DNA, 334 bp, Zea mays
  unsure (1)..(334): unsure at all n locations
  Clone ID: MRT4577_169031C.1
cccgagcccgactcgagccgacnaggagagagctcaggaggcggcggagagaagggagaaaatccccggtagggaggggggaaggaagccaaaggcccaaaggtctcggcgctgccgtagtaccggctgaggcaagatggtgaaggcacgaatgacgacgacgngacgtgcggcggtagctaagacatttctnctgttctgcccacggcgcctagatcgaccgtatgccttctgcctcgacacgatcgttcacaagctggtgatcacctgcctaagatcaggcactgctcatagcgaggaggtatactcccgcatacaaaggtatggcacggca

SEQ ID NO: 75662 - DNA, 845 bp, Zea mays
  unsure (1)..(845): unsure at all n locations
  Clone ID: MRT4577_169032C.1
ggccgggacttctacagccacagatgaggtggttactttctattactgtcgccttcctgtggtcggtggtggtgcaggccaagagtttcacaggcaaccgcttgctggttgtgctagaagagcaggcggagagggagaagtacagtgtgttccttgaggacttgacgtcccgaggatttaccacgtctgtagaatcgcccaaagagagcaagttgtcattactgaagcacggcgaacgagcatacgaccatgtcctcctcctgcctggcaagtccaaaggcctcggccctgccctcacagcgaacaacttcctggaattcatgaagaaggatggaaacatcctcgtcgccctctcgagcgaacacgctacacctacggccgtccaggctatgctcgccgaactcgacatcaacatcccagccgacaagggcgcattggtcgtcgaccatttcaactacgactcgtcatccgcacaggaacagcacgacgtactgctcctttcgttcccgaacgcgctcaggtcagacgtaaagaactacttcgctggcgagggctacattgctgtgccacgcgctgtcggtcaagctcttggaaacgagtcaccgctcacgtcgcctgtcctacgcgccccagccaccgcctacagctacaaccccaaggacgaggccgatggcgttgaggatccttttgcggttggtggacaactgaacctcgtctctgccatgcaagcgaacaacgctgcgcgcctggctgttgtcggttcagccgagatgcttcagaacaagtggtttgcagagaaggccaagctgggcgacaagccgttacactgntaacgcgatttgcgc

SEQ ID NO: 75663 - DNA, 424 bp, Zea mays
  Clone ID: MRT4577_169033C.1
gcgcacaaccttgctagcttgccggagccgctatacctgacagagtgggggctgaaagcgggggcgcacctttcgcatctcaccctctgaactctgaccctgctccgcgaagttgtttccttttcttctattatgacaaatgcagtcgcttgatcaagcatctagacggccgtttcactcccgttcacggaagtacagaccacgtgtcctgccggactttgtttcggtcaagctgagtgtgcacacgcgtatccatgccttactcaactgctgacctgtaacatctaaatggtctgctctgcgtcacgtggtactcatcagcaaacacttgacagccttttcaccgatcaccaacgcctcgttgccttgccactggctgagcattgacccgcagctatttgccttgcacgcacgacacccgtat

SEQ ID NO: 75664 - DNA, 208 bp, Zea mays
  Clone ID: MRT4577_169034C.1
accgcaaaggcgcgtgccgagggtctagaatatacgatcttcatgcactcttgacgagttcacgcgcaactaactcatgaaagccggattccaataacacatacgaactactgtacataagatgtcctttggacctatgaatatgaaaatgattgatatggaatcagatgggatacatgagcgataggttcgatggaagactcgagcg

SEQ ID NO: 75665 - DNA, 493 bp, Zea mays
  unsure (1)..(493): unsure at all n locations
  Clone ID: MRT4577_169035C.1
ttttttttttttttttttttttttttttttnttttttttttttttttttttaaaaaaaatccttggtgtattaattattcccacggacgacacggcagaaaaggaggcaacacgaaacaaaaaaaaaaaaaaaaaccaagaaaaaaaaaagggggggggggggggaggaaaccaacaaccaaacaccccccacccgacggcggggaaaaaaaaaacggccgccccaccagcagggggttctcctacgaggtctgcccaccacacaaaaaaacaaccaggaagggggccaaaaaaaaaaaaaaaccaccaaggccgccaccaccacaagaggcgaggaggagaacaccaaaaagggccggcagcacaacaagagaacaacccgaaccaccggaccgcggggccccccacaacagcgggggccaaaagaggctcagcagcgacagccaccacaatagggggggagacagcaacttcctgtggcaccgtgccgccc

SEQ ID NO: 75666 - DNA, 513 bp, Zea mays
  unsure (1)..(513): unsure at all n locations
  Clone ID: MRT4577_169036C.1
cccccgagggcaaacccggggggggccccccccccctggcgcccttattggggggtataatttaaaaaaaaacggggttggttcccttttttcccatacccaaaacggccccctgggggggggtttatacgggggcccaacttggaaaacacccaaagggtttggggtggcccggctgggttaagccccacccaacccaacgccggggggggggcccccccccgggacaaaaaaaaaaccagcttcaccggttgcgggttggggggggccccccaagaaaacccgggggccgttggggggaaaaaaaaaagccggtggttaaaaaaatcacccccacggtttttgggggaaaaacgaggccacttcttttgggggggggaaaccctcggggcaaaacttttggaaatttgggccctccggggccaggagggngaaaatccgttaaacctttttggccgggccccttttgggcctccggggatggtcttttttgggggggggcgggatgggccc

SEQ ID NO: 75667 - DNA, 333 bp, Zea mays
  Clone ID: MRT4577_169037C.1
acaaagcacaaatggggacatgcgatgctcaaattaaggtacatcctatttaaatatatatgtttgcggaaaaatagaggttgtataacatgatataataatgccacattagcttatggacattgaaaccacgcctggttactcggccgagcaaccactatgaggagcactatcaggatccagggacagggaaaggagtttcgtccgttactcgcttgcctgaactaaatccggcagttggtggaactgatgtcacggatataccaactacctctctatgacctccgactaccgattgaagtccacaatggggacaatggagacctcgtgctt

SEQ ID NO: 75668 - DNA, 255 bp, Zea mays
  Clone ID: MRT4577_169038C.1
acgcacgcaaccgaccgcacaaccaccggcaactcattcaatttcaacaacatgaccaaacccatagaccaagaccaatacaaaaaagcacacgcccaacacctcacaccataacaatacaacctacaagacacaaaatctaaacacatattatcaaccaatacccaaaaccacctaacaacaacatcaacaaacacctccctataaaaatcaaggcacacatccactacacaaatacaaacaaccacaacaaca

SEQ ID NO: 75669 - DNA, 311 bp, Zea mays
  Clone ID: MRT4577_169039C.1
aagacaactaccgcaaactttcaagactacagagctacccacaaacaaactagaaccaaacaacttggcctgcattacacggatcatgactgaatcttccaactataataatggtaactcttgattatgaacatactacttaccacctacaccctcccatactcgaatgctaagatctattagtccgaaggaactgatcgcggaacatactcttggggatcaactgtggccttatgtatatatggaacggatttcaaataggagagacatatgcttgtgctcgacacaaaaccactgtacaatatgatact

SEQ ID NO: 75670 - DNA, 300 bp, Zea mays
  Clone ID: MRT4577_16903C.1
ggccacaacaagggacatgtagcccaaattccctttttggggcaaaacagcccaatttaaaaaccccccccccccgggaattgtacgacgtttgcaaactttgccaatttaaaaatccccacttttaacatggggccaagtccaacctagggtttgcttaaaaaggttgacccccacggtagcatgacccatttgtaactgggcacgggaactgaaaaccaaaaactcctgggacccaacaaaatggtaacagatgcccatcccccaaaaaaaactccgccgaatgtcaacaaagcaaaa

SEQ ID NO: 75671 - DNA, 466 bp, Zea mays
  Clone ID: MRT4577_169040C.1
aaagggggggaccaagtcccccaaaattttaacaaatcaaggaaaaaccaagagaggcaagggacaaaacacatttacagaggaacagacattctccaacctttcattcccccaaattttcggcccccctgccctaataaaaaaccatccataaaaaaaggccattatacttcccccatttacgggaaaaaaaacaagctcactttggtttcaaccaaacaaaagggaaaaggggaacccaaaaaaaaaacccagtaaattaaccaaccaaaccaaaggggtccttcttttttttatcaggcgggaaaacgtttaaactggagggcccaagcaggtaggggggggaccccacactcactcgggggggctcttaaccttaaaacggaaaaggagcgttttttttttggatgcaggggtgttcaaagtaaaaaaaagtttgccaggctcgcccgccttgaaactccct

SEQ ID NO: 75672 - DNA, 345 bp, Zea mays
  unsure (1)..(345): unsure at all n locations
  Clone ID: MRT4577_169041C.1
gggcgttcccccttcttatccccacccactgtgcctccctccncctcggggggttctcgtcctttataaaaaatctactagccatacaaccctaaatttctaaccttgatgcatgcttgtaaaagatctatttgtcgctaataacttctaataccatgaccccacactaatgagatgaagcaatatagatacacaacctacaccgagggggttgaagccttttttttttgggaaacccagaatgagacgacgaggaagtacttcccgcagattgaagagatcctgtaggctgttgtcattactgacaagaacactggcatattcaattgctacagatttattacc

SEQ ID NO: 75673 - DNA, 627 bp, Zea mays
  unsure (1)..(627): unsure at all n locations
  Clone ID: MRT4577_169042C.1
cccagcgtccgcggncgcgtggngaaaaaaaaaaaaaaaaaaaaaaaaaaaaaaaaaaaaaaaaaaaaaaaaaaaaaaaaaaaaaaaaaaaaaaaaaaaaaaaaaaaaaaaaaaaaaaaaaaaaaaaaaaaaaaaaaaaaaaaaaaaaaaaaaaaaaaagggggggggcctttttaggggttcaaggtttagttccgggggttggcaaagtttaattttttttttgggggccctaaatttaattttgggggccgggtttttaaaccgggggagggggaaaaccccggggtttcccaaatttattggctttggggaaattccccttttcccaagtggggttattagaaaaagggcccgccccgttgccctttccaaaattttgccccccctgatgggaaatggggcccccccttttaggggctttttaagggggggggttggggggtttccccccagggggcccttttcctttgctagccccttaggccccgtttttttcttttttttccttttttttttggcaagtttggggggttttccccgaaaatttttaaacggggggttccttttagggttccttttaattgttttcgggaccccacacccaaaaaaattgattgggggggg

SEQ ID NO: 75674 - DNA, 283 bp, Zea mays
  Clone ID: MRT4577_169043C.1
gcagcattgtcaatggtttacatatcgggagcaccggttatgttcgttgggtgtgggcaggcatatacagacctgaagaaacttaacgtcaaatcaatcgtcaagacactgctgaaatgagtgaatgctttatcaaaaaaccaccccacattttatttgcaatgctcaaccaactcttttgttaatgactttggcctgtgattgcatgtttactttaatggaggtgcattggtcccttgtaactgttaagtttgttttatgtgagatcttaaaattattccta

SEQ ID NO: 75675 - DNA, 387 bp, Zea mays
  unsure (1)..(387): unsure at all n locations
  Clone ID: MRT4577_169044C.1
cccgggccaatttccggnacccggtaccctgcaggacgctaccagcgtttgccctcagagnntgagctcgtattagaagctgtggcgcgtaattcattnggtcatttagctgtcttcgctggtgctgnaaattgtctatgccgcctcacccaattcctacactaatcactacgatgccggnaagccatnaaacgtgtagaagtcctggggnngtgctctaatgaaagtgagnnctaactctacattaattgnnncgttgcgcttcaaactgcccnngctttcctagtgcgggaaaacccctgtcgtcgccatgctgccnattaatgcaatcgcgccaacgcgcggggcagnaaggctggtttgctgtatttgggcgccccagggtga

SEQ ID NO: 75676 - DNA, 557 bp, Zea mays
  Clone ID: MRT4577_169045C.1
cagtcaaaaaatatttatgaccataaatatgggcatgtcttcatatatatatatatatatatatatatatatatatatatatatatatatatatatatatattaccccaggttatttataaatatccgccactggacttggagacaaacctggggcgacctcaacctttcaaacaacagcccagcgcggatcatgatttttttatcacggatccgacggttgggcgtgggcgggcaacaaaatacgcgggcgcgccccacgtgagccacgagacggatccgagcgaaccagcgggggagcaaacacggtagttaacgcgcctcacgcgccgacgcacaaaaaacgaaaaaacggccgccgaaacgcgcttggttgggggcggcgccccgggcccccactgcccccacgtacgcccaagcccggtccacagacagaacagacctcaccttccgtgcgtgtgttttcctcctccaacactccacttcaccctgcctgtcaccgtccgccgccctcccttggtcctgtcccgtctgtgtatataaatccccgcccctcgc

SEQ ID NO: 75677 - DNA, 533 bp, Zea mays
  Clone ID: MRT4577_169046C.1
attgtaagagtgttgaagtttatttattatagcaccattgagaaattttgaaattgaaattggtaaaaaaatagaacaaaaagcatttgaactgtatttggtgtaacagcaaaaaaaaaaaaaaaaaggtatctttttttttgccaaattatacttttttccaaaacttttggaaataaataactggaattgagttggtcacttgtactggttgacaaggttagaacgagaggaacacatatggagtgtgaaattttttgctggggtttcagatagagtttggtttataaaaagcaaacagggccaacgtccacaccaaattcttgatcaggaccaccaacatcatagggtgcaatatctataataggtagtctcacagccttgcgtgttcggtattcgaagactgttttgccccattccccagtgtgtttagtgcaaccatcctccaggactgtgtatgtgaatttgctgtttccttcagccttgaattcaccttcatttgaccccatcagcctcagggctttctttacatt

SEQ ID NO: 75678 - DNA, 343 bp, Zea mays
  Clone ID: MRT4577_169047C.1
gttgctggttcggttgctgtatccagtgctccagaagcagctgtcatgaggcaaagtcaaaacgagacaatctatggtctgggtcgcggcggaaatgtaccttttggagtcccaacaggcaacatatatatgtggaggcagaggaggttggtgatgctgacaactcatgcagagggtcaaattcccgcggcccgggaagaaaaggcggacgggaaggcaaccgtcctgtggagaatgagagctcccatggaccatgttttggctttggtggcaaaataggaggctaggattcactgcaatttcgggtgatgaaaactggaaccggtatggtcaacaaggtttt

SEQ ID NO: 75679 - DNA, 914 bp, Zea mays
  Clone ID: MRT4577_169048C.1
ctcgaggccggccaggccgggagcttcgcaagctttcggctaaatccctgccattagtagcaagcaagaaagcagtggtagtaggtgccacccacacggttttcacggctgccggctgggagcgaccgaggagatcgtcgtcacgctcgatggaggccctggtggggaggtactggggtctggggggacggcggtgcggggcgtgcggcgggtcgccggcggcggcgcactgccggacgtgcccgggcggcgcgtacctgtgcgcggggtgcgacgcggggcacgcgcgggcggggcacgagcgggtgtgggtctgcgaggtgtgcgagtgcgcgccggccgccgtgacgtgccgcgccgacgccgccgcgctctgcgccgcgtgcgacgccgacatccacgacgccaacccgctggcgcgccgccacgagcgcgtccccgtgcagcccatcggcgccgccgctgatcccgccgcggagaaggcggcgctgctgttcggccttgccgcggaagggaaggacggcggcgacgacgacgcggccaaggtcgtcgtcgacgccagtaagctggacctcctgttcgctgacgacgtcgtcgacccgttcctcgcccaagacttcgccaggttcccgcacgccgatagcgtcgtgccgaacgatggatccagctgcggcgccgctgtggacttcgactttggtggcggcgtcgccgtcgccgccaagcagccgtcctacagctcctacacggcggcgtcgctgggccacagcgtaagcgtgcctttttagtgaagtggctctgtcaccgtgcccgtgattattgtttttctattcctaatcttcgtttcggctttggttttggtcgagcagggctcgtcgtcggaggtcggcctggtcccagacgtgatgtgcggccgc

SEQ ID NO: 75680 - DNA, 650 bp, Zea mays
  unsure (1)..(650): unsure at all n locations
  Clone ID: MRT4577_169049C.1
cctacccggccggccgaccctcggagaggacttcaacacactaaacgttggcctgctgctctctcctctcggtcatggcatcgaaacgagccaacgccggcgacgagcagcagaagctgtcaccttctggcctcccggtccacaagatcccgggaagctacggcgtgcccttcttcacgccgttgcgcgaccgcctggactacttctacttccagggcgcggaggagtacttccgctttcgcgtcgccaaacacggcggcgccaccgtcctgcgcgtcaacatgccgccaggcccgttcctctccggtgactcccgcgtcgtcgccgttctcgacgcgcgcagcttccgcgtcctactcgacgactcccgtgtcgacaaggacggcacgctcgacggcacctacatgccctcgctcgcgctcttcggtgggcaccggccgctcgcgttcctcgacggcgccgacccgcgccacgctgcgctcaagcgcgtcatgatccgcctcgcggccgcgcggatgcacacgnncgcgccgggggttcggcgccgccttcaccgcacgttcggacgccgtggaatccgggcctgggggggccggagcctccggccgtggaagtcaacaagcacaacatgcgccacatgctggacttca

SEQ ID NO: 75681 - DNA, 466 bp, Zea mays
  Clone ID: MRT4577_16904C.1
gccgccgtcctttattttttttgttgcggtttttttttaagttggtttccacagattcacaacccaaatgatcttaccataaccgttttcaaattggtttatgatatttgttttaagtattgaaccagaggtgatttttttttagggattctttggtttttcactcatggaaaatcttattcatggactactttacgattggtgaaagaggcgttgtagacatttgagtgaccattaccactggtactcctgcttttggattttggagttcatggtgcccttacctttgtaggcgttacttggaaacactggtcctttactgccactgtcagttgatattgtcttttttcctttgattgtttaattgtttagtgaggttgggatttttctctttttattaaaattctttgaagagtcattattatttttgttgtcttttttggtaaggttttttgcctttaaattt

SEQ ID NO: 75682 - DNA, 1240 bp, Zea mays
  Clone ID: MRT4577_169050C.1
ccggccggggcgagccgccgcgacgactttatacatccgcttcctcgtagtcagtcatcaaagaaacagagcgagcctagactgtgaggaagaaaggactaccatgggcgacgtcgctgccggcgctgccgccctgagtccacccccgatgaccaaggagaccaacctcttcatgcaaatcgtcggcaacccggacggcacggtcacgcgccccgaggtccccctcgtcccggcctcagccgaagccactggcggcgtcatctccagggacgtgcccctcgacgcctccgccggcacgtacctccgcctctacctgcccgacccatcctccgcgccagccgccaagcttcccgtcgtcctctacttccacggcggcggcttcgtgatcctctccgccgccaccgtattctaccacggccactgcgaggcgatggccgccgcggtgcccgccatcgtggcgtccctcgagtaccgcctcgcgccggagcaccgcctgcccgcggcctacgaggacgccgccgcggccgtggcgtggctccgcgacggcgcgccgggggacccctgggtcgcggcgcacggcgacctctcccgctgcttcctcatgggcagcagctcgggcggcaacatggcgttcttcgcggcgctccggaccgggggcctcgacctgggccccgccacggtgcgcggcctcctgctgcaccagccctacctcggcggcgtcgaccggacgccctcggaggccaggtccgtcgacgacgcccatgctgccgctggaggccaacgacaggctctggagcctcgcgctgcccgtgggcgccgaccgggaccacgagttctgcaaccccgtcaaggccatggcgccggaggcccttgccggcctgccgcgctgcctggtcaccggcaacttgggcgacccgctgatcgacaggcagcgggagttcgctcggtggctgcaggaccgcggcggcgcggaggcggaggtcgtcgtgaagttggacgtcgcggggttccacgcgtcggagctgttcgtgccggagatcgccgaggtgctgttcgccgcgatgcgcgagttcgtgtacaccggcgacgcttgacacgttgaatttcgtgccggccggtgacaagtggacatacgtgttgcatcgttgtggattgtgtgaccgtgcgcaataattctcggccgtgttgaatttgaatcttgacaaaaaaaaaaaaacaacaataaagaatccagacataa

SEQ ID NO: 75683 - DNA, 337 bp, Zea mays
  Clone ID: MRT4577_169051C.1
aaacaagccgcktcattatcctttacacacsaaggagtaacaagaaamacyacattacataggagaccytkagaatgckgaaccttcaaagatctcagttgtggacaagtacacaaggacgaatkcctkgkggagggggtcttgcacgaaggtgagacaaacatggggkkacaattggktaaccctatagcagtkgcactaaacacctatktktaggatcggccartatacatatttktacatagttacgggagcatgcctcaccatgtacaaattacgtacatagtcgggaaarggatgtaccacttttaatattagakadatggaacatttctcc

SEQ ID NO: 75684 - DNA, 245 bp, Zea mays
  Clone ID: MRT4577_169052C.1
cacccttcaaacttaaaggcccttttacctttccatgcccagatatttccaaatttgtaatggacaaaggttattacatttagctctacaaatggaccaaagtggacatctctgataaagcccacaaagagcgtgtcaatactattattgaataccatgagccctttaagggctaggccttgctaaacacaaatcgcttccaattattgttcttgccttgagacaaaactatttaacccttttaa

SEQ ID NO: 75685 - DNA, 413 bp, Zea mays
  unsure (1)..(413): unsure at all n locations
  Clone ID: MRT4577_169053C.1
gggggggggggggtgcctccccaatgtntgtgncacagacctatcnnnatgcanttcttggtgagggccatcttggtgcaaccccagcaagtgttgagccntcnacttctgggtcgcctttttcttttcttcacagccatggtctttttgggtgaggggggttttttttttggcccctcccttcnnntggggtgggccggtaccaggtaagcaaggcttcctgtttgggcctcgctggggcgaaacccttggtaactggggttcttggaaaggggacactgttgtttacagaaatccctgggaacatgattttcctaaccagccgctgaccgtttgtggtgctcctttacaccacttgggggatgtttcttatccgcccttgggccgcattggggcggggctgctcagattgg

SEQ ID NO: 75686 - DNA, 1144 bp, Zea mays
  Clone ID: MRT4577_169054C.1
gacaaggcggcggcgacaagacacaatggggtgccggtcctgtgacaagcccaagatgaactaccgcaaggggctgtggtctcctgaggaggaccagcggctcagggactacatcctcaagcatggcctcggctgctggagtgctgtcccggcaaaggctggtctccagagaaacggcaagagctgccgcctgcgctggatcaactacctgcgccctggactgaagcgtggaatgttctcccaggaggaggaggacgtcgtcatcgacctccaagccaagctgggcaacaagtggtctcagattgcgatgcatctgccggggaggaccgacaacgaggtgaagaactactggaactcgtacctcaagaagagggtgatgcagcaggcccagggcgcgtcgtccaactccagccccaagagcccgcccgagctcacctccatgagcaccaccgccgacctgtcgtccatgtccatgcccatgcccatgcccatgcccatgcaccagcgccaccacgtcaagaacaacagcggcggcggcagcaccgcgacgtcgcacggccagcaggacgacgccaacatcagcggcagccatgcagcgctgtcggccccaccgccgccgcctctcgcccagcagccattcgagcaccaggcggctaggagcttcgtgttctcggactgggcgccggagagctactcgctgtccacgcactggcccgccgccacgtcgacctccgggaacgtgacgccatcccacggcagcaccgccgcagccgccgccgccgccttcggggaccagatgagcggcacatacggcgccggcgggctgccgccgcagcaccaggatcaccaccacagcaccgcgcccgccaccggcatcgcggggagtggctactttgacctgctcaatatgggagacatctacggtggattcagctcgacaaacaacgatgatctgctcttctgaactcaactgacgacgatggaggcgtgatcagtgttgtgcatgagtgagtcaaatggatgcagcgcgcggtatattgttggatttgttgcttcgtcttcttcttttgtacgtattttgtaacaaaattattatttgtaacaacattattaattgcgatgtagagaacacaccctaggctgg

SEQ ID NO: 75687 - DNA, 192 bp, Zea mays
  unsure (1)..(192): unsure at all n locations
  Clone ID: MRT4577_169055C.1
gttgcaatacnnaatagtccactatatggaaagcgtgatgcatcagtnactgaccgtaaacccgggacgtaccacgcgtccgccactcttcctaacatatcaagctcatatcctcatatctccatcaagtcttgctgtctctaatagcaacgcaacaagatggataagctcgcattctgaagcgtcgtctac

SEQ ID NO: 75688 - DNA, 194 bp, Zea mays
  Clone ID: MRT4577_169056C.1
cagtattaaggagctaactcagcttttttttttttgcctcaaattaaatactatgggcgagggtgttctatacttccggtcgctaatgtcgaagatggtttgccatgctatcaccatacgtctcaacgtgtcctacgtaggaaaagacaactcagtgtacaaagtcctattgaacatacacaggtccatatatg

SEQ ID NO: 75689 - DNA, 569 bp, Zea mays
  Clone ID: MRT4577_169057C.1
cgatctgcctgtgccaggagcgaatcatagcttcgctctcggcctccggaggctccgcgggtcctctagtccgctccgtcgccacgagcccggcttggaggggcgtttcggggagggcgaaacgcacgccagcgtttccgtttggttggcgtggaggcgaagctgatgctggagcgctacccgggtttcctccgttcactagctctcgcgtatctgatgatcgttgactagttgctctgcacagatcccagccagggcttctacgccatgatccaaacggagatggggatcagaacacaagcacaatcccgccttctcaacttctacagtttccatccaccacgagaagcatggaagaccttcaacagtgagtgttacaattactttgtgcatggccttgaagctcgagcaattatgtcaaggtggactacatatttggcccggaaacaaaaatgggctactaagcataatggcacacactatacttgtttaagagaatgatagctctgataactagctatccatgctcgacctcagacaagtgtttgtctgaaacattggacagatgc

SEQ ID NO: 75690 - DNA, 1122 bp, Zea mays
  Clone ID: MRT4577_169058C.1
aggtggagaatttgggtcgcccccatcgccctcccactccgggaccgcctctcgcgcttcgttgtgcctcgccgccgacgcagcggcattgtcagccagggcgcgcgatggcggtgagcccagagctagagggcttgcggcgcatcgcgccttcccgcttcgtctccttcgccttcccaaaccctttcctcggccacgcctccaatccttacgggggcggggacgacggcgacgcgggggagtgcgtccgggtcgctgtcctcgattcgcccctccccgccccgcccgtcccggcgacggcggcgatgctggtcccgaccggccggcaccgcgactggatcttctccacgcgtgcgggccacctccacctcctcctctccgccacccgcttctcccgtctatactcgtcggccccgagctctcggcgccttcccctcgggtcgtttcgtgcgcccgtcgccgcccagacccagacccccctgcccacgcgcggctcctccccctcctcctcgctctctgccccgtggccgcgtttcggggcaacgccgtccccgacgtcccgctgctcaccttccaggacgacctcctccggcttgcccctatcgagttcgtcgccggccccgtcgtcggcgagatggttgtcgaggatgtggccgttgactgcagccctagtcgtccagctgaactgcgccgcaggctgcggttcaagcgcatgccctgccttgtgcagacccaggtgcgcctgcgtcagtcacacgcgtcgccgtcgctgtcgctggaagcattggaaggctcatcaggtgagctgctgcagccggaggtgggtggaccgctggctcagccttacctccaagccatggttgctggcctcgcagtgactgcgccgtccatcgagaagagtattcagtcaggcgctaagcctaggtgcctctgtgccggcgtcggaggcgggtcgctcctcatgtcactcagagtggggctccagttcgatgtgctcggcatagaggccgacggcgtcgtcctggatgtcgcaaggagccattttgggctggtggaggatgagtttctccgcgttcacgtcggtgatgccatacagacgataagagggtttcgctgctgggc

SEQ ID NO: 75691 - DNA, 227 bp, Zea mays
  Clone ID: MRT4577_169059C.1
atgttgtcacccagtgtagcggggcccacagtggcgggcaataaaccggcgcatgtcataactcagaagaaacacaaatggcatgctgggaactattaatcctgcacgagacgggcatgaccggtagcacgctacagatgaacatgaaccccatgagcgaccatggatcgataatggcgggtgcagatgacaggaactaatgtagacgcgcctattatatttatacg

SEQ ID NO: 75692 - DNA, 434 bp, Zea mays
  Clone ID: MRT4577_16905C.1
cccacgcgtccgcggacgcgtgggaaaaatttaaaaaaaaaaaaaaaaaaaaaaaaaaaaaaaaaaaaaaaaaaaaaaaaaaaaaaaaaaaaaaaaaaaaaaaaaaaaaaaaaaaaaaaaaaaaaaaaaaaaaaaaaaaaaaaaaaaagggggggctgttttaaaggatcaaagtttatttacgtttgattgcaacgttatagtttttttatagggtaatctaatttaaattaattggccgtgtttttaaaacttgttatttggaaaaaccttgggtttcccaaatttaatggctttgaagaaattccctttttagcaagttggctaatttgcaaaagggctctaacgtttcgcttttccaaaaattttctaagtttaattggcaattgggaccctccttttaggggcttttaaaccccgtcgtttttggtgtt

SEQ ID NO: 75693 - DNA, 225 bp, Zea mays
  Clone ID: MRT4577_169060C.1
aaagcccttctctgacattcggttctacattttgctccaggccaccatcatctgcatagacgaactattatgtatgcggaacaaccactactccacaacaacttccaggcacaggccgatgccgtcaaccttatatgcagtgccaacacccattctaaccccaagaacacaataggcgtgatgacaatggccgcgaagggcgatcactttctaaacactcccacc

SEQ ID NO: 75694 - DNA, 735 bp, Zea mays
  unsure (1)..(735): unsure at all n locations
  Clone ID: MRT4577_169061C.1
gggtcatccacgcgtccgccccccacccgctctctcccttcgtcaccatcacatccagccagccaacaaaaatgtcgcgcgtcacagctgcggtgctcttctacatcctcgccgttgctgccctcagcgcggccgaggccccggcagagtcaccgaaggaaggcagtgctgccaaggcacctgagtctgccaagagaactgctgcccccgctgaagcacccgaagccgcatccacccccgtcgccgccgctgccccatcgccgtcgtctaggaagtctggtccagctaccgcgccagccaccgcctctacacccccttcttccacggacgaggagttgagcccttccccgccagcatccaccgccgcggcgtcccctgcggctggaccggctgctgatgactcctgctttgggtggaggtggacgacgactaggggggatacgcgggtgatgatccaagaggctgcggcctcgtataccaactttcggagatcaaactaacatgccgaaaagtagtctgagctcaattcgcgtaagatcaagcggcggtcgatccatgtatacgtatatgaactcagaaagggcacatgcatgcattggggagtgtcacgtacattagcattctcaagagtgggtgtgcacgcacaaacgccattcngttctctggttcttctctaaactggtatactgagctgcattttttcaccggtatcttgtcaagattcatatatatata

SEQ ID NO: 75695 - DNA, 785 bp, Zea mays
  unsure (1)..(785): unsure at all n locations
  Clone ID: MRT4577_169062C.1
gcgtccgacgacgcctcggtcttctgccaggacctccccgccgtccccaaggangccaaccgccggaagaacaagggcagctccgaggccaacggcggcgccgcgcccaaggacaccgccacggccgggccggaggagggggcggcggcgacgaccccacccgccgtggacgacgactagggatacgcgggtgatgatccaagaggctgcggcctcgtatacgaactttcggagatcaaactaacatgccgaaaagtaatctgacaattttccgcggtnagatcaagcngnggtcgacctanaaagggcacatgcatccggccgggagcaccggcctgttgtgctgctcgctcagacagctctgctagctgcatcctcctaactctccaggtctctctctcctctcccttccccgccagcatccaccgccgcggcgtcccctgcggctgagggaccggctgctgatgactccgccggtgctgctactcttggaagtggagctgccatcgccggcgttgccgctgctgttgctaccatgatcttcttctactaaactcaccgacgatggtcgtgttgtcgcggtgagccattagggtggacacgtaattatattggctgtgctgtaatcgctctcgtctggtcgggagggagggaccaagtgtttctttatttgctttgctcacttcgtttgctctcttgtaacattatggggtcaaccgttatgtaactaatggatttgattaatctggtctctaactctcaaaaaaaaaaaaaaaagagcggcc

SEQ ID NO: 75696 - DNA, 972 bp, Zea mays
  Clone ID: MRT4577_169063C.1
gagcaaaaaggactgtccggtgcgcccttcgccagcatttttcatttacggctagattctgcgcggagggtgtaccggccgggatccaccatcacacacagcaatccacacaagcacttcgaccaactgcaacacgcggcctctcacgcgtcccctttactcctatgggcgattgggagcctcgaggccggccgggcaaccccacaaagcaataacccggccctctcctttcgtcaccatcacatccagccagccaacaaaaatgtcgcgcgtcacagctgcggtgctcttttacatcctcgccgttgctgccctcagcgcggccgaggccccggcagagtcaccgaaggaaggcagtgctgccaaggcacctgaggctgccaagagaactgctgcccccgctgaagcacccggagccgcgtccacccccgtcgccgccgctgccccatcatcgtcgtctaggaagtctggtccagctaccgcgccagccaccgcctctacacccccttcttccacggacgaggagttgagcccttccccgccagcatccaccgccgcggcgtcccctgcggctgagggaccggctgctgatgactccgccggtgctgctgcccttggaagtggagctgccatcgccggcgttgccgctgctgttgctaccatgatcttcttctactaaactcaccgacgatggtcgtgtcgcggtgagacattagggtggacacgtaattggctgtgctgtaatcgctctcgtctggtcgggagggagggaccaagtgtttctttgctttgctcacttcgtttgctcttgtaacattatggggtcaaccgttatgtaactaatggatttgattaatctggtctctaactctcaaaaaaaaaaaaaaaaataagctgaaacgatttgattaattgataaaaaaaaaaaaaaaaaaaaaagccgcctactaaaaaaaaaaaaaaaaagcgggc

SEQ ID NO: 75697 - DNA, 296 bp, Zea mays
  Clone ID: MRT4577_169064C.1
aagaccagaaaacatgggtacatatataacaacatacccaaattgagatgttacaaagtggaataccaatctaaagcgtgctacagataaacttgcataggctggtgtgcaattaatacccaggctcgctgagaatgcaataaaacatatcataataacagcatgaaacatctgcgcccaatgatgtagagaaccgtattgctgtctgtagtaacatacccgatctgtaaactttgccctaagatatgagctctacccatattgactccaacaagactggttgtcacatggggcat

SEQ ID NO: 75698 - DNA, 1054 bp, Zea mays
  Clone ID: MRT4577_169065C.1
aaaagccatttatataaccccagtatttgtaataattaacgaatttataataaattacagaatggacagttcggtaacaactcttcttaaaagggggtgcaaaaaagaaaaaagaagaagaaagaaagaaattcccgcatgcatgagcacatgtatatgtttccatcagctcaagatgtctctttgagtctttgttgtacgtaccatacaacaaactgtgtagtgtattgcagtaacacacgatatgtaccccccacaccctcatcagctttctcctccaatatagcaccaccatctatacgtatatgtacggtgaatctcacgtacgtgtcctctatgcatgcatatgcatgtgtatgtgcaggattagattggatccagagatatgaaaagatgaacaaggaaagagctcggtgttgtccatggatcgaaaagagtaaaaatgcatggttttgatgctgttcggtgtgtccattttctttttacctgtgcaagaggacacgtacgtacagcaagctctgtacgctttggcatctatgcatgcatgcagctagtgatggaccatggtcaagaaagacccacttgttgtcgctgccggcccggcgctgccgctcgcgttcggccggactccgccgccgctctggttctgctgctgctgcggcggctgaacatgctgatgctgctgctgctcgtgagggtgagggagcggcgaggggaccagaggcgagcggctggcctccccgttgacgctcggggtaggctctgggggcgcggaggcggcagcggcgttgcccgggttggtccgcttgtttgggttggggtcggcggcggacgtcgaagaggacgacgccttggaggcagcgacctgcgggttctgcgacgccgcggtgggcgccgcgggcggaggcagcggcgtggacttgacctgcggattggcggcggacatcatgccggaggatttctagggtttcgtcgggctcggaagtcgattttggggaaaaagggctggacttggtggctacatggagtacatgcgatgtgagatcttcgaaag

SEQ ID NO: 75699 - DNA, 1733 bp, Zea mays
  Clone ID: MRT4577_169066C.1
ctacggtttgggccgagcgatttacattaacctccaggacagggatgtgaaacagggagccagcacccttactcaacagttggcccgcagtttgttcagtgaagtagggcgggaaaatacggcggggcgtaaaattcgggaaatgtttgtcgccctcaagttggaagcggtgtatagcaaagacgacattttaaaagcctatttgaatcgagtttacctaggggctggtaattacggctttgaagatgcggcccagttttatttcgacaaatctgcccaggatttggatgtgggggaagcggccaccctagtggcaatgttgccagctcccaatctttacaaccccgtgcaggattatcaaacctccgtacaattgcggaatcgggttattgagcgcatggccatgttgggcatgattgacgaacaggaagccaaccgggctaggcgatcgcgcattcaggtcagtcccaaggctacccaaaccctttcccaacggcaggctccctacttttacggttacatttttggcgaattaaaccatttactaggcgaagatgtggccaaagaaggcaattttgtcgtggaaactagccttaacttaaaaatgcaggccctagcggaaaaaagcttacaaaaattcctcaccacggagggaaaaaagtatgcggtttcccagggggcagtggttaccctggacagtcgtaccggggcagttttggccatggtggggggcaaaagttaccgggaaagtcaatttaatcgggcgagccaagcccaacggcaaccaggctcaacgttcaagctttttgcctacacagcggcgatcccaaacagcggcaaccggatattacgttggcgaaaacttatttagactggcaaccgaccattcccctagatcaaggtttggcaatgactatcgaagatttcaaatctcgccacgaaggatgattaatcacgaccgcctctttaaggaacttttgacaattttttttgcagagttcctttagcaaaagttcagattgctccccccgaccgcgtcaaagttaaggctgaatgtttgcgactattggtaaccctcaagctagatccggctagaatgcaattaatctctggctttgtggacacctatctcacccttaaccaagcggaagagacaatttttaaagaagctatcgctgaattttcccccctggaacaggaggacgttatgcagttaacaaccagttggatgcttcagggcattgaacagggcatcgaacgtggacaaaaatctctgctactcaaacaaattagacatcgttttggagagttgaatgcagttaatttgtcgaggattgacattctcacagtgcctcaattggaacagttgggagaagtgctgttggactgctctgatttcgcagaattagaacaatggctagcggcccaatctgaaacacctgagcgaaaaatttagtgaatttccagaggtggatgttgccatgaatgttcccaaagaatcaggtttcaaccatcggcttccaattccaaactgagttgataaagttgccgacggggcagtttagtttcttctgccaattgccgactagcctgggagcgagttaaccctttagccattaaacttctcaattcgtcccgtagattttcttcagagaagctgggcctgtcctccggtgtagccccggcaatgactaagcaaaattctcctttcggtgtattttccgtaaagtagg

SEQ ID NO: 75700 - DNA, 395 bp, Zea mays
  Clone ID: MRT4577_169067C.1
ttttttttttttttttttttttttggttttgttttttttttttttttttttttggggggaaggaaaaaaaaatgggcttacttatattagcagggcaaagaatactttaaattggtgggacctaaaataaaactttataaatttgggaataagtaaaaaaagggaaaaaaaaaattagttggccgccgaagccagttatactaggaaatttaaaaaaacgttttttttaaagttagtaaccgatattaccactgttttggcttgccacaaaaaaagggaggattaattttttacccggcttttggtgatggggcttaaatgaacttggatacaaccaaaccaccattttttttggaaaaaaatgttgggggcataaaaaaaaaattataacctac

SEQ ID NO: 75701 - DNA, 628 bp, Zea mays
  Clone ID: MRT4577_169068C.1
caggtcggactccagcatcaaggacgggtcgctccagctcgagttcaacgcggagccgacggacgcgcggtccacgtcgttcgtcggaacgcacgagtacctcgcgccggagatcgtcagaggcgagggccacgggagcgcggtggactggtggaccttcggcatcttcctgtacgagctcctccatggcacgacgccgttcaagggggacagcaaccgcgccacgctgtgcaacgtggtcgaccagccgctgcggttccccgacgcgaccccgcctgtgcctgtgagcaccgtcgcccgggacctcatccgtgggcttctggtgaaggacccccagaagagaatcgcccccaggaggggtgcagctgagatcaagcagcacccgttctttgatggggtcaactgggcactcgtcagggatgctcacccaccttctgtccctgaccctgcagacttgggccgggttgcatctaaggagaagccggcggcggcagttgccactgctcatcgtgctcctgcagctaaaccaaagaccggcaattttgttcagtatttttaggttgtctatatatcatgtttttgtttttggcagacaaaaaatacaagtcattttttaagaacgaaaaaa

SEQ ID NO: 75702 - DNA, 195 bp, Zea mays
  unsure (1)..(195): unsure at all n locations
  Clone ID: MRT4577_169069C.1
cgnnacaaaacaatttttaaaggattcttcaaaaattttttagacaatccaccccatatctctcccatcagatgccacacatccaccgaggaaaaaaagggccccccaacgaggacccaagaggtgaacctccaaaaacctactaaaaacaaggcgcaaccccccgcggggctcgacttgtgaagagccaacctt

SEQ ID NO: 75703 - DNA, 272 bp, Zea mays
  unsure (1)..(272): unsure at all n locations
  Clone ID: MRT4577_16906C.1
ggccaacttcccgggtcgacttagcgtccggacaaatttaacagtgttctaccaggggcgagggttggtaatgccctcttttagattgcttatgagttatagttcaataatgaagttttttggatgaaaaaaaaaaaaaaaaaaaaaaaaaaaaaaaaaaaaaaaaaaaaaaaaaaaaaaaaaaaaaaaaaaaaaatttaaaaaaaagggagttgggagnggcnncctttcncaatcaaaaacaaatnttctaaatcncaacccncccccct

SEQ ID NO: 75704 - DNA, 166 bp, Zea mays
  unsure (1)..(166): unsure at all n locations
  Clone ID: MRT4577_169070C.1
cctgctacggcggcggcgtgcagnaacaggcctgcaggtggaggcgttccagacacacaacgtacaagggcgccgggccgtgcagcagaagcactcctccttcaagaggacaggaggagtgcgcggtgctgctgccgccgtcagaagctggcacgacgagttatac

SEQ ID NO: 75705 - DNA, 253 bp, Zea mays
  Clone ID: MRT4577_169071C.1
aagaaactatgtgcgaatgatgtgtctatgcctggattaataaagtgtagcctatcattttgcacaatgtatctgcagcaccggtcgtggcagatcagagtaaaatctgagtactctgctttcaaaaaaaaaaagaggcgacgataaacaaaaggaaagactgtgaaaaaccggggggggaccctaaatgggtggccgctttagagatccaagtttaaacaggttggcttttgattagggagccctaaattaa

SEQ ID NO: 75706 - DNA, 574 bp, Zea mays
  Clone ID: MRT4577_169072C.1
cacacacatcacacaccccctcaccccgcatggaggccctcttcgtcggaggtgcgcgcactggtttccctcaagccgtagcaccggctctccgaggccagtcctaaactgtcacatggggaaggtgccggcttcgacccacaacacaggttctacgaagaatctccaatgtgcttactacgacgtgcacaacatctcaccaagtctggtgtaaggtatagtgattcataattcaagaagccacacaaaacccactcaaggtcctgcgcatggaggtcccattacgccaaccataacgcgaagcactctggttacaggaagcgcatttgtaccagagaggttaggctacacaacaagatcctttagatgcccaagatgcctatcctcaagcgtatgatgcgcaagtctcgtgctagcaactaaaattgccccacacatgtaccacgatatgtatatgcaaagtaaaaggaaacatttttaaaaataagacggtactcatggagagcattcacatgccaaaggccaagtaaggccagagagaagactctctacctatcagtttgtaagccaagcg

SEQ ID NO: 75707 - DNA, 3542 bp, Zea mays
  Clone ID: MRT4577_169073C.1
agaaaccagtcttctcatcctggtgacacttcttcatgcgtttctcattggtcaccacaaacccggcggggctgcttcctcattgtggtttcctcagcgactacttttttaacagttgttcatcgcattgaggaagggaggccggctggtgctactgcttttctagtacctgcccacctgcacttgcatctcctgcttccctgagcggcctcccggctgcgaatccaccagcatttcccgaggcccagcgccgcgtgtgcctgtggggcggagtcaggaaatgctcggagctccattccacggctgaaacttctgggaaggtttaagccaaaccttgttgcagtttagggagaccggcagcactaaagaaactagcctgagcctctctttcagcctctcacccactatcgtgagggcattttgtaccttccaagaaagagagtaaggagaacttgacctcagcgctagagaagaatatggcagccactgaagctgccacggacacaggcagttcaaggaggtcacaagatgacactacaacattagtcccacacagtgggaatttgggagaaccaatccagaagggcgtgaagaccaccagattcaaagatgatgacgaggttgtggaaatcaccattgtacagcgcgattcagtggcaatcgaagatgtcagggtagtcgatgatggtggctcagggcatagtaatgggtttgatggcctgtcacttgtgtcaccttcctcatcaaggagcggcaagctatcatcaaagattaggcaagtgaaaaatggactaaagatgaagaactcaagcactaaggcgccacagacacagttgggaaagaacatgaggaagagattggacagaagcaagagcggggctgctgtagcgctcaagggcttgcagtttgtgactgcaaaagttggtcatgatggctgggctgtagtggagaaacggttcaaccagctacaggttgatggcgtgctgctacgttcgagatttgggaaatgcattgggatggatggatctgatgagtttgcaatgcaattgtttgattcattagcaaggaagagagggataacaaagcaggtgctgactaaagatgagctcaaagatttctgggagcaactaagtgatcagggttttgacaaccgtttacagatattctttgacatggttgataagaatgccgatggaagaatcacagaagaggaggttaaggagattattaccctcagtgcatcagcaaacaaactttccaagctcaaggaacgagctgatgagtacacggcactcataatggaagaacttgaccgtgacagccttggatacattgagcttgaggatctgaaggcacttttgctgcaatcaccttctcaagttgttgcaagatcaacaacgcatagctcgaaacttagcaaagctcttagcatgaagcttgcatcaaacaaggacacaggtccattttaccactactggcaagagttcatgtacttccttgaggagaactggaagcgcatttgggttatgactctctggctctcaatctgcattggcctctttatttggaagttcatccaataccgtaatcgagcagtatttcacatcatgggttattgtgtgaccactgcaaaaggtgctgcagagaccctcaaattcaatatggccctggttctttttcctgtttgccgaaatacaatcacatggattcgatcaaagacaaagatcggtgctgttgtgcccttcaatgacaacataaacttccataaggtaatagcagcaggtgttgcagttggtgttgttttgcatgcaggtgctcacctgacatgtgattttcctctgctgctgcatgcaagtgatgctgcctatgaaccaatgaagcctttctttggagacaaaaggccaccaaattactggtggtttgtaaagggaactgaagggtggacaggtgtggtcatggttgtacttatgactatagctttcgtattggcccagccatggtttcggcgtaataagctcaaggattctaatcccctcaagaaaatgactggcttcaatgccttttggtttactcaccacttatttgttattgtgtatgcactgctcattgtccatgggacctgcttatatctaagcaggaaatggtacaagaaaacgacctggatgtaccttgctgtccctgtgctcttgtatgtaagtgagcgcattcttcggctatttaggagccatgatgctgttaggattcagaaggttgcagtgtatccagggaatgttttggctctctatatgtctaagccacctggattcaggtaccggagtgggcagtatatcttcataaactgcagtgctgtctctccatacgaatggcacccattttccattacatcagcaccaggagatgattatcttagtgtccacattcgcacaaggggtgattggacttcacgtcttaggactgtcttctctgagccatgccgccctccatctgatggagaaagtggactccttagagctgacccttccaaggggatcaccgagaccaacgcgaggttcccgaaactcttgattgatggaccatacggtgctccagcgcaagactatcaggaatatgatgtgctcctgctcattggactgggcattggagccacaccattgattagcattgtgaaggatgtacttaaccacatccagcttggaggatctgttgcaggcacggagcctgagggcagtggcaaggccaagaagaggccattcatgacaaagagggcctacttctactgggtgaccagggaagaggggtcctttgaatggttccgaggggtcatgaatgaggtggctgagaaggacaaggatggagtcattgaactccacaaccactgctcgagtgtgcaccaggaaggggatgcacgttctgccctcattgtcatgctccaggagctccagcacgcgaagaaaggggtcgacatcttgtctggaactagtgtcaagacgcattttgcacgtcccaattggcgaagcgtcttcaaacatgttgcagtgaaccatgagaaccaacgcgttggagttttctactgtggtgagcctgtccttgtgccacagctacggcagtggtcagcagacttcacccacaagacgaacacaaagtttgagttccacaaggagaacttctaatggcataactggagaaagctctagacgtggccctctaatgatttcagaatgtgaattacgatggttgtaacatatatacgagtagaagaataagacgatgggagttgttttgttgtacatgtcaagagtagatgaattgtctttgcaagcatacaaccttaaaagttgtaacacatgtcagctggttttgacaggtctgtttgttttgtctgctcctgttggagtgttgggcatacactgcttctgtcttttaaagcaccaccactacattgaaagccctgaggaaggtattttacggcacaaatgagtcaggttcacttgtgaattgtgatcctcaactcctgatgctgagtaactggttgtgccttccgt

SEQ ID NO: 75708 - DNA, 221 bp, Zea mays
  Clone ID: MRT4577_169074C.1
gactagttctagatcgcgatctagaactagtttcgtctccaccgaggccgagacgaaggcgaggaacttgcctttgggcgcgacgttgtaggcgtaggagcatcagaacacgtacatgtcggatatgtgctatagatgtttactggggaggatgatctgcaccgagtgctagtccttgacagacgggatagagatgcttcatgatgcatattacgcgggcc

SEQ ID NO: 75709 - DNA, 516 bp, Zea mays
  Clone ID: MRT4577_169075C.1
agttgctccacaaaactgggactgcttcatcatggaacaaaaaggtacttatcttaaattactgcgggacactagactgacgaatcattgtggaaattcagcagcccctgcacagggcaatcatggtcgcactgaaaaaatgaaaaaaactccaggagaggtttggacgagtcctgaaagctaccatttcacaccatactagatacattctggcgccgcaaatgggaaatggtaaattaacttgcaaagacagcacgagctaactgacataagtaaacaagtttgctgctggctaacatgaccaaatcttacttgatacgacccgggaggctatgatgcttaaattctacaacacaggcatggggcgcttttctagtatctcgggtccctcccagttccaggtgagcagctggggggcctgtaatacccaggactagattgtcccggcttggggtcataatactgagggctgcttggtcttcctcatcccctggcgcaatcaccactgccggcgcc

SEQ ID NO: 75710 - DNA, 1691 bp, Zea mays
  Clone ID: MRT4577_169076C.1
cccagcctccggtctggtggtgtgcttgtgcaaccagcaacattatgtggctatgaggatagagatatgttctgcattgttcttctacctggaagtggcaacagaaaggtattcggaaaagcagttgtgtttattgttgacacaagtggaagcatgcaaggaaagcctcttgagaatgtcaagcatgcagtttctactgctctttcagagcttgtgcaaggggattatttcaacattataacatttaatgatgagcttcactcattctcttcctgtttagagcaagtaaatgacaaagcaatagcaagcgcaactgagtggatgaatgcaaactttgttgctgagggtggtacagatattatgcatcctttgagtgaggcaatggcattactatcaagtgttcatgacacacttccacaaatatatcttatcacggatggttctgttgatgatgagcataacatctgccgaactacaaaaactgatctctccaacagagggtctaggtctcctcgaatttctacttttggactaggatcgtattgcaaccactatttcctgcgcatgttagcttcaattggcaagggacattatgatgctgcacttgagacagcatcaatcgagaatcagattcttaaatggttcaagagagcggcgagtacaattgtggcaaatttctccattgatgctttgacacatcttgatgaattcgaagtggattctgagtacattccagacctttcagcgaactctcctttgtgtgtatctggaaaatacaaaggaaaattcccggacacaattaaagctaaaggttacttagctgacatgaaggagatctcggttgaactgaaggtccaacaactaaaggaaatacctcttgacaaagtattggtgatacaacagattgattttatgacatcaaaggcatggatgtctgcagataaacaagtggagagaaaggtgattaaattaagtatacaaaatggtgttccgtcggagtacacagatatgatctttcttcaaacaaatctggataaagtagaaggaacacaaaaggtcaagcaaaaactgaaaggacacaaaggcagagatgagcaacagatttatggcctgaaactgggattcggtaacaaagatgctacacgggaaaatctcatcacaggatttggagacatgaatccggcagagaaatctgtgatgctccaaaagggatcgggctgttgcagccgcgtcgcagactgcctctgctgcatgtgctgcatcaaggcgtgcaacaggatgaacgaccagtgcgccgttctgatggcacagatctgcgcggctctagcgtgcctcggctgctacgagtgttgtgcagaggtgtgctgtggagggtcggagtcgtagtaggaagtgttttgtatatttgtatggaagattggagaattggagtgtacataatagagttcgcggaagcccggttctggcccggctcttggttgtatccgtccaaacgttctataatttgctcgttacatgcaatgcaaaagagggatggcacacttgagtagtaaaaaaaaaaaaaaaaaaaaaaaaaaaaaaaaaaaaaaaaaaaaaaaaaaacaaaaaaaaaaaaaaaaaaaaaaaaaaaaaaaaaaaaaaaaaaaaaaaaaaaggccccaaaggaccgcgaccgcacaaaaaaaaaaaga

SEQ ID NO: 75711 - DNA, 349 bp, Zea mays
  Clone ID: MRT4577_169077C.1
ctttattctttctttctttttttagctcacttttaaccagtgctcagacacaaaatgggtacagcaataatctctaacaccacagcactgtgatctatcccattgggaccaaaaaagaaaccccaggggggaaggctatttaacaagaatggtatttcatacaaattaacccccgggccctgcacagatgggaaaaaaattccaccaggggtaaaaacctttggcctaactaaagggaattttccctaaaatatgatgggcgtggaggattccaaccggcaccaaacccccaatcccatttttggagggacctgacctttctaatttcggcaaaacaggcaaagcaggc

SEQ ID NO: 75712 - DNA, 441 bp, Zea mays
  Clone ID: MRT4577_169078C.1
atgtcgttacttctaacgctgaataagcgccggcgagggacagtcctttacttgttcctatgctgtatcaaaacaagcctatgccatattccaaacatactcgttccgtgccggcggcactcccctcctcacgcccctgtcgggtcttcaatcttcaccaacgcctgcgcgtagcgggctaccattccgtacggctttctcaggatctgacggacgacttgttgttcgcaccgcctcaccagcaaccattgtcggccatcaggcctcgccctagaagctgggcggagggtcattgtggcacggactccatgcttacaggccgcaccagcaacagcccatggggaacgccgcagatgaccctatggtagatgaagccgcattacaaaatgccttaacacatgagaccaccgataatcaggacgcccctagataccatggggg

SEQ ID NO: 75713 - DNA, 278 bp, Zea mays
  Clone ID: MRT4577_169079C.1
gcaacagacagcatctcagtccactactccgtcatcgtgccatccaccagcagcagtgaaagcatatggctcgccgtgccagcctgctcctgcgccgcggcgctcgtcgtcgccgtcgctgccgcggcggtgcagccgaagtgcgagcgcatccagtgccagctgtacgtggtggtggacagcgccaacgggttctagatacggcggtagaccgacgccatgtgaattacgacggggctcatcgaggagatctacttcgtcgccagcaacgtcgcagc

SEQ ID NO: 75714 - DNA, 357 bp, Zea mays
  Clone ID: MRT4577_16907C.1
atggcggtgccctcgccagagctcgacgctgcccccaaatcgggcctaattaccctgctgatggcctcaaaacatagagttgggtacgccaaggctaggagcagtccaagggcactaccgcaggcgttgagtcgacgacgaactagagatccctcgcagcggctccggttcctcgcgaactcttcgtgcggcgcagcagatgggaggagaagaggagaggggaggcgtatgcccacttatcttgtggcaggcaacctgcgcgaggatctcacaaagtggttacgcaagctggagctacggacgatggttatggcgcccgcaatcaccggcgacgtgggcacgaagacccggttgtaa

SEQ ID NO: 75715 - DNA, 508 bp, Zea mays
  unsure (1)..(508): unsure at all n locations
  Clone ID: MRT4577_169080C.1
tttttttttttttttttttttttnnnnnnnnnnnnnnnnnnnnnnnnnnnnnnnnnaatagcgattacagaggattatagtctgggaaggaagaacagcatgaggattaaggatagaagaacaatgttgaagccactctagaagggtctagaagaatctagagggaaggtagaggaaacatagaagagagaaaactggagaagaaagataacagtaacactctgaatatttcatgtctattctcctgaccgtcctgctcttttgaacctgggctggcacggaccgtttgagctcacattccctaacattctccccttcttaaaaatcggcttgcccccaagccgatacatggcatcaattccatcgagatctcattgccagtgcaagcaatttatccaaataataccagtgtgctatcctttgatcggctgaacattgtgatcaccaggatcccaaacaaagatggagaaattgccttggtcaccgaactcattggtcttctgcaacc

SEQ ID NO: 75716 - DNA, 305 bp, Zea mays
  Clone ID: MRT4577_169081C.1
gaagagcgattcaaaatgattataatctgaatgtataaaatatttataagtttgaaatatgtgctagcttaagtgaatcctcaaagaagatatagatgggatatacttatacatatgagaaggccgaggcccaccgtcacgtagcaccatccacaacagaacaaaattataacctgaaaaacaacatagctaaaccaaactgcagatatgctgatgattccgattcaaacatttcattgagcacgaggtgtttgctgcactggagttcatttcttcttctccacccaaacacttgggattctgct

SEQ ID NO: 75717 - DNA, 155 bp, Zea mays
  Clone ID: MRT4577_169082C.1
gctatcggattctgtaccaggtaagctctattttgaagcgtctcttcaggggtcctagatatggctatagagtacctgtgacccctgttcaatatgatatagagataggatttcagagacgaccttcaacctgtcaaacggtttttctttctaag

SEQ ID NO: 75718 - DNA, 385 bp, Zea mays
  Clone ID: MRT4577_169083C.1
aaactaaaatttatttagaggcataacattttgtgaagaagtatttggatcacgatccattaccatcctaccacccgtacatgtatccaaaatttcataaaactacagctctcggcactcgtgaaacgtgagagcatgagcaaaattcagagcatcccccatcggaaagaacctgttccggttccacttgggtgacgactgaagcacataacacgtagtgcagatccactaggttttacgcgttgcgatgacgatgactgacacatctttacacctaaaagcaaagaccagccccaggtggttggctagttgccgacttgtgggccgatgctttcttgcagccttttcatccgcaaccggaatacaggtcacagattgtctcacg

SEQ ID NO: 75719 - DNA, 900 bp, Zea mays
  Clone ID: MRT4577_169084C.1
atgagctcctccgctgcccccaggcagcagctgccgccgccggccagcacacctctagcgacgtccggcgcgcaggtcgcgccccctgctgcgaccagcgccatgatgctcaccgacacaggcgcgttggcctccactattccgagatcgggcgcaccgctggtccagccgccggcggaggccctcacgtccgcagagatcgctgcgacgttggtcagcttgagccactggatgcgcaacgtccaggacaccttgagcgcgctgctgtcgggccagatcagcatccctgctcccccaaatgcccagccaccacagccaaaccaatctgtgccgctgccatccgtggatcggccggccctcactcatccgtcctcaccgctgcaatctgcaccactacaccccatctcctacccctacggcatgcccatagagtcggccccgtcatccacaacgtcgttgcaatcttccactccaatccaccacatcaagtttccaccgtcgccttcaccaattctgtcatgggcctatggcactgccgcggtggccgcccccgtctactcgtcgatctcgcctcggccgacgatcacctcctccatgccgggcagcgccactggagggcatggtggtcccatagccagtagcccattgtacggcggggtagatggactgctctcccaagagcgcagcagcctactgccccacgtctccgccgcagcaaccgtgtggtcgccctaccatgcgcacacccatgatgctggcatggaggctacggcttacgagggcgtcgacgctcgtccctccccatgtttttataagctggagttcgccacgtatgacagatccgaagacccattgaattggctcaatcactgtgagcaattctttaggggacagctgtaa

SEQ ID NO: 75720 - DNA, 738 bp, Zea mays
  Clone ID: MRT4577_169085C.1
aatcatactgttcggaggatctggaaagatatcagagttaaaggcaacaattgacatgggattagctcatcgtgacagtatactcaaaactattgcatcagagtttgagcattggaaccatctggccaaaaaggaaaaatcaatttaccacactctaaacatgttgagcgttgatgtgacgaagaaatgcttagttggtgagggctggagtccagttttcgcagctaatcagattcaggatgcactaaagcgtgctactctcgagagcaaatcccaagttggctcgatttttcaggtccttaacacaaaagagtctcctccaacatatttccaaacaaacaaatttacctcagccttccaggaaattgttgacgcatatggagtagctaagtatcaagaagcgaatcctggtgtatacactattatcacttttcctttcttatttgctgtcatgtttggagattggggtcatggaatttgcatattacttgcgacactctatctgataatccgagagaagaaattcgcttcacagaaacttggagacataatggagatgatgtttggaggccgctacataattatgatgatgtcaattttctcaatctacacaggattaatatacaatgagtttctctccgttccatttgaactttttgctaaatcagcctatgcatgccgcgattcttcttgtagtgattctactactgaagggttaatcaaggtaagggatactta

SEQ ID NO: 75721 - DNA, 316 bp, Zea mays
  Clone ID: MRT4577_169086C.1
actgaatgttttttccgcaaacaggaaagaacgtgtgaggttatttcccatacatcgtacaaaaaagtgctttaacaagtagttgaactacaagatctcttcacttgcctttttttgtaagaacggagttttgtttttgccatagtttctgggaagaattaatgtattttccttgtaacgctcaactacgttatcggcaggcacttgtttaaatataccccaaaaaacataaatggcaaggggggccttcctacctcggagtttatttgttaacgaagggcacacgcctaaactaggggtcaacacaaaaaacaac

SEQ ID NO: 75722 - DNA, 484 bp, Zea mays
  Clone ID: MRT4577_169087C.1
ggggaaaaaaccgggggctttccattggtaaaagcaggggaaaaattacaccaaaggggggaaaaaccggaacaccccgaaacgaaaatacagaaaaaactacaggggaccggccaactagacaaaaaaccgaccacgggcggcaaaaaaaaacataaaaagggggggggggctaacccccaaaacccaaaagggggcggccctggggcttgaacccgtaaacaaaatccaagggggggacggttttggggggggcgggcccggggtaagggacggggtcccggataaccttctcaaggaaaaacttgagcaccccgggggtctcctcgaaaaaaaacccaaaaaaggccttgaccccccccctcctggccagcctaaggaacgccgggttcgtgaagccctggatggtggcccgcaaaaacttgggggggggcttggggccccccttgcccaacccctttccccccttgcccccggaacgggg

SEQ ID NO: 75723 - DNA, 1265 bp, Zea mays
  Clone ID: MRT4577_169088C.1
gtgagcagccagccgtggaggaagagatgtacccataccgcatgagcaacgtgatgatcgggtacctgaacctggccacgctcctggcctcgctccccatcatcggggcggggctgtggctggcaaggggtagctcctcctcctcctccaccacgtgctcgtcgatcctgcagacgccgctcctcgccgtgggcttcgcggcgctgctggtctcgctcgccggcttcgtgggcgcctgcttccacgtggcctgggcgctgcggctgtacctcgccgccgtcgcactgctcgtcgccttcctcctcggcctcaccgcgttcggcttcgcggtcaccgcgggcggcggcggcgcgcaggtgtacggccggccgtaccgggagtaccgcgtcacggactactcggcgtggctccagaagcgcatgcaggacgacaggtactggcgccccgccctcgcctgcgtcgtcgggtccaaggcctgccccaagatccagaactggacgcccatggactacctccagcacgatctcacgccaatacagtccggctgctgcaagccgccgacggcgtgccagtacagcggaggcatgccagtcggggcgcaggacgaggactgctaccggtggaacaacgccccggacatcctctgctaccggtgcgactcgtgcagggccggcgtgatggagcaggtgcgccaggactggcacaagatctttgtgctcgacgtcgccgtgctcgccgctctcgtctgcatctgctcatgcgggtgctgcgccttcaggaacgctcgccgctcccggtcccagtacccatacggggtaaaccaaacgtccaagataaacccacgctgggactactggtggcgatgatggggtggtagaagagaacagatctactaggctagctgtagcttctcaatgcctgtatgatattttgatccagtcttctgtggaaaaagataaaataacacttgggatctgtatgtgttattagcccctgtggtactctgtttgtttccaggtctgcagagtgtagtgtagtttctgtagatatttgagttaagaggagactaagccatgaagtaaaagagatgcctagtttttttccccttcaatatggtagccagcattgtatcatgtagaattttaatccaggacagaagtggttccatgtatatgggggaaaccaaaccacaccagaagctatcagctatgcctgttctactgttggcgtggcttccttatgatgtgattacactggattccttt

SEQ ID NO: 75724 - DNA, 616 bp, Zea mays
  unsure (1)..(616): unsure at all n locations
  Clone ID: MRT4577_169089C.1
cctcgaggccggccgggccgggaattcgccaaacaatacacatttaattggaatctacgtcaagcaacctcgggccggcgcgtgatcgagatggcaaccagtggaccgagcgccgccgccgccgctcccaaggactcgtggccggaggttgtgggcatgtcatcggaggaggccaagaagaagatcaaggaggacaagccgggcgccgacgtgcaggtggtcccagccgacgccttcgtcaccatggactacagcaccggccgagtcagggtcttcgtcgactccaacgacaaggtcgccaaagctccccggatcggctagctggataggagggacatgcatacatgcagcaggtgccagctgccaacgtgcatggaattatttatagttttgtatgaacaattgataaataaaaggcaaggtgtatccgtgtatatatatgtgatatttgtgtacctactagctggatccattcgtgcatgtgtgatgacgacgtacacttcggtttcggactctcggcactagtttgaaaaaaaaattttttcaaaggcccaaaaaaaaaaaagggcgcccgccgactngagtgctcgtcgacccaggaattaattccgggccg

SEQ ID NO: 75725 - DNA, 271 bp, Zea mays
  Clone ID: MRT4577_16908C.1
attcccactcataatcgactgcgctggacgacactggcacaggctgactgatcaaaggtagctgaggtagagacaacacgagctgtcctgactgacatgccgaaggacatgcgaggcatcgcggcccagaggcggaagaggtctcggcccaggactacaccgaccctccgccggcggcgatgatcgacgcggaagagctcacgccgtggagcactgtaccgagcgcaccatacccgagatgatccccacgctgctcttcgtctacatgacc

SEQ ID NO: 75726 - DNA, 510 bp, Zea mays
  Clone ID: MRT4577_169090C.1
gcgctccggtacccaaaatttcctcatcttggacctcccccttcctatacccctgacgctgcccgtgccgtagaaggcagtaaccctatccgtcgagcagtgcgccgaccatggtctgctgcgtgtataacgcggttgtgcctgcggaagacgatccccatgccccgccaccttctgcacacatgagctacctaggaagcatccggcgagaggtgggatgagctcgtgaaccacttagagcgagctcaagagctcttcagacaggtgttccaaggccatttaggatgaagacttcatggactccgattactgtctaacacgaggcgctgatagcatgtctacacattatggaaagttcccaccgtatttctccagcacatactttgtatatggctctgcactgctttacaaagctcacgaagatagtgatgttaagggaactgttcccaatagctatgcgagtgacaactcacagaagaggacagccacttcagatgaccgtattatctc

SEQ ID NO: 75727 - DNA, 750 bp, Zea mays
  Clone ID: MRT4577_169091C.1
tcgcgatctagaactcccttttttttttttttttttttttttcgcttttttttttttttttgttgttcccactccattaccatacatactccatagtccatacacaggggcatgtagggcccagcaccaacccgtgccgaccgaacttctaatccagcgacgccatctgaaagctcccccaaaagcgatgatgcatgacaaagctaattagcctactaaacaagtaaacaacatgacctgctacggtcaaacacatcggagaccgatcagacgacgtcctgcgccgccggtccgacttcgcccgcggcggcggccacctggttccgccgctcgtccagcgcgttcctcaccttgccgtacccgtggcgcgcccagtcgtaccagtgcagcgcgacgtagacgcccagcccggcgatgatgccgttggcgatggagaaggacaacggcatcagcgccatggtcacgaacgccgggactccctccttcatgtcgccccactcgatgtccttggcgacgcgcatcatcatggcgcccacgaggaccagcgacgggcctacggcccacggcggcacgctcatcagcagcggaccgaagaagagggacgccaggaagcaggcggccacggtgatggccgtcagccccgtccgcccgccctcccggatccccgctgtggactcgatgtaggtagtgaccgtggagctcccgagccccgcgctgcggacgcgtgggtcgacccgaggggggaaacgg

SEQ ID NO: 75728 - DNA, 677 bp, Zea mays
  Clone ID: MRT4577_169092C.1
gccggccgggtctgacattcccagctattgtctctctcgcccaccacgctccactcgcaatgtacgacatggacatcgccgcccactccatcgcctaatcatcctatcgtcgtgctccgccgcgccctgcaggtgcttctcatccgccgtgtcctgcaggtgcactgctcgtagttgctgatccggtttgccgccattgattcgtcgcctccttcgttttagggttcctgttcttcgatcgaacgcgcttcaaatcaagcaatcttgtcctttcttggtgataccggtacgcgcaagaattatcatctacccaccatctatccaaggagaataaaacatggccacactagcaaaggcataccagatcttacaggccccaaaaagaagagctcctagatcgtcatcaacttcatgaaggtatttgcttattgcgcacctatcaagagcaccatcacttttggaccatgaatgcttctctatagatatgaacctactattagactatttgtggatctgtacatattgatttaacacctggaagcacactgttgctaagtgttgatgtatggtggttgaatgctacttagtatgtattgtagtctaaattcactctacaactggtatcaactattagggaaaaacaatattatcaaaaaaaaaaaaaaaaaaggccccta

SEQ ID NO: 75729 - DNA, 462 bp, Zea mays
  unsure (1)..(462): unsure at all n locations
  Clone ID: MRT4577_169093C.1
aaccagaaacgactacgtaaaaaattggctaaattaaaacacccaacagtccgcaggcaaacaagggatcgaacaaaaagcaagcagcaagcttgaaactatgcatagcccacgagctaagcggcctttgcctacttggagggggtcgcttaaccgaacagttttttgacggccgggaacctggggtccttggcgccaaacttggggccctggaagaagccgagggagcccccaaacctgtagggaccggggaccccngnnggggcccccnnncccttgatcgtccctgccgggcgctggcgcaaccacggggtcggggccagggttgaaaaacggggccacggacaggggggggccctggcccccggccgggacgcggggcaggaccctccgggaggccccggcgctgaggaccccgatctggcccccgatgtggacaaaaagcctgccccccttgggggg

SEQ ID NO: 75730 - DNA, 291 bp, Zea mays
  Clone ID: MRT4577_169094C.1
gcaggcgagcacctcgtgtcatggtcgtgggcgccccgcgtcactgccaggggcagatctccgaagcccgaagcctgaaggtgaagctgttagctgtgaagcagactgcctacaagcaaactagatccaccactggacgaaagaacggagcaaatttcttatcgattatttaagacaagcaagcagacgggcctggcctggcaagcttggagccgatgtcgggcgtgacaagcgtccaggacaccagcgagttaaaaaacggcaaggaggagctaagtgaactcgacgcgc

SEQ ID NO: 75731 - DNA, 354 bp, Zea mays
  Clone ID: MRT4577_169095C.1
attaaataaaaaaaagggtttcctttttttttttttttgttgggacagaagcaagggacatgcactttcccgagcccagaacacgccaatgcccacacggacccgaaaacacaaaggggaggcaaaaaaaaaatacacggaacacccaggagacaaaaaccccagagagaatcggacccggagctcaacacaccaaaagaggccccacaaaggataagggcaccgcccacacactggagaaccagcaccccggcagcgacccccacaaagacagcaccgcgaggcgagacgcaacacgcccataaacagaatcatagagccccgaaggcggacaataccggaggaaagatcccc

SEQ ID NO: 75732 - DNA, 1880 bp, Zea mays
  Clone ID: MRT4577_169096C.1
atcacatatgttctcccagttaatcaccgcttttttttttttttttttccacaaacaaaccattaagagcatgcaaccatgaactggttgaaataactctgtattatggactcctcactggtattcacatcactatagaacgtataacaagtgtcaaccaatcacaaagattgtcatcaagttatctgcaatcccctatccgatgaacaacaaaggcctacatctggctccaatactgtagtagggcagagacaagtagaggatggctggaaagggttggttggttctaaggaccacgggctctgaagaaacacaagcacccgcctgcctggccttctggtatcatgccaccgcccttgctcgtgtcgagggcctccaggaaccgcaccacgtcgtccatgtcagggcgcttatccgggtttgcgtcccagcacttccgcatgatgttcgccattgggcttgggcagcagcgagggatgtcaggccgcaggttctggtgaacgacggcggacgagacgtctgcaaaactgaggtctggatatggcatgtcacagcagtatatttcccataagcatatgccaaaactgtagacatcacactttctgttgtatggcttgccttcaagcacctctggggccatgtagccaagtgtcccagtcgcgcctgtcatgtcctttggattctgagcctcaacacgagcaacaccaaaatcagcaatcttaaggtttcgctgtgtatcgagcagcatattttcagtttttacatcccgatgtactatctttcttgaatgtagatagttcaatcctctggcaagatccagtgctatctgaacaacaaccttgtatgcaagcttccttcgcctgttctttattaaatactgcttcagtgatcctccagcgagatattcgaccacaacacaacatgctcttggcggcagctcagtgcgcccaccactgttagaactattggctggaatcttaaggtctgtagtacccattgatgcaccaacaaactttgtaacattcggatggttgagctcatgccagacagcaacctcctgcttaaatgatgctcgcagtgtggcagtttcagtttctgacgcaaagccatcttcaccccaatccaatagttttactgcgacgtcctgcccatcatacgtgccgcgatacaccgtgccgtaggtgccctgcgctatgacgtagcgaatctcgagcttggcgaggtcgatctcccagtcctccctgggcccctggttgtacgaccccttgtgcttctcccaggtcttggccagctgcttctccagctggatgtccaggctctcgaggtcgatcttgtcggcccgcaggtaggactcgctcttcgccgccgacgacgacgcgccggcggcggtcgacgtcatcgcggccctggaccggcttccaacaagtcaactttcctcccttaccgaaggcttgcagcctccgcggtggttgctaccacagttgactcctccgcgccgcgggggcggaggccaaggtcgccaattcttcagcgggaggaggaattggtcgccaggtcgcggtggatctgcagctccagcgcgagtacaaagggaggggcggcggagcaccaggacggcgaggattgtggaagttaaggcgaacccgaggtgacgcaacaccgcagccgcaggacgcggtagacggcggcgggagccgagagcaggctgcggcctgcggggacggcgaggcgggtgggtttggggcgcaggggaggcaggagcagccagcaggtggaagaacaggagtttggccgcgcgtggtagatggattgtcagaggagtcgacattgccgacaataattacgagaaggaccccggccggcctcgaggtctgcttatg

SEQ ID NO: 75733 - DNA, 236 bp, Zea mays
  Clone ID: MRT4577_169097C.1
ccatcgaatccatcggcagcccctcgaataccaacacgagccgcggggccagcgacaaggaggagaagacgaaggaggacaagatcaaaggcaaggactcgtcggggccatccctcaaggagaacgaaacgctcctcgcctaccacggccccctcctccacgaggccaaggttcaaaggatcgaaaaccatgaagatgaatcgcgctaccttgtccattatctcggttggaataag

SEQ ID NO: 75734 - DNA, 246 bp, Zea mays
  Clone ID: MRT4577_169098C.1
tcgagcggcgcggccgggcaggccacccataggcaacaaggataaaacttctactaatgtctatttaattgcatatatgcgcccaggtagtcaatgcccagggtgatcgaggagcccacgtacaacaggatccccatgcctcattacggcatgctgccacacttagaattcccacaggaaaggagagtagagccctagactaaagagaggatacacgccagaatgcaagagctcagttaatcgata

SEQ ID NO: 75735 - DNA, 227 bp, Zea mays
  unsure (1)..(227): unsure at all n locations
  Clone ID: MRT4577_169099C.1
ntgtttttttttaagagaataacagatctcagttggataatttaaaagaaacggcgcgtaatcctctgtaaggcagccaaaagagaggtgagctgcactggaaccacttgcctagaacaaaccgggctagcatacaatcaagcagcggctggaccatattgcctgaggagagatcgttcagtccaccaggcttgaaattagagagaccagctgagaaaacatctaca

SEQ ID NO: 75736 - DNA, 415 bp, Zea mays
  Clone ID: MRT4577_16909C.1
ggaataatataggacaaggtttgtggggcagtatccaattactttttgccaaaaaaaaaaaccctaaaatcgcggggataaaaacagcaaactttttagctaaaaaataagcaaagttttttgggttttatccaattccttagccccaaaaaaaaaaaccctaattttatagggataaaaagcaaacggtttagctaaagactaatcaacccctaagggcccatgtaacattaggctttttcaaacaatattttaaatcgaagcctcaggaaaaattgctttggatcagcaggcatgacactaagggctaggggcaaaaccctctttttttccctttttttatgggggacaacttttggctgcctcaattttagctttttactccttaacggcatatttaatttctaattcgcag

SEQ ID NO: 75737 - DNA, 190 bp, Zea mays
  Clone ID: MRT4577_1690C.1
accactcgctacgttagctacgggcagacctatcgatgaatgatagatagtaattggttcaatatatgccatctagtgaaccaattactatctagctagtagatggcatatattcctgtcccctccccccttaattcattagctttgttttttcacaagctaattaatgaattgatagcggcgtcgcgtg

SEQ ID NO: 75738 - DNA, 527 bp, Zea mays
  Clone ID: MRT4577_169100C.1
tcgagtttttttttttttttttttttttttttttttttttttttttttttttttttttttttttttttttttttttttttttttaacggagggggggcgaaaaccggggaaaattaaccttgtttttggcccaaaaataaaatttcccccccctttccccaaaaaaaacgggggggacttgcttttactgtacatgggggacggggggggcaacccccagcaggatcaaccaaattggccgggggcaaggaaacagttcccggaaaatttaccactacctttttttaaaatttcaggacccccggaaacgtggggggtaaaaaaaaaatggggcacacagggcccggggttagaaacataaaacgggccgttttgtacccataaaaggtgtttttaagcaccaaaaggatttgggggcccgtttttttttttcgggggaccaaaaattttttttgggaaaactgaaattatggttgccaaaatgttccttgttgtgtgggaactgaccctttttaggtttttttggg

SEQ ID NO: 75739 - DNA, 318 bp, Zea mays
  Clone ID: MRT4577_169101C.1
cgggaagggccaaaactaataacggggatggggcccccaaggtaaaagattcccatcccccttgaaaacaaaacccgaaaacagttgttattaaaacaagcccaaaagtagtggaccagactgtaagatcaactttccgggttgtttttttccagcttggcccaaaacaaagaaatgcctgggggggataacatttactttagaggggggggggccgccctttttgtttttttaggttttttggccagaggaaaaagagggaccgggtttgaataaaagtttcacggggaaaaatagacctgccaaaaatttggcctt

SEQ ID NO: 75740 - DNA, 393 bp, Zea mays
  Clone ID: MRT4577_169102C.1
ttcttccgtagttaagtctgagagaaaaaagcattagctgagcatcatcaatggcttatgctggctactaggccgagggtctgactctgttgtgcctacacttgagccccttcgcgttgcgcgttcacatgtctctaagcatcatggccctaaccttctagtgcgttgatcacgtacttgaagataggtgcatgctcatcttaaaacacgacgacgtactcaaagtcgttccagtgctcacaacactagctatggagtcttacgcttcgtctagtgtctactttatcatctgcgggcctgagactaactcatctataaacaaagatgaatcatcaagaatcccttacgggagtaggagagtttctactagattttggtgtttcagtggtcctg

SEQ ID NO: 75741 - DNA, 658 bp, Zea mays
  Clone ID: MRT4577_169103C.1
ttttttttttttttttgtccgaaagcttgttgtacagtttgttattacataatcgtgacaggccatgtggtgctcaggatcaagaactcaaagccgtcgctggctttgactctgcttctccggagactggctcaaggacatcgccgtcagtcacttctgcaccctcaacttcctccgtatcgaaggtctcaacaccggccttgtccctagcctccaaagcagcaacctgctttgtggcccaaatcttccacttctcgaactccagatcctcgaggtgcataccgacatccaagcggttcttgccgaagtaagcgcccacgtagcgagcctcctcgagggcaacccgcttctcgacctcctcgagctggcggaggcggtagaactcgcggcgggcggtatcgtatgccttgcgcttgggcatcttttgcgcctccatcagccaaagctggcgttgcaccacacattcaccggtcaacgcgacaccgggctgcctgacgcccttgctccaatcacagcgctgcgcatcctttccatccaattccaggactactctcggccgagcgagctcccaggggtgatcctcgtaaaaggtctgtcgcaagcggtcttcggggtaggagatggtctggggtcggtaaagctttctcggcttcgtcgt

SEQ ID NO: 75742 - DNA, 563 bp, Zea mays
  Clone ID: MRT4577_169104C.1
ccccccgcggcctcccccccccccccccccccccccccccccccccccccccctttttcccttctttttttttttttatataaagaaaattatattatcacacaatgacccaaacagaacgtaaccaaaaaaaacgacccataccatacccaaattgccttgggggaaaatagatagacagaaagaacaggaactcaaccaacacaagacacaacaagttgcagccgggggaggcatggggcaccgggcgcactgacaccgggccccaccaccattaccacccgaggcacattttttttagcccacgttatttggagcccggaccggacacgtccacgcgaaagttactggtagttacgtaccgggtttcgtacgaaacacacccccccccccacagagggacccccgtaaccggagggtactgaacaaaaaaatcccgggttatactggcatgtacccgcgcgaaaaattaccccgccacgcgcgcacgccgatcccctggggcctgggccctggcccccccccttgggtgcgcacgggctcacttgttggccttttggggc

SEQ ID NO: 75743 - DNA, 139 bp, Zea mays
  Clone ID: MRT4577_169105C.1
tcaatgctgttgatcttttaaagactatagccattttaccatctcgttctggcattctagcatccagcgcatcgtcttgtatatcatcatctcctgcgtatgtacacagagtacccatttacctgaatcatgcttgagt

SEQ ID NO: 75744 - DNA, 606 bp, Zea mays
  Clone ID: MRT4577_169106C.1
tcgagttttttttttttttttttttttttttttttttttttttttttttttttttttttttttttttttttaaaccaaaaaaaacgacccataccatacccaaactgccatgggggaaaatagatagacagaaagaacaggaactcaaccaacacaagacacaacaagctgcacccgggggaggcatggggcaccgggcgcactgacaccgggccccaccaccattaccacccgacgcacattttttttagcccacgttattcgaagcccgcaccggacacgtccacgcaaaagtcactgttagctacgtaccgggctacgtacgacacacacccccccccacacagagagaccccagtaaccggagcgtactgaacaaaaaaatcccgtgttatactgccatgtacccccgcaaaaaattaccccgccacgcgcgcacgcagatcccctggggcctgggccctggccccccccgttgggtgcccacggcctaactgggtggccttttggggctcctaaggaacaaaaacctccgcctggggggccggttcctggggaccagcaggagcaggagcaggagcctccggttcgtccggggaaagctcc

SEQ ID NO: 75745 - DNA, 359 bp, Zea mays
  Clone ID: MRT4577_169107C.1
acgcccacgcgtacgctaaactagtctaatctagtcatattcaatctaatctatctggtacttggtctaatacgatctaagctagtgagtgttacttaatgctggtacaaacgataaggccatactcctaaatcacttaagcctaatttggagacttatatcaacttggccatacacaacaactcgatctatataacacgttatataacttacccaatcaataaagtcttaatggattgcataatctatcaaccgacacctgacatcaaaccagattttgacctatatcatgtaatctatcttaccacatatatcttaaccatatgtccttaactcggatggcaactccaagaagaaag

SEQ ID NO: 75746 - DNA, 295 bp, Zea mays
  Clone ID: MRT4577_169108C.1
tttttccttttttttttttttttttttttttttttggaaacacaagagacctggtttttgaggaactgaatggagccttaaacaacaggcctgaggtatccgcttccgtagggaggacttggttatttgcacaataccgggcacgggagaaccgcacttcacggaacggaacggggaaacccaaacacctagggcgacgaccgtacgggctcagctgagacagaatctagagggaaacgccgttggcaatgcccttggcggtaatgccggcggggtcccccttcgtgtcgaaggg

SEQ ID NO: 75747 - DNA, 184 bp, Zea mays
  Clone ID: MRT4577_169109C.1
gaaagagaaggaaggagcggcacacctacgtcttataccatgtgaagaagactaccaaagctgagctccgctgctagagaaaggcccgattgttctaaccctgaaggaactgctaaacgacatcgaaattcaaaacccgaagtacaagaggcaccgccgtctactcgaaccgagtcaaacagac

SEQ ID NO: 75748 - DNA, 261 bp, Zea mays
  Clone ID: MRT4577_16910C.1
gtacaagattacgcgctggaaggacccgttctgctctcggcggacggagacggtgatgattaccgcacatgaactactacacggcgtgcatgtaccacttcaacctacgccggacggcggtccgcaggcttgccaacaccattctcaacgacaagcttttccactgcggcatcatcgacattcaggtcaccagctgaccgtgcgatgtacacggaccagacgatcggtttccacatgtgtagagtaccagaaccccggcta

SEQ ID NO: 75749 - DNA, 400 bp, Zea mays
  Clone ID: MRT4577_169110C.1
cagaggaacgaggacgacatggacttgagcgcctgcggcgcctgcgagtagaagaactccatgaggccgacgtaggtgaacatgtcggcgatgccgaacacggcgaactgcggcgccagccagaagcaggacatgggcaggtgctggaacccggggatcatgtccagcatgccgtgcctctcggccaccttcttgcgctgcacctccacgacggcggccatgaccatggagacgatggagagcacgaggccgacacccacgcgctgcaggtacgtgatccccgtggggatgcccgtcaggcggcgcgcgaagggcacgaacagctgctcgtagatggggacggcgaagatgaggaagacgagcgggatgatgggcatcgaggccaccggcatctggaaat

SEQ ID NO: 75750 - DNA, 270 bp, Zea mays
  unsure (1)..(270): unsure at all n locations
  Clone ID: MRT4577_169111C.1
gcgtctgttgcgctcctaagggtgttgtggcccctaaggacgcttgagctcggcctacttgcaagtgtttcgcattcttgcttgtgtcgtggaggcctttatgccctcgtgctgttcggccccccggaggagtgtgtgcttctaaaaggggggggaggctgtgcccatttccgatgttggttggttgcatatgaccggcggtgcganaatttcgtgcgcttgcttcgtgttgttgagcnttgtcggcccgccccctcctttgggcttgtg

SEQ ID NO: 75751 - DNA, 327 bp, Zea mays
  Clone ID: MRT4577_169112C.1
cgcatcgccaatgaacactgaaacccaaaggtttcaaatgatccaatgcctgtaagcacgcatctaacatatggtatctgaatgtgtgaagcttgatctgtactccaactacaaggtctgcctgatattcaaggtcacccacatattccgctagaacagcctgactgttactaaggctgagatgaccactctatacaagatggccgtgaacactttatacgtgcgctggttcgctgtagatgccgtctacccatatgcgattgactgcatcactgaggacatatgccacaggctccatgtgataggacaggccgatccgacgaaacc

SEQ ID NO: 75752 - DNA, 258 bp, Zea mays
  Clone ID: MRT4577_169113C.1
cgcaaattgcaccaagaaatttattgagaggccgtcgacaggggaattggtcgcgtcgtcgtctagcagcagccaccgccgcctcatcctcgcagccgccgtcctgctctccgtgctcgcggctgccagcgccagcgccgggacctcctgcgtgccggggtgcaccattcctcacaacccgttcccgagctggctgttggtccccgaccagtctaaccttataggctacaactcgcatttcctgttcgtggcttacat

SEQ ID NO: 75753 - DNA, 296 bp, Zea mays
  Clone ID: MRT4577_169114C.1
ggaaaaaaaaaaacccactttgatgaaaaagggagggtccgggtacagtacaaagttcctaccctccgggtttgaaaacttttcttatgacaaggacagggttcaccgaaaagggaagtaccccttttactaaaacataactgattttcttacagacgactgggactaaacacaaaccccccgttgggggcccttattaccacaaattggtcgatcgccaccaatttttttttaacaacacgggacagtttttgaccacagggggtttttcctttaaaggttccaaatattgggga

SEQ ID NO: 75754 - DNA, 445 bp, Zea mays
  unsure (1)..(445): unsure at all n locations
  Clone ID: MRT4577_169115C.1
cgggccgggatcaccaccagctgggtcttcagaccattagctttatgtgcagcagagcgcagaagaacccgatcagcgccatataggggttagtggttgccctcgctctgtgaggttgctaaggagnccacctaagacgcatacaaacatccagtagtcttatgancgccgcggatgcnggtgtctgcccacttgngtgactttgctaccatgngttagcctatgcagcaagatgtacatctctagacccgccgnnacacgctggccatgggnccaatgncttcnccctggaaaccttgacttcagcaggccatctatcgtggtctctagctatatccagagtctctgtgctaagacaaatcagtcagccgttttgtgaacctattatgatggagctttatttgctgctaatatcgacctacctgttaagtaattgcaacgtttg

SEQ ID NO: 75755 - DNA, 252 bp, Zea mays
  Clone ID: MRT4577_169116C.1
gatacgcggcctgagaggtctagtgcgcatccaagcagaccagattgacgcagtcaggttcctgccaacacgaagtgactgcaatatcttccacgctagagggattctgtgacagactctatatgatactttaagatgtagactgagcaagttgccgaacatatgaacgcacattatgtctgattcaagaacgatgagagagtcctcgaatcggatctcttcaccgaatccattatccagaccactgaattt

SEQ ID NO: 75756 - DNA, 280 bp, Zea mays
  Clone ID: MRT4577_169117C.1
cgattgtgtacctcgagggcggtcgggacgggttctaagccattgtccattccctctcctcccctcgcttttcctccaaagcaagacagctaagcgttacgccagtactggtttggtctccgctcaaggccagacgcaagggagcacatgaatgccgcggaccgagccatactggcgaggagcctacgggatgagcaacgaccgctgccacgactcgccctcgctatccgcccgcttcctcgttactctcaccctcactcgtgactccaagtccgacccg

SEQ ID NO: 75757 - DNA, 589 bp, Zea mays
  Clone ID: MRT4577_169118C.1
accttttcccctccaagagcagcagcgagctctgagttctactagctcaagcacaagcccgagctagctgcctagaagaagcctctgttgaaccatggcggcatcagtagcttgcgccttcttcttcgacgccgagccggccggcgagcccggcaagcacgcgctggacgcgtgcgcgctctgcgccaagcggctggcgcgcgacagcgacgtcttcatgtacagaggggacacgcccttctgcagcgaggagtgccgccacgagcagatgcacctcgacgccgtctgcgccaggcaggccgcgcggagactgcagcgcttctcggcggagacggagtcccagtcccaccgtgggcagcggcagtcccggaaggtgtccatcgccggctagccgcggaaagttttgtttggatcgacaagataaccatcgatgttgttttgaagaaacgaccgctgtattctgaagaaacgactgctgtattctgaagaaccatcgatgttgttttgggaggcagtgcagggcacggcatccggtggtaggtgcctgttgcttcccatatgtgtccatggcaagctaattatgctgccc

SEQ ID NO: 75758 - DNA, 476 bp, Zea mays
  Clone ID: MRT4577_169119C.1
tcgagaagatgacagccttctcgccaagctgcaccgtaccagctccagttccagctcgtcgagcgacgaccaggaataggaggtgatcgttgacaccgcgagattgtcacgacgtagcaagacgatggtccttaaggagatggtaacggagaatctggcggcctacacagcccacgatgatggctaccactaccagacgcccgttccggccgtggtggtgtacacgcatgctcaccactaggagggagagcacttcccggagccggcgcctcccccgcacgtggagacgcaccaccccttctgtttccacaagatcgaggacgacgaccctaagattcagaccctaccacaggcaccggaggaggagaagaaaggcttgctggacaatatcaaggagaagcttcctgttggccacaatatgccggaagacgctgttgtcgccgccgccgctccggccgtccacgcgccaccgccgg

SEQ ID NO: 75759 - DNA, 252 bp, Zea mays
  unsure (1)..(252): unsure at all n locations
  Clone ID: MRT4577_16911C.1
acttntaatcaagtgttgtattgttcacccaccaatagagaacgccagctggtgtgggaccgggggggataacttgggaatgttccctattctaaaccgatgccaagatggtattcaatttataaccaggggccgttgtttattaagcaatcaacagttaacatgacttaatatataaacacggggatttttcctcatgccggttttcaaggattaattggtaaggccgaacttttggaaatggtggcccca

SEQ ID NO: 75760 - DNA, 132 bp, Zea mays
  Clone ID: MRT4577_169120C.1
agccttccggaacgttattaacccccctgcctactgttgtgcacacggcgctcatcaaggcggtggcccatgccatgtcaggggcgcatcgcgcaccgaccttctccatcctggacacgtgcttctagggcc

SEQ ID NO: 75761 - DNA, 249 bp, Zea mays
  Clone ID: MRT4577_169121C.1
aacacatccttccatacaagccatcccacgcgagtatccaagattagagcaaatacaaccaggggctgggtgtaatttgggacggccaactgcttacacatcctgatcgccatcatcctgcctacgatgggggtgtaccttaagtacaggtgccgccacgagttctggatctgccttctgttcaccttcctcggatacatccccagtatcatctactccatttactccataaccaagaacacctatcat

SEQ ID NO: 75762 - DNA, 306 bp, Zea mays
  Clone ID: MRT4577_169122C.1
accttccgtacagccgcatcaacacacaagacctcatcctattcgatccatgttccaacaaaagcgggggtctttatgcggttctggtcacctcctacaggaaaacaaacggagagactttgcacatcctgacctaaatcaaccatggagcacggaaaataaaaatcaaacacagtccctccccgcacgcaccaacatgagtgattactcggcaccatggcatactggcatatgcaaacaagaggcccagttcaaatctcggaagggtggcgcaaacacgaaccacttggaagaggaaaagaacca

SEQ ID NO: 75763 - DNA, 2713 bp, Zea mays
  Clone ID: MRT4577_169123C.1
cattgggtacctcgaggccggccggggcaagaatccagcgagccaacaaggcaacaacaaacacctccctccttcttcacttccctgccgttgttgcaggaagcaagcgagggcacacaaaccgacaaggccgcccacgcgcgcgtcggccgccgccgttgccgaccagcaggcaggcagcatggtcgtgaacaacaaggtggacagcctgtcgtacgacgtcgaggcgccgccgccctctgccgccggcgccgccgcggggcaagcgccaccgccggcgtcgccagctccggcgccggcaccggcaacccacgcgcccgtgacgcgggaaggcggcgcggcgtcggtgctggagctgcacaaggtgtcgctgccggagcggcggacgacggcgaaggcgctgcggcagcgcctggccgaggtgttcttcccggacgacccgctgcaccagttcaagaaccagtcgtcggcgcggcgcctcgtgctggcgctgcactacttcttccccatcttccagtgggggtccgcctacagcccgcgcctcctgcgctccgacctcgtcgccggcctcaccattgccagcctcgccatcccgcagggaatcagctacgccaagctcgccaacctgccgccaatcgttggcctatattccagcttcgtgccgccgctcatctacgcgctgctggggagctcgcgggacctggcggtggggccggtgtccatcgcgtcgctggtgatggggtccatgctccgggacgccgtgtcgccggacgagcagccgctcctctacctgcagctggccttcaccgccaccttcttcgccggcgtcttccaggcgtccctgggattcctcaggctgggcttcatcgtggacttcctgtccaaggcgacgctgacgggcttcatgggcggcgccgccgtcatcgtgtcgctgcagcagctcaagggcctgctcggcatctcccacttcacctcccacatgggattcctcgacgtcatgcgctccgtcgtcaaccgccacgacgagtggaagtggcagacgatcgtcatgggctccgccttcctcgccatcctcctcctcacgcgccaaatcagcgccaggaacccaaagcttttctgggtatcagcaggtgctcccctggcgtcggtgatcatctccaccatcctctccttcatctggaaatcccccagcatcagtgttattggcatcctccccaggggagtgaaccctccttcggcgaacatgctcagcttcagcggctcctatgtggcgctgacgatcaaaaccgggatcatgacaggcatcctgtccttaacagaagggatcgcagtgggcaggaccttcgcgtccatcaacaactaccaggtggacgggaacaaggagatgatggcgatcgggctgatgaacatggcgggctcctgcgcctcctgctacgtgacgacggggtccttctcccggtcggcggtgaactacagcgcgggctgcaggacggcgctgtccaacgtcgtgatggcggcggcggtgctggtgacgctgctgttcctcatgccgctgttccactacaccccgaacgtgatcctggcggcgatcatcatcacggcggtggtggggctggtggacgtgcgcggcgccgccaggctgtggaaggtggacaagctggacttcctggcgtgcgtggcggcgttcctcggcgtgctgctggtgtccgtgcagacgggcctgggcgtcgccgtcggcatctcgctcttcaaggtcctgctgcaggtcacccgccccaacgtcgtggtggagggcctcgtcccggggacgcagagctaccgcagcgtggcgcagtaccgcgaggccgtccgcgtgccgggcttcctcgtcgtcggcgtcgagtccgccgtctacttcgccaactccatgtacctggtggagcgggtcatgcgctacctccgcgacgaggaggagcgcgcgctcaagtccaaccacccctccatccgatgcgtcgtcctcgacatgggcgccgtcgcggcgatcgacacgagcggtctagacgcgctgtccgagctcaagaaagtcctggacaaaagaaacatcgagctggtgcttgccaacccggtggggtcggtggcggagaggatgttcaactcggcggtgggcgagagcttcgggtcgggccgcctcttcttcagcgtagcggaggccgtcgcggcgggggcgtgcaaagcggcgcagccctgacgacgacgacaggctgatccctgaggtgccgcacgggagcatgcataggaataggatgggtcagagacagactaccggtgctgctagtggtagtagggcaggacgacgtacgaataacatggtgatggcctctcttcctccactccgatgcgatgcgagtgtgcgacgcaggggaggggagaagagtttttgaaggatgtgaccagttgctgttgtagttgttgtcaagtacgtagtaatgaaacgagaattgctgcgtggcaattcaggcctgttttttctttttgcatcaaggaaaaataagtgctggtacagatgagattattttaactagaaccaagttacttgccagtaaaataagaagcttccatataaacttgaaacaaaagaaaaaggagacacgattctcagttcaacctttatggattctggtttcttgtcgtcttcttttcttaatgcaaacttgtaacaagtatgttttgttag

SEQ ID NO: 75764 - DNA, 469 bp, Zea mays
  unsure (1)..(469): unsure at all n locations
  Clone ID: MRT4577_169124C.1
gggacccaaaaaaaaatcccccgccccgattttacgggggacaaaaaaagaacaaggggggaaaaggaaagcatggggggggggaaacaacaacggaaaccgccctaatttttttcaaaaacccgggggcaaggggggggaaaaaaaaacccttacaacaacgggggggggaaaccacccaattctttagaacagacccccctaacacggtggggggggcaaccctcgggagaacacgggataaggggagcacacgggcctggggggggggaaaaagaaaacttttttaggactgggaaccctgggggccatccccgcccttatggaactcagcaccggccccctgggaggccttttggggcgccgccggggccccacgggcccaaaaaaaataacctttcttcaaacccttaccggggtaccagggcacaaaggcccccttggggtacaagagggcngaacctggggg

SEQ ID NO: 75765 - DNA, 1174 bp, Zea mays
  unsure (1)..(1174): unsure at all n locations
  Clone ID: MRT4577_169125C.1
ggccggccgggaagaatccagcaagccaacaaggcaacaacaaacacctccctccttcttcacttccctgccgttgttgcaggaagcaagcgaggtgttcttcccggacgacccgctgcaccagttcaagaaccagtcgtcggcgcggcgcctcgtgctggcgctgcactacttcttccccatcttccagtgggggtccgcctacagcccgcgcctcctgcgctccgacctcgtcgccggcctcaccattgccagcctcgccatcccgcagggaatcagctacgccaagctcgccaacctgccgccaatcgttggcctatattccagcttcgtgccgccgctcatctacgcgctgctggggagctcgcgggacctggcggtggggccggtgtccatcgcgtcgctggtgatggggccatgctccgggacgccgtgtcgccggacgagcagccgcccctctacctgcagctggccttcaccgccaccttncttcgccggcgtcttccaggcgtccctgggattcctcaggctgggcttcatcgtggacttcctgtccaaggcgacgctgacgggcttcatgggcggcgccgccgtcatcgtgtcgctgcagcagctcattcggctgctcggcatctcccacttcacctcccacatgggattcctcgacgtcatgcgctccgtcgtcaaccgccacgacgagtggaagtggcagacgatcgtcatgggctccgccttcctcgccatcctcctcctcacgcgccaaatcagcgccaggaacccaaagcttttctgggtatcagcaggtgctcccctggcgtcggtgatcatctccaccatcctctccttcatctggaaatcccccagcatcagtgttgtaagcatcttcagttccattgagacctcaccaatcattattcgtcagttcatctctgtaaaaaaacttttgtgtgctgtgtaaacacagattggcatcctccccaggggagtgaaccctccttcggcgaacatgctcagcttcagcggctcctatgtggcgctgacgatcaaagccgggatcatgacaggcatcctgtccttaacagaaggatcgcagtgggcaggactttgcgtccataacaattaccagtggacggcacaggagatgatggcgatcggctgatgaacatgcggctct

SEQ ID NO: 75766 - DNA, 197 bp, Zea mays
  Clone ID: MRT4577_169126C.1
ctttttctttatgttctgttttggctaaatcacacaactttattattgatcaaataaaattatttaataatgcgaaacaacaccagggccttcctgctgaagaccatcctgtttcggaactaccaagctcccggggccggtcgcacgcctggccagtgctatgtcgcctgtaggctccggaaccgccgtgagaagtc

SEQ ID NO: 75767 - DNA, 788 bp, Zea mays
  Clone ID: MRT4577_169127C.1
tgggtacctcgaggccggccgggaagatccagcgagccaacaaggcaacaacaaacacctccctccttcttcacttccctgccgttgttgcaggaagcaagcgagggcacacaaaccgacaaggccgcccacgcgcgcgtcggccgccgccgttgccgaccagcaggcaccagttcaagaaccagtcgtcggcgcggcgcctcgtgctggcgctgcactacttcttccccatcttccagtgggggtccgcctacagcccgcgcctcctgcgctccgacctcgtcgccggcctcaccattgccagcctcgccatcccgcagggaatcagctacgccaagctcgccaacctgccgccaatcgttggcctatattccagcttcgtgccgccgctcatctacgcgctgctggggagctcgcgggacctggcggtggggccggtgtccatcgcgtcgctggtgatggggtccatgctccgggacgccgtgtcgccggacgagcagccgctcctctacctgcagctggccttcaccgccaccttcttcgccggcgtcttccaggcgtccctgggattcctcaggctgggcttcatcgtggacttcctgtccaaggcgacgctgacgggcttcatgggcggcgccgccgtcatcgtgtcgctgcagcagctcaagggcctgctcggcatctcccacttcacctcccacatgggattcctcgacgtcatgcgctccgtcgtcaaccgccacgacgagtgggagtggcagacgatcgtcatgggctccgccttcctc

SEQ ID NO: 75768 - DNA, 379 bp, Zea mays
  Clone ID: MRT4577_169128C.1
ataccatttatttactctactgcgcagagcaacccaaccgacaccatacggtgggggctcggttccttgcctttcctggcttgggtttcgagcgcaacctcaactcatacaatacaagggtggggttggcatccaccccacccggttcatttaatgtaccgggtgcatttcatacgtcaggttcacttgacatgtcaggtgcatttcatatcgcaggtccagctgacgtggcgggtccagttgacatggcaggtccatgtgatgtgcccggttcatttgatgtggcgaccatgccattacactactctactgaaccggcctgagcttaatcctaagccaaaccaatgccattgccaacagaacaatccaatccaatccc

SEQ ID NO: 75769 - DNA, 639 bp, Zea mays
  unsure (1)..(639): unsure at all n locations
  Clone ID: MRT4577_169129C.1
cattgggtccctcgaggccggccgggcgcggcgttcgacaccagcggtctagacgcgctgtccgagctcaagaaagtcctggacaaaagaaacatcgagctggtgcttgccaacccggtggggtcggtggcggagaggatgttcaactcggcggtgggcgagagcttcgggtcgggccgcctcttcttcagcgtagcggaggccgtcgcggcgggggcgtgcaaagcggcgcagccctgacgacgacgacaggctgatccctgaggtgccgcacgggagcatgcataggaataggatgggtcagagacagactaccggtgctgctagtggtagtagggcaggacgacgtacgaataacatggtgatggcctctcttcctccactccgatgcgatgcgagtgtgcgacgcaggggaggggagaagagtttttgaaggatgtgaccagttgctgttgtagttgttgtcaagtacgtagtaatgaaacgagaattgctgcgtggcaattcaggcctgttttttctttttgcatcaaggaaaaaaaaaaaaaaaaaaaaaaaaaaaaaaaaaaaaaaaaaaaaaaaaaaaaaaaaaaaaaannnnnaaanaaaaaaaggaaaaaaaaaaaaaaaaagggggcc

SEQ ID NO: 75770 - DNA, 1408 bp, Zea mays
  Clone ID: MRT4577_16912C.1
ctcgagtctagttatgaacagcatgacaaggaagggcacgctcacatgaatgaggaactatctggttggaagcttgtcgtcggagatgtattcagagagccatcttgctccaagctgttatgcataatgattggtgatggggttcagattttgggtatggcagtcgtaacaatcgtttttgccacacttgggttcatgtctccagcctcaagaggaatgctccttactgggatgattgttctatatcttttccttggtattgcaagtgggtatgtcagtgttcggttctggaggactattaagggcacatccgaaggatggagatcagtgtcctggttgactgcttgctttttccctggtgtcatgtttacggtccttactgtcctaaactttgtgttgtggaaaagtgagagcactggggctttacctatctcactatttttcaccctcctggctctatggttctgcatttctgtgccattgacgcttgttggtggttttcttggtacaagagcggagaaaatagaattcccggttcggaccaatcagatccccagagagatcccagcaaggaagtatccatcgtggcttcttgtccttggtgcaggaacactgccatttggtaccctgtttattgagctcttcttcattctatcgagcatatggcttggaaggttctactatgtgtttggtttcctgctgattgtcctgctgctgcttgttgctgtctgtgccgaggtgtccgttgtactaacatacatgaacctctgtgtggaggactggaggtggtggtggaaggctttcttcgcctctggttctgtcgctgtctacgtgtttctctactccatcaactacttggtctttgacctcagaagcctgagcgggcctgtctctgcaatgctttatgttggctactcattcctcatggcatttgcaatcatgctgacaaccggaaccattggttttttgacatcattcgcctttgtgcactacctcttctcatccgtaaagattgattgatgtattccacagtctgcagacagattcgttcacagctgtgcgtacctgtgttcacagctgtgcgtacctgtgataggcgtagtttacgagatgaggtggttttgggtaaactagtgacgtgtttagttccaagtaggagtgcagtatctgtttccagttccaattggtcagagttgtaagtgctccatctgatctagatactacagcctggctttgttagagtttaggagcaatggtactactgtgtttgttcggcaaagtgtattggagtggaaatggcgtgcttgttacaggctttggtaagttatattattgagaattgcaaagtgtatctgttatctttcttcagactgacatggtcacttaatgttaaattgctatttttgct

SEQ ID NO: 75771 - DNA, 165 bp, Zea mays
  Clone ID: MRT4577_169130C.1
ctcacaccgccggcacgcgaacgagcaggggggggcatttttagaacctgtgcggctataacccccccgaggaagggccactgcaagaaccagccgaaggggagcacccaggagccgaagaagaaggacaaccggaggaacgccgagcagcggagccacagcgcg

SEQ ID NO: 75772 - DNA, 1285 bp, Zea mays
  Clone ID: MRT4577_169131C.1
acccgggagcagacagtgacaggcgaaccaagacacgcagggacagggagacatggggcgagggcgagcgccgtgctgcgccaaggtggggctcaacaggggctcctggacgccgcaggaggacatgcgcctcatcgcctacatccagaagcacggccacaccaactggcgcgcgctgcccaagcaagcaggtttgctgcgctgtgggaagagctgcaggctgcgctggatcaactacctgcggccggacctcaagcgcggcaacttcaccgacgaggaggaggaggccatcataaggctgcacgggttgctcgggaataaatggtctaagatcgctgcctgcctgccggggaggacggacaacgagatcaagaacgtgtggaacacgcacctgaagaagaaggtggcgcagcgggagaagaagaaggccggcgcggggagcggcgacgccggcacgcccgccactgcgcccttgtcctcggcgacctcctcgacgacgacccacaacagctccgggggcagcgactccggcgaccagtgcggcacgagcagggagcctgacgcgaccgacgtgtgccccctccagctagaggacatggacgtctcggacatgctggtggacggcgcgcccccggcggcgcagccaatgccgtcgccgtcctcctcgtcctccctgacgacgtgcgtcggcggcgtggaggagctgatcgagctgccggtgatcgacatcgagccggaaatctggagcatcatcgacggcgagagcgctgtggcgcgccatggtggcgatgcagccgcgccatgtacgggcaccggcaccgccgtcagcaccagcgaagcagaggaagcggcggcgaacgattggtggctggagaatttggagaaggagctgggcctgtggggctacgcggaggaggatactcaggcccaccctgacctactggaccactacacaggtttgagcccactctgcgccctggagggggacccagtctccacctacttccagaccgggcccgccgccgcggaacctgagctcctggtggtcgtcgaaccatctgccgttctgctatgactatgagcaacatgacggacggtcacagcaacgaacatcctggttcttggagatgttcggtggatcaaattcgagtagtttgtttgatgcagtggcagattaatatctctacaggccaattagaatgcacattcagaacagaaccgtccaaagaaagcctgtagagtgaaggctagtactctcttattcttaacagtgtttaacgcagat

SEQ ID NO: 75773 - DNA, 354 bp, Zea mays
  Clone ID: MRT4577_169132C.1
ccctcgcctacattgatgcattggccaaatctctgcataccttggagacctgaatgcggttgagtgagacaaaccagacgtggacggaatatggcacttgatattctcaaggtccacctcaagaccaccgcacacatccctatatgcggctctctaacttgcgatggtcattatgtccttgtgaatcaattccacggttggcccatcaatgatcattaccgatacatctattgtactcaaatgtatgcgtatgagaacttgataacctcttcgtttgacaatctgttccaggtcggtatatcgtaacccgaggatctgtggattacatctaaactctggaatacttgatcatgc

SEQ ID NO: 75774 - DNA, 1700 bp, Zea mays
  Clone ID: MRT4577_169133C.1
ctcgaggccggccgggccgggaaaccctagtctcagagcagccgcatccacaacctgcctctctcgtcccctggcggcgtccgcggcaggatggcggaatctacggcgaggacggtgaaggatgtcaacccgcacgagttcgtcaaggcctactccgcccacctcaagcgctccggcaagatggagctccctgagtgggttgacattgtgaagactgcgaggttcaaggagcttcctccttatgatcctgactggtactacattagggttgtatctattgctaggatcatatacctaggggaatcgaggccggccgggccgggctcgaggggcctccctcaaagagcgttgaatcggaaattttatgcccatcgaacgcgcaactagaagccaattacaagtataactccattcccctccgtcctccggcagcaactcgaaccgaagggacgaccgagcggagtctagactcgagagcaacctcgacctcccggatctctctcccacccacgcctcgtcggcgccgtcgtctgctgcagcgatggcctcccccgacctgctcttcaatctgcggaacctcttctacctgggcgcctaccaggcagccatcaacaacagcgacgtcccgggcctcgacgccgacgccgccgctgagcgcgacgccatcgtcttccgctcctacatcgccctcggctcctaccagctggtgatcagcgagatcgactcgtcagccgctacctcgctgcaggccgtgaagctgctcgcgctgtacctcactggagacaaggaaggtgctatctccagtctcaaggaatggttgagtgattcagcaattggaagcaatcctgttctgcgattgattgctggaattatatttatgcatgagcaggactacaatgaggctctcaagcacacacactctggaggaactctggatttgcatgcattgaatgtccagatcttcatcaagatgcatcgttcagactatgctgagaagcaattgaagatcatgcaacaaattgatgaagaccatacacttacacaacttgcaaacgcatggctgggcattgctgttggcggctctaagatccgtgaagcttatctcatattccaagactttgctgaaaagtacccaatgacagggatggttttaaacgggaaggcagtctgctgtatgcacatgggaagctttgaggaggctgagactctgttgcttgaagcgttgaacaaggacgcaaaagatcctgaaactcttgcgaatctaattgtatgtaatctccacttaggcaaaccatcatcacgatacctcagccagctgaagctatcgcatcctgaccatgtgctagttaagaatgcggcagcatcagaagcgaccttcgagagggccctccaagccgttgcttgagctcgacacaccccacccagccagattgcaggaatcagcacattctggtctcttctccaattacgagtgtattaacccagagtatggtggttttggttgcctgtatcgtcgctgttaatgcgactccgccagtcttgtactacaaactgctgtataaacggatatgtcgaatattgaatccttacatctgttgccaataccagtattttgttaaaaaaaaaaaaaaaaaaaaaaaaaaaaaaaaaaaaaaaaaaaaaaaaaaaaaaaaaaaaaaaaaaaaaaaaaaaaaaaaaaa

SEQ ID NO: 75775 - DNA, 894 bp, Zea mays
  Clone ID: MRT4577_169134C.1
ccggccgggataaatccttcttgacctccgccctgctacaactacagtctgttctgttgaaatggaacagggcgatcctactcccgccgcctctgcctgcaactgcgaccctgccgccgcaccacccgcgtggatcccgctccacgaccacgacgacacggcccacagcgacgacacgcttctacagcagctcgacgcaattctcctcggcatggacgacgacgacgttgccaccgccgacgaccgctgctgctccggctggctctcctcctcgccctcgccctcgccctcgtcctcctccgaggcgacgacaacggcgtcaccaccgccaagcacgcgggagcagcacaggcggcacccggcgaaagacgacaccgccttggcgggaggaggcgacgagaagcgggcggtgacgacggcggccttcatcggggtgcggaagcggccgtggggtaagttcgcggccgagatccgcgactcgacgcgcaagggcgcccgcgtgtggctcggcaccttcgacacccccgaggccgccgcgctggcctacgaccaggccgccctggccgcgcgcggcgccgccgccgtgctcaacttccccgtggagcgcgtggtggagtcgctgggcgcgctcgcgctcgccggcgccggctcccccgtcctcgcgctgaagcgccggcactccaagcgcacgcgcaggcgcaagccctccgccgtggcgacgaccgacggcgacggcaaagacacgatgatgaagcagccgcgacggcgacagcctgctgcggcgccgcgccaatgctctgggctgcccggcgccgtgccttcgtacaccaccgtggcggcggtgccgccgccaccgcagcagcatgcgacggcgcgcggccagagccacacgcg

SEQ ID NO: 75776 - DNA, 408 bp, Zea mays
  Clone ID: MRT4577_169135C.1
cgagtcaaccagttaatgccttggcattcatctttgatggcctccattatggcgtctcagattttgactatgtcgctcaagctacgatcgtggttggggtgatatcatcgttggtcttgttatatgctccacgtgtctttggcctggccggagtttgggctggtttgacaacactcatgggattgcgcatggccgcaggcatcctgaggttgctatggaaatcaggaccttggtcctttttgcacgaggaaccagaaaccaagttgcaggcgcagccacttgcatcataagaattcatgtcgagccagcgcagggagagctgcatgggcagatgcagttgaggaatgaagaagcacaagctaaaccaacaagctgctaagctaagaggattgtcacttttgtgtgtgt

SEQ ID NO: 75777 - DNA, 372 bp, Zea mays
  Clone ID: MRT4577_169136C.1
tgaattcccggctcgacccactcgtccgaaaaaaaaaaaaaaaaaaaaaaaaaaatataaaaaaaaaaaaaaaaaaaaaaaaaagaaagattattataaaaatccaaacttacaaaacacatacatacaacaaaataaactcttctatattttcaccctacatacaattcactcccctcctttttacaacttcattacttttaaaaccctctcattccccaacttaatctcctttcaccacattcccctttctccaaatccctaatacccaaaattcccccacctatcgccctttccaacatttccccattctaaatatccaataaaaccccccctgtatcgcctcattaacctcttccactattttaattc

SEQ ID NO: 75778 - DNA, 249 bp, Zea mays
  Clone ID: MRT4577_169137C.1
ccggccgggtttgctttgttccgcgataggattactagtggtgatttgtgtcattgtgtgtactctctacacaaactgaagataccataccctctagtctctacacaaactgaagataccatggtctctacataaacccttccagatggccaggatgccacatgctgtgttctgctttccgtgcagaaacaatggcacttgttgctgctcacctactgctaaacacgtgtctatctggttctgagcttt

SEQ ID NO: 75779 - DNA, 362 bp, Zea mays
  Clone ID: MRT4577_169138C.1
gcggccgaggagatgcgaaaggacccgaccctggctgtcctacaacaccggatcgaagccatcgttgaggggccaagaacgacagggaactcatcgacgattacgacgatatcatccgaaagatggacgacggcctcgcctaggccaaggacgaccactagctctacaacgcctacacaatctacaccgaggtactagagtcaaatatcataatgattcgatagacgccatagtcacgcggctacgacttgcataacatgcacacgatggacgcgatgcgcaacgccatcgatggcatgaacggtaaggagctcgacggtcgcaacatcaccgttaacgaggcccagttccgcagaggacgt

SEQ ID NO: 75780 - DNA, 219 bp, Zea mays
  Clone ID: MRT4577_169139C.1
tttaagcgtacctgcttatgtatgtgtagggagtgatctactgggtgtttgtatggagaggaaaatgctaagcatttacatgatgtaactgcatgcatgtcgctttaactcagttcggactcattattgttgcgatatcaggcgagcgtattaactacatttaactcaaatagagttagggcaggagttgaataatgcagcttaaggacaggggaggac

SEQ ID NO: 75781 - DNA, 207 bp, Zea mays
  Clone ID: MRT4577_16913C.1
ggttggttaattataatgactgaaaaaaaggaatttgttgggtttgacacgggggcctgaagaaaaccgctcaggaaaccaacacgggtggccaaaaccactacccccaaaggaaaccaaccccaagtctaaaaaccgaaagagctaaaggtgtactgaaatcagaaggtaaaaccgcccatcttggcagttagagaaaagcacccc

SEQ ID NO: 75782 - DNA, 336 bp, Zea mays
  Clone ID: MRT4577_169140C.1
ccagatgggaagacccccatttatgattctttccaaataataaaggcttgaggtcccacaaatcagaagtcttaccatttttgtttgaaacacccgagggcaggcagggggggtaaaagggagaaattttaccaatctggttacaagcatttacttgtgtaagagaagcggggaaaaaccccacaaaatccttgaactgttaaaaattgaactttgccgcgggttttctttgggcctccttgcgccctatttaagcaatcgggggtctgggtttatcatctgaactggaacaactcccatgacgggcattacagaggcggcattccaggaacattt

SEQ ID NO: 75783 - DNA, 214 bp, Zea mays
  Clone ID: MRT4577_169141C.1
ctcacatcatgaagagtttcaagtctgaatttaaactctcatgagtgcaaggtcagcagcaaattaaactagtggcacctgtgtaacttattgctgtcttcttctctgccagcagccatgtggagatccatatccataattttatcagtttgatatttgtgtgctgtgaaatacttgtaccatctttcttagaacatactacctccgttctcga

SEQ ID NO: 75784 - DNA, 359 bp, Zea mays
  Clone ID: MRT4577_169142C.1
caacaagcaacatacaaagtggactccagtgccaccaatggagcaacaatggcgaccatgatattgctcctcgttatgctcgttggtcttgctgcatgtgctgctaacgcgacaagcttacatgaatgcttacatgctcctattgcttccctccttccatcataccttgcatcaatgatagcataagcatgtgaaaacccatctatgcaaccctataggctccaacaagcaatcatagcatgcaacatacctttatcacccttgtttgaacaatcgccagccctatctttggtgcagacattggtacaaaccatcagggcacagcatctgctgcaactggtgctacctgtgatcaacca

SEQ ID NO: 75785 - DNA, 248 bp, Zea mays
  Clone ID: MRT4577_169143C.1
aattcccgttctactccacgcgtccgattcgaaatagctcaggctgactttcacctcgactactactagcaccgaactttgcgcgggaatggacccccctctgcaggaccgctaccagacacacttgacggatcacatatggactctgggaaccaacaggcggtgctgtaccgtcagctactattcttgatcccctctgagccctcttcttcatctcatgcttaaatatgcacacatgcttccgtaac

SEQ ID NO: 75786 - DNA, 746 bp, Zea mays
  Clone ID: MRT4577_169144C.1
gtaatgtgcgagatgtgaggaattccatatttgtgtggcgaggcaagccgtgcgacaagtgccagatgtacgatgaaatgattgaatcggagagcgtcaccgtttgtgtggattatcaagtcaggcaaataacggagtactatgtctgatcgctaaatcggctgtggtgcatatgtgttgctctatagcgacgttagggaagggttcctctctttttcctttgtatgatagtatgttgctcatgatgtagtgtgaaaagatatatcctatttgtgtggtggaacaaataatgcgtagaatactgattggaatgccttgctataaggtgctttatttgtcagaatcccaatttaattatgatggtatagttatgctagagagtataaattaggtacattctagttgtattgacatgataaagcttagattgaagtgtagtgtatgtatcaggtgttctagtggatgtataagtctagcgttagtaaattggtttgtgttatgtgaatgaaactattttcatgagtgtcttagaatctacatatgttggggttagttctacgctttagtggtcatagtacttatatatgcgtagtgtcattagagtagttcttcatttgcaatatgaaccttaggacgaagatgcaactcatacgaagtaattgtgtgcatggttatgaagtatactaatctatctatgtgattaactaggtggttttagctctaatttaggatgatgtgtcagaata

SEQ ID NO: 75787 - DNA, 260 bp, Zea mays
  unsure (1)..(260): unsure at all n locations
  Clone ID: MRT4577_169145C.1
tttctttcgcatcgtgtgctcaatcaaatcgcccgcccaaatttaataaggcccgcttggntaacatttaaaaccattacttcttcttcaacttcttgtgtgcaaattgtggcttcacccccttgcatttcggcctttttttttattcttaccgcaccggtaacaacttctaagacttattgcatgcttaataccacttctacatttcccaaaattctcttcttctgtcctctaaagattaagcccaaatttttttcttt

SEQ ID NO: 75788 - DNA, 337 bp, Zea mays
  Clone ID: MRT4577_169146C.1
atttggttcgagccattgttatacccccctttgttcaacacccgaaccgaatcaacaagatggggggatctttattcccctagaggggctgaacaaccggcgacgacaacatcgacaccgcccaagcgacatgtgacctggtgcacgagcagcttgcaggagcagcccctgccagctgccaaaggcagacgctatgccgatccccgggaactaccccaggccaaaaatagccgcacatgaccatcacaacgacgcaaatgacaaagcacacgaacacaggttttcgtaaggtccctcatctgaacaacacgtacgcggtccggatggccgcggctac

SEQ ID NO: 75789 - DNA, 285 bp, Zea mays
  Clone ID: MRT4577_169147C.1
gtcgattctaatatcgcggtcaaaaggtggggtctcttgaaagatgaggccggcatatcatattcggtggaccacatctagacgcccacgacacaaattgatgtaacagatgatgacatgccacctcttgtccggcagaattatgccattgacctttctacaccaaagataggactaacagggtgatccttagcgctacatgtcccttgtagcacatactttttttccgaaaaagctgggcataactcatgtacatacgctagcaccttgggatctctggtaagg

SEQ ID NO: 75790 - DNA, 365 bp, Zea mays
  Clone ID: MRT4577_169148C.1
ttctttaattattagcagtttattttaaatcctctcctgccgggcagctcgatctgtggcaagatccggtgcggaaatctttgcatgcacgcaagtggtcacgcgtgtcatgttacttcccgcctggccactgatgctatcctagctagttgctcctacacacatactacagctatcaagcacctatcggcttccacagctttcttcggttgccactgtttttctttctttttttttcagtttttataactacaactttgccacgatcgcatcacatcatgtgcggcggcggtgcgaggcgtctacaccagcagccagctaacgggctcgattgattggattggctcttaacaaacacttttttt

SEQ ID NO: 75791 - DNA, 363 bp, Zea mays
  Clone ID: MRT4577_169149C.1
gttatgagcgaaataatccataatgtatcctacatgctttattactttgaaggaactcggggttccagatgcttttatctcatcagtgactgctggggtaataccatcttgtaaagcccttatctgtgttcctaatggcctgggtgcaatatgcctcaataatcaaggacttgaggctgtcagggaaacttcagcactgcgatttcttgtagataccttcactagcatgaaatacttgataccaatgaatgagggtgtggtccttctagctaatgcagtggaagagcttcttcgtcatgtgcaatccctgagaagtattgatgttgacatcattattgaaataatcaatagactaagttcgtc

SEQ ID NO: 75792 - DNA, 534 bp, Zea mays
  Clone ID: MRT4577_16914C.1
aggtggtggtggaaggctttcttcgcctctggttctgtcgctgtctacgtgttcctctactccatcaactacttggtctttgacctcagaagcctgagcgggcctgtctctgcaatgctttatgttggctactcattcctcatggcatttgcaatcatgctgacaaccggaaccattggctttttgacatcattcgcctttgtgcactacctcttctcatccgtaaagattgattgatgtattccacagtctacagattcgttcacagctgtgcgtacctgtgatgggcgtagtttatgagatgaggtggttttgggtaaactagtgacgtgtttagttccaagtaggagtgcagtatctgtttccagttccaactggtcagagttgtaagtgctccatctgatctagatactacagcctggctttgttagagtttaggagcaatggtactactgtgtttgtttggcaaattgtattggagtggaaatggcgtgcttgttacaggctttggtaagttatattattgagaattgc

SEQ ID NO: 75793 - DNA, 282 bp, Zea mays
  unsure (1)..(282): unsure at all n locations
  Clone ID: MRT4577_169150C.1
gggggcgcncggttttaggggacccaagtttccttccccgtgcttccaacgtcatttcttttttttggggcccccaaaatccatttctgggcccgcctttttccaccccagtttttgggaatcccttgccttccccctttttaatcgttttgaaaaacatccccttttccccagttgggttattaccaaagaggcccccccctatctcctttccaaacagttccctatcctgattgataaagggccccccccttgtagggtccctttaaccgcgccggttgt

SEQ ID NO: 75794 - DNA, 213 bp, Zea mays
  unsure (1)..(213): unsure at all n locations
  Clone ID: MRT4577_169151C.1
tttatactttttttttttttttttttttctctttaagggtnttttaagaccgttaaggatttatccctcatcagaaaccggcccccgggcccaaaacgcgcccataccccaaaggcacacacacccacttatatggaagaacaagaagcccccccggcttaaagctggcacccgcaccccaaaaaatatggtcaagtccacctcaaccacaaa

SEQ ID NO: 75795 - DNA, 412 bp, Zea mays
  unsure (1)..(412): unsure at all n locations
  Clone ID: MRT4577_169152C.1
agggccaccanccccaaaacccgnaaaaaaaccggggagggcaagaggagncgacggggaaggaanaaaagaaggggaagagcacgcgccgccgccagcaccgcgnccgccanggccgccnccacccgccgcgcgacncaanngcaggggnccgcggccacccgccaccaccacgggcggggcaacgccgggggggggggcgcggcgcccacgccggcggacnacgccgacaagagcacccgagagaacngccagggcaacacggggaagaacggcaccnaacacaccgagcaggccaacgagnacggcaccaacagggnagggggagagacaaccaagaaaggaggaacggaacacgnagggccgccagggnacaacncagcagcacaagcaaaggcagaaacaaaagcca

SEQ ID NO: 75796 - DNA, 365 bp, Zea mays
  Clone ID: MRT4577_169153C.1
cgctgcaccggcgcttcacacacacacaccttccgataccaccagaggaagactaccacgaggggggcgacagcgctgaggaggggaaggcgaagcccccgaccggcggacgccgacacggacgcggcgtccaaaagcacggcccaaggagaagctcgaggaggcagacacggacacagacgccggcgccaaccaccaccaccaccaccacggacaccacggaggccacggcgccagggagcgcgagaccagggccgaggaggacatcaacaccaccaccggcgaggtccacgagcgcacggagagcatccacaccagggctaacggacccacccggccgacaggaaccacacccggacggaccg

SEQ ID NO: 75797 - DNA, 622 bp, Zea mays
  Clone ID: MRT4577_169154C.1
ttgggtacccgggctctccccctcgagttttttccccccccccccccccccccccccccccccctccctccccctccttctttttttttttggacaaaggcctttaacttttttaaagggggtccttgtttttttaaaaattttttgggggccggaaaatttccccctaaaaaagccaaaattttgttaaaaaaaggttcattatttaaaaagggaaggagtaaaagggaaccggttggggatccccattaacaaatttgccccaaatttgggcccttttcgggggaccaaggcccaaacctccaatggcttggtggttttcgcaaaaaagattggggccacccccacctgggaaaaacataacatagggccattttgttgggaaaacaaacccggttaaacacccaaccaaaattcccccccacctttgcccttaaaattgattaccaccaccccctcagtttttgatttttttttgggccctaagggggtggttggaaccacctttttttttggggaatttgacacccttagggggcacccggccttaccttttgtaaaaaaggggtaaaacttggggccattgcccaaaaagagtttcctgatcccataggggccttta

SEQ ID NO: 75798 - DNA, 127 bp, Zea mays
  Clone ID: MRT4577_169155C.1
agccagaattgcgaaaggggcaataaagaactgtgaatgcttgcaggaaaacatgtgtgtggacatcgacatactggtagttgcatctaggctaactggtcaaactagatgttttgacgcaatgaac

SEQ ID NO: 75799 - DNA, 553 bp, Zea mays
  unsure (1)..(553): unsure at all n locations
  Clone ID: MRT4577_169156C.1
gtccgcgcagctgcagctccacccgccgccggcttccatcaccccgcgcatcgcgccccccggcaagaggtggcctatgaggcgtacacagcgccaaagccgccgccaccgcagcgatgggcaccgaccacatagggacagctgctcgacatggcccaccgcgcgctcctctagcctgtccggagcacagctgcctcgtgccctccttatatctcgccctgcgccgcctacagctgctacaggcgagctatccgccgccgcccggagcatgactccgagcccgagctaagggcgccccctccactccggcatnctgctacacgctcacccccagatgcggaagctgccggccggactctgacccttagggcccgagaactccggaagcaccagcggcgctgctccgactccgtcaggccttgggatcgcgaggtatgcctttcctcctcctgcggctacgacgtaaaggatgccatacgcagttcaagtgcactcctagctcggctatccagatcacgtgggatatggggggaagaactgaattcgcatcacc

SEQ ID NO: 75800 - DNA, 358 bp, Zea mays
  Clone ID: MRT4577_169157C.1
tagctgacactggggccctctccctgcgcacaccgcccctcttcacgcggcccgctccggaggagcacagaggccttcacggcggcctccccgcaggcacgcaccgccgcggccgttgccgccaggccgcttgccggggggcgccatggacgagaggctgtggggcaggacgcgatcgcttcagccagcaaatcacacgaggccgggaacattttttaaaacacccgcttccgaaacgtcggtcaacgaaacgagggccagcggcgcgacaccccagatctagaagacgagacctcacggccaggaagacactccgcacctcccgggcggcactacggcttcactgcagccgcccagg

SEQ ID NO: 75801 - DNA, 418 bp, Zea mays
  Clone ID: MRT4577_169158C.1
ccggccgggcacttcatcccagtcgctcaccgtacagctatctatacgctccatctgatcctaccacgtaaaattgattccttggtcaacgtcagaaagtgggagagttcccgactctacatatgatatgattgctggcgttggccagctagttacggacatcaaagaggctcttgagcttccactcagacatccgaaactatgtcagagacctggaactgcacatccacaggctcccctcctttatggacctccagggacaggaaggacattgctgtcacgggcgcttgctcatcacactgactgcaccgttgctccgggtgcatggtactgaattgcttcataattatagtggtgagaccttgccgtatataacgggaactctttattatggccagcatgcatgcgccatccatta

SEQ ID NO: 75802 - DNA, 520 bp, Zea mays
  Clone ID: MRT4577_169159C.1
gcccaaaagttctaaacgggccaggtgggctttttttttcttcagttcagttcacctttttccagcaggcaatcaaaaacaagcccgactttgaaaagccgcggtttgggcgggtccccccccacatttttttctacagggggggggggttttacaagcaagctcccggctccagttcaaagctcgatcgcttgagcttcagctcccatttccactggcggggcgacatttgaaaccaaaagacgggccctgcccccccagaccacaaaattcagggctaaccataaaccttccttgttttttatacaattggggggggggataccctctctagacagttagatttatatggatggccattctgaacctggctggtatcatcggaaacgtcacaaactcccggccatatggggcgagctctttccagtcttttcgttcaaactcttgccatcttcattggcaagggaatcatcttccggaagcatggggatacctatgccattgattggaaagcttcctg

SEQ ID NO: 75803 - DNA, 406 bp, Zea mays
  Clone ID: MRT4577_16915C.1
acacaatacatcctttaacttacaaccacatccatactcttttattttctgttggcttaggacattgtgttatccaactaaaatctacgagaacaatacaatatactgcagtgtataaaaatatcaacatgaccaaacttacaatcttttggatacataaaaaatcacaaaataattgctagactactggtctggcagatcttcgtacaatcagcaacagagatatgggcatatggatgctggcatgctgcaaatcaatgaatacagtagtcctcgaatactgcaaagcgaccttgtataccttattacaaatcaatgaatacacatgggccgtcagagtcagttgtgtagggtattccttctctgattgaccattcggccaaatttggtttttcttttcatgctc

SEQ ID NO: 75804 - DNA, 204 bp, Zea mays
  Clone ID: MRT4577_169160C.1
aggatcctccacagggggcgcccccccttttttttttcccaaaagcacagaaccccacacggggggaaatttgggggcaaccaccgcgagaaaacggcgaacagagagggaaactacggaccaaacactgccacgcctaaaaggggcccaacaagaggtacgaaaaaagggtacacaaaaaccccggagaaggggggaagccca

SEQ ID NO: 75805 - DNA, 300 bp, Zea mays
  Clone ID: MRT4577_169161C.1
acgcgtacgccgttgacgttcgcgccggccgacgcttccttttcgtccaagcgtcagcgtcggggctggactgagcgtgcgcgtcaccgacggcaagcgagggcaggcggtggtggcgatagcatccgctgatgcgcgcttggaggggatagcctgctccatacgcgttatccctgacttccccaaaccagggatcatgttgcaagacatgacgacgttgctggtcgataccaatgcgttccgagacaccatcgacctgtttatcgggcgggacaaggaccaaaggatcagcgcggttgc

SEQ ID NO: 75806 - DNA, 714 bp, Zea mays
  unsure (1)..(714): unsure at all n locations
  Clone ID: MRT4577_169162C.1
cgcacgcctgatgtcgacgcgccggtgtcccgtcggccgcctccataccgcgtgctgagacggctggcgctgccgtcatcagaggtggctgttccgtccaccgtggcgcggattggggaagacagctgcatggctgccggaccttcgccaggacagctcggaccggggacggcacgtgcatggcggctggcacttcgtcgttaatccctaaatggaaggagattgtgcctatttcaccaatttgttgactgaaggattgtatgaagatattgtagaagacaatactactgtcctagctgagttccagccgaccccaccctcatcgaagccaactcagaagcagaaaggaaaaatttctgcgaggatgaagataggctccttgtttcagcatggttgaatgtcagtacagatcctattcaagggacaaatcaaaccagagctacattctggagtagagtgtataagttctatgacacgaacaaaggagcatttgcggaacgtaatcaaaattcattgctgcatcgttggggttgtatccaggacgctgtgagcaaattctgtgggtgtctttccgagattgaagttagaaaccaaagtgggatgactatacatgatagggtaacccaatccaaactcacatattctgtttggtttaaagaccaaggctcttacaaccttgttcagntcagtattatggaaaatatggtggcttgc

SEQ ID NO: 75807 - DNA, 997 bp, Zea mays
  unsure (1)..(997): unsure at all n locations
  Clone ID: MRT4577_169163C.1
ccacagcaacagaaggcatatttcagcacttcgagtgtccaaggcatatactaacaagatgtacaaagttctgatgcatctttgtcctgtacacatgtcaaaactcaccggttagccaggcacacatctggacacagcagcaccggctacctatggctgttgcaggtttatttctgaacaaatagctacgacgacatattcatcaggggtgaagaacagagcattgtcccaaacaggtttgtggatgcagtccagatgtacaactatttacacagacatacaaaacttcacacttcaacagcgtttactttgttgcatttttgcgccctacccatattcgaaccgtgcggtcgtcgctagcagaagccagcatgtggggccttgcaggattccagcttacacagttcacaatcatcgtgtggccatgtagaaccttaatcggcatctccacgtgcctcttccaaatgtagacctgtgaatcctcactgccactagcaatgaacgaagagtttgaaccaccaaagcaagacctaatcacaaacttgtcttgcttgtgccccatgaacttttcaggcacagtacaactttcattaattttccacagatgaatctcctgactgttaaggttcacaatgagtgactgcccatcacctgagagagaaagagatgaaatcgtctgcttctcacgaaatctccattcccgcccccttggaagttccctaatccagatatcgttgcaagatacaaagattaggtgtcggccatcaggtgtcacagcgagatcactgacttttggtattctatctccagcccatattccagattttggccttctagatcacaagtgaagatcctatttggagcacttgcaggctccgagctggcacatactattttctccganattaggaaaccatgcacatgaactgatgatgcagtctgctgagcctctgaatttaaggttacatccaccccggccggcctcgaggtacccaat

SEQ ID NO: 75808 - DNA, 287 bp, Zea mays
  Clone ID: MRT4577_169164C.1
gagtagaaagaagcttcacaacttcagcttgcattcaaatgaatggcttgccaccttaggtccgcgactgttccttcgagccctccttgcacacaaaaccaacatctgtggagaactggctctcaagagaggacgcgacctgtctctgcaggccaaggctcagtcttacgctcagttggccaagataggcacagttagcacgttcaagaaggtcagcagcaaggctgcctctgaacattacaggttcgacatagtcatgctgttggctgaagcaaaggagattgctg

SEQ ID NO: 75809 - DNA, 243 bp, Zea mays
  Clone ID: MRT4577_169165C.1
tccgcttcagtgacgttttattttatgtaacaacctcacttatgaagaggcccttcatggcttgaggggcatgagggttttcaccactcactttttaaagatactttatgggcctcatatgaccagcctggacagcaacaatgcccttgtctaccttattatatgttgcaatgctaatattaccaacaaatcaactgaagttcactctctaattgattataacttttttgagcctatccactc

SEQ ID NO: 75810 - DNA, 252 bp, Zea mays
  Clone ID: MRT4577_169166C.1
aagtaaatttttttttttttttttttttttgggtttttttttggagacagttcggctttttcccttaatactcttaatactggactacactggactcatacagtaacagcactagctagctagtagcacataacaggggcataactctttttaaaataagcagcacctcacaccacggtgattttacaggaagatgatccctatacatacaccgttaacgcgttgaataacaataaccgtgaccagaagctt

SEQ ID NO: 75811 - DNA, 560 bp, Zea mays
  Clone ID: MRT4577_169167C.1
ccggccggggtcacctatacttctcctccgctccgccactgccgggagcgcctctcgatcgagatccagcagaatccctcgttatgatgatcgacgtggaaaatacactccttgtctggtgaccagattcggcccacttgcactcgatccctggacctagaatatcttttcagcaagtatggaagaataccctcccggtgcctcaatggagactatacattcatagaattcactgaccctccggagggtgatgatgtctaagaccacctagatgacagacctgtccatcgcaggcgtattattgatgaatttgctaaacgagatcttcgaggtgtctggtgcctcacgagagtacgtgctacaaaggacctctacccaaagcagagcaatgcctaaactgctacatggatgatacctgtcacaacgaattgcttggctggtgacgtggaccacaccatgttactgctgtgcacgcatagctgctcacatatacattgattgctctactcctacaagcaatctcaggcgtgagatgagatattctatttctccatccccac

SEQ ID NO: 75812 - DNA, 615 bp, Zea mays
  Clone ID: MRT4577_169168C.1
gtgtgtaatgtgcgagatgtgaggaattccatatttgtgtggcgaggcaagccgtgcgacaagtgccagatgtacgatgaaatgattgaatcggagagcgtcaccgtttgtgtggattatcaagtcaggcaaataacggtcacttggtcgtggaagggcttcttattgcagtcatagtgttccagctctccaggaagagttacaaaccaccaaagaagccactcactgaaaaggagattgatgagctatgtgatgagtgggagccattgtggttgttgttgcatgatgccgctggaccacatacgattgttgatggtaaagaagttgtgaactttgcatcagcaaactacctcagtttaattggcaacgaaaagattattgattcttgcatcagttcattggagaaatatggtgttggttcttgtggtccatgtggcttttatggaacaactgatgtccatcttgactgtgagtcaaagatagctaaatttttggggactccagactccattctttattcatatgggatttctacaatattcaatgtgatacctgccttctgtaagaaaggagatatcatagttcgctgatgagggtgttcactgggcaatgaaa

SEQ ID NO: 75813 - DNA, 298 bp, Zea mays
  Clone ID: MRT4577_169169C.1
tttatctctctcaccgtgatatcttgctcctaaaatatactactagaagccaattatttggtatcagaaatcctgaaaatatttatagatcgctagctccaaccgtacgtttttatactttgtttcttcctttcgtctgcaatctcaatcggttgctttaacctacttcttttcaccttcccacgtccttttcagccctgtcgtctctgaattaattcccggatcgtctatgtgcgccagatttgcacgcgattattagattgtttttttctctctcaagtgcggaatgactgatagt

SEQ ID NO: 75814 - DNA, 517 bp, Zea mays
  Clone ID: MRT4577_16916C.1
gtttatggaggaagtctggtactaatagtggagtcgcatcgtgttgttgtgatcatggaacttcagtttctagaatcttgaggccatgtgtctgtgatgcaaccttcctcagaagcttaacctgcacccatctcccgactttacattttcctcgaatcaccaggcgttgataattcagcagtgctgtaactgtagttcaacaatctcactgcattgaaacatgcttctgctggtattttatatgtaagtgttagtgggttgtttcaaagggagctgatttgttaggccgtggttcctccgcagacatggcatccaaaggaatgatgctctagagttacatttttgtagctgtattggatagagatgtttgtacaaaagctaactttattcttctgaccaagactggccacagacagggttgatatacctagtgggttactctaaagagccagcttctgtgtgcagtatgttggtctaatactgcaataagaccccccacactattgctgtgtttggg

SEQ ID NO: 75815 - DNA, 951 bp, Zea mays
  Clone ID: MRT4577_169170C.1
gtgcgagatgtgaggaattccatatttgtgtggcgaggcaagccgtgcgacaagtgccagatgtacgatgaaatgattgaatcggagagcgtcaccgtttgtgtggattatcaagtcaggcaaataacggtcacttggtcgtggaagggcttcttattgcagtcatagtgttccagctctccaggaagagttacaaaccaccaaagaagccactcactgaaaaggagattgatgagctatgtgatgagtgggagccattgtggttgttgttgcatgagtaatcctacatatcatttcatatatggattaaccggatgtgccgctggaccacatacgattgttgatggtaaagaagttgtgaactttgcatcagcaaactacctcagtttaattggcaacgaaaagattattgattcttgcatcagttcattggagaaatatggtgttggttcttgtggtccatgtggcttttatggaacaactgatgtccatcttgactgtgagtcaaagatagctaaatttttggggactccagactccattctttattcatatgggatttctacaatattcaatgtgatacctgccttctgtaagaaaggagatatcatagtcgctgatgagggtgttcactgggcagtgaaaatggtctccatctatcaagaagcactgtggtgtacttcaagcacaatgatatggcttcacttgcaagcactttggaaaaacttactcgtggaaataaacgtgctgaaaagattagacgctacattgttgtagaatccatttaccaggtgcagtgcttttgattgttttgtgttgatttgtgctgtctttttttatatgtccttatgaaagtttggaaaataaaatgtccatttaacctgagcaatttaggcaattcatgaaaaaaaaaaaaaaaaaaaaaaaaaaagaaaaaaaaaactcgagaaa

SEQ ID NO: 75816 - DNA, 948 bp, Zea mays
  Clone ID: MRT4577_169171C.1
tagcgccagccgaagacgaccgccgcccgggagccagcccactcaaacccatcggccatcggtctcctctctccctctttgtccaccgcgtcgtcgtctccctccccgcccctcgtatattaacagccccgtcgtgactacactgaccaccgcctcgaatccatcgcttcgctactcgaaccagactcatcggtgcgtactcccgcgtcccgcctggctccggggaccattcgtcgacccatctccggcgaaagcttacctctactaccactgaagcgaaggcgccacatcggaagaattgtagctgtttgtcctcctcttcccgacagcgcagagcggagatccgaccggacctgggatcgattccttccttttctcgattctgggcgctaacggttcctgagggaagctcctggggacatggacatggcattgcccgttgtgaatgccacagcggcggtgctcgcccgtgtctcggctgcgttcaatgccccacttgcccgtgcagtcgtcttcggggtccatatcgatgggcacttggtcgtggaagggcttcttattgcagtcatcgtgtttcagctctccaggaagagctacaaaccaccaaagaaaccactcagtgaaaaggagattgatgagctatgtgatgagtgggagccagagccgctatggcctccagtcaagggaggggcctcgaattgatactcccatgttggaaagcgctgctggaccacataccattgttgatggtaaagaagttgtgaactttgcatcagcaaactacctcggtttaattggcaatgagaagattattgattcttgcattggttcactggagaaatatgggtgttgggtcttgtggtccacgtggcttttatggaacaattgatgtccatcttgactgtgagtcaaaatagctaaattcctggggactccagactccattct

SEQ ID NO: 75817 - DNA, 111 bp, Zea mays
  Clone ID: MRT4577_169172C.1
ggttgctggtcacaaggacttccttgtatgaaatccttatctgaagcatcatctacgtacttctttaaaactacatcaccactcttaacttctgccaaccctacaccctta

SEQ ID NO: 75818 - DNA, 359 bp, Zea mays
  Clone ID: MRT4577_169173C.1
ggaatccttaaacaccaaacctatatcagaagttgctgtaccgtgggcggtttcctcaacctacaagtccactaaatagttccgcaagcgagcagcgcgaccacatgagctcgaaggccacatctggcgatcaatcagctggctggggcactgcggcgagagcgtataagctaaccttcccgctgcagaatgctagcatggacaaggccgcggacattttatcagcggcggatgcgcctgccaccaacatatctgcaccgagtctggcaaaaccatattgagatgcatgaaaacatgtgtgtatgcctctgtgtgaaggataagttgacaagcccacacggaagcactcaatacaaacc

SEQ ID NO: 75819 - DNA, 353 bp, Zea mays
  Clone ID: MRT4577_169174C.1
cccacgcgtccgcccacgcgttttccctctcgtccgcggacgcgtgggcgaacgcgtggtcggacgcgtcgtcggacgcgtgggaagaactgggtaatcatgaccgagtccctgagacgtactagatgataaatgtactacgtcgtatcatggccgtggaaggggccgtggggatcgtggtagttatagaggctgatactgagggggatacagtcgtggtctaactgctgctgctacattcattgaagatcaagctcagttaccaagcctcagtgggaagtgaaaggctcacaaatgatgatgtcacctatcgttgtgttgtctgctagttggtatttatttatatttaaatt

SEQ ID NO: 75820 - DNA, 521 bp, Zea mays
  Clone ID: MRT4577_169175C.1
aatacataccaatgagcattggtcaaggtctagcgaacacactcatgtgttgctaacattatataagaccctaaatcggatacacgagatgggatacatgttggaccattctaaatatccatagcaaagagctatgcttggcaaaggagcatccgaaatcctaaaacatgggcaaaacctggtaggctttcttggctagctgctctattgaactaccaataaccaacagttagctacttcttatatatgctggcctcggattgcattccaaacattttgaacatatacttaagtgactgcgacatagcctactgctgttcctgcataattttaatggactgcagggccttcctttctaccagccgcttctcattttccaggcaatgaatcatctgtatctgattctgcatgacctgcgccttcccttttcttcaggtactcattcttggtcatgacaaagaaaaaacatacctctcattgtgcaacccgtcatagcgcatcagtctacagttccatatact

SEQ ID NO: 75821 - DNA, 412 bp, Zea mays
  Clone ID: MRT4577_169176C.1
agcgccgagcctgccgagcgctgaaccgccgagcgccgcctgcgtgagcggcatcacgagcatcaacaacaccgcctgcggtggcaacaacgccgcgtcggctatggcgccgccaccggccaaacctgcactgcacgagccgccgcagctgcccaggagcgcagcgtcagcgaacaagacttcagagaagcggcagagagttccttccgcatacaaccgtttcatcaaagatgagatccagcgcatcaaggccagcaatcccgacatcactcacagggaagctttcagcgcggctgccaagaattgggcccatttcccacacatccatttcggcctcatgcccgatcagggtctgaagaagcaccccatgcaaactcaggagggagctgaatgcatgcttttcaaggacggg

SEQ ID NO: 75822 - DNA, 285 bp, Zea mays
  Clone ID: MRT4577_169177C.1
aacttccattccatagatgcgcaataactggatgagatagctaatcacaggaaattaacactggactcgattatgagtctctagctcagggaggaagcactagcactaaaccacactagctagtagctaacatcttggctacagttacttgttactacacagaagaagcagaatcctcctggagtcgcagctacgcacgagccgtggccgccggagctgacgaggcaatgacgccgtcgtcgaagttctgggagtagctgcgcaggtcgtaggcgaacctcgccg

SEQ ID NO: 75823 - DNA, 389 bp, Zea mays
  Clone ID: MRT4577_169178C.1
ctcttatttttttttttttagaacctttatatttttttttattcttcagttgtatgagtttttgtttttttttactccagagaaaccggaaaaaggcgaagaagggtgccggcggggcaagggagtcggacccagtacgaactaagagacgccgtccgtaaaaaacgggctgcaattccccgccggccgcaaaaaacgcgggctgaagaaggcccgccactcgcagcgcgtgggcactggcacccccgtataccgggacaacgccctgaaaaacctcgccctcggggaactggagtaggcaaggaacgcggccaaagaaaacaagaagacgcgcggggggccgcgccacaagcttctagcgatccgcaacgacgaggagcttgggaagc

SEQ ID NO: 75824 - DNA, 286 bp, Zea mays
  Clone ID: MRT4577_169179C.1
cccacgcgtccggggaccctctcagaaccaaatctttcccctttctcggggcttggggctcgggccgtaggggctcctgagtgtcatgaagtgcacaggagccaaatgaccgagccctggagagccccatggtgggtaggtggttcgtgctgtgctctggcaccatcagcctgttccagaaggaggattcgagcatcaggctaagaccctgtgtcctccaccatgcactcacccctagccctggttagctgacagtcagctgtggggaacacagctacaaccctac

SEQ ID NO: 75825 - DNA, 386 bp, Zea mays
  Clone ID: MRT4577_16917C.1
gtcctttttttttttttttttttttttttttttttaaaaaattcattaccattttcctcttttttttttttcaagctatttaaaaacattgtttgaggaccattttttcttttttatttaccgtgttccaccctatggaacacgtaccatttacacctataggcgggttgccaagccattggcaaggggctcatttacaaaggccttcccaccccaacaggccaagacctcgtgtccccccaaaaaaaacagctctatatctacctgcctgcaaaaagcgagttttataaaaaaccagaaagaggggtgcttgcaattgtcccccaaaaaacgaacacaaccagtgcgctccaccgggcaacataaaacaatttataggccaaaaa

SEQ ID NO: 75826 - DNA, 438 bp, Zea mays
  Clone ID: MRT4577_169180C.1
gcctaactgcagtgttatttcatgagcagtaaataaaatttgtgtcgaatagtatgtgatgtcgtatcactttcaagtgtcttgaatggactacataataggttctcctaagtcacatactcacattgtatacatttaccttacagagtcttacttatgttggtactaatcaaggatcttttatatgtaactccaacgccttgcctttgttggaggcaagggtatttcacatgtttcaaattgccatgctgaaggagctaacgaaaaccaactgtgttccacagatattagaacctttgagatccttcttcgcacgtatgaagtacgagacgttgctctgaagagcctcacctccgatgaggcttatgtggggcctcttccgcagaaaagaagaatgcccacaaccccaggtgaaaacacggactgcccacaaaggac

SEQ ID NO: 75827 - DNA, 456 bp, Zea mays
  Clone ID: MRT4577_169181C.1
ttcatagcacagggtgggcgtcaacgagtggggcgaggggcgaggcgtcaagacatgcatccgggaccacaagtctaaccccaacctaaagaacatcctgctggaaggcaatcttgaccggatcaagcaagccatcaacttggtgcgtgatttgatgggagccatcatcgcaagcatgccagcgagggggccatcttatgatgcggcgcctgctggaggaggcccaggaagaggtccagggggcactagcaggaactacaagacaaagctcagcgaaaacttgttgaagatatgctagaacttccaacacgactatgtatgagattttatctgttattatgactggatgagatgcgggttatggctttagatgagacttttgctgagacattgatgagactatagattaaactgttgatataagattgggtgtgagatgttttatgagaaaatatg

SEQ ID NO: 75828 - DNA, 869 bp, Zea mays
  unsure (1)..(869): unsure at all n locations
  Clone ID: MRT4577_169182C.1
ttgggaccctcgaggccggccgggaaacttcttctccggccgacattcaagctcaacaatcaacaatacaccagggtcgactaattgaacccactccattttgattccgataaagatagaatcgcgcatatgagtgctgcgcctacactctttacttcccaggattacatctcagaccacctgtggaaggcgtcagtgaactgaaagcctacccaacaaatcaccgaaccaaacacttctctatatcacatcctccatcatcatgatctctcaactattcaaaccctccacggtccggtccgcaggtctcctgggacgagtggcaaagtaccgcgtacaggcacgctacctggctactgtgcaatcaaataccgaacgtgttatgcctgctcctagtgcacgcagggccactgccgtctctaacgagcctgccacttttaccatcaagaacggtcccatcttcgagggcaagtcatttggtgctaaaaccaatatttccggtgaagccgtcttcacaacctctcttgtcggataccccgagtctatgaccgacccctcctaccgtggccagatccttgtcttcacccagccactgattggtaactacggtgtaccctcgagcgcccgtgacgagcatggcctgctccgatacttcgagtcaccatacatccaagcttctggcattgttgtccaggactatgccctgaagcacagccactggactgctgtcgagtcgcttggtgcatggtgtgctcgcgagggtgtccccgccatttctggtgttgacactcgtgaggttgtaacctacctcccgtgagcaggatcttctcttgctcgtatctccgntggtgaggagtacgatgctgatg

SEQ ID NO: 75829 - DNA, 245 bp, Zea mays
  Clone ID: MRT4577_169183C.1
cccacgcgtccggatggtcactaatttttacaagcattttaaaactcataaatattggatacattttaaattggaattgtatttaatcattgccttttgtgatcactccgataatcggtttatggcaacctattggaaccaaaaacaataaatcaactggttgaacagataactattactttgctattcatgaggactgtcatgcacgccataagggttgttgctgcatagatagagtttgtgat

SEQ ID NO: 75830 - DNA, 372 bp, Zea mays
  Clone ID: MRT4577_169184C.1
ttaatatcttgacggctccttatcaagtaaatcaacgagaatttggaggtgggcatttggattattctcaattacagagacttcaacctgcaaaagaagaaagacaaagagaagaatggccaaacggaatgaagaattttgcttcaatgagctacactggaggagataataatatgacaaaggctttcatcaacctgccaccgagatcaggtatttaccaccgatatcaatggtattgatgccaggaactcaatttgatccaaataataccataataaagccaatgttccaggtgattggaaatagctttgttccttaacagaataattatcctttctattaaaaccagaattcaaacaattctaataatta

SEQ ID NO: 75831 - DNA, 107 bp, Zea mays
  Clone ID: MRT4577_169185C.1
atcatctatgcccattgtgcttatcattctaaaatgacattgaatgttttctttttggaaacccacaagtagttatttatgcaactagccatttatatagttttatg

SEQ ID NO: 75832 - DNA, 353 bp, Zea mays
  Clone ID: MRT4577_169186C.1
cagggattaaagggaatgcaggccgggccagttaaaaatttgaaaccagttgaacacgaagcaaccacaggatttaggcaaaaaaaaaaacttatggttccagcatttttttttgccgagttgtttcgaaaacagcagggggaaacggtttgtttgatgcggaatggggggaggatcggaaccgtttggaaaccactccccccgttttggtcaggggtaaatactgggaggcccccgtcaggggcattaggtttgacgcgttaaacaattccataaacctttggtggggggtcctccccttccccgccggaaagggaaggttctttttaaacacggaggaaaggccccatttt

SEQ ID NO: 75833 - DNA, 326 bp, Zea mays
  Clone ID: MRT4577_169187C.1
aaccgaatatattattttataaaacaacaaatactaattaaataaagtcttgacttcaatctgtcagcataaaggaccagaagtgaattcacaattaataaataaacgggcaaacaaaacaggaacaaaagctggtactagcacgtcggatgaccatttgatcaaacatgtatgaagcgtcttccagcatttggcacagatcactattggcgggctatctgcgggcacacccgatgtgcattgctgcattggcccacctcattgcattgcgaggctactccacctggccgaagtaaaaaggcctgtacggaaacagtataggcctt

SEQ ID NO: 75834 - DNA, 518 bp, Zea mays
  unsure (1)..(518): unsure at all n locations
  Clone ID: MRT4577_169188C.1
caatcctnccaccccgtaccacgcctccccctacccccaccaccaacaagcatgatttccccccgccccgcgctctcccccagcttcctcgccttccggtccgactccccggccgagtagccgccgtcctccccgcgcctcaacgcgccgccgaacatatccgcctactataacaccgtcgccaagggggaagagagacacgcagctgccaggaccttatacaatgagactcgggctccgtaccggtgacagcgaacgagaaataaagggcgcggaccggcgacaggcgctcgcacgcaaccctgacgaaggcaagcacatgacatggaaagacgaggacttcaaccgtgtacacatactactacataacacactgcagaggcacaccagcgctctgagaactacaggatggcagtcctataaaactctggagtgcatggaagcatgtatggaggaagagttgcctgcatacacatcgcaaagcggacttcagataggaaatatagaccagtgtctgt

SEQ ID NO: 75835 - DNA, 510 bp, Zea mays
  Clone ID: MRT4577_169189C.1
ggccatacaaaaggggcaaaatttggatcgcctgtataatattgaatacctggtagaaataacacatttgagttcatttccaagaaaaaggcaaaaaaaaaaatcaagagtttgcaagggacagcttttttgttagttagggggggggggggcactaccatttgtaccagcagtacagtaacctaacacgggaaaacatcacgggaaaaaacaacggcatcgataggaatcttttccttttgaggggaaaaaaaatttttatggttttttgcatcgggcagcctggacaaatttataaacactgggcacaaacaaatctgtagcttcgggctgggggacttttcgctgaaactgatgaagctcctgggctgcccccctaaaacagggactttttatggttgctggaaagggcaatgtttgtgcacaaagacttgtcgttggcgttggcgctcccgctgccaaacgtgtcgctgctttccagggggctcttaactgatgggtaaggccccc

SEQ ID NO: 75836 - DNA, 629 bp, Zea mays
  unsure (1)..(629): unsure at all n locations
  Clone ID: MRT4577_16918C.1
tcggctcaggccggaccgtccgcaagcctcaatttggttccaaacaccatgataccaccaaatttggtgatggctcggaggtcacaattgaaggatccgacaccatactgttcgagggaaagatcggtgagcacctctcgctcatgagggtgcacttcatcctaaggctaaccactaacatcatccgcctcgactagctgcaacatccacaccaggcacgacatccttcggatccgtgatatgacaagggtcagcgtgtgaagattgggcggtcgctctgtgtgagtgcacgcatgaatgcgacaactacctctacatcgatgccctacacaagctcgaccagcagggcgtggtgcacgactgctccatgtctagcacgttcacgagctctgcggcaactgtgtcaccactgaggtaaagaagagctcgttatcgtcacaggtgaagtgatgggcgaaggggctgctggaccctgtgcgtctccatcacgtcagtgacacctgatagtaagccgtatctccttctgttggttgatgactggagcaagtancatgtgggtgacgttgctcgatgtcaagagcgacacattcgctgttgtcaaaaagtttcaggcaaaggtagaggtggag

SEQ ID NO: 75837 - DNA, 488 bp, Zea mays
  Clone ID: MRT4577_169190C.1
ggcccccaaactggtttttttttttaaaggggtggcccctcccaaattaacagagggttcccgggggggaaatggaacccggaaacccacggggggaaaactaatttttccaaaagctaatttagggggcggccccattttactacagggccctttccgtttttggacccaaaacccatccaacggcccccttaaaaacccatgtaaaccagggggttaaaggggctggaaaatcaaaagggaaaagggcgtccaacccccttattgttttctgaaaaaaggttttgccccggggggggggggccccttatcctggggggaaaaaaaaataggcctccggggtttcaaaagaatatgcccgggttttcggccacagtttcacaaaggcggcaaaaaaaaggcttcgacccaaaaattggatggcccccaggacctttttaaaacaagcaggggcggataaattcatttttaaaacccaaaccttaaag

SEQ ID NO: 75838 - DNA, 270 bp, Zea mays
  Clone ID: MRT4577_169191C.1
attgtaaaggctcattattatagggggtgggacacactttttgggtgggtaatgctcatctgcaagctgctgcacaggcgccaccaaaaaaatctccgggggtggtagggggcaaccatgattagcgccaactgctcctatctctccaagcacacatgcaaaaacacccctttacaaccggctgccttgaccctccatgcagggccccgggcttgcatccacatagggagcgtcccccaaccggcccttgatgggaaactccaaacctta

SEQ ID NO: 75839 - DNA, 327 bp, Zea mays
  unsure (1)..(327): unsure at all n locations
  Clone ID: MRT4577_169192C.1
cggggcgaccgcacgcgtacgccccccagtccggaccccggaggagccatatcatggcgtccacctcctgctgcctactggaccattcaaccgtccgcctcgaggcgtcatcacncctttcactcctcaagccgacgcagcggaagttccgcgccctgcactccctcgctacgctcgtctgcagtccacgcgtacgaccacgcgtgcgcccacgcgttcgcccactcgtacgaaccaccatccacgcactgctagtaagcgagcttagctactgatcgtcgttaagcactctttagcttgatctttctaagcggttagctggtagca

SEQ ID NO: 75840 - DNA, 535 bp, Zea mays
  Clone ID: MRT4577_169193C.1
agctcctgcagagatctgggggggggggggggggggtcgcccacaccttcgttgcacgggagatcacggcgggcggactagcactggaactcgcccgatacaccaaagaggactaaccccggcgttgcttcccatcgagtaaccggcacctttctgcccagtcccactacctcccacgttggacgtgtcctcctccccggtaacctctcccaacacgttggcgtcctgccggttcagtctcagaagtcacttagccgcctatccttcattggacagtttaattcctagaagtgctcgttcttagtaccaattgcatctcaaactcctgtatcgagttcaagtagaatcttgtaggtgaagtcaatgtcgagtaaatagactaggtggtggactcaacctgatacagtaacgaggatcaaaaaggaatcgttctccagtttcagtacctggatataaactctaccttgaaattataacaggacgactctctctcaaactatggtctctttcagttaaccgattcgctgagggtgaa

SEQ ID NO: 75841 - DNA, 698 bp, Zea mays
  Clone ID: MRT4577_169194C.1
ctcgaaaccctattcctgtggtacttctgccggcgccgccaatcccctgccgttgttcgccaccgtcaatcccctcccgtccttcgccacctctgatgagagcgagaacagatggtcgcaagggtgtgggccggcctcggatcgatctacgtacgacctactcttgcgtctgagtggccagtacgaccgtgtcaagaccatcgcccccgaccagtgaaaccgtaccacaccctgcgacgagagcttcaccgactacgagcgcctattgcggtatgctggcctacaacacatcgttgccatgaaccccatcaacaccggctatgatgccaagctgactattggcaggaggttcagtgatgcctctgtccagagagatcttaagctgtggcccttcaacgtcatgcctgggcccgccgagaagccaatgataggccgttcatcacaagggggaggataaacatcctgcaccctgaagagatctcctacatgggtctcatcaagatgcagtgagatcgctcgccgcttacctttgcagcaccctcaagaatgctgctgtgacggtccttgcctactttaacgactcacagaggcacgctcacaaggacgctggagtgattgctgccctcaatgagctgcgctgatatcaatgagccaaccgttgctgctattgactatggtcttggcaagaaggcaccagc

SEQ ID NO: 75842 - DNA, 119 bp, Zea mays
  Clone ID: MRT4577_169195C.1
taccttctcacggtatcacaagttggaaaggttataaggttgaacaagtgactgtctgtcctttattggcgatgtactattacaaccaataattgtagatttatccctcaataaaatta

SEQ ID NO: 75843 - DNA, 194 bp, Zea mays
  Clone ID: MRT4577_169196C.1
attcggctcgagctccctcctggccggtgattttatgctacaaaaggcttgccgacactggggagagactatacatcgatgaggatggggcgatcatgagatagtgtcccatactaactgaacgatgtagagaagctttctaactgagctcaaacgtcatgctccggattgcaggcaaatacataccggtcatg

SEQ ID NO: 75844 - DNA, 482 bp, Zea mays
  Clone ID: MRT4577_169197C.1
ccggccgggatttcctattattagcgactgtagtcgggcgagaatggaatcgaaacgcaagaaacccaatctcataccatacaagtaaggaatcccccgatggctcatctggttctcctcctcatctctcttgtggttgccgacgctttagccggcgacgacatagcgcgcaggacccgctgatccggcaggtggttcccgtgggagatgacagcgatctgtagttgaacgtggagacccacgttcctgagcttcctgcataggatcggcaagttctacgaggacgtcgactagcactcgtaccgaatatccggttacgaggtcatgctgatgcgcgtgcgacggcatctgctgttggacccagaggaagagctacctatcgctaagttctccaagctcttgacgaaagacgatctggcagagctacatcagcctccgttatgttctgggagcttgtcctcagataactcatggagtgggtg

SEQ ID NO: 75845 - DNA, 648 bp, Zea mays
  unsure (1)..(648): unsure at all n locations
  Clone ID: MRT4577_169198C.1
ggtggtaccctncnagtccggccgggttttgcctgttacgagattggaggttgaccccactgattattgctacctttagaggatatcctagtatcgtgaagattttattggagcacggtgcagatgctggagctaatgtgaatggttttggatcttataatcccttggcaagagctgcagagaaaggtttgactgaagctatcaagtgcttgttggaagctggtgcaaatccaaacgttcctgacacatttggcaggctgccaatagaattggctgctgagtatggtacatgggaagatgttgaacttctattccctgtcacttccaaaattccaacagtggcagattggagtgttaatggagtaattagtcatgtacacatggaagtcacgcaactagagactagcgtgaggtcacgagtcatctgaaaagcaagctggtacctagaatctcaagtcccaggtcaagaacaagaacaggtaccacaggatgaggcgcgtggaggatgatgtgacgtgttcgtgagaggtctaggccgtcgtctcccagtcaactttgggttgctggaccgttgtctccttataatgtaattatttatttattttgtacataactcctattatatagtaaagatgtgacattcgatcc

SEQ ID NO: 75846 - DNA, 493 bp, Zea mays
  unsure (1)..(493): unsure at all n locations
  Clone ID: MRT4577_169199C.1
cgacaaccctctttttttctgttcattttttcacatgtcgatgttgtttacattcacattgccgggtggttttacatgctgctggggcaggctccccattccaggggccctcagcctggtcccaaaatccccggggacgggtaagttttatcaggtcttatctccagacccattctctggggccccngttaagtcgcacccttctaaaggccgggcctggcacccgggggcggcggcttggctctcttctcccgttccttctccttttccctgcccccggcctctgcttgctgccgcctcagctcctccatctcctcctccttcgccgccttctcttccttctgcctttttttggggncnngangagaggggtctgtttctcttcccgggatgaacttgggccccctctccccttgcccccgggggtcacctgcggggcccccccgcctgtcccccttgggggtccggccccgcccctgggggccccccttcc

SEQ ID NO: 75847 - DNA, 275 bp, Zea mays
  Clone ID: MRT4577_16919C.1
gtcgtagacgcattgcgctttgcatgcaaattggttgggttggtcgaagaaaggttaagaattcgattagtagagcgccatgtgtcgtgactcattgcgctttgcatgctttacgttattaaaaaaaaaaaaaaaaaaaaaaaaaaaaaaaaaaaaaaaaaaaaaaaaaaaaaaaaaaaaaaaaaaaaaaaaaaaaaaaaaaaaaaaaaaaaaaaaaaaaaaaaaaaaataataaataaataaaatgaaaaaaaaaaatatataaaaattatttt

SEQ ID NO: 75848 - DNA, 1892 bp, Zea mays
  unsure (1)..(1892): unsure at all n locations
  Clone ID: MRT4577_1691C.1
cgagccggcgggtgagcttatcttagccgattgtaagcactgaacttacttttctgccccgttaacctataaaaatggaggggataacctctatttttgtggtccacaaggcacacctgatactggttgcatattactgagcagaagcacttaaacaggcatttactttctattttaggtcttaggatacttgtataggaagagagcatagctgaagtgggaggtgtggttgtgcatctcaatcacccagattcatgtcctcttcaacataattctgttgcctattttcttgttaatggaaaaccacctagttctccaaggttgggaaatggggtgaattatcctttggaagtagagttatgtggttgacaagatcttgaaaaactgcatatatttttttttcatatgagcatgtgcatccattttctcatctcctgggaaattttctgacaataaatgcacgaaccacattaatgtttggtggtgcaatttaactaagtatcattcccaaatagcttcctatgtgtggtaaggcagtagggcactgctatttatagaatttgcactgagcacgtgtctacctttgctgttttacattagatgattctcattgtagtttatatcttgtaccaccattacctactgtcatccacgcttccttctagatatttttacatgttgcaaagggtgtgtagtacacatctgttatttctgcggagcacttcacaagcatattatcaacgcacctcctggcgattgggtacctcgaggccggccgggcagtcggtctctctcactctctcttgtctccaagtttgtaaccctagccgccaagcttgaagctccagccgtgctcgtgtagggccgcaggccatccgggctccggcttccagcatctaccaggcgtccttagaatacggtgcagcgagcagcaagtcgccgagcagccgagccaccgccgaacacagggcgccgccgagcagccgagccgccgccgagcgccgagtcttctctgagtgacttcggtacagacgacaaactttctccacacataccgcgccactccgccactcactgtgctgacggatggggtggtgctccccgtccacttcccggcagcttctctccacgacctcactcttcaccttcggcgcgggtctccttaccttcggcatccacctctcctacgtccacatcgagccccagcgcgctcgcacgctcgctcgggaccaattcgtccgtgactacctccgcaagaagcacgacaagtagcccgccttctgcggtccccaggtgattgcttggtagtcggagacgatggccctggtcccatcgaggtccgacagcgaggccttgatcccggaggtggagatgaatgccggcgccgaccagaccgcaacaacggcgcgggtcaccgtcgttcaggcgtcgtccgtgttctacgacacccctgcgactctcgataaagcggagaaattggtagcagaagcagctgggtatggttcacagttggttttgtttccggaagtctttgttggtggctacccacatggatctacctttggactggttgtcggcaatcgcactgccaagggaaaggaagactttcagaagtatcacgcatctgccatagatgtgcctggtccagaagtgtcccgcttatctgcattagctggaaaatataaggtgtttctggtgaagggggtggttgagagggcaggatatacactttacaacacggtgctctccttcgatccactgggaaaatacctagggaagcaccgcaaggtcatgcctactgcactagaacgtgtattctggngggtttggagatggatctacaatacctgtctacgatacttcgattggaaaaatgggtgctctcatttgct

SEQ ID NO: 75849 - DNA, 591 bp, Zea mays
  Clone ID: MRT4577_169200C.1
cccacgcgtttggttctcttcagattttcgttgattcaagacatctaggtcctaaatgagtatgctgactaagtattccattgctatgtggatcatggacccatctgttcagtggcacagtcttctttcaccaaggctcgatttcaacaacaggttaaatgtcctgattcctgaaaagatgtgtttacttcaagctttgaaaaggtctaggtcctactgggcacaacccgaaggtggatggccaaaatggaactttcctctttagtagctgtgcccttcgcatgttttggcttcacctattctgggctctggcaatttcacttatactgcttgtaactaccattaacctagtggtaaccgagaaaagtagtatcatgtgtttacaaatagtatcaaattctgttccgtagagcattctgctcgtgcaaaattaccaagtattaacttcttaactacttactactccctctagtgaaaaacatttatgttttggacaatacaaggtccagcttttaaaacattctattcaataactcaaattatttattttggacacataaatatcatgtgatttgcctaaaaacccgtttt

SEQ ID NO: 75850 - DNA, 546 bp, Zea mays
  Clone ID: MRT4577_169201C.1
cactcacgcttgcgcgagccagtgcggcatcatacggatcagggaggagaatgcgaatacctggaaaagcaagtggagacgacgtcaacgctatacgcattcaggccactagtaaacagttaagcatggctgaggctgagcccagcatgggataaaagggaatctctacaattgatagctcgacctcccaactagaggtgactgatcacagacattcaattgaagcggcgatcatggaaaatacctgactcgccaatggataatgattggtctgtataccttcattggcggagagcctctcagctgcatactagaggcgcagaggctctatatgtgtcatgatcttgatacgaactggcaagttgctgtgatgtacccaaatggcaacctttgtatccctgcaacttgagaggcctgtaccctgcatatgcatccagtaagttctgcaatctgaattcgatgccaattcctgggcgtatacgaacgatctacgtgcatgaatttattccagcgcatgtgcatctaaacaatattgggatagcatga

SEQ ID NO: 75851 - DNA, 724 bp, Zea mays
  Clone ID: MRT4577_169202C.1
ttcgggatatccgaacataccctaaaagcagagccgtctgcgttgccgctaacaaggccgccgccgatggacgccttcgtcgccggttcgcgcggccgcccagccctcagcttcctttgccctaagatatcgctattctccccgccctcgcactcctggttccgctggctcgtcggtgcgcctcgcgttctccctcccttcaccgtcgctgctgtcttacgtcccattcacggcgaccatgacgccattgatcttcccagggaagcagacgaaatccgggggttgctgccacgcggtttcgacatcataggggtgctgctcgtggggggagagggttctgatgcggacgtcactcgcgcactggagcaggctcgggcgctgagggagctgctgtttggtgtggcagcgagccatggcttggtaggaggccacatggatgcagccactggggagattcgatttgttgtatctgagagtggatggacgaactcggtggaaggatctgtggttacatgggaggatgagcccgggaggttgttgtgggagaagggatgcctcctgcgctgcgaactgctgctgaagcatccactctatcttaggcctgacgtgaattctggcatcggctaacaagtttcttcatttatttagtctattactgctaaactcaacgggcaacatgtgatcattcatgatatgatgtgccttgacatctatttgagacatc

SEQ ID NO: 75852 - DNA, 574 bp, Zea mays
  Clone ID: MRT4577_169203C.1
tcgactcagcgtccgattttgttggctcagtgagatagacaaaagttgctcttggcatgatacatgaatactacaaaagtaatgctacgggtcttggtgttttctttactctttactatgctttcgacacatcaagctttggggaataaggaaaattgtgacaaggataaagatttcattaagcgtcaatgcgaaaagtgcattggagttggtcgtaaattccctacgacacaactatgttgcaatgctataaaaagagctgatatggcttgcgtctgtcgtagcataacactagaagagcagctcacaataagtgtcgtgaaggttgtggatgttgcaaaggaatgtggcaacccggtgccgcctggaaataaatgtggaacttggactgttccaccacaactgctgggatgggtgcatccgtaagggttcaacaaagcgagcaacaaagggcgcatggataggagttcaacaatgaaagcaatcataggaaaatcttgagataaatgaatgaatgtatgctctactggcttttggaaaattagatcaaaataatatgagatgtgatttattt

SEQ ID NO: 75853 - DNA, 519 bp, Zea mays
  Clone ID: MRT4577_169204C.1
tcttgccaacgccaatgccaatgcccgagggaccactgtcgaggaggaacggatgctcgctagtgagcccgagcagagaaaaagggcacaggaagccactacatctgagattttagctggggaagacgaccggggaaggaaaagccagcaagagggacacaaagagcaccagcagcacaagttgaccctcccaactgtttcgaattataccattcacgatgccactgacggcaccgacaatggcaaacaggaagaattggataatatggagcgggacaaaccattgtgtgatttctcaaacttcagagcaaatgtctgtgagatgagaggtaacatcagaatacacccaaatggcagttcggtcatatacatggaacctacgggttcaggttcaaagagaaacgaacaatggaagattaagccttaccctcgcaaaggtgatgaattatgcctcaatcatattacagaggtgacagtgaaatccagcatagtggcacctgagttgtccaagtaccatga

SEQ ID NO: 75854 - DNA, 748 bp, Zea mays
  unsure (1)..(748): unsure at all n locations
  Clone ID: MRT4577_169205C.1
gttttgcccattccctctcctccactcgcttttcctccaaagcgagcgagctaggcgttacgccggagctggtttgggcggtggtgaaggagagaggaaagggaggagatgaaggcggtggagcgagcgaaactggtgaggagcctccggcacgagtcgcggcggctgcgtctactcgtcctcgttatcggtttcttcctcgttactctcaccttcgtcgtcgtctccaagcccgacgcgcttctcttcaacctgaacggcaggctgtcggtggaccaggcgccgcgctcgctcttgatccgccagcgggttgacgccgacgaggggagatccgccgaaactctcgcctcagcctccggagatccaaaggtggtcgaagacgatacctacggcgaggaagccagcgccaaagccagagccaacgccaatgcccgagggaccactgccgaggaggaacggatgctcgctagtgagcccgagcagagaaaaagggcacaggaagccactacatctgagattttagatacagaatttaatcntcactccggatgttgaccagagaaatggtcgagacagatctcatcaagcagcattggataatatggagcgggacaaaccattngtgtgatttctcaaacttcagagcaaatgtctgtngagatgagaggtaacatcagaatacccccaatgggcagttcggtcatatacatggaacctacccagttcaggttcaaagagaaacgaacat

SEQ ID NO: 75855 - DNA, 2481 bp, Zea mays
  unsure (1)..(2481): unsure at all n locations
  Clone ID: MRT4577_169206C.1
gccnggccggttcgcggaaaggcaagcattcagcaatgcatcccgttccactgttccagcttgcacccgacaagccgaacacttcaccctttcccacttcacctccgccgttccgcatctgtggtcaaatacgacgctcgcgtccataccgatccgtgtttgcccattcctctcctcccactcgcttttcctccaaagcgagcgagctaggcgttacgccggagctcgtttgggcggtggtggaggagagaggaaagggaggagatgaaggcggtggagcgagcgaaactggtgaggagcctccggcacgagtcgcggcggctgcgtctactcgtcctcgttatcggtttcttcctcgttactctcaccttcgttgtcgtctccaagcccgacgcgctcctcttcaacctgaacggcaggctgtcggtggaccaggcgccgcgctcgctcttgatccgccagcgggttgacgccgacgaggggagatccgccgaaactctcgcctcagccaccggagatccaaaggtggtcgaagacgatacctacggcgaggaagccagcgccaaagccagagccaacgccaatgcccgagggaccactgctgaggaggaacggatgctcgctagtgagcccgagcagagaaaaagggcacaggaagccactacatctgagattttagctggggaagacgaccggggaaggaaaagccagcaagagggacacaaagagcaccagcagcacaagttgaccctcccaactgtttcgaattataccattcacgatgccactgacggcaccgacaatggcaaacaggaagatacagaatttaatctcactccggatgttgaccagagaaatggtcgagacagatctcatcaagcagcattggataatatggagcgggacaaaccattgtgtgatttctcaaacttcagagcaaatgtctgtgagatgagaggtaacatcagaatacacccaaatggcagttcggtcatatacatggaacctacgagttcaggttcaaagagaaacgaacaatggaagattaagccttaccctcgcaaaggtgatgaattatgcctcaatcatattacagaggtgacagtgaaatccagcatagtggcacctgagtgttccaagtaccatgacgtgcctgctgtgatctttgctctgactggatacaccggaaatctattccatgacttcaccgacgtgcttgtcccccttttcacgactgcaagcgagttcaatggtgaagttcagttcctaatcacagacatggctatttggtggacaaggaagtatgctgtggtgtttgagaagctaaccaagtaccccttgattgatttcaacaaagacaacgaagtgcattgcttcaagcatgccattgtcggccttcatgcttacatggagttcacaatcgacccgttaaaggctccacacaattactcaatggtggacttcaaccggttcatgcgcaggacctactcgctgcctagggatgcagtgagagcacctggtgagaccccgcagaccaggaagccgaggctgctgattatctcgaggcaaaggacaaggatgttcctcaatcttaaggagatcgtggtcatggctgaggagatcggctacgaggtggtggttgaagaggccaatgtgaactccaacgtcggccatttcgccaaggtagttaattctgtggacgtgatgatgggcgtccatggcgctgggctcacaaactgcgtgttccttccgcacggcgccacactgatccagattgtaccttggggcgccctagatgggatatgcaggatcgattttggctacccagcagaacagatgggcctgaggtaccagcactacagcatcggcatgcacgagagcagcctcacggagcagtaccctctggaccacgagatcttcagaaacccgcttgcgttccacaagaacgggttcgagttcgtcaggcagaccttcatggatacacagaatgtaaggcttgactgcaaccgtttcagacctgtgctcttggaggctcttgaccaattgaaccaataaggacccattggtctaattccacggccactgtactagatttttgttttccttggcgattctagtctcaccatttttcctctttgtaaaatttcgtgatcactgtatctggttacatgagcaacatgaaaatcaattgtttctccaaatgtgtaggatcgaaatcgggattgtactgtattttgtttaatgtaaattagcagtcgtcgatcacagaaatatcagcgagaagctgctgttacatggcccttttcctccccccggggggagaacccacccgagcgagaaacccacaacggtgcgcacgcccccctccgcgcggtgggggctctttattttgttctaaaaatgggggggctccccccnttnntcccctccatgaaacgacccccgcgtctgcccccccgatttccccactttttgttaaat

SEQ ID NO: 75856 - DNA, 2481 bp, Zea mays
  Clone ID: MRT4577_169207C.1
gccggccgggccgggagggcagcgtgcgaactgcgaaaccgaactcggggagaggaaggaatctcctaccagccggcagccaacacccagcattcgtgctcccgtagccttcgtcgtccccagccccacggccgctgcgtcgccttcccctctcggtcgaaaccacaacggcctcttccggcataacaatatgcaccgaatattcagctcatccgctctcctataaaaacgaagcgcaaatccaaaaaaaaaaaacccgcccgcacgacgcattgtccgttccgtttggacccatgatatatctcgctgggatcttgaccgtgcgcgagacgaatctcctcgtgcggtaaccgatacccccaagtcaaaaatcagcccataaaatttttatgggcggaggatcacccgtcgccgcagttcaggacgcgagcgacgacggcgccagggtcgtggtgctagtcgcgggttctcccgtcgattccgcctccgattccctccctcctcccgttgcggcgactcctgctcctgcggcggaggccaagcaggagtcggtgtcggagacggaggaaactaagcaggcggcggcggcggcggcagcagcagcagcagcggcaggaggtgtgcaggccatggcggtcaccgtagtgcgggacgtcgagacgggcctggacgcgagcaccagcgaccgggacggtgacaagccttcctggttcacacctaagagattacttgtcatgttctgcattatcaacatgctgaactatattgatcgaggagtaatagcaagtaatggggtcaatggtacccgcaaaagttgttctggtggcacatgcacctcgggctcaggaattcaaggagacttcaatcttaataatcttgaagatggtacactgtcctcagcatttatggttgggttgttggtgtcttcgttgatatttgcaagccttgtaaaaagggtggatcagtggatgtgacaagccagtttttgtacagttggagggacgagggtggatgatataatcctttcaggcttattggtgttggcttgttagtgtggactatcgcaacagcgccagatgcttaatcctgaggttcaagatcagataaataataatgcgacaaagcatgttttgcctggtggaattgaggatctttcagggaaggttccacaaaagttctccttgtccagtttttgccacggtatcatgactgaaattggtcgcttcagcaaagatatgaaagaactactacaagagaaggtttttgtcatcgttgttttaggttatatatcctacaatttcgtcattggtgcttattcctactggggcccaaaggcaggtcaagagatctacaatatggggagtgcagatcttatgtttggtggaattactatagtgtgtggaattgttggatcactagcaggaggtttcatccttgacaagatagggtctactattcctaatgctttcaagcttctttctggtgcgacatttgtaggggcaatattctgctttggtgctttttgtttcaagagcctttatgggttcataccctcctttgcagttggggagctttcagttttcgcaactcaggcacctgtaaattttgtatgccttcacgccgtgaagccacatttgcggccattggcaatggccgtatccactgtttggatccatatatttggtaatgtcccttcttcacctctttttgggctgcttcaggacaaaatcaatatctggggggagacagctcttagattgacctctatcattttcgctgctgttgtgttctggttctttagcatttttgtccctacttcaggacaaaatcaataattggagggccacagctcttattttgacatccatccttttcgctgctgttgtgttctggttcattggcatatttatccccagcgtcgatcgtttcaatgaagagagcgagcatggccttactgtcgccgagagatcaaatctcaggccgctccttgatgaaaaggacgagccacggacatctgactaaaacctacgcaagtcataaccttttatttcttggcttagtccgtagtttttcccttatgccatcaacatgtgaaatgtaaatttgcatgcccgttggctgtacctgtacatatacgaggtttgttcgctttgcgttattcttttacttttttttgtacaggctacagaaacaagcaaaagagtgctagaattcctttttttacgaattaaaacattttagaatttctttttacgaaaagaaaaaaaattttatttcttggcttagtccgtagtttttcccttatgccatcaacatgtgaaatgtaaatttgcatgcccattggctgtacctgtacatatacgaggtttgttcgttttgcgttattcttttacttttttttgtacaggctacagaaacaagcaaaagagtgctagaattcctttttttacgaattaaaacattttagaatttctttttacg

SEQ ID NO: 75857 - DNA, 234 bp, Zea mays
  Clone ID: MRT4577_169208C.1
ctatatttgaaaggggaatggctacatgctttgcttatgggcagactggaagtggaaaaactcatactatgggtggtgacttttcaggaaagaaccaagattgttctaaaggaatttatgcattagcagctcgagatgtctttttaagctaaagaagccaaactataagaagctagaacttcaagtatatgcaaccttctttgaaatttatagtggaaaggtgtttgacttgct

SEQ ID NO: 75858 - DNA, 384 bp, Zea mays
  Clone ID: MRT4577_169209C.1
ccggccgggagcagcctcccacatccccaaagacttcgacccccttcctgtatgcctccaccgccgctgcggacgccaggaacaagcgacatgggcggctacaccttcttgtgccgctacaacagtacctgagtggaccggcaagcacactccggtcagatccaggcttccgccgctaccccatacgagctgcacttgcgcctcataaccgccgacttcgctttcgagtctgcctacgccgaccatgtcgtacttctccatggtaacccccacctccgacgagttccatgtgatcatctgtgctctcggcggtggtgccatgatggagagacaaagtgaaggcggtggcgctgctgcatctgttggtgctgctgccgaggctcc

SEQ ID NO: 75859 - DNA, 288 bp, Zea mays
  Clone ID: MRT4577_16920C.1
ttcgccttgtatccgctcgaagctcgaatcgctcgaggggcgcatcatatgttgtggagcactgctgaggtgcataggctttactgctggtgtgtgggaggctgatggatcctatcatctcactaaacaagatatttgactagtacatcttggtacgtaggtgatctgtgatattgagggggatatcatcatgagacggcgagtcacttggtgctaaatcgtactgaattttgttatctgcgtctcagtctgctgctattgtcccgcccgtattcgattattcccgca

SEQ ID NO: 75860 - DNA, 1838 bp, Zea mays
  unsure (1)..(1838): unsure at all n locations
  Clone ID: MRT4577_169210C.1
ctcgaggccggccgggccgggaaaaaaaaaccaacaacccgcccgcacgacgcattgtccgttccgtttggacccatgatatatctcgctgggatcttgaccgtgcgcgagacgaatctcctcgtgcggtaaccgatacccccaagtcaaaaatcagcccataaaatttttatgggcggaggatcacccgtcgccgcagttcaggacgcgagcgacgacggcgccagggtcgtggtgctagtcgcgggttctcccgtcgattccgcctccgattccctccctcctcccgttgcggcgactcctgctcctgcggcggaggccaagcaggagtcggtgtcggagacggaggaaactaagcaggcggcggcggcggcggcagcagcagcaacagcggcaggaggtgtgcaggccatggcggtcaccgtagtgcgggacgtcgagacgggcctggacgcgagcaccagcgaccgggacggtgacaagccttcctggttcacacctaagagattacttgtcatgttctgcattatcaacatgctgaactatattgatcgaggagtaatagcaagtaatggggtcaatggtacccgcaaaagttgttctggtggcacatgcacctcgggctcaggaattcaaggagacttcaatcttaataatcttgaagatggtacactgtcctcagcatttatggttgggttgttggtgtcttcgttgatatttgcaagccttgtaaaaagatataatcctttcaggcttaattggtgttggcttgttagtgtggactatcgcaacagctggttgtggagtatcatttgatttctggtcaattactatatgccgcatgtttgttggcgttggcgaagcttcatttccacgtctcgcagctccattcattgatgacaatgcaccagtagctcagaaaacagcatggcttggtatgttctacatgtgtataccaactgggattgcattaggctatgtttatggcggactggttggaaaatacctgaactggcgtgttgctttctggggagagtcaatattgatggttccttttgttattcttggttttgttataaagccactaaacctcaaaggatttgctcacaacacaacaaaagaatatggccagatgcttaatcctgaggttcaagatcagataaataataatgcgacaaagcatgttttgcctagtcgaattgaggatctttcaggaaaggttcggcaaaacttctccttgtccagtttttgccatgttctcatgactgaaattggtcgcttcagcaaagatatgaaagaactattacaagagaaggtttttgtcattgttgtcttaggttatatctcctacaacttcgtcattggtgcttattcctactggggcccaaaggcaggtcaagagatctacaatatggcgagtgcggatcttatgtttggtggaattactatagtgtgtggaattgttggaacactacaggaggtttcatccttgacaagatagggtctactattcctaatgctttcaagcttcttgggtnaccaacgtcctcgtcaactacctcaccgtggacatgtgcgtcggcccgcgggaccccgagagcacgcggccccccgacggtgagatccaccacctgctgcatctctactaccactggttcctaccaccggaggaccggggacgggagcggcacgggcagcaaggacaaggaagacggcgaggcgctcgaggaactgatgtccacgtctgcggatgagcgcatgccgtggcagctgccgccggcgtcggagctgaaggactccggggtgacgtttgtaggggctcttgtgcgacatttgta

SEQ ID NO: 75861 - DNA, 2289 bp, Zea mays
  unsure (1)..(2289): unsure at all n locations
  Clone ID: MRT4577_169211C.1
tgcaaggaattcggcacgagggccggccggggtgcacgagacgaatcccgttcggtaaccgatacccaagtcaaggcggatcacccgtcagtccgtcaccggctcaccgcagtccaggaagcgagcgacgacgacgccagggtcgtggtgctagttgcggggtcccggcccgtcgagtccgcctccggttctcccccttttcccgttgcggcgactccggcggcggagacagaggagcctaagcaggaggaggcggcggcggcagcagcagcagcagcaggtgtgcaggccatggctgtcacggtagtgcgggacgtcgagacgggcctggacgcgagcaccagcgaccgggacggtgacgccggggacaacccttcctggttcacacctaagagactacttgtcatgttctgcattatcaacatgctgaactatattgatcgaggagcaatagcaagtaatggcgtcaatggtacccgcaaaagttgttcgggtggtacatgcacctcaggctcaggaattcaaggggacttcgatcttaataatcttgaagatggtacattgtcctcagcatttatggttggactattggtgtcttcgctgatatttgcatgccttgtaaaaagatataatcctttcaggcttattggcgttggcttgttagtgtggactatcgcaacagctggttgtggggtatcatttgatttctggtcaattactatatgccgcatgtttgtgggccgttggcgaagcttcatttataagtctcgcagctccatttattgatgacaatgcaccagtagctcagaaaacagcatggcttggtatgttctacatgtgtataccaactgggattgcattaggctatgtttatggcggactggttggaaaatacctgaactggcgtgctgctttctggggagagtcaatattgatggttccttttgttattcttggttttgttataaagccactagacctcaaaggatttgctcacaacacaggaaaagaatatggccagatgcttaatcctgaggttcaagatcagataaataataatgggacaaaaaatgttttgcctagtcgaatcgaggatctttcaggaaaggttcggcaaaacttctccttgtccagtttttgccatgttctcatgactgaaattggtcgcttcagcaaagatatgaaacaactattacaagagaaggtttttgtcattgttgtcttaggttatatctcctacaacttcgtcattggtgcttattcctactggggcccaaaggcaggtcaagagatctacaatatggcgagtgcggatcttatgtttggtggaattactatagtgtgtggaattgttggaacactaacaggaggtttcatccttgacaagatagggtctactattcctaatgctttncagcttctttctggtgcgacatttgtaggggcaatattctgctttggtgctttttgtttcaagagcctttatgggttcataccctccttcgcagttgtggagctttcagtgttcgcaactcaggcacctgtaaattttgtatgccttcacgccgtgaagccacatttgcggccattggcaatggccgtatccactgtttcaatccatatatttggcgatgtgccttcttcacctcttgttgggcttcttcaggacaaaatcaataattggagggccacagctcttattttgacatccatccttttcgctgctgttgtgttctggttcattggcatatttatccccagcgtcgatcgtttcaatgaagagagcgagcatggccttactgtcgccgagagatcaaatctcaggccgctccttgatgaaaaggacgagccacggacatctgactaaaacctacgcaagtcataaccttttatttcttggcttagtccgtagtttttcccttatgccatcaacatgtgaaatgtaaatttgcatgcccattggctgtacctgtacatatacgaggtttgttcgttttgcgttattcttttacttttttttgtacaggctacagaaacaagcaaaagagtgctagaattcctttttttacgaattaaaacattttagaatttctttttacgaatgtaaaacgtgttcggattgtgacatggcataactttctggttatgcggttatgctctgctcacgggaggctaggtgatgtcactgtatgcctagatggatctgcaactactctttcgtggctactttgagcacctcgaatccccttggggattggagtggattaagagcttgttcgattagttctt

SEQ ID NO: 75862 - DNA, 228 bp, Zea mays
  unsure (1)..(228): unsure at all n locations
  Clone ID: MRT4577_169212C.1
cacggacacacgcgcggtgcccagcagcggtggcggccggcggaaccggngcagagcccggnggaccaggcggcgacgggcgcctgcgcctgcaccgagaacgccatttttttctcgccggccgcctgttctttggccgccgggtgctgaaggggattccctttgcctgtggctgtgcccctttgtgtgccggcttgggattcattgtgtaggctcgccggacgctag

SEQ ID NO: 75863 - DNA, 308 bp, Zea mays
  unsure (1)..(308): unsure at all n locations
  Clone ID: MRT4577_169213C.1
gttgcacgtacgtaatatctagacagccaaatccgctctctagctagctcctcccttccgatcgacatcatggacatgttggagatggggatggcgcaggcaccaaggtccgacccggaccactgatcagagcggcagccggcacatattctaaacgatgagatgggctcccttcgtgccatcaagctgaaaatgccggccaccatcatggtgctttctancgtccccctcccccagtcatagacctcgtgttccccgaccccaccaccagttacctcctcgccatatcccgcctcatacttaccttc

SEQ ID NO: 75864 - DNA, 786 bp, Zea mays
  Clone ID: MRT4577_169214C.1
attgcgcaaacgcggatttaggtagggcttcttcttcttgttccctttgcgctgacgatttctagcatcgtttgttcatctcctgggtcttcttgatctggaattcggctttctcgtgactccgtatgccaattctacctgttttgtgaggttgtatgcaaacgctacctagctattgaaactatcgacggacattattgtactggctaaaatctggactagaggacatctgcggcggatggacaggagcgaggaagagacgatcatgagtgattcagaccctctcctcgataggaatgatcagtcaggctcattgccccagctctcgccaccacagccggcgaccgtgactgtgctggaaattgaggatgaggagaccgatggttcttatgccgcatgctgccgcatttgccttgaggccgagtcggagataggtgatgagctaatatcaccttgcatgtgcaagggaactcagcagtttgttcaccgttcatgcctagaccattggaggtctgtgaaggaaggatttgcattctcacactgcacaacatgcaaagctcagttccatcttcgagtggaaactctggaagataactcatggcgcaaaataaagttccggctcttcgtggcaagagatgttatacttggttttcttgcagttcaaattactattgctatcattagtgcagttgcatactttctagacagggacggaagtttccggaatagtttcagggatggttgggatcgtatcttgctcaagcatccaataccgttctactactg

SEQ ID NO: 75865 - DNA, 1827 bp, Zea mays
  Clone ID: MRT4577_169215C.1
atgggggttggtttgaaggggaacggcgacgaatcaatcgccgctccgtcttgctgctctgcccgaaagtcgaaagatgtagtgcgtgagagagacgcctgctgggagtactgcgacaagctggatgggaacaaggtccggtgcaggttctgccacaaggtcctcaacggcggcatcagcaggctcaagttccacctgtcccagatccccagcaaaggggtgaacccctgcaccaaggtgaaggaagacgtcgtcgacagggtgaaggccgtcatctcggccaaggaagagtacaaggagttccagctcctcaagaggcagcgcgtcgccgacctgtcgtcggctgctgccccggcgaagtgggcgccggaggctcctccgtccctgtctacctctccggggcgagtggcctctcctgctgctgttattactcgtgccgctgaacagagtcggcttctcgccccggaagcgtccgctccggtgcccagaccatctgctgctgcggcaaacaacaagccacgcgccgccgccgcttcggaatgggagacagaacgatgtatagctgagttctttttcgagaacaagttggactacagcatagccgactcggtctcataccagcagatgctcgaggcgctcggcggtccgggattccgagggccgccagcagatgttctgcgggacaagtggctgcagaggctcaagtccgagatcctgcagaagacgaaggagatcgagaaggactgggcgacgaccggctgcacgatactggccgattcgtggaccgacaacaagctgaaagccctgatcaacttctccgtggcgtctcccatgggcacgttcttcctcaagacggtggacgcctcctcgcacttcaagacgcacaggggcctgtacgacctcttcgacgaggtgatccaggaggtgggcccggagaacgtggtccagatcatcgccgacaggaacatcaactacggcagcacggacaagctggtcgcgcagaactacggcggcgccatcttctggtccccctgcgcgtcgttctgcgtcaacgccatgctggacgacttctccaagatcgactgggtgaaccagtgcatctgccaggcgcagaccgtgacgcggttcatctacaacagcaggtgggtcctcgatctcgcgaggaagtgcgtggcggggcaggagctcgtctgctcggggatcaccaagtccgtgtcggacttcctcacgctgaagtccctgctgaggcacaggccgaagctgaagcagatgttccacagcgccgagttttcgtcctcgtcgtacgcgagcaggtcgataccgtgcgtcgagatcctggacgacgacgagctctggagggcggtcgaagagatagccgccgtctccgaacctctgctcagggtcatgagggacgtctcaggaggcaggcaggccatcggctacatatacgagtcgatgacgaaggtcacggactctatcagaacgtactacataatggacgaagggaagtgcaagtcgtttctggacatagtggagcagagatggcagacggagctgcactcgcctcttcactcggctgccgcctttctgagcccgggcatccagtacaacccggaagttaagttcttccgcactatcaaggaggagttctaccaggtcctggataaggttcttacgacccctgaccagaggcatgatatcaccgcacagttgcacgctttccgcaaggcacaagggctgtttggttcgaacattgctaaagaggcccgcaacaatacccctccagaaaatcagtacattggtatcactggccatttatatcgttaa

SEQ ID NO: 75866 - DNA, 428 bp, Zea mays
  Clone ID: MRT4577_169216C.1
ggtttgacggcctggtgggacggacgatggagccaagtgcttgagagaaggcatctgagggtaactgtttgctcgacgactagacgattcaccttgctcgccgttgccgcgtgttttctagatgaacgagaattccgtccggacgtttctccttcccccttgccgcaatcactgtctcgcagtgtagcagacagaacaactcaacagctccgcagaagctctgtttttaagtttcaatggaagttacgccaaagcagggaactatttgaccattgtgtggtatgtcatttatacaaaacaaatgtgaaggtatcaccctgcataaatatgcatgtcacttattatggacatgtggtatatctatagcatcactattagtttttgtaccattccgcacaaactcgtaatagatatcatatacgtcattt

SEQ ID NO: 75867 - DNA, 478 bp, Zea mays
  Clone ID: MRT4577_169217C.1
gctgcgacgtaatagctctctgaagagctgcctctgtgactgttctattctcaccggcgacgttgcggtccggcaacgcgagctaggcaagggtctgcacacggcggccgacgaagcataagctagactcactctgatggaagccgcgcgccattgaatcatccatatctgccaagaggatgcggaggtggcagcacaagcacgtacagccacctcagtgaccaactacagcaggggactagaatggatgaacaactgccacgagcacgggcgacacctgcggtacaggccgaatgtaatgtgccacttacaaccagcggccagagcgactgtgagccactacaacgtgcggtggaaccaacggcccattataaaaagtggcgttgagctattctaatcggcaaactagggtcggccaccgatgaggatactggactgactgaagcagtcgtaaagaacatgaatgcacaaggcgctg

SEQ ID NO: 75868 - DNA, 343 bp, Zea mays
  Clone ID: MRT4577_169218C.1
cggacgcgtgggaaaaagcgaaactacttcttcagttccgtcccgttcgtgacgacccccggtccctggagggggagggggagggggaacatattaaaagattgtggcctccggcaccggctacggccagccgcaacccgcagcagctgatgctgacccgggagccggcgacaacaagcttgtctttgagacgccgctgcatccgcagcccttatgggaggactacttcgagaacaccatcaagttcatctaacacccaaaggtcaagggcttccccggcgtttacagactatccttgctcgagaagaagggccttaccacacaggagatcgacgaggcccta

SEQ ID NO: 75869 - DNA, 295 bp, Zea mays
  Clone ID: MRT4577_169219C.1
ggttcgaaagagttgataaacaccgaattaatttttgggggcgtcccgtctcatactaccttaacctcaaaccgagcagttttactcaaaccaaacacataatactgctcactcgaaggaggatatatggctctcatttctcaatgtctgaagacaatgccttggtacaatagcatatatactgctagtacagcatatattttgacaagaacattttgacaactgtacgtgccgtcgtcgattaaagcacggccgggtacctaatacccgggggcgccattatttttggcccccc

SEQ ID NO: 75870 - DNA, 444 bp, Zea mays
  unsure (1)..(444): unsure at all n locations
  Clone ID: MRT4577_16921C.1
gacagggatgagctcaccccacaaggttttcctgagccccggaggcggggccacgcgctgggaagccctctcaggaaacgccgccaggacaggaagcagattggaggagaaaaaccgcaatcttcattcgcggaaaatccaggtgcttatgggagcattttcacagaataactagaataacgaggtatttgggttttttaagcaccggggtgttaagtcttccttcaagaatcacctattgctgaaaggttgttttattcggcggaagtttcaacatgtcagagcagcctgccccgtccgggacaggtttcaccgtcgggagacaacatgcctgtccttcgncctcccagccacaacgtgtccttctgtgcacgtttcagctgaaaccttgcatttagttttctaactcagagggtttgtcaatcttttacctgcgaactcctg

SEQ ID NO: 75871 - DNA, 798 bp, Zea mays
  Clone ID: MRT4577_169220C.1
gtgcggggcctttcttctctacgcacacccccgggggccgtggccggaggaatccgccggcacgagacgtaaactgaggcggagcccgcggcggctgatcggggaatacatcgctgtccgcctgtcccgcgtccggcggctggtcccagccgcgacgacctggggcctcatgttctccgcagctcgccgcctcctcacgtcccgcgcccgctcccgcgccctggcggcggccacgccctacccccactccgctgtggcgtccccgtcgtgccctcgctttccgacgcccaaggagatccgcaggggcttggacgagttcgtagttggccaggacaaggccaagaaggtgctctctgttgctgtgcacaatcactacaagaggatatacaacgagtcatcaaataagtgttctgtgaaaagctgggtgcgtggtggtgtcgctacgaacagtgatgatgtcattgagcttgaaaagagtaacatccttctgattgggccgacagggtcaggtaaaacactgttagcaaaaacgttagctcggtatgtgaatgtgccattcgtgattgctgatgcaacagcaattacacaggctggatattctggtgaagatgtggaatctgtaatctacaaacttctagtggctgctgacttcaatattgaagctgcagagcatggtattgtgtacattgacgaagttgataagctcacaaagaaggctgactgccgcaaggatcgaaaggatgtatttcgagagggtgtgcagcaagcgttgctaaaaatatttgaaggaacatcatc

SEQ ID NO: 75872 - DNA, 1001 bp, Zea mays
  Clone ID: MRT4577_169221C.1
cttcgggcagctctggaggctggaaccgctcccgccggagaagaaggccatgtggcgacgggagatggactggctgctctgcatcagcgaccacatcgtcgagctggtccccacgtggcagtcgttccccgacggaaccaggcttgagatcatgacaagcaggccacggtctgatctgtacatcaatgttccagcacttcggaagctggatcatatgcttctcgaaatcctggaaagcttcaggacccggaattctggtatgttgagcaaggtatcgctgcaccagactgcgacggctctgcctccttcagggtggctttccaccgccgtgatgagaagtggtggctcccggtgcctcgtgtgcctcccggtggccttcacaacaaaacaaggaagcagctccagcacaagcgtgattgtgcaaaccaaatcctgaaggctgccatggccatcaacagcaatactttagcagagatggaggtccctgaaccttatcttgactccctaccaaagaatggacggtcaaccttaggtgatatcatataccgctacataacctctgatcagttctcccctgagtgtcttcttgattgcctggacctgtccacggagtaccaggccctggaagtcgcaaaccgtgttgaggcgtcagtgtatgtgtggcgccggagggttgctgccaaaccagtaaatggattgggccgaagcagcagtgctagatcatcgtggggcatggtaaaggacatgatggtagactcggagaagagagagctgctgctagctgaacgagcggagggcctgctaatatgcttgaagcaaaggtttcctgggttgacacagacaagcctggacatgagcaaaattcagtacaacaaggatgtgggcaaatcaatcctcgagagctattcgagggtgttagaaagtttggcttcaaacatcgtcacccgcatcgacgatctgctgaacatcgacgagctggacggacacgctgaacatttcgc

SEQ ID NO: 75873 - DNA, 385 bp, Zea mays
  Clone ID: MRT4577_169222C.1
cctcgaggctgccgggatataaacctaaatcgtctctctcccgtcctcccctccccgccgagccgccgcgtacctctcctcccgcgcagcagccccgcccgcggaaatgaagacctctgcccggagacatggacatcccgagggagtacggcacggggggcagctgtgacggggagggcggcgtagctacccgactaagactaactgattctctgagacggggcaagctaagcaccctgttggaccgcgaccatgcgcatcgcaccgcattccactcagaactattgaggcgtaccaaggttttcgcttaagatgcatgtcggctacgctcacttttccattaacgccttcattaccaacgccaacttcggcattgagatcagaa

SEQ ID NO: 75874 - DNA, 1019 bp, Zea mays
  unsure (1)..(1019): unsure at all n locations
  Clone ID: MRT4577_169223C.1
gctcgaattcggctcgagggatggtcctactgtttcaattcatgctaccccttgggtacgtcgtatctgctgttgacatcttaggttccatcgacggagaatgtgctataaaactccaaatagatgggtctgatgggtgttcgcatttgccttacttgattaactactcaaattcgttgccgtccccccccccctctcgggtcacacatacgggctggcaattctctgctccctgcttcgttttccagcggccacgcacgcggtcgggttgcgtttgcgtctcccctccggcacccaagcttccgtcacctcttccttccccaagccgtcggtctccgccgctggcctgccgggtgggactcggcgtgggcgcgcctggaccggaccggacccgcccgcgaggatgcggagatgctaagtaggaattcttctcggacctccaccaagcacctgttatctgtgtatgcggagaagttagattattaagtgcagttgggcctgacttgttttatggctcgaaataatgagggccatctcgagctgccagagatggatcaaattcaacccaagaacatcccacacaatgaatcactgcctctaggccagaagcttctcctgcatcatggaagtgatgcgccccttagaattggtcattcaagtcatggaaatatgggacttagaataaatgatcttccatcttcaagtcgcactgtgcagactctaggttatagagttgggaacccaggaacctcgcatgctccctttgttcattttcatgctggaagttctggtagccatttaccagaccctgctgtgaatatccacataggtctgaggaaggcttcngctcagtgggttcccatatggacaacagaagggctgcaatgaagcgaanaggtcccagtgtacaccctggcagggatcagtgctactgggtattttatgtttggaaagtcttccagtactcagccatctaactctgtgcagccaaatgcagctccacttgctgagncctttct

SEQ ID NO: 75875 - DNA, 1961 bp, Zea mays
  unsure (1)..(1961): unsure at all n locations
  Clone ID: MRT4577_169224C.1
gtaccctcgggtcctgccgggaagcccgcacggagcggtggggcccgccccgcttccgttctcgccggaagccgggatccttcccgttctccgcccgctcgtccgtccgtccgtccgtctgcccgctgctataaataccgnctcgtcaccctccccgctcccgttcgttgccgtccccccccccccctctcgggtcacacatacgggctggcaattctctgctccctgcttcgttttccagcggcgacgcaagcaagcccacgcacgcggtcgggttgcgtttgcgtctcccctccggcacccaagcttccgtcacctcttccttccccaagccgtcggtctccgccgctggcctgccgggtgggactcggcgtgggcgcgcctggaccggaccggacccgcccgcgagattattaagtgcagttgggcctgacttgttttatggctcgaaataatgagggccatctcgagctgccagagatggatcaaattcaacccaagaacatcccacacaatgaatcactgcctctaggccagaagcttctcctgcatcatggaagtgatgcgccccttagaattggtcattcaagtcatggaaatatgggacttagaataaatgatcttccatcttcaagtcgcactgtgcagactctaggttatagagttgggaacccaggaacctcgcatgctccctttgttcattttcatgctggaagttctggtagccatttaccagaccctgctgtgaattatccacataggtctgaggaaggcttcgctccagtgggttcccatatggacaacataagggctgcaatgaagcgaaaaggtcccagtgtacaccctgcagggatcagtgctactggttattatgttggaagttcttccagtactcagccatctaactctgtgcagccaaatgcagctccacttgctgagccctttctccgtcaaatacctttaagcattgaccaaagtggttgggatatccaacacttgattcaccaagaagggtttcagaggaatgtgagagcacgccacagtagtattccattagtacccagatcagcttcaacatacccattaaacataaacagtgttcatgtgccgtcattcggttcaaccgcaagtgcttcctcaagtgcaccagtggaaatgaaccaagtgcctgtttctttgccaataagaactctaccatcaggtgcaccaggtatgactagcagggtcccaacagggagggcttactatcctgtggttggaagcagcagcagcagctcaagtgttggtgctgtcccaactatccacggatcatctggcgctgcaatgtttgctaacggtggctatgttcctagtagtgttcatgctggaactgttccgatcttccctaacccagcgcctgctacttcatctggctccagagccatgccccaccagatggtcattcagagtcatccagctgctacttccgcagcaacctcttctacatccatgcggaccgcccaaccatcattacctgccagaaccgcagcggcttccagacatgcaaggcatgtgtcagcagggcttgccaacaacggaaggtacagaagggccaggagctcttactacaggcttcatccattgatggtagaggcagagcggttcatgatggaccacttggtcttctacgaatcgagagcagcagctgctgacccccacagggacatgagactggacattgacaacatgagctacgaggacctgttggctctgggagaagctatgggcaatgtcaacacaggcctggccgatgaaaaaatttcggagtgcgtgaaagaagtggtctgctgcagttctgaccacacgcagatggaccaagacgatggaagctgcgccatttgcctggtacgctgggaactaggactacagagacaaggacgcgctgggaatactcaagtgcaggcacgacttccacgccggct

SEQ ID NO: 75876 - DNA, 329 bp, Zea mays
  Clone ID: MRT4577_169225C.1
atccgcctccctctcattctattgctgggcgtcactacggggaagggtaactacatgtgttttgcgcacaaaaacatagagaaagcacactcgcctactcgcctttatcatcgcccacgaaaggcaatccaccactgccatgcaccccaggagcaaactgacaaggcagcccagccacctatgagcgcatcgttactgctaccaggtccaagctccgtcacactgctcaagcccctgccctccacatggcacttatacatgtttaactccgcaacgaaacgcaccatgtatgccaagtctgcataccacgacccaccttcctcaccgct

SEQ ID NO: 75877 - DNA, 282 bp, Zea mays
  Clone ID: MRT4577_169226C.1
ccaatttggattcctgagtgtggtaatggaccttacatagaccaagcatgatagatgatcagttgtccttgtattgtgttggtggttatctagacgctacctaattctcggcctcagactgaggttgtcatatttcgtttcctgctttactgtccagtcagcagtcacagtgcatgtttgtagcagttttgagagcaagtctgttatgtgacataattaatgatagtagattagttggatttgggtagctgctgtgttggacatatgcgagttccgcaattt

SEQ ID NO: 75878 - DNA, 178 bp, Zea mays
  Clone ID: MRT4577_169227C.1
tttccttctccagggtcctacccgaccaagactgtccgggaagcacttggttaagggataaggcggacctttgccaatttttactccacacgaaattcaggttcttcgggacaggaaataggaaacacccgcccttctttgaggtcccctgtggccatgggcacgacatgtggggcct

SEQ ID NO: 75879 - DNA, 474 bp, Zea mays
  Clone ID: MRT4577_169228C.1
ctcttactccatccctcgccgccgccacagatcacacctcctcgtacgtcgctcgtcgctgccaccaaccgaagcgatggccgcctccaccgtcgcatccaaggccctggccctcgtcgccatcctgtcggtcgccgccttctccgtcgtctccgcccaggaggccccggcgcccagccccgtgtccgccgccggcgtcgcgatgccgtccctcgccgctgcgctcgtcgcctccggtgccgccttcctcttcgccgccgttcgccactgaagagactgcctccgtcttccccgtcgacctacctagtacaaccacatatagatccatttatttatcactagtgatttgttcgttcgtgtcattttgcccagatctgctactgtgtgtcactcggtgatggtgattagtatctccttattagtagagattgtacccgtgtgcttgtagatactatttatccggtttgatctagc

SEQ ID NO: 75880 - DNA, 355 bp, Zea mays
  Clone ID: MRT4577_169229C.1
cccacacatacactccacaggggtctggtttatgaacttcaggccccaatctgcttcgcagtccttattaagccacctgcgtatcaaatcattcttatgaccactacatcaactctgtttatcaccagccctctactaagccttactctgaccttaattccacctatcctgcatcttcagaacattataaccaagtagcatattctcatctcaatctatcctacccattaaagaggatacactatgacactgcaggctttgaggatgtcgaatattcgatggatatggaaattgattttgtccaatctaggaacctgtaatacaaatgtttgcagcacctgttttatttgaataa

SEQ ID NO: 75881 - DNA, 210 bp, Zea mays
  unsure (1)..(210): unsure at all n locations
  Clone ID: MRT4577_16922C.1
ctacgacctagacagacacctactacgctcgtntacgaccgtacgcgnccgagctgactgtnacgcgtncggnnnccgccgannggatcaagtntacgccgacctacnacccgangacagaccttgccccaccgtgtcgcgaccatcgcctacgtnccttacgtacgaccaagtactgcnatccattttcgagcttcgaggaatcgacag

SEQ ID NO: 75882 - DNA, 310 bp, Zea mays
  Clone ID: MRT4577_169230C.1
gcctaacaaaaatgccacaacaataatcatacttatagccaatttcaatagcctaacaaaaatgccacaacaataatcatacttatagccaatttcaatactcttctaaacggtccttcattttccttctctcagcttccttttgactccgcacagaactagcagcaccaaacacccgaatcaatctcgcattctctcttctcctttccgcttccaaaatccccatccgcttactctctgcagctgctctcttctgattaatcgcagcacgcacactctccttatacctcgtctcctgaatagctttctt

SEQ ID NO: 75883 - DNA, 194 bp, Zea mays
  Clone ID: MRT4577_169231C.1
acgaccacacatccataccattttctttatttactccagagcgcaaaaaaacccgttcttacatcattagtttgttgctcgttacaatcgatctcctggctctatttgcaagcgccacctcaactcatacaaacggaagatattattgctatcaatttcttcattttaattaaccaacaattatataattttaa

SEQ ID NO: 75884 - DNA, 297 bp, Zea mays
  Clone ID: MRT4577_169232C.1
atggcggcgcgaggagaaacagtgctcgtagatgatccgggtacgtcgacgggcatggacatcatatctgtacctgatgggggacaccaacagaagagaatggagtcgtcagccatggatgatgtgaccggaggaacgagcattgtagctgttattccaccagctgcgttgagggcgccaggaattgttgctgacaacaacacaggagcgacagagatggtaggagcagatcaacgcattcctatgagacatattgatgcgcatgatcaggacacacctcacattctgcatagccat

SEQ ID NO: 75885 - DNA, 480 bp, Zea mays
  Clone ID: MRT4577_169233C.1
ctcattctgcagctctccacgcttgactccattttatctcgcgtgccccctctctgctcacatgcgaaagccgacaatcactacacccgcaccgcgctcctccaccccccatatacctcctttctcgctaaccatcgtcaaccaattttcggaagaactgtgacggaatcctgtcgccagctctgatcgagcgccaccgtaagctgtacatctgcctggagaatttcctgcccaacacataattctccctaggacacgcctcatctaaaaagcaagtcaataccttcaatctcaagtgccacgagaacagcatgtgcttcttgaccaaccacaacgcgacgaacatgatctgatctaaggaccgccactcagatgacatttgtgccaacgatccttaggacaattcatatcaatcattttatcttgtaataagcctcacgctaccgaataaatactctgatcacttagaacatttatctc

SEQ ID NO: 75886 - DNA, 343 bp, Zea mays
  Clone ID: MRT4577_169234C.1
ttaccatgagataagggggtacaagccttttgaactaagggtccaatccaacgatttcttacgaaagaattggatataccccacataaaaatctcccccctataactaggacaatctgtgtaccattgggaaaatcgtccaccccctttcggattacccgtataatggtttaatacaaaagaatgtcgacattgtgctacccggaatatgggatatgcggtctatttacatcgggctttttggcccaatgaaacaaaaataagcctttatgttcttgtaaaaactttggtgcggaccatttatattaaaacttttgtccaccgggcggtgcctttttaagggg

SEQ ID NO: 75887 - DNA, 389 bp, Zea mays
  Clone ID: MRT4577_169235C.1
gctgattagccacttctccttgtcgatctagagcctggacgctggcgcgggtgtgcattggtcatggtgccatggagaagatggacggcaaccactacagatacaacgacgagccaatgactcacgagtagcacagacgccaaacgtcggatggctagggttaggacacaaactgatatagagacatttaatcttttatcgtctttactgccagttgagtcattaagatggcattttatatgacatacattcaaaaaagatgacaaaagattagattgtcctgttagatgcgattgtgatggaaaatagtgggtcactgagtgagacatttgggatggtctgaatacctactactatatccactaatcacaacagcccgagcagaatct

SEQ ID NO: 75888 - DNA, 257 bp, Zea mays
  Clone ID: MRT4577_169236C.1
gtgagtcgtataagagggcccgtttcgggcctgaaccctggtttggcgtacagaagggcttcacgcttactttcctgtgcatgtcgagatcacgtgtagcactcagacactgcgtgtgcagccttgctggtttagattgtcacaggttggtctcactgcaggtaatgatcggatgatcctgcgcatgcatctctcacgaatccgtcagggctatttcagatgataaccacattacgttgtcatcactgacttgttca

SEQ ID NO: 75889 - DNA, 342 bp, Zea mays
  unsure (1)..(342): unsure at all n locations
  Clone ID: MRT4577_169237C.1
cctcaacttgtatttgtatatactaggaataaataagccatnatacaccctgcgccgnnacggaggcaaacaagcncatgggcagnngagaacccggaaanntggaaacttngagngaactggaacccgagaggtttcccattcgatatattttttaatttgtagtaatatctaacactatacagagaccattgctttaggngttgtnttatagtaaggataggattttatatgcagaatctntatttaataagaagaggttgtgatttgggcaagatcttcttgccatgggattgtaaagagattattgtatataatatatattttaaccgttgaatgttt

SEQ ID NO: 75890 - DNA, 314 bp, Zea mays
  Clone ID: MRT4577_169238C.1
atagtgagtcgtattaaacgcacaagcatgatcgacaggtcaggtcagcgaggcaaactctggtaatggatgtaggcacgggactcgcttcgatgacgacggtacttcacgcgcagaactaggtagccctgctcacactggatcgaacagtggatgtccatatgacttctgagagccagcatgctacatcagaggcaacaacatattgggaaaattcacgatgtacatcgtgacgaaactctcagagcagcattgaccgtatgaacagaatgctgaaccatcatggttcatccatgcatcattcagagaagctg

SEQ ID NO: 75891 - DNA, 891 bp, Zea mays
  Clone ID: MRT4577_169239C.1
cacgattggcccaaaccgacttggatgattaatcgcgactaatccaggccgtgtgcgtgtggggctttggactctgctatatgtgtccctgaattggactctgcgtgttcggcaggctgcaagccgacactgttgcagctgtttggactgctgcagctgcaatccatagagagaaaaatactgtagaagccgcagccgcagccggattgcagccgcagcaagccgcagcgaacaagctgtaacaggttgttaacaaagttcatcagctgtctcgtctgaatcccttgctgttcttctcgattccctctataggttgttaacaaagttcatcagctaacttgattgaatggatcaatatgacttgatagacagatactcagatggaaacgtcggtttgtccaacattttagatcacttgcatccaatttttgtacatgtttagaccagaaagggttagcaccgttttcattattgtttttgggtttcagttgatgtaaaaggcaagaatattagatcagttactaagatcagcaattgtttcatttggcgcactccttatgtatcctcgcttagtttcttttgccctgtggcaggctcaaaatacagcttcagaggaaccagttcaaagctcaacctgcaggtccaaagatgagaatgagaagcataacaatatcactgaagaggcttcatgatgagcacaccctgttccgaggtggcgaggtgtagtaaaaacgagagagaataaagggaggctagttcatgtaaataactttgaataaaaaatagttgttaaactacttgtttagatcagatcatttgatgtaaataatgatttatcgaaacccgacggcactttctaattattcgtatgccaggcttttctttataatc

SEQ ID NO: 75892 - DNA, 406 bp, Zea mays
  Clone ID: MRT4577_16923C.1
aaaaaaaaaaacaacaggggggggggggacccaactgggggggggaaaccccgggcatttaaaaaaaaaacaacaggggggggggggacccaactaggggagggaaaccttgggaattgggacaaaaaaaagcccctttttcgggaaaaaagaaaaccgataaagtcgcaaaaaaccattttgggataaaccactaaacttggcctttgaaacaggggggaaacaaccttggtaaagggaaccaaaggttccgtttaaaaaccaacccatacatacaactttttaaaaccaaaccaaagggggaggcgcccaccgccgggggggaggaataaccgggccacggttgggccggttttccaggacttgaactccgggtcgggggggggcagtttgaaggggaaaaagg

SEQ ID NO: 75893 - DNA, 423 bp, Zea mays
  unsure (1)..(423): unsure at all n locations
  Clone ID: MRT4577_169240C.1
atattatatttttataaatataatttttttnggtnttgtttttattaaacggcaatcccctccccaccagggtaatgtaaaaatgtttatccaaagcacacatattcgtgagggtaaaaacaaattggtgaactggcccaaaaaaatggaaagcaatggtacaggggtcaatccctcacttgagggaaaaaacaaaaaacagggcaccaaaaaaaacgggggcataaacgaaaccaatttgttaaaagaaaatcaagtaaaaagaggaaggaaaaaaaacaaacaaaagggaaacgagggggtgccactgccaccgccgtgcccaaaaaaaacacccccacccattgggaatgcgcgggaacaaaaaaacaacgcaaagaaaacaaatttctccccccaccttgggttttttcctccggttcc

SEQ ID NO: 75894 - DNA, 267 bp, Zea mays
  Clone ID: MRT4577_169241C.1
aaattaatgtaggacagcgaattttggaaactttataaggacaatccagcaagctgtgcgattgtgatgaaaacttcagctggtcttgtatatctccttgcctgtctcctggaacctttcatgccttccttttcaaaagaagtatggtcctaatcattattgagtgttgagtttcttcgagtagcattctctcgccttcaaatctcactatgtgatatcttctataacgtgctacgtcaattaaacctgtccccagaagaaaatatt

SEQ ID NO: 75895 - DNA, 396 bp, Zea mays
  unsure (1)..(396): unsure at all n locations
  Clone ID: MRT4577_169242C.1
taagaatcctaactacaaaggaaaatggaagaccccagggtttgtcaatccaaaattggaggttgacccagacctatatgttctgaaacctttgcagtatgtggngattgaagtatggcaggtcaaagctggttcagttnttgacaacattttgatttgcgatgacccagactatgcaagacatgttgtagatgaaacttttgctgcaaataaggaggctgaaaaggaggcctttgaaggagctgaaagaaagaggaaggctagagaagaagaggttaattaacatggaatcttactctctttctgctctggtcgctgttgcctgttaacaattctgaaactgtgaatgtgagccttggaggagttaacaggacgttgcttttccacaggaagcac

SEQ ID NO: 75896 - DNA, 397 bp, Zea mays
  Clone ID: MRT4577_169243C.1
agaaccaaacaccaaacacttatttagcttaaaggttcattttttaggctttgttttaccaagagtttttaaaggtgaatttaacacataaaaacaattcaatttttttaaagatgacaacaaaaattttacagttttttacccttgggaagcaaagatttttttaattccccccaaaaaacaaaactttttttggctaatttctggaaaaaccctgcactccgaatggacctccagtcaaaaaggagtttgcaggggcttttgaattgaaaaccatacatttaccgagttttttttgacgaaaaaaacacccaattgaaaggccggaatttactggaagtgaaaccttcaaaaatggccctaataaattccaaaggggctttttgccaaaacccaa

SEQ ID NO: 75897 - DNA, 2203 bp, Zea mays
  Clone ID: MRT4577_169244C.1
ttttaacaatttaattgtcactttcatgcttcagagcacttactcagatctcagtatgcaaatgatagatcttcactatttatgttattagacaaatgaggattgagaaacattcaactttattcatgcatgcatgttacttttgctttatttttttagcaacttagtcacttttttcctggtttgctagtgtgtatcagtaatttctaaacattcatgactaaacgaacacaagatgacagtatttttgttttatgctaaatcagcctgagtcatgggatgacgatgacgatggtacatggaagcctagaatgatacctaatccagaatacaagggaccatggaagcggaaggtttatttactttatactagttataatttcttaaccttttgttcatttgaatatttatgtactcatgacttttctctctcagaaaattaagaatcctaactacaaaggaaaatggaagaccccatggattgtcaatccaggtgagagacatatatctgatcttctgctctttacatattgtcatgtagattatgtctactgtctgttgatgacagttttgagtatttctcttggcagtaagtttacttcatatctgtctttgaattgaatcttgcacgcttgacccagcattaactaaactatcttttgcagagtttgaggatgacccagacctatatgttctgaaacctttgcagtatgtggggattgaagtatggcaggtatcaaacatcataactgggcaaagacgtgtgccccatcacaatctttggttgtatcaaataaattaaaccctatctgaacttactactaccatggtatacaggtcaaagctggttcagtttttgacaacattttgatttgcgatgacccagactatgcaagacatgttgtagatgaaacttttgctgcaaataaggaggtagaggcacggcatgttatgatccatgttgtccctccgtaggaacccttgtctcattttatttctatgctgcaggctgaaaaggaggcctttgaaggagctgaaagaaagaggaaggctagagaagaagaggttaattaacatggaatcttactctctttctgctctggtcgctgttgcctgttaacaattctgaaactgtgaatgtgagccttggaggagttaacaggacgttgcttttccacaggaagcacggagggcacgggaggaaggggagagacgaaggcgggagagggatagggaccgcggcagggaccgatacaaggatagatataaggtacatttcttccattttccatactgggtcattattccctgttgcaattatgttcgtcttgtccttgtcatatagggggcctttttttcttggtttgcagttcaatattccatccccttaacttatcactagccttcttaaggattatcatctgtcaaaagtttcaggctgtaggtccttgcctccctgtaggtcgttgatataaaggattgtatggatattatgacaacaatatatataggcagggccagcacaccaatgaagaatttagaattcatcactcccgtggacgaaattagcgaaaatatgtaccagtgttcatagatcttagctgcatagttttaagtctcaatagtatggcacagtgctttatatatcgaccatatgctgcgttgctgacatttttgttcctttcctctgcatctgcagcgtcataggcactacgactaccatgtaagttacgaagtagcttcatttcttttcttggaacgccctaagctacaccagaaaagctacctgacgttataaattgtttgtttcgtgttcaggacgagctatagatcctgtattcttttgaaatctgcacgatattggatgtctgtctacggagagcgcacgtgcaaaacttgtatgttgtactcacggatgaagctgaacctgtgattttggcgatgggtagagattggccatcgcgtctgtaactaaatttccacgttgcgatgcaatatgagctgtagtactgtcctcgcactactatttaccgtttgtgctgcatatgtgatataaaccttcaagaaacacacacacgaagggtctgaatgagcacggcctttgttgtttgcttcttataaaaaagaactgttttatctgtgtatacttgccctactttttgctatttccaagcagctggacagaaactgactactgtaccag

SEQ ID NO: 75898 - DNA, 2073 bp, Zea mays
  Clone ID: MRT4577_169245C.1
gggaatatattgaagatcctgatcaagttattccagagggatatgattcaattccgaaagagatacctgatcccaaggacaaaaagcctgagtcatgggatgacgatgacgatggtacatggaagcctagaatgatacctaatccagaatacaagggaccatggtagcggaagaaaatgaaaattcctaactacaaaggaaaatggaagaccccatggtattgcaatatagaatatgaggatgacccagacctatatgttctgaaacctttgcagtatcgagtttttgttattgggaccctcgaggccggccgggaccgagagtggcagtggagtagtggtaggaaaagctcgtcgccgagtcgccgtacgggggctcggctcgggtgagcgagcggcggccggcgggtactgaggcctgagggcgaggcgatgggccgcctccgcgacgggcgagccttcctccaccgcgcgcttgtcctctcgtcgctgctccttctcgcctccggcgaaatcttcttcgaggaacggttcgatgatgggtgggatagccgctgggtgaaatctgattggaagaagagccaaggacaagctggaaccttccgacacacagcgggaacctactctggagaccctgacgataaaggtatacaaacaactggggatgccaaacattttgctatatcagcaaaattcccacaatttagtaacaaggaccggacattggtgatccagtactctctaaagattgagcaagatattgaatgcggtggtgcttacatcaaacttatgtctggttatctcaaccagaagaaatttggtggcgacactccttacagcttcatgtttgggcctgatatatgtggggatcagaaaaagaagctccatctcatactttcataccaagggcaaaactaccctatcaagaaagaactaaaatgtgaaacagacaagttgacacatttttacacatttattcttagacctgatgccacttatagcatccttatcgataaccgggagagagaattcgggagcatgtacactgactgggatatccttcctcctcgtaagatcaaagatgttaatgcaaaaaagccaaaagactgggatgacagggaatatattgaagatcctgatcaagttaagccagagggatatgattcaattcctaaagagatacctgatcccaaggacaaaaagcctgagtcatgggatgacgatgacgatggtacatggaagcctagaatgatacctaatccagaatacaagggaccatggaagcggaagaaaattaagaatcctaactacaaaggaaaatggaagaccccatggattgtcaatccagagtttgaggatgacccagacctatatgttctgaaacctttgcagtatgtggggattgaagtatggcaggtcaaagctggttcagtttttgacaacattttgatttgcgatgacccagactatgcaagacatgttgtagatgaaacttttgctgcaaataaggaggctgaaaaggaggcctttgaaggagctgaaagaaagaggaaggctagagaagaagaggaagcacggagggcacgggaggaaggggagagacgaaggcgggagagggatagggaccgcggcagggaccgatacaaggatagatataagcgtcataggcactacgactaccatgacgagctatagatcctgtattcttttgaaatctgcacgatattggatgtctgtctacggagagcgcacgtgcaaaacttgtatgttgtactcacggatgaagctgaacctgtgattttggcgatgggtagagattggccatcgcgtctgtaactaaatttccacgttgcgatgcaatatgagctgtagtactgtcctcgcactattatttaccgtttgtgctgcatatgtgatataaaccttcaagaaacacacacacgaagggtctgaatgagcacggcctttgttgtttgcttcttataaaaaagaactgttttatctgtgtatacttgcccaaatttttgctatttccaagcagctggacagaaactgactactgtaccagaaccag

SEQ ID NO: 75899 - DNA, 805 bp, Zea mays
  Clone ID: MRT4577_169246C.1
attgggtacctcgaggccggccggggccacacaccctccaaatcctctccacgcgcctacccccgacgtaccgagcgtccgagccacgactcttccctcgctcgctcgttcgtctcctcccaccaaggcaccaaaccaatctagccaccaaggcaccaaccaagagccatggcatccccgttctgcgccgctgccgccgcttgccgcctcgccgtccccgccccgtcccttcccgccgcacgggcgcctaggccccgacgcggcctggtggcggtgcgcgcggaggcgggcggtgggataaacccggccatccggaaggaggaggacaaggtggtcgacaccgtcctcaccggcgagctcgccaagccgctcaccgcgtactgtcggtgttggagatcaggaacattcccactgtgcgatggatcccatgtgaagcacaacaaagcaaccggtgataatgtgggccccctgctcgttaagaagtagatgcagtttctttcgacttttgccctagcgtcatgttgagcgctgagctgaacactatctgtctgtcatgatatatgtttttttagccaagataaactatcacgacgcaacgatccttcattcagaataaagtaagctgctcatgtcaacaagtctcagtttcatgattgtaggaagcgttagtgacaggtgatacatgtagtgggatgtatgaaaatcggaaaaaatattttgttttctgtgatgaacaatcaagtcatgagcttatgatctgctaataaaaagaaaaaaaaaagtccttcagctatattgtggttcc

SEQ ID NO: 75900 - DNA, 191 bp, Zea mays
  Clone ID: MRT4577_169247C.1
caaccgggctgacaccataggtcaacaatggccaccaatactcctggcctgctcatggcgagttgctctttctgcaagtgttgctaaccacggcacttacgggccatgctcacaatctggaggagttcatgtcgaaagacgatacgatggatcaacgatggctgcagggtgagcaaacccacctctttgac

SEQ ID NO: 75901 - DNA, 238 bp, Zea mays
  Clone ID: MRT4577_169248C.1
ggacgacaaggggcagttgataggaaaagcactcttcgatagaagatttgcaagctcctcaaagacattcctgcagtcaagattggcatacatctccaccataattttttttcctggcgacaaaagtctacaagagcttccattgcaacctcctgctgatgatatgttgctccaaaacgaggttgtgcaagccttataattatacaagaaaaaaggcctcaaactgcagcttcagctc

SEQ ID NO: 75902 - DNA, 327 bp, Zea mays
  Clone ID: MRT4577_16924C.1
aacgccattgcccccgcaatccccttccaccgacggcgcggaccttccgacgacgaagccggtcttgggtggcgtcctctcggcctgcttggcctcagctgccgacactccccacactcgctttccctgggctgcgcgggtgaaggagcgcgcgcctgcgtacatgccggtggttggactcggatctgctgatgggtggggcgccggatggcgtcgttcgctgtgtccggcacgaggctcggggttgtgcagcccagcggctcggcgcgatctggtggcgagcgtacgagtgcggtggacttgtcgtcggagctcttcaagaggaag

SEQ ID NO: 75903 - DNA, 257 bp, Zea mays
  Clone ID: MRT4577_169251C.1
attcggctcgagctggaaagagaagtttatgagctcaagaagaaggttatgcagtggggccgcatgactcaggaagtgctgggaaacacgaacatgagggtgttgaatgattctccaatcggagtgctacaattcacaaccaattatgtcatgtaaggattctcctgctatcccctgtatattcatgaaaccgcagtcactcagatagtcgagcagggtctctttcaacaaactcaggacggaagcttatactaaaa

SEQ ID NO: 75904 - DNA, 1580 bp, Zea mays
  unsure (1)..(1580): unsure at all n locations
  Clone ID: MRT4577_169252C.1
gtttttggccntgccgtcacgttcttaaaaaaaaagaatatcctcatncgtgacatttgnatagattnagtgnncnttngngnccggccggggtcccgttccaattccaaccaacctacctaggctccgcgcgcacctaccccgtctctgctccggggagcgtcaccagtcagtcacggcggctctaaaatctcagataccacccgggcagacccgtcccgcgaatctaaggtcaaaccaaccgcgatccgcgaatccgcgggagaggaggggaggggcgcgggggcatggagttcctgcagggccagaggctggagaccacgctggccgtcgcgggcgccgtcgttgccgtcgcagccggctccgcctacctcttcctccgcagtaggaagcccaggggatgcctagaccccgagaacttcaaggagtttaaacttgttgagaagaggcagctgagtcataatgttgccaagttcaagtttgcgctcccaacacctacttctgtattgggtcttccaatcggacagcatataagctgcagaggacaggatgcttctggcgaggaagtgatcaagccttatactccaactactctggactctgatgttggatcttttgagcttgttataaagatgtatccccaaggaagaatgtcgcatcatttccgtgagatgaaagttggtgattatatgtctgtgaagggacctaagggccgtttcaagtacctacctggacaagtgagagcatttggaatggtagctggaggatcaggcattactccaatgttccaagtcacaagggcaattcttgagaacccaaaggacaacacgaaagtacacttaatctatgcaaatgtcacgtatgaggatattcttctgaaggaagaacttgacggcatggccaaaaactatcctgatcgtttcaagatctactatgtcttgaatcagcctcctgaagtctgggacggtggcgtcgggttcgtgtcgaaggaaatgatccagactcattgcccagcgcctgccgccgacattcaggtattgcgatgtggacctcctcccatgaacaaagccatggccgcgcacctggacggccttggctacacgaaggagatgcagttccagttctaagcgttacattctctctaccagtaccagaataaacggcggtggaacaagtttcgtcgcctctttgagcagacgaagcctgaccatatcgctatatagctccaaacagacgcggtttgccactgacagtcacagagcgtcgtacttaaggggtgtttggtttatagggactaaactttagtctctccactttattccattttagttcataaattattaaatagggaaacttaaatagagttttagtttctatatttagtaatttagggactaaaatggaataaaatagaggactaaaaattagtccctagaaaccaaacacccctttactctacctggatgaaagcagcagtacagtacccacctaatttgtatcggtgtcgggacattgtaccatgccgttcttttgtatcggtttgtcactccctcaaaaaaaaaaaaaaaaaaactcgagca

SEQ ID NO: 75905 - DNA, 654 bp, Zea mays
  unsure (1)..(654): unsure at all n locations
  Clone ID: MRT4577_169253C.1
ccggccggggagcttatccctgcgtctccctgccggtgtcctccatgcctcttctcaccatacgcaggcgccatccttcggccttcagttccgctcgccgtgagctctcacggccgcccctcctttctctggtatccagctccaatttttcccccatggcgctcgagcttctcctggtccgactcgagcttcctttgtgcggcgctcctgttccctggctcgcccctccacgcgtccttggcttctgctcggactgcgccctgaccgagtccctccatcgcgccctgcgtttgtcatagacgcgcgcagatttctcaaggtttctctcatggcgcgcccagctcctccccggcttcttctctgcgcgcagctcgccccaggccccagctccctgtttctccatggcgcgcgcctgactcccggttctcggngcccagccgctcctccctcggctcgtctctctctgctcgccggcgcgcgtncctctctctctgcttgccgcgtccggccgagcgtccctgcgggccgnggnttnctnccctgtgctttggtcgtggggccctgccccaggggggaccccaggtggggtttgggcttaggtggggctgcattggtggggggaggggtggggagctccgggttgcggggtgggtt

SEQ ID NO: 75906 - DNA, 1743 bp, Zea mays
  Clone ID: MRT4577_169254C.1
gaggcacccaaccaacccctgccccgagggacagcgtcgcgagggagacagacagacagccgcgcgggaggaagggggccatggatttcctacaggggcagagcgtcgagaccatggtggccgtcgccgtcgcggtcgtcgccgtcgccgtgggcggcgcgctcctcctccgccgatccaagaggcccaagggctgcttggatcctgagaacttcaagaagtttaaacttgtggaaaagacacaaataagccataatgttgccaaattccgatttgctcttccaacccctacctctgtgttaggccttccaattggtcaacatatcagttgcaggggtcaagatgctaccggtgaagaagtaatcaagccttacacacctactacattggattctgatctaggaaattttcagcttgttataaagatgtaccctcaaggaagaatgtcgcatcacttccgtgaaatgaaagttggtgattatatgtctgtgaagggacctaagggtcgtttcaagtacctacttggacaagtgagagctttcggaatgctggctggaggatcaggcattactccaatgttccaagtcacaagggcaattcttgagaacccaaaggcaacacgaaatacacttaatctatgcaaatgtcacgtatgaggatattcttctgaaggtatatgccttttatgctgacagacttcatagactcttaacctgatatatcagttatatacctgtatgcaaaagggtctggttcaattgatggtgcctatttggtgagacactggtatcgttactctccatctgtccagcttacattacgaataaactagtaggtctggtttctgagatatggaaataatctgattttttgctcataatttatgaatcataccatgaagagcataaacatgtctcagaataccaggcaggttgtgttttttactagaattctatatacggtctcttgcaaaaaaaaatcttatataaaaatatgtgtaagcagcactctttgtctagaaataattacggatttattcctccacagtagaactagtaactcgtgtctcagttcttgtaatctcttcatattagtgtttgtatgctacactaaaccatcacagtagaagcaatctttctgcgtgaaagcatgctttcgtgccactgatgatggggcttatgacgacactacattcgtgatgaaatcgctattgtcatacagtacggttaccgtttttgtgtgccttacatctagcttgatgcaggaagaacttgacggcatggccaaaaactatcccgatcgtttcaagatctactatgtcttgaatcagcctcctgaagtctgggacggtggcgtcgggttcgtgtcgaaggaaacgatccagactcattgcccagcgcctgccgccgacattcaggtattgcgatgtggacctcctcccatgaacaaagccatggccgcgcacctggacggccttggctacacgaaggagatgcagtttcagttctaagcgttgcattctctctaccagtaccagaataaacggcggtggaacaaagttctaagctccaaacagacgctcttttgtacccacctaatttgtatcggtgtcgggacattgtaccatgccgttcttttgtatcggtttgtcactcacaaaaaaaaaaaaaaaaaaaaaaaaaaagtactctgcgttgttaccactgctcgtcatacaaatacaaaaaactgcacgtgcagcag

SEQ ID NO: 75907 - DNA, 792 bp, Zea mays
  Clone ID: MRT4577_169255C.1
agtttgttcacgcttcccccaagttctgcgtgctactccattccccgagccaatcgtcgaatgttcattgatggccggcctcaccggaaatattcctcgccccattggcccttcgatcccgctccttctgcggagatgctacgatgtcctgttgctcctgcttctgctgatgcgtggattcacgccctgcacatggcgacgacgccgccccgcatctaacttgatcatgccgctgtgacaccagatgataccacttctgcccctattgactgaaaggccgaatacatcaccaccgtcccgacaatctagcatgacggctctccacccctaaatcctcttgctgtataaatggaatcatcaagacctgcccattcacgcaaacaatattaaacactgatggcgattcatcgttactgttctgtacacctaccactaccatctgagcactcaagcattctggctgctacctggaaaggatctctgctcaacacatgcacgatttcgatgacatggctatgagattatgagacctacctatgaacacatagaagatattgctgggagtatcaatgccagtcgttccatgacagggatatcggccatgatgatgaaactcacaagaagacaaatgatattttggataagatagatgatgctctgaatcttttccccgatgaaaccttactggaacccctgtgttatgctgtgctacacattatgcaacacgccttgtggacgactgtgctactattgcagaagatatagtatatgcatgtgcgatacgctcagatg

SEQ ID NO: 75908 - DNA, 1022 bp, Zea mays
  Clone ID: MRT4577_169256C.1
cacgtttgctcgtaactcatatcaaacgtcaagatgtcgggaggaatcgacgttctcgccctcaaggaggaggatgttaccaagatgctcgctgcatcgtctcacattggcaccgacaatgccaacttccagatggaacagtacatcttcaaacgtcgtgctgatggcccttacatcatcaaccttcgccgcacctgggagaagttgttgctcgctgcccgtgcaattgctgccattgagcacccagctgaggtttttgttatctcaagccgtccctatggtcagcgtgctgtcttgaattttgctgcccacactggtgccactgctattgctggccgttttacccctggcgctttcaccaaccagattcaggctgctttccgtgagccccgcctgttggttgtcactgacccagcaactgacaagcagcccatcactgaggcgtcatatgttaacattcctgttattgctttctgcaacactgactctcctctcagatttgttgacattgccatcccctgcaacaccaagtcccaccactccattggtctgatgtggtggttgttggcacgagaggtgctgcgcctgcgaggtcagattccccgtgaatctaagtgggatgttgtagttgacttgttcttctacagggatcctgaagaggctgaaaaggaagagcaggctgccaaggaagttgctgctgtacccataaaggttgagacagactatgctgccattagttctgcagcaaactgggatggtgaggctgcaccagttgtgggcgccacggagaactgggacggcgaagcagccgccccggctgctgctggggctgctcctgttgctcctgcagctgttgatccagcaactttcgttgctgctgctgctgcttcagacaactgggccgatgaggcatggcaggctcagcctggtgcccctgcggcagcccctgccactggcagctggggagctaatgctcaatggtagataaagagaacacctgtgaaataaaatggtcaacccat

SEQ ID NO: 75909 - DNA, 445 bp, Zea mays
  Clone ID: MRT4577_169257C.1
aaaaaaaaaaaacgaagccgcttttaaaaaaaacttttgggggggggggggggggttccctgcccctggttttttataattggggacaacaaaaacaccccccaactaatttttcgaaaccaacatcacccaatttttttttttttttcaaaacaaaaattttgtccctgggagggaaccaagggccctttaacaatttaaaacccaaaacctgggcccccccccattgccattgggtttgcaggaaaaaaaggggctttttaaacccccttggggtaaaaaacaacgggataaaaggggaaaaaggttttcccccccgatgcaaaatgccccaagaagcccccaaaaaccttggtttttttaatgttccccgcggccataaagtccccatactcccctggggccccattgtccccatccctgaattttttattgggaaaaacct

SEQ ID NO: 75910 - DNA, 669 bp, Zea mays
  unsure (1)..(669): unsure at all n locations
  Clone ID: MRT4577_169258C.1
gtcgccgccccaggcgttttccagccgccggccaggnacgagcgccaaggctcccagccgccgccagggagggggccgcggccgagcctggcagacgagccatggccgggtcggggccgacattgcaggttcactgcatgtcctttgctccatgccggagagcagtgccacgccagagcactgggcttgcagcgccattcctccacccccctcccccaaacggccgacacagcggccggatcgagggccattaggccctcccattggaggaggaagacggggccaccccatttgggcgatggcctgtgaagatgatgcgtccacgcggagcatcgacggcacgagggggctgtccacgacgggcagcaatggtcccgacgaccataggcactggtggagatggcgaacgacgagcaactgccgctgcagtgggcggaggcggtggtggtgctgccaaatcgacatccatgggggccgatgcagacgatcctgcgtcaaacaccggcgccggtggcgacggggatgcagtggggagtccacactccaccaccggcagcggaaccaccgctgtccatccatggagaacgcagtagtgcacattttgcacttgcacacggcgttcagggatcgcgtgcaccggtggaagcgatgcggcttgcccaacggtga

SEQ ID NO: 75911 - DNA, 442 bp, Zea mays
  Clone ID: MRT4577_169259C.1
ccgggccgacccacgacgtccagtcacttacactacactgatcagcatacactgcaaggatggcgacatggaggaggctagaaagctgttccgaaaaatggcacagaaaggggctacgcccactgttgtgacctacagtgttatgattcatgggtacgccacaaatgggaggatccatgaggctgaaaagttcatacagcacatggacaacaaagggtttgttccagatgtatacacctatgcatcgctatttcatgggcactgtgtcaatgggaacgtggatgtggcgctgaagctattcgaatagatgacgcacaggggaacggaacctaatgtcgtggcctatacagctctgatatcaggtctagccaacgaacggagatcagaggccgcattccaactgtatgatcatatgctgaaagctggattgagtccacatgac

SEQ ID NO: 75912 - DNA, 208 bp, Zea mays
  Clone ID: MRT4577_16925C.1
gcagtgagctcggtctgtgtcctgcctctcgcgccgctgagccagtgagccgagctgctaggaatgtgtcgtagacaggagcgaaaagggcttcgagtactccgcaactcgcgaggtatggactgcggcgcggacgccctgctgctgctgccatggccggggatgcggagttgcctctcgaagaggcggaggccgcgatgagatccgc

SEQ ID NO: 75913 - DNA, 373 bp, Zea mays
  Clone ID: MRT4577_169260C.1
cccacgcgtccgcccacgcgttcgtccacgcgtccgcccacgcgtccgcccacgcgtgcgcccacgcgttcgcccacgcgttcgcggacgcgtgggctgagaaaacacttaccatggaggtagctggagatcctggcaaaattgctgtagtgcagaggaatctatggaaatttggaatcaaagaaatttgcaggacaggaaaaattgctttgagacgtgaaaggattggtgcaacagcccggttctggcgattttctgttgctttttacccagacctgattgaggcgttgtcgaaaaattcacttacattttgtaataggacagttattggtatgtttggttaaccatccaatgctgggggtgattgttatcc

SEQ ID NO: 75914 - DNA, 893 bp, Zea mays
  Clone ID: MRT4577_169261C.1
ccggccggggtctacccccgatttggagttcgggcacgacgagagaacccgccgtccgacccattcacccccgtggaccgtgccggtgccgcggcacgccgccgccgcaacgccatggggaagcgatccggcggccggaagcttccgttcttcaccagatcctcctcgtcctcctccaagcggaatcgctccgggcgtcgcctcccttccccctccaagcaggacaacgcgacgagggctcttctcgcctcccccaccgccgcctcgccgtccgcgaccccggactctgcagcggcggggcagaccgcccagccgccctctcccctctcagtcaccgcgggcgccgggggtgccttgtcggggaagatcaccaagaagaagcccggcgcgcgcctgtggatgcggctggaccgctggggtgcctccgaggtcgtcgagctcgacaaggccaccataatccgccgcgctggccttccctcgcgcgacctacggatccttggtcccgtattctctcgctcctccagcatcctcgctagggagaagacaatggtgatcaacctcgaattcatcagagcgatagttactgccgaggaggtgctcctgttggaccctctcatgcacgaagtgctccctttcgttgatcaattgaggcagcacctgcctctgaggagccttgtgggtgggaatggtgaatgtgcccctgatggcaatggagaaaaacaggggggctcgcatggaggccaggtgccccgtcttaatgaggcgaccggggcagagcacgagtttccatttgagttccatgtgctggaggtcgcgctcgagattgtgtgctcatcgttggacttagcggtgatgacctgagaggcatgctactcagtgcttgacgacttgac

SEQ ID NO: 75915 - DNA, 274 bp, Zea mays
  Clone ID: MRT4577_169262C.1
ggtgttactcgacacaagctatgacgagccgtgcccccggccggaaccgggccatactgaacgagggctgaacatagctcgctcctcgatggtcgcctttttaagagttgatggaggaaggtccgacttggcatggcacaagttaccaacatatagcgaagcttgctggtgaccgatgataaggggaggtcacccaagagatcattcgaagccggatacccgctgataaagaacgcatttagccactactaactcaacttgaaaactaagggat

SEQ ID NO: 75916 - DNA, 218 bp, Zea mays
  Clone ID: MRT4577_169263C.1
tttgatgtataaataaaaaaaaactcgagaacgagtcagaaaatcagttgagctgcatcaagtggtcgtgtaaagtttcttcaatcattttgcgcaacagaatggctctagagggttggtatatgagtgcgagcagaatattcttttgttcaatttgacacaaaggttctctaggaaggctgcataaaaaaaaaactgaatgctcaagttgtcatatt

SEQ ID NO: 75917 - DNA, 414 bp, Zea mays
  unsure (1)..(414): unsure at all n locations
  Clone ID: MRT4577_169264C.1
ctncgaggggccggccggggaaaaaactggccgcattctaccccggaaccggggagaccccaacgcgagacacggatgctccctgcggcacctctggcgggctcggggatggccaccggccgccactggaacagcgacagaccggtcaccacgagtcctccctgcgggtgccctgacgcggccggcgttggctaccggacgccggggctgggctccagcagcacccccccaccgccaacctctcaaagtcgcaagcgatgaaggatgtctctgtccaaaccgcgcgccatgccggagcggagcattccgccgggtgccgcgacggtcgacatcggcggtgtgtccaggggcgccctgcgcgagattctactgggcctgcaggcccaggaggtctgacggctccgcctgggctgc

SEQ ID NO: 75918 - DNA, 860 bp, Zea mays
  unsure (1)..(860): unsure at all n locations
  Clone ID: MRT4577_169265C.1
cttgttctgtaccattttgtggataacatggggcaacatgtttttcttcattgctgggcataccaaagatccatctgaaggtgttacaggtttgctaaaattcagcttttaaggaattcgatccgcatacttgtacctggtctattgtcaggacttatggaaaatcaccggtttctcgcggaggtcagacagtgactcttgttggaacaacactgggcggactcgtgggtgaagatgcaaaacggtgcctcttgaatgacttgcacattcttgatcttgaaaccatgacatgggatgatgtggatgcaatgtaagtacaagaatcttgattcttaatgcacacctaatgagaagataaggccattatttgtttcgtgaatctttgctatgtgagcttaaaatgtatttttttaaaagctcctagatttggttggcgcactggtaacccagcatgattggtttacatggtaactttagcgctatcaagcattagcttttactaacataaaaatgcaaaataaatatagattgtatcaagaccttaaacatatttttcgtagttaggtaaggttatcttgtatttacactttcattatgaaggtgtaatatacgccccctcccccaatgtattttttttatgaaaggctgtattttaataacatgtatatgtggtttgtggaataatctctctaggtcatcatgcacatgttctgaatcacaaagcaatggtcttttttaaagccaaccttgtgttattgtattttgaattcagttcatcgtggtgttggcttttgtgttttagaggcacccctcctncgagatcggatcatgctgctgcttgccatgctgaccgctatctt

SEQ ID NO: 75919 - DNA, 373 bp, Zea mays
  Clone ID: MRT4577_169266C.1
gatatttaaaatctattctcttttttttttattttttagtcaaaagacacactctgggagccctgtgttaaaaaacaactttcataaacacagcttttaaaatcccttttgagaccccacagtgcctttgggcgattaccgaacaggtattttttttggggaaccccccaaaaaatttttcttcttttgataaagggggaaaaagggtccaaattgaattatgcggttccaaactccaaatgtagggcttcgaaatttccacctcaacctttttgtgtgcgaattaaaccatgagcccctggaagggcaaaattaaccttggggctagcagaaggactaacccctttattggatcaaacaggatcttggggag

SEQ ID NO: 75920 - DNA, 549 bp, Zea mays
  unsure (1)..(549): unsure at all n locations
  Clone ID: MRT4577_169267C.1
aagcaggccccaaatcccgttttgaaaaatccaatcgatcaactacaacccgtcccggggggggcaaaaccgatcgaaaaaagttgcggcccccggagggaggagcgggccggatgccaccagccgtttcccggcaaatttacaggggggttttttcaattttcaacggcggggggggtggtggtgatggctcaaggaggaggacaacaacgggggcggggggtcaaaccggcggaaggaggcggccgatggggcgggggcagttgtcggggcggttttggaaaatcctgatgatgctgcaggggacaacgtcgacggcagcggcaacggcaacagggtggtggtaggagaaggaggtgcanttggggccaccttccatgctggtggtggtgcccaggtgggatctttttttgatgcatcactctcatggggggggaagaaaaaggggtgagaccgagggggtaaatgctctgcccccacaaaatgaggggggaaccaccggggaggggggcccgcccacgacagtttaaacggaacatcgatttttgg

SEQ ID NO: 75921 - DNA, 195 bp, Zea mays
  Clone ID: MRT4577_169268C.1
tcttatgagtgactaaaagggactaaaccatgttaattctaccttttggctctgctttattttagttacactaatgaaaataaattacactaatggcatgagaatgctaaggggtattttggggtgtatgttcaaacttttttttcataatttaacttttaatatattttccgtcattgtacattttgttgtatt

SEQ ID NO: 75922 - DNA, 608 bp, Zea mays
  Clone ID: MRT4577_169269C.1
agggccacccccgcgtccgtggaggttgctgcatgggaggcaaatgttcctttgtatactagaacatggacaaggattaccatgccggggaccgatagtgcttttcatgcttttattacctgcacttgtctgctgtcagttgccagcgcacacctgaccgctttgcttgcttaaaccatacaaatcttctttgttcatgcggaatggacatgaaaatcacattctttcgatatagcatggaggagcttaatactcttgtatcacctctggagggtgatctgactgcagtttgttgctgggtacacgaccacctacgcttattttgccaaatcatgttctctgaagcacagcaaaatggactcatgtaaaagcacagaatttacaggattagctattgatgccaatcatgtttctgtatttggtggtattcaaaatcagtgccatgaccttcaaaagccagcaggattccagcaagagaaaggaatccaggataattgtcttaatctcaacatagaagatccaccatgcagttccagaatataagaagagcatggcaaggataggatgtttcttgatcataggcctttacagaaaactgacagtccatt

SEQ ID NO: 75923 - DNA, 583 bp, Zea mays
  Clone ID: MRT4577_16926C.1
tcttgatatccatttcagaggaggatcttatcctaaaacccagccttacaaacggaaccataaaaaagaagattttgcatcaaagttgataatagggattaataggacatgttggaaatataccatgggacgtaacaagtacgtatgttggaaatctactatggggtataatagctgacgatatgaaaaagctcttctctgattgcaaaatgtttgttcatccgatctggaactgacaagaagatagacgaaccaaacggttgtgtggatgttgatttttttcctgatggcacatctcttgatgttcatcttatatggatatttggcaccttggccgttgttgttggagttagaacatttgtaaagggtcctttgtgcatatagcatatatggaagaggtacacatgaaaattgaccccccaaatcacaatatggtatcgcgtgctagggtttggcctcacaaccgctgcccgtaggcactgcagccagccatgcactgtcgatccatcaacgccgggtctgtgcgtctggccgccgcctgcgtggggctgctctcacgccgcatccgcgttgttgggggact

SEQ ID NO: 75924 - DNA, 307 bp, Zea mays
  unsure (1)..(307): unsure at all n locations
  Clone ID: MRT4577_169270C.1
agcaaacgcaaaaaggagaagacgagaggaaaagagagcgatggcacagagcaagccaacgaccgggagcaggaacaaggagcggcacaccaacggcaagngggccacgagaaagcagggcagaaagaacgcaacagaaacgggcaagccaggcgcaaacccgcagacaccgctggcacaacaacaccgaagaacgaaaggaacagcgagcaaagagcaagaaagagagaacagaggacaagcccagaccagaaccagggcgacaacaatcggacaccaagaagagaggggccgaacggaagcaaaa

SEQ ID NO: 75925 - DNA, 115 bp, Zea mays
  Clone ID: MRT4577_169271C.1
gattctggaatttgttcaagttttgggtatgtgtaatctgttatgtactagtgttctgattgttattgttctgctaattacaccataatgctaatttagagagactccaaatctc

SEQ ID NO: 75926 - DNA, 252 bp, Zea mays
  Clone ID: MRT4577_169272C.1
aactccaccaactttaaccacaccttcatctatcttctcctccacatctaccacatcttcaactccaacacactctacatatattactacccaaccaaaccacccacatccaataccatcaacatcatctcctccaaatacaatatataccctattaactcatcctatttctcctcatcatcacaaccctaatcaaacatactctatcctgattaacgaacacataacatcataacaaactatcttaacttc

SEQ ID NO: 75927 - DNA, 310 bp, Zea mays
  Clone ID: MRT4577_169273C.1
tagtactcattcacatcctgggatatcataaggaggttccgggcagaaaaaaccgataccaatacattacataaagggttaatccaacatggaaaatccacagttttacatctggttttgcctttcaaaggccaaaccagttttccggaaaaatccttttgcctgttagttgcagccgctgtaagatgtaccccctgtcgaacgcagcgtgcccaccatcaggccgttgtaaccatcccttgaatgacttgaagccagattggttattagtagaaccaccaatatattcttttaggctttaaaattttgg

SEQ ID NO: 75928 - DNA, 640 bp, Zea mays
  unsure (1)..(640): unsure at all n locations
  Clone ID: MRT4577_169274C.1
gggtaccccttcgnagggccggcccgggccgggnaaaaacccgatctgcgcaccacacgcgagcgagggacctggggcgctagaagagagagaagacgtctctctcctgtcggaggccccgctcacccaacctctcagctgctgcgctgcctgcctgcataactgaggttgacctgggggactaagcacatcctgaacgagctgaaggacctgcacaacgaccccaacacataatacagtgtaacccctgatgatgaggacatgagggattggaaagctacaattatgaaaccacctgacaatgcctatgctgcaggggtcgtcttaaccaacacctatacggacgaacagattacaacattgaaacctggcaaagaattctgtatgaaacaaagcgcctccatcttagtaccaacaatagaggacttgtactccttgcacattttgaatgattagaggagccatgcttggacaatcattaacgctctggtatccatcagctgcctgttagaccgccgccaacccggactaccttttaagaaaccgaagattgaccagatgttcaagacgtaccgctcgaagtactagtccattgaccgcagctgaacgcacaagtacgcgatggactgacgaacgcttt

SEQ ID NO: 75929 - DNA, 263 bp, Zea mays
  Clone ID: MRT4577_169275C.1
catatagttgttccattgtttcatatataattgcacacaacaaggaaactgggactaaccagataattaaagggtgcagacgagaagaaaaaggcggaacaacgggggacaatttaggtggaaaactgaccaggagcaaaaatccaaaaaagggggggaagacaggccacagaatggaagggaaagctacgggcatagcaaagctccacctccaagaaaaagaccgcacctggggagggccaggtttaatgagaaagttcaaa

SEQ ID NO: 75930 - DNA, 1156 bp, Zea mays
  unsure (1)..(1156): unsure at all n locations
  Clone ID: MRT4577_169276C.1
cctcgaggccggccgggcgcgtctaccctaaaccagccgccgccaggccgccagccgtggaggacaggaggagccacccccgcccagacccaggcacaggcacccaccgctgtaccgcgccaccgcccacgaccccacacggcgacgccccgacgacccgagccccggaccaccgccgctgcaggctgcagcacgcagcggcgcagcgctgctcgcctagttgcctggaggcaggaggcccgagccactgcctgccgagccggaccgccgccgccggaggcccagagcaacaccagcagagcactgctgcagccgcggactgagccgctgcccgccgagccggaccgccagaggcccagagcagcgccagctgagccacagcgacgtttgccccgccgttgtccagccgtgatttgaggtctcgtgggaggaggtcgccgtcatcacctagtgtgcggcgctcggccccgcaccttttaacaagttccagccgtggcgccgagccctactcctcccgccgccgccgcagattcttcctcgcgactcgccgctcgcccgactttccgagctccgacacaaaggagcaccatgggagagccgagcaaggagctcctggacctgccctccgaccccaggcctcccgcctccttcatcgagtcgcttctcgctggcagggagcagcagcagcaggataaggagggaaagcgtaagttgggggcgtccactgatcccctacccaaaagccaagttatcgggaaagtgaaggatttcttgggggagattgcaagggccaaccagaagttgcagcttgatgcacagaacaagcctcctgtggagtacgatattgaagcccttactgggaacgaggagcaatacattgagatggatctgcttctaggtgtcgctgatcttcattcagagcaggctgtggaggcagctgaagcaacaataaacggccgccagacttcagaaatgacatttgcttgcagctcatctgacttcggaagatgatagtgatgacagcgatgaagatgctgatgacaaacctgtcatgtctgacaaagataataaaggtgaaagtcctgatgacgcggagatgggtccagcgaaaggaaagaagcccaataagagacagaanaatggttgttctcaacta

SEQ ID NO: 75931 - DNA, 361 bp, Zea mays
  Clone ID: MRT4577_169277C.1
ggacctcgaattattggtggattctgacacatacataaaacacttttttatgggggttccttggatgacttcagagccaaaaacaaaaaaagttgcccaaattaataggggggcacatctgctttggctccccaaaaggcgctgcttattttagtgcaggttatttttcaacgaaggacatgcctagacaaaagttcagcacgaaaaacagtagcacaacccctctgttacatcatagaaaactgtggttggttcaagacggctccatgaggaagcccctggggtccctaacataccccgtaggggctgaagcaaccgcccggattggagactccaggatgatttgcccttccttggggcc

SEQ ID NO: 75932 - DNA, 2054 bp, Zea mays
  Clone ID: MRT4577_169278C.1
cggacgcgtgggttttgttcactgtggtgccttgggtggttgtcatggaccgtgatccacggccgcctgggcgcaatgctgtgaaggaagggtgctatcttgtatctctgatggcaactgatgccacaatgctcaagtgctgggaaacagttgtttgtggcagcatggggcggctcatcatggtgacatttggtggaaaggtttttggtggatttctgcattcaattgcgcaggtctacttcatggtggtatggctgctgttctactttgcagcaaggtgtaaggaggtgaggctgggtggtcgtcaatttggactggaggatgttgcagctgctcttgatggatttaggtagtgtctagttgccgcttgccgcctggatcatacatgaagagaggtatatttcatggcccatagtgtttattgatgaaacgctgctggtcttggctaagtagaggtttttttagttatcttgatcttctaaatcttgctgagatggtaaatgatttggatgagagagagaacttgacaatgttgtatgtacagtttttgccacagagtggtaatctgcttatagtccaccacatggcatacaaagaaaggatgtttggtccccttttccatggaaggttagaagcaagatacctggtgataggtgttctagctgcaacatgatttgtgaagtttatatacttgtgttgtgccagcaaaatttctctgggtaataggtcaaaacatgtgacgtgcatccaatcataggtaataatattgttgaagagagcggagatgacccaaaaaaaaaaaaaaaaaaaaaaaaaaaaaaaaaaaaaaaaaaaaaaaaagcccacgtttccagtcccctacgtcacgcgcgtgtcaacctccgtctgcccgattccccattcgctcctcacctcgctgaacgccgatccacgctagaacgcgccatgccggccgatgccgcatcctacgccgcgcggcggggcatctcgtccacccagcctctctcccgccgctcctcctcgcggcgctcctcctcctcctcttccgctccgctctcctggctggcacgctccgtctcgcctcctttgctgaccgcgacccggccctccgctcccttctcgcccgcctctcctctcccaatccgccatcgccgccgcctcccccacaccacctcccacggcgccgctcgccgttcacctccccctcgtcctccctctccgacgacgatatcctagtcagcccccttgatcccgctgcctcagccccctcccgccgccgcaacgcctcctactaccatgtgctagtcacctcctactccgccgcgcccaaaccctatccgttgccgctccccaacccgctcccggcctccgcttcccccttcttccttgccgtctacaatgagacggcgcctccgaagcccgcctcgccgctgggcagagaattcggttttcttgccctgaccaggcgcgacgcagcggccatcgtcaacctcctcgcgctgctctcctccgcacatatcttcgcgatccttggctacatcgccgtgcactccgccgcgctgggcgcagtgtttgcgtccgtggcggggcaccacgtacctgggcggcgtctagtgttcctcctcacctgtgctgcgaggggcgctaagagactcacagggttcgcgttcctgcggtgggccacgcgggacgccgttgtgcagatgctctgcctctggttctttgcggatgtgcacgatcaggcccagctgttcaggctctttgtggtcgccaaactgatgccattctccacatccgttaacccgtggcttggtgcagtcgttgcaggcccagagctcgatggtttctttgttgcctgggctgttcttgatgcagttgtgtcagttttgttcactgtggtgccttgggtggttgtcatggaccgtgatccacggccgcctgggcgcaatgctgtgaaggaagggtgctatcttgtgtctctgatggcaactgatgccactatgctcaaggctggggaaacagttgtttgtggcagcatggggcggctcatcatg

SEQ ID NO: 75933 - DNA, 292 bp, Zea mays
  unsure (1)..(292): unsure at all n locations
  Clone ID: MRT4577_169279C.1
tcgcgatctagaactagtccttcggatgaggactaaaagtttacangaaattactagtacaataacatatattagaacaataccgagactaatcgaacaaggatttgtctccacatatatacacaataatattacaaatattaatgtatactttgcgcgtgaatacgaatgcgactatcggtcgtacgatacgacggggcgaagtatgcatctcgctcctttcacttggccacgactgccaccggcgtcgcgaggacaggtccaccctgctggttctagatcgcgagcggcc

SEQ ID NO: 75934 - DNA, 381 bp, Zea mays
  Clone ID: MRT4577_16927C.1
ttttctctggaacagattgcgcttaattgacatcgggacaggaatctagcacccaaacaccctactgataatgccagcccatgaaatgtattaaaaatcttaattacctactcgccccttttactcacttggttgacaatttcctgtgcctttgtcaggctctccaccatctgttggcaatccttccgcctcctgactgtgtagtcggactccttcagcagctcgtcaagctcgtcggtcttgtacatgttggtgagcagctcgctctgcatgttctccctcgaccacgagacgaggttcagcatgatggccttgggaaccatatcaatcattgtgcggcggacaatgttgaagtatgatgtgataagcagtttgatgact

SEQ ID NO: 75935 - DNA, 202 bp, Zea mays
  Clone ID: MRT4577_169280C.1
atggagaaagcctggcgcagccagggcggcgctggagcagctaagcagcagcaagatgttcgacggcttcaatctccgcttccgccaccagagcgccacccttgagtgcaacaagtcattctcactctcacctgctcgtgtgcccctaggaagaatgtagaggttgactccccttccaggccagcatccactattcccaagg

SEQ ID NO: 75936 - DNA, 944 bp, Zea mays
  Clone ID: MRT4577_169281C.1
gggatggccacagcgcgcctgctccgttgcgcctcctccaccttccttttcagcacctgcaccaatccgttgcgctcgtgctcccctctcgtccgccgccagcacccccgcgccgccatgaccacggactcctcggccgcctcgttccagaagatccagatccagcgcgaggacaccacttttgatgcttatgttgttggcaaagaaaatgctcctggaattgtggttttgcaagagtggtggggagttgactatgagataaagaaccatgcgatccacatttcccaacttggtggaggatacaaagcactcattccagatttataccgtggaaaagttgctctggatgttgctgaggcacaacatctgatggagggtctcgactggcagggtgcagtcaaggatatccaggcttcagttaaatggctgaagtcaaatggatcacccaaggctcatttcggggagcatgacaattttgttggtttttcagatgtcactgcagccaagtccctggaggagaagctcaaatcttccgggatatcatatgaagttcacatataccctggatgttcgcatgccttcatgaacacttcgcctgaggcactcaagaggaagaaggggatgggtctgactgatgagaaccaggaagccgtcgacctggcctggtctcgcttctcttcttggatgggccggttcctcggatctgcttgattatgtgccgcgtgatgatgtgtggagtcaggtcccatgaataaaatagaataaaataaaatgttcagattcaggaaccatgcaaatggactgggctgtacggttctctggatttgcttgtccttctgtttataattatctacctcagtgtgatttccttattttctgtggatggatgcatattgtggaatagccgtcgatggcttctgacagtaagcagcgacaaggcaact

SEQ ID NO: 75937 - DNA, 604 bp, Zea mays
  Clone ID: MRT4577_169282C.1
gctcgccttcgctctaccttccgcggggaaatgtctgcggggggcggggggcggggctgcggccaccggcgcggtccgacccactccttcccctccttgctctacgagatccacatccaccgcgaggacaccactttcgatgcttatgctgttcgcaaaaaaatgctcctggaatgcccacgcgtcaagccacgcgacgacccacgcgtccgctcacgcgtccggcgatccacatttcccaacttggtggaggatacagagcactcattccagatttataccgtggaaaagttgctctcgatgttgctgaggcacaacatctgatggagggtctcgactggcagggtgcagtcaaggatatccaggcttcagttaaatggctgaagtcaaatggatcacccaaggttggtgttactggctattgcatgggaggtgctttatcaattgcaagtggagttttagtcccagaggttgatgctgttgttgctttctatgggacaccatcttctgagcttgctgatccttctaaggctaaggctcctatacaggctcccatccgggagcatgacagttttgttggttttttagatgtcactgcagccaa

SEQ ID NO: 75938 - DNA, 1641 bp, Zea mays
  Clone ID: MRT4577_169283C.1
gtacctcgaggccggccgggaccccgctttccctagacccagctagatctttggacacatatcgaaacagctctagctagcgcgctcgtcgtctaacctggcttccggcatggcttccaagcagatcggagtcttgacctgacttcattgccatcgtgctcccctctcgtccgccgccagcacccccgcgccgccatggccacggactcctccgccggctcgttccagaagatccagatccagcgcgaggacaccgatccatcaacaaacttcagcaaccaaccacagacaaagaagacctggacactaactctccaggtcagcagggagcgtccagccaaacaaggcagagagggcctccacctgaacctggttcaagcagcgattaaataatgcagcatattcttacttttgatgcttatgttgttggcaaagaaaatgctcctggaattgtggttttgcaagagtggtggggagttgactatgagataaagaaccatgcgatccacatttcccaacttggtggaggatacaaagcactcattccagatttataccgtggaaaagttgctctggatgttgctgaggcacaacatctgatggagggtcttgactggcagggtgcagtcaaggatatccaggcttcagttaaatggctgaagtcaaatggatcacccaaggttggtgttactggctattgcatgggaggtgctttatcaattgcaagtggagttttagtcccagaggttgatgctgttgttgctttctatgggacaccatcttctgagcttgctgatccttctaaggctaaggctcctatacaggctcatttcggggagcatgacagttttgttggtttttcagatgtcactgcagccaagtccctggaggagaagctcaaatcttccgggataccatatgaagttcacatataccctggatgttcgcatgccttcatgaacacttcgcctgaggcactcaagaggaagaaggggatgggtctgactgatgagaaccaggaagccgtcgacctggcctggtctcgcttctcttcttggatgggccggttcctcggatctgcttgattatgtgccgcgtgatgatgtgtggagtcaggtcccatgaataaaatagaataaaataaaatgttcagattcaggaaccatgcaaatggactgggctgtacggttctctggatttgcttgtccttctgtttatagttatctaccccagtgtggtttccttattttctgtggatggatgcatattgtggaatagccgtcgatggcttctgacagtaagcagcgacaaggcaactaactgctggccaaaaaaaaaaaaaaaaaaaaaaatctcgcttctcttcttggatgggccggttcctcggatctgcttgattatgtgccgcgtgatgatgtgtggagtcaggtcccatgaataaaattgaataaaataaaatgttcagattcaggaaccatgcaaatggactgggctgtacgggtctctggatttgcttggccttctgtttataggtatctacctcagtggggtttccttattttctggggatggatgcatattggggaatagccgtcgatggcttctgacagtaagcagcgacaaggcaactaactgctggcc

SEQ ID NO: 75939 - DNA, 162 bp, Zea mays
  Clone ID: MRT4577_169284C.1
tcagtagcctgcaataagagccagccagagtaactattataattttcgccgcttccattcgtgcttacatgccaaccgtctccgttctcaatgttatccagcatcgacgttccttcatcaccgctggagcgagatggttgtgaagaggttctctctttgtcg

SEQ ID NO: 75940 - DNA, 418 bp, Zea mays
  Clone ID: MRT4577_169285C.1
cccacgcgtccgcccacgcgtccgcatcccttcacatttcccattccctccctcgttgatcccgcattcgtctatggcggctgcactgggcgccgtgctccggcggctgcatacggcggcggcgcagccccctcgcctgacgaaattcgcgctgcacccgcccaaattcaatttctcagagtatacagcccagcagttgatagcaaaatccgatcagtgggcggtgaaaaggttatatttggacgacgacatgttgggataatgtcagctgaatcagtaggaaactacggagtccggatactctttgatgacttgcacaagacagggatcttcacatgggattacttgcaccatctcggttcagacaaattcagtctgatgagaaattacatcagaactttgagaaagcatggtctta

SEQ ID NO: 75941 - DNA, 819 bp, Zea mays
  Clone ID: MRT4577_169286C.1
gtgcggcgctcaggcggcgggtgggaaccagagaccagagagcggaagagatttccatcccttcacatttcccattccctccctcgttatcccgcattcgtctatggcggctgcactgggcgccgtgctccggcggctgcatacggcggcggcgcagccccctcgcctgacgaaattcgcgctgcacccgcccaaattcgttgaaatcgaattcgctgatggtagctcatttcacctgtcagcagaatttctcagagtatacagcccagcagttgatagcaaaatccgatcagtgggcggtgaaaaggttatatttggacgacgacatgttgggataatgtcagctgaatcagtaggaaactacggagtccggatactctttgatgacttgcacaagacagggatcttcacatgggattacttgcaccatctcggttcaaacaaattcagtctgatgagaaattacatcagaactttgagaaagcatggtcttagtcgcgatccccagagaaggaaatgatggagcaacagtctctagacagcctcgcttcttggcgcatggatcgatccatcaggcttgcctgccatgtaacaaagagatgctcaattgaatatttgagatgtgaacgcataacgcaaggatatccattaactagtgatcaacagtgactgtgatgggaaagactgaataaaagtactaaaacgttcatttactggagttcattgactatttggaacgaactggacaagacaccctcaattctcatatgtacgtatgcagttttcttgcaaaaaaaaaaaaaaaaaggccctagggcc

SEQ ID NO: 75942 - DNA, 347 bp, Zea mays
  Clone ID: MRT4577_169287C.1
cccacgcgtccgcccacgcgtccgtccacgtgtccgaaaaaaaaaaaaaaaaaaaaaaaggggaaaaaaaaaaaaaaaaaaaaaaaaaaaaaaaaaaaaaaaaaaaaaaaaaaaaaaaaaaaaaaggaaagaaaatataaaagaaaaaaagcattaagattgctacagtgaaacaaaaatggtttagtttagcaacacaaaaatacaatatacatgggggtggattaacaacgtattaaagggggaaaacaattgagatacatgaacttagattggatggaagcacatttcattttggtcaattggtgataattggtaaaaggagcagaaggatggcattatgaaaa

SEQ ID NO: 75943 - DNA, 824 bp, Zea mays
  Clone ID: MRT4577_169288C.1
cattgggaccctcgaggccggccggggaatccctcttctccagcctcagctcccctctccaatcgcagttgcagttcggcacgggctaggctttcgtcagcagcactttcctcccctcggctcttgacagattgaactgcttccatcagcaatccaatcgggagatggccaccactcagttcgccatggttgaggagctggcctcgctcatcaaggacaacctgcacagcaagcatctcatcctctccaccgaggagtccctcgtcgcagccctccaggagctgcactgccgtgacggcgacggcgacggcggccgtgaagagggcgacggcgcggcggatacgatagagctccagcctgccggggcctaccaccgccttctcttgcatcgccttgctgaaatttatgggttcgctcatgaatcggctggtgaaggcgaggatcgacatttggtcctccagcgctgccccgaaacagccatcccatctgttcttgttagtgatatgatatggaagtttgataacagcgatgatttcatgtctgttgtgctaacccgaaatgatacagattttcaaaaacctcagaaggcagatattgtccaaaaagacatttctgttaaaagctcgcgtctgaaagacaatacagactcgaaacctctgaggcagccagcagtacatcctgcagcatcattaaaggagagggaagctgcttatcgagctgctcgtgagcggatcttctctgtggatgatgccaagggaaacgataggtcatacgtgaaatgtcggcaggttcctgttgttgctcaacggatgattgcccatgca

SEQ ID NO: 75944 - DNA, 1958 bp, Zea mays
  Clone ID: MRT4577_169289C.1
gagtacctcgataccggccgggcgcggcgtccaagccctagcctaacgatacttgcttcagcccagggctttcctccgaatccccttctcgtccaggcagttgttgcaaaaatcccgcctccctgattgcggttgttgcaaaaatcccgctacgctagtcgctaggctttcctcagcagcacttccgcgcttcggctcctggcagattggattgggtcgctgcttccaccagcaatccaattccggagatgactaccactcagttcgccatggttgaggagctggcctcgctcatcaaggacaacctgcacagcaagcacctgatcctctccaccgaggaagccctcatcgcagccctccagcagctgcactgccgcgacggcgaccgtgaagaggacgacgatgcggcggatacgatagagcttcagcctgctggggcctaccaccgccttctcttgcatcgccttgctgaaatctatgggttcgctcatgaatcggttggtgaaggcgaggatcgacatttagtcctccagtgctgccctgaaacagccatcccatctgtccttgttagtgatatgatatggaagtttgataacagtgacgatttggcgtccgttgtgctaaccagaaatgatatagattttcaaaaacctcagaaggcagatgttgtccaaaaagatgtttctgttaaaaactcacatctgaaagataatacagacttgaaacctctgaagcagccagcagtacttccagcggcgtcattgaaggagagggaagctgcttatcgagctgctcgtgaacgaatcttctctggggatggtgccaagggaaatgatagatcatatgtgaaatgtcggcaggttcctgtcgttgcaaaacggatgattgcccatgcactcggtcaaaaggttcaaaataccacagagacagccgcctccacagaaagcaaagggaaacaactgtcgaatgggaaaactattccgacacatagcaggaacaacttctgcccagttacaccagataacatagaagcagttctaatggggatgccaagctcagctggtagtaactcgtatcaaactccaccaagccaaaggtgccacgcaactaatactagagctgttactgctgaaagcttgaagaaagagcagactggagcagctaagagaatgtttgcgcatgcactggggctgtctgcagctcgaggaagttgtggtacgctgcccaaaccgaagtaaagatctggagtcgagaacgcggataagtgaagaaggttggctgttgccgatgcaaggtccgactgagcttcatgtcctatcatatgtgagccatgggaatggaatgagcctgcaatggttggtgccatctactgatctacctctgcgaaacacgttttttgtgatgtgctagtagatgaaagggtttgttggttggatgttaattgttgggacccagagaggatctggtagccctggttcgaaacgcaacctcagtcggtgagagagcttgctggaatgctggatacgcatggacatggcatgccaagccaagtggatgttcttcaccagagtggaagcaaaatgatccttcacatgctctaggttgctgcaatgctgcatatgtttactctagcatgttgttaggctgtctccagcaaaacttgtatacaggcgtttaaaacactttttatactgtagacatgaggctttccatgcttacgtaagcatgaggcttttaataagtgttaattagagctccagcctcacgaattttgtagctgtctgtctctagctatagaaacttaagctgcgggtaggttgaaggcatttaattgatcctttctttttcttattttggattggattaattttaaggtttagtccatttcaattatcatgtgaacctgatgtactaactaaaacaggctcctgtcctctgttcatagacaaaaaaaaaaa

SEQ ID NO: 75945 - DNA, 222 bp, Zea mays
  Clone ID: MRT4577_16928C.1
acaaccccgtatatctttgggcaagctatctataatgggcccaagaacacatacctagtatcatactgctgttcggcaaaatgcaaagccgaccaaggaactctcctccctggagagcgtaccgaccaggcctcgctgctttatcccctgctaccgtactgcaagtatccataagatcaatccgacatcgcggatgcccatactcatagtatattctgtagc

SEQ ID NO: 75946 - DNA, 1550 bp, Zea mays
  Clone ID: MRT4577_169290C.1
ctccagcctcagctaccctctccaatcgcagttgcagttgcggctgggctaggctttcgtcaggagcacggtcctcccctcggctcttgacagatcgaactgcttccatcagcaattcaatcgggagatggccaccactcagttcgccatggttgaggagctggcctcgctcatcaaggacaacctgcacagcaagcatctcatcctctccaccgatgagtccctcgtcgcagccctccaagagctgcactgccgtgaagaggacgacggcacggcgtagcggatagaactccagcctggtggggagaatctgaactctctcttgcagccagaaaactagtttataataggaatcaagtaaatactatttgcatggatctccgaaattaatttttacataaaagcacctgggtttgaaaaaaaaaaataaaagtacaagctgtaactagttagcccttatctttcagactcgaaacctctgaggcagccagcagtacatcctgcagcatcattaaaggagagggaagctgcttatcgagctgctcgtgagcggatcttctctgtggatgatgccaagggaaacgataggtcatacgtgaaatgtcggcaggttcctgttgttgctcaacggatgattgcccatgcactcggtcaaaaggttcaaaataccacagaggcagttgcctccacagaaagcagaggaaaacataaacagctgccaaatgggaaaagtattccgacacatagcaggaacaacttctgcccagttacaccagataacaaagaagcggttcgaaatggtaggccaaactcagctggttgtaactcgtatcaaactccatcaagccaaagacgccacacaactaatactagagctgttactgctgaaggcttgaagaaagaacagactggagcagctaaaagaatgtttgcacatgcactgggtctgtctgcagctcgaggaagtaatggtgcgctgcccaaaccgaagtaaagatgtggatttgaaaacgggtaagtggagaaggttgcccagtgcaagctcaagctcctgccgtgggatgaacctgcaacggttggtgctcttctgtgccatctactactgtggagcgatttttgtggtgctgtaggagatgaaagcggttattggttggatgttaattgttggacttggacccagagaggatgtggcccggcgctggttcgaaaattcaagctcagatggggaaagatgttgctggatacgcattacatgccaagccaagtggaagagaaacgcccctcctgtcactcgtatggtaatatcgctctaaggttgctgcaatttgtttactctagtacgttatttagagaggcacatcctgtgccgttactttttttcctttgactatacttatataaggacgacttgctggatttgtggtcttgatttaatttgcactcttaggacttgtttaggagcaagtgtaatggacgaaattgagaagtttaaaatctcaaactattgaattttgattggtcccctcaaaaaaaaaaaaaaaaaagcggcc

SEQ ID NO: 75947 - DNA, 1313 bp, Zea mays
  Clone ID: MRT4577_169291C.1
agcatctagctgccataacatgatagggttgcagagtttacatgcatccagcaccagtcatgtagcaccgttgaacatgaaacgcgagtgagcaccaaagaaatgttctaaacttctaagagggcatttttgacatctgacaacagcccactgtaggctaagagaccaggtcgtcctaccgttagcatccttcgtccggttctttaggattcagcaacaaccttggatcatgccggcacatccattgcactatgggaccagtacatgcgtttatcagtctatggagtccaaacagaggttcaggtccagaaaaggttaagatgctactcttttcgtttagccacaaagagtttgctcatgtcttcagtaacaacattgctccttccacgaagctgcggtggaattagggcgttccctgcagcacttcctatgccttgggattgtgaatgcatcctcgattttgaccaggattctgaaaccggaaggaagctgcatgactgcttcatgcgtgcttgaacatcttcatgctgagccagtgcaggtagacagccacgattattacaggaagcgtcaacggcacaagcagacagtaataccagtcgttttggatggcggccaggaatccattttgatgtggcggaagcagcttggacacgacggcaacgtagaagaaacacacgaacaatgtgagcccaaaggcaatgaacgccgagccgatcagctgatcggtagaaaaatgcatctctggatttcccagtcttgtcggtctctgatgcgcagacccggtgggagcggacacaatagtaaaccctgagggcatgttcgtttgcaatggattacttccctaggggcatgttcggtttacaggtttttattccagagaggtattgaatccaggagggattgagttaatcccctctttgtcacttgaaccccttgggggtataatcccttttggctataatccctggctcaaactgttgttcggttaatctagagtattgtcaagtaccagtcacgctgccaatacataacacttcagctccatagagacctgcagagcggtggaggacggccggcgtctggctctggcggctggcggcccacgtttatggaaggaaaggagaagaacattgctgtcattgttggcacagtcacagatgacaaaaggatccaggaggttccagcaatgaaggttactgccctgaggttcacggagacagcaagggccaggattgtcaatgctggtggcgagtgcctcacatttgaccagcttgctcttcgtgcctcactgcctcacgggcattcttggg

SEQ ID NO: 75948 - DNA, 243 bp, Zea mays
  Clone ID: MRT4577_169292C.1
attcgtctcgaggcttcttactgatcgtttttttggaaggttatggccattctcaactcggggggttttaataaaatgcgtgggcgggaaactgttatggagttgctgcacaggctctaccacttccccattctgacttggcatagtcaaattacatcgctcaacctttcatggctgggcacagacttttgctctgactgtaactcgcataatcttaggcagaaacaccctacaaaaatcttt

SEQ ID NO: 75949 - DNA, 208 bp, Zea mays
  Clone ID: MRT4577_169293C.1
tgtgaattcgtttgagttcgtctgttacaataaacaacgaccaataaaacaaaggcctaaccccctgaaccccagcatagtgcagataatataaaaggtccggtgcacctgcgcctaagaacatagtacaggtgggaagatgtaaaagatccaggctttctggcggtggcgggtacaacgatagttatggtagagggtgccctagacc

SEQ ID NO: 75950 - DNA, 725 bp, Zea mays
  unsure (1)..(725): unsure at all n locations
  Clone ID: MRT4577_169294C.1
ttttttttttttnnnnnnnnnnnnnnnnnnnnnccataacatgatagggttgcagagtttacatgcatccagcaccagtcatgtagcaccgttgaacatgaaacgcgagtgagcaccaaagaaatgttctaaacttctaagagggcatttttgacatctgacaacagcccactgtaggctaagagaccaggtcgttttatcgttagcatccttcgtccggttctttaggattcagcaacaaccttggatcatgccggcacatccattgcactatgggaccagtacatgcgtttatcagtctatggagtccaaacagaggttcaggtccagaaaaggttaagatgctactcttttcgtttagccacaaagagtttgctcatgtcttcagtaacaacattgctcctcgattttgaccaggattctgaaaccggaaggaagctgcatgactgcttcatgcgtgcttgaacatcttcatgctgagccagtgcaggtagacagccacgattattacaggaagcgtcaacggcacaagcagacagtaataccagtcgttttggatggcggccaggaatccattttgatgtggcggaagcagcttggacacgacggcaacgtagaagaaacacacgaacaatgtgagcccaaaggcaatgaacgccgagccgatcagctgatcggtagaaaaatgcatctctggatttcccagtcctgtcggtctctgatgc

SEQ ID NO: 75951 - DNA, 352 bp, Zea mays
  Clone ID: MRT4577_169295C.1
ttttttttttttttttttttttttttttttttttttttttttttttttttttttttttttttttttttttttttggggcaaggaacaccatgggaaaaaaggccctccaagggggggggatattaaataattattacaaaacaacatgcaaattggacgaagcttattattacaaaatggataaaatgccaagattttccacttgggcctggcaacaagagggaatataaaggggggggaaattacctatgcctagggaaaacaaaccccgccaggtcggcctttccatccaaaaaggacaaaacgcccccatccggaagacgataattggggggcacctctggaggtaatg

SEQ ID NO: 75952 - DNA, 1777 bp, Zea mays
  unsure (1)..(1777): unsure at all n locations
  Clone ID: MRT4577_169296C.1
attaagaagcatttggatcgcgatctattaccactactagacgtaatacatggttgtaatcaccgaccaaaagatagacgtagtagcatctagctgccatgacatgatagggttgcagagtttacatgcatccagcaccagtcatgtagcaccgttgaacatgaaacgcgagtgagcaccaaagaaatgttctaaacttctaagagggcatttttgacatctgacaacagcccacggtaggctaagagaccaggtcgtcctaccgttagcatccttcgtccggttctttaggattcagcaacaaccttggatcatgccggcacatccattgcactatgggaccagtacatgcgtttatcagtctatggagtccaaacagaggttcaggtccagaaaaggttaagatgctactcttttcgtttagccacaaagagtttgctcatgtcttcagtaacaacattgctccttccacgaagctgcggtggaattagggcgttccctgcagcacttcctatgccttgggattgtgattgcatccttggaaatttattgcgcgagtcatgaagagcagacccatttgattccctcttccttgatgcattgtctgcagggggagcaaagagatctgcaacatctgggagatctaatgatgatgtgggcagagagacatcactcgaactaattggtgctacactcctcgattttgaccaggattctgaaaccggaaggaagctgcatgactgcttcatgcgtgcttgaacatcttcatgctgagccagtgcaggtagacagccacgattattacaggaagcgtcaacggcacaagcagacagtaataccagtcgttttggatggcggccaggaatccattttgatgtggcggaagcagcttggacacgacggcaacgtagaagaaacacactaacaatgtgagcccaaaggcaatgaacgccgagctgatcagctgatcggtagaaaaatgcatctctggatttcccagtcttgtcggtctctgatgcgcagacccggtgggagcggacacagtagtaaaccctgagggcatgttcgtttgcaatggattacttccctaggggcatgttcggtttacaggtttttattccagagaggtattgaatccaggagggattgagttaatcccctctttgtcacttgaaccccttgggggtataatcccttttggctataatccctggctcaaactgttgttcggttaatctagagtattgtcaagtaccagtcacgctgccaatacataacacttcagctccatagagacagtgtatggcaatatgggcccaatcgccgagcgccaacagcagtcactcttggctcacggcagtacggcaacagcaccaaatcgccctcctggccgctagatccaacagcggcaagccggcaacaggatacctcggctctggcggctggctctccagtctccaggctccggtccggcggcctcctttgtcctcgcggcgggctcgcggccggctgatcggctgtccggctccgtgcacccacggccgcggaggccggaggagactggatcactggacagtggagagaggacacggtctgccctctgcgtctctgccggcgtccgctctccgcctctccgagcgtccagcactccagcagagcagggacggccggacggcacaagcagccagcaccagcacagcaagcagcggcacggcccgaccggcttttttttttttttttttttttttttttttttngcccttttcatcccggccgg

SEQ ID NO: 75953 - DNA, 432 bp, Zea mays
  Clone ID: MRT4577_169297C.1
ttcctggtttacccacgcgtccgctccttgttccttgaccgctaacaccttactctcccgaatcgccacaatttccatgtgctcctgcactaccactcccaggacgtttaaggggtagcccgcaacttacgccgccatattcacacctagcgatgaagccggacgccattgtcaatttctatcggaagacagcgactgatgaagcacgcgcgcttattcgtcaaatgtgaaggagccggaacctactgactacgttcatccttaaacggcttatgaggaggcctcaccacatgcgtacattgccgcgacctgtaactcggcggattagaccgctgatattacctgcatgaggtatgagaatctctggacatgcaccattgcagatgaataagctggcaccgccactcagaccacgctgacggtggatactaa

SEQ ID NO: 75954 - DNA, 289 bp, Zea mays
  Clone ID: MRT4577_169298C.1
taaagttgtaactatataaacaaagtatcagctgcatatatgtagatatgtatgcgtatgagcaatgcaagtaaggagatctatctacatatatgcagctgatgccagagttataaagttgtaactatatattattattatttgtactactaacatgagagcagttgtacacgtataccagcatgcatgcatggatgttccttctgatgtatgtatgcatggtccatgtctagctagctattgttggaacttattaattggaacaatatggccacgattggatcaggtt

SEQ ID NO: 75955 - DNA, 228 bp, Zea mays
  Clone ID: MRT4577_169299C.1
atgccgcatcccttttaatgcaagcagatcatcccgtctcggctatatccgcctctgagcgctagatcatccattcttccccctcgcgttccctgatcgccacaaactctcgccgccgttgcagatgcaggcgcaaggattccgcgcgtccaagctcaggtgagacggtcactgatccagcaccctacccataaccgcgaggttcctaccctgatccgaaccctcgac

SEQ ID NO: 75956 - DNA, 763 bp, Zea mays
  Clone ID: MRT4577_16929C.1
gaatcatggcacaggatcgaatgtcgcatctttactatataatcggagtttggtacaaaataaataattacattataagaagacaacggtccagcaaaccaaagttgactgggagacgacgacctagacctctcacgaactcgtcacagcatcctccaagcgcctcatcctgtagtacctgttcttgacctggcacttgagaatccaggtaccaacttgcttttcagatgacacgtgtcctcgctcggcctagagcgcgcgttggagtcggtcctcgacgtagagcggcaccgcggcggatgtgaagtccggcgagcaattacttgagccccggtggagtatcctccatcgcgcagccatagagaccctcccatcgagcgccgcgcagccgtgcatccacatcgcgcggaggtgtgcaggactggcgacggctctccgcttggcattcagagtggagagatcgagagccctggcgtagaaaggggaccaggggacgtagccaccggcgacgaacagcgccccagagtgcgtgacggccgcagcgaactcccgtgtagaggacaggcgcggccggcggaccagtattagcacggatgcagaggagaccgcggatccgtcgacgaggcagagtcgagcgccatcggtggcggccgacgtgaggacgagacgaggacggggccaggcttttatacaccggaggggtgagctgaccaccgagaaccagggagaccccaaccaccgaacggacctggcgagctcccag

SEQ ID NO: 75957 - DNA, 994 bp, Zea mays
  unsure (1)..(994): unsure at all n locations
  Clone ID: MRT4577_1692C.1
tctctctctctgtgtatgtgtgtgtaaaactgtgctcctactcctacacaattctctggatctccaaaatctgaccagattggatgtgcgattcccgtttcttttcatgtctcccctgtcgagacgtcgtcggtgccagtaaacggaaataaacctttcccggcatatattagcagccagccttcctcttccacccacgtcctcctccatatatataaaaagcccacaccctcctccactccacctccaagggcgtgattgcagtagagcatctccttttctttatttgctatatatatgcatgttctgatcttcaagcagctcggccgatcaaacccatagcatcgccaccaaattaaaggtcttctctagatcattacatacacatatatatggggcctcagcaagacgggcggtcgtccacggcgaacggcggcacggcggcgaggcgcaaggaggccgccgcgaagcaggtggtgcggtaccgcgagtgccagcgcaaccacgcggcgtcagtcggcgggcacgccgtggacgggtgccgcgagttcatggcgtccagcgcggacggcacggcggcggcgctcacgtgcgccgcctgcgggtgccaccgcagcttccacaggcgcgaggtggcgacggcgacggagacggccgccgactgccgcgaccgcgcctccaccacctccgggtgaactcgacgatgagtcgtgaggtgagacgatcgactaggatcacgcacggcacgcgtgatgggcattggaatggtcgttgttgcagtagttgttcttggatgattttttgagtggatttttattgcgtgtactatactatatgctcgatgcaattaacagcatgcgtgtggatcgccgctcgtaaatacgtacgatgcttgtaactgatgattgtggaccgtggacgtgtatataaataaagtgagtggttcttccaattccnnnnnnnnnnnnnnnnnnnnnnnnnnnnnnnnnnnnnn

SEQ ID NO: 75958 - DNA, 234 bp, Zea mays
  Clone ID: MRT4577_169300C.1
cggggccctgactcacaagatcactcacctgtccacactacagataaaatctctaaacgtcaagtgcctgacgaccccgtagcacgcttcaaggcacatttattacttcgtagacgaacccgaagactcggagccccctgccatattcacaaatgacaccttgtttatagctaactacggagaattctataaaaagactacagataagatatgtaaagctctactaaaaatctt

SEQ ID NO: 75959 - DNA, 365 bp, Zea mays
  Clone ID: MRT4577_169301C.1
gctggaccggctgctggggaagctgtcgtgcccgctgctgctgctgtggggggacctggacccgtgggtcggcccggccaaggccgcgcggatccaggagttctacgccgacaccgccgtcgtgcacctgcaggccggccactgcccgcacgacgaggcgccggagcaggccaaccgggcgctgctcgagtggctcgcggctctcgacgcccgcgccaagccggccgagcccagcctccagaccgtctgatcgatcaggcgtcaggggcttagcgtacatacatacactagtcaaagcatacaatttggtggccatgtgccaatgtagcataacactagttaaagcatacaatacggtgattccc

SEQ ID NO: 75960 - DNA, 626 bp, Zea mays
  unsure (1)..(626): unsure at all n locations
  Clone ID: MRT4577_169302C.1
tgggaccctcgaggccggccgggccgggatattttgttctactccatccacttctcagatctcatctcatcactcgaaagtccactgctcaccaggagggagctactgcagatccctcgctgtcggaagacccactcggaggcctagaagatgaagacggtcccatccatcgtgccgcgattcttccgccgggaggggaagcccaattggccctatcctcaccgggttcctctcatcgcacggtttcatcatcactatagatggctctacaacttcaccgatcgcatgcactcgtcacacacactcgcatgctcaatctgggagcacaagatgcgctgtagcaaccaggcgattgactaattggctgactggacagccacatatgttatgatgtgtgaatgaactgttagcttctttctcttcgtactaaatgtgcgcaggctatgctccatttgaatcgtccataggacgcgtctgacttgagccggaagctaccaccttctgattatgagtgatacttcaacgttcggtccggctctctgacctgcgtctctactccacttatatgcatgcatcanatgcttatatcatgacaaaaaaaaaaaaagggccctagggccctcgag

SEQ ID NO: 75961 - DNA, 346 bp, Zea mays
  Clone ID: MRT4577_169303C.1
gcgcccttttttttttttttttaggagatgaaaattgtgatacctgctgatgatgggaatgcaaactctaacaaaggggagaaatatacccacagctacaaggcaaggtctctaacaaaagcataaataaaaaaccagtgccgagggctaataaaaaacacaaagaagaaaggcgtaagaacaacataactgaaataaaccgaggaaacacatgacaaaaaaaccggataaaaaaaacggaaacaggaccaatatgtattaaactaagtctagtaaacatgcacggtgagaaactgaacgagtacaccaaaacagatatggaggcagtgtaattctaccgcataca

SEQ ID NO: 75962 - DNA, 650 bp, Zea mays
  unsure (1)..(650): unsure at all n locations
  Clone ID: MRT4577_169304C.1
taaaagtaccatgattattataaagcctcttatacaacctanagcatgaaagttggcccaacaccaaataaacattaatgttagactggaattattattgtaaagcatgttagcttcaataaatcttgataaagtgatatgatgattgacttgtattatcattagatttataataatgcattcttccttttttactcgctggctacacgcaagctgcagagtctcttacagcacgattctctatttgaactaaagggctagtgagtggacctgttagttatttgttttggttgtttgaactgctgtaatgtttgtgttcactgtgtgtttcagaaaacagagtatgcaaggaaaattgaaatggaacctaaaaaataccccaaggagtttggttgtgtgtgatcaatgtaattgaactttaatgcattcattgatattttattggcttcaaaagaaatgtttaccagtgccagtcttgtcaatggcctggctactccaggggatcacatatcaatctgaaattaaaatgcatctgagttctgaatgaaaaaaaatcagctaacactgtctgaactactaacagaccttaaacataatactgttgatttgttgtctttgttactctgtatttgttttggagcattgcattc

SEQ ID NO: 75963 - DNA, 118 bp, Zea mays
  Clone ID: MRT4577_169305C.1
ctgtagcggtcctttggagagtgtgtgtggcgggagagtgaaaccttgggggaaaatgctaggagatacatagatctatttgttctacttttcgctcggaaagtttttaaatcctcat

SEQ ID NO: 75964 - DNA, 252 bp, Zea mays
  Clone ID: MRT4577_169306C.1
taaaacggccacccttttaatacatttttttttttttcgcacaaacacaaaacatcggagccagggttaagtagatttattgtaatcttccccctcccctacataaccataaatacacaacaatttcaaaatagatgtacaataaaaataccattacggcatcaagcaactcatccaataattattgtacccgttccctttcttgtgagaatctcattcagaatacatttagtaacacgcccataaaatgat

SEQ ID NO: 75965 - DNA, 301 bp, Zea mays
  Clone ID: MRT4577_169307C.1
cggccggggctggttcccttgcgggcgcaccgcagtccgcaccggacctcgagaggggaggagaggagatgggaggaggaaagccaggggcgactgaacggtcagacccctgacagcctcccttcaagcgatcaccgctcccggcttatagagcgcgttctaatcggcctatagccgacgccgcgacatgagtcaagagctaatccgaccttcaacaggaaactacggcccgccgtgaggtacacactggctgagaagaatgatgacgatatcgtcctcagtgtgcggcaacaaatacgcc

SEQ ID NO: 75966 - DNA, 443 bp, Zea mays
  Clone ID: MRT4577_169308C.1
gctctggacctttgggctgatttatgtgcttgcggtctcctaaaggagcgacgcccttacagcactgcggtcacgtctttaggccgacccgtgggtaccacgcgtaacggctttagcattctccaattagggggcttcttcggttccaccgtagtagtcagtatccgatacctataacgagatactatgaaaggcctaacggacgatagacgccgttacggtaactaatttagtagattagacgactgtggcctacgcgtggttcactcccgagtaagctcataattaatcggtttattagtggatatctttcattacgattgtagtagacggtattagtacttgcgcgactacgtacgcaaccaatctagcctcgtccagtcataagcgaccgcagtcatgtaatcgcgggaagcacggttcacctcactccgcacagagaa

SEQ ID NO: 75967 - DNA, 394 bp, Zea mays
  Clone ID: MRT4577_169309C.1
ccaaccggaacggtgtttttaaaaaaagcaagggaactcggggacggggacattcgactgggaacggagccaaaagacctcacgggagtaccacaggccacacaaagaaaacatagggccaaggaaaaattaggctggggcagggacaaaccaccaccagcaacagcaccccacgggaaggaccgaaccaaagggacaccaaaatcttgaaaaaggccccgaaatcccagggaaggacacacacgtaaactggctcaccgcacagatagcccgcaaagagagcgggaaccgaaacaagaacggggacaaaggaaaaaaagaatcgcaaatggtcaaaaccaaatgcgactgggacaagcctggacgccccgcaaaaaagccgtttgaaccggaa

SEQ ID NO: 75968 - DNA, 174 bp, Zea mays
  Clone ID: MRT4577_16930C.1
ccgggtcgacccagcaatccggacttttttagggtttgacttgacggatacagcgctggctcttccaatcgccgtgtgctctctgccactctgtcttgcggagccctcaccgcagaagccaggtgcggcgcgtggccatggtggtggcgaaggtcatatcgtgcgccctctcct

SEQ ID NO: 75969 - DNA, 611 bp, Zea mays
  Clone ID: MRT4577_169310C.1
cctcgaggccggccgggccgggatctctggcctcgctggtcgccgcgagcaagcgaatagcagagactggctgaatacagctgagctgatgtacagccaacagcagttagtctgactgagatgcatatcgacatactagggatcgatggcccggaggaggaatgagttactcggccgaggactgcgccgatcctcacggggctgcgatgattgacgcgcaggaggtcacccggtgcacagtgtactcgcgaggtcatccacaagcctctcgccacgatgatcgtgctctagatctagcgaggccaccgaggtcgaggacgacgaccagacggaagttgcctacatggatgccgacgctctgtgcaaagtgaacaagaatcctcagcttggcttgaggcttggcaggaatgatcttgatcctctgctactgcaccgccgcattctgcagagtccacgtctacccggtcgtgaccttcagactgatgctggtcagcaagcgtgcctactcccagcgatgctctcacatcatcggggaacgacagtaaggcatctgcggagtgccagctcacgagggctctctgagtgcctactaccggcgctaccttggcgat

SEQ ID NO: 75970 - DNA, 194 bp, Zea mays
  Clone ID: MRT4577_169311C.1
cgtttttccagcgtccgccgacgcgtgggcgggggggggggttgctatgagcacaatgctggatgtactttatttaccgcgccgcagtgaccacaccttatttttgtgcaccaaagtgaaatgccctctcatctacagacgcggtggcttatttttgtttttctggacggacgccataaagcatgagggggatg

SEQ ID NO: 75971 - DNA, 1609 bp, Zea mays
  Clone ID: MRT4577_169312C.1
agagcaccagctcaccgccccaccgattcaaaggcgctcggatcctctgacgtcgacgttccctgccagctcccggctgccgccctcgctccttccgccatctgcgctgctctgcggcgccagagccggcgcccgcccgctgccgccctcgacggaccgggacacggggccccaccgttctctttcctgcgctgcgctgcgcggcggctgtgctgctgatcagttaatgtgcctgtgaggctgtgacaggcggcgtcgagcgagtccgaggcgggctaactaaacccgccgtctctcgaggcggcgcccgcggagggccaggtggagggccgaggaaggtggaggcggtgaggcgatggggggcgccaaggcggaggacaagcccgccgccgccaccgctgaagacgattggtgttaccagtttggaaacaagaatgcgtttgactcgaaggccccgaaaaaatcaccacttgcattgagagtggttgtctttgccatgactgtgttatgtgggatatctatttggtcaatgtgtatgaagcagctagggagtgatggctggtcaagaatagtgaagatcgaagttgtggaacaaccatgtaataagtctacagttcctccttctgaggttcaatttgcgcattaccctcaaccgacaacttacagcagggtctcgtggcgaatcacgtggccgtagtggactacttcaatcgaagaggagtctctgcaatatttctcttcagaaggaatctgctccgccagttggtatcacagctagcgaataaccacgacagattcctgaagcagttaaacggaacacacaaggcgcatgtccacacagagcatgaggcccatatactcgcgagatacaagcccaggctgaacacgtcgtcgctaatacggaaactgaaacaggctgatgagtacacacgcgacgcccttgagaacctaaataacacccgccacatcactgtctactacgaggacatcgtccgcaacagaacaaggcttctcgacgccctggatttcctcggagtgccgaggagggagctggcgagtcggcacgtgaagatacacacgaagcccctgtcggagcagatcgagaactgggacgaagtctacagcgccctcaacggtacccagtacgagggcttcctgaatgccgctgactatacgtaatatgacgtcacggtctccacgtctcttgatgtagatgtaggtgtgtaggtatagcgccccagctgtgattcctttgttcttgttttcgagtagccggccggccttctgcgtgcctgcctggcaggagttttgatgcgggggatggaggcgctttgccatggttgcgttcgagctcctggctagcccacccactagctttcctcatgtccatgtaacgaccctcgagcttctctcatctttggccgtccgcttgtaatgcttgtcgtcagtgatctcacccatgccatgccatgccatgccatgccttcgagggacaaagctgtgcacttgaacttgaggcttgtcttttcattgggtgtttgcggtgggcaagcaagacgctgcagttaaggattattggaaggtggaaggacttgttggagttgctctt

SEQ ID NO: 75972 - DNA, 1451 bp, Zea mays
  Clone ID: MRT4577_169313C.1
gccggccggttcgggaagtaaaaatcaccacccgctcccactcccagccatgcctctcatcttcttctccgccgcagcccccctcgccgccgtctccctgctgcccctccccacccactgctgcctccgcctcaccgccacccgcgcggccgccacgagcacaaccgccaccccgggtcccgctcccgcgagcaccttcgccgtcgaggactacctcatcgccagctgccacctcaccccaccgcaggcgctcaaggcgtccaagagcctggcgcacctcaagtctgcatccaacgcgggcgcggtgctcgccttccttgcggacctcgggctctccccaaaggaggtggccgccgttgtggcgtccaatccgcgtgtcctctgcgctcgcatcgaccgttccctggctcctatctccacggagctccgcgcgctcggcctctccccgtcccagatcgcgcgcctcgcgcagatcgccggccgctacttcctctgccgcagcttcgtctccaaggtacggttctggctcccgctcttcggctcccccgagcggctcctccaggccagcgactggaactactggctcctcagctccgacctcgagaaggtggtggagcccaacgtggccttcctcaggaagtgcggcctcagcgcagtcgacatcgccaagctgctcgtggccgcgccgcggctcgtcaccatgcctccggagtatgtccaggacgcggtgcggcgtgccacgcagctcggcgtggcgccgggctcccagatgtttcgccacgcgctctccaccgcgggatgtatcgggcaggagaaggtcgactccaaggtcgccgtcctcaaggagacgctcgggtggtcgcaggaggaggtgagcctggccatcagtaaggcgccgcggatcctggttgcgtccgaggagaggctgcgccggaacgcggagttcctgctcaatgaggtcgggctgccgccgcagtacatcgcccgccgttcggtgcttctcatgtacagcctggagaggcggatagtgccccggcacctcgtgctggtggttctcaaagagaaggggttggttgagcaggaccggtgcttcttcaacgtggtggcaccaacagaagagaaattcttggagaaattcgttgctccctacgaggaatccatccctggtcttgccgatgcttacgagtctgcttgtatggggaaagtgacccggggtctatgactggaatgtcgaggagaatttcgaagagtggagtttaaaacagaggatgcaatatgagatgtgacagagaacggagcctgaaataggagatgtgacatagatctgctgaagatagcccatactgtcctcttaacagtgtgtcatcttgtatcgtccttgtgccgttctccgattgctttgaaatatactagatcgggcggcgccccttcgggcgccctatccggcactg

SEQ ID NO: 75973 - DNA, 385 bp, Zea mays
  Clone ID: MRT4577_169314C.1
cccccttctcccaattccttccaggtgccttctatccacccgtacgacgacaccattagggagtgcatttccatccacatcgaccaaaccagtttccatgtctgaaacgcgtgctgggagctgtactgtctttagcatggcattcatgctgacggtcagatgcccggtgacattatcattgtgggaggtgatgatgctttcaacaccttcttcagtgagactggtgctgggaagcactttcccctgtgctgttttttgttgacctttaaacctaacttgttattctattatgtgagaacctggcacctaccgccagctctttcaccctgagcagcttatcattttgaaggatgatgccaccaacatcttttgccttggtcactac

SEQ ID NO: 75974 - DNA, 453 bp, Zea mays
  Clone ID: MRT4577_169315C.1
gaaaggggcctttatttttttttttatttattgaaacaattgtttgtttgaactatttgtattgttgggggggggccaaaggcccccaattagaaaaaatttgggggggatttccctttttggggggtaaacccaaaaacccccaggttttaaacggggggggggggggggcaaaaaaaaaacagggcaagggggagggggccaaaaaaaaaaatatgggggacaaacccaaaacccgggaaacccgggggtccccaattttaaaccagtggggcccggggcgaaccaatcccggggggcctgggatttaaccttttaggggtcaaaggggacatgtatcccgaaagcaagcctgttttagggtccctttagggggtaaaatttaaatcccaaaattttttcgggaggaatttttcaaattttaaaaaaaaaaatgggccaaaaaattttggg

SEQ ID NO: 75975 - DNA, 257 bp, Zea mays
  Clone ID: MRT4577_169316C.1
cacgcccgcgggcacgtgcccggccttaattaattgctcgacccgctttttatctgtgagacggcctctctagagatgggggtgtgttttaaaatgacaggtatgcttcacatcaataacggacctggtcacatacaggcatctcagattctgagcgcaaattgatccctttggtaaaaaagacaacacatgtaacccactgcaaacggcagtgaatcccatacaccaaccaatgtggctggagcggctaaacaagt

SEQ ID NO: 75976 - DNA, 294 bp, Zea mays
  Clone ID: MRT4577_169317C.1
ctgatccggaagggaaacccatacagggaccggcgcggtcccagatttctttttcatcaaaaaaccccccggtgccctggttccaattcggccccggttttggatttcttcctcctttgaccgccggtgccagaactttcctttgcgggggctgcaccgccgggggggggtaaccaccagctgaggacccggggacgaacctctttggttcttcggcaatttggtatagttccttcaaaatggtttcctaataaggaggacacatgattgggctgccaattgggctctggctgg

SEQ ID NO: 75977 - DNA, 501 bp, Zea mays
  Clone ID: MRT4577_169318C.1
attactaatttcacttttttcttttttccgtgctttcttcccctccgcgaggaagcaaggaagcaagcaaatccatcgcgagtctcctcatcccaaggcggccggcggcgatgttggaggagctgctcatcttcacgcggggcggcctcatcctgtggtcgtcctgccgggccctgggcggcgccgcgctgctcaagggctcccccatcgacgcgctcatccgctcctgcctgctcgaggagcgctcgggcgacgccggcttcaccaaggacgcctacgcgctcaagtggaccttcaacaacgacctcgacctcgtcttcgtcgccgtctaccagcgcatgctccacctcctctacgtcgacgacctgctcgccgccgtccgcaaggagttctcccagatctacaaccccaatgctcgcgctgggggcggtgctgctgggaagaagaattctggctctgggaaggatgactccgatggcgactccgggaaggaggacaacg

SEQ ID NO: 75978 - DNA, 313 bp, Zea mays
  Clone ID: MRT4577_169319C.1
gtctaattatacaactctcagtctagggaactcactcatcttaagggtggacatgaaccaatcggtggcactaccatacaaggggaggacagacatggccatagcatgaatgtcattgcatgcgtttccattgccatgctccttgccttgtgcacattatataacctccaaactcactaggtctatacttactacattctatttgatacccgagcgtgcatgcaccgcctgaccatctattggaagccccgttaaatggcgacagaatgatgcatagaatcgtgcaaagtcaaacggacaatgagagctacac

SEQ ID NO: 75979 - DNA, 1176 bp, Zea mays
  Clone ID: MRT4577_16931C.1
ccttgctaaccaaccacggcgccgcgcgcgcgcatcgccgtcgcaatggccgccgccgactcgtccaagcccgcgcgcgcggccacgctccccgcccgcacgctcctcctggcgctccccttcctctccctcctcctcctcttcctctacgtctactccaccacctcgtggcgccctgcatcaggcctccccgcaaccgccgcaacaacaacaacaacaaccgtcgccaccaccaccaccaccaccgtgccgctgaccccctcccctccgtccccgcacatccggatgcggcggtcccggtaccgttcctacgacgactacctccgccaccagctgaacaagacgctggacccgcggctccggcgggtgtgggcgacgcgggactggcagcggaaggtggacgcgttcgcgcgcctcttcgcggggctccgggacgagggcctcctctccaacgcgtcccgcgcgctctgcgtcggcgcgcgcctgggccaggaggtggccgcgctgcgccaggtgggcgtccggggcgcgctcggcatcgacctggccccggcgccgccgctcgtcgcccgcggcgacttccacgcgcagcccttccccgacgccaccttcgacttcgagttctccaacgtcttcgaccacgcgctgtacccggaccgcttcgccgccgaggtggagcgcacgctgcgccccggcggcgtcgccgtgctccacgtcgccgtgcaccgccgcggggacaggtactccgccaacgacctgctggacgtgcgcggcctcgtcggcctgttccgccgctgcgacgtcgtgcgggtgtccaaggtcgacgccttcgggctcgacaccgaggtcatcctccgcaagaaggggtcgtctcgccgctgacgacgtctctagccatgcgtccatccgctgggtcctccacaacagtcaccgaccgaatacacgatccaatcttggcttgcaaactacgaacggcagagagaaaaaggcaagtgttgggcatcgatttattttggtttctgtactactaattgtggcattgtaccaacacctagcaaacacagtaggcatccatcttgttcttgctttgtatacctaggcaccgaattggtggtagttaggaaaaaacaattgagttcaattgaattgaaatcaatccgctttgatttatgtgcc

SEQ ID NO: 75980 - DNA, 837 bp, Zea mays
  unsure (1)..(837): unsure at all n locations
  Clone ID: MRT4577_169320C.1
atttcacttttttcttttttccgtgctttcttcccctccgcgaggaagcaaggaagcaagcaaatccatcgcgagtctcctcatcccaaggcggccggcggcgatgttggaggagctgctcatcttcacgcggggcggcctcatcctgtggtcgtcctgccgggccctgggcggcgccgcgctgctcaagggctcccccatcgacgcgctcatccgctcctgcctgctcgaggagcgctcgggcgacgccggcttcaccaaggacgcctacgcgctcaagtggaccttcaacaacgacctcgacctcgtcttcgtcgccgtctaccagcgcatgcaccacctcctctacgtcgacgacctgctcgccgccgtccgcaaggagttctcccagatctacaaccccaagcgcgtctcctatgacgacctcttcaccgagaccttccggcagctgcacctcgaggccgaggcgcgcgccgaggccatgaacaagtccaagcagcagcccaccaatccctcctccggctccggcgccggccgtggtcctgccggcaagaagctcggccccaatgctcgcgctgggggcggtgctgctgggaagaagaattctggctctgggaaggatgactccgatggcgactccgggaaggagcacaacggtggtttcactgctaacggtacggttgccaagggtggccaggagaatggtgctatcaaggacagttctcgcgccgcccggggctgttgttgttgacaatgatggcaaggagaacggngaccccaacgacggnngccttcgatgtaaataccttgcgtaagaagacaggagaaagaagggcg

SEQ ID NO: 75981 - DNA, 367 bp, Zea mays
  Clone ID: MRT4577_169321C.1
tacacatgtaatatcaataaccgaacaattggttgttgctagtatcggtgaacgagacgacccatctgctgagcgagcgagcgagcgagctagcttaagcgcgacgccggcatcactgtcactggcgccgtatagtgcatgacacgacacgattccagttgccacaggccacgcccaagctcgtttgtatatatacgcgcgcgcacatcaaactgccgtggcgagcgatcgaccccattccgtgccgtcccgagtctcttctcttgacacgacctgcagccctgtgccggcgcagctgcagctgcccgctcgctccagctccccgcacatcacccaggccaccaggcgctccggacagcgcccgccg

SEQ ID NO: 75982 - DNA, 773 bp, Zea mays
  unsure (1)..(773): unsure at all n locations
  Clone ID: MRT4577_169322C.1
aattttctggaaaatgcttaaatctcctccgagctcgcaaatccgccgccgccgccatgggcgactacgggaacgcgatgatgaggaaccaggatgcgggcgtgcagtctcgcgtgaaggcgcagagccgtgccaacctcctccagctcaagctcatcgggcagagccatccgacggggctgacgacgaacctgctgaagctgttcgagccacgccccccgctcgagcacaagccgccgctcgagaagcgcaagttgccggcttactctgggatgtcgcagtttgtatcgcggttcgcagagcctggtgaccccgagtatgctccgcccgtccccacgtgcgagactagggctgaaaagaaggatagaattcgtcaacttaagcttgaggaaggtgcagctaaggttgctgaagagctccagaagtacgacccacaaaatgaccccaatgtcactggagatccatacaaaacactctttgttgcacgacttggctacgagacatccgagcagaaggttaaaagggactttgaagcttatgggcctattaaaagggtacggctcataactgacaaggtaacaaataaacctagaggatatgcattcgtagagtatgcacacactcgggacatgaaaagtgcttataagcaagctgatgggagaaaagtggataacaaaagggtgcttgttgatgtaaagcgtggaagaactgttccaaattggcgntcctagagattgggtgggggacttggattcagcaggattgggggggaa

SEQ ID NO: 75983 - DNA, 480 bp, Zea mays
  Clone ID: MRT4577_169323C.1
atgggtagaggcaggaggggtcgtggttggcctcgccgtgctgacgggaagcacaagcgtgctccgagtcccccgagtactcggaggaggcctcctccgagtctgaccgctcgcctgctctggcttctcccccagcgtcatccgaggactcggatgactccatggggctctccaccgcggctcgggcgtactagcgctccatcgagcgcaccgggctcggcagactcctccgactcctcagaggagtggagcggcgacaacggtgacggcgagggcgatggcagcgacaacgatagcggcgacggcagcagcgacgatagtggcgagggtgacagcggcgacggtggcaacggcagcggcgacggcagcgacggcagcaagggcgacggtggtgacggcagtagcgacagcgatagtggcgacggtgacggcagtggcaagggcgacggcaaggccagtgacataatgccactggtttaa

SEQ ID NO: 75984 - DNA, 358 bp, Zea mays
  Clone ID: MRT4577_169324C.1
gacaaagccatctaccacatgaagcaatcctccaacgaatccgcgggcgcagacgtttcccgtgcgcaatcggtgaagagccgcatcgccaggagcaacgacgcgcgcaggctcaagaactggatcacggtgctccaggaagcgcaggccgccgtggccgacggcgccgactgtgctccgcaggtgatggcgttgcaagccgaggcgttgctgaggctgcaacggcacgacgaagccgactcgcttctcagcggcgccggcgcgccaaggttcggggtcgacgagtcgaccaagttctttggcaccttcggccacgcctactttctcatcgtgcgagctcaggtcgacatggctgctg

SEQ ID NO: 75985 - DNA, 1120 bp, Zea mays
  Clone ID: MRT4577_169325C.1
ggcgtcttcacttgttctggtcttctcgtatgcctgatgaagaggttcacattttggcctcaggcttatcttggcctgacattcaactggggagctttactagggtgggctgctattaaggaaagcatagaccctgcaatcatccttccattgtatacagctggtatttgttggacgctggtgtctaacacttgttctggtcttctcgtatcccctgatgaagaggttcacattttggcctcatgcttatcttggcctgacattcaactggggagctttactagggtgggctgctattaaggaaagcatagaccctgcaatcatccttccattgtatacagctggtatttgttggacgctggtgtatgatactatatatgcgcatcaggacaaagaagatgacctgaaagtaggagtcaagtccacagcattaagatttggagatttgaccaaatactggatcagtggctttggcgcggcatgcgtcggcagcttagcactcagtgggaacaatgcttggacagggtggccctactatccattcatagcagctgcagctgcccagttagcgtggcaggtttcgaccgtggatctgtctagccgctcagattgcaacaagaagttcgtgtccaacaagtggtttggagctttggtatttagtgggattctatttgggcgtcttgtatcatgatggttagctgatgaagcgtcatgtgcttgcatggtgggtccagtggaacctaagcaatattatgatgagatgctacaaacttttgtgtctgggctagcaaatgcggcgtggtacaggagtggagtggactttgtaagctgcttgatctttcaccgtcatcaaaccttggctatttaacgagcatatcaatcaatcatggtggtggtctgatgtaggacatgtgttacgatttccctagcagcttgctccttctcatcttttatttcaaatcttactgtgagtgcagctacggtacgtgttttgcacgatctattgactatagccttagggcatatacttgttttttttattacttctgtcaccatgagtggaggcaaaacactgctgtgttgttacataaaaacagacagacgtagatatttaagtgtt

SEQ ID NO: 75986 - DNA, 1134 bp, Zea mays
  Clone ID: MRT4577_169327C.1
atgtggaccggcccgggcggggggggcccctttctggggaaccctgctcaccgttccggtcctcccgaaagctaagggagacgagcagcctaaaaaccctagcccccgaatcagatccgaccgcccgccggagcgcggaaccctgcccccggccgccatggagatgagcgatgcggagcggctgttcttcttcgagatggcctgcaacaactccgaggtcgcgtacgagcagaaccccaacgacgccgacaacttgacgcgatggggcggagcgctgctggagctatcgcagctgcgtaacggccccgacagcctcaagctcctccaagatgcggaagccaagctggaggaggcactgcaaattgatcccaacaagtctgatgcgctctggtgcttgggaaatgctcagacttctcatggattcttcactccagacactgcaatagcaaatgagttttttgcgaaggcaactgaatgtttccagaaagctgctgatgtggaacctgcaaatgagctgtacaggaagtcattagacttgtcagcgaaggcacctgaactgcactcggagatccacaggcaaatggcttctcaagcggcaacacaagcatcctcagcctcaaatccaacgcaatcaaggaagaagaagaagaagaaggacagcgagttctggtacgatgtttgtggatgggtgatccttggcgcgggcatttgtgcttgggttggattggcaagagcaagcatgcctcccccaccggcaccagccacgtgaagctgatcgagtgccaagaatgctttgcaaatgttgttaacatgcccccatgttaaggtgcctcaggcatgggatctttccaggtgttagttttccatggagaggagagagtggtgtttccatacgggttggatcaatttttcatgcttgttcttttcggagcctcgatgaggtttcccttataatcggcatatgctgctggataattttgtacttgcttataccgttttgagccttaaaaaccgtcacgacgttgcgactgttacaaaaaaaaaaaaaaagccgtgttcgctatgaatcgtgaaatggtgcccatgcataaagtggcaaataaatgtatgcggctgtttgttttgcttttgttt

SEQ ID NO: 75987 - DNA, 484 bp, Zea mays
  Clone ID: MRT4577_169328C.1
tttttttttttttttttttaaccaaattggatctcaactatatccatcatattgggtagaatagggataacactattaaaaaaaatatagctgcatgaagctcaatgcgcatcacatgagatcattaagatacaggggagatttactcccagtcaaaaagaatcagtttattaccgtcaattagaactaaatctactcacgagtgaagtatactgaacatggtacagaggggttctgtaagtttcaggaaaaaagctgtacgccctctcatatctttccccatatatcagaaaaggtgaaccaaaattttttgaaggaaccttcaagtaagcttgctagctatacccgtaatgtataggacctgctccattctcgttctctcctgctgtgatatcacaaggcattatacagaggataaactttcctatccatgcccgagacttgccacgatcaaaacattcatttctggaagcaggcgtagata

SEQ ID NO: 75988 - DNA, 574 bp, Zea mays
  unsure (1)..(574): unsure at all n locations
  Clone ID: MRT4577_169329C.1
attcggctcgagccataggcagcttataagctgtaccaaacaggccctaagcccatctaggtctaagtttaaaaaaaatcaactttgataaccaacaactaaaattttatgtatgttgacaacacaagtagattcattatgtaaaattatttttacaacttatagcttttttcatttgatatagatattacatgtcattttttgtaagaagtttgacttaggacaaatcccatattcgttatcgtagtatgaatgctttgtgctactgaagacaccatgtttaatttactttgtataaggaatttgattttgatatatgcagcttaaatatagttgctttgctttacctgcataatgctcaaattatatgtgtttttctattgtaaactgatttagccatgtagcctctcccaaatagctttgacactaaaaggttggngaacaaatagtacatatattttctgtttgtatctgtgttctaactcgtttagagttcaaatctgttcgtattcaaatgctcaaattcgatatatatgaagtcgatatctattcatatcttgtccgacacgactga

SEQ ID NO: 75989 - DNA, 350 bp, Zea mays
  Clone ID: MRT4577_16932C.1
aaaaaaaaatttcaatttttttcctttccaaaaatttaaaacataaggaaaattctttttgaccaaaaaaaaagtttgatagttgcatgatgcttaaatcaaagtctaccaaataaggttttaaagcagtctagcgggctgtttgacaagctttaaaatcccccccacaacagattgggttttaatgaagccctgcattgcaagaactgaagccctatagtaccttaaatgtaaatataactttgaaaaaatcaattttggggatgcttcgctataaaaacaaattcttttgggaccaaccatttcgcttgtcggcccccggttttcctttgtttccacaaaacattttt

SEQ ID NO: 75990 - DNA, 572 bp, Zea mays
  unsure (1)..(572): unsure at all n locations
  Clone ID: MRT4577_169330C.1
ttttttttttttttttttcgttttgagtgaccgactgattgaacttgcattgaggtctaagggagcgtgcagagttcatccactcgctgaagcctcgaagttgaaagcaaactttttaaatagcttagtacacgttccagaggtatcaaaaaaaaatctggcccgcattttctggcagtgacagactgacagtttaagacacgatttttgggtcctagagaattgaagactaggtttggcttaccaacaaagctaggtctcgactgttcttcggtgcctttggtttgcacgacatttctgcatcttggtatggtagctccaagatggcgtctttattaaatataaaaagaatcgaagatggcctatgcgcagagattatggagtatgaatgagaatgagatattacggttttgtgtaaggggaataccatgcatgcatatcagcataaccgcctctgatgtcatggactcatggctgatgcagctttgcgcctttgcccaccaagatacagatacagagcatttgtgaagtanaggtagagccccaccaaagataaactatgtgctgtgaga

SEQ ID NO: 75991 - DNA, 559 bp, Zea mays
  Clone ID: MRT4577_169331C.1
ccggccaggtccccatagtacatgaaagatcacactgtgaccacgcccttgatgtgcccgtcggtcgactgtgtgcgatggaggccgaggacggccttcaccgtacggaaaatcggcggcatgcacccaccctaccaaaaaaccacggatgccgaaatccgatccggcatcgagtaccccgtgcgcgaactaaaagcgcatgtactagctggcgttggacgcggctggtctgcaggcatacagcggctcctcgccctccaggaccgcccacatgacaccttacaataccctgagaaatgaggaaaacaccgcgttcctggcccgattcacggaaataaagaacagccatcgctgccgctacaagacgatcgctctattctagaaaatgagggcggtaacctggcacagcagaaacgaaatacctaccccttacccgatgatgcgctgctcgacggtacgctcaacgtgtgccgcgatgactataacttcccgtcacgtgatctactcatgtggaacgactacaacacatacagcatcatatatatatacgctgcctgat

SEQ ID NO: 75992 - DNA, 184 bp, Zea mays
  Clone ID: MRT4577_169332C.1
catcaaaaattttatttttctctaacgatatctcaactaccgcggggtttataaccaccgctggatctttaacaccttgactcaaggattgactcctctggaatacaaaagatataactctgctggcctggcttgccattctgatgctgacgacgactccatcattgttaagcaagttgaaaag

SEQ ID NO: 75993 - DNA, 616 bp, Zea mays
  Clone ID: MRT4577_169333C.1
cgtgttggtactcgcctacctccgaggaatcaaggctttgccccttgtacggatgacgtgcggcgaccggagttcaatctgaaccacgacaccctgcatgcgagtgcttctcctatccacatgagggcaccccgtgctataagggcagataacggcgtgtctgggtgcgtgaagctgtcttgacctagtgatgcacgctgaggggcaaatgtcagcagacacataccattgcaggaggatacgatgcttgcaacagcttgttcagggaaaatgtggctgggaaccacgcgcccagggctgctcctagggagctctatcctatttggatacaggaggtgagatctgacccctaccgccagatgtttcaccctcagcagctgatgagggtgaaggatgatgcatgcataccatgtgatccgtgtgactacgccattggagctgatagttgtgtacctgccctggctctgaaatagaagcttgccgactcgtgtcctttctacaatgcttacttgcacatgacgctgaaggaggaggaacgggctctgggcttggctgctttctcctacttcgcctgggtgtagactaccgctagaaatacaaacttgcattcactgtg

SEQ ID NO: 75994 - DNA, 570 bp, Zea mays
  Clone ID: MRT4577_169334C.1
tgtgcgtggaggtgctctactccacgcacctccggatattcgccggcggcgaggtcaacccggcgcacctcaacgacctcgagcacggcggcatgctgctcatgttcttcctcttcggcgcgctcgctctcgcgtcccagctctggcccaggcacttcccgctgacggacggcgcgctgtgcctggtggcggcgacggcgttcacggcggagctggtgctcttctacttccactcgacgacgcacatggggctggaagggtactaccactacctgctggtgctgctggtgggcctgtgcgtggccgccgccgtcctcggcgcgctcctgccggacagcttcccggccgacctggcctcgggcgtcctcgtcgcgctgcaggggctctggttctaccagacggcgctggcgctgtacgggcccatgctgcccgcgggctgcgcccgcgacgccgacgcccacgtcgagtgccgctcgcgcgccgcgcaaggagcgcgccgagcagctcgccatctcccagctcttcgccctcgtgctcctcgccttcctctacgcgctcgggtgctacgcc

SEQ ID NO: 75995 - DNA, 735 bp, Zea mays
  unsure (1)..(735): unsure at all n locations
  Clone ID: MRT4577_169335C.1
aattcggcacgaggtggagaggcagtagccagagtgtgagctgacggcggacgtgctcgcctctcctctccnacatttccggctcccctctccgcattccatggcaccgcattaccggtatttttagccgccggaggagacgggttgcgtagagagaggggaaaccagagctcctgactgttcctctctccctcctcacgggcgggctccgtctgttccgtccatccaccgccccggtcgtctcccggccagatccctctcctgcaaggtttctttgcggtatggtcggttctctgtggtttctcttctgaatgtgctggtgcggtgatgttgttttgatttgtgttcgctttggcggatctggtcgcgcacagagtggccggagaagatgatgggcgggttcctctccagggtcctcctgtaagcgctctattgctccgaatcttgtagcatgttgtttgtagattgacatgttgaggttggagccttatcagaggcatgagtttcgggtttgaatttgtttccttgaaatgggattttgtgggtgcccattcagagagttcagtctcttcttggtttaaactcttcattcgttcttaacatactgctttcttaaaaaaatgaggagatgcgttctgtcttatcgatttgtccccctggttattcgccggaaaatgaggctaagagcacgcacccattcaaaagtattttattggtctcgaggagcatgggagc

SEQ ID NO: 75996 - DNA, 386 bp, Zea mays
  Clone ID: MRT4577_169336C.1
aaaatctcgaggcctgcctcctaccgcgcttcaagtggtcaagctctcgcgggtgcagatcagggttttggtcagtgccgctgcggcttcaatccatactggagtgcttaatcgatcttatgccgaagacctcgaagatgacgtttatcctgcctttaatgagctccaatttcccccagaaggactttttatgcgccttggagcatgctctccgaaagatggtgcgcagctaacgcctgggaagctggcgattcattccgtcgaggatatcgtgctccgcatcactacgtccgcgagaacgtggagcgcgctgacaaatatactcaaccatgaaggtgaagaaggctacgtatactttcttccgtcaactctgaaatgagatctga

SEQ ID NO: 75997 - DNA, 839 bp, Zea mays
  unsure (1)..(839): unsure at all n locations
  Clone ID: MRT4577_169337C.1
ccggtaccggccttcccgggcataaccatgtagcaagtccggnaaaaaaaacactggtgcttcgtacgtcacacaggcctttcaccttgacgtcggcgctaggctctgcctcctccccgccactcatgttcttcgcaggagttcctccccgccgctcccggtcatcgtaggatctcttcctagccgccgcaggaaccggattcagatatggaaggggatggttgttattttaccaatcttgtgaattgaggatttgaaccttttgaagacatctctcaatcaccagttcacttgcaacagccaatctgtacaaaggataagaacacctcatccaagccaaccctaaagcacataggtaaaaatttcagtgaagaagaagatagacacaagggactaatcaaacaagaggcacgttttggaaaagaatatatttgttctctgaggcgaatagagaaaattgtcccaaacgtactgaaaattctttgctgcatcgttggagttgtatccaagatgctgtaagttattgtggatgttgcaatagtattgagactagaaatcaaagcggtttggctgttcatgatagggtggagcaagctgagaagctttttaaagaacaagatccccacaacaagtcttttcaattcaagcattgctggctgttgttgaggaaccaaccaaaatggcatgacaagctaaatcaattagttaccacaaaaaactagtaacaagaagcagaaaacaaccagaaaaatcaagtctaggccttgttgacctatcaatgaaagagggtaatgatgctgctcctaatgcaattgagattccagagatagaaccatcac

SEQ ID NO: 75998 - DNA, 530 bp, Zea mays
  Clone ID: MRT4577_169338C.1
tttttttttttttttttttttttttttttttttttttttttttttttttttctgtttttttttttttttttatttttttttttttttttttttattttttttttttatcgaaataaatcccaaccaatatattgattatttttaggaaacacatccccctttgagggccccattttcgagtccatctcatatgtaatctaaaaaatggcccccccaaccatgggttgctgccaccacaaggcagggttcatcaaaaaaaactggttgtatggcaacaattgtttcttctttaggaaggcacccaccaatgggttacccacccctaggggattaaataactgttgcccctgttgtaggtccccaacaaatttccacacaatcaattggttaaatggaaataattgttgcaagtaggcaacagggtttgccacaactagctgagtaaaaactggtacaatttgttgcaacaactgttgttgcaacaactgttgttgcaggtatttaggtgcattgcccataacgagcgggct

SEQ ID NO: 75999 - DNA, 634 bp, Zea mays
  unsure (1)..(634): unsure at all n locations
  Clone ID: MRT4577_169339C.1
atttcacctcactcttcctcttcagttcatccacacaaccacctagatccaagccaatcgtgagctcgtgacgatcaccaccaaccaaccaaccaccatgtccagcgacacggcgccgcacgtcgtggaggacttcttcggggccatccagctccttagcgacggcaccgtcgtccgcggcgacgaggcggcgctgctgccgccgaagcccttcccggacgtcccgggggttcagtggaaggacgccgtgtacgacgcggcgcgcggcctcaaggtccgcgtgtacaggccaacggcggacgccggggacagcaagctcccggtgctggtgcacttccacggaggcggctactgcgtcggctcctacgacgagctcggcggggccgactacctgcgccgacgcctcgcggccgacctccccgcgctcgtcctctccgtgcagtaccggctcgcccccgagcaccgcctcccggcggcgatcgaggacggcgcgacgttcctggcctggctgcgcgggcaagcggcgctcgccggcgcgggcggcgccggcgccggcgtcgagcagtggctcgcggagtcggccgacttcgcgcggacgttcctgtcgggctntaccgccggcgccaacctggcc

SEQ ID NO: 76000 - DNA, 269 bp, Zea mays
  unsure (1)..(269): unsure at all n locations
  Clone ID: MRT4577_16933C.1
tcggagacgcatgaggacctatgaagaacacttggagcctcactaatgactgccatgatattgggcatgttgatgctatttagaacattaagcttgagctgctatgtgtgaccatactggctgaactgactcaaagctcctatgactgnggttggatggccatacctctaactgggggtgagaaacgtcactgacaacccggtatttgactgctacaggattgaccatagaatcacagctggcatattacgagtatcaccctagatcgt

SEQ ID NO: 76001 - DNA, 516 bp, Zea mays
  unsure (1)..(516): unsure at all n locations
  Clone ID: MRT4577_169340C.1
ccggccggggcaacagtcctagagacatgcgcgattgtggtcccccctgaggcatgagcgatgacgatggtggcgaggagtgtacggtggcgaatgcgtgtgacatcctcctatcgtcatggctcctgcatcctccgtcgacgacctcctccgatccagcatgttcggacgtcctttggcgatgacctcctctaaaatggtggcctcaaggacgtcctccagcgacgacctcctatgatttatgtttaggccttccatgattgtgttttatgcctactactatactatttatgtattccattgagtattttatgatgatgaatacgatgtctctcacgtggcttgttttttatgctaaccacctgaattcgcgcacgtttgctacagggatgtcatatgtgacgtcacactgaccattgtaacaacattggagatttttatgcctatcaatctcactatttatgcttacgaaaaaaaaaaaaaaaaaatttgngggccttgagctccagtttttgt

SEQ ID NO: 76002 - DNA, 329 bp, Zea mays
  Clone ID: MRT4577_169341C.1
ccacgcgtacaccgtatatacttcaacttgtcgtcccaaaagcactaccgtcgcgagttctacacgccgtcagctggaccccgaccctcctgcatcgctggaggacttaaacgagggcggattggccgcgttgggcgccgcggcgtcccgacgatcatgggtacaggagacggaagacgggtcgacagcaccggcaagccacgatcacgagcgcacttttgagacgagaactggcgatcggcggacttcttcgatgcacatatatagcgtaggcatttccatttgcgaacttttgctgatttctactactggctatacactagcaacca

SEQ ID NO: 76003 - DNA, 176 bp, Zea mays
  Clone ID: MRT4577_169342C.1
aagacccacgcgtccgcccccctccctatatattccccgcctctggggaatgttcccgcagggggggccgacggaaaaacactagatgcgggtcgtcttaaaaaatctacacggggggaggaaagaccaaccttgctaggggatggacatccacaacggcgggcacgagatagacg

SEQ ID NO: 76004 - DNA, 1058 bp, Zea mays
  Clone ID: MRT4577_169343C.1
atgtacgccacgggtttgcttgacgatcagttccagcagctccagctgctccaggaccccagcgcccctgacttcgtctccgaggtcgtcacgctcttctgtcaggacggcgagcggatcatcgaagagctggccaaactgctggagaagcccaacgtggattttgacagggttgacgcctttgtgcatcagctcaagggaagcagtgcaaagtgattaccttgcccatacctttttcttgaattgaatgtgtaatgctagtaggaatgtacatgttttgtttccatttcagcgctggaatggggtatgcaacttagtaaccaggtttccggatcgatgggatcgaggaacgggaacgtggtacgcggtacgctactaaaactaggatttaacactactggaacgagattgttcccacattcccggaacggaacgaatgttcccggaacgaggaacgtggccaagttcccagttcccggttactaagtattggtgctcagaaggttaagaacacttgcattcagttccgcgaattctgtcagcagaagagcagagatgggtgcctcaaggtactggagacaatgaggattaacttctatgagctgcgtggcaagtttcagaccatgcttcagctggagcgtcaggtcaatggctttccccccaacaagtaaaccagatggtggagtggaccttcatgttaggatgatgcttgcacctttcaagtttcagaacattctgaatgagctcctcaattggtttctgggaagtcttgtaatagcttagcagcaagattagcgttgacaccaccgtagcagtagtcattgtcgtcaagtagttgtcctaaatgtctgtgctgggttatggatctcctgcaagcagttgcaggcttgcagctgttctgtttactctagtagtttatgttggagtagtcgctctcaataaatctgtgctaggagtctattggtggattattagtcagtcagtttctgggattcctggtggtgaagcaaaacaatgttatggctatcggttaataataatagtttgctgtgtttggc

SEQ ID NO: 76005 - DNA, 612 bp, Zea mays
  Clone ID: MRT4577_169344C.1
gaccccatattttcttcacttgctgcgtcataaaggaacacagtccatcttaacacctcggttaaaaccgtttttccctgcgggagagaggaggcatggaagccttgtctccacactttttgccttccttctattataaaagcttgtgcattatatgctatctttttcattgactggcacatggattgaccactgagactgcacatctggacttgctgaaaaggataccccttcgccgtcgccaactcgagcgccaccagacggtgacaggatatgccctccgacaccgggctgagctacattcagcgccggatactccttgggccacaccataaccaggcggaccattatgggcgttcacggactgatttgtttgtagacccagaaaccaagtcctggagtaattgtcctggcattgaatgtgaaacgaacaggcttggtgtatcacgagaccattgctggaaaggtgcttactgcactcatgggtcactggcattcacaccagtgccaaggggacttattgatccgcctccggtgctgaaaagggtggcactatggatgaattgacatgtggtaagtctaagccactggctctgacgaccttgtagacct

SEQ ID NO: 76006 - DNA, 1092 bp, Zea mays
  Clone ID: MRT4577_169345C.1
aatagatccaaaaaacactagaaaaaagtcgacccgcggagaagaagccaaggatgtactggttccagttcaacctccctgagctgtgatgggaatcgcattccctctataattcctataaataggggccctcccgctcccggcccggcactcgctctattcccattccaagcccccgctctcggattcccgacgacgagctcagagctcctcctctcctcccctgctcggtgttcgacgcaacagctgccgccatgtctgccgccaaccagctcgccgccctcgtcagcaacatgtacgccacgggtttgcttgacgatcagttccagcagctccagatgctccagaacgccagtactcctgacttcgtctccgaggtcgtcacgctcttctgccaggacggcgagcggatcatcggagagctggccaaactgctggagaagcccaacgtggattttgacagggttgacgcctttgtgcatcagctcaaaggaagcagtgcaagtattggtgctcagaaggttaagaacacttgcattcagttccgcgaatcctgtcagcagaagagcaaagatgggtgcctcaagacactggagacagtgaagattaacttctatgagctgcgtgacaagtttcagaccatgcttcagctgcagcgtcaggtcaatggctgtccccccagcaagtgaaccagatggtggagtggagcttcatgttaggatgatgcgtgcatctttcaagtttcagaacattctgaatgagctcctcaattggtttctgggaagtctgtaatagcttagcagcaagattagcgttgacaccaccgtagcagtagtcattgtcgtcaagtagttgtcctaaatgtctgtgctgggttatggatctcctgcaagcagttgcaggcttgcagctgttctgtttactctagtagtttattttggagtagtcgctctcaataaatctgtcctaggagtctattggtggattattagtcagtcagtttctgggattcctggtggtgaagcaaaacaatgttatggctatcggttaataataatagtttgctgtgtttgacaaaaaaaaaaaaaaaaa

SEQ ID NO: 76007 - DNA, 237 bp, Zea mays
  Clone ID: MRT4577_169346C.1
acaacaccctgacgtgagtcgtattaaacatgaccactgcagtcgccttgatcatccacaggtcttcgttgccgggctccaggctcccggcagcaattctggccacactggcgttccctatgggggctagcagctcatctcgcggaggctctgtgcccatctgcgcctccacgtccatctccttctccaccctgcgttacgacgtgaactccttccggttcaacttcatcaaggagt

SEQ ID NO: 76008 - DNA, 265 bp, Zea mays
  Clone ID: MRT4577_169347C.1
accttactttcctatttgcactcattcaaatctgatcacaaacacacactcatctaaaacacaatactttcagactttatcataccctaaattcaactaaaactctccctcacgaacctattaataatcgtagaagctacactctttttccactttcagctaaattccactccatcaaagatacacttcataactactaacataatgttacagctcctatagttactaaccccctcaactacccacttaaattgatttctaaaaa

SEQ ID NO: 76009 - DNA, 491 bp, Zea mays
  Clone ID: MRT4577_169348C.1
gggtaacgtggcatgatgctcctgaccgttggagctggagctgctgcaggctccgaagctgctagctgtgcaccaggttgatgcgctgttgcttgagccacagctgcctgcgccggtgttttagcctcagccacatgagctcgtaacttatcatctggcacattaatgggcatcaagttaatttgcatagtcctgatcagcacaactagcttgatggtccgattttgctcaaattgatatggggatcgataattaagatgctctaatcttaacccatctagatcatgtagcattctaagaacgtttatactgtctccaaatgcagaaaggctctgactgtctccatacacatactgtgtctgaagggttataatcagactctcagtaataagggtctttgtctgcctatgcactagaagaatcttcttcttcatatgctcaccactaagtatgtttgtctccatatcgacactatgggtgaccgcctaatt

SEQ ID NO: 76010 - DNA, 544 bp, Zea mays
  unsure (1)..(544): unsure at all n locations
  Clone ID: MRT4577_169349C.1
agtatccatatgtggataagaagaagaaagtctgatgcacataattgtcaaagatgggaagtatcatcagcaggatgtaatgctaaccttattttgtccacaaggctggaatttgcaccgtcaagtgggcccaaaatgactcttgaagagttgcctgttcgtgaatctattttcaattatctactgatctagatatataattaaattagcagtacactagcctggaatcagtttcagcaggcagttgacatgcttgcatgtaacatctggaaggaggtttcatattaatggtgtttacttgcacagcatgatgaacttactgtctgcctttcctggattgttatttatagactgatttgtgaattttgaatatgttatttatgatgacagaaactaagaactaattattttgcgtcaaaaaaaaaaaaaaaaaaaaaaaaaaaaaaaaaaaaaaaaaaaaaaaaaaaaaaaaaaaatgattggctttatagaaaacttccttttttgantgnaaacaaaaaaaaaaataaatgggggttccttt

SEQ ID NO: 76011 - DNA, 909 bp, Zea mays
  Clone ID: MRT4577_16934C.1
ttctgtgctgtccgtctcggtgcctctggtggtgtcagctattgcgagcggttccggaaaggaataaaaatggtgctctctgacttcgcctcttagctactgaccttgggagtttttaatttctgaatactctacaggattgaggggggtttttatcaccttgacatgttcaatttctaaaagttgatctagcaatattaccttatcctctcatattttttcctgaacttttttgtctccggccggggttatttcagtgctactattaggaccgattatttactgattttaaataaaatcgcgcctttctacatttctttggctctagattgagcaatgctccctttgcatataaacaaagaaaaagcgtagcaacacacatcgagattgatgataatatatgtattgttcgttttcatgtaagagttatgtactaactcttctcttaggtctgatcttgaatggatcacaaaggggtatgggcagctactttcgcagaatgcttccctcaaggaggcatttggtatggaatacggaaatttgctcatttattatttgtgtcttgtcttcaatgaggtaatgatatagacacttagactttttgatgtgccctgttgcgccttattgtttctttcttatttaggtaggtgcaattgttgttccgcaggatcgccttagccctatcgggaatgcagacgctctcggcgaagtaggagagacatggtggacgtgaacctgaagccgacttctaaccaatccaactcgtaggcgggcggagagcgaatgcgccaactagaagagtggtatttctcggcgcttgcttgacaaacgtgtgttgttaaccgttgtatataatgttattaattaatgtcctttattccccgaaaaaaaaaaaaaaaaggggcgggc

SEQ ID NO: 76012 - DNA, 459 bp, Zea mays
  unsure (1)..(459): unsure at all n locations
  Clone ID: MRT4577_169350C.1
ttaccaggagggtggacttacttgctcggagggagggtgaggtcggtggccctcggcccggcttttcggctgcnncacggcggcggcgtccaagcagcactgtcgtcaagggagaagttnaggaggntcgacactggtcgcacgctgccggcgccaaccaccaccaccaccatggtcaccacggcggccacggcttcgtggtgcgcgagaccagggtcgaggaggacatcaacacctgcaccggcgaggtccacgagcgcagggagagcttcctcgccagggctaactgagcagcccgagcggacggcatccacgcccgttcgtgcctgcctgcgtgccttatgtatgtctatgattatgcagggtcatcgtacttagctagcgtacgtacgtacacgcactcagctcctatacgaattacgacaataagctcgtgacctgcataaaacttcttcgtaa

SEQ ID NO: 76013 - DNA, 950 bp, Zea mays
  Clone ID: MRT4577_169351C.1
gtttggactttggagccctccgaggctcttcagaaagagcgaagaaagtctgcgaacgaattgtttgtccaggagaaggcccccgacgggattattctttctccccgcgtgctctctatctctcccctctttctctccctctgcccgacgactaggccgccgccgccaccgccccgccgccgccgccgtgcccaggtctttgtcggtccttgtccggcaacgagcaccctacagatggctgggaggcacaccattattctgatgcagccatctcaaaatagggcttctagaacatttatggattacaattcgattaatcatgcattggatggaatctgtgggctttatgaaaggaaaattagggatatcaacccaatgatcccaaacataacttatgacatcagcgacctctataacttcattgatggcctagccgacattagtgcgctggtttatgatcactcgattcaggcattcctgccatatgatcgacagtggataaagcaaaagttgtttcaacacctgaagaaattggctcagcggtagcacaactgttgtttgttcttgatgccttttatccaacaagcaagcatgcgtgacaataggtgtccaatcagtggtattgggagttgtttcttgtaaactttgtaatgttacatgacagatttgctcccttgtattctggatgtttgactcggatttcattggtggcttgcttgtggttgtggtatgctaaacttgttttgtttcgcagtgctgggaatcagataacccttttgcctgttgtaaaaaagattttttaacgtgtagatggtttctatgtattattgttctttagaaacatgccctacggccataaagtctttaggacaagggtgtgtcaatcttgaaagctactagcacccatgacctgattatttattttttaaacaaacgctgggacccccccc

SEQ ID NO: 76014 - DNA, 528 bp, Zea mays
  Clone ID: MRT4577_169352C.1
cccacgcgtccgaaaattgcattatccttttgagctcaacttgtcatctatgatatgtattgtaactgatcatgtttttactacttcatgattcagatcgctgctagcaagaccaagatttacatggtgcttcagcttgtcaatgggggcagaactgttcgacgggattaaaacatacaagatgcaaatatggaggaacaacaatcttccttggtggatggtcttaaaactcccactactgtggctgatcaagaatccacagccgtggagtgcttgtccaatcatgagtatcactcgcagactcttggatatgtaattggtggcactaacatgagaagcgacaccaaccatctcacagaagggatcaatatcttaattgccacactggacaggcttttggaccatctgcaaaataccggtagtttcaaatacaaagagctaaagagtaccaaaaaggtcatgcccgacgacaagctcgctgagttcgcgctcctcgaccccaagccaccaagaggtgagcaagtgcta

SEQ ID NO: 76015 - DNA, 497 bp, Zea mays
  Clone ID: MRT4577_169353C.1
aatctaagctttttttgttcccttatttgaataaatgacgaaacggggcaaaaatgtactacaagaacaaaccagtggaggatcagacaaacgagaaaaagctaggtacgggttaagacattttcttacagcacagttggagagaggaaaaaacgaagcaagaggattcaaaaaacaggatttattgaagcaagcctacggcttaattataacacagcggggggttggcttacttgaaggattgagaaaaccatttgaaaccttttacggaacccatttttctgacaatgctggacaagaaaacccccaatgggcttacgttccaaaacgttagattcactttaccctttcctgtggtgaagatggagaggccgaaaaggtaacggagctcgacctctgatgcaacatacaggatgtctatcttggttcctaaaatgaagaagggaacgctggccttggattcgcctgagagaagggcatcaagttccttttttgat

SEQ ID NO: 76016 - DNA, 505 bp, Zea mays
  unsure (1)..(505): unsure at all n locations
  Clone ID: MRT4577_169354C.1
anngnnngnnttttttttttttttttttttttttttttttttttttttttttttttttttttttttttttttttaatttaaaagggttaaagggaaatgtttaaaaacttttttataaacaagggatttccttaaaatgtttgcaatgggccccacccttgagtatggggcataaactcctcacaagatttttgggagtttaaaatacaaaaaatagatttttccttttttataaaaccaaccatttttgggggtgggaattactttcccaccgcaaaggcaaaggcttttaaggggttggataggcccatgcccatttttaagggaacctttttcggggaggccttgggcacttaaaccttcacaacccttagccagagcattattttttttttttttaccccggggatttttcttaagttgccctttttggggaaaggccgccccttaggggggtacgaaacaatttgtttgattttttttaaggggggcttcaccttttttt

SEQ ID NO: 76017 - DNA, 2592 bp, Zea mays
  Clone ID: MRT4577_169355C.1
gcacgagctgaaacatccgtcggatcggtggatcaaaggtgcagatcgtggcgcgtctcctcgttgccgtagggttttctcatctcttttcttaccagagccacctcctcagcaggccgcagctactccacggtgacggccgccatgagagccctcctctccctctcccgtctcgcccgacggcttccagcttctctcagccctgtaagggcgccgacaacattactcctccggcacatccatgcggatgcccctccgccgccgccatctcatgactcgacgcccttcgtctcccgcatcctcgaatcggagccgtgcctgaccccgaacgacgagtcggagccggcatccgatccgaccctcgacgagttcctcgcgcgcttcgtggctgccttccgcccgcgactggcggctgccttccccaaccatgaccgtgacgtgctcgacgagatgctccgcctcgtcgcggacgccgtgctgtgccgcctcaccgggaccgaccgggggggcgatgctattgagctcaatgacgacctctgggcggccgtatgggaggtcagcgcctccgtgcgcgaggctatgcgccgggatcaggtccgcgccgaccttcgccaataccttcactgcgacgaggtgaaggagatgacgcggttcgctgtcgatgtcggcatccgcggttccatgctccgggagctccgcttcaagtgggccggcgagaagctcgacgaggtcgagttctatcacggccttgatgacaagcacgccgatgccgaggccggcgccgaccgggcgccagtggccgaggctgactgctttgccgaagaggaagggagaggtgaagttcacgatgtacgggctggacatgtctgacccaaagtgggctgaggtggcggagcgagtggccgaggctgaggcgcattttgtgcctgaggaggccaaggctgtagaagggagggcgaagaaggctgaggagcggctgctgtccgttgacccgaggagtggagatccggtgcctgccattgaggagtggaaggaagatctcaggccaaaccgtgtcgattggatatctctgcttgagcggattaaggcacggaatgtcgagttatacctcaaggttgctgaaattctgctagatcaagaatcttttgaggcaaacatccgagattactcaaaattaattgatcttcatgctaaagcaaataatgtggaaagtgcagagagagtacttggtaaaatgaaagagaagggtattgcacctgatgtcatcatatccatcgtattagtccacatgtatagcagggcaggcaagctagagcaggccaaggaggcttttgattttattcgtagggaggattttaaaccagatcggaaactcttcagttcaatgattaaatgctatatcaaccatggagaaccagaacaagcagaaaatctgataaaagttatgagggatacacgtgtcaaacccactagagaaatctacataggtctcttacgatcatatgttcagcgaggcttgatggcatatgcagagagggttcttaagacaatgtcatttgatagagtcgagcctacacaggaactctatacaatatgtatagaagcatatggacgtgttggtgatccaaaagaggcctgtgccatgtttgatcaaatgaggaggaagtttggacacgaagcagatgacagttcaattgctggtgtggtggccgcatacatgaagaataaccaactagaccatgctttgcagtggctgctgagtttagagaaggaaggacttcaacttggtgtcaagacaaatctcatgttactggattggttgtctatgttgcagctagttccggaggctgaacagtttgtgcagaagataaagaatcttggagaagagcccatagaagtccatgtgttccttgccgatatgtatgcgaagtcgtcccaggaagataaagcccgcaggtccctcaagatcttggaagagaagaagaaactattgaagtctgatcagtttgagagggttataagaggccttgtcgatggtgggttttcggaggaggcaaataaattctacaaaatgatgaaatcctgtggctttgaaccatcaaaaacaatcgaggtcgctgttaaggctctcaggattaggggcggttctcatcgcactggtaggtagagcctgtacgccggcagagtggcagtgatctactgggcacgcagtcaggcaaagagggattctggtgtgagaaccttgtggcactgacacggtacaatcaaattgacaaaactcagtgctgaaagatggtttggccaattttttttttctggttgtcaattgtctcgaggcgcgacgttgcttccatagactatgtagttaataggtcctggctaaatgactttgttgtttccagtgatcaggattttcacttgtattagatgaggtttgaagtgattgtaacactgatccatctttcaggttgtgccaaggaaaacatatatccgcgattagtggttattactctgttcagacatgcaatgatgtaagttaataaatattccttctggcttccggtcaaaaaaaaaaagataaaagcggaaaaa

SEQ ID NO: 76018 - DNA, 606 bp, Zea mays
  Clone ID: MRT4577_169356C.1
cccacgcgtccgcccacgcgtccgcatccttgatggctttcctcgaaccataggacaagcggtgagctaattatttgacctgaccgagatacttgaaggagtcacagacattgatttggtgatcaatctcaaactccgagaagaagctctgcttgcgaaatgccttggcaggaggatgtgcagccagtgtggagggaacttcaatgtggcctccattgatattgagggtgaagacggcgggcctcgaatgtacatgcccccactgttgcctcctccacagtgtgaatcgaagctgattgctagagcagacgatactgaagaagtggtaaaagagcggctgcgtgtgtaccatgatttgactgaaccagtggaggagttctacagagcacgtgggaaactgctggagttcaatctgcctggtgggatacccgaatcatggccgaagttactgcaggccctgaacatagaagaccccgacaataagcgatctgcagcagcatgattcttgttttggtataggaatgcacattctaaattgaacatctgtagactatgtcaaagctagtcaaattggtgggcattccttacatctttgggaagcctact

SEQ ID NO: 76019 - DNA, 344 bp, Zea mays
  unsure (1)..(344): unsure at all n locations
  Clone ID: MRT4577_169357C.1
gaaccaccaccagaggnccncgcagaagagagagganagcaggcggggggggaaggggangnaaaaagacgccaggaaggcaaaacaaccacagagcccgaagacangcaaaggcaaacggagccccaaaagcgcacaggaacggcgaaagangaagaanaccgggaggcaacacggaaacggcggcaaaaaaacaaagcaaaggcgcgccagagggagaaacangcggncaaccaaaggaagcaggnacagcagagaggagcagccaggggcggcagaacaggaagnggagacagagaaagaaggcgaaaacaaacaggaggacgaaangcacgaggacgaag

SEQ ID NO: 76020 - DNA, 973 bp, Zea mays
  unsure (1)..(973): unsure at all n locations
  Clone ID: MRT4577_169358C.1
tggcatgctcccctctttcaacaagcatatgcatggtacgacctacaagtgaatgtctcgacgcccaacaattattttcttgccttttnacacaccttacgttcgaggatcacagtcagcacatccatcgatcgaccttgccaatcgatgatcaatctactgtacagttgagtgccatgccacaataatctggatccagaatggagtaggcttcccaaagatgtaaggaatgcccaccaatttgactagctttgacatagtctacagatgttcaatttagaatgtgcattcctataacaaaacaagaatcatgctgctgcagatcggctattgtcggggtcttctatgttcagggcctgcagtaacttcggccatgattcgggtatcccaccaggcagattgaactccagcagtttcccacgtgctctgtagcaactcctccactggttcagtcaaatcatgctacacacgcagccnnnnnnnnnnnnnnnnnnagtatcgtctgctctagcaatcagcttcgattcacactgtggaggaggcaacagtnnnnncatgtacattcgaggcccaccatcttcaccctcaatatcaatggaggccacattgaagttccctccacactggctgcacatcctcctgccaaggcatttcgcaagcagagcttcttctcggagtttgagattgatcaccaaatcaatgtctgtgactccttcaagtatctccgcttgtcctatggttcgaggaaagccatcaaggatgaaccccnnnnnnnnnnnnnnnnnnnnnnnnnnnnnacgtcttgacagcagatttatgatgatctcatcagacaccagttttccatgattgacaatctcagcaagcttgttggagaaggggccaggggtggccagggcgtcgcggacgaggtcgccggggcacccgaggaacacccactgcacgcgcctcccgtcctcctgatcccgcccca

SEQ ID NO: 76021 - DNA, 307 bp, Zea mays
  Clone ID: MRT4577_169359C.1
acccccggaaacaaaacaaacacagggggcacatacacaaaccggccgacaaaccccacccggggacagagggaggacccgccaagaacaaaacaaaagaaaaaacagggggaagaaaccgacgggaagaaacaaagaccgaaagaccgcacaacgcacacagaaaaacacaaaccaacacaccgaaccgaacaaagaaaccaaccccccagcaacgccgggaacaaacagagccaagaacccgagaaacccgggccagccaccccgagagaaggaaccacgccagcgggcccaccggaggagcagc

SEQ ID NO: 76022 - DNA, 348 bp, Zea mays
  Clone ID: MRT4577_16935C.1
gtgtaagaagccatggccggtgtgcccccggtggttctctcgtcggtcgcggcaatgcatgccgcctagctcgttggcagcagcgccgggcggcccccgggccggcctggtccggggtacaggggcagtaagaaacttttgcagaacaagagagagaccctgatagtttttgctctcgttcagtcgttctctcctcttctctctctcacacacagaaacacacgcagaatggcaggagagagagagagagagagatagaaagggatgtatgaaagatctagcaagaagtattcttcgttacatgtatacaagacatggcaaatgaagcatcggtgatggcaaatcatg

SEQ ID NO: 76023 - DNA, 1423 bp, Zea mays
  Clone ID: MRT4577_169360C.1
cccacgcgtccgccgaagtcgaactcaaaacacgcaacacgcacagtcacgaacgcacgacaaaaggaagaaaaacccaagaaatatctctgcggccctgctcgtcccgagccgagccggcgagatggcggggatgtctcgcgcgatccgcaacttcgccgccgcgtcccggcgaaccctgaccgctgcttcggggccggcgctgccgaaggaggcggcggcggcgggggcgcgggtgagggcggcggcgcccgggcgcatggggcgggatcaggaggacgggaggcgcgtgcagtgggtgttcctcgggtgccccggggtggggaagggcacctacgccagccgcctctcgcagctgctcggcgtcccgcacatcgccaccggcgacctcgtccgcgacgccctggccacccctggccccttctccaacaagcttgctgagattgtcaatcatggaaaactggtgtctgatgagatcatcataaatctgctgtcaagacgtctggaagagggagaggaaaagggtgaattggggttcatccttgatggctttcctcgaaccataggacaagcggagatacttgaaggagtcacagacattgatttggtgatcaatctcaaactccgagaagaagctctgcttgcgaaatgccttggcaggaggatgtgcagccagtgtggagggaacttcaatgtggcctccattgatattgagggtgaagacggcgggcctcgaatgtacatgcccccactgttgcctcctccacagtgtgaatcgaagctgattgctagagcagacgatactgaagaagtggtaaaagagcggctgcgtgtgtaccatgatttgactgaaccagtggaggagttctacagagcacgtgggaaactgctggagttcaatctgcctggtgggatacccgaatcatggccgaagttactgcaggccctgaacatagaagaccccgacaataagcgatctgcagcagcatgattcttgttttgttataggaatgcacattctaaattgaacatctgtagactatgtcaaagctagtcaaattggtgggcattccttacatctttgggaagcctactccattctggatccagattattgtggcatggcactcaactgtacagtagattgatcatcgattggcaaggtcgatcgatggatgtgctgactgtgatcctcgaacgtaaggtgtgtaaaaaggcaagaaaataattgttgggcgtcgagacattcacttgtaggtcgtaccatgcatatgcttgttgaaagaggggagcatgccagaaacgtctgatttttagctttattttttatttgggagggctcgctggctggagcttttcgtgtatgtgacgagctacctatgtacgcaatacactaatactacactgcaaaaaaaaaaaaaaa

SEQ ID NO: 76024 - DNA, 618 bp, Zea mays
  Clone ID: MRT4577_169361C.1
ggccgcctgcgtggatgcagatgtgctcgaacgccgtgcggaagtccggacggtagagcctcaccttggcgcggcctctgaggagcaggagcttccgcttgaggaaggacagcgcgacgaggagctgctccgaggctggtaggacgaggggtccgaaggcggcgatgttgctcttgagcgcgtggccggcggtggcggcgaggtccttggagaggcggatcccggtgttgcccttgtcgtcctcctcctggaacacacaccggtagtcggcgtcccgagcggccgtcacggtgcgcaccaggcgggtgagcctgtaccgcgcgcgctccggggagttggaaaggatcatggccgcagcgcccatgcggaagaggcagttgggcagcagcatggcgcgctccgtgccgacgtagtactgcgacgagaggatctccgtggagacgatgaggacgtgcgtgcccggccgtgccgtctgcaggaggttcttggcgaggccgacggagacgagccccgcgctgcaccccatcccggacaggttgacgttctgcacgtcggggcgaagcttgtacctgttgacgaccatgtccgcgaacacccgcgtgggcgtgaagatgctgc

SEQ ID NO: 76025 - DNA, 629 bp, Zea mays
  Clone ID: MRT4577_169362C.1
cccccctacagaatatccctttttttttttttttttttttttttttttttttttttttttttttttttttttttttttttatttttttttttttttggaaccaaagcctttcaaaagggaaaaccaccaaccggccaattcccggaaaaaaaacccgggggggggggaaaaaaccaaaaaaaaaaaaacaacccacgggtaccccaaccgggcaaccccaaaaaataaaccaaggccggggaccccccgccccaaaaaaaaaaaggggggggggccaggggaacctaaaaaaaaaaacccctgggcggggggggctgggtccaaaagaaaaacccccagttaaaagggcccccggacaaaaacgggttcccgccgaactccctggaagggggcccggcccggaaccgaacccggccccgggaacacaaacggaaccccgggggggccttttaaaaagggccctggggggggaaaaaaccggcccggtttcttaaaagggcaggggggggagggcccccccggggggctttttggggggatcaaagggggggggttttcccccccggggggaaaaaacattccccccggggccaaggggggcaggcggcccccgggaaaaattttttaaa

SEQ ID NO: 76026 - DNA, 302 bp, Zea mays
  unsure (1)..(302): unsure at all n locations
  Clone ID: MRT4577_169363C.1
acggtcccgacccactcttacgataccaacatgctacatacaaagttgtantttattacaacaanagaacaacaaaggggacgaagatattatcactactgatggtccttacaaatattacatttgttgctaactcaacaatttaaccttaatgctcacatgcttctatatcttcctttttttcaccataccttccatcaataatatttcagtatttgaaaacccatttctttaaccatatatacttcaacaatctattttaacaagtaacatatctttatcactcatgttatttactacaa

SEQ ID NO: 76027 - DNA, 266 bp, Zea mays
  unsure (1)..(266): unsure at all n locations
  Clone ID: MRT4577_169364C.1
gtagaaaaggtttctcngactcttctncacatcgcgctcagcgctcatcatcatctaacatccgattgtgtcctgtgctctgcggttctcggatccaagatttcgtcggccggcacgcggcgtgtggctccggcatcagngagcgggagaaagactggatttctcgggcccatgagatgtggcctgatccgttcaggcacgngcagantgggtgcatcctgagcaagtctgattcgtatcggttcaaatgatnctcgcggcttgat

SEQ ID NO: 76028 - DNA, 871 bp, Zea mays
  Clone ID: MRT4577_169365C.1
gcttcatctacataccacttgacctatagcaacaaggatgatgatgaggtttgcagaaatggcgacgtcaccgagatatgatcctcaagaacgtcaacctatagcacgcgtgatatggtgtcggccggtagctatgatgttcccgaaaacatttttcagttcgattaagcttttaaattaaagcgcttctgaaccaccacgatcttcaatcttgctatgctcaaacaatttgcaatattgcattccaatatcagaatgatatggctcggtgatctgaaccatcgagtgtcagtgggctatgaagatacatgaacgttactatagaagaatgattgggacgttcttgtgaagaaaatattgcaaatattccgatcatctttggatactgatgtctctctataaattggccagaatttcaccaacaatttttgcatctcataattgagagagaaacagggagaacgttcagagacatggcatggaaggtgggcattgggtgattgcgagcactcgggatgacaacgtgtgagatccacagatggagttgctggacgacggctcggctatgataccatcgctatcgaatgtcgtaccccttgccaccctagcacgacgccattgcagtctcaggcatgcatgaaggccaagggattgagcatgggatctaaaggagcctgtagaaattaccctggctcggccaaatgtccaataaaaaatttcccaaagaaatagagccctagattgatgctcactatgggcgttagtttatcctttagtttcacgtccttctaataaggttttgctaaatgtttttacttagtgcttatgtgtacttaatattgtcatgggtgtatttatagtgccctccccc

SEQ ID NO: 76029 - DNA, 441 bp, Zea mays
  Clone ID: MRT4577_169366C.1
ggaacacaaaaatttttccttgccgatggaaccctgggccgggaaggaatttacagggggggacaaacgggaaccagggggcgctcacgggcatccgaacacctaaatttcggcagggggggccggggggggggggcgggggcccctccgaccccctaatttgccgggcacaaagttgggggggtaggcccatgccttttttttgacggggtcggcaagggggtcgggaaggtttttgagcgggcccttgccggggacaatggcctggacaaaaaaccccaacatggaaaacatggggggggggccgtttttgagctccttaaccttgagccccccaaaggccttggggtcctcggggaggcccagcgggtcaaaacttcccccggggtaaagggggtcaacaaccttttcgagcgggcccccgggaacccggtacccctt

SEQ ID NO: 76030 - DNA, 243 bp, Zea mays
  Clone ID: MRT4577_169367C.1
cctcaaaacttaaattcgcctgatctaacaataaaatactcctgtccaatgcttctaccgtacacctatccaataggaaaaaaatttacttcactaactgatctatgtgtatatactctcccaaacaggccataaaaacacccccctttctagccactaatcaattttgacatattcttgttgagaatacttccaaccacttactacataccctcaagacctgttttgtggttaccctcttat

SEQ ID NO: 76031 - DNA, 294 bp, Zea mays
  unsure (1)..(294): unsure at all n locations
  Clone ID: MRT4577_169368C.1
gaagnacggggccgacccacgcgtacgaactatcatgacatcaattgtgtttttctttaccaaggggtattaccataaacattggcgggtgccgaagaaaaggccttgacaatcttaatgaacagctgtgccatgatataactaactaagagggaatggagtaaatttgtttactgctgacggaatcaaaccatgatgaggcttttgtatttgaaatggataacatgtacaatatctactgggctatgtatgaagacaactctctctcaaacagacataagtatggcatgtgct

SEQ ID NO: 76032 - DNA, 333 bp, Zea mays
  unsure (1)..(333): unsure at all n locations
  Clone ID: MRT4577_169369C.1
ctatgtaccttttgttcattttccgtaccatcccctgaggccgaaccgttgtcattccgtcctactactgattgatgatactaaaggaaatctcctgtatccgtctctctgcttctatcatgtaaggagggggggaagacgacacacgctattttgcgtgttttgaccaataatatatgggcggnagtacacccgtaccgccttaggcgttgcggcggccgatgggcccttgtttcctactacatgtctagctttggctcccgcgccccgggcttcggccgncagcgggaactcggggcctccctcttgggggcccttggtgcgctctacgga

SEQ ID NO: 76033 - DNA, 1064 bp, Zea mays
  Clone ID: MRT4577_16936C.1
cattgggtacctcgaggccggccgggctcttcgctaccccagcccagtcacgtccttcgcagtttgccgtcggccacaccgcatcgagcgccgccgccactcgccctcccctgccatctctcgccggccgccgcctcccgcccaccggccaccgcagcgtgttatatttcagcccctcttgatcggccacccgaaacccgcaggagagaggctaaggaacgatggggtggaaggcggcagagaagctcatcaggcactggaaggtcctgcgtggtgacaacgtgatgatcataagaggcaaagacaagggggagtccgggctcatcaagcgggtcattcggtcgcagaatcgcgtcatcgtcgagggcaagaacttggtcaagaaacacattaagcaaggggaagggcacacaggtggtattttctcggtcgaagccccacttcatgtctcaaatgtccaggtggttgatccagtcactgggaaaccatgtaagattggatacaagtatctggaagatgggaccaaagtcaggtacgctagaggaatgtacgcatcgggcgctgtgataccccggccagaaattctgaaggagagaaggaaaccgaggcccacgtcacctggcccgaaggacacaccaatcgagctggcgcaggagaagacctacgatgaaaaggctgggatcggtatgcccgatctatagctgcggagagttcactgtaatgtgaccaggacctgacgccctgtgctgtgctgtgctgtgcttcccgcgtaataacggtgtactagttaccttctttgcagaaaatgctttctaggaatgagagcggaaatatttgtaccatttatttaaggtcctgtttggaaacaacccaacagtttttaagacaccagtttttatcttttagctttgagagaccaacttcttgtttttatgaaagtgggaatcaaatttctataaactgagccataaactggtgatatctttagaaccacctcaatttttataaaccggtttgttaaaaaaaaaaaaaaaaaaaaaaaaaaaaaaaaaaaaaaaaaaaaa

SEQ ID NO: 76034 - DNA, 379 bp, Zea mays
  unsure (1)..(379): unsure at all n locations
  Clone ID: MRT4577_169370C.1
agcgtccgcccagcgtccgcccagcgtcgccagcgtcgggacctgggcggagcgtgggtggctctataggagagtgaaattttggttttgagaaaagaacaagtggaaaaattggccaagtattttattattaaaaaaaaattggggctcgaagagatgagaggggggctatcttaacataaagatgccgaccaggatcacgggtgttactaataggaccccgctggcaccttatgagaaataaatctttgggttccgggaggagtgtatgtcactatagagaactgaattatgtacggtagtttagctaaaattgtgcccattctgtttctaaaaaaaaaaaacnaanaaaaaaaaataaaaaatgttggcagctgtt

SEQ ID NO: 76035 - DNA, 267 bp, Zea mays
  unsure (1)..(267): unsure at all n locations
  Clone ID: MRT4577_169371C.1
ccggccggggtgcgctgcggccgggtcggatctgagacgagacgagtcccctccccccacctcgcctcacccaaccggaacgaacaagttaccatctcatcccaaccccgcctcgaccggatctcgtcggactcggatccgcccgaccaccccgcgccgccgcagatcaaagcaagatggcagcgtctcggcggggggggggtgacgctcgnagtctgcgaacgaggcgcaccctgacgcgctctgcgagcaggtttagggtggcgg

SEQ ID NO: 76036 - DNA, 210 bp, Zea mays
  Clone ID: MRT4577_169372C.1
gcgaacagaagctaggagctctatttcgaacacgcgttagccggatccgagaaggagaggcggagggaggaggagaggacaacggtgaaaagctcatcggattgagagcatggacgaaagcgctattgctgagcgagaagatgctgtcgcgaggcttgacggggagaaggcggggctttttttttgcagggggtggagagaaggagccgc

SEQ ID NO: 76037 - DNA, 1944 bp, Zea mays
  Clone ID: MRT4577_169373C.1
ggtaccttggtggttgttgcattttcattaatcttcttatgagggaatttgagccaggccgtttgttggggcttcagctccttggaaaacttttgactgggattccatctgagaagaaagaaacgaaactatttgccctacccttagggcagtctagacccatctctgaaaacttaacaaaagaaataacagcggcacctcagtttttcttgaatacagggtctgaaaggctattctaatttccactatcagataacttatgtgcagcacttttcagtgttcttagtggaaccagtgcacaacaggttattgtacatttgtactaactttatgtcatattgcttttatcttcttttttctgtttcaccagtatcaaccgcatatgtgatctgctgttttctctctataggttccccaggaaaattctgagcctgatccatcaagggatagaaattgcaatattttaagcttgccacccttttcccttcctcagattttgatatgcatctttagatttatgcattcttgtaaagattcctcagcacgcacaagaatcttaaatcttcttcttggtttgctggattcaaactcttcaaacatcgaggcattaatggagcacagttggaactcttggcttgaaacatccacaaaacttgaggtattcaaggactacaaatcagtttctaaaggcgaccctgacgatgtgaaggcagatgaaataagtcttgttaggaacttgtattctttggtcctttcatactacctgcgctttgttagaggtggctggcatcaacttgatgatactgctaattattttctcttaaaaactgaccagggacaactatcatgttctgatttgcttagggacatacttgatgatattgctgggagcctgcttcacaaatctgtggaagataatattttccttttacagccttgctgtgataatgttttacattttttgaaccttatacaggagctgcttatcagtcaaatgggaattaggctattgtttctctctcccagtatttcggaggaatcttcacatgataacatatggaaagaagatattaagtcaacagtaaatgatattttaaataccgagagccatggtcaatttacaagattttctgatgtaaatgaagtcagtgatgattggtggattttctttgacaaggtgtggagtattatacgtcatttgaacggaaaaggaccaagcaaatttataccaaaggatccaaatgttgaggttgcatctttggggcaaagggcgcgtggactggtggagtctatgaatgtccctgctgccgaaaaggtagctgttgtatctggaggcggaggtattggtactgcattaggtataaaagtgaacagatttgctgagaaagcgacaacgtcgagggaagagataatcccaagaattttcttccaccttgtgattctgtacctctgcaaagctggattggagaatgcatccaagtgtgttatacagttcatgtcgttgcttccgattcttcttatttcagaagatgaccaaagcaaaaataagttgcactttttgatatggtctctactaattgtaagatctcagtatgggcaacttgacgatagcgctcgtttccatgttttctcgcacttgattcttgaaactattatatatgggaagtccatgttggtcactaatatcttagagagagatgattcggtggacgtcaacaacaaggagactggattcatccttagctttatacagaagaatcgtgttcttgctgcggtttgtatctttgccccctccccctatctttgtctggaattattttgttgacgcgtacaaaatgagaagggtgtgtttgaagttttgtgcatttaatcaattactcgatctattccaactgatgattgttacgaataaaaaactcaacctacgaggagtaagattaagat

SEQ ID NO: 76038 - DNA, 277 bp, Zea mays
  Clone ID: MRT4577_169374C.1
ttgtactcaccagcgagccatcctggaggggcatagaacaggcgcgttggcaccggtgccactcgatgcgggtctggcatcggtgtcgacagcccgagaacccactgtctctcaatgagaaggaggactcgacattcaagggcactgtctttggtctggacatattgttcatgcacggagagacatttgaggttcttggggcaagggcatattatgtagtttctgaggtactgaaacggcaatatcaggcctaggcagacatattgagagctggggg

SEQ ID NO: 76039 - DNA, 299 bp, Zea mays
  Clone ID: MRT4577_169375C.1
ctgaaaagggtgccaaaagagagggccagtgatgatgacggcgaatccgaaggacattccactcctgtgacgaggcgttctgctcgattggttaagaatcagtcaaaatcttaccgcatgtatcgtggagtcagtgacattgaggatgaagatgacaatgagggaacagctgcgcctcagggcaagagtggggacaacgacgatgaggatatggttcccgtctataaattgctcaagaggatgccaaatgagagatcgagtgaggacgacgatgaatcagatctggccaaagggcattc

SEQ ID NO: 76040 - DNA, 808 bp, Zea mays
  unsure (1)..(808): unsure at all n locations
  Clone ID: MRT4577_169376C.1
attgggaccctcgaggccggccgggtttgcactcccacccctccatttccttcagccgccacaacattttcctcccttcttctccctgcacgcacgccagggcagggagcccttcttcccacggctgcagcgaggagctcggctcctcttccatggacgtcgccccctctcccatggcgcggcgccctcccggctcctcctgcgagcggctgcagcagggagctccctctcctcccatggcgtcctccccttcttcctcactgttcacagcagcagcacgctagcgcagggacagggacctccacggccgagcgccctccctgcgagctacctcctcccaggcttatcttgcgcagcgggacaagctcccatgggcgccccccccccttcaggcttggcagcagggacaacgcccatccctccccctgctgttcttctcctatggcgtgctccccttcctcccctcggccagcaatggcacggcgccccctgctcctactctctcgcgcggcagcaactcccatggacgcccagatttttttttcagtgccctgttcatcttcctcccagcagcaacagtccctgcgcagctccattttcgcccatggccgaggcccattcctccatggccgcccagctccctgtctagagcgcccagaaatttccagcagcgagctcctcccttgcgtnggctgtcggacgtccctgctactacctcgctccctcgtcgcgcagcgagctccatcgccgacctgcgcatcaagctgcgcgctgcagcagcaccgctcttcgccttgcatcgtcatcg

SEQ ID NO: 76041 - DNA, 349 bp, Zea mays
  Clone ID: MRT4577_169377C.1
gagttttgctcttaggagtcttattttgctttgattcaagcgatagcgtacaaatgtgtttgtaatcgatctgaaactgtcaattatgctgaacttcagtttactcattttgtcttcccttctgctaagtgaacaaatctgtattttctgttcaaattggactctgtctgacgcttgcttaatatatagtctcaaatttcctggcgagaacttcatgaggaaagccacagcaggtgttgagtgaaacaggagaactaacaaggttgataactgacaagggcaagcagcatgtggcacatatgagttagtagcttagtatacctgccactgaagagggtttgggcacacc

SEQ ID NO: 76042 - DNA, 310 bp, Zea mays
  Clone ID: MRT4577_169378C.1
ttattttttttttttaatttttctatttggtgggatttattaacaatgtgtggggtataaaaacaaacaaggggtggtcactaaccaatgagcctcatatacaccataaccttagcacttcaccggccttataatgctgttctgcgcgtatacaaagcgacactacaccatcatcccccaccactcgcaaatgcctttgatggctgtaatcacacaaaaccgtcacggtgcatactgacgatgcacaccgctttcacccgcctgaggagtctctgggacgccccagtagaaactcccctatttgattctg

SEQ ID NO: 76043 - DNA, 236 bp, Zea mays
  Clone ID: MRT4577_169379C.1
attcggctcgaggtgactacctatgttttttgtgacgatatggatgccgacgaggtgtccctgttgctgtgctgaccgggggtgctggccacgaggagagaagggtgagtactgtataggctacctggacctgtgcgagaagagcaacaatgggaaggtgacggggtccttaaacccggacaagctcaccgacaagctgagctggagggcgtgcacgaacatcaagtagatcacga

SEQ ID NO: 76044 - DNA, 990 bp, Zea mays
  Clone ID: MRT4577_16937C.1
ccgggccgtctacaccaacgtgttcgacgccaacttcgacacgctggtgtcggcgctcaagagggtcgggctcggccacctgccggtcatgatcggcgaggtcggctggccgacggacggcgacaggcacgccacggcggccctcgcggagcgcttctacgcggggctcctccagcggctcgcggccaggagaggcacgccgctccggcccggcgcgcgcatcgaggcctacctgttcgggctcgtggacgaggacgccaagagcgtggcgccgggcaacttcgagcgccactggggaatcttcaccttcgacgggcggcccaagttcccgctggacctgcgcggcgacgggcggccggcgatgcccgtcccggcccggggcgtggagtacctgccccggcggtggtgcgtcctgaaccccatcagcatggccggggacggacggctcccggacaacgtcgcgtacgcgtgctcccgcgccgactgcacggcgctaggctacgggtgcagctgcggcgcgctggacgcgcgcgggaacgcgtcgtacgccttcaacgcctattaccaggcacagggacaggtggagtcggcgtgcgacttccaggggctcgccgtcgtcgtcgacgaggacgcgtctcagggcgcctgcaacttcagcgtgcagctcgttgggtcaggggctccggtggccaccggggtcaccacgatggcggccgtactggtggctctgtttcttgtgttgatttgagctgacgcaaggtgtggtgcttgcctgcctgactggaatcctgatgactgtactgtacagtgttggtcccctacagtgatgtactaaggcgggctccaacaagaccctctaaagggttctgtaccctaaatttagaggatacccctccagcaacgtcctctaaacggtcctctaaatttagagaacgctgctggatcctctatatgtagagtttctctaaacggttctctatctatttgaat

SEQ ID NO: 76045 - DNA, 163 bp, Zea mays
  Clone ID: MRT4577_169380C.1
gatccattaagctgtccgcacccatcatggtcgccagtatggcagcaggtctggtagtactggcactcctcgctgcagtcgccgtacggcgcacgccacggactacgtggtgcgtgactcggatgtgtgcgccagcgcgtggactacgccacctgggcgagcg

SEQ ID NO: 76046 - DNA, 261 bp, Zea mays
  Clone ID: MRT4577_169381C.1
ggaagtactactctctgaatgcccaatgtcacggtcgaatcataatgcttttaatttgcgtgcatattatagcaggagccattttgttttcaatgattacatccatagcacatcatttgtggtccttgcatgtttgttagcttcactcattgaggttggtatgaccttggcaaatctcacttatttattccttggtgctgaagatgctggaacatgtttttcataactcaattcttcttaaaatttcaaaacattactttt

SEQ ID NO: 76047 - DNA, 635 bp, Zea mays
  Clone ID: MRT4577_169382C.1
ctggccgggaaggccacaagaagctggctccactaggccccaatagtcatgtgcggtcgtcgcgttgcgtgcctctcgggactcagcggtcgcgcctggggtctccggctctccgctcgccacgcccacgcccacgcccactacccacgccgccgacggttccgcccctgcgtactctaggtatcccttgtccaacggtccacccccaccgcaaccgccgtccgcccgccgccgcaccctgctagggtttcggccaggccggattcgccgccgcctgtagattctcctatccgaccgcggcgcctcgagccgcaccggcaacctcggacctgaatacctggtacactgcacttcttcagtccgcaggaccacagcacgcacaattgttcttcaatctgcaggactgcagccgcgcacaagccgtagctgtttccttggaactttgagctttggaagatgccaaggagaacaggaaatgctgctccaaccaaatcagttgaattggtcaaacaagaccaattggagtttgatgatcctgacgaggtagatgaagaggaagaagttgagtatgaagaaattgaggaggaggttgagtatgaagaggtagaggaggaggaggaggaggaggatgatta

SEQ ID NO: 76048 - DNA, 887 bp, Zea mays
  unsure (1)..(887): unsure at all n locations
  Clone ID: MRT4577_169383C.1
cggggcgcctggggtctccggctctccgctcgcctggggtctccggtctccgctcgccacgcccacgcccactacccacgccgccgacggttccgcccctgcgtactctaggtatcccgtgtccaacggtccacccccaccgcaaccgccgtccgtccgtccgtccgcccgccgccgcaccctgctagggtttcggccaggccggattcgccgccgcctgtagattctcctatccgaccgcggcgcctcgagccgcaccggcaacctcggacctgaatacctgatacactgcacttcttcagtccgcaggaccacagcacgcacaattgttcttcaatctgcaggactgcagccgcgcacaagccgtagctgtttccttggaactttgagctttggaagatgccaaggagaacaggaaatgctgctccaaccaaatcagttgaattggtcaaacaagaccaattggagtttgatgatcctgacgaggtagatgaagaggaagaagttgagtatgaagaaattgaggaggaggttgagtatgaagaggtagaggaggaggaggaggaggaggatgatgaggatgaggaggatgaagaaatggaaggtatgcatgaaattgatgctaatgatgaaagtaaaatggtggatgctgatgggaaggttgagaatgaaaaagagaagcatgctgagcttcttgctcttcctcctcatggagctgaagtttatgttgggggcatatcttctgatgtatcttctgaagatctcaaacaactatttgaatctgttggaaaaagtgtggaagtgcgaatgcgnagaaagggggataacaggacttatgcttttattatttcagnaactaaagcgatggccttaaagccatccaaatt

SEQ ID NO: 76049 - DNA, 281 bp, Zea mays
  Clone ID: MRT4577_169384C.1
cccagctcttattccaattacttttagggaaaggcttgtccccctcaaggacccggcccgaatttcccggggtccccccttttggccagccaaaggtttcaggccgggtcatttgacttattttcaggtgcaaaaggccattggctttccgaaaacttacccccttactttttctaataaaccaccaaaccagaatcctgttatggaaatgggggctctggtgaaaataaaaaaccgactactttttcaaaaaaaaaaaaaaaaaaggccgcccgttttaa

SEQ ID NO: 76050 - DNA, 405 bp, Zea mays
  Clone ID: MRT4577_169385C.1
ggagcaaatgggccaacaacttttacaaaaatttttgacctccccctagaccagtgataaactttgccccgagattttaaaaaataaaagggtccccaactttcgttcaaaatttaaaccattttattttgcattttttgggtaaatttcaggattccccaaacccacgaaaaaattttttgctgaaacaaatttttagggacttaaacttttgggaaaatgccttttttccctattttttggaggccttttccttggttttttggattttaaaaaccttttttaaaattttttttttctcaaccaaaaagggccgggtgatccttttttttactgggggccccaacaaaaccccccctttttggcggtttcaaatcctggggtttttttccaaccttgaccttt

SEQ ID NO: 76051 - DNA, 438 bp, Zea mays
  Clone ID: MRT4577_169386C.1
ggccccaaaattttggggggatttcaaactgggggcaacttaccaagaaaccaagctaaggacccaaggggggaaaagcttggccccccaaaaaccagtatcgcccgcttctttgggcaggaaaaacacaaaccccccttccaaggggggggggggggaaaaaaaaaaaaaaaggggggcccaaaagccgggggggcccagggggaaaaaaaactcacccaaaaaccccaaaaatttgcggggggtaaaaaaccaacaaaaaggggcccagaacggtttcttgctagccaattttgacggggaaccgggaccataattgggtaggcccgacccttggaaagcttttaaaaattttgccacccagtgacccctcctggggaggaccccctccagggccttaaccttttccaaaaagtggtccgggtttgggtcccccca

SEQ ID NO: 76052 - DNA, 580 bp, Zea mays
  Clone ID: MRT4577_169387C.1
gggtacctcgaggccggccgggggcttttgacaggtcatgccgagcacagcactgcttctacttgctgaatcttcgacacgcgcgtcctccgatcccgacgttcgcgtaggttgtactcatcctcacactcacacggacacgacagcgaggagcacgccatcactcaggaggatgagcatgttcacccggcgaccctctccacggaccctcgtggcgccttaggtggctctgccccaaggagaggatacctcatagctattatcggtgacaaagtcctccaaagatatgaatgggttgaaccggcaacttcatgtgattatctgcatgatagaaaatatgaggaaggcattagagattgatccattcatgaatttgaaagagatattcttggactctagactcagaatatatgtggtgaaattttcttatatatcatgacatgtgtgaatagctaacagctactccatgatagagtgcttgtgctgactccaacgactgccctacccttgctatgttgtatcactctgggaaagtatttacggtgacaaatggggtgcatttatcaccaccatatgagca

SEQ ID NO: 76053 - DNA, 368 bp, Zea mays
  Clone ID: MRT4577_169388C.1
agccaagccaagcagcaaccggagcttcgtcgtctgcgccgagctacgcttcctactcagattacctgtacaactctccattttcgcatttcactgcccctactcccagtagctactcttcgtcgtccccactgatgatcacttacgacgacgcaccagtcgcgccgccgcccatggtcgtcagttctgagcataacctagatgaccagctgctccctgctctccccttgcagcctctaggtctaaaccttagcttccagggattcaatagttgtagctccgccgtcgccggtgacgacaccaagcagaacagcacctgctctttcgatcctccgttgctccaaccgacaccaggttcctcctattcg

SEQ ID NO: 76054 - DNA, 886 bp, Zea mays
  Clone ID: MRT4577_169389C.1
ctgcgagccttcattggtacctcgaggccgggccgggatcgtctccctctgtactcttcctcagcctcatcctatccaagaacgcagaaccgagacccacgaactcgcagcagaccagcagccatggccgcccccgcaacgagctccctgctgagcacgctgctgcagctaccgctcgctccgttctcggggaagagctcgccgccgtccgtggcgcacgtggcgcgccgggcgccgacggcggtggtggcggccaaggggtacaatgtgcagattctagtggacgagaacgagggggaggagtccatcttccgtaggttccggcgggaggtgatgcgcgccggcgtgctgcaggagatcaagcgccgccggaggtacgagagcaagacggacgagaagaaacgcaaggcgcgcgaggccggacgccgcaaccgtcgcaggcgtatgatggacgagccgaggttcccagaagaagacgccgacgcgacctccaaggctcgggacgaggacaacgacaactgggaggtcgacggcatcctgtgaaacaaaaggaacgcagtccacagttcaatttcacagcgtccatatgatgcacagcacagacccgtcaaattcgagttctttttggccgcgttcgtttccacttcagtccaatggttacagttgcaattgcacaactaacgttcgcaaatgtagcgtcctccgaccccttctcgttccttgagctcttcttgtgtccatggtgtttgagaccctactggctactactactcttgtgtctgttccaacatctatcctttgtgtagcttgcgctcatgaaagtttcagaaactgatgaagataaaaaaaaaaaaaaaaaaggcaaaaaaaaaaaaaaccctagtag

SEQ ID NO: 76055 - DNA, 288 bp, Zea mays
  Clone ID: MRT4577_16938C.1
gtcgcttgcacttatactttgcttgcctcatgttattgaggcaataattctgttgcaacttgcaagtggcactttcttttgattctcactccaccaggcaccagccaagaggttctgctgggaattatttggcatctcctactcagcacagagtgtgcagataagcctagcctttagagaggatttcagatggaaatgttatcctgcaaactaaaattaactggtaaaatgacagaataaaacaaaggaagtcaattcataagtgccggatgcataggatgcctacca

SEQ ID NO: 76056 - DNA, 320 bp, Zea mays
  Clone ID: MRT4577_169390C.1
gatgactctcatccaagggtgattcaacaacagcatctagccgacatctttgacgctgcaccagcatttgctgcgcctccgatcgaggatttgttttacaaggttacgggcctgctcgcgacaaagcctctttcagcattatgaagggaagaaattggtatataataaggcatgtttaaaaagctagaatgttttttgttacagaggagtatgtataaatcaaaactagacagtcatggtctagtcgcatgtggtcttgggaagttagatgatcgcagcgccggcgttgagtaggtctggaatactagctattcactcag

SEQ ID NO: 76057 - DNA, 939 bp, Zea mays
  Clone ID: MRT4577_169391C.1
tcgggtcaagtctaactgtggttccctccaaatcccaaataaagaggataagccgcagccttcggccgggatcgtctccctctgtactccttcctcagcctcatcctatccaagaacgcagaaccgagacccacgaactcgcagcaggccagcagccatggccgcccccgcaacgagctccctgctgagcacgctgctgcagctaccgctcgctccgttctcggggaagagctcgccgccgtccgtggtgcacgtggcgcgccgggcgccgacggcggtggtggcggccaaggggttcaatgtgcagatcctggtggacgagaacgagggggaggagtccatctttcgcaggttccggcgggaggtgatgcgcgccggcgtgctgcaggagatcaagcgccgccggaggtacgagagcaagacagacgagaagaagcgcaaggcgcgcgaggccggacgccgcaaccgtcgcaggcgtatgatggacgagccgaggttcccagaagaagacgccgacgcgacctccaaggctcgggacgaggacaacgacaactgggaggtcgacggcatcctgtgaaacaaaaggaacgcatgcagtccacagttcaatttcacagcgtccagatgatgcacagcacagacccgtcaaattcgagttctttttgaggcccccccgtaagacgcaatccaaaccgtatatttgcgttttggccgcgttcgtttccacttcagtgtccaatggttacagctgcaattgcacaactaacgttcgcaaatgtagcgtcctccgatcccttctcgttccctgagctcttcttgtgtccatggtgtttgaaaccctactcttgtgtctgttccaacatctatcctttgtgtagcttgcgctcatgaaagttcagaaactgatgaagatacaaaaaagtctctcaaaaagtggtc

SEQ ID NO: 76058 - DNA, 322 bp, Zea mays
  Clone ID: MRT4577_169392C.1
aaaacaagagggaacgctgaagcgccttcatgcaccgccccaaaattcccgagcccacccatacttaccgggacgcgtgtgctgcaaatgggagaccacccacgcgcgctcggtatgtacacacaattcgtagatccacccgcccacctaataccctcgcctgctcctgcgctctaatacctgcaacccatctgtaatcctgacctccagccccaggatgcactgcctgccaacgctttcctgctggcactaccgcactggctggcaagatcaagttttgcttggtggacagcacgctagtgttagccagtcctactcgtcc

SEQ ID NO: 76059 - DNA, 411 bp, Zea mays
  Clone ID: MRT4577_169393C.1
cggacgcgtggtcagactcgtgggcggactcgtgagctgacacctgacgcgttctacgcttcaattgggactggactgatccacaccaggcacttgagtaggagtatgcggcatttgaacaggcaatcatgctagctagacctgattagatagacagcgttcgcttccatgtcaaatcatggacacctacaaggtctattgcacctgacgagtcgttcaccacctgcaactgggaaacctgtgtcgaaccaaacatcattggcaagtgtaagatccctgatgcgccatgtatcagcacctgatgggaaacctttgactaatcacatagcacaagctatatgcaagacccataatgaggcagaaaacagctgagcgttgaaggcctcagatgatccaattacctgtagcaga

SEQ ID NO: 76060 - DNA, 271 bp, Zea mays
  Clone ID: MRT4577_169394C.1
cgcgtgcgaaccaagcataccccatcagattaagcttagtcgtcgccggagcatgaggaacgtcgagcatcaagatgtcgtggcgaggcgtacctcgatgaccacctgctgtgcgacatctaaggccagcacctcagcgccgccgccatcgtcggccacgacggcagcttctggtcacagtccgagaacttccccgagttaaagcctgaggaggttgctgggatgatacaggactttgattaacctggaactcttgcaccaactgttcttt

SEQ ID NO: 76061 - DNA, 229 bp, Zea mays
  Clone ID: MRT4577_169395C.1
gagatagtaaactgacaaggttgctgagggattcattgggagggaaaacaaagacttgcattattgctacaatatcaccttcagtatattgtttggaagagacattgagcacacttgattatgcacaccgtgcaaaaaatatcaagaacaaaccagaggtaaatcaaaggatgatgaagtctgctgtgatcaaggacttgtactatgaaattgaccgcctcaaacaaga

SEQ ID NO: 76062 - DNA, 1461 bp, Zea mays
  Clone ID: MRT4577_169396C.1
cccttttcaccccccccggtccgcgcctgcgccgccttccctctcctgccttctccgcttcaatttgcgtagcgttgatttcacgcccggatctcacaacgctcaatccaaacgctagccgcaaccctaaccctagcaaccggtgagtaatggcgcgccctaggggcaagaagcgcacggcgccccgggcggccgccactgattcggtccagccggaggcggcggcgacggagacagcggcggcggagccggcaaatcgggggcggtggaagcgcgtcaaggcgccgcccaagcccaagcccgagacggattacttcgccgagaaaagaaatctggaggatctatggttatctgcttttcctgtcggtactgagtgggaaaacattgataagataaaggagttcaactggagctttgaaaatttagagaaagccttagaagaagggggcgagcttcatggtaaaacagtttatctgtttggaagcactgagccccaactattggatgttaatggcgaatcaaagatagtgcttattccaatcgtagttgctgtagactgccctttccctccatcagacaaaattggcataaactctgtccaaagggaaaatgaggaaatagtgccaatgaaggcgatgaagatggcatgggtgccttatgttccccttgaggaccggcttagcaggattgacagtttgaaaacaaaaatattcactctcggatgcacgcagcggaggtctgcactgaagcatctcaaaattgagagagtcaagaagtttgactactgcatgccttactatatgccgctgcaacctcttgaagacgagaatgacactgttatcagtttcttatatcctctagaacccccgatagtagatgagtttgactgggaaatggacgattacgaggattttgctgatcagaaagttcaagaaggtggcctgccagaggatgagaaagaaaaattcaaggagttcctgaaggagaaggttagagaaaggaagagagagcttaaacaggctaaagaagccaggaggaaagctattgatgatatggatcctaaggtgaaagaggcattcgagaacatcaaattttacaaattttatcctgtgaaaaccccagacacgcctgatgtaaacaatgtaaaggcgaggtacatcaacagatactacaggaatgcccattatctgatgtgatggctttccttatcgcacgtgcttggcgagcttgtcacttgagaggagttgatatgaaaacagttcggtgttgtactagagttggccccagtttttcaccccccctgggcatcttttgctctccggtgtatacaatcctgaggatagattattgtgtagcactaagaggggcaaagtagtttgagactaaacaaatcattaaggaacaatttgtgtgcccttttcataaaattttgtggtggtttcagaggaaaaaaaaaaaaac

SEQ ID NO: 76063 - DNA, 598 bp, Zea mays
  Clone ID: MRT4577_169397C.1
gggctcgaagtgtgtgtctatgcatgacattattcctctatttagagtcgtgggatacaactttgtataaaattacaaacatgtcctcaaaccatatacatgaccgctacatacattacgacagtaatattgtactttcccatctatacatcttgcagatcaagtcttccgtaacctttatcttcgtctcctgcatgtatccatgtctcttgcatagtaagccacagcgcatcaccccgaagctacctccttcgacctcgattggcttaggttagctttgactcgatgacaaggtgaaggcttttatcttttcagcagagctttgtggagtcttagctaagcaacggttgaatataaaacctcagactaagagctgtggtaacctgtaatataaggcgaaagagaatcagcaaaatgactcgtaatagcagcccaaagaagcaacacgagatagaaccaattatgctgcgtgagaaaactaaaattgtgctgctgcaaatcaataagcactgtaagatgcataggatgttcatgacttgcggatcagtcataaaactgaatctgtaagactaataactttatgatggattaaaaacat

SEQ ID NO: 76064 - DNA, 426 bp, Zea mays
  unsure (1)..(426): unsure at all n locations
  Clone ID: MRT4577_169398C.1
cggacgcacaaccccagcgaggcttgtcggtcatggtgtgcgtgcatccaatatagcgaccatggcacgcgcatgaaccggcgtcactaagccacaacgactcgcgtgatcaacgcatgcaccgtcaaatggtcggtgcggcaaccgctgaataagctcaactatctacacagttactgtattatacattgagatctaaagccttgcacctaatgtntgtggtttaacgacatgaacatgtgattataaagttaagnnatnttggactttcttnnttttattaagctccactgaaaccattatgtgataatggtgttgctgtaactatatggtatcgtgctcctgaactattacttgcgtggaaacacttcaccagtgctgtataataatttacaattggtttcatttttactaaaatgcttacac

SEQ ID NO: 76065 - DNA, 491 bp, Zea mays
  unsure (1)..(491): unsure at all n locations
  Clone ID: MRT4577_169399C.1
ggcaaaagagggtgaatagcctgcaaaagtatccaacaaactcacaagttattttagcaaagtttaattaatacaaaaatgacaggttaaacaactactttggactaacactaatttactcgagactaattttttaaagtgaaaggggaaaaacacactgtatttaaaatatttatacgttcacacgaactgtaatttaatcagggagggttaaaccaaaactgaaaacaaacaagttaggaactgacaaatgaactaggaagactagtaggtggcgagaagttagtggctggctaaacattatatgcgtactaggacaaaccttnatatagatggtaatgatgtggttgaaaccatttttgcgtggaatttatataggggcaggaggaacctataaaccataagggggttaagggtttttaatcccttggaaaatttgcattttgaggaagttacggatggtttattttaaaaacaattttttttgaaaa

SEQ ID NO: 76066 - DNA, 438 bp, Zea mays
  Clone ID: MRT4577_16939C.1
aattcggcacgaggctcgttccttccccaactatcgttaggcttctccaccccgccctccccgccctccccgccgaacgcgcctcactctccctccatgcagatcaatgcgtccttccaccccaaccgtgctcctcgcccttctctcgtcgtcctcgttccccctagactggcgtggagtgaagatccatccggactccgattgatttcttctcctgctgaagaaacggagagattcggccaagattgggatcaatctgcgcatgggtcggtatcgtataagaacgtataggttgctgtcgctcaatctggaaaatttgtattgttatgaccaccgtacaattttctccaatataattaacgacgtttcatgttgatatgttctgaatccgttctttgttttgctgaggtcccaacgttcacctgtatgcgcagttgc

SEQ ID NO: 76067 - DNA, 231 bp, Zea mays
  unsure (1)..(231): unsure at all n locations
  Clone ID: MRT4577_1693C.1
tccagagcagccgccctttttttttttttttttttaaaaaaaaaaaaaatccnatccnttttgaagggaaaaangaaaagaaggggagtttacgaaagttattttgcccccttcaccccccaaaccnganaccctaacaaactcatgcctcataacacctaatgtaaacaactctaatacttatccccgactagccagccaaacaatatttcaagctacccaccaaaccct

SEQ ID NO: 76068 - DNA, 151 bp, Zea mays
  Clone ID: MRT4577_169400C.1
gagggtggaattatatctgctaatctggacatacatgatcctcataaggccttctttctacacagtaacacactaaattggcatgttcgagtatctatacgaggtagtatatactgcaaaattgccagcaattgacggactttgtacacac

SEQ ID NO: 76069 - DNA, 683 bp, Zea mays
  unsure (1)..(683): unsure at all n locations
  Clone ID: MRT4577_169401C.1
actacccgaccaaatcgaagcttccaccaaacgcccggagcccccctcgtgaagcagcccggatcgaattgcggccgtctcgatcatctgctcgattcgacgccgccggacgatttgggcgcggaatccggaggggggaatctgtgcgcgcgggcggaggcgatcgtggggagcagccatgagcgaggtattcgagggctacgagcgccagtactgcgaggaatccgcttccctctcccgcaagtgcaccgccgcctccgctctcgatggagagaagaagaagcagaggctctccgagatccagtccggcgtgcaggaagctgaatcgctgattcggaggatggacctggaggccaggaatacgccgcctagcgtgaaagcgggtttgctagctaagctgcgggagtacaaatctgaccttaacaacctcaagagcgagctcaagaggatctcggcgcccaatgccaggcaaactaccaaggaggagctccttgagtctggcatggctgacacactcgcggtgtccactgatcagcgaggaaggttgatgatgacaactgaaagactgaatcagtccactgacagaattaaagagagccgaagaacaatgctggagacagaagaaacttgngtgtgtcgattcttcaggatcttcatcaacaacggcagtcactactgcatgc

SEQ ID NO: 76070 - DNA, 272 bp, Zea mays
  Clone ID: MRT4577_169402C.1
ctgctgctcgagcgcatctgatacaatcagagaatacccgatcgtgatctagtccctctgaatggcccgcagctctcggactccctgacatgtactatcgcacgatagtcgccgttgcggcggcagagatcggttcactgggacgatgtgaaggatgacaagcatcgggagacttaccctggtcatagtgttagggcttcggttggtagatggcggagacgaaaggatcttcactggtatagtcgggctaagaaatccgacacggaagatgc

SEQ ID NO: 76071 - DNA, 219 bp, Zea mays
  unsure (1)..(219): unsure at all n locations
  Clone ID: MRT4577_169403C.1
tcttgtaaggcaaaaatagagatattgtggattaaaatcgttccacttacattacatcgctaattaggatcaaatacttactacacacgacaattataccttttagcacattatttttttctgcctgactaggaaanaaaatgtacgaacaagacaacgactaatngtatagtttatgataaattatgccttggccgctcccttggcaaaaaagacgct

SEQ ID NO: 76072 - DNA, 305 bp, Zea mays
  unsure (1)..(305): unsure at all n locations
  Clone ID: MRT4577_169404C.1
ctggctctttgcctaacttttggncnnacttcttattcttatcttacactgacncntgagctcatgcagaattctaaaccgacagtgcataccaacaaaaacacccaacctccccatcatgagtaagccttgtaggaccatacataccctaacactatcgctgcccactctccgagtagcgatggccaaggttttttcttttatccttcacaaccgaacccgcaactcaccgctcaagcgaacacactttcgaccgcaccacagctctccttcatgatgcttgtgccaactactaccctttcatc

SEQ ID NO: 76073 - DNA, 124 bp, Zea mays
  Clone ID: MRT4577_169405C.1
agaaacgaaatcccggatacattccctattggattttatgaaaacatcccccgcgggtggcgtccaattacttcgaccactgtggtctttcatctccgaccaaagctctacatgaagacctggg

SEQ ID NO: 76074 - DNA, 708 bp, Zea mays
  Clone ID: MRT4577_169406C.1
ccggccgggatggagccgacgaggtttctgcgcgaccggcgggaccaaggcggaggaggagcagagcgacagccagctcgagcaggagcaggaggtcccctgcgtgccggacatcttcgtgcaaaaggtgcccgtgtcccgccgctcttctcccgccaaggcggcagagaagccgacgccaccgcccgacgtcgacgaggccaccacggcgcccgtgtcccgccgctcgccagacacgccaacctcgcgcggcgagaaggctaaggcagacgtgttcccgactccgatcgaggacatcgacatggagttggattggaggcggacaaagcggggaagttcgcaacgggccagacacggtcgccatatccatatacgatgccagcgctacgggaaaaaatcggtgcgaactagccgcagattcctcaggtgcgatcggtcaaatcatccggcgaggtgagaaggctcatccacgacgcttgcagccgactcgcatccacaaccaggacaaggatcaactctgtttacggctcgactcataaactttagcttaatttttttcatcattgcaatcagaagtgcctgagcgtgaaggcctgaagggataagagcacttgcttgagtggtagctgaaacggttatagcgtgttttggtttgagaaatgatgtagtctatcatcttctcgctctttaaattatggttggattgcg

SEQ ID NO: 76075 - DNA, 855 bp, Zea mays
  Clone ID: MRT4577_169407C.1
cccagcgtccgccactcctccccctcaacgcggccagcccccacctgatctccatgcctgcttcctcggtcagcaagccccgtccccagtgccggatggggcggagcgttgcagccccgtccagcccccaactccagcactccagaagctccccccgatccgacgtcgtggtggccgacagctggatccctccacccctgcgcacagaagtccctcgcgccgcggtcctcctcgtcgacgaaccggcacagggaagcaccaccgcctccgacgcctagactcttacagagcgggaacaggagcgtagggatgagggaccgactggagaagatggtggagcgggagtgccaaaaggagctccacagcattgttgacgacctggaggaagctggccgataataggtaatgttctggtgctctgcgtagcagtgctagaagttttcttgtgatcgtccatttgcaatcaaacaaaggtcgtgaggatgcaaggccttgaataatatcactagcaccaggttccctagacattcaaagagatggtggcttgataacagtgacaggtatttgtgaagggtcgtggaatggaaatagatcatgaaaaaaataaaatgtgtatgcctctcaaagcaatgttgtatcatggatcaactatcatactgtgttcggtatgtgatcgaatcataattgttctcgctttttattataagatttttttgtaataaaacaatgtggtcaagtaatgattacatcggggattctaaaaaaaaaaaaaaaaaaaaaaaaaaaaaaaaaaaaaaaaaaaaaaaaaaaaaaaaaaaaaaaacccgaaaaaaaaaaaaaaaaaagggcccccca

SEQ ID NO: 76076 - DNA, 1088 bp, Zea mays
  Clone ID: MRT4577_169408C.1
accaaaccaacccatacctgatccaggcggcagcggaaacgcaaggagaggggcggcgatgatacagtagatttcaaactcaaactgaccaccagagagagatagaggggagagatcggagaggaaggacgtttggagcaggcggctattgcaggctttgcagccgccgtcctcctgattcgggcccccctccccggatcgctccagattcgcacgatttggggatcgtgcgtttcgccatcagatcgggagaagaaaaatcaaattcaaggggcaagtttctgcaacttaaataaatagagtgaatatgactgacatgaattctgatgagattcttgaggttcctgacactcctgaccgattacagcagtcaaaataccatgcttccagctctattgttgggagggatggtacaatggcagctgctaatccatcaccacagcgcaaatttagaattagattcaagaacaattccgtgcaaggttcatcaagtcaaaataatggttgtagcatactgcctgcagctttagatactgatcatattttcaaacaagctgaagcagcacagattctggaactgtctaaagactataaggcaaaattttccctacagaaacctgacagcacaaggatatctgttgacagtgaaaagagggctggaaaacatggctttgatcagagcagaagcatttcgaacaatataagttgtagtgtgactggaggaaggaaccctaccttccaagttaaagatggagaggttggtcagcaagatgcaggtcatcagagtgcaaactttctagacataggaccaggttttcctactattcaagtgggaaaaccaggatacagattatgcactcgcactactgatagctgaaaggtgtaacaggtgctgatgtttgtccaggatcaagttctggggaggtcaaaggggacttgatcactaacaaggtcattgcaggacctacaagccctctgcgtgtttttcctcgaaggcatgtgggccaaaaaaggctggtacgcaatggatgtatttccccctctaacatagccaagacagatgcaaaagttaatgaaaaacaggaaat

SEQ ID NO: 76077 - DNA, 690 bp, Zea mays
  Clone ID: MRT4577_169409C.1
aatcaacagcgagccgcgccgccaagcaagggctcagcaattgtagtaatgggctccaggcacgctgcattattagcaatacagaaccatttctctctgtttccgttaaatgttgctcctgttcaagaatccggtggattatcaacaagaccaacagaaacatatgaatcaaggacaagcaatactgatggaactggatttaacgatttggaagcgtcggtgttccggaaacttcgagaggcccagaaaaggaaacattttggttaattgttttgttctgatgcatgatttggtactatgtatatgacgtcacacagctgaaaaatatctgaggatcgtgatggtagctgagttacagaaatctgaactacacatttgtttagttcgagtcttgtcgcagataaaattctctgaatcatagcaacgtcagatcgatttttctgtcactgtacaagctgtaccatgtatctatgaatagtttgtaaccacaaattcatgcatgacatggcgctacacatctttttgctggaaattgggaacacaacccctttctcgcagataaaattctctgaatcatagcaacgtcagatcaatttttctgtcactgtacaagctgtaccatgtatctatgaatagtttgtaaccacaaattcatgcatgacatggcgctacacatctttttgctggaaa

SEQ ID NO: 76078 - DNA, 316 bp, Zea mays
  Clone ID: MRT4577_169410C.1
ctcctgtcacgtaaggcgctgaggggaacgcataagagcctgacgaggacgagagggcggtggctcacaactatcacgacgagcatagcgaagaggcttaagatagaaaaaagctatcgactatgtaggtgagaacgaggcatcctgcgttatagcgcactataaatagctacatacaggtccagtcgtgatcgagagcgcatatcttatgctcttgtactcaccgtacgcatgcttacctcctgttctactgcgttacacactcttactacgccctatagccctttaccttgcctggtgctgccactgacacggg

SEQ ID NO: 76079 - DNA, 370 bp, Zea mays
  Clone ID: MRT4577_169411C.1
attcggctcgagagcaaccgagctttttttgcaaccctacgaccaggagccctagggggggttttaaaaagcattgcgttttaatacacccaaatactcggaacccccagaacggagggacccttcggcgagggccaaactacagtgcatatgaccgacgataagcccaaagtggcaggtatccaaaaacactaaggccaataccacggggatacgtaccaacgcctctgttctggaaaggggaagagctacctcacgcaccagttcctccgacaaaagatctggatcacgatccggttttgcctacaagatgacaatcttctccaagaaccccgatcttgaagtcatccactgctgacagggcacactc

SEQ ID NO: 76080 - DNA, 1147 bp, Zea mays
  Clone ID: MRT4577_169412C.1
gctgggaacttatgaaactgcgacggtggatgtgatcggtgacgggttccgtgcgagggatataacatttgagaacagcgctggtgctggagctcatcaggctgtagcgttccgttctgacagcgatcggtcagtgctggagaatgtggagttccgtggacatcaggatacgctgtatgctcacacaatgcggcagttctaccgcaggtgccatattgtagggacagtggattttatatttgggaatgcagcagcagtgtttgaggaatgtgtgattaagactgtaccacgggccgagggagctcagaagcgcgcacgaaacgtggtggcggctagtgggaggattgatccggggcagacgacagggtttgtatttgtgaattgcactgtggatgggaacaaagggtttgtggaattgtttcggagaaagccagattcatacagactgtatttgggccggccatggaaggagtatgccaggacattgtatgtcagctgttacttggggacagttgtcaggccggagggatggcttccatggcgaggtgattttgctctcagtacactgtattatggagagtttgacagtcgaggccctggtgcaaaccacacagcaagggttgagtggagcagtcagacaccagaacagtatgtcaaacacttttcaaccgagaacttcattcagggccatcaatggattgcgtactaactacagtgtaaattgttgttcttggatcagtgacttattggcaccttaagactgtctctagtaaactatgcagaataggagatacggaactatatatgacactgagaggagtttgaaataaggaatgtgatagaggatgagatagtgaatctgctggagatagcctaacagcacgatagtgaaaattttctggaatggtaaatacattcatccattattccaaggatctcgagacacatgtggttcctgttagaaaatccaaactgatgtggttcgtgttttgttttcttactatatatgtacctattttttagtaataattctgtttttgtaattaaactgttccttgtatatagtaaagattaaaattgttttctctaaaaaaaaaaaaaaaaaaaaaaaaacaaaaaaaaaaaaaaaaacaaaaaaaacggggct

SEQ ID NO: 76081 - DNA, 202 bp, Zea mays
  unsure (1)..(202): unsure at all n locations
  Clone ID: MRT4577_169413C.1
cccccaacccctcnttttctttttatacagccaacgacaaaaaacggacganagtttttaaatgaattcacgggcacccccccatgaaaaaaatccttaatgtggttattgagtgctcatgcaaaagcttatactgggggggaataagacaaacatgttgttcacaggggaaaaggaaagaagttatgttagtggattcttg

SEQ ID NO: 76082 - DNA, 506 bp, Zea mays
  Clone ID: MRT4577_169414C.1
caaaccaaaaaacttttttttggacctttacctaataaaaaatttaaaggggggcccccccaagggggggttgtgggaaaaaccctttggggtttgtaaaaaaaggtgggttaaagggaaaaatttgtggcatttgaaaggggggcccagctttggggccagggggttggtaaaacggaaaaaattggggtggtttaaaaagggggggggggttaaaaccacttagtgggttaaagggaaaaagttgtggttgttgaaaaaaagcgggggggttaaatgctcccagtgggttaaagggaaaaaattgttgggggtgggcaaaaggaacctggctaaagggaatttgtggttgttcaaaataaaaagcagggttaaaggcacttggtgggttaaatggaaaaaactgtttttgttaaaagtaggcaaaagggtttgctaccacaatttgttgaatttgtgggcccctgtttttttgggccaataattgccccaaaggtaactgtttt

SEQ ID NO: 76083 - DNA, 405 bp, Zea mays
  Clone ID: MRT4577_169415C.1
tttttttttttttttttttttttttttttgggggtttttttttttttttttttttttttttttttttttttttttttttttttttttttttttcccccattccaaaacattaagggggggggaaaacacaaacatttccgggttaccaaccgtgggctgggtttagccccccccggcaaaaattttttttaaacaaaaaaaagggggggcgggctccccctactaaaaccccccaaaaaaaacttttggggggggggggcaccttgggccaaaaaaatatttaaggcggttctttttggaaaaaccaaaaccaaaagcgggggggggcaacccctcaaatggttttcggaatgaaaaccccccggaaacggaaagttagctacccgttagctggggccctagggg

SEQ ID NO: 76084 - DNA, 760 bp, Zea mays
  Clone ID: MRT4577_169416C.1
agatctccagctgcaagcaatgggcgccgtcgctgctctgatcctagccggtctactcgccgcgctcacgtacgtgctttgcgcgctccactccatcgtgtgggtgccgtaccgcctggagcgccgcctgcgctgtcagggcatccgggggcctccccgcagcctgctctccggaaacgcggccgaatacgtcgccatgaccaaagccgcccagtccgcgccgctcgcctccttccaccacgccttcatcggccgcgccgcgccgcagtaccgcgagtgggcggcgcgatacggccgcccgttcgtgttctggttcggaccccgcccgcggctggtggtctccggcccggaggtcgccaaggccgtgctgaccgactccacgggggccttcgagaagggtaccaccggcagcggcaacaacccgcaagctcggcagctcatcggcgaggggctggtggggctcaccggggagaagtgggcgcaccaccgccgtgtgatctcgcccgcgttcaacatggagagggtcaagggttggataccagaaatatcagctatcacttcatccatgctggatgaatgggaagtccaaggagaaactcgagcagagtttgagatcgatgtaaataaagaattccacactttggagtgcggatgtcattttcttggtgtggcatttggaagtagctatgaggaaggaaagcgaatttttcaattggcagatgaacagatacaacttgtcatacttgctatgaaaaccttc

SEQ ID NO: 76085 - DNA, 806 bp, Zea mays
  unsure (1)..(806): unsure at all n locations
  Clone ID: MRT4577_169417C.1
ggttcatttctagcctatcgagctcctcaggtagtaaaaccctatacctcgtgccgcctctgtcgccgtcgccgtcgccgtcgccggctcgcctccccatcgacgcgcaggcagccctgcgttcgccccccgtcggtcgggaaaggggcgcgccggcgctgcctccagcaatcaactcgccgcatccaagcacggggcctccctcctcgattggctcctcggtggttggttgttataggcaggcgggaaggatgttctcgctgagccagatcgagcacgacctcccgatgccgccgcacctgctgagccgcccccttcccgacgccatcaaggccgagctcgagaggctcttcttggacaaggtttcatttcgtttgctgatgttcaagccttttaatggggagattctcgttgggcggattactggatatgacgataagggattgcaggtttcacttgaattcttcagtgacatttgcatacctggacacttgatgcagtttggcacagtaaggggaccagatggtaggtggatgctgaagactgaattaggcgatgagctttatctagatctagatgacgagcacaaaatacccgcctataccaattgatcaaaatgaggatgacccaccatttgctccaatgcagattgttggaagtattaaaggggatggccttggtcttcttgtttggtgggcggctgatgaagaggaggggggaggaggcggcanaggaagagcaatagcatcgtgttgcttgagggctcacttcgtgtaatttacagaatcagcctggtagcatgtgta

SEQ ID NO: 76086 - DNA, 124 bp, Zea mays
  Clone ID: MRT4577_169418C.1
taagtgttcataaacacgtctgtggatcaattgacgtgtattacagccttgcagttgacgattaaagtcgaggtttaagacgcttgaggactggcatcatctcatgaatacattgaagtgcaag

SEQ ID NO: 76087 - DNA, 1107 bp, Zea mays
  Clone ID: MRT4577_169419C.1
cgaacaaagtacaggtccatttctagcctatcgagctcctcaggtagtaaaaccctacctacacctcgtgccgcctccgtcgccggctcgcctccccatcgacgcgcaggcagccctgcgtttgctccccgtcggtcgggaaaggggcgcgccggcgctgcctccagcaatcaactcgccgcatccaatcacggcgcctccctcctcgattggctcctcggtggttggttgttataggcaggcgggaaggatgttctcgctgagccagatcgagcacgacctcccgatgccgccgcacctgctgagccgcccccttcccgacgccatcaaggccgagctcgagaggctcttcttggacaaggtaatcacaaaacttgggctgtgcgtgtctgtctatgatatccgatccattgaaggcggttccatccatccaggggagggctgctcgacttataaagtttcatttcgtttgctgatgttcaagccttttaatggggagattcttgttgggaggattactggatatgacgataagggattgcaggtttcacttgaattcttcagtgacatttgcatacctggacacttgatgcagtttggcacagtaaggggaccagatggtaggtggatgctgaagactgaattaggcgatgagctttatctagatctagatgacgagataaggttcttggtttctagcacaaaatacccgcctataccaattgatcaaaatgaggatgacccaccatttgctccaatgcagattgttggaagtattaaaggggatggccttggtcttcttgtttggtgggcagctgatgaagaggagggggaggaggcggcagaggaagagcaatagcatcgtgttgcttgagggctcacttcgtgtaatttacagaatcagcctggtagcatgtgtagtgtaggggtcaggttcctaggagaattatgtatgtatgcaatcccctgaaattttctaaatatctgtgagctatatataattttatagcgcagagatctctccctgtaagagcatctccaaaagctccccagaagtctcctctaaatctattttttggggaaaaaaaaaaaaaaaaaaaaaaaaaa

SEQ ID NO: 76088 - DNA, 371 bp, Zea mays
  Clone ID: MRT4577_16941C.1
ttgagtgtcgcctgcggtccgtccgaattcccgtcgcccacgcgtcgtggattcatgataatgcttgagaactgaaattcccgtttcatgctaaaaaaaaaaggagggtaataaacaaataaaagggagaaagcaaaaaaaatcatgagaaaaaaaggaaagaacattggagggggaccaggtttgctgctcgtgcatgcaaccccattcctcttacatatggcatccttatgggggggcccctttttggggttccacctttcgggggcgtggattggcccttatgtttttttttttggggcccccaaatttactttccggggcggggttttaccatattcgggatggggaaaccccgggggggccctact

SEQ ID NO: 76089 - DNA, 1538 bp, Zea mays
  Clone ID: MRT4577_169420C.1
agcccaggcccctcccgggccggtggcagggcggacggtgcgcgggccgacccgcccgtggcggcggagggcggagtccggcggtgcgagcggcgccgggtcccgcgctgtcgcgggggcggcccgccgcgctccgcccgccgcggctgcaggccgcgcccccctcactctgctcgcctccgggtctgccgccacgcgtccgcgacgccgctgggagctcgcagggtgtggaaagggccttgggcggacaatccatctcttctcttgggttccatgacatgtttggtggtatcctaaacgatccccaagcgggtggcagtatggaggttgggtggggcaagctgaacgaagaggatgaagacagagacctgcagaataaacggctcagagtacgacactttggcgaagaaaacccactgcattctggtgccagtgctactccctttggctctgaatcgtcatttttgcccatttctgatgaatgtgttcatttaaagctgtctcgtttcccagaacatgaattggaatttgggttgtcacttttcgcaaatgatggtagtgagagcccaagggatgccaataatgagcaagtcgatgatgcagaaaactccggtggaagaaattctgtggatgttggaataagaatggatctctccgatgatttcctgcacatgattttctctttcttggaccagaaggatttatgcagagcaggtgtgacctgtaaacagtggcgatctgctagtgtgcatgatgatttttggaagtgtttgaaatttgagaacactagcgtatcactggagaactttgttaatatttgccgtcattaccagagtgtcacagaactcaatttgcatggtgtcataaatgcagaaatgctagttctggaagcaataatgtttttaacgcatctgaagacattaacaatgggcaagggacaactgggagaatcattttttcaagctttggctgagtgcccattattgactgctttaacagtaaacgatgcttctcttgggagtggcattcaagaagtaactgttaatcatgatggactgcgtgagcttcatattttgaagtgccgtgcacttagaatatctgtcaggtgttcccaacttcaaatactgtctttgaggcgaacaggcatggctcatgtatcactgaactgtcctcagttgcttgagttggacttccaatcctgccataagctttctgacaatgcgattcgccaagctgctacagcttgcccattgttggcaaaactagacatgtcatcttgttcttgtgttactgatgagacactgcgcgacataggtaactcatgtccaagtctgtctgctcttgatgcatcaaactgccccaacatttcatttgagtccgtgaagctttcaatgttagtagacttgaaactgctaagttgtgaaggaatcacatctgcttcgatggttgcaatagcttacagccgtctgcttgaggcactacagcttgataattgcagcctgttgacatcagagtctttggacttaccacatcttaag

SEQ ID NO: 76090 - DNA, 285 bp, Zea mays
  unsure (1)..(285): unsure at all n locations
  Clone ID: MRT4577_169421C.1
cccgggctagcagggactcacggagtgataatcactactcactggacccaattcgataggagcagccacacaggtggccatggcggccancatgatcatggcctcagctgtggccgtggcgcctcagggccatgggctcatgggccgccgcagcttctccttcgccggccgctgctccaagagacaagatcaacaccgacaaccgctacaaggatcgggggcgggctgaccggggacgtctacggcaacaggagaaaggagacggtcaagggcctgtaccagttg

SEQ ID NO: 76091 - DNA, 394 bp, Zea mays
  Clone ID: MRT4577_169422C.1
gcggcggcttttcttgctcatgtccgccccaaaacatcatgtggagaccgtgtcatacaccgaagaccggtgggctggggtgctcggtggaaaaaaagaaagagctcctaccgagactatctgggaacaatgctcacaagccattattgcttgtgtccctggaggtaaatattaccgccggggtctttggcctgtgaaaagcaactccatcaacggtactggatccaacaggctaaaacaggtgtcgtgttacctccatcacctttgttactccaacaatcattatggcctattacagcagctacctgaggtgcattgatcggcacaaaacataacggcacttcaactacaacaacttgtgctagcaaacggttgctgcctactctcagcaaca

SEQ ID NO: 76092 - DNA, 722 bp, Zea mays
  unsure (1)..(722): unsure at all n locations
  Clone ID: MRT4577_169423C.1
gaggctggccggaccacaccacgacgtacacgtcgcacaagcgccacctttcagcgcgctggctgaggcgactgcagccatgtacaagcaagcaacacagaagacgggcgaggtgctgtcactgcccccgagatggctgggcatgtactcggacttcatcaccaaaaacagcagcgctgtgacgcagattgagtctgcactgcgttcgttgacatatatcattccgggacgcttccgggaatccgaaatcgcatcagagtctcttcatagcggcgtccaggtcctttctctataccacgactctctcctctccaaagccatggcgcaaatgccagggacgcgacgacaccctgtcaccccgcatcatcgatacgccaagttctggacacagcactcgcccacgtataagcgaatcgcgctagtactccagatgattcaatataccgagttgctgtgggagatggcagccaagaggaagggcgagaaggtacgatggcgggttgtggtgttgctggaagtggtaaaggcagtatgccgattgctgctgctccgactgacaaactcccgccctctcctatctcccccgctccctcagcgggaaattgaccccagctctcttgaagagtcatcnggcgtcggcggatggcatggatacgccaccaagcgagcgtttcgtcgaggctgagaactggggcatgcccagnactggtctgtcgatgcct

SEQ ID NO: 76093 - DNA, 315 bp, Zea mays
  Clone ID: MRT4577_169424C.1
gagcaatgcttatacctgatgctgtaactgatcagtcccacaatggatgctaggcgcgctcggctacataagcactaccatatagcatagaatgctattctatgaccatcctacagatcacgaattcatccaaaaccaacttcttgatcctcgtacacccatgggacgcatagtcagtacggctgattatgcttacagaatatcagatttaggagtggctatgaattgatcactgtgttatgaacattaacatcctatgcactatgtgcaacagatcgatgatcatagactcaatgcgatcaacatctacaagac

SEQ ID NO: 76094 - DNA, 581 bp, Zea mays
  Clone ID: MRT4577_169425C.1
aattcggcacgaggatctcaggcttggagtcgaccgtctagcgcctaaccctatcatgacacactggaacggcgtcgtcacgcacaccaacttccggacgatgtcctggtggaaggaaggcggctcccactcgatcataggctgccttcgacaatctcacgctgcgggatagggagcatatccaggactacctggagggcaccgagctccggcttaccgtgacggactacaccgtcgacatacaacacgtgcagctggtgcgagcgcaaccaccgtgcactctgctgcccgttaacggcgacacgcaccagaactctgagagtacttcgaggacctccgcccggcatccaacatggaccgctacgaaggtacctgcataagaggacgacaccaacagtcatcatcgaagccctgagcgcggccaaaaccttacgctgcattatagacaccaatgctaagctacaccatagcacaacattgccacttacgttatgggcacttatgatgattatgattatctagctagatcatgcttcctgaacttcaagggcagtgtcgatgcagcgccgtacctgaggaag

SEQ ID NO: 76095 - DNA, 768 bp, Zea mays
  Clone ID: MRT4577_169426C.1
ccggccgggccgggactattgacagtatttcagagctctagatctatttacctatctcagggtctcaacatgtctccgcttctcgctgttgcaatgaaccacactgcaaaccatctctgcacttatgagccatctaccatcagccaacaatagacagatatctgcactgtgacacacctgccgtacttcttctccacagagaaagaagcaaatatgtaaccttacctttactacacgatatgctaaagtactgaaccaccatgtagtccaaatgttgagcccctcacaaataccacaaaggcactggttcccctctgacttcaccttctctgccgccacttcaccgcaccaaattgaaggtgcttggaatgaagaagtaaaggaagaaagcaactgacatcacttctgccactatcatccaaaaaggatactgtatcgtgagaaattccaacattgtagcgaattcgtaccatatgtaccaaaaggacggcaaattgctcaaagaaatgggcatggacacatataagttctctatatcttgcaccaaaatactgccgaagggaaccgaagaaggaggtatatagcccggatgtgatcaagtactacagaaacctacatcaacttgttgatagaaaacgcgatagagccatatgtaacaattttccactgctatgtacctcaagcactagaagacaagtacggaggcttcctagataggagtcataagagcattgtattaagattacacatacttttgctaaggtgtgc

SEQ ID NO: 76096 - DNA, 1340 bp, Zea mays
  Clone ID: MRT4577_169427C.1
ttgccatatctgttcctctatcactgtatatagagatctacataatggacgagaggaggactattttgatggaccgttacgaaatcgggaggcagttaggccaaggaaacttcgccaaggtatactttgctcggaacctgaccgacgggcagtccgttgcgataaagatgatcgataaggacaagatcacgagggttgggctaatagtgcagataaagagggagatctctataatgaggctggtgaagcatccgaatgtcctgcagctcttcgaggtaatggctagcaagagcaagatctactttgtattggagtacgctaaaggcggcgagctgttcaacaaagtatcaaaggcgaagctcagcgaggatgccgcgaggaggtatttccaccagctggttaatgccgtggactactgccacagccgaggcgtctaccatcgcgacttgaagccggaaaacctactcctggacgagaacgagaaccttagagtctcggactttggtctgagcgccctgtctgaatccaaaaggcacgacggcctcctacataccacgtgtggaacccctgcctatgttgctcctgaagtgcttggtaggagaggctacgatggcaccaaggcggacatatggtcctgcggagtgattctcttcgtgctcgtggctggttacctgccgttccacgacccgaatctcatcgagatgtacaggaagatctccagagctgaatacagatgccctcgctccttctccggtgagctgaaggacctgcttttcagaatgctcgatccagatcccagtaccaggatatccatttcaaggatcaagagaagcacttggtacagaaaacctatcgaggcaaacgcggcaaagatcaagcacggcacagcaagagacaccaccgtgcgcgacggtgaagccgccacggcctcgagctcgatagagtgcagtaaccggccagaggaagaccaagggtcgtcaagcctccctaacctgaacgcattcgacatcatttctctctcgaccgggtttgacctatctaacctgttcgaagaaagacacgggcggagggaggagaggttcaccaccaggcagccagtgggagcggtgtttggtaggctgaaggagctggctgaagcggttgaagctgaaaaattccagaaagaaagagaagcggggtctttaaacttggcttgcgcagaaggaaagggattgaaaggggttccttggaagctcgacgccgaagttttcgagcttgccccttcgttccttctggtcgagctgaagaaagccagccgtgacaccattgagtaccaaaggcttcgtgagggaagaaagtgc

SEQ ID NO: 76097 - DNA, 267 bp, Zea mays
  Clone ID: MRT4577_169428C.1
tgtaccgacgagaagaaggaggaccagaaggaccatatgagccacacggcccgcatgctgggtacccggggatgggctgaggctgacggcgccagggtcggggaggtggtcctcgccgtcgccaggtctcatcggctggtcgctaacagtagctcggtggtcctcgggttcacaggcgacatcggggagcagagcctctggtggcccaacaagaaggacaggacgtccttgtgctgcaacaacacgccggggaggaagtatcacatg

SEQ ID NO: 76098 - DNA, 1239 bp, Zea mays
  Clone ID: MRT4577_169429C.1
ttgttcgcgtgggcgagatgtacaggaagatctccagagctgaatacagatgccctcgctccttctccggtgagctgaaggacctgcttttcagaatgctcgatccagatcccagtaccaggatatccatttcaaggatcaagagaagcacatggtacagaaaacctatcgaggcaaacgcggcaaagatcaagcacggcacagcaagagacaccaccgtgcgtgacggtgaagccgccacggcctctagctcgatagagtgcagtaaccgggcagaggaagaccaaggtcgtcgagcctccctaacctgaacgcattcgacatcatttctctctcgactgggtttgacctatctaacctgttcgaagaaagacacgggcggagggaggagaggttcaccaccaggcagccagtgggagcggtgtttggtaggctgaaggagctggctgagcggttgaagctgaaaatccagaagaaggagagcggggtcttgaaactggctgcgcagaaggaagggatgaaggggttcctggagctcgacgccgaggttttcgagctcgccccttcgttccttctggtcgagctgaagaaaaccagcggtgacaccattgagtaccaaaggctcgtgagggaagaagtgcggcctgcgctgaaggatatggtctgggcttggcagagcgaccggcagcagcagcagcagcagcgcgagcagtctgtgcaaggagaggaccagcagcagccgttgtcgtctttgccgacgcagcagtagtcactgcaccaccagttgcgaccgccataaccagatcacgtcaaaactgcaccaagccgcacaggactagtaactcccacttgcatcgacgcttatgtgattgcggaattgtgtttcaggttacctgcctgctgcggtaggacctaaagcgcctacctgcctaccatttggcatttttttttgtatactgtacgtacattagagtaataaacaaacatgcttaacttttcagctttcgattggaacgtgcttttcgatgtaactctgtaaccagtgtaggtacgaagtcgattagccacagggtctggccatgttgacctcacgtagccctggttcattggtgtaacagtttgttggctgcggctttacattattttgtctctatggattacggctgtggattacggctgcgactatgtgtagctgaacaagctggtatatgatgagtcctggaaacgtgtgtttactgc

SEQ ID NO: 76099 - DNA, 599 bp, Zea mays
  Clone ID: MRT4577_16942C.1
taggggccttttttttttttttttttgatggatattccgcaccaaaattaaaattgggacgtcccaatgcatctcatgtgctataaaaaagcatgacatttatatacggcgataatctccgatgtattcgacattcaacacgaacgcaacatcgatctagcctggattaaaataggcttgatatacgagaaacatgaagccgcctatactagataacgaccggaagacgcaaaacacccctcatgcgttgagtgccctggaggatctcagctgctcgaatgagccgacaacatccatatgcccccctttgtcgtcccatccttgatgggcctccgtgtcgaggatccccttcctcctgacggctcacataagatggatgggcgtgatctgcttacttcgccaccaacgaagagcagctcatcgtaggggggctgaccctaaagatggcgatagggaccttctccttatggttacccttggtccacttcttcttcttctgcttcccggctccggacttggccgggttgcaccatggaggtgaggccttctccttcttccgtgccatgccggaggtggcgccctaggcgtgaggcgaacga

SEQ ID NO: 76100 - DNA, 278 bp, Zea mays
  Clone ID: MRT4577_169430C.1
gcttttcagcaaccatacatgaacagtggcttgttccaccaggcagcagcggcagttcccacctcaagtgtgaaataccctctaccgcagtacaaaagcaacattgccctggctgtggtaacccacgcgtccgcgcacatctctagggttttagcgccccatttccgcaacgccattcccgatcggatcgcccccttcccacccgccgccgaccagatcccggcgcgagtgctacccaaccctccggcgccgccacccttagtctcagagggtcggtc

SEQ ID NO: 76101 - DNA, 146 bp, Zea mays
  Clone ID: MRT4577_169431C.1
cttctcatcctcccggttctcccaactgcgtcctcactccagacacgccaccgccaccgcaggcggcgaacactgtccagacgccggccttcgtctactcgtccccaccgcagccggaagtggaatactactacccgcagccttag

SEQ ID NO: 76102 - DNA, 869 bp, Zea mays
  unsure (1)..(869): unsure at all n locations
  Clone ID: MRT4577_169432C.1
aaatcccacacctttgctttcccctttcccctctccttttcccctctcgccctcggctcccaattgtctcgccctctctcctcgcctctccttcaccacctaccagtccgtgtgcttgaccagagggagggagggagcctgaggttgtctagatccttctttctccaatccggggctgcttagctttccagctggccgccgactccaagattgcggaccggcgggcgtttcttcctttccaatactgatataggagcgggctacctgcgaggatgtgagagtttcttttcttgtttcggtggagttgttaggaatcaacagtccgagtgttgcggatgatctggaatcttgactgaggcccccgatttgggatttcctttcggccggtgctgcaatctgcattcttcaaggttgttggcggcagatgggttgcaggcactccaaagtggaggacgaggaggcggtgaggagatgcagggacaggaggaacctcatgaagcaactggtggcgccgccgtgtcgaccttgcagccgcacacattacctacctgcatgcactccgcaacacaggagccactctccggaaanttcgcccgaggtggagactgcatcgtcacaccagtcctcggnnnnggntgctcaaccanatnntnnntccccnnntnggnngnnggcggccaccaccaccaccaccaccaaccgcctccgggatactctgtgacttcttccatgccaccacactcggtcacatcctcaatgccgccatcaccattccccccaccactcataccgtntagtcccataaggataagaacgcggaagagagatggtgaactcaacgggtatgattccacggatgaagacgacga

SEQ ID NO: 76103 - DNA, 383 bp, Zea mays
  Clone ID: MRT4577_169433C.1
attgggcggcacaaaaaaaaaggggatattgagtggattaaaataaaatccgctagacaaacggggggggggggggaaagatttacatttcataccaaggggacgggggacccccaaaataaaaatgaatgaatcaatatggggggggacaaaaaaatgaaaaaaagaaagaagggtcctccaagggcgggggccaaaataaaaagggaggtaacggcgttggcattttatgagacctgcatcaggcccccggggagaacccctacggggcccattcataccatgggccgggccaaagcggaaaaaaaattgaccaataacaacacctggcacgcgggggtgcacctggaaataacgggccggggcctggagggtgacaagtt

SEQ ID NO: 76104 - DNA, 163 bp, Zea mays
  unsure (1)..(163): unsure at all n locations
  Clone ID: MRT4577_169434C.1
tccgacttcttccgcgacgcggccaggagggtgggcgactagggagagctcgtctgtgtctcacgtnaggaggcggtgcacaacatcctcttcgccatgtgcttcaactccttcggcggcatgaagatcctgttcccgtcgttcgtcaagtggctgggccgcg

SEQ ID NO: 76105 - DNA, 1635 bp, Zea mays
  Clone ID: MRT4577_169435C.1
atggccaatagactaagggcagtgtttgatgatattatctcagaggagcagagtgcgttcatccctggccggctcatcactgacaatgtagtgattgctcatgaatgttttcactatctgagaaagaagaaggggaaggctggagcctttgcagtgaagctcgatatggcaaaagcgtatgatcgtgtggagtggacatatttggagtcagtgatgagagccttgggctttgctgacaaatggcgtgatctggtgatgcggtgcgttacttctgtttctttttcagtcaaggtcaatggatgtttgtctgaggttttcaagccatctcggggcataaggcagggtgatccaatttcaccctatttgttcttgttatgtgtagaagggctgacgtgtatgttaaagaacactggaccacaatatattgcgagggggattcgtatcagtctgcggacaccttgggtatcccacttgatgtttgctgatgactgtttggtttttggccaggcaaataagaggagcgctgaccgggttgcttcgattctggacctctataacaagatctcaggtcagttggttaataagcagaaatctggtgtcttattcagtgctaattgcgaccaggaagggaagcaggaggtgctgcagtcacttgggatcagttccgaagttttgggtgaaaaatatttgggcctgccgacagctgccggaagagctacagatggtgtgataaagtcttatgctgatcgtattagaaactttgtgtatgggtggagtgaaaagaagcttagttgtgcgggcagagaggtgctcatcaaagctaatctccaggcagttcctacttatcccatgagctgttttaaattgccagcacatgtgtgtaaaaagatgcagacttatatttcaaatttttggtggggaagtgcagtagacagtcacaaaattcattggcaaagctggtccaagctgacaatgcctaaaataagtgggggcatgggctttagagacttacctctgtttaacaaggcgatgcttgcaaagcagggatggagactaatgacaaggcctaattctctttgtgcgaggatcattaaagggaaatattaccccaataatgaatttttgaaagcaaataaaaagaagcaaagttcagaaatctggaaggcggtgttgttgggacgtgaagccttatggcagggtttgattaaaagagtaggccctggatcctcaattagtatttgggaggacaactggattccaagtattaggcagttgaagcccactgtccatcttgaaggagtccaagtgcaatctgtggatgaactttttctgccaggtactagatgctggaatgttgatttggtgaggaagtctttcattgctatggatgcagaggaaattctgaagctgaggcctggcactcggatggatgctgatgtgatgggatgggcgcatgaggaaaatggtgtgttctcagttcggtcatgttatcgaatgttgaagcaatctcaaagtgtcgggaaggattatgctgtaaatgcagcaagctcatcgaatgaagaagactggtggagaaaactatggaagactggtggagaaaactatggagaaaactatggccgcgcgccggtgtga

SEQ ID NO: 76106 - DNA, 823 bp, Zea mays
  Clone ID: MRT4577_169436C.1
atcgccctggtgccgctcaccttggccatgccctctccggacagcgccaagcgtcggcctcctgctcgactcctccatctccctccctgcttctctctaccggtgttctgctggccggcgcccagcccccagctcggatccctgcctctgctcgcgtcgaccccggccgccggagccgaactgcccagttccagctctcagctacgtcgctcggtctcccagctcctcttgcctcagtcatcttcccagctgtcggctcttgcctcatctcctaccacgttggtgaagatccatttccatgcctgagctcctctccatgtctctggcaccgtccacaatcgtcgtgctgctcagccatggcaagctgttggaaagcaccgcctcctgcgctccctgctcgacgcagcatcagtcctctgccagcatgcccaactcctctgcgtttggcttcatcaaacgtgctcctttcatcatcagcgatgcgctgcccttggtgccgacccaggctactggtcacgcctcgaagctccctcccgcccgcgctatggtgtccaggccggccgctggcctccgtctccgcatgctgatgtgcccagaccctcggtctcgcccttgccgtcaaaaacgtcaccggtgtcgtcggataggtgagcaggtgggtgttcgaaatatacattgtgatcgacgctgttttagtatcgtgtggtgatttacgtcttttctgcgttcatacgtttgaatcgcaatatgcgattagcgaggaaggtttgatggtgtaggcagtgaatgttcatgcaaaaaaaaaaaaaaaaaggccccctag

SEQ ID NO: 76107 - DNA, 467 bp, Zea mays
  Clone ID: MRT4577_169437C.1
aagccttttcctcattttccggcaagggaggccacacacaaaggccggggaactggtaactagacaagagtcaaacacgatctcctcctcgtcactaacgctacagaacatgctgggccgttatttattgttttgcaccttgccccaccaccagactaaacgggaactggatcatcatcacctaggtagattggtaggtaggaaaaaaagacagaggcgacccccatctgctgcgtttcgaccggcctccggagctagccccggctaagtgcagcaacagcaaaagcagtcgagggagccctcgcagggctcgtatcatccaaagcaacacaccgcatagaaaatgccggcgtttaggcaaaccctctcctcggggggcctctgcaagtgctccagataagaatattctgggccgaacgggcggtagacaacttgcctgccttgcggaatccatccgagctgtggtg

SEQ ID NO: 76108 - DNA, 598 bp, Zea mays
  Clone ID: MRT4577_169438C.1
acccgaaaacccccgtttttaaaaacaaaggaataaaaaagggtccccttttggaccttggggccccccaaaaaccattttaaaagggggccggggcagggccaaaaaaggaaacctggtaaaaaaaccaaattaaagttccccaggccccgaaaaaattggaaataaaaaaacatttttcaaaagcaaagttttttttttcagccaaaaaaagccaaaaggttgggtttggaacttttaagtggggaaagaacccaacccccttttttgacaaaaaccggccggggaaaaaacggttttttttaacccaagggttttaaaaaaagcttcaacaaaaaatttttttttaaggcataaaacccgaaaaatttcgttaaaaagccctttaaaagggttcgggccctgattatggaaaaatttggaagttttttggccaaaaaactccgaaaaaaaaggcccacaaccggggctggcttaaacctttgggaaaagggcccaaaaaaaaggaaaaccatttttctaaagcgtgggaaaaaaacctggagaaccggaatcaattctgttttcgaaaaacccgagtaaaaaaatttaagggggc

SEQ ID NO: 76109 - DNA, 227 bp, Zea mays
  Clone ID: MRT4577_169439C.1
gctagatacactccactgtgcagttcggttcattcagcaggaggaagctgtttcctgcgttgctaattgctatgatgatgctgaacgtgaatagacttgctggacatcacaacgaggaagaggatcagaaggaggatgtggggactactactgctgaggcgactttgctacacaatgattaggcaataccacagcccaaatatgatagctggagcagtattagtaat

SEQ ID NO: 76110 - DNA, 230 bp, Zea mays
  Clone ID: MRT4577_16943C.1
ggaacaacaaaggaatcctgctactttgcagtcgttgattgaaaaaaacggcgtttaattctggacccagaccaactttacagaggaccaaaatgggactatagtggaaagtgggaggtttatattgtcaccaattatggactatcagatgaaggggaaaactatgtcaggggagcatgcttgtttactggatatttatctgatcccatgacaaggaactgtcctatagg

SEQ ID NO: 76111 - DNA, 219 bp, Zea mays
  Clone ID: MRT4577_169440C.1
aaagagaaacagttttccatcggggtacaaagatgcctttgaagcacagaagaagaaaaaaaaagcatcaacggatctagatgcttaccagttcaaacctttgaaacacttgggagtggggggctggctccaggaccaaacgatggccaaaagagaggaacaaactgacctcaaaaaaaaaaacccgggacggacagaaactttagaaaaattcacaag

SEQ ID NO: 76112 - DNA, 1445 bp, Zea mays
  Clone ID: MRT4577_169441C.1
ctagttctagatcgcgagcggccgcccgcaagcatctggtctcgtctctctccgatccctctcctctccctccccctagccactacccacttgagcgagccctaggccctagcaggcgaaagccatggcgtccttgggtgttcgtgccgccgccgccgctcgtcttccctccctccgtcctcgccgcgacggcagcagggtgctcaccggcttgagggtcgggacagggcactacggcgtgcggctcgcgctttcttcgtccacatcagcttctcccagagagttcaaggtcgctggccttcctgtcgatgacagcagtttgggcccgggggatgaatatgagtttggactctatactcctaagctgcttgcagttactggagatgattatgtgtctaacccccgcatgccagacgaggatgagttcgaccatttctaccgtgttgtcgccaagaagactgacatgctgctcagctgccaccttccaaagccgcttgcagtttctgaagaggagaaggccgtgcaggagaagttcaaggagatggcgaacgaatgcatcgacctcctggttgatgcgatgcgccgcatcccagcggagaaaaggcgcccactgttctcggtgtttggtgagctgtacccggtatttgagtcagtgaggtggactgccgagggggggtgtgccaagtggtggatggcgctgcagatcatggagaagctggagatcgtgcgcaagatggtgtcgagcgcttgcggcggcacccctcttgacagaggcacggtgttcgccaggaaggtggacctcaccggtgtcgacggtcaggcgctcgccggccacggcctcgggagcaacttatcagtggtgatcttcgtgctgctccacaacgtcttcagcaacgtcaagtcggacatcgatggcatggtctctgcttccactccttattagccatcgtcacctagctacctacgtgtctacagatttgcagtcactagcctcaagtctccaagtgattggatctctgctacagtgctcttactactgccctagcgcaaatcttgatgtgtccgttctagctactactagtatctaccttggttatgttggatcatgcatgtgattgggttctgctagtactatggtttctgttctacccagtagatggctacttcactgtgttggatcagtcacattacatgatttctgataataatgatgcccttcaatccttctgtttttcgctgatgtttctccaatggtctacagaatctcccctaactcaagttttgatgtgatcggccgcccccaaaatcgagctttgagtccctttccctctgttgttcgccccccccaaacttttgataaggcatgtgaaaattgggtcgctgcttttagaactaaaaatgtactcaggatctccctaatccctcataaagccaatttttttttt

SEQ ID NO: 76113 - DNA, 351 bp, Zea mays
  Clone ID: MRT4577_169442C.1
catataggaaaaatggtttattataaaagaactgtacataaaatttagacaacaggttatatacaaaattaagagaacattccactgtgaaaaaatgaaaaaggtagctagctgatcactagtgatactgaaatcatgtttaaaattaacaaaggcaaaatgcatatacaacagtcacattgatttggtagtaataatggcctttaattttcagaaataaatgttttgcactagttttaaccatttactatgctgttataagtctgtaacacccagtacataataattgtaatttaaaatccaaacagatcctcaatacacagaaaacccacacttgagtgcctctacttt

SEQ ID NO: 76114 - DNA, 251 bp, Zea mays
  Clone ID: MRT4577_169443C.1
cttttactccttttctgtttaatatatgggtatccacttcgcagttgatgctacaatgtagaactgcactttctggttatctggacttgacaacagtgagttgcccaagagatttgtgtttctttctggcagtttatgtaccttctgttacggttacatgacctttgggtgtgagcctgtgaggctgccatcgagccctggttcttcagaaagagagaaagaaaagacttgctgcatgttccgctggtcgt

SEQ ID NO: 76115 - DNA, 512 bp, Zea mays
  Clone ID: MRT4577_169444C.1
aagaaccatattgactcctcgccgcctctctcattccgacactcttcatgcgctgccttccgccgagccacacgcgactaactcatgggtctacgcggagcttgcctcgcacctacggcgctctcttccccaccgacaatggcatcgctcatcaccgacgacaagatccgacccgatcggtgaagagcccaacatgcaaagtctagtgctcacttaccgcaactctacgccgagctcctgcagaagcgccgcgcccaggacacacatcctctccgatgcatctgttgacacctgtgctccagatgctgctggcgcagctgatgaacgacgctgctgctgctggtgctcatggtggcgagctcactagagagatgatgctaggaggagactgatcgacgacttgcttgtctgactgctcactgtgacaccccctcccgagactatctaaaaacttagttggctgctgcaactatatgcatatgtgatagacctaacctgtgatacaactaccc

SEQ ID NO: 76116 - DNA, 684 bp, Zea mays
  unsure (1)..(684): unsure at all n locations
  Clone ID: MRT4577_169445C.1
aattcggcacgatgggtaaaacgctccagtgggccccctttggtttcctcaaccccttttgcaagtacccttttgcagttctttcagtggccgtggaagtcactagcaaccaattgggccttgtttttttttggcgaaaatgactaattcaaattcacatggtcctaggagtaacataaaggacacttcatcactgcatacctattgtgttttagcagcttacaagagctaagtagaattcaattggtgatacttagggcatgtacaatgcaaggtacttaagcatgagtgcttaaatgagaatggttcttaataagcacttgcatagaatttaattcctctaatgcaaatgggatcttaataagctttaactaccttggtaagccccaggagcaaacttaagaatcttattctctatataagcatctggggcaaattacattatgtaaaaacagattttttagctgtgcacacccccattgtacaagatcttaatgcttcgtttaccacaagtggctgtgattccattttcaaaattcccantcatgtgcttctgatgacctgtgctaaagctttcctacttggtcgaatgttgaagtaggatattagtaaatagtatttggttattttctgcgagcagcgaacanttacaatttgttgcatttgatantgcaccatttcaat

SEQ ID NO: 76117 - DNA, 1290 bp, Zea mays
  Clone ID: MRT4577_169446C.1
ccaaatagtttgtgttttgcaccatactagttgtaacataaaatggggaacttctcagatatatgtagcagctgcttaatgttcctttctcatgtacaggacaagctataccacatactgtatgctaaaagaactatgatgaccgaagcagttcagaaaatctctcgaccagaggtagacaagtagccgcaggaaggattacattcccaatctagtatgcttctggaagcaattacatgtagcatttccctgggccagatggccaataatatctccagtcattcttgaattgaattagcccaaataatatctggtgtcaatcaataacaagactggggaaaagctccaagcaagcaagctgcgggcactatgggtaagcaacatgaatcaggtaaagaacaacaagctacatgttctcaaagatactgacgacctctcgagtgtctacaccacatgcagtaaaacccttatccagtgtttgtcgcttgttgcctctcacactgctcgtgttccaaacctgttgatcttaccaaacacctgatctcagtccttttcttgttcatatctattattttctgccgccatgccggtattgccttcacaaggtcttcaaatccctgcattaacttgtcttcaaacaacttttgtatctcagagattgaagaatcaagttttcttttgtgcatactttgcctttccaatgacgacatctctctttcaagattttcagactccttgttagcactttcgagctttctccttaaggagtcaagttccaaatccaaatctgaatctgaagtcccatttttgtgtgattcttttgcacaagaactatcattttcatcggccacaaaaccttcaggtacatcgaagcaatgtcgaaggcagaatttctcccagttggccattctcttgtccagtcgatcctttacgacatggtgaacagcatttaatccccgctggagatccatggccttctctgcagccttggcggcgccgacgacccctggtgcggccgctgcctggagacagtactcgaaggcctcggcgctgatgtcggcgatgatgccgtggacctcgttgacgaaaagctgcgggctcagccccagcgccgccgccgcgctctcgtcgccgtcttccatcaccccgcttcttcttccgagtcttgtgcggttggattgtggatttgtgggggggcctggcaggcagatctgagtgcggagtgccgggttgagggttctcaaaattagcgctcgggagaaactagctctgttccgagacccggccggc

SEQ ID NO: 76118 - DNA, 2998 bp, Zea mays
  Clone ID: MRT4577_169447C.1
tcggccgggagtcccattccacaccgttggtggctcggaaccgccactgaccacttccctgaccccgcgctctctccctctactacagtcggagggcggcggcggtggcgaaccgacggcgtatgtaaggaatccaactgaacatttgacttgcttgttccgggagatctcttgcctaggtgtgaggaattgagttgtcacagaacagttggctgctcacaatggggacactttcaatgtccgacgccagccctatccctgccaagaactgggatgcttcccctgtcaagctcgaggctcaaggtggtgacaccatcctcggcatgaaggaggaagagcgactactggagctcgtgaaggatgagcaggctgatggaatcttggattcattaccaattgacctggaggccaagaatggcgatgcatcactcattactgaagcgatgaaaaaggaggaggagcagcttgaagacacccggatcaaggtgcaggaagaagaggaagccaggaagagggaagaggctgctagacttgcttttgatcctgagacacagtataacaagttagatgagctgctgacaaagacacaactcttttcggagtttctacttgagaacatggatcggattgccgatgaaagtgttgaaactcaagctgaacagccacaggtagaagagaagaagaaagggcgcggccggaagaggaaagcaaagccacagtacaatgataagaaggctaagacggcagtggctgccatgctcacaagatctcgcgaagaacgtcttgcggaagattctactctctcagaagaagaaaggtgggaaaaggagcaggctaatcttgtgccgttattgactggtggaaagttgaagtcatatcagataaagggtgtcaagtggcttatatcattgtggcagaatgggctgaatggaatactggctgatcaaatgggccttgggaaaaccatccagacaattggatttcttgctcatctgaaagggaaaggcatgcatggtccatacttaataatcgctcctctgtccactctctcaaactgggtgaatgaaatctcaaggtttactccatctctggttagtatcatataccatggaggtaaggctgcccgggcagagatccgaaggaaatttatgcccacaaatgttggccctgattttccgatagtagtgacttcatatgagatggccatgtttgatgctaaatttcttgctgcctataagtggaagtatgttgttgtggatgaggggcatcgtctgaaaaatgctaagtgtctattattgaagcagctgaagcgcataccaatggataataagctccttttgactggaacacccttgcagaataatcttgcagagctctggtcactattgaacttcattttgcctgatatattctcgtcacatcaagagtttgagtcatggtttgatttttctggtggaaatgaagaaactgatgagaagaaaaggctgcatgttgtttcaaagcttcacgctatcttgcgtccattccttctaaggcgtatgaaggaggatgtggaacagatgcttccacgaaagaaagagataatcatatatgccaacatgactgagcaacagaagcaaatccagcatcacctgatcgaaaaaacatttgacaactacttgcacgaggaatcagatattatattgaaaagacctggcattagggcaaggttgcataatctaatgattcagctgaggaagaattgcaaccatcctgatcttttggaatctccagttgattcaactggtttatatccacctgttgagaagctcctggaacagtgtggtaaattccaactttttgacaggttgctaaatttcctgatggcgcaaaagcacaaggttcttgtattctcgcagtggacaaaagtgctggacattattgaatactaccttgattcaaaaggccatgctgtttgccgaatcgatggtaatgtgaaactggaagaaaggaggaggcagatagcagaattcaatgacgtgaatagcagcatgcgtatcttcctcctgagcacaagggctggtgggcttggcatcaaccttactgctgctgacacctgtatcctctacgacagcgactggaaccctcagatggatttgcaggccatggaccgatgccaccggatcggccaaacacgcccagtgcatgtgtataggctggctacgtcacactccgttgaggggcggatgatcaagagagcctttgggaagctgaagctggagcacgtggtgatcggcaagggacagttcgagcaagacagagctaagccgagcgccttagatgaaggtgagctgctggcgcttctcaaggacgagcagaccgaggaggacaggatcgtccagaccgacatcagcgacgaggacctccagaggctgatggaccggagcgacctgatgggcccgccgcctggcgacgcgcaaacgcgcgtcgcctcttgtaccgctgaaaggtccgggctgggaggtggtggtgccggccaagagtggcggcggcatgctgtcgtcgctcaccagctgagccgtcgtggctgcggggatctgttgtgcttttggttggtcgcacgcactcagttttggtttggccccccactggtgctggtggttttggtggcagctgttgcgctgctcaggcgatggctgttgaactggggcgttgcccctgcagaagtagctttttagtttaggatcagcaacaaaacaagcaggaggactctaggccatgtgtggtcgagtctccgtacggtggtcgttgcgttagattacgtgggtgggtgatgggacggttggttgaaccagacccgacggcagcatggacacacgccggttgctttgtaaagttagtatcgcgtcgtccgtgatacaatgcggtcctccgtctacatgggtgctgacgctctcttgttcggctgtcttgtgatgttgcaaacgcccgtgccgtgacaaaagccggttccttcccg

SEQ ID NO: 76119 - DNA, 462 bp, Zea mays
  Clone ID: MRT4577_169448C.1
acattgctggaaaccctcagatgggctgttatatgctaattttgaaatataaaacccctaaaccgtaccctaaatgtgcacgaactactcagatcttagagagtatatatacatgaggcacatttacctatagctgtcatctgacacatgaaattgcaaaggataccccacgctttcattcatgaacacacagagcaatgggacgtaatttaattatacccctaacacgcagatgttgacacggttaaaatatggacaccagctactgatgaattgagatatgtatgggctcggggggcggcctgacaagatgggcctgctctggaaggcgccggtgtttaaggggagaaactaggcaccgcatggttaggtgcagtgctagcagaaggtatgccaggccgcctacggggtacccgaggcctaggaagccaatgctaacttgcagaacacggggagcggaca

SEQ ID NO: 76120 - DNA, 505 bp, Zea mays
  Clone ID: MRT4577_169449C.1
ctctggacctctctgcggcgactggtagacagactgtgactcattacgactggagccctacactatctgtcggagacacagcacctgtcagctgcagggggctggaaatggacgtcgttggtgctcaagcacccccaggagagacaaatatctgcagatgcaaatctattccaagcataagaaagcaagagcgctgctgaagcaagctatgaggctgctgtttttaactcaaagacaaataccaatggcaatgacctggctcctccaacggatgtgatagatgaatggcccgaacctaacaaaatcatccctcctactaaattaatgtccactcatttgaagatactaaactgagggcaaaagatcagcaagctcccaaaaaatttcacaagaagattcaagctcgatctaaacttattgaggcattttgagccaacaaggcaggacgctccaccattattgccgtaactacaaccatcttatcgctgataacaaccaatataat

SEQ ID NO: 76121 - DNA, 357 bp, Zea mays
  Clone ID: MRT4577_16944C.1
gatttggttttcaattgcaaaaaacttttttttttcttttggccgccagggactcttacttgggaatggctgcccatagtaagctttcgggttgaaggttctccttttttgtgaaatcatgccttgttccaaatggaaaccgggtttgtggcttaagtccttgaccaaactccgttttgtaaccggcagttcctattgccaaagggccaacaacttgtttgtttcattacgctaacaagcaaatgggggaatgggtggggtgtttcttttggtgaaaattttttttgccatgttcaatcgagcagtttattatgttgatcagaattgggcggctggtttattgaatccaattttcct

SEQ ID NO: 76122 - DNA, 243 bp, Zea mays
  Clone ID: MRT4577_169450C.1
gaggcggcaagcaagggggaggaatcgattacacagacacacagatgtagggacatatagagagcgcagcagcaggtggctagccgtcttgttcaactaccacaacccaacccaaccctgtatcggtcgcacattatgtaatcgatatcttgccggttcattacacaggccaatacagctggcccgtgggtgccaaggcgcccgtacttcgccaaggacccggctacttccattcccatgcca

SEQ ID NO: 76123 - DNA, 260 bp, Zea mays
  Clone ID: MRT4577_169451C.1
ttcttaatatctaaatttggcttgccaatctcgacaaacatttttgccaactttttgcttgccaaatctttgccaaggcaaaatttggtaacaaaccaagcaggcccttaatctaaatagttattattgtattgatggatggaacttagatttttgacgaactcatatcctgaattacttaactgcaattggatgagtattatctcactcttaactcaacatttaccaatttcctttttttgtcagcattgtatacaagg

SEQ ID NO: 76124 - DNA, 393 bp, Zea mays
  Clone ID: MRT4577_169452C.1
ggctctggacctttgggctgatttatgtgcttggtccggcctacccgtctacggacctatgcatcttggttacttagccgttcgcgtcgcggttaccgaagtctcgaaatcccactgtgaaagggatacctttggttacgctaagtaaactgttttaaagccttaggatgggaccagggtgtcggtagatagcttgaccacaggggagacatgcggtccggggacgaccacgggcattgaacctataaataataagctattgatcgactcgccttttgttgaacggggggccggcgttactcctggtgaagagcgttaaaagtgtggtacgtcggcgaaggctgtcggtgatgttactacgacgctggtgatgtcgactacgatgtttggtga

SEQ ID NO: 76125 - DNA, 971 bp, Zea mays
  Clone ID: MRT4577_169453C.1
gccggccgggttgggacagtttgcacgagacgtgcagtttgcacctgatctgcagctgcaggcctgcagcccccgagtccgaaatcgttggacggggaaaggaaagcgaaacaagccacgctaagcaagatgcaccgaaaccctcgcgccgtcatccgcgccgccgtctccctcacccgccggccccccgccgttcctgccgcggaggctctccaaaccctgcctaaagcgacgccctcgccctcgccctcgcccgcgcttggggcgtggcggccagaccaggcggtggggcctttgggtagcgtcagccgccgccgcgccttctcctcctccgcggcagagtatggcaaggatgtggacgaggtgaaccgcaagttcgcggaggcgcgggaggagatcgaggcggccatggagagcaaggagacggtctacttcaacgaggaggcctccatcgcgcgtgacgccgccaacgaggcgctcgctgctttcgacgcgcttttagcgcgcctcccgcccaccgacgccgacgcgctccgccgctccatggggctaaagatggaacaactgaaggccgagctcaagcagctcgaggactagccgactaggctgcggaaaggtttgagttttgcgagaaaatttgggcggaatgtttggttatacacctgttcttttgagatagagattcctaggtgttccgcttggtgaataaattttagcacaacaatctgttgcattgcctgtttctgttggttcttggtgagaggagatccgaagctaatttgtaatgtgcctagtttaccaccttcccatgattggccactgttgaggccttaaattgatttgatagaagttagaccgatgcgttcctgtgttgttcggattaagctttatttgcaatttttcttgcttgattaatgtttaggtgcaacatggatacttcattgttcagtatctgttgccatgacattgcc

SEQ ID NO: 76126 - DNA, 463 bp, Zea mays
  Clone ID: MRT4577_169454C.1
attaagaagatctcttaataaaaaaatagatatatagatgacataggagatggccacggcagggcgggtatctcggagaaacagtagtgggggaagcacgggtgtggagggccaggggatgaggagggcggctggaggtgcagtaggggaaggaggagctggatgcgcgaggtgcgtgggaaaggcgggagggtgcaggacggggaaggtgaaagggtcagttgcagggtcatcatggtagtggatacacacaactctagggctagatgatagttccaaacttacagcggagcacagttatgacgacgactaaagcactactggataaaaacgtgcgatgcttctatgcaattattttctaaggtgaccgatatctcacaaggacctagggttttgcacgtagcatgccaccataaggcgggaccggcatggaagggtggggtccaggtgggaggcaggaagc

SEQ ID NO: 76127 - DNA, 224 bp, Zea mays
  Clone ID: MRT4577_169455C.1
aaaaaaaaaaaaaaaaaaaaaaagggggagagggagaggagaaaaaaaaaaaaaaaggggggggcgatataaaagatccaaaatttacataaggagtgcgtgacgaattaatagatattattttggggggcccttaaattgaattcaatggttcttttttttttaaatgagaagaactggagaaaattttgggggggagcgaaattaaaattattggggaaaat

SEQ ID NO: 76128 - DNA, 1249 bp, Zea mays
  Clone ID: MRT4577_169456C.1
cctcgaggccggccgggattcagttattcactcatcactcactgactcaatagttgcagcagcagtcacaggcctacagcctacagctagctagcacacacaaggccaccatcttccctcagctcattcccctttcctttttttcccctcccatcatcacgtgcaggtactccaaccagcaatttcatcaattcctcctactcttgttcctcatctccatctctgctggtgtggagtttctacgtacctctccattccattgcattgcattgcattccattgttattcttgagtagctgagtcactcgatccagctagtgactgaggccaccgagcgtgagagggcagggatgaggaagcgctagctctcagtccttgagtctcttctctcttctctctatataaatctaggcagcaggcagccactgcacattccctcaccaactcaggcaggcagaggcagaggcagagagagtttgccgccgacacagccatacatagatacaccagccggccggcatccggatggattcgtcctcgtcagccggggccggggacgacaggtggaggctgtccaagaaggggcggagcagatccggcaggccgcacgccatggacgccgccgcggggagcgtgctcagccggagctactcggccagcgtgagcagcagcaggagtactgcagcaggcaccagtactgcagcagccacaggcagctctgccgccgccccgtcttctcagcagcagcagcaacaacaacaagcaggcgccgccgcctgcccagcggagtcgtcgtcgtcgtcgtcgtcgtcgtcgtcgcggctgtccaagaagtgcgtggaggcggtgaaggagcaccgcgcgcgcttctacatcgtccggcgctgcgtctccatgctcgtctgctggcgcgactactagctagctaagctaagcaaccccgccctgctctgccgagctagcgttcctcggactcggacctatatatccacctagctccatgcgtccatccatggccttctcttctttctgtagccccacccactgcactcttccttgaatccgtgtagctgattttgttccccatttattttgctgcgtgttgcttgctgtcaatagtttctgtatgtacataagtaagttagcaagaggtgaacgaaaaggggcatggtgaattggtgatggatgagcagatgactccttccttctcttgccactgctaaagtaaagatctaattttttttgtttt

SEQ ID NO: 76129 - DNA, 719 bp, Zea mays
  Clone ID: MRT4577_169457C.1
actccatagggcgattgggttcctcgaggccggccggggaccatccgccaattcgattgcctggtgagcgccaacatcatcagaaaccgcaatcatgggtatttcgcgtgactctcgacacaagcgctccgcctccggtgccaagcgtgcctactacaggaagaagcgcgctttcgaggctggtcgccagggtgccaacacccgtattggccccaagcgcgtccacaccgtccgaacccgaggtggtaaccacaagtaccgtgccctccgtctcgactccggtaacttcgcctggggttccgagggcctgacccgcaagacccgtgtcattgccgtcgcctaccacccttttacaacgagttggtccgaaccaacaccctcaccaagagcgccgtcgtccaggttgatgccgctcccttccgacagtggtacgaggcccactacggccaggccattggccgaagacgccagaaggcccaggctgccaaggagggcaagaccgaggaggaggtcaagaagtccaacgccgtcgagaagaagcaggctgctcgcatgtctgccggcggcaaggtcgagagcgccatcgagaagcagttcgaggccggtcgattgtacgccgttgtttccagccgacccggtcagtccggccgtgtcgatggttacatcctggagggcgaggagctcgcttttttaccaacgcaagctccccaagtaagctt

SEQ ID NO: 76130 - DNA, 718 bp, Zea mays
  unsure (1)..(718): unsure at all n locations
  Clone ID: MRT4577_169458C.1
ctacgccaggtgcccaggttctcgtccggctcttcgccggcgatgagcacccaccaggccaatacgctgcggttgtacctcacctgcatccggaacactctggaggcggcgatgtgcctccagaatttcccttgccaagaagtcgagaggcacaacaaaccggaggtggagctcaagtaagtcatgctgcaagcaggcaacaatggttgttcagtgctcttcttccttggcacatgtgcttaaccttcataattcatatcccattccatgttgactcctataaataataacacaattcttgtttgcttgtgaatttcctaaaggctcatgtggatatatcgttttgcccttactaatccatcttcatttttaatcttattcacaggacaagccctgaacttctgctgaatccggtgagggagacttctttgacagtatcttaaattcattttacaaccctttattattgacctttattttctttttggagacagtgtgagtgtgttctaatatgtatgaggtaactaaacccaacatggcgaaaaatggactactaatgattgcagtgctgtcgtttttagttggaacaagtgcactattatgataccatgctaagaatcacggacagctctgtttcatcgttaacattcctaagtaaatntaagcttgattactcaaggctggatcttcttttgacctgcgatggaattttcagtga

SEQ ID NO: 76131 - DNA, 244 bp, Zea mays
  Clone ID: MRT4577_169459C.1
gtaggacacagcacaacacacctggaatgaacaagcagccaacaccggagctgacaatcacgctcatgggaaagctctcacccgttaaccttgctacacttgcgcacacacacattgggtatatgcaaacgtaacattacacaggagcagccgcggctgcgtcctgcagcgtgtgcttcaaggactacctcccggtgataagggagccgatagataatgactggctgatgcggaacatgacaag

SEQ ID NO: 76132 - DNA, 261 bp, Zea mays
  Clone ID: MRT4577_16945C.1
ctagggagggatggggtttatatttttgggctttcaaaacaatgaaacgaagaagtctcactgtttattgttccatgacgaaggccgaccatccacgggggctagagtttagacccacaccctgttttcacaagacgaatcgcctgaaccccacgcattggatatccttaccccgatagggcgctaatgttgaatacaaggaggccccccccgtcgaggaacccaccgggggtgactgccaaaataagaagcccaaaggtt

SEQ ID NO: 76133 - DNA, 318 bp, Zea mays
  Clone ID: MRT4577_169460C.1
gacatagtacggatcacaatacatttgagaaaccaattggaagaaagatacagagaccatatcattgaagtaatccatcccaacctcttctaacgttctcctactcaaattgcatgaaccaacaaatccttctgccacccaaagatgaaccaactcttcaggtctatatccgtgaccttttggaaacaagctgcaatacaagaagcacctctgcagacgtggatctaacttctcgtaactccaacaacagagatgtgaagggatcacttaaatctccaatctttagagcagctttccattcagcaatattcttttttc

SEQ ID NO: 76134 - DNA, 779 bp, Zea mays
  Clone ID: MRT4577_169461C.1
cattgggtacctcgaggccggccggggcacctcgccctctcccttgccctgccccagatctcggccttcagtcctcgctgccgccgcgacttgctcgccccgtctccctccggccccgcctcatcgcggccgtggtggccaaggaacacgagctcattggaaaacactcttaaataaagcttccaatgaacaagacaggagctcgacttcgcctagctccgaacaagcggtcgacgaggcggaggtctcgcgtcctgcgtgcgtcgcgccgttgcctggctccgtcctcgccgttcctctgtagaagctggccgctgacccccgcccgcctccgcttggccgtctggccgccccccgcgtggtcacctagatggctggccgtgcccctagatttgggttcctatcttgttaggacttccatcttcgttcattttgctgtgtgtccgtcagatagatgactaatgcatcctcaaagttctccaaggcggagccttgcatctttgtgtgtttgatttggttgagctgcaacccgtgctgctgtccttttcagtataaaaaaaaagatttagatgtaggttggcattcggatgaaaaatggaccgtgaaaaaaaggaggtccattcacctcgtgttctgtcatttgagcacggatcctttagtgtatcggaaagcgtgatatttctgataatcttctgcttttcagagaaaagctttgagtaaattgagatgtatattcctctattgaaaggaaaaagaggggttttcaagcaatatgaaag

SEQ ID NO: 76135 - DNA, 393 bp, Zea mays
  Clone ID: MRT4577_169462C.1
cgcgcgactagcagcttcagcaaacattcacaatcttctagctgcgtgctaccccataacgggcaggggtaaacaggcgtagagcagctgcccaactgcaacgatcccacatggaaaccagcgaagctgtctgctctttgcccagctctacgctgatagctacgcatcttttcataaattggggaatcaacctccgaactgtccccatgaaaagccctggatcacccagtacttcaaagatctgacgacaggagatgcacactgactgaagcgatccaccaatggcccgacctcacaagtcgacatatatatacgtacgcgtcatcgtgtccatcacgattgccctgatacaattcttttgctaccaatgcacactctactttctcgtctcta

SEQ ID NO: 76136 - DNA, 209 bp, Zea mays
  Clone ID: MRT4577_169463C.1
ctcagcgagtgcattgactatagccgtgtccgtgattcggctcctgcgtaggatgagatgagcctgcttacgtgcatgcagcactagtaatttttcagctcccgcttgcatgcgtggggatattggtaggaggctgctctgctgatccaggccggcgcgagcctagcactcacggtcacagtgaaccaatcacgcggagtctgaattgc

SEQ ID NO: 76137 - DNA, 565 bp, Zea mays
  unsure (1)..(565): unsure at all n locations
  Clone ID: MRT4577_169464C.1
gntttcttccggatgctttcatgctattttacaactgttggcttttatattagttcaatgatggttgtgataatagtttatgttttcttgtatgggagactgtacttagcattaagtggactggagtttgcaattatgaaacaagcacggatgagagggaaccgtgcacttcaagcagctatgggatctcagtctattgtgcagctaggtcttttgatggcattgccaatgtttatggagattgggctagaaagaggtttcagaagtgccctgggggatttcataatcatgcaacttcagctttgttcagtgttcttcactttctcccttgggaccaaatcacattattttggccgcacaattctccacggcggtgcaaaatatagggcaactggcagaggttttgttgttcgccatgtaaggtttgctgagaattacagaatgtactccagaagccattttgtgaaaggacttgagctgatgctactgctagtagtctatcagttatatggcgatgttgctacagattcgactgcatatatacttctgacatcatcaatgtggt

SEQ ID NO: 76138 - DNA, 419 bp, Zea mays
  Clone ID: MRT4577_169465C.1
gggaaaaaaaattttttttttttattaaaaaagtttatttagggtattggtgaaaatggcgctgccccccccgggggggggggaaacaatattactaaaggatgggcggaaaaagaataaactaactgggaagcgcggggtgttactacagaaaaaatgtttttaagggggggacacccccggccccactgaaggggctatgagctggttgttagacgccgcatatctacctaagtgggtgggttatttgggccgacaaaaaacccccgaattgggccttttatgggtggtgctggaagaaggactgggggaccaacccgaaaattggctgggaccgaggctgggggtccccccgcctgaagtggggggaaaaattctgccccaaaaaatgggactgaggggaggaatagggggtcccc

SEQ ID NO: 76139 - DNA, 612 bp, Zea mays
  Clone ID: MRT4577_169466C.1
ataccaacagtacatatagcataccatatatcatggctggagacacagtatctggcgcttgctcccgcggggtcatacctcgcgtgcttgatgcagaatcatgcgtacactccaccccagcctccatggacgccccctcgccgcgcgtagccgctgcccaaatgctccctctgcaccacgaacaacttgaagaggctgtcggcattcatgggccactgaggtggagatctggtgctacaacacctgattcgatcatgatagctccggcatgtttaaggttgatgtctgctacgccttattcatccctgttacttcggacctccaccattcctgaatgccttgaatcgttcctgcatgctgcggggaaccacaaccccgctccctaccttcaacaattgttccagagacgtctgatggcaagttcctatggatgcctgaaaatacgactatccattaaacgaatgtgcgaacccaacccagagtggtgctatctaaattcccctactagaccgtctcctcaagaagacttatacgccggatgcgtgccatgaacctaagccagagccgaaggcccctacggaacctaagccccagcctgtgaaccccccaccg

SEQ ID NO: 76140 - DNA, 118 bp, Zea mays
  Clone ID: MRT4577_169467C.1
atcccacgtctccagtccgacactccgactcagtgcccctaccccgctccaacccgtcgcaatggccgcagtctccgcagcaccgaggccctcgatgcctccctgactcgccctccgt

SEQ ID NO: 76141 - DNA, 1260 bp, Zea mays
  Clone ID: MRT4577_169468C.1
gtaccccctcggacggccgggagagtgtctagctgagaacatggtgacctcaagcaagggcaaggtatgcgtaaccggggcctcaggctttgttgcctcttggcttatcaaacggctcctcgagtctggatatcatgtggtagggactgtcagggacccaggaaatcaccaaaagacagcccacctttggaaattacctggcgctaaagagaggctgcaaatcgtgcgagctgatctgttggaagaagggagcttcgacagcgccgtgatggcctgtgagggtgtattccacactgcatcccccgtcctcgctaaacccgactctactagcaaggaggacacgctcgtccctgcggtgaacggtactctgaacgtgctgagatcgtgcaagaagaacccgttcctgaaaagggtcgtccttacgtcttcgtcgtctgcggtgaggatcagggacgacggtggccagtccagtaacatctcgctggacgaaacgacatggagctccgtgccactctgcgagaagatgcatctatggtatgccctagccaaggtatttgcagagaaagcggcgtgggagttcgccaaggagaacggcatcgaccttgtgactgtcctcccgtcgttcgtgatcgggcccagtttgtcccacgaactatgcgttaccgcttcagacgtcctaggcctattccaaggcgacacggcaaggttcagctcgtacggaagaatggggtacgtccacatcgacgacgttgcgagcagccacatcctggtgtacgaggccccccaggccgccgggaggtacctgtgcagctcagtggtgctggacaacgacgagctggtctcctcgctcgcgaaacgctacccgatattccccataccccggaggctgaacagcccctacggcaagcagtcgtaccagctgaacacgtcgaagctgcaggggctgggcttcaagttcagaggggtgcaggagatgttcgacgactgcgtacagtcgctcaaagaccagggacacctgctggagtgccccctgtgaactgcgatggggtgcctccgcctgtgaacgcgccggttgggttgcgtcccgaacccgctgttaattcgtttttttttcttcaataattccacgtcatgtcacggtgtcctcgcgcagactgctactgtcagggcgtcatagctcacgggctctccggctacatgaataaaatgtcacgctagctcgtcatttgctttgccatttaaaaaaaaaaaaaaaaaaaa

SEQ ID NO: 76142 - DNA, 213 bp, Zea mays
  Clone ID: MRT4577_169469C.1
ctaacacatcgcgaatccttgcacaggatggtcatagtcttagactgcaactcacagctgcagttactatgtcttcagatacgaccatcagtagtccagctgatgatcctgcatctaatcatgattacatgactgatatgtcagtataagcggctagcattgcatctcaatggatggaattactgcatcatgacataacgggacgtcatgctg

SEQ ID NO: 76143 - DNA, 798 bp, Zea mays
  unsure (1)..(798): unsure at all n locations
  Clone ID: MRT4577_16946C.1
tgggtacctcgaggccggccgggatatactgcagctcgaaaaactctatagagttacaactctggagttagggtgtttgacatgctctgaccagctcctccttagagttttgctctggagccatgccaaacaggcccttaatctaccagtaacagatcatgctatattgtacctggtgtaaaaaaatgtcagtagtaaaagttatagtgagaacacgcatgtgaaactcatgatagtgaaacttggaactaagtaaaacatcagcgctcttaggatttgagttgattgtttttttttgcttgaaaccaaaagtttagattgtaaacttgactcacactacatgcccaaaacttatttgtatagtacagatcatttttttaacagcacaccagatgctttctgcttaaggcattctaggatagcttctgcatctatccaatttaagagcactgctgggtgaacatgaactgaccaagcatgctctacattttttaggcacctactgatttccatttttattttctttccaggacttgacaacttttgtatgtgtttgtatcccggaatttctttcattgtatgaaacagaaagattggtgcaagagttagcgaagtttgagattgattcacacaatattattattaatcaagttatatttgatgaggaaggtgcgtacaanaatgagcttcgtcactttcactgacctctagctttcttgnaaaattaaattcaccacattcagttaanatttcattaggacctattcttcagcaaaagaaatttgtctcatgagctct

SEQ ID NO: 76144 - DNA, 710 bp, Zea mays
  Clone ID: MRT4577_169470C.1
tacaacgcgcagcactcaaattcttaagatactttatcttagtgtacttcttcttcatatcttcaagtgattagcaacttaatcacctgtcctcgtgagcttaaaatggtcattgagagccttagcacaagcactgagatgaactttcttgaacccagtggaggtcttccacaatgttgctaagaaaggtgagcacaaatgtggattgagttggtgtccattgacatagttgagagcacctagagggggggtgaataggtgatcctgaaaaaacttaatacttaacaccacaaacttgattagaagttagaacaatgaaatcaagtgattagagagaagagctcttgtgaagcacaatagacacagtaagaacaagcacaagagactaatttcatggtccaagtccatctttccctttcaatccacctttgagactaatttaagaacactcaagcatatggttagtcccaaagagtcaagttgtagcacatctccccctaaatatgtgcagcacttgcaaatggacttgtgaggtccggggagtgtttgtacaacttgaaccccacaaatacataacaaaatgcataaaggaacatgatcaaagcataaggcacatgtatgctacaaatcaatccaagttccacgaatctaagacatttagcacgctacgcagcctgaaaaaggacttctcatctagagtcgacctgcag

SEQ ID NO: 76145 - DNA, 537 bp, Zea mays
  Clone ID: MRT4577_169471C.1
ccagccgaccagccgccgccgcgcgataaccggagttaatggagacgcccaccccatggagggtcctcgagttctacagcggtatcggcggcatgcggtactcccttgcgtcgtcgggcgttcgagcggaggtggtggaggcctttgacatcaacgacgtcgccaacgacgtctacgagcacaacttcggccaccgcccctcccagggaaacattcaaacactcactgctggtgatctagataagtacaaggcacatgcatggctcctttctcctccatgtcaaccatacacacggcaaggacttcagaaacattcagctgatgctcgggcattttcatttataaagattttaaaccttatgcaaaacatgagctttcctccacaaatgttatttgtggaaaatgttgtcggattcgaggtgtctgatacacacgaccagttgttagcggtcctttcaactctcaatttcaacacacaagaattcatcctaagccccttgcagtttggtgtcccatattctagaccgcgctacttct

SEQ ID NO: 76146 - DNA, 477 bp, Zea mays
  Clone ID: MRT4577_169472C.1
agctagagccctcggcggcagcgccctcggccaagcggccagcgcggcagcgccctgcgctagcgcgcccctgccgccctcaaccaggccagcgcggccacagcccacatcggcaggcggcagtggcactcactacaccctccccggcatctcagtggacagcaggcagcagcaccctccccggcgccctcggttagcggacaacagtacacaactacacaccgaaaggtactatggactatggtatggagacatggagattggagagtggtcctgtgcggtttgtttattagtagcgcttacatctgctgatctgcctgtgcggttgtgagttgtctgttgtgcggtgcttagtgcttactgcttgtgtcctgtgcgcctgttgtttgttgtgccattgtgcggtgccttactgccttgtgcagttgtgcgcctgtgcctgatgttgttgtgcagttgtgcctgatgcctgtcact

SEQ ID NO: 76147 - DNA, 231 bp, Zea mays
  Clone ID: MRT4577_169473C.1
cccttgcgtgcgcccacgcggccggttcaacgtacgcttggcatggacgccgctcgctgtctgttttaccaactagagaagtgcctcaatcgagacccttctcactggcacagtatcggtgatccagacaccatgctgccaacgggtacacgggcgcgcacaatgcactcggggccctgccggcgcaccatgagaagtgggcgcccacggggcgatgctgagaaccaaaga

SEQ ID NO: 76148 - DNA, 455 bp, Zea mays
  Clone ID: MRT4577_169474C.1
aaggcccacccccagcgccctggaagagggcaatatccaacccacgggcgggcccaacctgggggtcccaacgggcaaacaagtttgcggggagaaagggcaaaccggtcacctgtgcaaaatagtacccccccaaaacatccaaacgaaaaaccaggggggcccaaaaagggaaaaacctggggtgcctaggggggggcccaccgcccattattcgggggggaaacccggcccgccttccagatgaaaaaaccggccaacccgctggaataaggaattggccaaccgggcgggagaggcgtttctcgtttagggaccttttgcgcttcgtcgttcagtggcggggagcggtatgaggtcactcagaggcgggcggaatgttctccacaaaaggggggaataacgcaggacaaaacatggggggaaaacgccaggaaaaaacccggggaacccaa

SEQ ID NO: 76149 - DNA, 411 bp, Zea mays
  Clone ID: MRT4577_169475C.1
ccaccaacgaaggcatacctcgaggtcatttcctcccctcctctcttggattcttccctggaggagggaggagagccacacatccagcttcagctactgctcctccctgcacctgcacgggatcatacacggcagcgtgacccaccgccagcggtgccagccaccgcctgcggagcctcccccactggaccacaactcgaccatggacatctcggcgaggcgacatctactggcccagacagcggctgctcccccgccgccgccgtgtggtggtgcgccacccacaaatgagaacagcgagggcgcctcgaatgatgatgacccttgtgctggcacccgcactagtaagcccccagcatgatcacaatccccagcagcatgcagtcagatgatgtgcgcgccgtgaaagca

SEQ ID NO: 76150 - DNA, 343 bp, Zea mays
  Clone ID: MRT4577_169476C.1
aaaaaaaaaaaaaatttttttgccccccttacctataaaaaaaaaaaaaaaacattgggaggcttaaaacctgaatttaaaaaccggaaattcactcctggggtttgaaaaaaaaaaaaaaaaaatccgtaattggttaatgggtcaaaaaacctattcttgaatgaaaaaactttacccggggacccaaaataaaaaaaacctggatttggatcctcggcgcttgaggttcccccaaaaaaaattgaaccaacgaaatcagggagggggaaatacgtgggcaccggaatttttttcggaaaaaccggaaatgggccctaaaaaataaacactttaagggggg

SEQ ID NO: 76151 - DNA, 181 bp, Zea mays
  Clone ID: MRT4577_169477C.1
gcagggtcaaccctggaaaaaaaaggattccaatttcacttctaccaacacaggctcgacattcatttcgaaaatcgaaaatttggcaaagaatttgcggtggaatttgccaaaaaaggatgggggtttggtaaagatggagcctccaaaccccggaaggaagggggtaatggggatcgat

SEQ ID NO: 76152 - DNA, 297 bp, Zea mays
  Clone ID: MRT4577_169478C.1
gtcgtcctgctagctcctctactcgccagtcgccatggacaagattaagatcggaatcaacggctgtagaaggatcggcaggctcgaggtcagggtcgccctacagagcgaggatgtcgagctcgtctccgtcaacgaccccttcatcaccactgactacatgacctacatgttcaagtacgacaccctgcacggccactggaaccacagctacaatccactctatgactccaaaacccttctcttacgtgaccatcccgtcaccgtccttggcataaggaaccctgatgaaatacc

SEQ ID NO: 76153 - DNA, 376 bp, Zea mays
  Clone ID: MRT4577_169479C.1
aagcccagcacgatcacccactccctgacgtttaagacactcgctggacccaaaaactgtcgcatgcgcatcctcgcgaccggtcaacgcgggtacacgactcagctacgagtcgatgctccagcgccagatccagagccgattccagcacccactccaacgcgcgctgcagcaacggcccacccgaccaaaaaaccccaactgtaaggccccgacaacaaaccgcttctagcctacaaggcgaatggcggtctgaagctgctcaatccggccaccggcagcataccccgtaacgacgggcaactcctaaccataaaacatgccagcaaaagtcgcatcaacagccaaaccatggcccttggaaccggcgaccttc

SEQ ID NO: 76154 - DNA, 271 bp, Zea mays
  unsure (1)..(271): unsure at all n locations
  Clone ID: MRT4577_16947C.1
cttccttcatctctgcagcgaacgntagtcggaattcgcgagagggaaaggactcacctgactttggacagctgacctgggatccccctgctcaaacacaatggggatcagaggaaaagggctgaaaagggagggatggcccatatctcaagaagcaagatcttgtttgtggtggttgtgtgtgggagtgtgttttttctccgtctttctttttattatttttgaatgggggaagctatttattgtactgagagtggtgtctggatatatt

SEQ ID NO: 76155 - DNA, 605 bp, Zea mays
  Clone ID: MRT4577_169480C.1
agcgtccgcccagcgtccgctttatttgtggttggttggtacttttgtggtggttatttttttggacctcgtgatagtcggtcggttcaatgttatcgcggctactggcaaaccttaagtgaaaaaaaaaaaaaaaaaaaaaaaaaaaaaaaaaaaaaaaaaaaaaaaaaaaaaaaaaaaaaaaaaaaaaaaaaaaaaaaaaaaaaaaaaaaaaaaaaaaaaaaaaaaaaaaaaaaaaaaaaaaagggggggccggtttttaaagaaaccaaatttaccttcccgtggctcaaaaaaataaattttttttttggggcccctaaaataaatttaatggcccggtttttaaaaacgccgaattggaaaaaccccggggttacccaatttaaatcccttggaaaaaaacccccttttcccaagttgggtaaaaacaaaaaaggccccaccaattacccttttcaaaaaatttgccaaccctaaatgggaaaagggaccccccctttaagggtccattaaacccgggggggtgtgggggtttccccccagggtaccctttaatttgccaagtccctaaaccccccttcttttgtttttttgcctttctt

SEQ ID NO: 76156 - DNA, 437 bp, Zea mays
  Clone ID: MRT4577_169481C.1
ccggtgccggcaattacccgggtgggacccaccacgcgcggttttcgaccttcacctgcgacggcaaatccggggctcttatttcattttaacggcagtgcacatagcaccctcaactgccgtaccgagccgaactctcctatacaacgctttagacatggaaagaatgggacccgcgggttctcagtttgatgctaagcactatgattctaaaatgcacgagctgctgagcactggtgagactgaggagttcttcacttcatatgatgaaacttttgaaagctttgatgacatgggccttcaagagaaactactgagaggcatgcattcatatgggtgacagaaaccatctgctattcagcagagaggaattgttcccttttgcaaggggctggttgttaggcagctaacacaatctggaccatgaaagacagata

SEQ ID NO: 76157 - DNA, 356 bp, Zea mays
  Clone ID: MRT4577_169482C.1
atattcttagccctgtgttcttgtttacaataatctcaggtgtgaacgcgaatcccaccagaaacacggggcatacacagtattcacaccagccctagtctaatcgaatccacatggaccgaggacccccggtgttataccactacgcgagagagggggacccaacagacggatacgcaacgtcaagggggggctaccccggggcaaagctagaattagccgggccacctacagcttttctacaagccggatgactcacttgcagctgcacaggacccggaaaggatgggtccttccttaacaggaggacactaggctgccctttgctagtgctgcctaccatactcctgtttatg

SEQ ID NO: 76158 - DNA, 1148 bp, Zea mays
  Clone ID: MRT4577_169483C.1
gggtacctcgaggccggccgggacctcggagcccaggatttctaatctaatctaatccaaaacccttccggtctttgctgcggctgccctgctccatttgcagctagcttagctttggtttcctctgcttctcattctcccgtgcacttccagttcctgcccagcttgcagggctgctccaatggccaccttgtccgccatctctgccaacgtcggctactgcaaggcaccaaccctgagctggaagggaagcggagtaccaggccggattgtggtctccatgtccaccacccgaagaggcctcgtctccctaagacgacgatcccctcggtttcgcgtctacgcggcgaaggcggagacggtgagcaaagtgatggacatcgtgaagcagcagctggcgctggcggcggacgtggggctgacggcggagaccaagttcacggacctcggcgccgactcgctggacacggtggagatcgtcatgacgctggaggaggagttcaagatcaccgtcgaggaggacaatgcccagagcatcgccaccatccaggacgccgccgacctcatcgacaagctcgtcgaccagaagccacgagacagcgactgattgtcgacgcgacgacacccaaatccaatccatcgatcaccgctcgtgcatgtgaattcggaggctccgttattgtactgtaattgagtatttttttttttatctctagctagagatatttatggacccagatggaagagaagagttgatgatacctaccatcgtcatcgatcattgccaaaaaaaaaaaagggccctatttccatctgttctgttttcatctttcccagccgagctagctagcgtcgtcgtcgtcgttcgacgacagagtgacggacatcggcttagctctccttttaatttccctcgagtttttagctgtgtctgatgggcctggttgtgtcgtttcaaggctttgttttttgttaggagaagatggttggtgaacatgtttttgcttccagcttttgtgcccagagagctacgacattgtttgaatatttatgtacctatctatattggagtgagttagtctagagtttagttcagattctatattatccactccaacactttggattaagatagtagtgattttaag

SEQ ID NO: 76159 - DNA, 422 bp, Zea mays
  Clone ID: MRT4577_169484C.1
gtcagagcgagggcatttaaattagatcgagcagagcatctaatagtaaaaatctagactatattacttatagaaataagcggggtccgtgccctcactgggctacacataggtccgcccgggcggggcggagccgcggaggcgcggaccgcggagcgggagcctgacccatatccatccctccgggcgcggagaggagggggaagcagagcagcgggcgcggcggacatgacgccgatgcggctggtcgtccgagcctgcaccgcaccccccatccgcgtactggaagtcgaggaagtcctggaagctgctctccctgtacattgctgggttcacctcgtcgaccagctcctcggcgcagcagaccttctcgtccttggagagactatggatgctggcaatggaaattcttgcttcatcag

SEQ ID NO: 76160 - DNA, 879 bp, Zea mays
  Clone ID: MRT4577_169485C.1
caggcattgctgaaaatgctggaaggcacgatagtcaacgttcctgagaaaggagcaaggaagcatcctcgtggtgataatatacagatagataccaaagatattctttttatatgtggtggtgctttcgtggatttggaaaaaactatatcagagagacggcaggattcatctattggtttcggcgccccagttcgtgcaaacatgagggctggtggcatttcaagtgctcaagtgacatcatccttgttggaatctgttgagagtggtgatctaatagcttatggacttatccttgtgagcctggccgctctaaatgaggaccagcttgttcaggttctgattgagccaaagaatgccctgggcaaacaattcaagaaattgtttagcatgaataatgttaagcttcactttacagatggtgcacttagaataattgccaaaaaggcaatgtcaaaaaatacaggtgcacggggtttaagaactatccttgagaatattctcatggattctatgtatgagatcccagatgcaaaatctggggagagccattggcatgtgattcctggttctgaccgcaccagtgtaacctgtaaaaatctaatcccagttatatcaatgtaagtagtagtagccttgtaaatgaaacgatatgtgcagcgtccattgttcttctgaagccctggcacacgttgccccgcccgcgctcacgcattgcatgatttgcagcaggattttaatgagtgtagtcgagcaggttcgtgtagataccagtcgcttataaatggcgcaatgccatgaattgtaatagctgccggatctatgttaaaacttgaaacaaagaaatggatcaagagggcatggagttgcaaatttgtg

SEQ ID NO: 76161 - DNA, 1685 bp, Zea mays
  Clone ID: MRT4577_169486C.1
aagatcattcattgcttgattatgctccaagggccattcagcttacataggcatcaggctgccaatcagtcctcaaatctctctcaattattaagtttctaaattagcaccagctaatgtccgcttcccattgacagcagatcagccactttcctggctaggtgttcctgccttcttagtcctgcggctaaactgctttccccacatgacacatgcacgatccaatgctattgatcaggttcttgggacttctttgacaatatttttcttatattttatgcctcatatgtctgtgcatatgggtgggcatgaacttctataagaaacagcggtagtagtcattctttgttattgtaaaagcaataaacactaaatgtattttttcatcagtaagctgcttattcagaaacatgccaaacagctctctgctgtaaatgtctggcctaatgtacgctgtacccccctccccaaaaaaaggaaagaaaattccacgatgcctattgagtcttgacctgtgttttggccttttatcacaaacattggttaattacttaattatggcattcatgtacatgcagatagataccaaagatattctttttatatgtggtggcgctttcgtggatttggagaaaactatatcggagagacggcaggattcttctattggcttcggcgcaccagttcgtgcaaacatgagggtcggtggcacttcaagtgctcaagtgacatcatccttgttggaatcggttgagagtggtgatctaatagcttatggacttatcccagaatttattggacgtttccctatccttgtgagcctcaccgctctaaatgaggaccagcttgttcaggttctcactgagccaaagaatgccctgggtaagcaattcaagaaattgtttagcatgaatgatgttaagcttcactttacagatggtgcacttagaataattgccgaaaaggcgatgtcaaaaaatactggtgcacggggtttaagaaccatccttgagaatattctcatggattctatgtatgagattccagatgcaaaatctggggagaagcgaattgatgcagtggttgtagatgaagatgcagtaggatcagtggaccaacctggctatggagccaagattctttatggtgacggtgctttggatcaatatctatcccatataaaggtggcgggagatggagtcgcaagcgaaatggatggagaagctgagctttcaccatcccgagccattggcatgtgattcctggctctgaccgcactagtgtaacctgtaaaatctaatcccagttgtatccatgtaagtagcagccttgtaaatgaaataaatatgtgcagcgtccattgttcttttgacacccggcacacgttgcccggcagcgctcgcgccttgcatgatttgaagcaggattcggaagagtgtattcgagcaggttcatgtatgtaccgtcacttatgaaatttcctataagtcccagtcaactccttgtgtctgattggaagaaaaaattgataaaaggcttcaatcttggcgcaatgccatgaattgtaataactgccggattatgttaaaactgaaacaaagaaatggatcaagagggcatggagttgcaaatttgtgatctcgattccttcacctgtatccactgtattttattcttccctaaca

SEQ ID NO: 76162 - DNA, 1740 bp, Zea mays
  Clone ID: MRT4577_169487C.1
cctgtgtcgagaactctaggaagggggccgcatgactcatctattgcggcacgagccacattttatccttagattaatggtcgtactggctctggtaaacaattgaggtgatcgcggttggaacgttttgtgagtgaagaatttataggttctgatctaacaccatagtcacttgcacgatgcccaaggagagttgtaggggcctcgtcaaataagtgactggcgagggcagattcaaattggtgctaagtatagcatgtgacaacaaatataaaaggagttaacaacaatctatacaaaagggcaagtctgaagcagagtagggaggttttgatggggaagctgatgacgacaacaatgtggaactagagaaaagcaatgtcctgttaatgggacctactggctctggtaaaactttacttgcaaagacattagctcgttttgtgaatgtaccatttgtaattgctgatgcaacaacattgacccaggcagggtatgtaggagaagatgtagaatctatattatacaagttactcacggtggcagattttaatgtgcaagcagcacaacaagggatggtgtacatagatgaagttgataagatcacaaaaaaggctgaaagtcttaacattagcagagacgtatctggtgaaggtgttcagcaggcattgctgaaaatgctggaaggcacgatagtcaacgttcctgagaaaggagcaaggaagcatcctcgtggtgataatatacagatagataccaaagatattctttttatatgtggtggtgctttcgtggatttggaaaaaactatatcggagagacggcaggattcatctattggtttcggcgccccagttcgtgcaaacatgagggctggtggcatttcaagtgctcaagtgacatcatccttgttggaatctgttgagagtggtgatctaatagcttatggacttatcccagaatttattggacgcttccctatccttgtgagcctggccgctctaaatgaggaccagcttgttcaggttctgattgagccaaagaatgccctgggcaaacaattcaagaaattgtttagcatgaataatgttaagcttcactttacagatggtgcacttagaataattggccaaaaaggcaatgtcaaaaaatacaggtgcacggggtttaagaactatccttgagaatattctcatggattctatgtatgagatcccagatgcaaaatctggggagaagcgaatcgatgcagtggttgtagatgaagatgcagtaggatcagtggaccaacctggctgcggagctaagattctttacggtgatggtgctttggatcaatatctatcccagataaaggtgtcaggagacggagtggggagcgaaatggatggggaagctgagctttcgtcatcgagagccattggcatgtgattcctggttctgaccgcaccagtgtaacctgtaaaaatctaatcccagttatatcaatgtaagtagtagtagccttgtaaatgaaacgatatgtgcagcgtccattgttcttctgaagccctggcacacgttgccccgcccgcgctcacgcattgcatgatttgcagcaggattttaatgagtgtagtcgagcaggttcgtgtagataccagtcacttataaatggcgcaatgccatgaattgtaatagctgctggatctatgttaaaacttgaaacaaagaaatggatcaagagggcatggagttgcc

SEQ ID NO: 76163 - DNA, 1377 bp, Zea mays
  Clone ID: MRT4577_169488C.1
ttgggtacctcgaggccgttggtagtggctcccccagccctgccggtccggaaacccttccccgtgggccgtggccgccgtctgcctgtctccttccactcgccactccgatttccctcggtcagacgccgaagccgaaccctgactccaattctctcgtgcgagtgacatctaggtttccagacgccttcggtgagtacagggaaggaagtcgccatggctgacgacgaacaggcggagaagaaggaggaggtccccgagcttgctccttttgacccaaccaagaaaaagaagaagaagaaggtggtaatacaagagccatcagatgaggtggataacttggcagagaagacagagagcttgactgtaaccgagtctagtgagccaagctttgcgggcatgaaaaagaagaagaagaaacatgtggaacttgattcttctcttaccgagaccggagatgttgatgacacaggagacgatcaagttagagaggatgaagaaggagaagggattgtgctcgctggtgccgctgccaccagatacccttgggaaggaactgacagagattataagtatgaagagctgcttggcagagtattcaacattttgcgtgagaacaacccggatcttgctggtgatagaagaagaactgttatgaggccccctcaagtcctcagggaaggaacaaagaagacagtttttgtgaacttcatggacttgtgcaaaacaatgcataggcaaccagaacatgtgatgatgttcttgcttgctgagatgggaacaagtggatccctggatgggcaacaaaggttggttatcaaaggaagatttgcaccaaaaaatttcgaagcgatacttaggagatatatcaatgaatatgtcatatgcaatggttgcaagagtccggataccattctttctaaagagaacaggttgttcttcctccgatgcgagcagtgtggttcgtcgaggtctgttgctcccatcaaggctggattcgttgcccaagtgggccgtcgtaaggctggatcttaagctacctactacttgcctgaagtcgcttcccgatgaagacaatgcaaactagtttgctggtccacaaaaatcattgttgcactttcccttgtgcctacacagttcactggatttctgctgttcgctatacttggattggtgctgtgaatttatttcgtgtgatgagaggatttgtgtttgcggctcacttgtgtttactacgtttgttttgctcgtgattttgctgtggaaggcactgtcgggagcttcccgagttaggacgagtaacaaaaaaacgtgttgcttccattcagataaaaagcaaggctgcagcattctgaactaaaaaaaaaaaaaaaaaaa

SEQ ID NO: 76164 - DNA, 309 bp, Zea mays
  Clone ID: MRT4577_169489C.1
cttctacgggctgaggaacccagtcaacaccaacaacccggcaggctccggggttactgccgccaacgtggggaagttcccggccctgaacacactgggcgtgtccatggcacgcatatactacgcgccgggcggacagaacccgtcgcacacgcacccgcgcgccaccgagatcatcttcgccctctagggcacgctcgaggtcgggttcatcaccaccggcaacgcgctcttcaccaagaccgacaccaagggcgacgtcttcttgttcccgcgcagcctcgttcactttcaacataacagggggca

SEQ ID NO: 76165 - DNA, 456 bp, Zea mays
  Clone ID: MRT4577_16948C.1
ggttggggccaaaaactgggggcggggaactgatcctaaaaaccttgtttaaaaggggggaaaaaaaaacttaagccaaaactgggggggcgaaaccggttaaacaaaagcccaaactgggactggggggggccacccccgaaagcctaaccgaaactgggggggcgggaaccataacactacaaggtcactgggcctataacccctgggaaaggggggggccttttaaaccccgggtggtgactgaaaaccccactttgacagggccgccctgaagttacgacggggtcatggttttgggcttttggagggacttggcgttttgaaatttgacaggggaaaaaccacgggaacccccggtttttttggggacgggaaaacttaccgaggcaatttttgacggccccaaaaaaacttccaaggggttttcccccacgttccatgaaagggtgccaa

SEQ ID NO: 76166 - DNA, 234 bp, Zea mays
  Clone ID: MRT4577_169490C.1
ataaaaaccgctggggcgttgccctcttacatagcaatagagaaacgtactaatacagccaaaattgcttcagaacatacagtcgcccatgttctccaaaacaggtcctgtcatgggcgtaccgtttcacgggatgcatcaacgcaagccttaggcttgcgcgtattgaacaaagcggactaacgcatgctgcggatcgttcacattggcataccatgggggttacccctaccc

SEQ ID NO: 76167 - DNA, 556 bp, Zea mays
  Clone ID: MRT4577_169491C.1
aaaaaaaaaaaaattaaaatttgaaaaaaagggaggaggaggaaaaaaaaaaaaaaaaaaaaaaaaaaaaaaaaaaaaaaaaaaaaaaaaaaaaaaaaaaaaaaaaaaaaaaaaaaaaaaaaaaaaaaaggggcgccccttttaaaagacccaattttaccccccctttcttccaacataatactttttttaaaatgccccctaaattaaatccctgggcctccttttaaaaacttgctaactgaaaaacccctgggttcccccaacttaacccccttggagcccacccccttttccccttttgactaataaccaaaaagcccccccccatccccctttccaataatttcccccccctaattggcaaatgtaaccccccttttaaggcccatttaaccccgtgggtatttgttgtttccccccataaaaccctttacatttaccagggcctataaccccggccttttaatttgttccctttctttttcccccaattcccccggtttcccccaaaaattttaaaatggggggctcccttaaggatcccaattaatgg

SEQ ID NO: 76168 - DNA, 580 bp, Zea mays
  Clone ID: MRT4577_169492C.1
ggggggggggtgttttttttttttttttttttttttttttttttttttttttttttttttttttttttttttttttttttttttttttttttttttaaaagaaaaaagcccccttttttttataaccccaacacttttaacagggcctggggggggggttaatttaccaaccccccggtggtggggaaaacttccctcctttggggcctccaaccaaactactaaaaaagactgggagggggacaaaaaaaaactttgaaaagggcccaaggcccggggtttttttaacaacatccaaggccaaacaaagaaaacccacaagcccccggatccattaattatgacaaaaaaggggggtcacttgattaccaactaaaaacccggaaaaaaaatccccccccccccgcccaaaaaaggaggggttaaccactccggccgggggggtaaaaaacctttgggggcaaaccccaccccctggccggggccctcaaaaaccacccgaaacccctgttgttggattttgcccaaaaaggacacccccccctgggggccccggaacccaaaaaaaaaggggcccctg

SEQ ID NO: 76169 - DNA, 229 bp, Zea mays
  Clone ID: MRT4577_169493C.1
cgcttgcagcggcaaaccaaaccgtacctaagttaaactacttgctttcaacgctatatatcaacggagggatgtgaacattatatatcgtcttgtccagatagcaaatttgatatggacctaaattacttgctgttgtactatatgcccaactcagatgaaaacattacacagtggcctcagattgactgtaaggccaatcttaggcttgagagtaaatagatccacg

SEQ ID NO: 76170 - DNA, 766 bp, Zea mays
  Clone ID: MRT4577_169494C.1
gccccaatcctttctcagatgcgtgtctagccataatctgctaagtgccgcgcgcctgagatcctccccgacctcgaccgacgaggaggaaggggacaggacccctttgactagacactgacaacgcgttgcaacatgtgaacctcctccgtgagctcttttgctcgcacccatgcttcttagagaatacccgcactcctttctcgcttcgacaacggcctcgctctcctctacgtcttcccgtacgaatctcagaactctcgacaactgcgcgctgcttatgaatttgtgaggggaaaaatactggatgtctttactgatgatcctaatgaggctgataatcatttatccacagcacgaaaggagaacccatctcttgtatatgcatggctatggttgactagatgaatttagaaaagggtggatctatgcggtaccagaagaacttgttattgcattagctactatacaagtactctaaaaaaaaaatactgggcctcagctctctgcttgaaacaagtatgtttcaaggtagagtagaccactctttattaggaaaacagagcatcgctgatgccgaagaatctattatgctggacattagagatgcccattcttggtatagtatgcgcgatgattatctcactatcttcattgtgggaggagcctgggatcacactaagcttcatcattcgatgaaagcctatcaaaatgctgagaaggatatcactatgattctatatcctgacctctactataattgggc

SEQ ID NO: 76171 - DNA, 484 bp, Zea mays
  Clone ID: MRT4577_169495C.1
acgtatcagatggaagagttagatataaaatagcagtcacatttagattttgcttggatgcaccatgcgaactgaactgacgaaccactgatgaccctgttgttggttacaaggtactaacctattaatctctggtgttgaccttcctacagaaagctaggtgatctcttgaatcgattcaggaaatatggatttttttttctgctgatacaatgctgaaggtggggtcaatgtcactgcagtgatttgggtgacctataagcactgttcatattgtgaggttctcttggatattcaggaaggagccgcagatgttcccgccaagatctgggaatgtggcacacccagacagaggattcaccttgcccctggaatcgatgctgacggggtacttgagcaggtggcccttcatctcggtcacatggctggagatgaatttctcccagttctgctgtccgatgtgtcgcacctgcctcgtgcactc

SEQ ID NO: 76172 - DNA, 332 bp, Zea mays
  Clone ID: MRT4577_169496C.1
gttcacaaaaaattgcagttcgtttatatccaagtgaagcttgatgaacagaactagacacaatttgatcgggctactgggaccttatttgataacacttgacaggatgaaacaaaggcaccacggattgaggaatttcatatgtgactcaatttacaacacaagcaacatttgcaacaaaggggctactacgggcgccgaagacgtgctgtctatcagtaaggggataattaatggacagttggggagcactcttgttgacatcgtgagaacaaaacggccaaggggggttaattttaaaggcgccaagataattgttgggacgagactgc

SEQ ID NO: 76173 - DNA, 606 bp, Zea mays
  Clone ID: MRT4577_169497C.1
gcacgagcggcacgagccgcagcaagattgggcaggaaccaacaagacgaccagcggccgcccttgttgccaggctcccaaatgcgccaaggaggcagcggggcgaagagcggaggggggaacggtgcgaattgcgcctgcaacgggccgcggggagtgggatgagcgcatggttgcttggcagaaggagcagaggcggcgggcgctggttgccgcggcagcccggtgctcgccggcgacgatgccgccgcctggtggagaaggcgtggccatgaaggcgcatctcaggtcgtgggcccacgcggtcgcttgctccgtcagatgagggctctccattcaggaacctatggaaagtagattttttttgctccatctctgaacgacggcatctcttcatggttgtgcttgcggattattgtggtttatgcagttcgtctttcaggtacgatcactcgaggctcgcataaaggcaagcgattcatttgatacccagtataagtatgtgtccgtgttatacagattatgattgtaagagtagcaatgtgtcgctttctgtgtacacttgctttgcatctggaatctgataaaactctatgctgctaaaaa

SEQ ID NO: 76174 - DNA, 241 bp, Zea mays
  Clone ID: MRT4577_169498C.1
acgagctctacgagaggatccgcggggtcgaggtcgggcccgacggcaccatgcgatacgacgactttgtccggcgtatcggcgacaaatgatcccgtcccgtccgagtctacattccgccgatacaccctcgcgcgctatgcgcctgaaataactgcgtctcggatcccggtgatttcatttggtttccctactatggctggctaattggaatgcaatctggcctcctcttggttccaaa

SEQ ID NO: 76175 - DNA, 264 bp, Zea mays
  Clone ID: MRT4577_169499C.1
ttgtttttttttttgttgttgttgcctaaaaaaagcacatattggttttttgaatgggcgcacaaaattaccttcgtaaggtttggggtctagtttgtatgtgcatgatagagcgcgcagacaaaccaaattggtgccgccccatctagttgtgttgctcaagcagattcccggtcataaaaaagaagaggaatatgggcccacccttcctttaaaataagccttgctgcatgtcgtcataaaaatcggacttgggcttccatt

SEQ ID NO: 76176 - DNA, 795 bp, Zea mays
  unsure (1)..(795): unsure at all n locations
  Clone ID: MRT4577_16949C.1
aattcggcacgagggtgccgagcaggtagggagagaaacagagcgagagaatacccgacctctcgcctccgccctagctaccaaggttcctcctgatcgatcgattcccttccatccaaacccccaacaaaatgtgagttctcatctcatcctctcctatcccgcgagagatttccacctgtttcgtggatgggggatgtgttctgcgtcgcgcgtttttttttgttctgatctgttccggcgaacggactggagctgctgtctgtcaggcttcttcatcttccgtttgggatacattccgcccagaacccggttcctggcctgcgggaggaggagggnnaagaatataaatgagcggncgcgcgccgcctccccactgtcggtcgacacatgccgttccactgggtggaatttatggcgactcggacgcggcgctgcttttagtagtaaccaatgcagcttcctcctcagggcctggaagaagctgcgaccttctttgtgttttgtgttttttttttggcgacgagatctggtcctcgcgctccctccctccctccgtttcttcctctgctcaaatctgcgcggcgcgcgtccgtggcgcgggagggctcgcgctcctgcccgcccgcccgcgctgccaaatgcgctttgttttccttttgttaatggctactgcagtgcagcggacctgatcgttcctagcgtttctttttgtctccaccacgcagacgacagtagcggcggttcgaggttcggagctagagcgcgacgtcccggaatcagcggcggcgaaaa

SEQ ID NO: 76177 - DNA, 635 bp, Zea mays
  Clone ID: MRT4577_1694C.1
atttcctagggtttcgtcggttccagccgccgccgcgtccgcctcgtcaagcgcaggagccgccgcagcacgtctctctctcgatctcagccatggaggaggtggagcagcaacaggacacgccgaagctgctcaaccgctgaagcttctatgatggccaggggaacgacatctcgctgaacgactacctcgctgggaacgcgtaggaagtacgcgatgtacctgccgcacagcgtgggtggttactccaagaagcgacatccgcagaggagcagtgcccgatcgtcgagcgcctcacaaactccctcatgatgcgcggttgcaacagcggcaagaaggccatgggtggccgcatcatcaagcgtaccctggagattatccacctggtcagcgatgccaaccccatccaggacggcggcgacgcgatcatcaacagcggaccccgtgaggatgccacccgtattggttccgctgatgatgtgaggaggtagggcgcgtatatctcacccctgaggaggacgaaccaggtcatctacctcctcagcactggtgccagggagagtgctttccggaacatcacaaccattgccgagagccttgaagatgagctgatcaacgctgccaaggtatcatcc

SEQ ID NO: 76178 - DNA, 415 bp, Zea mays
  Clone ID: MRT4577_169500C.1
ggctttggacctttgggctgatttatgtgcttgtttatgtgcttgtacatcttctggctccaattcaataaaataaatttctacatactcgtgggccacacaccactaactggctcaaacacccagtcatctatccttttattcatcgcataacataacaccataatcaacataaaacgaataacgctcgttccattctccaatcatgacatagcctaaatctttcatctatacaatttcacttctcgaccacctctcacatatcacccatactaactacttacactatagcacgtacatacactctattatctcactccatcactcctgtacacctatgctaattcaccacaatatatccacccactactcaaacgccactacataaacctaactacaaattccctacaactac

SEQ ID NO: 76179 - DNA, 375 bp, Zea mays
  Clone ID: MRT4577_169501C.1
gccactcatacgggtggttccattttaccggatccacagcacagggggcgtagagatctaggcctccaatgcatcttggccttttatgtttgctgaacttatgtcatgtatttcttacatgtctatcttgttttaatgctctcattttcttatattctcctttcattttttgtaccattgtttatttatttatattttttttgttttattttatttcgtatgagctttttgatttattttattttttttttttatgttattcttttcttttttattttttttttttttttttactttatttgtctacttgtatttttgtattctttttctcacttaatttttttttttttatactttcttacgtatctatttttt

SEQ ID NO: 76180 - DNA, 186 bp, Zea mays
  Clone ID: MRT4577_169502C.1
tttatttttttttttgccagaaccaaaagtggcaggctcctcttagagccttaataggtggtaaagataaaacataaagataaccaggagatagtatttcaacacccgttcagccatggatcggaccttgcctacccagctatgatgtacaaggccaggttcagaagccagaagttgccgatgtcc

SEQ ID NO: 76181 - DNA, 366 bp, Zea mays
  Clone ID: MRT4577_169503C.1
ttcttttgaaaacccatcagtttcggcagattttggccttacgagttatgctagtagtgcatactctacaggtgctggcggaggcacaaatcggctagaaacccaagaggcaacaaggccggaccacgaaatggtggaagaacagcacacgatgtactggtccagactatgatggttgtacacactctcgaactcgaaacccgtgtccatcactacgacacacaaaggtctaacggcatagccccaatgaggcatcaactgtaggagacatgctctgcgtgggtacgatcggtggcgttctcagcacgatgcacaggtggttacgacaagcaaggcggacccagtcaagcattctatacctttgga

SEQ ID NO: 76182 - DNA, 122 bp, Zea mays
  Clone ID: MRT4577_169504C.1
ctcgagccggcctgtctaacccgtacttggccgcctcccgtgctgcgggggcgatcgattgctagggtgaaaatccgttcgccggcgattttggtttctcggcaagagacaggaggatccgc

SEQ ID NO: 76183 - DNA, 685 bp, Zea mays
  Clone ID: MRT4577_169505C.1
atttcagagctagcagcacggaggtccaacaatggcggagaagggcgtgaaggtgtttggcatgtgggcgagcccgatggccatccgggtggagtgggcgctccggctcaagggcgtcgtgtacgagtacgtcgacgaggacctcgccaacaagagcgacgcgctgctccgccacaacccggtgaccaagaaggtgccggtgctggtccacgacggcaagcccatcgccgagtccaccgtcatcgtcgagtacatcgacgaggcgtggaaggacggctaccccatcatgccggccgacccctacgaccgggctcaggcgaggttctgggccaggttcgccgacgacaagtgcaacgccgccatctacccggtcttcacggcgaccggcgaggcgcagcgggaggtggtgcgcgaggcccagcggtgcctgaagacgctggagacggccctggaggggaagaagttcttcgggggcgacgccgtcggctacctcgacgtcgtggttgggtggtacgcgtactggctgccgatcatcgaggaggtctccggcgccagcgtcgtcaccgacgaggagctgcctctgatgaaggcctggttcgaccggttcctggccgtcgacgtggtgaaggagaccctgcccccgagggccaagctcctggcgctcaacaaggctcgccgtgagcag

SEQ ID NO: 76184 - DNA, 372 bp, Zea mays
  Clone ID: MRT4577_169507C.1
acatgatggctacgtggagttgtagcacatgcggtagcaggaggagggatctgatcggagccttatttctgctggtcgcgggcatcgctagaaggccatagctattaccttgcagcagtgacctttaaacacgtactgcgtcggcgcacactcccggaacgttgggctaggcaaaaaggccccttttcatttgagcgggtctagcgctctggagccccgggttgagacaagacaaaccttctggtggacacacatgcatgcacatacgagtggccctctatacttgctttcccttgcaatggatttcccgactggaaccgaaacacacccgactgcacgtgtacatgcctcatgcgagcagcgtggaccggc

SEQ ID NO: 76185 - DNA, 231 bp, Zea mays
  unsure (1)..(231): unsure at all n locations
  Clone ID: MRT4577_169508C.1
agcacttgatccctacaactactcgagctcgccgaaccggctcttcgcgtaagcactctccgatgactgacttccatatttggccaccgtattacggacaggtatcgaaaaacctgtcgcccaggtctagcgcgcgcgctacagctgagcatgcagtttttcgatacatctncccctaacgttgccaaatatcgaggtacctactccgacattgcttacgccaagacccct

SEQ ID NO: 76186 - DNA, 313 bp, Zea mays
  Clone ID: MRT4577_169509C.1
agacacatgaacaatatgttttcctcttcttacacagaaaacgagataacttgataaaaaagtgaaagtttaataaagacgacataaaaaaaaaaaaacttttatactaaagtaaaaaaaaattagggggggtcgcttaaattaaacaaactttaccgccggttaaaaccaaggggattcctattttattggcgtcccaaatataattcttttgccagctttttcaattttcgagagggggaaaaccatggggtttcccaactaatttcccttttaaaaaaaccattttaccctgcttggcgaatgagaaaaa

SEQ ID NO: 76187 - DNA, 355 bp, Zea mays
  Clone ID: MRT4577_16950C.1
atattgatcctttcaagcaatacttatagtttttccaccattctgaaacatattatcgccaggacgaaggggggatctttcaaaaacatactcccaacatgagaaaaatttattaaaacctcgggggcgggacctaccagagttaaaaaaagagcgggctttgaacaccccgcttggctggccaaaagagcttttgccccacaggcttaagacattcagccacctcttatttagaagggaaccccgggggttgacccttaaaaagaggggcaaatggaaaaacattccccccaaccccaattttccaaaagttacaccggggcaaaggaccgggctaaaccgtaacaaaactggg

SEQ ID NO: 76188 - DNA, 236 bp, Zea mays
  Clone ID: MRT4577_169510C.1
cccacgcgtccggctcctcttccgccgccgcagatctcgtatcgccggagtccatgtaccgcgccgccgggagccacctccgctccctcaagcatcatggtgcttctaggcttgccagtacaagtgttgcgaacagtcctcaggtggtccgtcaacctgcctcctggtgggaaattcaagggacttccttcccctgaaggtcccagtcccaggcattagcattccctcacctctac

SEQ ID NO: 76189 - DNA, 384 bp, Zea mays
  Clone ID: MRT4577_169511C.1
ggagcgccttagtattacccatggtcgtgaagcggaacatgttaaaatgttaaaaagggcgcggtcggtttttatgtttttttttcgacgaaaaagacggaaaaacagccctccagggccagtctgctaatacccgtcaaccgcgaaaggggggacctcaaaaagggccggtacccgcattgtttatgcaaggaggcccccggatacctcgacgacggcctggagtacctcggggacaaggtgctcgagctcgccgacaacgcggcaagggacaacaagaagacgcgcatcatcctgcgctaagtgctgctcggcatccgcaacgacgaggaggtaggtaagctgctggccggcataaccatcgcccacggcggcgtgctcccc

SEQ ID NO: 76190 - DNA, 235 bp, Zea mays
  Clone ID: MRT4577_169512C.1
agaccacagcgaggaggaagaggaggaggaggaggtgctggaggaagatgagccccgcttcaccatcatccccaacccactggacaggagagaggaggctggaggtgcctccagcgatgaggaaagcggtgaggacacaggtccacaggatgctcaggagtatgggaactaccagccagggtccctgtgtggctactgctccttctgcaatcgatgcactgaatgtgagagctgt

SEQ ID NO: 76191 - DNA, 179 bp, Zea mays
  Clone ID: MRT4577_169513C.1
gtctgttatgatgttctttgaatacttgcataagttttaggaatgttcatggcctactggtgctactttggccttttaagttgtgttagttttctttttccccccttgaactttggccagagctgtgcattttctttgagcaacgtatgcggcgtagaagggtcaatttgttattggca

SEQ ID NO: 76192 - DNA, 644 bp, Zea mays
  Clone ID: MRT4577_169514C.1
agcagtggtaacaacgcagagtacgcggggaatgtagctgcaacgagcctaggctcacagcttacctccttcacgtaaggaagctagagaaagacttcacagccctggagctgcaacatgttcctcgggctgtcaactcggcggcagatgacctctgcgtgagggcatcaacttgggcacccgtgcccgagggcgtcttcgaaagacggctgctgagacccactgcccagcctgccgaactgggcgaggggggcaagactagcaccttgaagctagcggtcccggtggcgttacaactacaacacccaccgaagactatgtgtgctatagggggtcctgcctatcccttagcgccatagccagtatctcagagtggtcccgatgcatggatctccgagatctgggactacctgagggaaatatccttcctgaagatcatgtgtccgcagagcgcatagtgcggttggctaaacgctacgcggtggtggaaggggatctctaccgccgtggcaccaacgacattctcatgcggtgcattacccaggaggagggctgtaagacctaaatttggttggaaaatatatatattcaaaaaaaaaaaaaaaaaaaaaaaaaaaaaagtactctgcgttgttaccactgct

SEQ ID NO: 76193 - DNA, 793 bp, Zea mays
  unsure (1)..(793): unsure at all n locations
  Clone ID: MRT4577_169515C.1
gccggccggtttgggacgtccacctgttcacttcctgccccctccccgcacctccctccgatcccccaaatcccgaattgaccaacccaaagccgtcgccccgcatggagtggacggtcccgaagcgcgccagggccgacgacggcgaggtgaggtgccaggtggaggggtgcgggctggacctcagcagggtcaaggagtaccaccggaagcaccgcgtctgcgaggcccacaccaagtccccccgcgtcgtcgtcgccggtcaggagcgacgcttctgccagcagtgcagccgatttcatgccctgtcagagtttgatcagaagaagaggagctgcaggaggcgtctgtctgatcacaatgcccgccgccggaagcctcagccagatgcattcgcctttgcctctgcaaggctgccttcgttcggtaatgtgttcatatcttaagtagtgcttgaaatttgccagtggatactggcaaaatggtggtgatgggctcttagccagctgcatgtacagcacgccaatagatgtcttgttgctcaaatggcaagctttctatcttttatacttggcaataagttgctgttgcgtttcttcatggaattatatacaaactaaactagacattttttgaccggcaaaagctgtaggggaaagcaataaatatactccctccgttctttttttatttgtcgcgttttagttcaaaatagtatatatttaaaaagaaagagaacttgtaccgagagaagggtgaacccaccaaagggcagagaaataannagaagtag

SEQ ID NO: 76194 - DNA, 195 bp, Zea mays
  Clone ID: MRT4577_169516C.1
gccaggaccacggcatcacagtcttttgcccgtgtcggtacaaggacgaggagcacgtgtaagacattatagtgacctgccccacactcaacaacaccaccaacagacttcacattaattctatactaggactccaagtcgtcaaaaaatgccaccaatttcctgtacaaatacttaaccatagtcaacattttc

SEQ ID NO: 76195 - DNA, 509 bp, Zea mays
  Clone ID: MRT4577_169517C.1
cagttcaataacaggctgatgaataacagagaaaagattaagtcaaagaaaatcactgatgttctcttgtctagtgatacaactgaagctcaaggttttctccaagagggtggagatgattgtgcacaagttgtctttagagatgaggaagatgagatggaaggtacagggataccttggtctgttattggagaggcagttggagcagaagaacagcttgagccttgtagaagtgcaagagtgagagagctctatgaaggagaagagtttgagtctgaagaagaagagtatgaagatgaagatttgtgctacagtgaagatgaaatatgatctggaccatctccatctagtagtgaagccttttgtgatgccctggtcttatgaactgcagctgtgtcactttgtgtctgtgtgtcttcttttgtgtgagacctgaactaagaactatgtgcttgtgttgtcctttatttataaattgtgttctgcactatctagtagtgaagcctttt

SEQ ID NO: 76196 - DNA, 124 bp, Zea mays
  Clone ID: MRT4577_169518C.1
catgcatcgtagcctaatggctatgcaccgctggatatatttgtgcgcaccgatggatgaggattcaacgagtaagatcgtctctaggtccaccggcactgcctgatcaattgatcgatctata

SEQ ID NO: 76197 - DNA, 839 bp, Zea mays
  Clone ID: MRT4577_169519C.1
aaatcaactggcaattctatatgcaacatgttagccactgaaaatcctccagtttcgaggcacatgatgacagcttctttctttttgcgacacacatggtagctcatgttactgttggttttctgaagcaactagacctcactagtacctctctttgtacgaactaaactaccaagggaaccaatttacaacctgtacatggtaacaacaggcaatgggtgtttgattcaaaaaaaaaacacaggcaatgggtgttatgggctatgctcttggatgacaatgaacttggatgcgtcgagctgctgctgaccctcttctcgtggcagcatcctaaatcctgcttttgaatgtaagtttaaccgtttgaagcctcggtcatctccggatggtgattgagacccgatcaaccctgcccaattgtgatagttccggttcctggagcagcaaatcttgcagtttctcagcgctagcatcactggaatcaagagagagtagcctatgatgaattgagctatcagagccaatgtaagtgacaactaggcttccagcatctggatgtggccagcttcgggtgataggaaatctgagaacaaatgttcctgcctcctttaacaattccctggaacttcttagtgcattctcagcttcttctgttgtaatcaagccctctatccatctaggtgctgtgcaatcccacagctttttaattctctctctcgataatgaaacaaccactaggtataaccagcaccatagcctatcaaattcatctcttcctatgtcctcaccacaaccagcaatgcctcttaaaacctcaagatcctgctctgataaacccc

SEQ ID NO: 76198 - DNA, 329 bp, Zea mays
  Clone ID: MRT4577_16951C.1
ccctgggaaaacacctatctacaactggaccttcagccagacagttttaagcacagacaaactcataccacggggagctgcggggggaacttgaactggggagggaacaactctagcgcacccttcgagggatttcgaggaggtggaaccgaaatggacccatttggcgactgaaaatacctgtagaaagcaaactatcaagcaaggccccgccactgctggagccaaataccgagggaccaactgggggaggccagaggcaactcccttccctttgttggcgctagccaatggacgctccgagggtgaagggccggtaaccgatgcca

SEQ ID NO: 76199 - DNA, 636 bp, Zea mays
  Clone ID: MRT4577_169520C.1
ggtaccgcggcccttcttctcggtttttttttttttttttttttttttttttttttttttttttttttttttttttttttttttttttttttttttttttaaaaaaagggccccccaggggtctcccacccgaggggtttttttggaaaaccacccataaaacaggcgggggggaaatgccctttgttaaacccaaattttaaagttaaaaatttccccagttggaccagggggcccaaaggccctttagtaaaaaaaaaataaatcccaatggtttccccggggttaaataaaacaaaggcaggattttccccggtggggggcccaaaaacttttgtttctcccgtggaaaaaaaaaagggtccccgccccaggtttccaaaaataaaccggtaaagggcaaaagggcttttgctttactggggtaacccaaaaggggcccctagcccttttattttttccaaaacccccatgaaaaaacccccaatcctggggggttgggggccccctaaagggggcccaccgcctttttttaggggggcccccgggggctttaaaagggaacctggaaaaagggggggctgcccccccccctttggtttgggctggggaagagaaaatttttttttgacccgg

SEQ ID NO: 76200 - DNA, 2787 bp, Zea mays
  Clone ID: MRT4577_169521C.1
acggcggaggctggggctgcggcgcgccgacgctagccgccgctaggaccttgagcgcggctgccggctgcgctcgcgcgggcatgcgccgtgcggacggtacctgagcgcaacgacggatgggcagcgacggcggatgcagactgctagccgcgtccgccgtcgaacgccgccgctcgtccgctccttcgctcggccagaagggaggaagacagaagggatactaggggttctactccggcggtaggtggggcagctgccccaccgtgccgcatggggagctccgcctctgctggcggatgaaatgatcctgcggccttctcttctggccgtcgcccgccctctcagcaccgtagccgtcgcggcggccgtccgccgcggggacctcgccggcgcggaggaagccttcgcgtcgacgcagctcaagaccacgaccacctacaactgccttctcgcgggatacgcgaaggcgtccggtctcgtccgcctcgcggacgcacgccgcttgttcgacagtatcccgcacccggacaccgtctcctacaacacgctcctgtcctgccacttcgcctgcggcgatattgatggcgcgcggagagtcttctccacgatgcccgtcaaggatgtcacgtcgtggaacactatggtctccgggctctccaagaacggggccagcgaggaggccgcagccatgtttcgggtcatgccggtgaggaatgctgtttcctggaatgcaatggttgccgcgctcgcgtgctctggagacatgggtgcagcagaggacttgtttaggaatgcgccggagaagacggatgccattctgtggactgcaatggtgtcagggtacatggacaccggcaatgtccagaaggccatggaattcttcggggcaatgcctgtgaggaacttggtttcatggaatgctgttgttgctggttatgtaaaaaactcacgcgcagatgatgctttgagggtgttcaagaccatggttgaggacgctattgtgcagccaaatgcgtcaacgttaagtagcgtgcttcttggatgcagtaacctgtctgcacttggatttgggaggcaggtacatcagtggtgcatgaagttgcctcttagcaggaatgtgactgtgggcacatctcttctcagcatgtactgcaaatgcggcgatttgaatgatgcctgcaaggtgtttgatgagatgagtacaaaggatatagttgcatggaacgccatgatttctggctacgcccaacatgggggtggaatgcaagctatcaagttatttgaaaaaatgaaggatgaaggagtggtgccagactggattactctgttggcagtattgacagcttgtatccacactggattgtgtgattttggaatccaatgctttgaaacaatgtaggcagcatataacattgaacctcagattgatcattactcatgtatggtggatcttctctgccgagctggtctgcttgaaagagctgtcaacatgatccattcaatgccctttgagccacatccttctgcctatggcaccttgctgactgcttgtagagtttataagaatttggagtttgctgagtttgctgctagaaagctgattgaacaggatccacagaatgcaggtgcctatgtacagctggcaaatatttatgcggtggcaaataagtgggctgatgtctctagagtaaggagatggatgaaggataatgcggtagtgaaaacacctgggtatagctggatggaaataaagggtgtaaggcatgagttcagatctaatgacaggctgcatcctcagcttggtttgattcatgacaagttggaccgcttgcagatgctgatgaaagcaatgggctacgttcctgatcttgattttgcactgcatgatgtcgaggacagtctgaagtcacaaatgctgatgaggcacagcgaaaagcttgctatcgctttcggtctaattagcacttcccctgggatgaccttgaggatcttcaagaacctcaggatctgtggagattgtcataatgtagccaagcttatatccaaaattgaggatcgagaaataatactaagggataccacacggttccaccattttagaggtgggcattgctcatgcggggattactggtgaaggaaagaatctcgataacagtttcagacacactcgcaatgtagtacttgcaacactatataatcccatcgacaggaataaaatgtgtggtaattttttgttaacttaataagtggctaggacgatctgcagagagttagccagagaaactgatcatttgcttgatggctgtgtttttgccaaacttttttggtttcggttgtttggaaaggttaatcttcaaagtttggtaccacagctgggggtcaacaattttatggagttgcggagataggctgctgggcagatcactggtgttgttgtagaggagctgaaaacacttttagttttgggagcttggaccatttggaaacaccgtaatggttcgttttcaataaaatcagccctaacttgatgctgctctcagcaaggctgaactagaagtggagtttggagtttggcaggggctaagaatctttccctcctaactgctccaacccctgttttgatagtccgattagttgtagtagtcgtgtgtgtgtgttttcttaatgaatcctttttgtgtattcatgtttttagcctccgtaagggggctccctgatgttctagtctattttggactcatctgtcttcttaaataatgagtgcagctctcatgcgtgtttgag

SEQ ID NO: 76201 - DNA, 409 bp, Zea mays
  Clone ID: MRT4577_169522C.1
ttgtgtatcactcctcaggttctgagttcgaatccagtgggagcgaattttaggctgaggttaaaaaaggccactatttcgttcccacggttgcgtgcctgcgagatggactgacctatgggggcggatcctacagtaggggctaggagggctcaaagcatgagtaaagacctacgcttccgtggaacggtggacaggttttctgaactatctggggctacgagtgaaattcttattaacataatactgtgggggcagtattttacttaccggccgagtttttttaaatagtgaacctcacgagtactatcacaattggttgatctgcattggacttcattgccattggctgtcatctgaatagagggcgatccctgattgtggcaatggattgattttttaaaagaac

SEQ ID NO: 76202 - DNA, 748 bp, Zea mays
  Clone ID: MRT4577_169523C.1
tctatgaactgctcagttttgcaattctgagcaagatgcatttttgttttgtttttcagatcagaatttgttccagttgacctcacgcagcagtactacaactatagcactctgagccactggattacaaattacaatcatgcattctccaggtccgcctgaactgagcgtagcatggtatgagtccgaccaagaaaggtcgagtaacgtggaagtttgactgcatggaaccttacaaaacgtacagcgcctatggcactgaaagtaagcacatgtcatgggggtttccagctagtagagacgcgaatcagggcgttcgagcgagggacacttgcttgactcgcaagggacgcccacaacgaagtcttcccccattcagggcagctagcgtcccgctgcaccgtacacgcgcggtaagaagcacggcgagagcgagaggctggcacgctatcttcttcgcacgtcgcccatgtcatgtcctttttcctcggctcggctcgcctcgttcccggccgacgcgaatcggttcccggcctccgtgtttccatggcgctgttcttggtataacaagtgtggagtgcggactactctactcgtcgtcttcgttggttttcccttccccggtctgggaatcggagagcgtcgcgtgtgtggcttggtttggtttttacatgtacttgttacgtagtagtagtattagtacttgctaactctggcttaattaaccctttggacggtgagtcaacag

SEQ ID NO: 76203 - DNA, 247 bp, Zea mays
  Clone ID: MRT4577_169524C.1
caacgcccagccggaaggcgcaaacaattgaacacatcggcccaacaaggtagatgcacggggccaccagaatacaccggcccactaatacggggtttaaaacaaattgtctgccctggaatccccggttttaacgggaccggacagttcgtgaccccaacccttctacgttaaaggggacctgtgcaatcggtattatctggggcttaccgggggcatttaggcaaacccatggggcccactttat

SEQ ID NO: 76204 - DNA, 406 bp, Zea mays
  Clone ID: MRT4577_169525C.1
ccttctttcacttgatcttgtcacggtcgtagtcgactgttcaggcgctactgctgcaaaagtgcaggaggtggaggccgtggtcatgcgtgccatggaaaatcatgccaaccgtccaaccataaaaatggaacgagtatttgaaaatttcatcttatctgacgaagagcaggaggatctggtgaggctgttcttgttgagtctgctaaagaaaatacgttgtcttaattatatatgactatatgttaatgggtactacttacctgtatgtttgtgtacttctcagctttagcgactgcattgaaaaggaaggccgcttgctcgagttcaagaaataagtttgatgctttttttaatcacattcctggggttgcttcgacatccctctaaaatcccgtatttccca

SEQ ID NO: 76205 - DNA, 562 bp, Zea mays
  unsure (1)..(562): unsure at all n locations
  Clone ID: MRT4577_169526C.1
atactactacacagtaggnaagctaggnaggaaatcaaagcaacaaagttgccggccgagagaaccaaaccatgaggcctcaggtgttactcgtcacactggctgttatcgtcgtccttgcagctctgccactcagcaaagggacggaggaggaagacggaggggcggtagtcgccgccgtggacgacgccggaacgagctcgtggccatgctgcgacaagtgcggtttctgctacctgtcttacccgccgcagtgccaatgcctggacttctcgacggtcgggtgccacccagagtgcaagcagtgcatcaggtacaccgccgacgatggcgtcgacatcccgcccgtgcacgcctaccgctgcgccgacatcctcgtcaacttctgcgagcgccgctgcactcccgccgcagctgcttcgatgtctagcgctagcaccaagtagaagaaggatgcatgcatcctcgtcgatgccattgccgggttccgcttctgagaagaagcaaataaatgttgccgctgttgatgcgtgcctctccttaaataaactaatatttctgt

SEQ ID NO: 76206 - DNA, 723 bp, Zea mays
  Clone ID: MRT4577_169527C.1
aactctactaggcgatgccggccgggccggggcgagtcgatcaatactatactactatcacagtaggaagctaggaggaaatcaaagcaacaaagttgctggccgagagaagcaaccatgagacctcaggcgtcgttactcgtcacactggctgttatcgtcgtcgtccttgcagctctgccactcagcaaagggacggaggaggaaggaggaggaggggaggcagtcgccgccgtggacgccgccgccggaacgagctcgtggccatgctgcaacaagtgcggtttctgctacctgtctgacccgccgcagtgccaatgcctggacttctcgacggtcgggtgccacccagagtgcaagcagtgcatcaggtacaccgccgacggtggcgtcgacatcccgcccgtgcacgcctaccgctgcgccgacatcctcttcaacttctgcgagcgccgctgcactcccgccgcagttgctgctagcaccaagtagacggatgcatatgcatgccatcgttgccgccgtgtgtgccgcttcagagaagaactaaataaatgttgccgcgcgctgttgatgcgcgtgcatgcctctccttgaataaaccaatatttctataattattgtagtatgtccaactatcttaagtttgaaaaataaacgcgctgcttcataaaaaaaaaaaaaaaaaacaaaaggacaaaatagacaaaaagagaaccctaa

SEQ ID NO: 76207 - DNA, 211 bp, Zea mays
  Clone ID: MRT4577_169528C.1
ccactggtttacgtttgcgcagccctaaacccaagggaagggtgggctctctcggttgctccgctccccaccctccaaagctcctcgaccagagcacctccaaaaccaaagccccagagctccagcagggccaggctctcacccatatcaaagacgaggcccaggacctgcctgccaacgcttccccagagcccatgaacatcgtcttgag

SEQ ID NO: 76208 - DNA, 366 bp, Zea mays
  Clone ID: MRT4577_169529C.1
caccgctgccaaagtagccaccaatgtcatcgttggaaaaccagacgtcgctatctatgcctaagcaagtctcaaacgttgtctttcttccctagtgccatccctcctaaaaaccagcacacctgcaacacgtacacacacatgccaggcttctaaaagggctggccccgattacagatggactcatgtgccctccacccaaccaccgagcacacacacacactttggactgcgcctgctgacacgctgacgcggtccatctcattgacctcgttctggtctgcatgttgaggtggactgggcattgagccttgacctgccacactttgcttctgtgtgcctcctgaaggcctgcggcaagttgct

SEQ ID NO: 76209 - DNA, 268 bp, Zea mays
  Clone ID: MRT4577_16952C.1
tcgtttatatttaccaaacataaacataggggaggggttgaattaaaacggggggggggctctcaacgtctacatcctgctggcttcaaatttgactgcatggcccatgccctcccatggcacaccgatggctatgtacagacacacgcactaaatgcttatccattacatcaaatgcggcaaggcatacctgcatgatgcgctactctaggaatacacctgaatacatcacatggctaactcctgctcactactcgatcttaaaaga

SEQ ID NO: 76210 - DNA, 345 bp, Zea mays
  unsure (1)..(345): unsure at all n locations
  Clone ID: MRT4577_169530C.1
tangttgcacgncgaggacnttcgtggtgcngctgtctngatgaggcgccggggcccccataatccatactcggagtccattgtgggtgcttccttggaagtgatccacaaaaagaggagtggcaagcctggagtccgatatgctggtggggaagccgttcttcgggagatcaaggggcgcattgggaagaccaagggtgacatgaaggctgaggagggtggggtggggaagtcccggaagggcgatacgaagggggctgttgggaatgactttggaaggccccaagctgataggtgttctgagctggcgctgtggtggtgctggggtgcgtttcttgacctggt

SEQ ID NO: 76211 - DNA, 302 bp, Zea mays
  Clone ID: MRT4577_169531C.1
tgtcctaattggattattaatcgtgactaatcgacgactaattggacgaccaggtttctgatcactctgatccatctgagtacctaatcgagtgctaggtaccgatcagcgcgagtaatcgcgacctaataacactgcttcactgttatttaataccgtgcatgaggacatatgttggggtaatttcagaacgtgatatgctttcaatctttttttttctcgaacgcacaggagaactgcgcatcattatattaagagaggaaaggtccaaagtggaccgaaatatagcaccttgagggcag

SEQ ID NO: 76212 - DNA, 304 bp, Zea mays
  unsure (1)..(304): unsure at all n locations
  Clone ID: MRT4577_169532C.1
ggccctgtcggtactgaagggcgggggccccacccaatgatcaccgagccnnanncccacctggtgacccctaaccaatgcagacatgggccaagtacaactgatgtaaaccgcctgtccaaatatacccaatataatcccacgatgataaacctgttccagaaccatgaagaatctaacggcagatccatctacacaattgcacgcgcacgatcacaatcgaggaatataatcctctatatctaccatgccaaaaaaaacatatgtacacagcccatgatcgaaacaacctagggcccaaccc

SEQ ID NO: 76213 - DNA, 278 bp, Zea mays
  Clone ID: MRT4577_169533C.1
ggggaaagaaccaaaatactttaaaaaaaaattacattttacccctcccaaaaaaaaaaaaaatttttaaatttgggggcaaacgggttaaaatgtttgtttttcggcaaaactttgggtatttccaaattttcgaaggtctaattgggcgccatttttaacgacaaaaaaactttgcttaaaaaaaaaaaatggaaccttaaaaatttggggcggtatccaataattaaactggggcgaaaggaataaggcccaccgatcggtatgcccgctctggc

SEQ ID NO: 76214 - DNA, 399 bp, Zea mays
  unsure (1)..(399): unsure at all n locations
  Clone ID: MRT4577_169534C.1
gtactctcccatgagaaccacagtaagtatccttttaataggggaggggcggactacactcatctctngcctgcaaggtgactctcctacttattccgcaataacgccgtatgttgggtgaagtaagaacgtcttttctttctcgaaatcacaaaataactgtttttttttctcttaaatcagtcaacgagatctactctatcattaacacacacatactgctaatcatgattattcctacttcctacatcttttttttcccatgtatatccacaataatttttttctacttctactttaactacatataatattctctctaacattttaacattaatgaattttttctagtttatactttaatccaatgtttttttaattttttttattaattatatt

SEQ ID NO: 76215 - DNA, 446 bp, Zea mays
  Clone ID: MRT4577_169535C.1
gggggcaaaaacaggtccctcagcatcaccattataaccaaagaggtccacacatctccacacagccccgatccaagggcgcgggaacggatcaattccccatcagcggagcccccattgaagcgcgccaaaatttcgggtgatgaaaaggggaacccatcaaacttgggaaacgcggcgaaaccccatgtttttggtggaaaaccccgggcccgaagcaaaaaaccggggggcggagcgggccaacaggagcggaagcaacccctaccggaaccccgaacaagaggagggaggaaaacccggggccaaaaacatcaacccccgggcgaactcctcccccgggacccaaaaatcatctttttattattgcctggcctgccctgcgagcccccccatcatgggaaaggccccctcctttagggatggcacaacttttttctcttttt

SEQ ID NO: 76216 - DNA, 167 bp, Zea mays
  Clone ID: MRT4577_169536C.1
gtgaggggttcttgttcatcgccgtctatatgattaatggttcacatagttagggggtgtgaccagcaagagaatatacgtggttattgggcacaacgccagccttgaaggggttacaagcacgcgggggaggcgatcggggagatgagagaatacaggggaaggaa

SEQ ID NO: 76217 - DNA, 133 bp, Zea mays
  unsure (1)..(133): unsure at all n locations
  Clone ID: MRT4577_169537C.1
atgtagagtggaatngagagtacgtctgggtatactccataagaggtttagccaatagcccatcttaacctgtggtaccagagaatttgatgagatgttcttttgagtttacattatgatccatgtccttgtc

SEQ ID NO: 76218 - DNA, 554 bp, Zea mays
  Clone ID: MRT4577_169538C.1
cccctcgagtttttttttttttttttttttttttttttttttttttttttttttttttttttttttttttttttttacagccaaaacaaccaaagttggctacaaaacaaacaacgggtccaaaacatcgcccaacataaatggctacaaaacaaccccccaacccctatcatttaaaatggccccaatttggggaacccccgcctcttttttcacctaaaactaaacgggacggtggcccaaaagggggtggcccccacccccatcatcagggggaaaatcttcacccaggggggtttggccccctggcacatccttacccagttttggacaataatttccggggagggggggcccccccgccccataattacccgattcaggacccttttgggccttttaaacaggaaatatttccccggggttcttcacagtttcagggcggcacaaaaaagggcccccttggacggggtaaaacaaaccctgacccggaaaacccttcggttttggaagctaaggcttcacccgttgggcgctgggggcataaccccttt

SEQ ID NO: 76219 - DNA, 417 bp, Zea mays
  Clone ID: MRT4577_169539C.1
aaattggattatataatctatattaagtaagctggtaggcacccaccctcaacgtttcacatcttgacgaagaaaaaaaagatccatttttccaaacacccggctgcaaaacaaaagtgaacccccgcgatgcgaaaagaaaccaaggcacgggcagctcaaaaacggtgcacacagggaacgtaacacatctatgctagaacatcaaaacctgacttggggggtccatatacccgattttaaatacaacccaaacctggacaaagtgtaacgagtccagaatggaccactcatggggaagcagctcctacaaaaaaagaagttaccgaatcaaggttggaacacaccagaccagcccaaccccttgggaatgttgttggagcaagatgatcgagacaaacccatgccaactgttgc

SEQ ID NO: 76220 - DNA, 625 bp, Zea mays
  Clone ID: MRT4577_16953C.1
gggttaaaaaaacttcttgaacctaaagggggggggcgcccgaacaaagcccccttttttttttttttttaaaagctgggggggggcccatccccccctagggggaaaaattttgaaagcaaaaaatgcccgccctaaaactttagggccaaggggccctgaaaaaatccggaatccaccccacccgattgggggtggccctttggggggcaacccgcattggggcctggtcctcccaaaaaacaattaaagggggcctttgcccaatttctcccttgaatcccaaactttaacgaaaaaacattccgatttccaacccgcccgccccttgttttggggggttttccccaacaaaactaaaaaccctaccccactaaaaaaagggttcaacggtttgacacacccggggggggaaaaaacaagcccaccaaaaaaaacatccccaagctcacttggcacaccgacacaaaaaacaattgttggaaaaagggggccgggaatcaccggtttggagggccccccggcccaacacacaaggggacccacacacccgggggttttggggggaaacacccgggggaaccctattacacaaacctgactggaccgacgggcaaaggcccca

SEQ ID NO: 76221 - DNA, 260 bp, Zea mays
  Clone ID: MRT4577_169540C.1
ggtaatttttctacagatgaaccactgctagcacagtagtgatccaacaactgctgacaagatatttagcctccttaggcttattggtctgctgcggacatgctgatagcacaaccattatcacggagtgctcagaatctgctatagcaaccgtgctaactccgtacctatcacgagagacgtcttcggtatgtgaaaacccatttgttgaaccttataagatccaacacgctgtcctagatggcttgttacctttatca

SEQ ID NO: 76222 - DNA, 275 bp, Zea mays
  Clone ID: MRT4577_169541C.1
ccccaggctgctcaacatcggcaggtccagaacacatggcaccgatagaccccgaagggcgtatagcgaaacgcggttggagaggtggactctggtcggctccccccgccacgcctccgttctgatgatccgggtatcgatctcccctccccctccgagatgcgggacgcgggtaggaagatacagactggtctgccgccgtggatgacttgatcgccctcggcatgaaggtggaaagtctctgtccgcttctccgataccacattatagagaaa

SEQ ID NO: 76223 - DNA, 294 bp, Zea mays
  unsure (1)..(294): unsure at all n locations
  Clone ID: MRT4577_169542C.1
tactctcagaccatcaacaccagcccgaggagagcactccaatccttctggaggccatacanaccctcccggctctctcgaccgccaacaacccaacccatatctctcagtcccgagatgaaaccagcaatccaatgaaagaacatagactccggactgggcaacagcccactacccaacgggtcatatatacccagaagcgccaaaacataactcatcaccagagaccccacatcgaaaaacatgaacatttgaaactactaactctgatcgccctatttctttccacctaca

SEQ ID NO: 76224 - DNA, 298 bp, Zea mays
  Clone ID: MRT4577_169543C.1
aattcgcaacaatgcttttttttttacatttgacttgtaaaaaccgggaaataatttatatgacactgccctaaatgtgaacagcaggctaactgtcacaaagatgtctccattaaggggccccactaatatagattccctaagggtatgctacatcacataaaaaccttatgcgggggacgccccctgtaacaggggcctaaaaatagaatctaaacaccccgctccgaaaatattctggttgggtcgctaggaaatcctctctccactcgcctggggagataccggaataacctga

SEQ ID NO: 76225 - DNA, 608 bp, Zea mays
  Clone ID: MRT4577_169544C.1
ccggccgggaaaataaatatcaataccagatcaccaccacctgctcatagcaccaaacccagtagcagcacaggcgtccggcaagacctgactaagcgaactcctaaacctcatgctactctgacagcaacggatagagacgatccctcaatacatatggataggcgtcatccggtatgtcatctcaggacgaaacccaggacccatctatcgcccgccgacggaacttaatatgctgagcgaagtgatactaccaccattgccgacggaccaggacccatttgaggacagaaagaacatccgtgaacccaatacaccagtcttcaaggcacgcaatttctagagatatgacaacatccttgtgacgagcaatagatacacctcacaccaatattcttactccacctataataaaaaagactacgccgagactttcaaaagtcctgaataccacagcagaagatcgtggtgtgtacactgcaggatgagtacacgcccaatcactcaatgacacaccctgaccccatgccaagtaacctcagatgtgttctcgctgctctctcaggatctctatactaatgtcgcgaatcggaatcttagaaactcat

SEQ ID NO: 76226 - DNA, 316 bp, Zea mays
  Clone ID: MRT4577_169545C.1
tcttttacgcgttcggccaatcaataataaggcgcgagttagctctgtagctgtacgtcagcgtgtgactggtgttgatagagcaagcatacttactatacatggatggagcaaagagagagagatatatattgatctgccggaggtcaaattattattgcatgcatatgtgtactgtattagcacgacactattagacacatttattaatggtaccatgctatgcttgcaaacgcacccagccattgacttagatatgacactatagggtttaatcgtatcgtgctataatacggcgcctcatgggcgtgaaact

SEQ ID NO: 76227 - DNA, 423 bp, Zea mays
  Clone ID: MRT4577_169546C.1
aaaaccgaaaaccccggctgggggaaatttttttatagggggtttttttcatcggcatttttttgattaacccttcacattggtggggggtgggaccaaaaaaaaaattttcggggtttttgggcccaaggccccacttggggggtttacaaccccccggggtttttgattggggggaccacccccttcccctggggggagttttttagggtggaaaacccctttttcctccccatggcgtttattttggaccccccaaaaggaatttcaaaattaaaaaagttgaaaaattttacccaaacggtccccgcccttaacccccccctaaaggggttggccccttcccagcttttggggaaaaccccggggggcaaaccataatgggtgggggttggcctttttaaaaccccattgggggctttt

SEQ ID NO: 76228 - DNA, 662 bp, Zea mays
  unsure (1)..(662): unsure at all n locations
  Clone ID: MRT4577_169547C.1
ttgtctgcacattggtcactttgacaacgagattgacatgaacggccttgagacctaccctggtgtcaagcgcatcaccatcaagccccagactgaccgctgggtcttccccgagaccaagaccggcatcattgttcttgctgagggtcgtctgatgaaccttggatgtgccactggccaccccagctttgtcatgtcctgctcattcactaaccaggttattgctcagcttgagttgtggaacgagaaggccaccggcaagtacgagaagaaggtgtacgttctccccaagcacctcgacgagaaggtcgcggccctccacttgggcaagctcggcgccaggctgaccaagctcaccaagtcccagtctgactacattagcatcccagttgagggtccttacaagcctgcggcctaccggtactagtgtgtccagcacggctagcggctggcctgagcctgagtcggagcagcggcaccaacgggaactctatcaactatcctgtttcccttctattatcttacatgctgtctcttaggcggaggatttgttattatggttatgttttgagccttgtgagggttgggagaggcggcgtttgcttttgcccagaaataatggcattattattggttggagntgaggaggtgtgcttttccgt

SEQ ID NO: 76229 - DNA, 380 bp, Zea mays
  Clone ID: MRT4577_169548C.1
gtcacgctggtcctgaccattgccctagaaatactgatctttggggcactgatacataagccgacggggcaaacatagccgccccacgagaaatcatccacagagcagccccaaacgcatacccaggatcaacacgtggaagccgttggtgcctgcctcaaccgacggcaggaaggaagcacgggaccattctacactccgactggctatccacaacaaacgtaaagacctgagtgcctgaaaaaagagacgcccttttggcccagccaaaggacgagagcatgtcgcccgtgctgctcatgaaggacgaccaccacgggaggctcgactgctacaagcaggacttgaccagagggtgccgagccagaatcaaagatcct

SEQ ID NO: 76230 - DNA, 386 bp, Zea mays
  Clone ID: MRT4577_169549C.1
agaggagcaacaggggctttttgtccattggaaccaaaatgggtgcaatggacacgggcccccccccacacgttaaaaaagaaccacctgcacctgccggccgggggggcaaacgagggtggtgagtctgatcttaaaaacggggacgtagggatctaacccaatatctggtcgagggccccggtgtttttgagccccaacacaatgcccacccccaggattgggcccacggccccccaagccaacgtgttgggaaggggaaacccgggggggtcacccctttgcaggccggaatcccccccctccaatttaaacccccccgtttccttggggtttggggacggggccaacccaaacccccccggaaaaaaaataaaggggggggg

SEQ ID NO: 76231 - DNA, 175 bp, Zea mays
  Clone ID: MRT4577_16954C.1
gcccaggcccggtccaggtccaagcgacggcgcgtccaaggtcacggagattcaggtcaccgtcgccttcagccacttcggcaacgggctggtgcagcgggtgccgcgctggcgtcacgggttcttccaggtggtgagtaacgactacacacacgggctcaggtacgcgatcggg

SEQ ID NO: 76232 - DNA, 497 bp, Zea mays
  Clone ID: MRT4577_169550C.1
tgcatgctgaagtttggagagctgcactcgaagaggctgcaccagcttcataactttaacgatggacgataagttcctggagataggtgtggaccatgtcggagatcgtgctagcagctacaaggactccacaaacagcctctctgaaaatgactgccgatacgcaatctatgactagcgactactgctactggataagatgtccagaagagcaggatcttctatatcctatggatcccatcctgcgtctaggtgaatagccagatgctgtacgcaagctcaatccaaagattgaagagtgtgctcattggcattcatgctgaactcctggccacagatgcgagtgaaatcatcctccatgagatcaacgattggtgactctaggagcacagacatggtacagttttatgatcacgcattgttgactcagataatactagggatttgtatgccattgtacacttgatgctgcgaaagaccgctttggagatttgggg

SEQ ID NO: 76233 - DNA, 251 bp, Zea mays
  Clone ID: MRT4577_169551C.1
aaaaaaaaaaaaaaaaaaaaaaaaaaaaaaaaaaaaaaaaaaaaaaaaaaaaaaggaaggaaaaaaaaaaaagggccaagcttaaaaaagcgagcatgcaaaagtaaaagttcatgaaaagggggaactaatttaaaatggggggtcgttttaatacaacggcgggactgtaaaaactttggggttaccaaaatttttatctttgcaaaccaattttataagggtggctgggggaaaaaccaagaggtcgc

SEQ ID NO: 76234 - DNA, 673 bp, Zea mays
  unsure (1)..(673): unsure at all n locations
  Clone ID: MRT4577_169552C.1
gccggccgggccgggaccactcacatcccggacacctcttcctccccttcttcacccactgccactggcctggcctctcacgggccacatagccatggcgacgaccatctctacgcacatctccaaaccctgacaccacctcttctagcgctccctcccaggccccagctgctgcaagtaggagtacgtagtaagcagccgtacataggtgataggttcagtcaatagttcagagagagggtagaggtacgtaggcatatatagaactatacaagaacggtagagacagacagggcaggggagatgatgctggggaagagatccgggcgcccgtcgcctacggcgcgacagcacatgcgacggaccacaagcttgacggagttcgcggcgcccgacaaagtgctggcggacgtggcggaggaggaggacgaggagctgcagttgctgccggcgcacgcggaggcggccgagctggagggcccctacggatgggccatcggcggcgctgcggcggccgggcgggcggactggctggcggcgtaccgcgcccgcgcggcgccggctctggcggggctccgccggaactccgccgacttctcggccgncgagaccgccgcgttcctccgcgcctgcgggctctgcacccgccgncttgggccagggccggacacct

SEQ ID NO: 76235 - DNA, 1990 bp, Zea mays
  Clone ID: MRT4577_169553C.1
actagttctagatcgccacagccaaaaaaaaaataaaaaaaaaaaaaaaaaaaaaaaaaaaagagccttcaccgcgaagctcgccatgatctctccggagaggagttcgtcacaaagcccgcggtcgcaggcggtggcgggggcgccattcctgtggatatctgtcatggatcccgtcaagatgggcaccggcgtgcaggcctacatctcctaccgcgtcatcaccaagaccaacctccctgaatttgagggaccagagaaaattgttattcgacgctatagtgattttgaatgaattcggcacgagggaccgccggtgttgcaaagggctgatgctcccgtgccttgctgaagcaatttgactccgtatgccggccagagtcttcaggaagactgaaacattagcattggtggtaagaggaaaagatggccatgccaagagttccagggcagcagctcctgacgccaaggagtatgacgaatacgaggaggagcacaccgagccttttgcggaagctgcgacgacctttacattggcagcaactaaataatggactgagttagctgacaataggccatttgattctatcccatgtttggtgcatgtagtgtatcatgtttcgtttaccatctctattgtcatgatcagagctctggctatcttttcaagaccatgctgagtgtacagaacttggacaatctttggcggacttcggaaaggcgattaagcttttgggctcttgtgaaggagatttgatggaaaaggtgttttctgaagttggttcaaagtcagagatgttgtcaataaagctgcaaagagaggcaatcagagcagatggacagacacaattgagccatgaaatagctttggagctaagtcagaggagtgctgctgctggactaaggccgattggagcagtggtcttcatgcaacggggtgtcctgaaggtttgcttgaggactactgacagtacagttaatacatcagagattgcaaaggcatatggcggaggtggaaaacgaagttcgagttcattcactctaagaatggatgagttcaacatctggacttcagtgaactcatgaattgaactggagaggtcacatagtgttcatactgtgggaactcgcaaccagctcatctgggcatggattccctcagtggtgaacatgtgaagatggggtggtctttttgtgctccggtatgagaggaaggaaaacaaaatcttagtctaacctaccatgttgatatgagcttacaggagaataatctcttcgatatgaatgactggagagcaatttggaggcataatgcttaagccgttcaagagaagatttgatgcctttaaatgaaaggtttgctggtacatcaaaagacgtattttatgctctttctaatctttctccagtagacctatgtgcttaattttagagatgataagggtggtgcgggccgaagatctgtcatactcctaggggccaattatagcttacacttatgttgttattagttttgaatgctgaacatacatggagatgggtagctcagctcagcttggatataacttggtttctatccaaactaatactttgctccatagggaatgcatctggcaacggaaattgttgtcaagctccagtagcagaaaggatcatcttcaattattgtaatcctgctccttaataatacattcttggatcttgctctgggcttaaaaaatctgcatcaccaaattgttcctcgttgcgaacatttatgtaatacagaaccttagaaactggaaatgtttattccattccggtaatttgggaatgatctgtgttaaaatcctttttaagtgtcataccacgcactatttttctgttcctcaactctatcgatcccataacctatttctgttaactggttactaaggacatgtacaatcccataaccaattggtgggtatgcaatgcgtcaatgaaaaaaccatttcttcagtcctgtaat

SEQ ID NO: 76236 - DNA, 612 bp, Zea mays
  Clone ID: MRT4577_169554C.1
cacatagtgttcatactgtggaactcgcaaccagctcatctgggcatggattccttcagtggtgaacatgtgaagatggggtggtctttttgtgctccggtatgagaggaaggaaaacaaaatcttagtctaacctaccatgttgatatgagcttacaggagaataatctcttcgatatgaatgactggagagcaatttggaggcataatgcttaagccgttcaagagaagatttgatgcctttaaatgaaagggaatgcatctggcaacggaaattgttgtcaagctccagtagcagaaaggatcatcttcaattattgtaatcctgctccttaataatacattcttggatcttgctctgggcttaaaaaatctgcatctccaaattgttcctcgttgcgaacaattatgtaatacagaaccttagaaactggaaatgttcattccgttccggtaatttgggaatgatctgtgttaaaatcctttttaagtgccataccatgcactatttttctgtttctcaactctatcaatcccagaacttatttctgttaactggttagtaaggacatatacaatatcttaagagcttgtttggttaatgtcgttccc

SEQ ID NO: 76237 - DNA, 961 bp, Zea mays
  Clone ID: MRT4577_169555C.1
gcggaagctgcggcgacctttacattggcagcaactaaataatgtattcatgttccatttttctttttcttttgaaaaaaggagaataatatatgttttagctgcatctacatcgccagtctgcaccgcatctaatgatttgttcaataactggtagggactgagttagctgacaatatgacatttgattccatcccattttttggtgcatgtagtgtatcatgtttcgtttaccatctctattgtcaagattaaagctctggatatcttttcaagaccatgctgagtgtacagtttctatttatgccactgaaatctatcttctggaggaccgaggccattcaagtagagggtgcagggacagactcctgttcgccgtggtactcaaggcctgtgattgcgcgtgcgtctgcaaggatcactcttgggattcggcggaccgccggtgttgttgaccgctgaagctcccgtgcgttgctgagtcaatttgactccgtatgccggccagagacttcaggaagactgaaacattagcattggtggtaagaggaaaagatggccatgccaagagttccagggcagcagctcctgacgccaaggagtatgacgaatacgaggaggagcacaccgagccttttgcggaagctgcgacgacctttacattggcagcaactaaataatgtattcttgttccatttttgttttgtttttttaaaaggagaataatatatgttttagctgtatctacatcgccagtctgcaccacatctaatgatttgttcaataactgacagggactgagttagctgacaataggccatttgattctatcccatgtttggtgcatgtagtgtatcatgtttcgtttaccatctctattgtcatgatcagagctctggctatcttttcaagaccatgctgagtgtacaggtaatccagtccagaaaattgtgtttatttt

SEQ ID NO: 76238 - DNA, 562 bp, Zea mays
  Clone ID: MRT4577_169556C.1
caggataataatctcttcgatatgaatgactggagagcaatttggaggcataatgcttaagccgttcgagagaagatttgatgcctttaaatgaaaggtttgctggtacatcaaaagacgtattttatgctctttctaatctttctccagtagacctatgcgcttaattttagggatgataagggtggtgcgggccgaagatctgtcatactcctaggggccaattatagcttacacttatgttgttattagttttaaatgctgaaaatacatggagatgcgtagctcagctcagcttggatataacttggtttctatccaaactagtactttgctccgtagggaatgcatctggcaacggaaattgttaacaagctccagtagcagaaaggatcatcttcaattattgtaatcctgccccttaataatacattcttggatcttgctctgggcttaaaaaatctgcatctccaaattgttccccgttgcgaacaattatgtaatacagaaccttagaaactggaaatgttcattccgttccggaaatttggcccatgatctg

SEQ ID NO: 76239 - DNA, 767 bp, Zea mays
  Clone ID: MRT4577_169557C.1
cgggatcaaaaaaaaaaaaaaaaaaaaaaaaacaaacgcgaacaacgcccataaaggggcagcttctgatccgagctcccgtcccgcttcgtggtcacttccagtcctctcgtctcccgggctcccggcccttctcgggtcgaccacacctcaccgccgcgtacctcgctccagtccagtcctacctggacggcctgccaacacaaccaagagggcatttctcagttctcaccatcgtcccatggcgtcgacggagatggagatgggcgtcgtaggcggcggcgtcaatagcagtggaggaggcagctgcggcgggctggtggtgacggagctgagccacatcaaggagctggtgaggcagctggaggtgcacctcggcgggtccccggacctgtgcaagcacctggcctcgcagatcttctccctcaccgagcgctccatcggcctcatcacctcctccaacctcgacggcgcccggcggcggaagcgacccgcgggcgacgccggcctcgcctcgccgctctcggcgacgcccaccagcgacgtcaccgacgggcctttccagaccaccaagaagaagaggaaggtgatggaacagcggaggcagagggtgagctctgccggcggcgagaacccggtcgaggacggccatagctggaggaagtacggccagaaggagatcctcggagccaagcacccaaggtgctactacccatgcgcatctcgctcctcgcaggggtgcccggcgacgaagcaggtgcagcgca

SEQ ID NO: 76240 - DNA, 386 bp, Zea mays
  Clone ID: MRT4577_169558C.1
ccccgcgtccgccccgcgtccgccccgcgtccgaacgcctcctccgcttcgtctcctccctccccctcgccgccgcgactcccgccaccagcccaccacactattaattctgcccctcccccctcgtcctcttccacgtccacaactcccatcccacgtcgcagagccgttcctgtctgcgcctcctccctagacacgcgacgcagagcatatatatagcagcaggggcaggggcaaggacgaagggacgaaagagccagagccgccgccgccgccgccatgtccgtccgcgtggcgtccgtgccgtacctggagcagatggcgcggtgggagcggcaggtggagcggcggcagctgttcctccgcagctaccacttctcgcgcga

SEQ ID NO: 76241 - DNA, 225 bp, Zea mays
  unsure (1)..(225): unsure at all n locations
  Clone ID: MRT4577_169559C.1
gattaatgaaaacatccttggcttagttttgagancncccaanccggcgaacaaaaggatccaacccgtgtttgggccgctgaaatgtttatcacccgggcggaaaccttttgcacttagttgaaggaagaccttattaaaggggcttaaaggccaccaaacgaaccccggggtaaaacacccccgggaaacctcgctccttaatccgataaagaagcactttta

SEQ ID NO: 76242 - DNA, 379 bp, Zea mays
  Clone ID: MRT4577_16955C.1
aaatatccaaagctggctttgttgaagatcattcttcacttgctcttttaccaaatatagttgctggtctacaccacactggagttgggattaactattcacatatatatacttattttactgataaaacccaatccaacacgaatttactgactttgaattatttcatcgatcatgcaatcgtaatcaacttgtatgacatcgaaaagatctgacatcacaccttttataattagcttctagtaacaccacaacagcacccatctcttcttacagagtctcctcttaaccctatacctaacaggtaaaatataacataaataattttttaaactttcatctttactgctttttatgttgcttattaagctttcctttc

SEQ ID NO: 76243 - DNA, 1681 bp, Zea mays
  Clone ID: MRT4577_169560C.1
tcgagccggccgggaagcgtagtcttagcgggcagctctgatcgatttccgtcccgcttcgtgtcactcagtccctcgctcccggcctccctctcgggtcgaccacacctcaccgccgcgtacctcgctccagtccagtcctacctggacggcctgccaacacaaccaagagggcatttctcaccatcgtcccatggcgtcgacggagatggagatgggcgtcgtaggcggcggcgtcaatagcagtggaggaggcagctgcggcgggctggtggtgacggagctgagccacatcaaggagctggtgaggcagctggaggtgcacctcggtggctccccggacctgtgcaagcacctggcctcgcagatcttctccctcaccgagcgctccatcggcctcatcacctcctcctccagctccagcggcctcgacggcgcccgccggaagcgctccgggggcgagggcggcctcgcctcgccgctctcggccacgcccaccagcggggtgaccgacgggccgttcaagaacaccaagaagaggtgaacctcgccatccatcgctaatgctttgtcgttgattgctcaaggcaagccaaggcaatggacagacacaaccggtcgaacgaactgtgtctgactctttcgctgattactgctctttgaacccggccggctcgcaccacggggctggaacagcggaggcagagggtgagctcggccggcggcgagaacccggtcgacgacggccgtagctggaggaagtacggccagaaggagattctcggagccaagcacccaaggttagcacatctatctcactcaaacacgtattgttgatttggattggaaccgcgctctgtctgacgacctccgtcgtgccaaacctcgcaggggctactaccgctgctcgcaccgctactcgcaggggtgccaggcgacgaagcaggtgcagcgcaccgacgaggacccgacgctgtacgacgtcatctaccacggcgaacacacctgcgccccccacaggccggcggcggcggagcacaacccggacgcgcgcggccacctgcagaccctgagcgccggcctcacggtgaagaccgagggactgccggacccgccgcggggccggggcgccgccacgcccttgtacctctccgcctcctccacgccgccgtccacgtcggagaactggggcgtgtcgcccgcgacctcgggctccacccacgtcgcctccttccggccgttcgaggccgccgagtggcgggggcaggccgagcaccaggaagtggtgtccgcgctcgtggccgccatcgcgccgccgcccgccgtcgacagcctcgacgacctgctcatcgacatagatctagacgacatcgcgagcttcttcgcgtgacccgcgcgttgtagcagccgatgtggcgtagtatgtgaccgagccctctggctctgcttcctgaaactggaacagaacagaggagggaagagcaccaaagctctgcttcctggggtccatgcagatgcaggatgcaggcgtaaaaacctaggagatgaacaagagtagagactgcatttttttacccctctttttttgttaatctttttcctctttcagaggactgagggtagtgtttgtattgtattattgatttttaatgccaatgggaaaaataagatccttcgtgcc

SEQ ID NO: 76244 - DNA, 358 bp, Zea mays
  Clone ID: MRT4577_169561C.1
gaaaacaattagcacagataggtttaaaatatcggaaatatttggtatgaacggggatcaaaatcctcaaaaaggactggcccaacagggaggagccacagatttaaaaactacagggctttttaacacaaataggtggaacaggaaagccctactagttcaaatatagatctcaaaaccaagaggggaacaagggctgaaacctagggggggagcaaaaaggggcccccggggggcttgattttttttttggggaccttggaaaagaacttggccttgaccacaaagggcttgggggggaggacccccttcccgagcaccttgaagtaaccgaactgggtgacatcgatctgggggg

SEQ ID NO: 76245 - DNA, 1721 bp, Zea mays
  Clone ID: MRT4577_169562C.1
ccccgcgtccgcggacccgtgggcccgcgcgtgggcggcgtccctcgagagtcgaccacctcgacggccggccaatatagcaacctatacagggcattctcatctcatggcgacgacggagacgatggagatgggcgtcgtcgtcgacggcgtcagtagcaacggatcaggcggctgcggcgggctggtggtgacggagctgagccacatcaaggagctggtgaggcagctggaggtgcacctcggcggctccccggacctgtgcaagcacctggcctcgcagatcttctccctcaccgagcgctccatcggcctcatcacctcctcctccagctccagcggcctcgacggcgcccgccggaagcgctccgcgggcgacgccggcctcgcctcgccgctctcggccacgcccaccagcggcgtcaccgacgggccgttcaagaacaccaagaagaggaaggcgatggaacagcggaggcagagggtgagctcggccggcggcgagaacccggtcgacgacggccgtagctggaggaagtacggccagaaggagattctcggagccaagcacccaaggggctactaccgctgctcgcaccgctactcgcaggggtgccaggcgacgaagcaggtgcagcgcaccgacgaggacccgacgctgtacgacgtcatctaccacggcgaacacacctgcgccccccacaggccggcggcggcggcggctcagcacaacccggacgcgcgcgggcacctgcagaccctgagcgccggcctcacggtgaagaccgagggcctgccggacccgtgggcgccgcggggccggggcgccgccacgcccttgtacctctccgcctcctccacgccgccgtccacgtcggagaactggggcgtgtcgcccgcgacctcgggctccacccacgtcgcctccttccggccgttcgaggccgccgagtggcgggggcaggccgagcaccaggaagtggtgtccgcgctcgtggccgccatcgcgccgccgcccgccgtcgacagcctcgacgacctgctcatcgacatagatctagacgacatcgcgagcttcttcgcgtgacccgcgcgttgtagctgaccaagggtaggaaatcaaatcaaagcagccgatgtggcgtagtatgtgaccgagccctctggctctgcttcctgaaactggaacagaacagaggagggaagagcaccagagctctgcttcctggggtccatgcagatgcaggatgcaggagtaaaaacctaggagatgaacaagagtagggactgcatttttttacccctctttttttgttaatctttttcctctttcagaggactgagggtagtgtgtttgtattgtattattgattttttatgccaatggaaaaaataagatccttcgtgccaaaaaaaagccgccgccgccgcgcagttcgagttcgagaaagtcatgtcagcgatggacagagccgacggcgagtttctcgaggacctcgacatctatgtctcaagcttcttagcgtgatctgctggatgtaatgtaaccgatgaacgctagggaatgggaatctgaggcagctgtcactgttaccatgagttgctctctgccgtttgtccaggggcagagcagggaagaacacatgttcttcctcggcccgtcccgttgtaaaccttaggaagtgagactattgaatgtcccatctctctcaaaaaagagg

SEQ ID NO: 76246 - DNA, 1285 bp, Zea mays
  Clone ID: MRT4577_169563C.1
cattgggtacctcgaggacggccggaaatcctcccagcaaacccccccgcctgggcaccgcattgtcccaacccccgcccaccctctagctcgggcgcagcccccctctcgcgggtcatcgccgcaccaccgacagccatccgtcagcgcttcagattcccaatcccgctaccagagcgcccacagcctgcaagtcacgagcaccgccatcactcgtgccggatctaggtcgtccaggtaggactggactggagcgaggtacgcggcggtgaggtgtggtgacggagctgagccacatcaaggagctggtgaggcagctggaggtgcacctcggcggtccccagacctgtgcaagcacctggcctcgcagatcttctccctcaccgagcgctccatcggcctcatcacctcctccaacctcgacggcgcccgacggcggaagcggcccgcgggtgacgccggcctcgcctcgccgctctcggcgacgcccaccagcgacgtcaccgacaggcctttccagagcaccaagaagaagaggaaggtgatggaacagcggaggcagagggtgagctctgccggcggcgagaacccggtcgaggacggccatagctggaggaagtacggccagaaggagatcctcggagccaagcacccaaggttggcaggcacacgcatctcgctcagacagccagagcagcagcggcggggctgggaggacgcgcccacgccctttctcttctcctccacgccggcgtgccttgtgccggagcgcagccccttctccgcaccgtccacgtccgagaactggggcgtgtccccggcgacctcggactccaaccacgtcgtctctttcccgcctttcgaggtcgccgccgccgctgccgcgcagttcgagttcgaggaagtcatgtcagcgatcgacagagccgacggcgagtttctcgaggacctcgacatctatgtctcaagcttcttagcgtgatctgctggatgtaatgtaaccgatgaacgctagggaatgggaatctgaggcagctgttaccatgagttgctctctgccgtttgtccaggggcagagcagggaagaacacatgttcttcctcggcccgtcccgttgtaaaccttagggtgtgagaatattgaatgtcccatctctctctctctttttcttcggtcgagggtttgcaaggaaaacaatttcgtaatagtgctgtcagttcagctaaacatgtgagtttctcgtgaatttaaacatttttccaaaaaaaaaaaaaaaaaagcggcc

SEQ ID NO: 76247 - DNA, 1424 bp, Zea mays
  Clone ID: MRT4577_169564C.1
gccggccggtccgggacggtcacacacaccccaacccagccacccaccacctcccccaattgcctcttctcttctcccagcagcagccgcgacgcagtcctactcctgcggtgcctccagtttcgcagcaccgttgccacacatcgccaactaacgccatcgatcacccggcggcctcccagagtcttgccctgccatatccgaacctgctcctacagctagccagcaacacaaacagaataggtcggtcggtcgatcgatcgatggccagcgttatcgacggcaatggaggcagccggctggtggtgacggagctgggccacctcaaggagctggcgatgcagctggaggggcacctcggcggctcctcgccggacctctgcaagcacctcgcctcgcagatctcctccatcaccgaccgctccatcagcctgctcatcaccgccacctcatcaagcccccacggcggcgcctctgacgcgccgcccttcatcaaggctactaccaagaaaaggaagaggatggacaagaagaggcatgaggtgagggtgggctcggccggaggcggcggcggtgaccatccggccgacgacggctacagctggaggaagtacggccagaaggagatccttggagccaagcacccaaggggctactaccgctgcacgcacaagagctctcagggatgtgcggcgacgaagcaagtgcagcgcaccgacgaggacccggccttcttcgacgtcgtctacctcggcgaccacacctgcgttcagagccagagggcggcagcgacggcgggtcgtcaggctgccgcggacgcgcaggcgccggtgtacgacgccaacctcatggtgaagaccgaggggccggccttggagccagagcagcagcggcggggctgggacgacgcgcccacgccctttctcttctcctccacgccggcgtgccttgtgcaggagcgcagccccttctccgcgccgtccacgtccgagaactggggcgtgtccccggcgacctcggactccaaccacgtcgtctctttcccgcctttcgaggtcgccgccgccgccgccgcgcagttcgagttcgaggaagtcatgtcagcgatggacagagccgacggcgagtttctcgaggacctcgacatctatgtctcaagcttcttagcgtgatctgctggatgtaatgtaaccgatgaacgctagggaatgggaatctgaggcagctgttactgttaccatgagttgctctctgccgtttgtccaggggcagagcagggaagaacacatgttcttcctcggcccgtcccgttgtaaaccttaggatgtgagaatattgaatgtcccatctctctctctctttttcttcggtcgagggtttgcaaggaaaacaatttcataataaaaaaaaaaaaaaaagcggcc

SEQ ID NO: 76248 - DNA, 714 bp, Zea mays
  unsure (1)..(714): unsure at all n locations
  Clone ID: MRT4577_169565C.1
gatttgttcatacaattagctgccccggttgcttcttctcgttagtttccagatcgcctcagcagcagcagcagtagctagcgatgaagcccttctcggggagcacggagagatgcgcccggacattctacgtcgcggtgctcctctccgtcgtcctttgggccctcatattctactccaccagcttgctgcaatccggcgatgctctcagcaagccgccggccttcttctcgccccgctctggccgtccggacccgtcgtgcgccggccggtacgtgtacatgtacgacctgccgccccggttcaacgccgacctcgcccgcgactgccgcaggctctcggcgtccaccgacatgtgcaggcacgtggtcaacgacgggttcggctcgtcgttcaccgacggagccggcggctcgctccccgagagcggagcctacgccaccgaccagtacatgctggagttgatcttccacgcccggatgaggcagtacgagtgcctcacgtccgaccccgccgccgccgccgcggtctacgtcccgttctacgccgagttcgacctggcgatgcgcatcgacaacagcaacatgtcggcgcggaacgcgctgccgcgggacatggcggactggctggtgcggcggnccgagtggcgcgccatggggggccgcgaccacttcatggtaggcagccggcccacatgggacttgctctgcgacc

SEQ ID NO: 76249 - DNA, 333 bp, Zea mays
  unsure (1)..(333): unsure at all n locations
  Clone ID: MRT4577_169566C.1
ggggggggggggggggnaaaacacacaaagttttttcctcacatgcagttcaaaaaccctcagttacctcaggaaacgttaaaaagacatacaccgttggacggcttgataaaggttcaagtgaagcatttttttttcacaacaaatacaggggggggggggggatctnatttcatttntcnattnncccncactagctcctgacctatcctaaatttctaatcttcactacaccattgtttcttttcattccatcttctcaagctcgcccatcctgtgtataattgcccttttgcttgttttttgggggcttccggggggggtgaactcgtc

SEQ ID NO: 76250 - DNA, 389 bp, Zea mays
  Clone ID: MRT4577_169567C.1
cagcactgcgcctgccgcgactggcccggcgtcgaccccgcccccgccaccgccccggctggcgtgaagaaggccgccagcgtcgctgacgacgctgggaaggcctccggcaccgccgcctccactcccgcgcagggcggcgctgcgcagtgagattcgcgccgcccaccgcgtggtgttctgttccctgaggatcggaacccgccgtgtcgaacgaacgtgtggtcatccatcgttgccccgtttgagcatatcaatccccgttgggtcgtgtttttcgggtctgagtggatttttggcttttgatcaaaaaaaaacaaaaagaccaccaaattacccttaatatcaaactttcaacaacattttcaaacaaaaaaaaaagggcggcc

SEQ ID NO: 76251 - DNA, 2139 bp, Zea mays
  unsure (1)..(2139): unsure at all n locations
  Clone ID: MRT4577_169568C.1
ccgcaagaaccccccgtctcccgctcacccgcgccctccggatcccgacacccccatggtcagcggcttccggccgggcgacatggtctggggaaagaagctgaaccacgccgcctggccgggcctcatctactccgccggagggaacggcaccggccacgagggccagcttctcgtatcctactttggcgacaaggccttcgcctggtgcgacacagccgagctcaggccctatgaaccctacttccctgtcgccgagctctatgacgacggcggcgaggatttcgacgccgccgtcgaggcctccctcgacgagttctccagccgcgtcgagtccgccctcgcctccgccgcccgccctttcgcccccgccgatttccttgcctcgctccatgatctcgccgcggatcgcatgggcttcaccaatagggtgcaggccgccgtcgtcaaggcgcatctcagagccttcgacgccttcagggctctgccggacccacctcagtacaccttggagctcggtctactcccagacgtcccgctcccgctgcccaatcctaaagctgccacggatgccgccttcagctcctacacataccccattccgagtttcaggaggggcaggaagaggaaggaggaactcatcaaggacgatgactccgatgaggactgggaccctagcaagaggggtgccaccgacttggattctgatgtggactttgactgcaggagaggatccagaggcaggggcaggggcggcggcggcacgggttcggcgcgtgagggtccttaaatggtgccgtgtgatgcagatgcctgcatggacgaagatgagattcaagacaaactggattagccgtcggctgctgagatgttgctgcagcttctgtccatcgccacggatcctgtaaatggcaattatgactctgctcctgtgattgttagcttcttctcaaagcacaaggactccgaggtgcctagtttatatgaagacaaagaactgattgagaattttggtggcaagaagggtaagaaaaagtccatcggaagcttgggcccagctacaaagccagaagccagcgatgatactgtggatggtcagaggggccgtaggaagtctgctgggagcttgtactcagctagaaaggccgaagattcatattggtgtgatattatcatcagcgatttcgatgacggagacagtgactatgacagtcacaagaggaagcggccctgtaacaggagcaccaataagaagatgaagcaggaggagccacctcaaggagccccatcatcgaatgcaaaacctgcagatggtccagccgcccttattctacatttcagcagtccagaagctattccttctgttgatgacatcaatagcatattccgtattcatggacctattgtggagcgtgagactgtgatcactaagaagtcaaagattgcaaaagtagttttctctaagagtgttgatgcagagcaggcacatcacagttccggaaagcgtaatgcatttggtccatcgcttctcacatctgaaattaagtacttgccatcggcacctcaggtttcttaaatgccgcagtctggactggtggatacgccgtggaaatgcgccatgaagcttggagcaacggagcataagttggtgtcactgactttactgaccaggtcacagtagtcactgagttgagtgagcaaattttaggctttctgtggttacatgcatccatttgactgattgtcgacccggagtttgttgtttatgttgatagtagattagattatgtagcatgatgtgcttcctcttatgctagcaacttttttttggtattgcctagtaattgcacagctgtggatctctctattatgtttttttatttgattgtcacgaggctagtgaagccgctttagtgcaagctcttgtgtagtgtgctgtggcctgtgctctacaaaatacggtatccatgcatatattgctaaaagatgttgtgtatgtgctccaataaatgtgatctgggcgatttcttgctatccattttgtgacgtcccgaacctgtttctacgctagggggtgttacgctttccagtcgtttattantttgccgcaggtttatatgctccacatgtctacgcatg

SEQ ID NO: 76252 - DNA, 1012 bp, Zea mays
  Clone ID: MRT4577_169569C.1
aatggcaattatgactctgctcctgtgatcgttagcttcttctcaaagcacaaggactccaaggcgcctagtgtatatgaagataaagagctgcttgagaattttggttgcaagaagggtaggaaaaagcccgtcagaagcttgggcctagctccaaagccagaagccagtgatgataaggatcagttcatgactgtggatggccagaggggccgtaggaagtctgctgggagcttgtactcagctagaaaggccgaagattcatattggtgtgatattatcatcagcgacttcgacgaccgggatagtgactatgaaggttgcaagaggaagcggccctctcagaacactaacaggagcgctaataagaagatgaagcaagaggagccacctcaaggagccccatcagatggaaaatggggctcctgcagatccttcacgcgtccgaaaacctgcagatggcccagccgctcttattctacattttagcagtccagaagctattccttctgttgatgacatcaatagcatattccgtattcatggaccgatcgtggagcgtgagactgtgatcactaagaagtcaaagattgcaaaagtagttttctctaagagcgctgatgcagagagcgcatatcacagttcggggaagcataacgcatttggtccatcgcttctcacatctgaaattaaatacttgccatcggatcctcaggcttcttaaatggtgcagtctgatggactggatacactgcgattcacagaggaaatgcaccatgaagcttggagcaacgaagcataagctggtgtcactgactttagagttaggatggctcactgaccaggtcacatcaagtcactgtgttgagtgagcaaattttaggctgtctacttggtaccggagttaatttatgttgaattattagttggtagattagattatctagcgtgatgcgcttccttttatgttagaaacttatctttttttgtattgcctagtaattgcacagct

SEQ ID NO: 76253 - DNA, 689 bp, Zea mays
  Clone ID: MRT4577_16956C.1
cggcgattcctcctatctctgcgcgctactttcttctctctctgctcctccggctccgcctgatccctcctagacagggatcgccatgtcggactcggaggagcacgacttcaaatcaaaggacgacgctgctacgtccaagacctacccgcaacaagctgataccgcccgtaagaacggcttcatcgtcatctagaaccgaccctgcaaggttgaggaggtttctacctccaagactggcaaatatggacacgccttatgccactttgccgccatacacatattcaatgcgagacagcttgaagatattggtccttcatcacacaactgctgacattccgtatgcgaaccgcactgagtatcaactgattgatatttctgaggatggatctgtgagccttcttacttcagatggcagcactaaggatgatcttagactcccaactgatgagactcttgcggcccatattagggaaggcatctaaagcgttaaggatcatgttgagactgtccagactgctatgtgggaggagcagatctgcgcgatgaaggatgttggcccccaggaacttccttggatttggatactgaaccctactgtatctcaacttaaatcggaaaagaacgtatacaccaaaggattgctaccgagacattcactggcttgaagcatggctttttgctatagc

SEQ ID NO: 76254 - DNA, 509 bp, Zea mays
  Clone ID: MRT4577_169570C.1
aggcaataccaaaaaaaattgctagcataagaggaagcacatcatgctacataatctaatctactatcaacataaacaacaaactccgggtcgacaatcagtactaaggatgcatgtaaccacagaaagcctaaaatttgctcactcaactcagtgactactgtgacctggtcagtaaagtcagtgacaccaacttatgctccgttgctccaagcttcatggcgcatttcctgaattcaccatatgaaaatttgataagaaagtgaatacagaattttggttgggaaggatcgaaggatgtgtaccacggcgtatccaccagtccagactgcggcatttaagaaacctgaggtgccgatggcaagtacttaatttcagatgtgagaagcgatggaccaaatgcattacgctttccggaactgtgatgtgcctgctctgcatcaacactcttagagaaaactacttttgcaatctttgactttttagggatcacagtttcacgcttcaca

SEQ ID NO: 76255 - DNA, 468 bp, Zea mays
  unsure (1)..(468): unsure at all n locations
  Clone ID: MRT4577_169571C.1
gggaaagccgggcgccgggccgggaccggaaccaaatcccgggccgacgagccctcccctcggcggccgccccgaccaaaaagggaggggttaatttaaaggacgggccgccccccccggagcagggcaacaaggcggaaccaccgaacagggggggaaagaacccgggcaacacacacagggacgggaccaaaagcccgcccaaaccgaacagggcaacggggnaacacaacaaagcagcccgccaacaggcaaanccgctccccagggccaaacaaaaaaaacggggggaaaggccacccaaccaaggcccgaggaaggcaacacaagcccccccgaaggccaacagaggagggagaaaaggccgagggccccccaagcaggggggccacgcgaaccaattttatcaaccagccacaagggcccggcgaaccgaaccaatgaaaccaccgcacgctggacgaagac

SEQ ID NO: 76256 - DNA, 366 bp, Zea mays
  Clone ID: MRT4577_169572C.1
ggggcatcttagaaacttggattgctacactattattaactacactgtggaacgaggacattgaggaatggtagctcccacgattggactatcactggcaggacataaacgtgcatgcacgagacagtccttcgagcgaaacaaaggcacgcaagttgcccacgcattcacagattacaagactacaagagtttttccaagtaacaggggacgctgatcaccggctaataaagtgtggaagtatcatcgggacatctgcaactaaaaatgcatacgggctggatttaaacgaggcaagcttcaccctaggatgcgttcaacaaaacgaagctcatgatcgaaacacttctgaccttagaagggaaa

SEQ ID NO: 76257 - DNA, 178 bp, Zea mays
  Clone ID: MRT4577_169573C.1
tccgatttaactcttgatcgaatatagcgtctgttatagcctcttcccccgctgcaacggtgggtgtgtttaacgactgcaaaacctactcctacaagttctttaatggctcttaatccctcttcaagtttagaaggcttcattccagacgatacatgcccaatgtatcttacacggc

SEQ ID NO: 76258 - DNA, 747 bp, Zea mays
  unsure (1)..(747): unsure at all n locations
  Clone ID: MRT4577_169574C.1
aattcggcacgaggcaagtctgaacatgggaattgtagaagttcaaaataccactgggaaactatctgcaaaatctgtggggaactctactgtacgtgctgctgttttagcaaatggaggtatcttagtctgtgaagcttttggaagagttgaagtggatatcccagtggctatgacattgaatactcaaagtgaacgtctttgtattggctgtagcatgccagtttatccatctctgcctaagggagatctattttccttctatgaaacttgccaaagttacagttggatgatagcagatgagaaggttgtgacattccaatcagctaaatcctggcgatacagacttgaccaaggactatattcagatggaaaaaagagtccatggttttccaatggcagcagcaaattttttatcagtcatatgcttggaaggtctgctggcaaaaccaaaatttccatttcagttgtttgtgatttcttgctacctggcacctctggatctgttgtatcatacaatgcctccaagatcattcttgtggttccagatcctccccttgcacttgcgctaccgatgacttggttattcccacccttctataccactatgagccttttgcctagatcagcaaattcccttggggaaccaaactcacttgacctgnnagagctcgtttggtattctctgctagggggcatggtaggataattgatggaaagtaaaatcagactggagaaaagcataca

SEQ ID NO: 76259 - DNA, 503 bp, Zea mays
  Clone ID: MRT4577_169575C.1
gggaaaaccggaattttcattaagggggaaccacaaaaatttcattacagatttgggtcccaaaacaaggacaaggcccccctttggtacttttttatcttaaaaaaaaaacaggggggacatggggaccatccccatgggacccaagagtttttttttggccccgcttttggagctttttttgaaaacggaacgggcccttaagggtcttcccccaggctttttggggctgggggaaaaagaacatcgaagctttcgcatcctcgagggggcaggggtcatttggggggtttttacccccaaggacttcagcaaaaaaaaccttaaaggagcgcctttttttttccctttggaaaacctaaaattcggagggaccccggaggccctttttgggggggcttaaaaccacccccttgggggcattgggcagggcaagaccaaaaaaaatttttcctttaataagctaaaatacttcctttgggacaacccaaaatttttgggct

SEQ ID NO: 76260 - DNA, 288 bp, Zea mays
  Clone ID: MRT4577_169576C.1
aacatactccctcacatatatcaaactttccaatatctcttttcttaatacaacaacaatgggttgcgatgataatcttatttattatccattctctaaactaaaaaaaaatcaaacttctaaccaatcaacatactcatcttcaaatcaaacaactatatcttcacaccccacatcattttcttcaacttcaaatactaattcactatctaatcctttaatcttaaatacttactcttcccaaataacaacatattcctctacttctatcaattttatcaatactac

SEQ ID NO: 76261 - DNA, 133 bp, Zea mays
  Clone ID: MRT4577_169577C.1
ctcgaccgtgagcaaccactacatcgccgcctatgtctagtatgccgcgtttaataacgatgtccaggtgaatagacggaacgagcacgggatatacactccgggcaggtataatgcctggtacaacgtctga

SEQ ID NO: 76262 - DNA, 424 bp, Zea mays
  Clone ID: MRT4577_169578C.1
gcggggtctctttcgaaccattaggggtgcgcactactttcgccaccacggcgtcggttggtgaggatataggaggtcctgcatgaggactgatgtggtctccaattaaatacaaccggagcagccccccgtaggagtcgccgcctccagcaggtggccgagataaagtcccccgcctaagcccgcttcatgtcgctccccctgcaggagcacgtactccagtggcaaagtgatatcctccagaggcgacagacggggagtgctagggtgccatttatcatcgtacgatcccctctacgttcagcttatgcattcaagccaccgtcctgtatgctacttactgcggccggaggtcttagagattgtgaacaagatacccttcgaggatattcaagcaccactgtcgacgaatttcagcgattct

SEQ ID NO: 76263 - DNA, 812 bp, Zea mays
  unsure (1)..(812): unsure at all n locations
  Clone ID: MRT4577_169579C.1
ttagtatgccggcatatgagctatgcgtcacattgttgttctagctggatgttgcaactaaaggacatggtgggcttggtgttttcgttggtgtatgcataattagcgccatatttgggacagctgatgctaattgtcaaggcgcactggttggcgacctttctttaatgtgcccagagttcattcagtccttcatggcgggactagctgcatcaggggtcctaacatcagctttgagattagttaccaaggcagcttttgagagctcaaaagatggtcttcgcattggagctagtaagtcagaattttgtgaaccatttgcggatttagtaaagttattcattctttggtattaagaaaacatatcttgacacttccaaaataaaagcacatgattctgaagcaaatatgggaattgaacgagatggccaaaagcatgaggttatactatatgtgattatgttctgtgatcattttaggtatttatttgcttgagaacatatttgctatagatttatgntatttgcgtctgttttggccaaggcattatacttccatttgctggattgttaagatgggaattaatccactgatctcatcaacagtattgttcataactctcttccatttgttgtgtcgttgggtcctgttacaatcatgtctacaaattcaagtattcaacagaagaccatgatatttatctgccaaataacccgtctttcattacttggtgcagtactgttcttttcatcacatgcctgttcgagctggtgtgcctnctgctatacacattcgtcttcggcaactaccca

SEQ ID NO: 76264 - DNA, 542 bp, Zea mays
  unsure (1)..(542): unsure at all n locations
  Clone ID: MRT4577_16957C.1
ccggccgggaccaccgcatcccacaccccccgagctcagcttagctccactccagctccaatcgcagtcgtgaccagagcgagagccagctagctagagggccgtgaaaatgccgatcaataggatcgccctggggagccaccaggaggtgtaccacccgggcgccctcaaggtggcaatgagtcggntgatgggcggacacgcaagatctccgggctgggcgccggcatgagaggctgccgacgctgagcccgtcgacggaggtgagcgcgctgttgacggacctggtgccggcctgcatcccgggcagcaccgtggagcgtggagcgccttggcccggagctgcagcgcatgcgcgcgagcctggtccgtcggtgcgccgacgccggggcccagctagaggcgcactactcggacctggtggcgggcttggaggacagcctggctggaccacctgtcgctcttgccctacttcggggactacctggtgctgggctagccggagcacggcctgctggcgcagcacgttccggtcccctcgc

SEQ ID NO: 76265 - DNA, 305 bp, Zea mays
  unsure (1)..(305): unsure at all n locations
  Clone ID: MRT4577_169580C.1
gcctcctgctancaagctatatacctacatagtgcagccatggcccccaccgtgatggcctcggccggcacctccgtcgctcctttccaggggctcaagtccaccgccggcctgcccgtcagccgccggtccaacggcgctagcctctgcagcgtcagcaacggtggaaggatcaggtgcatgcaggggtggccctttgagggcatcaagaagtgcgagaccctgtcctacttcgccaccggtcaacacggaggccctcctcgagcaggaggactacctggtccgctgccagggggcgcctggcc

SEQ ID NO: 76266 - DNA, 239 bp, Zea mays
  Clone ID: MRT4577_169581C.1
gggccgacccacgcgtgcgaaagggtaaatgaccatcaacccctacttctatgttattaaacacaccaacacggggacggtttgtataaaagactacatggacgacacaccacacttaatcaacattcatactggtaacgtgacggaccaattcactcacttcgatacacttatcaccaccaggaccagcattacaatcatcccctgccacacaaggatgaaggtcagcatgaacccca

SEQ ID NO: 76267 - DNA, 380 bp, Zea mays
  Clone ID: MRT4577_169582C.1
ccacgcgtccgcccacgcgtccggagggttctggtgacgacggcgatctggacagtgatgtcatcggcagccaccgtacttgcgccacgtcggtgccagaggtggatcgcttctacgccgcgttggaaggccccgagctggaccaactcaagccgtcggaggacctggtgctgcctgcggaccggacgtggccgttcctgctgcggttcccggtgtcggcgttcggcatctgcatgggcgtgagcagccaggccatcctgtggaaggtgatggcgctgtcggtgccgaccacgttcctgcacgtgacggccaaggccaacctcgcgctgtggtgcatctcggtggcgcttacgtgcgccgtcaccgccgtgtacgcgtgc

SEQ ID NO: 76268 - DNA, 700 bp, Zea mays
  unsure (1)..(700): unsure at all n locations
  Clone ID: MRT4577_169583C.1
atatgcggagcgtcgtccggggaaggatctggccctcgaacttgagcaacacgtcgtagccattgggagtcgcaatctcggtcagcagcaaatacagatcgaaactttgccaaaccggtgccatgcgagcttcacgccggaacatagatctgggggtgccggcccccaaggaggtctataactaccgcgtttatgttctcgctctcatcagcagtatgggtgcggtcatgttcgggtacgacctcggtttcatcggaaccgttctcgagcttgagtcgtttcaacatgactttgggctcgctgacaagactaaatctgagaagtctgccttttccgccaatgttgtatcgcttctacaggctgggtgtatcgtcggctccctcggggccggcccgctcagtgaccggtttgggagactcgtcacactctttttcacagctgccttctacgttgtgggatcggccatacagaccggcgcgcacgggtccgagggcctcatgctcgctggacgagcaatcggaggcgttggtgttggtgccgccagtatgatcgtccccctttacgtcgccgaggcttcccctccgcatattcggggtagactcgtcggtatttacgaaatggcggtgccnatggggacggttgatcggggttctggatcaactatggacttgcgaacaacctcccagcaacttcgtcccaa

SEQ ID NO: 76269 - DNA, 698 bp, Zea mays
  unsure (1)..(698): unsure at all n locations
  Clone ID: MRT4577_169584C.1
ttctcgccgccgcaatcctctgcagccacctgagtcgtcaggtttattcatggctcggctgacgcggaagcacgattgtccattcatcgccttcaatttcttcttcattttctctgactcctgacgatagaaaccaatggatccttctgagccttcctaaggtttatactcaatttgtcttccctgcttgtttatgttttaatttgctttaaaaaaacgcgaaaggaaggcaggatttttgccttgttgatgtgatgataaacctggacagaaacttcggtgttgaccaaaatttcagactacaattatctgatcaactgcaaaatcgtgcctttctgatagtgaatttgaccaactgcaaaaatccagaccacgatttttatgatacgtcacaagtttctgagtgtatttcaacgagcgacgattcaggcagcccctttgtccgatctcaatggcaatggaggtgttgcgttgctcggagatagaaatcttttggtcttcaatcggctgaaatggggaggcccgcctcccctcgctgaggctggtctagtaagtctctgaaagtgctctcgactaggcaccttttttgctatttgaatttaaataaatgaattgctcatttgtacgagcccgtgcttacacagaaactataataccattggtaactcanaaaaaaaaaaaaaaaagcccctagggcc

SEQ ID NO: 76270 - DNA, 457 bp, Zea mays
  Clone ID: MRT4577_169585C.1
atctggcaacattcccatatttattcctcaaagatataaacattattggaacgaacaccccacaatattgcgagcccacgtgagagctacgccattctggatttgcacgcgcacagtacacatgctgggggttgcaccccgcgccgactcgctttaaccatgggagctagtactgggcgccgccggaaaaaatcctgcactcctggggctcccacagccggcccatcatcggcaaccccgggggggactcccgggccttcctaagccccacacgggcgagccttgccccgccaccggggggggcggtacgaccccgtcctcgggggggaaaccggttggggccctgtttttttaaatggccccccccccgcgggggggggggttttgcccagggggccccccccccccccccagtacagagtccccggcgccgggggtttcgcgggggggggggggg

SEQ ID NO: 76271 - DNA, 386 bp, Zea mays
  Clone ID: MRT4577_169586C.1
aaaaaacaaaaaaaaacttcaaaaaaaattataaaaaaaaaaataaacaaaaaaaacaaaggggacattttacataaaaagcgggtaccaccaaaactataaacaaaacacttgaatattgaaaggctaccacgtttctcgaggtccggatcatggtcaaaaaccatgatcctaaccgttcattctcatgaaggtctaattgcaattctagcgcagtcacttttcacagggatgattgctaaaactctccatgacacctatttcaatgtcttgaaatagcattcacttctattatgatgcacctatgtagataaggtcccagcgcatgtgacttttcaactgctgactcatataattgggaatagtacccccccttatggttgcct

SEQ ID NO: 76272 - DNA, 255 bp, Zea mays
  Clone ID: MRT4577_169587C.1
ggaatctggaacccaagggcaactaatcccatcctatttaactttacaaaaccatgcccggggttttctttgcgcccccacccaaaatcaccataacggttgggcatttagcttggtgaacactcatattttagccacaaaaaaggggggccgacctttttacatttttggacaaaaaattgaaaacgcctcccgttatatataggggccctgtgtagaactaaaaaaataatatgtcaacacatccccctggtt

SEQ ID NO: 76273 - DNA, 250 bp, Zea mays
  Clone ID: MRT4577_169588C.1
ccggggacgcctctcccacacagccgcgccgaacgaccggcccacccaccagaaaagcacgggcaaaaagacccagcccggagagcaacaacccggcacggcacgcagacagagcgggagggcgccaaggaggcgaaggacgacacgccagacaaggaacgccgacagccgcaagcgccccgccaaagcggacaacaagaagcgcgagggacgcaacgccaagaacccgacgcggccggccgacacaaac

SEQ ID NO: 76274 - DNA, 422 bp, Zea mays
  unsure (1)..(422): unsure at all n locations
  Clone ID: MRT4577_169589C.1
tttgtacaaagaactgaaacagaagctccaatcttcttcaccacttgtaagattacttgaactgcatatggctatggcctatggaatggatgagagcataatccttaataaaggtgcagcttagccatgccatatcaattctaggcaagagacacgccgcaatcattgttgcatatgcagccacttcagtcggcggcaggattggtgttcccgatcccagtagcagcacgcaagtctggagtggcttctggccaccaattttccttgccctagtatttcagactatgctgcttgcttgttgccacctagtgacattcagtctgtattctggaatcatgataatggcatctcttttttaatggggttaatttctgtaaacttaattgcactatatatatatatatagntgtatatctctgggt

SEQ ID NO: 76275 - DNA, 418 bp, Zea mays
  Clone ID: MRT4577_16958C.1
tggacagcgctgcgccgcggccagctcaaggcgcaccagtgggaggaggtggctgccaaggttgcctcacgatgcaccgccacccctggggtcctcgcccaccgcagcacgggcacccagtgccgctacacgctcgaaaagctccgcaagcgctatcgcaccgagggcgcccgtcccgtcacctcgctctggccctacttccgccgcatggatctcctcgaactgaggccactcgccgtcgcgtcttccgcttacccggccgcgactggttcaccgcctgacgccgacggcgaccaacaaggataggaggaatactacgaggtggaggaacacgaagcggaataataagacatgcacgacgcaaacgagcaggatgaaaaactcccccaacccaagaacaacacccggagcatcaacg

SEQ ID NO: 76276 - DNA, 293 bp, Zea mays
  Clone ID: MRT4577_169590C.1
ccaacccttcggcggacttttgtttctactcgtgcttcattgcacaggcactctggcttgtccgttgctggtttggcagcacatgtaaaataaaatgtttcaaggaccaaatcacaagctgtcagtgatgaaaaggtactatggaaaacccatttcttgcaaggaattggcacatcgtgtgtcaagttatgttcatgtttgcacgctggactggtggctcagaccatctggttgtggcaccattctagcaggttatgatagggatagagcacaggttgatatgatatagtcct

SEQ ID NO: 76277 - DNA, 656 bp, Zea mays
  Clone ID: MRT4577_169591C.1
cctcgaggggccggccgggcccgggatttctactagtcacatacacttctgagagagactagtggcttcctatccaagtgtgcactagcatgtctaggcaaccagctaggtcgggcggcttgaggcagccatcatgtcaggaggacaagcaccaccatcttcttcaaccaccacaagaaggtactatggagtagccctgctcggcgagtaccttactccgagaccgaggtggtcaccgccaccggagtatggcgagtacgacaggtacgagaacgaggataatgagcacatgcacgagcatcacctcggagaggacggcggcatcgacgacggagacttcggactctacgataagtacgaggtgaatagtgacccgcgatgctcgcacgggcacaatatcacataggagcgtcgctgacgctgctgacgtcgaagaccggtgggtacctatgtccacgacaccacgagcatacatacaagggccactaagaagcctatgtagctatcggcgagaagtaggtaccaccacctcttcggctgaccgtactaccgtatcggcgctcgaacgagctaaataactccggctaactcgagcacacacctggttaattctgcactgcagtgcgtgcgtaatcttgatgttgcactataatgag

SEQ ID NO: 76278 - DNA, 453 bp, Zea mays
  unsure (1)..(453): unsure at all n locations
  Clone ID: MRT4577_169592C.1
cccctgggggtgttttttttttttttttttttttggttttttttttttttttttttttttttnttttaaccgcagaaaacaaaaaccacccttttccacaaacatggttcatcttaatgtacaaccccaactcaacatctcccacttccctgggggggggggggggaaacaaaaaaacacattcatttcccancatcaataaatccacttacctaccccctttcccaccccaaaaacaataaaatttcataacaaaccccttaaacttaattccccnaaaccaaattttttncttaaccccatccctttttttttacttnntcaacaattttntcaanaaattttttaaacttcccctttcccntaacaattnccttnaccaaaaancccaacattaaaaaaattnnaaancnncccttttttacctcctttaccttnaactnnnnaaaaccc

SEQ ID NO: 76279 - DNA, 515 bp, Zea mays
  Clone ID: MRT4577_169593C.1
cttacatgtattggcgattttaaagtaacatacaactccccatttattattagggaaaatgccatgcccctcatctccatcgccaaccgctggggggggggggggcccgcccccggcgcccagcggcatgatcgcgcccccccaaacccccaggccacgccgcccacccaggcggggggccaaccaccgccccccggccgcccggcgcaaaccccacgcacccctcaaacccgcccgggagaagagccccccaaataacctccagggcctgcgacaggaccggagacggcggcgccaatcaaatcgatcaccactggaacttccccttgacgagcacagccccatacaacacggcgggggggacccagctcaggtcctgcgccatgccgggcccctggagggcgcgccagctctccttgcagttcgagtacgtgccgaggcaacgcgagagcgcggcgatcatccggttcggctccgagcgggcgaacgaacaccccagcccggcgccggtgaaa

SEQ ID NO: 76280 - DNA, 256 bp, Zea mays
  Clone ID: MRT4577_169594C.1
atggtttatatatagagactcgatagccctcagggctatattcgggatttgcccacataaccctttattaggggttctcaacactcctatgtataaaacaccacgccggaccggaccacacgcacacgggggattaccaggtaccgttagcatagcaaggaccacgacgtgccgactgcagaaaagagcaactcaactcctcgggcttactttggcccggtctttgaggggcaaaggaaaaccaatcgagaggggg

SEQ ID NO: 76281 - DNA, 1124 bp, Zea mays
  Clone ID: MRT4577_169595C.1
actcctgtgcggcggtctacctcgaggccggccgggacactctccttttgtcaccttctcttcgttcccctcctcggctcctcgcgatccttctttactgcccgagagttctgactagccacatccagtcaagcagtaaaggcgcaccatggaggcggcggcggagaataaggaggccgagcaggaggagcagcagctaccgcacgcgcagaaggataacgcgcccgccgccgccgaggaagacgaagcggattcggaggagaccgagcgccgcaaccgcgacctcaagtccggccttcacccccttaggcacaaactcgtgctctggtacactcgccggacgcctggagcgaggtcgcagtcgtacgaggacaacatcaagaagatcatcgatttcagcacagtcgaatcgttctgggtttgctactgccaccttgcgcgcccttcttccctgccgagccccactgaccttcatctcttcaaggatggcatccgtcccctctgggaggatcctgcaaaccagaatggtggcaagtggataattagattcaaaaaggcagtttcaggtcgattttgggaggatttggtgctagtggtagtaggcgaccagcttgagtatagcgatgatgtctgtggtgttgtgcttagtgtccgtttcaatgaagacattctgagcgtctggaaccggaacgcatcagaccatcaggctgtgatggcattgagggattctatcaagaggcacctcaagctgccgcacagctatctgatggagtacaaaccccatgatgcttcgcggcgtgacaactcgtcctacaggaacacatggctgagaggatagataaacctcatgatactcggcagcttcactgcgacggttctgaagcaaagagactcttttatgtaccaagaacgcagactattatgcaatgtagtactactactactactactcaaaagcccctacaatgtgacgcgcaacaattttactatctaatgtgtttttttggcaaaagcatttaagtggatatttagggtttccgtccgtatttggttctgttggtaattggcacagaaatggtaaccaggatattacgttgatgagcagtatattggtcacgccacac

SEQ ID NO: 76282 - DNA, 327 bp, Zea mays
  Clone ID: MRT4577_169596C.1
acggatgatcaagacagaggccagtcacaaggttatagcattaggtggtagcaagatgacttggctccacgcgacagttggaatttggatcatcgtgacctccttggtggctttcttcatcctagccagctccatcgtgtgccgtctctgcagtaggccttgaagagcgtatgcaaagtgcagtcgagcatggacgccaagaaaggcatgttaagctgtaagtcgggctgcaagaaccggtgatgagagggacaacccaagaaggggacgccagcaacgaggagtgcaactgggccaagggaaagggggtctacgacaacgtgttcc

SEQ ID NO: 76283 - DNA, 283 bp, Zea mays
  Clone ID: MRT4577_169597C.1
gcgtccgtgcctagaaactagtatctagtgttagcttctgtctaatgacactatgcaatgtgatcgggaacctggtggcttggttgcaacgcttgttattactgtcgtcagtaaaatttgggggcttcccttatgagatgctttcgggcaaggcctctgtgtcccaccttttttgtggcttgtggcgcttgaacctcgtctggtttgattgattagccctttaaaccgttgactcttgcattttacctttaaaaaaaaaaaaaaataagggctgttttttttt

SEQ ID NO: 76284 - DNA, 626 bp, Zea mays
  unsure (1)..(626): unsure at all n locations
  Clone ID: MRT4577_169598C.1
gcannnnnnnnnnnnnnnnnnnnnnnnnnnnnnctcccgggaaacatcgttccgtgtcattacaactggtctcaatcatccagactggtcataatcatacagcctcgctaaaacagccttcatgtataaaagaatgagaagtgtgtacatctgatatcgtttatactcacctaaaataatccgcctaacccatattcatcatatgagcnnnnnnntataggcccctccannnnnnngagaatatagcccagagaagcaaagtttgtaaagactattggctagcatcaaatgaagtacaccatcaaacatccatgttgaatgctttcacctacgtcagcaagaactgaagcttccnnnnnnntcaatgttggcgacatacagcattatttcacttctgctaatacaaaacttccaggatagtaagaacagaagtcagacctcttcaactttagcacacaagcgcttcaggtacttgtagcatactatcattgaggtaccccaagctgatgagctgnnnnntcttggacccaaccctctgtacaaacctttccatccatcttcagcaatcaatcttttaacaacttccccagcttttggcttattttcattatccataacctgcagcc

SEQ ID NO: 76285 - DNA, 2011 bp, Zea mays
  Clone ID: MRT4577_169599C.1
ccggctctctccgctgttcttgctgagttgttgtggacaaaaagagcacgaaagtgggtagagaaaacggggggcaagccaaccacactcgcagccagcctgcccgctcgcccgcccgccattcttgccgattcgagtcgacgtcacgcctccggcgcccccttcggttgtcacctcgggggtcgcggattggtggaggggaggatttgagcggcgcggccatggatacaacatctagggccgccaagatcccgtcgctccaccagacggagatcaactgggataacctcgacaagaccaagctctacgtggtgggcgcaggcatgttcagcggggtcaccgtggcgctgtaccctgtatcggtggtcaagacccggatgcaggttgcctctggggacgccatggggaggaacgcgctggctaccttcaagaacatccttaaggtggacggcgtgccagggctgtaccgggggtttcctactgttataattggggctgtaccaactaggattatcttcctcacggcgcttgagacaaccaaagcagcctctctcaagcttgttgagcccttcaagctgtcagagccggtgcaggccgcctttgccaatggccttgccggtctgtcggcatctacatgttcgcaggctatttttgtcccaattgatctgatcagccagaaattgatggttcaagggtattctggtaatgtcagatacaaaggtggaatagatgttgctcgcaaggtcataaaggctgatggcattagggggctctacagaggatttggactctctgttatgacctatgcaccatcgagtgctgtgtggtgggcgagttatggttctagccagcgcataatttggagtgcccttggccatttgcataacaaagaagaggctcctagccaattgaaaatagttggtgttcaagcatcaggggggatttttgctggtgctgtgacctcttttgttacgactcccatagatacaatcaagaccaggctgcaggttatggataatgaaaataagccaaaagctggggaagttgttaaaagattgattgctgaagatggatggaaaggtttgtacagagggttgggtccaagatttttcagctcatcagcttggggtacctcaatgatagtatgctacgagtacctgagtatgtttcgccttcccttgccaaatttatacttatgctcctggttcctaaatcactgtatcgaatctacttgcatgtgcatctgtagtggcatatgttactgcatcccctgcaggttaattttaagtattcaggcacttctcatttagaatttagtttatatggtgtcattcaggtcagttggcatctcttgtacactgcttttgtaagttgtatcataaatcctatgtgcaatgaaaattttgactacattaaaatttattgagggaacaaggtctatttatttttgttaatttcgtgacctgcgctcagacgattttggtgttcttactgtaacattcttttgttttcccacagagcgcttgtgtgctaaagttgaagaggtctgacttctgttcttactatcctggaagttttgtattagcagaagtgaaataatgctgtatgtcgacaacattgacaccaccggaagcttcagttcttgctgacgtaggtgaaagcattcaacatggatgtttgatggtgtacttcatttgatgctagacaatagtctttacaaactttgcttctctgggctatattctcaaaaaaatggaggggcctatatttttttgctcatatgatgaatatgggttaggcggattattttaggtgagtataaacgatatcagatgtacacacttctcattcttttatacatgaaggctgttttagcgaggctgtatgattatgaccagtctggatgattgagaccagttgtaatgacacggaacgatgtttccgggagatgctgttttgaccttttttttttcctcatgcggtttcagttaaaaaaaaaaaaaaaaaaact

SEQ ID NO: 76286 - DNA, 195 bp, Zea mays
  unsure (1)..(195): unsure at all n locations
  Clone ID: MRT4577_16959C.1
tccgcgagtcgatcgtcatccgagtagctatgattgcagtatatactagcgaganaatgtcatcatagagtcgcatatagttcagaggaatcatacgcgacatcgtcgtcagacaagagagtgcagacctgtgcatacttcgaacgagcggcctgcgctttgattcgagcactggtgcacatcgtcagagaacga

SEQ ID NO: 76287 - DNA, 862 bp, Zea mays
  unsure (1)..(862): unsure at all n locations
  Clone ID: MRT4577_1695C.1
cattggacccctcgaggccggccgggactcttaagacaaaaaagaaacgagaaaaaaagaagagagctgctctgatggatcgctccacctccctgctccggctcatcttgcttgctcttggcgcagccctggtgctcctcgtcgtccgctccgccttccgcctcccacgtggaatcgacacacccaccacctcactcttcgatgacgaagccaccgcgggcagcagctgcacccggttcgcgccgtgggggtgccggcaagccgaccggattaagcagaagccgccgtcgcacgagaacgacgtgccgcggcacccgctcgacccactgacgatcagcgaggtaaaccgtgcgcgcgagctcctccgcgcgcacccgccgttcgcatcgtcgccgtcgtccatgttcgtgcactcgctcgcgctcgacgagccggacaagcccgtcgtcctgagctggcggaagggcgtcgacccgctgcccccgcggcgcgcggtggcggtggtccggttccgcggtgaggccttcgtcctggccattgacctcgccagcggcgccgtgactcctctgcctgtcccagcttccgggtacccgaccatgaccatggacgagcaggtgctcctctgctacacgcctttcagggacccggcgttcaacgcgaccatccagcggcacggcgtccgcctgtccgatgtcgcctgcctgcccatctcgctcgggtggtacggccccagcgaggagaaccggcggctgatcaagatccagtgcttctccgcggagggcaccgccaacttctacatgcggcccatcgagggcctcaccgtgctggtggacatggacaccnagggaagtggtccgcatct

SEQ ID NO: 76288 - DNA, 2010 bp, Zea mays
  Clone ID: MRT4577_169600C.1
atgggcaagaacaagaagggtggagattcgtcgcaccactccggcaataagcggaagcatgagccaagtcctccctcggaggactttggtgacttcgagtactcggaggaggagttttccttcgagtccgaggggttgccggtctacgcctctcctccagtgtcgtccgatgactcgaatgactcccaggggatagccaccgaggtgtggacgtatatccgggccatcgagcgctccgtgcttgagggctcggatgggtcggaggtctccccagacaaggagaactcctccgactcgtccgagggggagtgcggcggtgacagcgacgacgagggcgacggcggtgatggcggcaatgacggcgacgacgacggcaacggcaggggcagcggcggcagcagcaaggccagtggcaaagcgccactggagaggggtctgactaccgaagctgtggttgctgacttcgttttcaagaatattcagcctttgaaagacagggcgtatccagcttatttgtacagtggtattactgactctacccgggtcaccaacaagaaaattcctactgaggatctggtgagccgactagacatgatcctgagggaatcttctgactcgacccatgctgaaccgatggctatcacgattggacaagagcttaacaaagcagcaaagacccgaaagcctgagggtacccgcccaaaacatcctcgccaagttagccgtctgactgcgcctgttgaagaaaagaagaacaagaagaagaggtggcttcggcaactgtcatgcttggaccaggatgtcggtccttctgctcctgtttgcgatgaagtgccagcagaggtcctttctaaggttgatcccaatggtggtgtccatgttgaagttattgtccgtacttttgatgaggacaaagaagaggaagaagaagtcccattgattcataagaatagccggcattacagagctctgtccgcccttgtcagccttcaagaactgtccataacggattttgaacaggcccttgaggatgtcgtacctgaggatatgctatcggagccgattgctgatggcatgatggttgtttgttctgaaattccagacatgggattagaggtatctcaagcagtgtctcatgcatcatcgactttggaaggcagtcttcaatgtcaagatgttggtcaggattgcccgactcacatggtggtgactgaggatccttcagccttagaggtggctgttgcagaaaacccagtcctcaagggtggtgctggcagtcatccagcccccgagggtgtcgccggtagtgatccggctcttatgggtagcgcaagctgcaacctagcccccgagggtgttgccggtagtcatccagctctggtgggtggcgcgagctacaacctagcccccgagggtgttcaaatatggctcggcggtgctctgagcttgacaaaaaacatcttcaacaacaagccgactcaacttgacggtactctaatcttgaggagaaatattctcaagcttaactccgagagggcggcacacgaggaggagagacgagcgcttgcagcttcacgtgataatctggataggttatatcgtgatgctagtaattccttaaccatcttggagaggaaccatcgctttactatgtcagatctggatcatcatcgtcgtgagctgcaagtgtcccaggatgaggtcctatggcttagacagttggtgtcaagcaaggattccatcatcaaagatctgcatacctccaagaagttagtcgcccaggagctagtggctgctcgactggctaccaaagtttcagaggaccactacaccattctgaaggctcagcgcaacaaggctatggacaaagccattcgcgcaggtcggatcatgatgaggaggcccggcgtagttgttcctgatgacattgtcgccgacgtcaaggctgcgccatatgcctcgagtcgaccttcttcctcgattgcacctgcgaaagatattgccaaatag

SEQ ID NO: 76289 - DNA, 498 bp, Zea mays
  unsure (1)..(498): unsure at all n locations
  Clone ID: MRT4577_169601C.1
agaacgaggcaaaaaaaaaaaaaaaaaaaaaaaaaaaaaaaaaaaaaaaaaaaaaaaaaaaaaaaaaaaaaaaaaaaaaaaaaaaaaaaaaaaaaaaaaaaaaaaaaaaaaaaaaaaaaaaaaaaaatttttaccttggccgggaaaaaccctaagtggcaaattgtggggaaaatcaaaaaaacccggcgggcgcttcgagctttcatttaaagggccaaaatccccctaaaagaaggggtttaaaaaaaaaatggccccggtttaaaaaacctggaactggaaaaaaaaaagctttccccaattaaaacgccttgccgtacatcccccttttgcggggtgggggtttnnggatgaggcccccccccatcccccttcccttnntttgcccnccctgtttgggtaagggaaccccccttttccggttccttaaacccgacgggtgtgggggtttcccctcgtggtacccttaccttttaaagcgcccaaacccccccc

SEQ ID NO: 76290 - DNA, 727 bp, Zea mays
  unsure (1)..(727): unsure at all n locations
  Clone ID: MRT4577_169602C.1
cctcaggcggcgggatcttttttcataaacgcaaaatctttcattctnctctgcatacactggtggcgaattcctacatcatggccttctctccccgccttgcagtctccgccagactggcatctcgtgcattcacttctgtccggcctgtagtccctcttactgctgcaagatgcttccactcaactcccatctccatgggagaacatcctgttgctactctaaacgaggagcttatccctcgccttcccccgtcatccccaacactctttgaggcaaagaagaaaaagaaccttacttttgaagccattgcaaaacatgtaggacgtgacgaagtcgcaatcgctgccctcttctacggccaagccatggcttcacccgaggatgtccagaaactctctgaggtccttgagattgacccaggaaagcttgagtcccagttgggtggattccccaaccgaggcagcactctcgatatgcctcctaaagaccctaccatttaccgtctttatgagattgtgcaaaactatggtcaggcttacaaagccgtcatgcatgagaagtttggagatggcatcatgagcgccatctctttcagcacaaaggtggagaaggaaactgatgacaagggcgagtgggccaagattaccctgaggggcaagtggttgccatactcgcgattctagaccattcacgatacctatccaattcaaattttttgcattca

SEQ ID NO: 76291 - DNA, 326 bp, Zea mays
  Clone ID: MRT4577_169603C.1
cctacaaacattcggcatgctcgctgctcgccattggtattttacagtgtccttctagaaatacatcacaccaacatacgccactcgaggctaaacacaccattatttgataatggctctcggggcggttgggccgattgacacgctctggaggtaacgttcgacgacatccagtcacgcagagctccttgacgacgggcatcgtcgtcggcacgttcatctggaacgtgacagcagctttcgcgggcccgctgcaaatcgagaactccttgctggcagccctgatagcctccctcatggcacagtgcacctacgactctagaaga

SEQ ID NO: 76292 - DNA, 702 bp, Zea mays
  Clone ID: MRT4577_169604C.1
gcacgagggaaggtcaatactccttgaaagatgctgtccaagtggctgctattgctgccatgtgtgttcaaccagaggctgactacaggccattaatggctgatgttgtccaatcgctggttccacttgtcaagaaccgttctaatcagaaagcttgcaaccccaacgtgcaatcgtccaagccacttgactaggaaagcgtgtgttcgatctgcagtttgtgctcgtctttctggaacccttctcgtctataactaactatggctgagacagatattcacaagctcctaaactatgattttgtctgcgggtgctcttctgattttgtaggtccgtctgagcaggtaggttgtctgaacggtcctgagagcttatttgggtttgaagggaagtttctgtcatgtacaattagctgcccgcggtgatggtgggttgttggattagtacttgtggttgtgtggagttcgtcatcagatggtaggtttggtatgagctggcagaactgtttgtagagtactgcactaatttccttttggcttatttatgttagggaagcagctttagaagatcattgtgcgcttgtacagaggtcttaactgttaagctgctaagtgttatgtatccttgccagtagtgagtgttatccttgtattgtagtattactaatgtatagcacgtttctggattaaaaaaaaaaaaaaa

SEQ ID NO: 76293 - DNA, 218 bp, Zea mays
  unsure (1)..(218): unsure at all n locations
  Clone ID: MRT4577_169605C.1
ccaaacgccacaacctcaacctccacttcttttttcccgtctcccctgagctccgatgacgacgctctccaggatgctgccgcggttgcgctcctccgccacgcgcgccctccgcaaggtgttcggactggaacccgcggcgccgccggacggctccccgcccctgaagccttcgtcgcgtctnanagatcntctgcgcctcttcctggcctgnacct

SEQ ID NO: 76294 - DNA, 2237 bp, Zea mays
  Clone ID: MRT4577_169606C.1
aataatccgactcccactgctgggtgccctgtcccctacctcgggttccgcgcagaggaaggtgagacaccaattccactcccaaaccccacgaaaaccctcgcactatacgaccaaatcactcgcttgatctctcctctcaaataatccgactcccactgctgggtgccctgtcccctacctcgggttccgcgcagaggaaggtgagacaccaattccactcccaaaccccacgaaaaccctcgccgtcttcgtccaaacatcactcgcttgatctctcctctccgaacccggcaaccccttgaactagggttccagcgacccaatgacggacggcagcgacgagtacaagcgcgacgagtcggtgaccctgctggtcatcgtctccctcgccgcgctctcgctcctatccctcatcgctgccttcgcctactactgctacattactcgcaaggtctcccgccgccttcagtcactccatatccccaaacgttccagctcccctcctcctcctcctcctccccgggctctgccgccgccgcaacagcaggggaaggacagcccgttcagcagctccgccagcgatggggtcgctgcggcggcggcggcgatgtcggttgtggttgctggggagaggggcgtgcaggtgttcagctaccgtcagctccacgcggccatgggcgggttcggccgggcgcacatggttgggcagggcagcttcgggaccgtgtaccgcggggtgctccccgacgggaggaaggtcgcggtcaagctcatggaccgcccagggaagcagggcgaagaggagttcgagatggaggtggagttgctgagtaggctccgatcgccgtatttattgggccttattggccattgttcagaaggtgggcaccgtctactggtatacgagttcatggccaatgggggtctacatgagcatctctacccaaccagaggttcctgtggtggaatctcaaaattggactgggacacaagaatgagaattgcacttgaagcagccaaaggtttggaatatcttcatgaacgtgttaatccacctgttatacatagagacttcaagagtagcaatattctcctggacaaggacttccatgcaagagtttcagactttggtctagccaaacttggatctgatagagctggtggccatgtctcaactcgagttttgggcacacaaggctatgttgcaccagaatacgcattgactgggcatttgactaccaaatcagatgtgtacagttacggtgttgtgcttttggaattacttactggcagagtaccagttgatatgaagaggcctcctggagaaggtgttttagtaaactgggcattgcctatgctcactgaccgagaaaaagttgtgcggatcttggatccagcatcggaaggtcaatattccttgaaagatgctgtccaagtggctgctattgctgccatgtgtgttcaaccagaggctgactataggccattaatggctgatgttgtccaatcgctggttccacttgtcaagaaccgttataatcagaaatcttgcaatcccaatgtgcaaccatcgaagccacttgactaggagaaaagctagtgtttgatctgcagtttgtgctcgtccttctggaacccttctcgagttctcgtctataacgaactactgttgagacagattcacacgcttcctaacaatgatttcgtctgctggtgctgtaacccttctcgtctataactaactatggctgagacagatattcacaagctcctaaactatgattttgtctgcgggtgctcttctgattttgtaggtccgtctgagcaggtaggttgtctgaacggtcctgagagcttatttgggtttgaagggaagtttctgtcatgtacaattagctgcccgcggtgatggtgggttgttggattagtacttgtggttgtgtggagttcgtcatcagatggtaggtttggtatgagctggcagaactgtttgtagagtactgcactaatttccttttggcttatttatgttagggaagcagctttagaagatcattgtgcgcttgtacagaggtcttaactgttaagctgctaagtgttatgtatccttgccagtagtgagtgttatccttgtattgtagtattactaatgtatagcacgtttctggattggttctgacttcattgttgtttgaacaacgtaccttctttttaccatgttttgttgattttaa

SEQ ID NO: 76295 - DNA, 207 bp, Zea mays
  unsure (1)..(207): unsure at all n locations
  Clone ID: MRT4577_169607C.1
ggcattgcggtgactcaaaagngtttcattttcactacgacagcgccaaggagcggcgggtcaccaactcctggtggacgactattccacacctgtggaggaaactcatccggtgcatcatgcccatcgaggtggccgtcggttatgtctcgaccaacgccggatacccgattgagctgctaaacattattactctgtgctgttcat

SEQ ID NO: 76296 - DNA, 860 bp, Zea mays
  unsure (1)..(860): unsure at all n locations
  Clone ID: MRT4577_169608C.1
ccggccgtgggcggaggcctggcctactaccaaaaataatctgaacaaacttccaaatcctccttggaacagtcaacagccaaacccccaagaacacaccgtctcatcccagagtcccggcttccgatctcttcccttccccccgccgccggaaagatcccggctttttgggttccgcggcgagggataggccccaagaaggaggagggggcctcacggcggcggccttgcggtcgatgcgatcggttgacgcggcgggggcggagagctcggatcaccacaacctcaagaagccgcgcctggaacccaggaccaagatgccgctcgcggatgccgttgcggccggtgacagcggcgggggtgtggatgccgcggcggcgggcgccgacttctttggcatgacggtcgaggagatcgtgcagcacccgctgccgggatacggggcgccggcggttctcagcttcagccccgacgaccgccgggtcgcctacctatacagccccgacggcacgcttcaccgtaaggtgttcaccttcgataccgcgcggcgttgccaggagttgctcttcgggccccccgacggtggcgggctcgaggaggggaacctctccgccgaggagcgtctgcggcgcgagcgcgcacgggagcgcggcctcggggtcacccgctacgagtggcgctctcgccattctggtgaatcctcacgcgccggcattgtcgtgccgctccccatccggggtttacttccaggatttatctggctctgaaccagtgctgaaactacgaagttctcccacatctccgataattgacccatttctatctccaatggngagcatgattgcatacgttagggatga

SEQ ID NO: 76297 - DNA, 300 bp, Zea mays
  unsure (1)..(300): unsure at all n locations
  Clone ID: MRT4577_169609C.1
gaaaaccaaatgcaatttttcaaacctaaaaagtgcatttaaaaagtttgcaaccacaggggctaaaaaaataaccatttccttgcaaccccccaaatatgtggtatactccatcgacatacacaacaagacaaattgccaactcgttggcatgacaaaattttttatcaaaaatctagtgattttaaaaccttatttaactgccccaatttttggggttaactcccctcaacacaatttttgccccctcaaggnnatatttaccactactccataggcatttaacttaggacaccattt

SEQ ID NO: 76298 - DNA, 210 bp, Zea mays
  unsure (1)..(210): unsure at all n locations
  Clone ID: MRT4577_169610C.1
ttntttcttttctattatccttattttccttgggttgggtcaccttaaaaattctaagctggacatggccgaaaccggaacccaaacttgggccggggccccgaacgaaaacggggccttgtgaccccccgtggttcctgacccgctggggacagctaaagaaccggaccagcagcgcccagacaacggcccaagaacggcctcgattgt

SEQ ID NO: 76299 - DNA, 413 bp, Zea mays
  Clone ID: MRT4577_169611C.1
gcgaaacgaccctctatacggatcaatttctccgacagaacagcgcatcacactattcacccatgtgcatacacgtggctgtagactcctctaatcctaatctacacagtgttatatcggctcacgtatccctccccatttcacgccagcggcagactctacattcactacgtcgcagtccccaccaagttgcttctgcctctcctttacggacacccgcaattacaacaaacgcaatcttaaacaccaatagcatgcctaaaaccagagatctttcacataagatttgctttggcaaattcctaattgactccgtacgaactgtcaatgacatataacttacacatgcacctgcctctaagaatgatgctaatgaaccacctaccaatgctgcacatgaataaatattctat

SEQ ID NO: 76300 - DNA, 2253 bp, Zea mays
  unsure (1)..(2253): unsure at all n locations
  Clone ID: MRT4577_169612C.1
gacttagagtagatggtagacaacttgatgaagtgagaccattgtattgtgaatccaacacatatccattattacatggttctgccctgttttcacgtggagacacacaggttctatgtacagttacccttggtgctcctggcgatgctcagcgactggattccattgttggtcctccaacaaagcgtttcatgcttcactatagctttccaccattttcaatagatgaagttgccaaacgtggaggccttaatcgacgagaagttggacatggcactcttgcggagaaagcattgcttgctgtgcttcctccagaaagtgattttccatacaccgttcgggtaaatgcagaagtcatggcatctgatggttcaacatcaatggcatcagtatgtggaggaagtatggctttaatggatgctgggatacctgtaagagaacatgttgccggtgtttcagtgggtcttgtagtcaggtggatccagctactggagatatttctaattatcgcatattaacagatattctgggccttgaggatcacttgggtgacatggacttcaaaattgcagggacaaggaaaggtattactgctattcagctggatataaaacctgctggaataccattggacataatatgtgaaagtttagagcctgcacgtaaggctcgaaatcaaatccttgaccgcatggaccaggaaataagtaccgcacgtggtattaacgatggaagttcccctcgattagctacactgagcttcagcaacgagtctcttaggaaactgcttttccacaggaaaaaatcgagcaagaaacaggtgcacgggtatcaatcagtgatggtacagtcactattgttgctaaaactcaagaaattatggataaagctattgagaaggttgagttcctcgtgggacgtgaaattgaagttggtcgtacatacaaaggaattgtttcttcgattaaggagtatggcgcttttgtggagttcaatggtggacaacaaggcttacttcatatttcggagttgtcacatcaaccggttacgaaagtctcggatgttgtaactcttgggcaatctctctctctgagatgcattggacaggacatgcggggtaacattaaactttcacttaaagcaaccttaccccaaccacgtatcaagaaggatttgaaaaataaggatcctttgccaagtgaagttactggttgggctgctgtggagaacatgagtagtgtggatgttgatgctcagctatcaagtaccgaacatgaaaatggcacaactgaggaggcagctgcattttcgactccttcagttataattcgaagtgctgctgactgtgatgctcaagatgatgcaaatggttctaagaagcgggcgaaggttgcaaagtcatctcctagaccaaataaaccagccagcgaatgccatgatgttaggaaagctaccgctaagaaagctacaggtgccactaccaagaaaactaagaaagtaaagattgaggaatctgtgagtaatggactagaaaccagtggttctgatgttccagaacagagtgctgacaacacttctgaccagaatcagagtcccacgaaattccaatctggggcaatgaagttgggtgatgtagttacagcaaaggtctaccagattcgagcctatggactagtacttgagttgagtgatggtgtgcgtggaatgcataaatttgaggcaaatggcctaaaggaatttgaagttggacaggaactagtagtgaaatgttctagtttcaatgcgaaggggattccgttattctcattgctggactagcaatgccaccatttgggaaccggatacaaatgacaccttagcagctaaccaatcaacttgtggaacacatggctagcgaagttttgttctttcgctgttgttgaagcgttggtcaagttctttattcgtgcaaccatgaatagaatggaggtcaatcacatgaagtgtagagcgtacggactgagtacgaaccatcggaacctgctgtagccattatatataactaggattacgttacttatctatctattggttaaaataatagggacgatgaattctttgtaagacgtactgaagcagagtgtcccacttacaggaatccagttccagtttgtagtttctttacctaagattgttcagctgtacctttattttatttttagcagggctgtttacannnnnnnnnnnnnnnnnnaaaaaaaaaaaaaaaaaaaa

SEQ ID NO: 76301 - DNA, 472 bp, Zea mays
  Clone ID: MRT4577_169613C.1
tttaatggtttttaatgtttgttttttttttttttttatttttgagtttttttttttttttgacgagggtaacacaaacgcaatcatgcatgttttattttattattgtcgtcatcaaacacacgaacacatcctctattcgtttgggcagcagcattctcctggagaaatacttttacagtaggccttgtcgctcctgtggtgttggtgctcgcataacctgcggcacccgtccgtagtgcaggggtactgtgaggttccggcgtggaagcacggcatcccaggttttggcttgggagcaggggtgtcctccgtgccgattgcaccgatgcaatatacggatgtgtaagatatggctccaagaaccaagaacacagcgatgattgcgctcttgatgatgagtgccatggggagagaagctgtgaaacttctcttctcgtgatgaggagagtgctcgtgccgagtccgtaat

SEQ ID NO: 76302 - DNA, 320 bp, Zea mays
  Clone ID: MRT4577_169614C.1
agcaacaaccggggacgcatcaagagaaaccacatcggatctataacaaggagacagcaacccgagccatgctgttgagtgtataaacccctcggcaccatctacacataagattcaactttctttatatgaggcttagactgaggactccaagccctcaatatattgggggggaaccaagacatgaagtgctggatgattgatatccacggggagagccgggggatcggtgactaatctgccgatcctcgtctgcgggaagaagagagcgctcacctaggcaaattcctcccctctaaaggccgtgacgagggggatga

SEQ ID NO: 76303 - DNA, 470 bp, Zea mays
  Clone ID: MRT4577_169615C.1
cccaggacccccaaaattattcaaaatcatccaacggggggaacaaagggggggaaaaaaaggctcaaaggaggcaaggtctgggcggaaaaaagcataaggtaaaactccgggacattcatttgacggggagaggggacctcgaaccgatacatttttttggggagggcttgaaaaggttttttaaggcggccagcttggggagagcaggggcggtcttggaacccaggggcctgcccaaatgcttggaaatgtagccaccaccctccatgagcttgttgaggccaacgttggtctcgacccccaggccagggagcatgtacacaacatcctccggggcaacgttgccaggggcccccttggcatacgggcagcctccaaggcccgacaccgacaagtccactatgttgacccccatttgaagggaaacaaggatgttggcaagggcctccccgtacgtatcggggaaa

SEQ ID NO: 76304 - DNA, 413 bp, Zea mays
  Clone ID: MRT4577_169616C.1
atacatagatggactttgggtcagatgcaaacaggaacaaagggaagaaaaacaaagaggggggccaaagacaagagggacgaagaacgagcgaaccaaaaccacccgaagggcccaacaccgacaaaggcagaacaagaaaaaaacactgccgccaaagcaaaagaccacatgaagccagacaggcaagggaaggaaccccgccaagggaggggcaaagcaaggagaagccaaccccaggacggagagaggggggggggccaaaagggaggaaggaaagaaaggccacccacacggagggccctcccagacaggagggagaaaaacacggtcggccaggaagggggggccacaagggggggaaagaaggccctaccaacaaccaggcacaacttgctggaagaaaagaaggc

SEQ ID NO: 76305 - DNA, 308 bp, Zea mays
  Clone ID: MRT4577_169617C.1
gggccacgccaccctaagcttgatagactccatatcacagaaaagcctcctcgacaacatgaggtgcatgctgcgagccctcgctctaaagcctctcggtggcagcgcaaccttcacacatacaaacgggggctgaggatgtcatacaccacaaccagatcaagaaccatcgcaggagcatatgaacacctaggtgcaattaccatcattgggtgcatcaacgaacgccgggacagctagagccgtctgtacacccgacatgaaatgtccatgtgtcacccacaggtcaatatacgccaccacaatgc

SEQ ID NO: 76306 - DNA, 396 bp, Zea mays
  Clone ID: MRT4577_169618C.1
gaccctaaccaaaaggatccacaactttttggatgacccaagcaaaaatcaaagtttcttttttcagagattgggaaaaaaaaaaaaaacaaaatgcccatttctggaggtgcttttttttttttcaactcaaaaaacgagctgagattttttccaaccaaggaaaatccaaaaaacacaaaccatccttttttggaagtcaaaggaaacggttcaacaaacaaggagatgcctcccccaaaaacttttgttttaaaaaaactttgtttccctaaaaattttcggggccattttattttgtccatgacccaaaccgctttaaaacaggcttaaacattgccctattcttttcagggagaacattccgaaatgtgaaggattttccaacattatttt

SEQ ID NO: 76307 - DNA, 571 bp, Zea mays
  Clone ID: MRT4577_169619C.1
actccatagggcgattgggttcctcgaggccggccgggaatcctcatcctacaactttatctatacgagacactaccaaacaaactttacttctacacaatcaaaatgggcagactttcaaacggcgactggctccttgtcggcaacagcatcttcagcgacgacaacggaacagaattccgcatgcaagacgacggcaaggtcgctgtctaccatggcgaagagtgcgcctggcagaacaccgccgaacagaactggcaagttcacggcatcaagatgcaagaagatggcaacctagtcatctacgacaactctggtactggacatgccatttggcacacagacactgctggtggcaagggcaaccagtcaacaacccttgtggtccaggatgatggaaatgttgttttgtacaatgagggtggtgaccccatctggcacactgccagcaacaagtaatcttatcacgcggaatgaagcggtttctgggatgctttcaacgttggtatagctacagaacccatgaataaataataactttcacaaaaaaaaaaaaaaaaaacccgcggcc

SEQ ID NO: 76308 - DNA, 739 bp, Zea mays
  unsure (1)..(739): unsure at all n locations
  Clone ID: MRT4577_16961C.1
ccggccgggagcagtatccccggtagttttgctagcattattcacgactttcagatccattactcggactctgccttgtcacaacagccaacatgcttggccatctcgtctttacactatgcctagccagctcggccatcgctgctccggatggcgcgggtttagtctcagcaccagttgttggcaaatccctcaaagtccgggctcttccaaactctccaagtggtggttatgcgccaaaagtggttgactgcccctcgacacgccctaaagtccgccttgccgatggcctttcagaccaggaagaggcctgggtccgacgccgaagaaacaacacaatcgacccgatgacagatttattatcccgagtgaaaatctcaggttttgatgccaaaacgtggatcgagaaaaacaaaaacaacgcgactgcgcttcccaacatcgccatcgcggcttctggtggtggctaccgagcgttgatgaacggagcaggttttatctctgctgctgactcacgcaacaacaagactggccccatcagcggcctcttacagtctgctacgtatctggctggtctgtcaggaggtggttggctcgttgggtctatctttgccaacaacttctccacaattccagacttgcaaaaaggtaacagggattcggatatctgggcgtttgaccgttccatcttcaggngcccgaaagtcangtctcggcgtcttgaacacagctgaatact

SEQ ID NO: 76309 - DNA, 156 bp, Zea mays
  Clone ID: MRT4577_169620C.1
tgttcctgtccaccggcgaagtcggccatccagagcatggataattgagcaggaagatgccatcacatcacggtcttccgtcgcgagattcacatcatgaagaagggcaactcaccccagcatgttgaagctcttctaagtctttgagagcgacca

SEQ ID NO: 76310 - DNA, 363 bp, Zea mays
  Clone ID: MRT4577_169621C.1
aaacaacttgttaaccttttaacaacaaactatgacggtacaggtattttgtgtgcaattcatttgaatgtcgttacaagagaaaacctaccaggatatgcccatcgggggaaattgttgggtaaaaaaacgatgtacacctatggacagtctcttcccagggctttgagcatcttatgacctcccaagaatttcaaggcaaaccatgttcaaataaaacaaggggtctatacatttgggggggcaaaaaaaaacatccgagcaaagccaccaagaggcacgggctcataatttgccaccaaaatattgagactttactctcatgggaccgaccattcacgacgggaggggtccattttgtag

SEQ ID NO: 76311 - DNA, 365 bp, Zea mays
  Clone ID: MRT4577_169622C.1
aaaaaccgccaaaaaaatgggccccatcaaaataaaggggctgggggctcccacatgtaatagaaggttttttagttcaaaaaatggatccaggttggggaggggttaacccgggcccaataaattttttttttcccggggatggcttttaaaaaaagactggttctttcttccgggggctaaaaagtccatttttttttttggccagtttcctttttttttcagttggccgggaacccacaaaaatttttttgtttttgggggggggggccggctttgaactataaatatatgggggccaaccgggcacctttccaatttttcggccccgggggcggccccgggggtccccccggaatttcggg

SEQ ID NO: 76312 - DNA, 343 bp, Zea mays
  Clone ID: MRT4577_169623C.1
aacccaaccctaaaggggggggggatttttttaaaatttttggggtttaaaaaactggggtaaaatttggttcccggggaaagattacaaaattttacatttccccttaaatttttggcggaaaccccccaggggtcctaccaaaattgggggggtgggggatttgggaaaaaaaaccgaaagggggtttaaaaaaaaaatggggggaattccatttttccaggaaaaaatttttttgtttttttaaaaattttgaccaggaattctggttaaaaattccaaacgggaagccaaacccaaaagggggggggaagaccaacagggaattttaaaccgggcgggg

SEQ ID NO: 76313 - DNA, 333 bp, Zea mays
  Clone ID: MRT4577_169624C.1
ttctttaactgcacttgcccccagcatcatggaggcctttgtctgcgctcggccggctaggcaccacagggtagggattggtggaacacattctagtctcccgtatctcctttcagcagatgtggtgctctaagggagagtactgcgaatctgacacgggtataggccacatcaaatgtttccgtatttctggagcctgatatctgctgcttggattcggagcctgtagggattcaagtctgtcccaagatctcgtttgcattgttcgcagtctctggatacacatgagctgttgaccatggaacattggacgaggtggagaactctattgct

SEQ ID NO: 76314 - DNA, 169 bp, Zea mays
  Clone ID: MRT4577_169625C.1
ccgtcgacaccgccggagggggcacttcggagcagttaccagcacagaagacgaaatggtttctgtcctccaccacctcttccccctcgacgccctcctcctcatcgtggccgctgtccgaagcggcaacctttaccgtgaccaacaactgtaagtacaatgtgtggga

SEQ ID NO: 76315 - DNA, 495 bp, Zea mays
  Clone ID: MRT4577_169626C.1
caaataaaaaatctaatttttggaacggtttaaaaacctgggggggggttcattttttttacaaaacggggggggggacaaagggcccagaagaaacagatttccaacaaatccgtaaggcagcttaattgaactggattcctgaaaagctttccgggaaaatattaaggctactcgggggcagaataacaaaggctgtaacttggggtaaaaggggggaaaaaaaaccggtggaaggggcttccatgggttcttccttaacacaactgtattcctttcgaagggggcaacagtggggatcacctttcagggcccgcccaaaggtgggcttctggctccatgggttggttttcgggctgaaggtggaacatgtcctttcaaaatccattactgggacccaccccatccaaatgacgacggggttttatgccataggggtgggggggaccatccactcacagtttcagccaggggtgaggggggttacttgggggt

SEQ ID NO: 76316 - DNA, 735 bp, Zea mays
  Clone ID: MRT4577_169627C.1
caccaaataatgagttgacatgccatcgcgtgtgactcattattaacaataaaacaagtttcctcttaaaaaaaaaaaaaaaaaaaaaaaaaaaaaaaaataataactttggctaagtcgtggataattcactccgagacggcattggatggtgagttgattaagatacgtttcactaccaaggacgtgcacgtgaatagccagctgtgtaaacataataataataacttcctctagatccacgcacataataataacagtatataattacctctagatccgcgcaaagtttgtaaatgctagcgaatctgtctcgtgccgacagccctgttgcatttacacaacagggggtgcaactcccgacaaattaaagtcctgctgtttgatactccctccgctgtactattagttatcgttttgggtaagatttaaatcaaacttataaaattttgactacaaataactattttattatatagttttttagtttttaaaacctaatatttatatacacaaatttgtcttaacaagtacatttataaaagtataaatttattaaaagtttatttatattttaacaaaaaaaacattagtcaaagttatattttagagaccatgtcgctatactaaacgacaactaataaaaaaccggagggagtacagctcatgcggtcactagtaaagagaaactctatagatgcgtgtaatacccaaataacttatgcggtcactagt

SEQ ID NO: 76317 - DNA, 361 bp, Zea mays
  Clone ID: MRT4577_169628C.1
gcgcgtgcagctgagcacgctcgcgaaggaagaggagcatcctcctattgctgcagcctaggagcgctatcccactcacctcgcgcacccatggctagcgcatacgacgaccactcgatgaggctcagtgctcccaagcataggctgctcgactagcttggcggatctcatgctcctaatcatcttctggatctcacaagtccatggagtgccttactctgatcctcatgatcaggaacaggactctgtatgctctgaactaccgagaggtcatgtctatcctgatgcagcgcactatactcgttgatggaaaggccaagactgacaagacctaccctgctgagagcatggatgtgatttc

SEQ ID NO: 76318 - DNA, 459 bp, Zea mays
  Clone ID: MRT4577_169629C.1
atttctaaaaaaaaaaaaaaaaaaaaaaaaaaaaaaaaaaaaaaaaaaaaaaaaaaaaaaaaaaaaaaaaaaaaaaaaaaaaaaaaaaaaaaaaaaaaaaccctaaaaaaaaaaaaaaaaaaaaaaaaaatttttttccctccccggggggccttttaaaggggcaatttttccatttttccttccccttgggggccgttggaccttccttttaggggccccatttcccctttttgggggtcgttttccatttcctgggccgtgttttaccaccgcgggtctgggaaaacccttgctgtcccccatttttttcccttttgggccattccccttttcccctgttgggtttttaggaaaaggcccccaccctttcccctttccaaaagtttgccacacctggatgggctatgggcccccccttttgcgggcctttaagccccggggggtgggggggtttcc

SEQ ID NO: 76319 - DNA, 450 bp, Zea mays
  Clone ID: MRT4577_16962C.1
tcggtcactcgatagcggttataatcgccacagtcgaggtactcgcagaatgtatcgtctctctgaacggtgatggtcttactaatctgtaacacgtactttgatgtctcttactggtttgttctccggtggaactttatcaaggcaaaagcacatcagcttatttcacttccttcggtgaacatcgaagactgcgagaacatcccaatttcggaccaagtcatgttaacggccggtaccattgacccatgtgtcgtcgcttgttgtgtagccaatgtctctgaggctgtggcaacgaggtatttcttacaacgcacgtaagcggacaagtcattagacagtcaagccgctcatgtgcacactgatggtgattttgtccaggctgatgagcatcggccacattcagtacgtgggtgcaagaggaaacctgtatctgcagagagtttgatg

SEQ ID NO: 76320 - DNA, 780 bp, Zea mays
  Clone ID: MRT4577_169630C.1
acctccagagaagagcagatcgaaatccagccgaccttccccctcccgccgctccccctcgccggcgacgaccgaccatggcgacgcggtactggatcgccgccctgcccgtcgccgacgacaacgtcgccgccggcaagaccgccctctgggcgcgcctccaggacgccatctcccgccactccttcgacaccccgctctaccgcttcaccgtcccggatctccgccccggcacgctcgactccctgctcgccctcagcgacgacctcgtcaagtccaacatcttcatcgagggcgtctcccacaagatccgccggcagatcgaggacctggagcgcgccggaggggtcgagcccggcaccctcaccgtcgacggcgtccccgtcgacagctacctcaccaggttcgtgtgggacgagggcaagtaccccgtcaacgccccgctcaaggagaccgtcgccagcatccagtcccaggtcgccaagatcgaggacgacatgaaggttagagttgctgaatacggtaatgttaagagccagcttggcgcaatcaacaggaagcaaactggaagtttagcagttcgtgacctttccaacctcataaaaccagaggatatggtcacctcggaacatctagtgacactgctttctattgtgccaaagtattcccaaaaagactggttatcaagctacgagtcacttggatacgtttggtggttccgagatcgtcaaaaaaagctttacgagggacaatggagtatggctctctacactgtaacat

SEQ ID NO: 76321 - DNA, 1649 bp, Zea mays
  Clone ID: MRT4577_169631C.1
cggacgcgtggcaggtgtattcatgcgactggggggttctgcaaaaaaaaaaaaaaaaaaacgagacagaacgggcacgcgtagccaaccttccccgcgtgctccgtgctcattcattccccatctcgtctcctcccaacccaaacgacaaaaccctagcctcctccgtgtgatgggatgccgtctaaaccctacccccactccctgacctcctcttcctcctccgccgtcgcccccgcgacctggatgtccgcatccgcatggacggtgcccgagtcctgatcgccgccggtgccaccgccgtctgctgcctcgtctgcgccttctgggtcttccgttcctcttcctcctcctcccccgcatccccaaataagcaccaatcccctcccaccaacttctgtggctgcgcctcctgcggctgccgcgacgccaagcccgccaacggcgagatggccgtgggtggggagaacaagaagaaggcgccggagcctgatccgccggaggcgccctccatgatggagcagctcgtgcccgagatcaccacccacgcgctcagctacctcgactacaccagcctctgccgtctctccatgaccaactccgccatgcgccgcgcagccaacgacgatggcgcctggaaggcactctaccacaaggattttacggtggagcagggtactataaatcctcctaatggatggaaggcatactatgcagctacaaaagccatcattaaccttaacgcggagttctacaatatcatcagggaagggtccttgccagcaatgagtcgtttttggcttaatgcggactatgtcaagtgtattcatgcgactggggagttctgcactggatacaacgcagtgatggagagttggggcatgctgttgaactggggccaagacggaggagggcagggcattgccttccagataagggacgtccgtgtgcgtgtgctcggtgaggtggcatgggtgaacatgaaggcgaacgtgctgttccatgtgaccaacgtctacgagctgtgtaacggcaggtggtatatggtccatcaccacagctcgctcatggctgaccctcctccgcacaatatgtttgcttgatgtgctgctattcttgagcggagattagataatcggacgaagatttcctccctcctccccacaacccttttattcgttgtggatctgctgtttgttggtattgctctggatctccgttccgcagttttgtacagatttgttttaggtggtaaggcttattataaattggtgaatgggcgccctggtggccgcggctgactttgatttatatcgcctgcttccagacggtccgagttgatgagtaaaatcttctagaacggtcgaagctcaatggtgtttgttctactgactggactgagtcatggtctctggcaggtaggtagctgatgatgattccgaatctaggtcattcatactatggccttgtttgggagggctctggcttctctgaaaatagctctggctccggcttctctgaaagacgagctcctctgcaggagccgtgtctttttttaaaaatcgtttggcaaaacggcttcttgtatatttttttattttatgtatgcaaggatatgctgaaaaatattatggataaaaattttatgg

SEQ ID NO: 76322 - DNA, 309 bp, Zea mays
  Clone ID: MRT4577_169632C.1
caggttgggctatattttttttttaatgtttcacaccaggggaagatcgtgcaatgtcatgccggaggcctaaacgcaaaccaattatcccaatctaatagaagcttacatggtgagaatgaataagacaaaactatgtgattgggacaaagacctaattagggacaaaacaaaaaatgacagctaccgagggcagatctggtaaagcacactgacactgagaggtgtattagctaacactatgctggtagctatcactgcccgatttccaacatgaaaagcttcaccaccaatcgcaatgacaaattg

SEQ ID NO: 76323 - DNA, 1378 bp, Zea mays
  Clone ID: MRT4577_169633C.1
attgccatctaacccatccccgttcctaggtggcgtagcatccatctatgttcgtcttcctcgatcctgaacgaaaaccagtagccaaccttccccgcgtgctccgtgctcattcattccccatctcgtctcctcccaaaccagaagacaaaaccctagcctcctccgtgtgatgggatgccgtccaaaccctacccccagtccctgacctcctcttcctcctccgccgtcgcccccgcgacctggatgtccgcatccgcatggacggtgcccgagtcctgatcgccgccggtgccaccgccgtctgctgcttcgtctgcgccttctgggtcttccgttcctcttcgtcctcctcccccgcatccccaaagaagcaccaatccccttccaccaactgctgtggctgcgcctcctgcggctgccgcgacgccaagcccgccaacggcgagatggccgtgggtggggagaacaagaagaaggcgccggagccggatccgccggaggcgccctccatgatggagcagctcgtgcccgagatcaccacccacgcgctcagctacctcgactacaccagcctctgccgtctctccatgaccaactccgccatgcgccgcgcagccaacgacgacggcgcctggaaggcactctaccacaaggattttacggtggaacagggtactataaatcctcctaatggatggaaggcatactatgcagctacaaaagccatcattaatcttaacgcggagttctacaatctcatcagtccggggtccttgccagcaatgagtcgtttttggcttaatgcagactatgtcaagtgtattcatgcgactggggagttctgccctggatacaactcagtgatggagagctggggcctgctattcaactggggccaagatggagggcagggcattgggttccagataagggatgtccgtgtccgtgtgctcggtgagatggcatgggtgaacatgaaggcgaatgttgatgttgaccctttggtgttccatgtgacgaacgtgtacgagctctgtaatgggaggtggtatatggtccatcaccacagctcgctcatggctcaccctgctccgcacaatatgtttggttgaagctggagaaggaaagcaaagaaaacctttgggaagaaaatttgatgtggtatgaatgttttcttgaccggagatagattgtcggatgtatttgagttgaggagagatgagattccccccacccccacccccaccctttttctccgttgtggttctgtttgttaatattgctcctctggagcttcgttccgcagttttgtacaaatatgttttaggtgaatggaaggttatgggccgcagctgactttgattttttttttgtt

SEQ ID NO: 76324 - DNA, 537 bp, Zea mays
  Clone ID: MRT4577_169634C.1
atcgtgttcccttcctcttccgtcgttgagaacatcgaatcagtacgcgtatcttctttacacgatccactgctaaagaatggatcaccactgtcaacgccatagggtgtcgagcatgagataaccaccaccattcttttaccactagtgacgacaggacaggtgaacgaggcgaccatcgcgaaaaacgacgcactgggtcacaatcgcctctaccgagaatgacatttgcgggtactccaagtcccacaaccaccctccctaggctgacatcattgtagatcagacttcctgtacctcatggacaagatcgggtcgagatcgtggatcatcagcgatgatgctgacgtgaatcatgaccctgaactccctgccaactatcgcgaacatgtcactgatgatctcaagaaactcgctgcgcacccggaccactaactagggtaaaaaactccttcaagatgccgtgcacctgaggatagtccagccgcagcaagtcctcggcaaccagggccgcgacatagtgctcatgctcgccga

SEQ ID NO: 76325 - DNA, 400 bp, Zea mays
  Clone ID: MRT4577_169635C.1
gctgaaaacacactgtactgcttttattccatcagggtgacccgaaatacctaaaacaacgagagtcaaaacatgccacatagacatggcaagtgtaaaaacggcgtgctctccacagacaacagcgggctggcacaccctgggcagggaaaggttcgtcgcaatgaacagcaggcaccccaccgttattttactgtgctggaactgatgaacgcttgaggaaatagttggtcacaagcccacaactgtgggctctagggcatagacaccatgctttccgtttccttataggtggaccgagacatcacccatgagaggcttcgctccacgaaactagggcacacgacagcagatatccttcctgccgtccttgaccagtcattatgcctaactgtcgaag

SEQ ID NO: 76326 - DNA, 635 bp, Zea mays
  unsure (1)..(635): unsure at all n locations
  Clone ID: MRT4577_169636C.1
gtactacgtccgcggtccctgtccctcgggcatccggtacgtcactcgtcgtcacacgcgtacacgagtgctgctttcagcatgctccccggccggccgctgggcgttggccctgcccatctccggccggccatctcaatatccgcggcgcactcgctctgggcgtcccacacaattaaggtctatttaaagaagcccgtgccgtgccttgccttccccctccagctcgtcgtcgtcttcttttgcactgcactgcgctctcgctcttcttcctcgttcacctacctagctacctccgcatgaaaagatgaaacaaacaaaatggtgagtgctgccgcgccgcctgctgcttctcttcacattgttccttccttccctcagcagctagctctctagcgagttcgagcaacgatccactgtctatctagtaaacgggatattggcgcggttcaatcagaaagcttgcgctccaggcccgaggggctccactctttgattgagccgtgccaatatcacgtcccggccggccagctttattttcccatgcatgcatcctcatcgtatcctctctcgttctgcatatgcantctncttcttttttcgatcctgtgcgtcggggggggtgttttttttta

SEQ ID NO: 76327 - DNA, 230 bp, Zea mays
  Clone ID: MRT4577_169637C.1
ctctcatcctcatgcccttcgggcttatcccctggtctgtccctgtcgtactttcagaaaagtctgcatcctacttaccttctgccacctctttccatcctacacattatttgcttgcagtcactgatcttctccctctctcacccgagttcccttccactcctcccatccgaactctccctctccactcacctccctcactgtgctccctccatatctcccaaccactc

SEQ ID NO: 76328 - DNA, 369 bp, Zea mays
  Clone ID: MRT4577_169638C.1
agattccataagcgcaatcatgtcaatactaatggtggtgtcatcaactgtgtgacctggggctaactgggaatgctgatcgacatttagaaattctacaacatgttgattgaggatctgcatgccaacttctatgaccttatgtgatcattttgaatataaacagaactaaaagaacggagctggggatcatcatctaaggattggtcttaccgatatattataggacatcagtgaaaatgttgtaattattgctatgtcaaattcgctgtcattatcaaaatgcgatttttatatatgctatgtcactgtaaagagtatatctgcttacaagttcaactgtcttgacatgtaattaatattaataca

SEQ ID NO: 76329 - DNA, 588 bp, Zea mays
  Clone ID: MRT4577_16963C.1
ccggccgggggccgattgctatcaatcgtggtcgtcaattccccccatatcgccgccatggttgtcaagatccgtctcgcccgtttcgggcgtcgaaatcagcccttttacaacatcgttgttgcccacgctcgcacggctcgtaactcccgcccgctcgaagttattggcacatacgacccgattcccaagaccgatccttacgacgactctggaaagctttacaaggacatccagctcgatagagcacgcgctaggtactggatcggtgttggtgcacagcctacggacacagcatggcggttactctccatgctcaacattctaccaaagaaggaattcggccccaagaaggacgagataaagggtgttgtgcagaaggatcagatccagattcgctgaaacaacaatggtctggaaggatgtatgataatgtatgaaaagacatttcggggcgttgggtttggggatcgatatcacccgatttgaatgagccagcaaaaattcgagagcaggcagtgccaacacaagagattatcggggatctttggcaggcattggaggcacatagtacttccagaggagact

SEQ ID NO: 76330 - DNA, 343 bp, Zea mays
  unsure (1)..(343): unsure at all n locations
  Clone ID: MRT4577_169641C.1
ctcgaggccggccgggcctcngttcctctcattccgatccaatctttgctgctgccactcggcgatccgatcgatctcgagccagggcggtggccatggcacgctgacgccatcacctcctcctcctccccttgttaattgccctgcgccctggggctccacggcaggagcacactcatgaggtccgactccgccgtcttcctcagatgcaacatgccgccgctaccttagcgaacaccaacccccacacgatggatggatcactgccccgacaccgagatcctgcttcctaacgtgacctccaacatcatatccagggcaatctaacactgcaccaagcacc

SEQ ID NO: 76331 - DNA, 300 bp, Zea mays
  Clone ID: MRT4577_169642C.1
cctcaaggttcttgtgggtgtgattgtggtgaggatgagaatggccttacatgggaacttgttgatcaagctgtgggtgcatcatgctcgctgcgaggccgaaatcttccaaggaatgccaacaagcgtgcaagagtttcacactcaaggtttgactttgaagaagattttggttcagccaatgaagaagaggaggaccaagatccacatgatgatgttaatgtgactggttctgaagacgcacatgatgatgttggtggagaaaacactgaggctgctccagatgagttcgaagattga

SEQ ID NO: 76332 - DNA, 242 bp, Zea mays
  Clone ID: MRT4577_169643C.1
gagaccgtggacggcacgaccgatgacgttctgaacctgttgtgactgaagccccagaacatgatgtcgcatctatttaagatgatgctgtttgggatcgccaagcccttccatgacatgcggagccccagttgcacagggcggatactgttccctcaactatactcagaatgcaccgtggcaggtgctgaacaacgtatccgatgttcgcaatttacaggtggagcttccatcagcagatg

SEQ ID NO: 76333 - DNA, 508 bp, Zea mays
  Clone ID: MRT4577_169644C.1
ccggtgcgcggctgggagaccgtgaagtcgaggccatcgcgcggttggtctgcgggaagaagaattcgaccaagagcagtcctggaggcggcaagagggtctttcccgacgtcaacggcgagggcaaccacgatcatggatttgggcccaggcaatggcaacccgccctacagactatctatgaggcctaggttttccttaagaagggaaatatagttttttttcttagagagagaataggaaccccattcattcattcatacatgcatattcttttttcttgttcttccttccggtgacgatggaagggcaagttgtgcatacaccctgtaaaggcataaccctctttggtgcagtcatttataagaaatcagaagagtaaaatgtatagatggacaaaaaaaaaaaaaaaaaaaccgcaaaaggtaaacaactggatgctggattgaaatgattgtatcctaagggacatgcgacttactgctagtaaataaaattgttgtgtgcc

SEQ ID NO: 76334 - DNA, 433 bp, Zea mays
  Clone ID: MRT4577_169645C.1
cccacgcgtccgctattcaccccccctctatgcttctatcactatccacttataaacttgagacggtaatcatgttcctagctagattcaaccatctaaggagccatggaatgatgtttgtttcctatcatatttttaaattagccacacaagtgaactaggttaagcactgaagctattctaatttctaactacagcactttgcttccttcttattttataaaattagagtatggtaagtgcagattcttagcaactctagttagggatggtattgggctctaggttttatactattaaagtttaaggataggattaggattgggctctatttctattcatttttgaactaaatattattaatgtgctaatcaaattgtgaagagattttgattatttccaccctcttagtctagttaatcttattttccta

SEQ ID NO: 76335 - DNA, 325 bp, Zea mays
  Clone ID: MRT4577_169646C.1
ggcagagctataatcactctctaagtttacgcagggatcctttgctgccatcattggagctgatgccactcggttccatgttatgggcattatttcttgcaggctctatagagagtgccacatgtgctccaacttgatgaccatttcgtgatacctattgtggcatctatcattagacgctctgagacgcatattaccatctgcttggctcgatcgcaccatgtacaatcatttgtgtatgccttcgaagacgatgaccttgtgagtgcatgtggaccattggtactttaattgcttggggtttgcgtacactaaccaggaggtt

SEQ ID NO: 76336 - DNA, 808 bp, Zea mays
  Clone ID: MRT4577_169647C.1
cattgggtacctcgaggccggccgggactatccctcctccacagcgccgccgccagcccacgcgcccgccgccaccgctcctccaccgcgcccgccaccaccgctcctccacgcgcccgccgccgctcatacgacaccgaaggaaggttcgttcccgagaagttcgaggagatattcgccaggcatgcgaggactgtccccgacgccctgacctcggacgagatcgaccagccgctctaggcgaacagagagcccggggactacagcgggtgggctggcgcggaagcggagtggaagatcctgtacattctcggcaagaacggggacgacctcctccgcaaggacgtcacgaggagcgtctacgacgggactctgttcagccggctcgcgcccagatggaaatctcccgatagggagaagctgataagcgtggtccgggagaactgaaccgagaggaccgtgccatatctgcgtcctcttgttgtgttgcttattggtagcacaaggcagatccgactaggataggatgtcgtcttacgctgggctgctctaatattttatttttcatcttttacacaggcacaaatgagggacttgtctggctgttgagactaggcaacagcttttgtcgttaaagccaaatcgccgcatgaactggattggttttgcggttgctcatcatttgaattctgagtatgccactttctagtcgattagaaccaatcatatatgatttagcataatatgtcttggaacactactgaatttttatatgctacatatgctatgggtgaagtacggtagcaac

SEQ ID NO: 76337 - DNA, 337 bp, Zea mays
  Clone ID: MRT4577_169648C.1
ataactttagatctgcttgaaaccttcaatttttaatcaaatcaggcacgatacttataaggggctattcaaacgtcaaaccggatcactaggatcccactatcaacttaatccaaattgttcattcaatatgtatatatatataattatatatccatctatctatatatataagataatgaggtatcattaatgcatgcactcaattacatccatgtctaactcattctttctcaactatatttgctctttccttggcagatatcttgatgcaagcataattcacattcatggaaatgatcacttactagttatccattatcaccattgaaccatt

SEQ ID NO: 76338 - DNA, 181 bp, Zea mays
  Clone ID: MRT4577_169649C.1
cccacagcgtccggcaaattacatcgagttaacatcgcgcgcgaacactgccagtctagggctgggttctttctatctcgacgacggccgcatgcacaccaactctggcttcagcgacagcttcttcagcaacaaccggccaacaatgggatggctacgacagtcctgtccacctagctac

SEQ ID NO: 76339 - DNA, 364 bp, Zea mays
  unsure (1)..(364): unsure at all n locations
  Clone ID: MRT4577_16964C.1
ccaaaacanaaaacaaaggggggggcatttaatcacaaaccaaaccgtcccttcccgacaacgagacatatgtaaccgggagcgaacccaacccaccctaattcccccctaaataggcctaacctaaaaagcgcgacccatcaggcaagcaatcgtcgcatatagcacaagaggtagtaataatatatcacacacacgcacatatatgccgcccatccaaatccgatgcatataggaagaggagtatgtgcccgaccgggccgctgtctaccagcacggccggccgacgatgcactcgaggggcccggcgaagcgcgtgagccgaccgaccgagcggccgagcctggccgggaagaagaccaac

SEQ ID NO: 76340 - DNA, 356 bp, Zea mays
  Clone ID: MRT4577_169650C.1
tcctcgtcttcctcatcctatcacagctagcgcctgcgccccttcatctgggatcatgtcctgcaacagcggaaatgtgcaactgcggctccaactgctcctgtccgcggcacatgcatacgcatgtcgcctgacgctgcacacggtcgccgctagcatcatcaatagcatgggccgcgctgcgccgactacgaacggcaactcctgccgcttccaggcggacatcgacggctgtggctgcgactgcaacaccgtgcaactgcggatccacctgcggctgctcgtgctgcatctgacaactgacacggctcgccctgcccggcgatggcacgcgaaactctaaaggaccaccacga

SEQ ID NO: 76341 - DNA, 312 bp, Zea mays
  unsure (1)..(312): unsure at all n locations
  Clone ID: MRT4577_169651C.1
aaaggattcagcacncngcccgtnnggaaggnagcntcgangcggcccgcngcggcgcgtcggccgggcgggctgagcnaatngnactngncccttggngcgcgaacnccctaacgtnggtcggngcgggcggcgagcagaggcgccggttgcnagcttggatncnnacttagaggcgttcagttcataatccggcacacggtagcttcgnnccactngnttttcaaccaancgcgatgaccaattataanantnaacngttcctctncgtacnaggttgantnnctatcgcggcncngtcatcagtagggt

SEQ ID NO: 76342 - DNA, 375 bp, Zea mays
  Clone ID: MRT4577_169653C.1
cagaaggggaaaatgaggcatgggtgacaccgcggcggaagtgaccgagccacggcgaccgccggtgggatatcttcggccactcacggctgggttcgcgggatggtgccacgtccgaagttatctctccgtgatcgacccgcttcaccagatcactcaagcacatccagttcaacagtgcctcacatctttatccgcgttctgcagatatttacaatgctttgatgttcagcggtctactgaaccgaccacctatcatgcgcactttctcatgtttcttgttaagaacagggtagcgctccttaataaaatttgtctcccaaacaacattcttcaagtttgttatagggttcatggatcaattatgtatagatt

SEQ ID NO: 76343 - DNA, 268 bp, Zea mays
  Clone ID: MRT4577_169654C.1
caccttctcaccattcaacacttctacacttgggcggcgccaaacgctcgcattggtttctctcactcaacgggcttaactcaccaacgcagtttttggccactaaacggggcggcttacagatacaacgatcggatttctgtgacggatccattggtatatcaagccatctgtcaatcaagaatacacacgatatttacagacattaacagtttctggcaaattatcaacacgatagacttcaaatatcatgtatctacaggtacac

SEQ ID NO: 76344 - DNA, 405 bp, Zea mays
  Clone ID: MRT4577_169655C.1
tttttttttttttttttttttttttttttttttttttttttttttttttttttttttttttttttttttttttttttttttttttttttggggggggggggccaattttaggccctgggggttgagcttaccaaaaaaaaatatgtttggcccgcccaaccattggtgggggaggcatttccccgggggttattttttacgctggacgaggccgtttttaagaaaatttttcacaaatttgtttttgagggggggcccggcccctttttcggcgaaattggaaaaatggggatcgggggttttaaaaaatttcaacaggggggaccatgggtttttaaaaatgggtttattggggctgccccggaaaaaccggcccccatggtcccaaagagggccgtttctttt

SEQ ID NO: 76345 - DNA, 378 bp, Zea mays
  unsure (1)..(378): unsure at all n locations
  Clone ID: MRT4577_169656C.1
ggcggccaagcgacagggggaaaaaagagcgagaacncgcagcagacgcgcacacggcaagccccaagcggagccgcggaccggagcggaacgaggccncgaggcganggcaagcggaggcgagggcgcagggagcggcgaacccccacccgccgccccagcggaggcgggagcgggggaggcgacgcggcacaaccggggcgcgaacgggggcaagggcacggagcagacggaccggggcgccacggagggcgcgccaaggaggccgcagccggcagcggcgacgccccagcaccgcagcaacgccggancgacaagggccgcggccgcaaggacgagcaaacccaagacagcaaaggcggggagacggcccacaca

SEQ ID NO: 76346 - DNA, 367 bp, Zea mays
  Clone ID: MRT4577_169657C.1
ctatcgaagagctatgacgtcgcattgcacgcgtacgtaagcttggaattcggctagagctctcctttgtcttgctgatttcagacgtttcataagatctgcccatgaagacaagaagggctccatcttgttaatggaattcttggggagctacctcgctgagctgagtctactagattatggctgcctccgcttcttgccatcagtagttgctgcttcagtcatgtttgggggggggctgaccattgatccaaataccaatccgtggaacacaaagctgcagaagatgactggctacaaagtttctgaactcaaggattgcatcgtagccatacatgacttgcagctcaacaggaaatgttcatca

SEQ ID NO: 76347 - DNA, 267 bp, Zea mays
  unsure (1)..(267): unsure at all n locations
  Clone ID: MRT4577_169658C.1
gcatttctctaatggtgtatctgttgtgcaactaccggatcttgtagtcaggtttgagcatgtctatcctgattacatctctcataacgttattgcttctagtcaagatatgatgggtagtntttgtcttngtatagtctgcagatgtggatcctaactcctgcgagaagtaactcacagtgagaaagctgcctttgcttttatcgagttgcaaatcaaagaggggggggcatgttggtaacaggccccccaagatctggccataaa

SEQ ID NO: 76348 - DNA, 288 bp, Zea mays
  Clone ID: MRT4577_169659C.1
gaaattctaaagaaggacaaagaagcttcggcagcagaaagtcctgcaaagccaaaaaacgcagaattatccaagtgacagatgtgattcatcaaacgccgccaccggtatcggcgtcaaaaattgttattgccgagaccgccgaagccgaagccgccgcagccgaagctaccagggctgaaaccactgaaattgcaactgccagagccgaagctaccggagctgaagccgccgaaactaccggagccgaagctaccggagtcgaagccggggctaccgaagattcaa

SEQ ID NO: 76349 - DNA, 280 bp, Zea mays
  Clone ID: MRT4577_16965C.1
gggctggaaaaacaaggggctttttttttttcattaaggtttttaacacacgcgttatttcgggggaacaacccgatgaaaaacagcccacatttttgagactggaattcttgggggcccttatagactggttaagattaacaattggaaaataccatgcatccaggaacttcaaaacgcctttgatttttgaagaaaaaagggggtggcggcacaccggaacaccccatagaagggatgttggagcaatttgaaaaccttttcgagggacacatttttt

SEQ ID NO: 76350 - DNA, 358 bp, Zea mays
  Clone ID: MRT4577_169660C.1
aaaattggggaatcgacaatatttacaaaaaaattggggtccaggggggcattatccccccgggaaaaaggccacgggggggggcaaaaaccctatcccgatcacgggcagggggcccggccctataaagacgttaaaaaaaaaccctttaaaaaacttttttaccaattggggaataaacccgggctctcctttgggggtctttaacccgggaacaccgggcggggggaaccttggggggctcttttgaacggcaaaaaatttaaggtttgcccgggcccctttaatttctcgggcccggaaggtttttttggttctaaaaaaaaaacagggagcccagggggaatttcccaccaaa

SEQ ID NO: 76351 - DNA, 158 bp, Zea mays
  Clone ID: MRT4577_169661C.1
tgattgatatgcatggcgaggtcctcaacgacgcaggatgccggggctgcagtaggtccccttgagccacccatccgcgatggaacggtaggcggcttccgtgagatggatgccgtcccacaccaggtacttctccgggtcgccgcacgcgctcgacc

SEQ ID NO: 76352 - DNA, 1813 bp, Zea mays
  Clone ID: MRT4577_169662C.1
cattgggtccctcgaggccggccgggagactgtgccactcaagcaagcgagcaagcttaagccccacctcctagcaacatggagacggccttcgttgtcgttctgtcgttcttcttcatcgttgctatccaccgccttctcaaccgcggcgaaagcaagaatatgagcaagcagccgctgccaccgggccctcgcgccatcccggttctcggccacttacacctcctcgagaagccgtaccacctggcgtttatgcgcctcgccgcgcgctacgggcctgtgttctccctccagctgggctcgcgcgccgccgtggtcgtgtccaccgcggactgcgccagggagtgcctcgcagagcacgacgcgacgttcgcgaaccggccgacctaccccacgctgcacctgatgacctacggcggcgccacgatcggccacagcgcctacggcgcgcactggcgccacgtccgccgcgtcgtatcgttgcacctcctgtccccgcaacgcgtgctgtcctccatggtccccaccatcaccgcggaggtgcgcgccatggcgcggaggatgtaccgcgccgccgcgggcggtgccgcgaggatcgagctcaaggggaggctgctcgagctctccctcagcaccctgatggagaccatcgcgcagaccaagacgtaccgtcccgcggacgacgcggacacggacatgtcgccggagacccaggagttcaagcagctgttggacgctatcatctcgcttctcgggctgaccaacgtgttggaattcctgccggtgctacagacgttcgacgttttgggactgaagaagaagatcgcggcggcggcgggcagaagggacgcgttcttccagcggctcattgacgcggagcggcgcaggctggacgacggcgtggagggccagaagaagagcatgctggccgtcctgctcgctctgcagaagtcggaaccggagaattacacggacgagaagatcatggctctatgcttctccatgttcattgccggaacggactccacggcgacggcgatggaatgggccatgtcgctgctgctgaaccaccccgaggtcttgaagaaagcgcgggaggaaatcgacgcgcacgtgggcagctcccgcctgctgggagcggacgacgtgccgagcctcggctacctccactgcgtcctcaacgagacgctccggctgtacccggtggggccgacgctgatcccgcacgagtccacggcggactgcacggtcggcggctaccacgtgccaagcggcacgatgctgctcaccaacgcatacgccatccacagagaccctgcggcgtggacggaaccggacgccttcaggcctgaacgattcgaggatggcagcgccgaagggaagctcctgataccgttcgggatggggcggcgcaagtgtcccggagagaccatggcgctgcggactctggggctggtgctggggactctgatccagtgcttcgactgggccactgtcggaggcgtccccaaagttgacatgacccaaggcggcgggctcactctcccgcgggccgttcccctggaggccatgtgcaaaccgcgccaagtcatgcttgatgtcctccagaagctgtgacacaatctacgtacgtactctgagcgcactactgaagaaagttgatgagtatcatcatcaaaagttgttgccttgctatcgttattaattcgtagggctatatgtatttgtgctccttccgtcgcttctagaaacaccgtacctgaatatcacagctagtaataatcaaataagataccttttccagttatataag

SEQ ID NO: 76353 - DNA, 1585 bp, Zea mays
  Clone ID: MRT4577_169663C.1
cattgggtacctcgaggccggccgggccggggccgcgacgcgcacgcctccagcagatagagaagctaggaatggcgatccaaatggacaagacgtccatcatcgtttgctcggtgatcgggtctctagggttgctgagtgccatcctggggttctcggcagaggggacaaagctcactccatataccatactggtgtacggcgacgactgcctctacccgcagaacccggcgatcgggctcgggatctgcgccgccatcttcctggtggtggctcagatcaccttctcggcggtgggcggctgctgcggctgctgcaggtcccgcgccatcccttcggagaccaagaggatcgtcagcatcgtctgcgccgttttctcatggatagcggcggtgatcgcgttcgcgctgttcatacaaggtgcggcgtggaacgccaacgtggtgcgggtggaacaagcgccctactgcccctacctcaaggacggcgtcttcgccggcgcggccgtgctcgccctcgccgccacagcgctaagcatcacctccttcatcatgcagcggacccagccagctgcggcggcgacggtgacgggggcatcggctgtgggcacaccgaacatgccaggcgcaggcgcaggagggcagtcgccgtcccccgaggtagtaatgggccagccgctgtttccgtcgggcaaggcgcatcagaacgattatcccgtaaaaccccagggatacgagcacgagcagcagcctcatcaggtgcagcaggtccctcctcctaccgagtctcaccacccaccacaaggctacgcacagtccgctgctcaaggcaacgtgtcccacgcgccaaaccaccagctccctccgcgcccagcggccccagcggcggccgcagcaccggcggcggtcgcagcggcagccgcagcctcggcaccgagcgtgctgcagccggcgctcgggacggtcgccatgggccagccgctgccgctgcaggtcccgccacagtactgccttcctgtcccggcacctcagatcggaggcgtggacattcctgccgctctcccctctgctgctgctcctccggcggcagggagcgggtccacgctatcgacggctatccgcaacgaagtagtgagacaagggattagaatggctgcggaggtggtgaaagattccctctttcctgaaaacgggggtagcgttctttccatgatgacggattccactggagatcgaggcgacgctgttcaggttacaaactaattaagtaaggatatgacgatgcgcttattgcttaatgctctgtgcgttataccttgcctttagtttgctgtctgttcttcctcctgtgtatctgtcagtagcttcggcactgtgaagcatgtcctgtgtctgtatacctacttgctgtcgtttgaatcgtcctaaactcgaacttcaagtcacttttttcattgtacctgtgtaatatgtagcttttgcctagtatccatcagaattgtgcagctacactgtttatatgatgattatgcttgtatttatttggaggcgactacatcctctttcatttgccttttagtgttcct

SEQ ID NO: 76354 - DNA, 560 bp, Zea mays
  Clone ID: MRT4577_169664C.1
cgggtctgacccacgcgtttgtggttaaaaaaaaaaaaaaaaaaaaacaaaaaaaaaaaaaaaaaaaaaaaaaaaaaaaaaaaaaaaaaaaaaaaaaaaaaaaaaaaaaaaaaaaaaaaaaaaaaaaaaaaaaaaaaaaaaagggggggccggttttgggggttcccaggggttccgtcttttttcctgttttttgactgcgctttttttttggggggccggtgggtttcatttaattgggccgggtttttccaccttttgggtgggggaaaccctgggggtcccccacttttttcgctttgtagcatttcccctttttcccttttggcgtattggggaaagggccctaacggttcgcctttcccaccttttgcgcctcttgtttggctattgggcccccccttttgcggcccttttaggcccgttggttgtgggggtttcgcccatttttccctttatttttgtaagccccttaggccccgtttcttccgtttttttccttttttttttcggccggttggccggttttcccggtttttttttaaatggggggctccttt

SEQ ID NO: 76355 - DNA, 420 bp, Zea mays
  Clone ID: MRT4577_169665C.1
acgtgagcttgcatcctctaaattttccgccctttttttttatcttttttttttattgagaatattaaaaacataatcctttgtttatccaaaaaatcaccttcaacacttcagtaccacacttgtaccaaaaaaaaatttatacaagaccaatattcatctagagaaacttgcccacaagtccacaacttcaatcttcaatggcgaccttatgctgcttcgcgcgttgcctctccaacaatgccacaagaaatcaagtcaggcccctgcaattaaggccacgacgctgtccatgagcagcttgtccttctcccactcctgcttctggaggaaaaaaacatgctcctctccttctgactccagccaccccacgttcccggtccactccccttccgccactgttttatattacccccccgt

SEQ ID NO: 76356 - DNA, 389 bp, Zea mays
  Clone ID: MRT4577_169666C.1
gggggacaaaaagggacgctcttttctgaggactgatccaaccgcagcccaccccacataaacatttattggtcatcaaagcattggctatcacctggttcctgaaaaggatttgattggggcctaaattcctgacactatgccactgtttttccacatagtcttacaagataaccaaaccctgccaatgacatttggctatgtcaagcactgcctgaggcaaacgctgcattgaggcacaagcatagattggcataagtgtgtgcttcctgcttttaagttccttaacaaaacttgacttgcctggctacaaaggcctgtaaagaatccaagcaacatgctgccttctgccctgcacggtgagaagggcccaaaacaccagtgcaaat

SEQ ID NO: 76357 - DNA, 306 bp, Zea mays
  Clone ID: MRT4577_169667C.1
cttcctcatatgatattaaaactgaggggggataattaaaaaaaacaggtccaaaatccggcaaaaatacagcacgcctggaaaacgaacatgggaaaaacaaacaaggccgcaaggccagaaaaaaaacaagggggcaaagcctttacagaaaacaccccagggcaaaccccaaagggggaaaaacaaacaccccgggaaagacacacctttgcaggacgaaaggccacatacgaacaaaagcaaaagggcaatagataaggccgaaaaaaggatgtccccggagggaaacccagggtcatcaga

SEQ ID NO: 76358 - DNA, 805 bp, Zea mays
  Clone ID: MRT4577_169668C.1
ctagacgccaaagtattagcggtgggccttaataattccacagattaaaccaactaaacaagttctgtttattaaggtggtaattttattaacatttaggtcttccattggtaggttgtcggtgatacaactgggccaattataggatcaagttttgtgttgatattggataatgcaaagaagcataaaaaagaacatggtgatgaatttgtgtcagttgagcacatcctgcaagcattcacttcagataaaaggtttggacaacagctcttcaaagatctgaaaattgtggagaatgatcttaaagaagctatttcagcagtacggggaagccagcgagtcacagatcagacttatttcgttggatatgggagcattacttgctggagctaaattccgtggtgattttgaggagagattaaaggctgttctaaaggaggtcactgcttctaatggacagatcatcttgttcattgatgagatccatactgttgttggtgcaggagctgctggtggagcgatggatgctggtaacctgttgaagccaatgctaggccgtggagaactccgctgcattggagcaacaacattggatgagtacaggaagtacattgagaaggatgctgctcttgagcgtaggttccagcaggtttattgtggtgagccagcagttgaggataccatctccatattgcgcggtttgcgagaacgatatgaactgcatcatggtgttaagatatcagatggggctcttgttgctgctgcagttctatccgatcgatacatactggacgttttttgcctg

SEQ ID NO: 76359 - DNA, 460 bp, Zea mays
  unsure (1)..(460): unsure at all n locations
  Clone ID: MRT4577_169669C.1
tcgcccattccgcgtgtttactgccctccaaaacatccnttctccnattgggcgccgcccgcctcgccctcctcgtcaacaaaagcccacctgaagctagcgagctagccaccctccccgccgccgccacctnccccttccctcccccaccccttctcttcctgacgatagttgtggnnnacccnnnctncacctacaaaaaaaacaccctncccnnncanncacacccccaccncctnctccntttncantactaaccaatactcctncctcnnaatcttttaaaaccccctccctcacaacanaatccaatatttcttcctanacttcttntcctgccgttccacaacttncttttttttttttcctgacggtcgatcttnacccccttcgatttcaatttaatttttcttatctataaatcttttttctaacttcattacgatactgtcattttgat

SEQ ID NO: 76360 - DNA, 348 bp, Zea mays
  Clone ID: MRT4577_16966C.1
acgagctgggccgcggcctcttcgccttcgacttctcgctgctcgccgaccgccgtgcgttcgggatgatctatcgcctcaccaagcagggatactatctgcacgagttccatagcgccctgcgcaagatgggccgcgtcggcttgcgaacggacgccatccgcggctagatccgcctgaactgccaggccatgatctagtagaatgcgactgtccataacgtaacgtctacgttgccacctttttgttgggcaaacattattggtttgctgcaataaatcatatggatgacattggatttagcccaagtggtaattagcatacatctatatacatgtatacctggaa

SEQ ID NO: 76361 - DNA, 179 bp, Zea mays
  Clone ID: MRT4577_169670C.1
gttaaaaacagggcgtgattagcgagacttggtattcatccgctctactcaactcacataatgctcatgcgagcacctgtttacatagactcgggtactacagatttctccaaggctaccgtttcccagatattggttctcttgtcaaacagtactccacagatacacaccgcaccaac

SEQ ID NO: 76362 - DNA, 507 bp, Zea mays
  Clone ID: MRT4577_169671C.1
gcggtatgctcggaattcggctcgagcttgccagtccacatttctttggggtggctgacatgattggaccagggggggttaagaaaagtgtggattactgtcagaacgataagtcgactgggaaattccctgggaagagccacatactgaaggatgctcccaatactctatgccgacatatattgctggaaaacaacgacaatgaacttggaacaaacagcagatatacacagcaggtcaaactagagcaaggaatggacatgctaaagatctttaagaaccaggttgatgatgcatgaatccttgacgacttggagttatacgaggagcgtgagaaagcgctgtaggaaaataaggtacgcgtgcatcagcaacatctacccaggtgtatagttattgagcccaagaaaccctacactgcactcagtgacctcgtgggccatatcacaaagagtattgctgaggctgagcggctagatgaggccaagactgtaggccatttgactg

SEQ ID NO: 76363 - DNA, 862 bp, Zea mays
  Clone ID: MRT4577_169672C.1
attgctagatcgtccctccatccaccactttgctggctccgtctatacaatagcaacacatcagcacccgccgcccgtccacatcccttcacatcggtcgacccagatctcacaggccgcccaagccagccagcgacgatgaggccctcagtgatgagatccgccgcccagctcctccgccgccgcaactactcctccgcgtccgggcagcaggcgcggaaggtggccatcctcggcgcggccggcggcatcgggcagccgctgtctctcctcatgaagctgaaccccctcgtctcctccctctccctctacgatatcgcggccaccccgggcgtcgctgccgacgtttcccacatcaattcccctgccctggtgaagggcttcatggcggacgatcagctcgcggaggcgttggatggggccgacctggtgatcatcccggccggcgtcccgaggaagcccggcatgaccagggacgacctcttcaacattaacgccggcatcgttaagaacctctgcaccgccatcgccaagtactgcccgaatgctcttgtcaacatgatcagcaaccctgtgaattcaaccgttccgattgctgctgaagttttcaagaaggctggaacctatgatgagaagagattgtttggtgtgaccactcttgatgttgttcgtgccaggactttctatgctgggaaggctaatgtagatgttaatactgtggacgttcctgttgttggtggtcatgctggtattaccatcttgccactgttctcacaggcaactccttccactaatgcattgtctgctgaagaaatcaaggctctcacaagaggacacaggagggtggcacagaagtcgttga

SEQ ID NO: 76364 - DNA, 313 bp, Zea mays
  Clone ID: MRT4577_169673C.1
ggacgaacagagccagtctacatgttcgtactagtaagcattaatgctggggggtacttaggaccgcaaatgaattttatcaaaaccagcacaacattgtaaacaaaaaaaaccttttcagttggggcggcagatttcagcagtgaatatacagggcagcgaccagactatacaagcaggggagcagatgttaactaattatacaagggcagggagtgatttgggaagaaaatgtaccaggagcaatgtagccgtacgagccggcgataggggacatgcactccgaaccgccagcgttgccccggaggaactt

SEQ ID NO: 76365 - DNA, 485 bp, Zea mays
  Clone ID: MRT4577_169674C.1
ggcatcccgggtcgcccagcgtccgccccgcgtccgcggacgcgtgggtggttttttttttttttttttttttttttttttgtttttttttttttttttttttttttttttttggggaaggattgaccatccaaaagctcacataaggggggggggggataaacatgataaacggggtccatattacgacatttttagggggggggggggggcaaaactcgaaacacaagacaaggggaatcagggggggggggacacacacaagtaatagcataatcaaagatttacggggtttgatctcctcaacagagggggccgagattgggcgttagctcaaccaggggggagcatacagaagtcgatgcaaattggtccaagcaccgggcttccaaaaataccaaccaagggggggttggttcaaaagagcaacagaagattttatgggcccaggcatgaaaaaaatgacgttctttacgttcaggggg

SEQ ID NO: 76366 - DNA, 407 bp, Zea mays
  Clone ID: MRT4577_169675C.1
aggcaaccccaaaaaaactggggaactggtttataaaaaaagttggggtcatgtgagggggggggggggcttaaacagccatgatctgggaacctattacaaggaccaactacccataggggcaaacgaaactttaaacgggggcataggaatttataatccaaacaaacttggacacaagaggtactcggggaaaaaaccatccttccgcccctaaaacccagggggcataaattttttttaacgcttttaaatcttgggcatttttttttggtgggcccgaacccgggggtggtttggcctttttttttggttggccctcccttggttatcaacaggtttttggcttttctttcactgggcaaaaaggttttggggccggtttttctcctttttaaaaccttccc

SEQ ID NO: 76367 - DNA, 367 bp, Zea mays
  Clone ID: MRT4577_169676C.1
gtggcaactacaagctgcccaagcactgcgacaacaacgaggtgctcaaggcgctgtgccttaggcggggtgggtcgtcgaggacgacggcaccacctaccgaaagatccggtcggagctttggatgacctcacccgtgcgcttcttgcgtcgtcttggcagggatgcaagccgccgccggggatgatgagcccgtgctcgtcctcgcagctgctgagcgcgccgtcctcgagctcacgctcggcgtcggcgccaagtgagtgaaaagcggcgacggccgtcgtcgcgctcacagcaagctcgggatctttgagctcccgtactgcaatgccggtagtaggagaagattgctgtgagaccggcaaca

SEQ ID NO: 76368 - DNA, 719 bp, Zea mays
  Clone ID: MRT4577_169677C.1
aggtgctgtcaggccggcgggccattgacaagaaccggccccagggtgagcacaaccttgtggagtgggctcgaccttacctcacacacaagcgcaagatattccggatcctggataccaggctggaaggccaatacaatctcgacggcgcacaagccattgccgccctttctcttgagtgcctgtcctacgaagctaagatgaggccgactatggatgccgtggtaactatcctagaggagcttcaagactctggtgaggccgacaagcgtcaaggacccaaggctggaaccaaacaggcgcctgctgctgctgccgcgagcgctagcaagagcagtcgcaagcttcgccggagaaccctgggagggacgaaggagacgactgttggtccaaatccaaaaccattattggcccgttctcgttagcgaggaaagggaaagcgttgcttggtcaggtggtttgggtaggtagactgtagcttgtgaatatgatctgtcctgtgtataatgagggtaatcggattcttttttggcaacgagtcttgtttttttttttaatcgtgagctgctcggtttctgcattgtctggatcctggatgtcgaaacccatggcatggcatcaagggaggagaggccatgttccgagtgtttaattaacctgaatcattatgtttttgctgccaaaaaaaaaaaaaaaaaaaaaaaaaaaaaactcgagaa

SEQ ID NO: 76369 - DNA, 516 bp, Zea mays
  Clone ID: MRT4577_169678C.1
ctcactcgtgctgtatatctaactggggactgagctgaagagaatatggctagcgagttggggtgctttcatagagcttcacataagggacatgctggggcacatatcgcatctggatccttgtttgttaacgggctgaaatacctgctgttattacaagggtcaactcaggcaagagttcatgaactgggtaaaatgcctgaaaaagaacccaacaacaggatccactaaagctagcaaaagaacaagttcaaaatccagctgaagcaggctgtgatctcggcttgcagctgttgaagaggcttgtaacttatgaaaacccttaagaaaacctaaagcaggttctgcaatgatatccactgaaagaatcccattgcatatgccgcatacaaggatggaatatagcatcatggatggtgcacatagggctaccaataagtatatctactgccttcattatggccgaggctattctatactctaatgttcccttcaactttgcaggcagatatactg

SEQ ID NO: 76370 - DNA, 596 bp, Zea mays
  unsure (1)..(596): unsure at all n locations
  Clone ID: MRT4577_169679C.1
cctcttataacggcccgccccccttcctccccccctcccccttccttctttccttcttcttcttctcttcttctctttctttttttttttttttttttttttttttttttttttttttttttttttttttttggggcatcaaaactcccccaacatatatcaccaacaatatcccctcccggctaaaaggaaaaccctttttttgacagttttacaaacccaaaaaacccttatccattcttgcaaagggcccccccaagttacaaatcccacaccccccttgcaaaattcccaaaattgcatttcccacccaaaattgccccaagaaacaaaccccaattgccctctaaaaaaaaaaaaccaaaaccctttactttgaaaaaaaaaataattgccccccttgtggtccctcccgcgaaccaccaaggggcatcctatactgggtcatctgctgcaaaacccaaaataaaactgggggggcccccaaaccccacccaaaaacaggatattgaggcctggatttcccccttaatggttggttggggtatccanccnatccaaatccaaaaccccctgcctgcatgttaagattccaa

SEQ ID NO: 76371 - DNA, 199 bp, Zea mays
  Clone ID: MRT4577_16967C.1
gtacgactgtacacacacaagctatctctagctatagcttagcagctccttttcagcaagaaggatgctcctcggcgtgtgtgccgttctgaaggagggcaccgtcacaaacactgcggacggccagtaggtcggccgtcgagggcctggcgatgagcgccgacagcacgtgagaagaacatgaaggctgaagccggtt

SEQ ID NO: 76372 - DNA, 511 bp, Zea mays
  Clone ID: MRT4577_169680C.1
ctagggaaaagcttttctcttaccccgagccccgaaggccgcagcatcaggcgagggcccccacgcgagagaccgagacggcgctgcccaatcaggggaccgatgaccaccccagcttcaagctcgtcatcgacggcgatggaggaactggcaaaactacattggtgaagaggcatctcactggagagtttgagaagaaatatgaaccaaccataggtgaggaagcccatccgccggagtccaccactaactgtggtaagatcaggcaccactgctgggataccgcaaggcaagagaagaccggtggccccaaggatggatactaaaaccatggccagcgcgcgatcatcatgccagatgtaacctcaaggcttactaacaagaatgaccctacgcggcaaacggacccgcgcagggcctgcgaaaacatccccaccgacctctgcggaaaaaaggccgatgagaagaacaggcagggcaaagccaagcaggataccttcccacaggaaga

SEQ ID NO: 76373 - DNA, 564 bp, Zea mays
  Clone ID: MRT4577_169681C.1
ccggccgggacttgccacagcctccaagctctctccaacgatgggacctctattgccgggcgacagtgctctacgtcgaggtcatcgccctctccgccgagtcctaggcgtataacggcaacgaattgctcaacatcttccgaagccagcggaacgagaactactgacttccacataccgggagaccaccgaggaaggatgcgatagccccgcggccagcgaccaccagaacctcataacggcgtcggtgaccaagagcgggctcatgaaggtgccgccccgggccgcgcccaccgcggctgagcaggacaaggcggtggtccccgcggactacgccgcggggtaccacagcgcttgaggcaatatcactgagaacgagggagtgtccgcgatgaacctggcgattatgtggagcgacaagggcatgatgtgcgacacgttcaccacggggccgtcgctgctgcggatgcccaaggagaactgccgtctcgatctccgcagcaagcaggtcggtgccaaggactgagacgcgcacgacgtcgagtttgattacgcgacaggcgg

SEQ ID NO: 76374 - DNA, 459 bp, Zea mays
  Clone ID: MRT4577_169682C.1
tcgcgatctagaactactccctacgcgtgggcactattgatattgactcgctgtatgagggcatcgacttctactccgaccatgacccgtgccaggtttgaggtagctcaacatgaacctgtatcacgaagagcatggagcctgttgagaagtgcactgcaggatgccaacattgaacaaaagcaccgatcatgacgtcgtactcgaaggcggctccactatgatcctcatagtgcaccaactgtttcatgactacttcaacaacaaggtagctgaacatgaacataaacccctatgaggctgtcatctatggtgctgctgtccaccctgtcattctgagctgtgatggcaatgagaaggtgcatgacctgatcctgctggacgtcacccctctgtcactgtgactggagactgctggtatgagcaataacaatgctgatacactagaacacaaccatc

SEQ ID NO: 76375 - DNA, 404 bp, Zea mays
  Clone ID: MRT4577_169683C.1
tcgcgttgtcatttttttgccagatggctatgatttttcttgttgcacttaagtcggagctggcggcggaggtgtacgctaagcagaaggtggatgaccagtgggcactgcacgtgtcgcaccacacatcggacatcctccactgctggatggagcagagctggctgcccacctccacggtggtgcaggctggcaccacgccgcaggctaacaagcgatgcctatatctagagcaagatgaaggtggatgacacgttccagcagaaatccatgggtcctactacccttctttaaatcaagttttttaagaggaaccttgctttttacaccaggaatggtgatatccatgctgaacggtgtcttgaaggtgggattttcccaccaataagccatacttcaggcca

SEQ ID NO: 76376 - DNA, 376 bp, Zea mays
  unsure (1)..(376): unsure at all n locations
  Clone ID: MRT4577_169684C.1
cgcgtgcgctttggctcnnaacacacacacagcccggncttcgnatttcttttccctncgccgatccaagaggcagggcttcgttaagaccctcactggaaagactatcaccctcgaggtggagtcttctgacaccattgacaacgtcaaggccaagatccaggacaaggagggcatcccccctgaccagcagcggctcatctttgctggcaagcagctcgaggacgggcgcacacttgccgactacaacatccagaaggagagcaccctccaccttgttctccgccttaggggaggcattctaatcttctttaagacccttactggaaagactatcaccctcgaggtggagtcttttgacaccatctacaacctt

SEQ ID NO: 76377 - DNA, 646 bp, Zea mays
  Clone ID: MRT4577_169685C.1
ctctccttttgctcggaacgattccccgcccggcctccgatctccgatccccgatcccctcgtcgatccaagatgcagatcttcgtcaagactctcactggaaagactatcaccctcgaggtggagtcctctgacaccattgacaacgtcaagggcaagatccaggacaaggaaggcattcccccggaccagcaccggctcatcttcgctggcaagcagctcgaggacgggcgcacacttgccgactacaacatccagaaggagagcaccctccaccttgttctccgcctccggggaggcatgcagatcttcgtcaagaccctcactggaaagactatcaccctcgaggtggagtcttctgacaccatcgacaaccgtcaaggccaagatccagcaccaggagggcatcccctccggaccagcagcggctcatttttgctggcaagcagctcgaggacgggcgcacgctggccgactacaacattcagaaggagagcacccctccaccttggtgttgcctctcaggggccgcatgcacatcttcctgaagactctgactggcaagactatcacccttgaggtcgagtcttctgataccattgacactgtcaaggcccagatccccgacaaggaggccctccccccc

SEQ ID NO: 76378 - DNA, 290 bp, Zea mays
  Clone ID: MRT4577_169686C.1
aacaataaatttcagtctatttcgatcaaagtaaaatttgaacaacagaacaagagcctatttgatcgcgctaccaggaccttatctgataacagttgataggatgacacagaggcccaacggacacgggaacttcatatgtcactcaagttccaacacaactaaactttgaaacaaaggccatactacgggccaaggagcgctgttggctataaatatggggataatttgtgcacagctgaggaacactattggtgaaatcttgataacagaatggggtaaaggagaaa

SEQ ID NO: 76379 - DNA, 243 bp, Zea mays
  unsure (1)..(243): unsure at all n locations
  Clone ID: MRT4577_169687C.1
ttattttttctcccgaaaaagaaacccangttttttgtgaaatagccaggcacagcatctgcgtttctgatatttctcgggcaagcaatatacatactgaaaagtgccctgatgatgctatcaaaactgaggatcaggaagagtctgattctgctcttcaacatgattacaagaaaaaaacacaaggttttatgggatgctaccagacactagcaacatcattctccggagacaaaaagaagt

SEQ ID NO: 76380 - DNA, 236 bp, Zea mays
  Clone ID: MRT4577_169688C.1
acaacaaaactacctttttcacgggccaattgagaatgttcaaaatcattttacctaactcccctcatatcagaaaacttaccctctctctaagacaagccaatacatctgataacaacatcccttgtaaatataaaagatcaatatatcaatcttttaaaccctgaataaatatcatccaaccatgttctaaaacctactgactgcattcactttacatcacatgtactcatgta

SEQ ID NO: 76381 - DNA, 525 bp, Zea mays
  unsure (1)..(525): unsure at all n locations
  Clone ID: MRT4577_169689C.1
ggggggggcggggggcannagcaagcaaacaagtgcggggcgcataacgccattgagggaacnggctagagctagaaccaccctttgtttgggagnnagctagctagcgaccaacctcttttttttccaacanggcgaggnagacaagcggggggggttttttttttttttatgaccctctcctccccccgtagaaggaggaagagggttttttttttattgccaagtatggccaccgccgctggagaaccaaccccaattttttttttttttttaggaaaaaaaaaaaccgcttttttttttttttttactacctccagccggacctcaagaggggagctttcncgcatgaatatgagtacctcatcattcatttccattccatgaggggaataaaaaaaaaaaaaaattttttttttaacagaacaggcaagaccgacaangaggggaataactttttgtttcttttcggcaagaataagctccggcagcgcgggatcgacccggtcactcacaagccggtcc

SEQ ID NO: 76382 - DNA, 732 bp, Zea mays
  Clone ID: MRT4577_16968C.1
tgcggtaccggtccggaattcccgggtcgacccacgcgtccgccagtgtgtcctgttctgatcttctgctgtgttccgtaacttccgttattcctattcttttccaacgcgactacacgtctacgcctctcctctgctttcccctctggcccttccgatggactactcgagtggcgcgacggagtcggggagggtgcgagcacgttggtgctactgccgctgcttccgccgttggtgccgctgcttctgcggctgctactgctgcaactgcttccccgacgagccccacgacgaccgccgcgccgcagcgtacgcttaggctcctggactctccactcgcagtcgcagggagagtcgcatataggcatatgagcagtatgagggaactggatttctgtcctcatgtacactaggcaaatggctaccttgttcttcaaatagatgttgaagaagatattacagcttcagagaatcagagctctcttttttggtgcttgtaatgttacaaagaagccccgacgatgatgtgaatcagagtagcacttcgtgcattctaatctgtgtactgtggttcgcgaaactaagattgaatgtgtcgagtgtttctgtgtgggcggttgtttgcctcttctgtactctgctgttcttcttctctgtttaatgaaataattcacagctctcctgcaaaaaaaaaaaaaaaaaaggagagaaaaaaaatgttgaccccaaacc

SEQ ID NO: 76383 - DNA, 733 bp, Zea mays
  Clone ID: MRT4577_169690C.1
ctcgaggccggccgggagatattactatttactaaactttctcctaactatactaacatacacaaatatttccaaaattttctaagaactttgaatctagacgcatagtttacataaatatttcctataattttatatatgtttagatttatagttctcagaaaactctaaaactatttgtagctaagtgaaggtccgtgtaaaaattgttctctaggtgtttctaaaaatcaagtataaaattaatttagttagtaattagaccacttgacttgcttaataaaatcaataaaaaattattagattagtaataatattattagctctaataattttttgctagagataaataatattattgctaaactactaaattttattttattaagaaagctaagtgatattttcttctaattactaactaaatcaattatacatttgctttttataaaacttaccaaacaataataaaatgatatgcaatttttacataaactttctcctagctaaactaacatacacaaatatttccaaaattttctaagaacttcgaatctagacgcataatttacatagatatttcttataattttatatatgcttagatttagagttctcagaaaactctaaaaatatttgtatatgttagtttagctaagtaaaggtcagtgtaaaaattgttctctaggggttttaaaaaaacaaatagaccaaaagaatacaaaaagcggcc

SEQ ID NO: 76384 - DNA, 213 bp, Zea mays
  Clone ID: MRT4577_169691C.1
caaactgctgtgcgtaagccacaatgcgttgacgttttatatcaagtgcctcaactggaagacatcaaagagggcggtcgatgcaatggacccgagcttgactccgctcggctgccacgagagcacgatcatttaggcgagacttgcggcaatgactgtcgccgcgactacaaccttaggatgcacataaacaccgacggggaccagcttaag

SEQ ID NO: 76385 - DNA, 470 bp, Zea mays
  unsure (1)..(470): unsure at all n locations
  Clone ID: MRT4577_169692C.1
cccagcgtccngacctttcagnagcatgtaactagtcttgctgcactggacttcttggtgtgcctgaagtcggatgtgttcgtcatgacccacggtggcaatttcgccaagctgatcatcggctaccgccgctacatgggccgccacaggctcaagtcaatcaagccagacaagggtctcatgtccaagttcttcggggacccttacatgccttgggcgactttcgtggagaacgtgatgatcacccatgagacacgaaccgggctccccgaatccaccttcccacactatgacctatgggagaaccctctcaccccttgcatgtgtagagcttaaattatagactacgagtgatggtgcatagttattctttgttcatttgctgatatgcaaactgcaaattttgtgtagtttttttaccactttttgatgtacgatttttttttaccaaagcaaagttcagttcatgc

SEQ ID NO: 76386 - DNA, 560 bp, Zea mays
  Clone ID: MRT4577_169693C.1
aaaaaagaaaaacccccaaaaaacaccccacatttggcctaagggtttggcaacattcctaggttccccagggaaaaaaaaacccaatacacccaagaggggaattttaaaaaaaaaccccaaccccaagcattatacggggcgcccccgaaaacaagttaaaaaaaaaagggggtgtcttcccggaaaacaaaaacccatgacttttggggggattaattttcaaaagaaccacccccccttttttttcaaaaatggggaagaggggaaaaaatttgcaaagggctcaggtgaacacccggggggggggactttgttaaaaaaaaccaatggcggggaaaaaaaaagaccgggggcgtccccacccccttgttcacccgaaaaatttttgggaacaacagtttttaaagggggggcttaagggggggtttttggcccccccccaacttttccctttgaacccttaggtttagggttagaaatttttggccttgaaaccacgggttttttttcaccctttggggccaaacccccctgagagggatttttaaagaggggcc

SEQ ID NO: 76387 - DNA, 607 bp, Zea mays
  Clone ID: MRT4577_169694C.1
agagagaggcctaagcaccagcaccagcaccaccaccagtgatccggccaaggtccgtaccgaccaaagacggccggggaggagatggccgcctccgggaccgggaacaacaggttcgcccatacatgcgctcgcgtgcggcagttcatgatggagcagaacaggcaggtgcgaatggatgacctcatcggctcctcctcgtccccgaggccactgcaactgacgccagtccctgtagcgacggggccgccgccggcggctgcctgggagaccgacgccggcgctaggactttgccgctgttccccgtccgcaatagcagtagcacggagatcatcaggccagagcaggaggccaaggccaccctaaccatcttctaccagggccaggtggcaacgttccacaacttcccggcagacagagccaaggaccttatacaaatggcaggttctgtgaccggggaggcgccggggaaaggggtgacgacgacgaccgccgtgccagaaaaggccgggaccagtggtggtgagccgtcggctgcaggggtagctggcacgccgcccatcgcaaggaagcttacgctacaaaggttttcttaagaagaggaag

SEQ ID NO: 76388 - DNA, 297 bp, Zea mays
  unsure (1)..(297): unsure at all n locations
  Clone ID: MRT4577_169695C.1
aagagngagttttttttttttttaggtagatcnnccatagnnaaaaccccatcccttcaccggtttaaaacattcgaaaccaacaagcatttaaaaaggggccaaacattaaaaacacatttagcataaaaccccgggcttgggcccagcgagtccagcaaagacccccaaatttccttttttctggtcctagcggacccactaagcaaagttccacagatccaaaatatgcttgtatgaatgcaggatgcaagacccctcctccatagaataaccaccctgggggacccaaacctt

SEQ ID NO: 76389 - DNA, 1997 bp, Zea mays
  Clone ID: MRT4577_169696C.1
ctcccccccccggtccccggccgcggcacgagctacaacacgggtacagtacaggtgaggagggagaaaacaaacgaacgaaataaagagagtacgcatgggtttgcagatgatccatggcaggccctgcgccttgtgctgcccgtcctcctcctcctcgtcctccgccttgtggatgaggatgcaggcccagctgcccccaaagcagtctcaccatccattgaacggaggactggcactctcctcctctcccctcgcggtcctggcatggcatttcctgctaaggcgtcgcagcagggacggtgccacagctctcgcatcttcatccggggtgcttcaaatcgcagaggacaaatcatctgcggccaacttgacaaagcacaaggtgagtgcagaaaggaagctcctcaacgacgctcttgacagaactggtgtgcgatatgagactgagagctggatggatgaagagacatcgtcctggatggacagggatctcacggacagcgatttgcggtaccgcttgctaatgcagaacctcgaggaactggagaccagcttggttggtaaagacctggagatggacattcttgagcagcttggggctttgggatcgttcaacgcttctgtggccaggggtgtctcggcgttacatggtcgaccagatggctctctgcttgatgatccggagccggagacgactcctctggatgcggggcaagaagacagccaaatggtcgtcgtccggagtggcaagagccaggagaggaagctgagaaggatgagagcatcatcagatgagaaaggatccaggacctcggtgaaggtgaacccaccacgaagacccaagaaatcccgtaaggcgagtagcagccagtttatatccgagtggaaaagtcacccaggccaaaggaggatcattgtgcgtgagcaatcagcactgctgtccaccatcaaggaatgtgcaggtcttgagaagataagggagaagatggtgaaggaagggcaggaggtgagctaccacaggtgggcggaggcagctggggtggacgaggcagagctggtgagcaggctgcaggcaggttactgctgccgggacaggctactggtgaccaccgagtggctggtcaggtgcatcgcgagaacatacaccggcatggggacggccttggacgatctgcttcaggctgggaagatgggcgttcttgacggcgccgagaagttcgacagccggaaggggtgcaggttctccacgtacgtcaagtactggatcaggaaagggatgctcgctctgctggctgaaaactcaggagtcaccctgctgcctgcaagaatggagagcatcatgcgcaaggtgaaggaggcgcggcgtgggatccggtacaggcagggcaggaacccgtcggactcagaggttgccgccgccgtgggcgtgtcggtagccaacgtgaggctggcgcgcaagtgctctcgcagggccgtctcgctctactcggaggtcgcgatcggacaggacgtcaagttcgcggaggtgatcccggacgagtcggcgtctccggacgaggcggcgctgttccggggccagctgagggagcggctgctgctggtgctgggcaggctgcccgcgcgggaaggacgcgtgctgcggctgcggcacgggctggaggacgggcggtgcaggtcgctggaggagatcggcggcatctacggcgtctccaaggagtggatcaggaagatcgagaagtcggccatggccaggctccgggacgacgacgccgtgcgccgcgacctccacgacttcgtctagtctgtctgcagtgcactagaacaatttgttagctggtagggaacgatgtcatgtacgtagtaccatactatctatcagcagactgaaattgaagctgctattcacacgaaatatacaatgatagagatttgtgattcaaaaaaaaaaaaaaaaaatgacggttataatgtcatgcttgccttcatgtttcacc

SEQ ID NO: 76390 - DNA, 537 bp, Zea mays
  Clone ID: MRT4577_169697C.1
tatgttctgttctgcggtctgctcccgggatctcctctcccggtatctcctcatctatgctgcagaacctggggcaccacctagggaccgaccctcgcccatggacatcgctgaagaagctcccaaactgcaccacgcggccgcccgctcaacatcaacaaaaacgcgctgggggacagctacaagagcgagcagtccacgtcgaagaacctgacgacgcacctgaccgccgactaccgcgatcacgctccttcgacacccgtggaacgccgtggcccaccaaccctccactacttcgacttctctggcctacaacgcgcatggagcgcctacgctgctcgacctcctggacatcatctacgagatcggcgaccactgctgcttctacgacgagaactccgatctaccaccgcttcatcgcgctcgactccatctgcagaggtgagctgtttatcgaagtcgatgtcctctgcgccttgccgagtacctcaatgatgcgtgctctatatagctagtgatcaatatgatatacttgag

SEQ ID NO: 76391 - DNA, 573 bp, Zea mays
  Clone ID: MRT4577_169698C.1
ctgattctttttatgtggatatcatttttttttttggctctaattaaatcggtcaggtgggacacaacaaaactatgaaagaggcccttgattaaacgtcagcgacccaacgcttcctaaggaaaacatggaatacatgactcaagtcctgtttatgcccatagaggggaacgggatatttgagaacatgagttacacaacatgaaccagccgtggggacggccctcccatttaagagctgcgccaacaccttcatgtgaggatgagttggaaaaacttcgcctaatatctgaagatgccgctgttgtccattttggtaatcaggtagggtcttctaaaaccagagagcgggtgttcttatataaggggtggggatactactgatcaaggataaggagccttctcctgaaccgcgcatactactagctttgccggaggcatactcattcacaaaaaccttcttagctatgtacgcgggaactcccaatgattaaacaaacattttgggggaaaaaaaccctgcttgaaccagggttgaccacaaacacatgaacacagagcaactctgagaaa

SEQ ID NO: 76392 - DNA, 509 bp, Zea mays
  Clone ID: MRT4577_169699C.1
agcttgtaattcggttcgtgcccagtagtattcttatatatatcgggggggattatggaattactttagtgggggtatgttccttgttccaaaaagatgtatgtttatggattaggctcattttttctgaacaacacagctacactacttgctatttttattaagaagaaagaaatacggtcactccaagtatatgggaggaaaaaaatgtatcttctacaaccaactatttaaaacatgaattctcataggaaaaacacctttcaattaaaacagcttacattatgtttgtgagcttagcagctgtagaagcatctcattatgagcagtggtttcaagccatgtactcatagatcactctcgttagtcataggttgtacaaccaataggacatccggaggagcttcttcgagcacacaatctttgcaaatttaagctcataatttcccgaagtgaccaagatgattaaagaatcaagccttcttcttatatttattatcaaaccccta

SEQ ID NO: 76393 - DNA, 273 bp, Zea mays
  Clone ID: MRT4577_16969C.1
ggggactcaccagtgacgaactcgaagcttgcgttcttgacgcacaggtcggcagcaagcggtggtagagcgagaggtcgagaagatgaacagcagcactctgctggcgatcctagttctccaggccctcctgggctctgttatacgaggccaaaggacctgcaggacctacaaccaataatcagtgctggcgcaacgagcgcaccagctgggggggcttgcagacctgcaacgacctcctcacctatgtctccgccacctgcaagaactggg

SEQ ID NO: 76394 - DNA, 290 bp, Zea mays
  Clone ID: MRT4577_1696C.1
taggccttgctaggtacagagatatctatttttccgaaattaagtcaaaaataacacactggatctgaccatggatccgtacgctcaaataacaattcctaactgattactttgtgccaaatcattcaggggaatcagtgcacactgttcgttatgagcacccaccaatagtgtacctgattcatggtctgtttcttacgaaagcagaggcccactattctagacctttgattgtcggatcgattgcacatctccggtctgtgccgttggccaccatgttaaatagagaa

SEQ ID NO: 76395 - DNA, 524 bp, Zea mays
  Clone ID: MRT4577_169700C.1
aaccccagccccaaaccccccaaagtggaagagaagattgttgcggcggcggatcggagtgagaagaatcaatggcttccgacggcgtggtggccctgtacggcaacaacaaggcggtggtggagccctccgccaagcctgccgccgccaccttctccgtcaaggtgggcctcgcccagatgctgcgcggcggcgtcatcatggacgtggtcaccgccgagcaggcgcgcctcgccgaggaggccggcgcctgcgccgtcatggcgctggagcgcgtgcccgccgacatccgcgcccagggcggcgtggcccgcatgtccgacccggccctcatccgcgacatcaagcgcgccgtcaccatcccggtgatggccaaggcccgcatcgggcacttcgtggaggcccagatcctggaggccatcggcgtggactacgtggacgagagcgaggtcctgaccctcgccgacgacgcccaccacatcaacaagcacaacttccgtgtccccttcgtgagcggctgccgc

SEQ ID NO: 76396 - DNA, 465 bp, Zea mays
  Clone ID: MRT4577_169701C.1
atgcaggcggtgtgcaaccgcaccacggggacgcacccctccgacttcgacgcatccagcatggaggcccagacccacacgtcatgtaaccggcgcgtcggttactacatgcgagaaattgcaccgccatttgcgccaataccgcgccttcttgactgtggagccagtgccgcgactctaggcaaccctgtgcttggcccaacagtaccaaccgagcacatcggtcacgagtcagtcagccgcgggaggaggcgcgacggtcgatatggccaaaactgggccggcagtaatggcggcagcaggcgagcgggagcagctgtcaagtcatctgcaggctcacgtcccctcctggcgcagcaggggagccctctcccatggcgtgaagacgacgcgcccgtgttcggtccctcgaacgactcgcgcacgcaacagccgccccgcgaacaacccgtcccgtcgcattaa

SEQ ID NO: 76397 - DNA, 598 bp, Zea mays
  Clone ID: MRT4577_169702C.1
cttatatatacactttggaagttgtggaatgtcacattctaaaaaaaagtctattgtattagttaaatttcaattcatcaaaatgaagggaaacaaacgggccctaagtttattctgaataaatggctgaacatttgtaggctctacctattaaaagtttatgattataaaaatatttttgtaatgtaaacaaaattgtgatcctgcaaaataagtaagtacaccataatttgatttgataccaagagtgaaagaaaggctgcatatcagatagcaaggccttccttaaatagcaaggcctttcttaggagatgtagtattgatcacttctatccagacagaaatatatgctgctatgttaaccaggcatgttcaatttatcattagcaatgccaatatatgtaatcaatacacaatatgcatcaacaatgacccttcactgtcagggaatgatgttcatcttataaggaagatcttagacccaaagtacttggatcgtgctgaagatacttacagagacatgcaacttaccatccaaaggcatggaacatgggcttctgcttgggtcagtgaaagtggcggtgtattcaacaatggt

SEQ ID NO: 76398 - DNA, 289 bp, Zea mays
  Clone ID: MRT4577_169703C.1
gttctccctgtcgtttttgggcgcgcattttggtttgctggcctcggagctctctcagccttccttccatggcgtgcagttctctcttcctaaacacggccgcgcctccctctagtcttaaacaagccgcggcagcagcacccattcttcatatttctgcccatcacatcccgctgggtagttaccaggtacacgcgcgcggcctcctgctcgccaagatggccctcctgctgcccggccatggcgcccagacgacgcccctccctcagtcgtgctcgccctggtcacg

SEQ ID NO: 76399 - DNA, 728 bp, Zea mays
  Clone ID: MRT4577_169704C.1
cattgggtacctcgaggccggccgggacacggcggtctatagaacgcggcagcttgcgttcacgatggcgctcatgtccgtctcctcggcttccaccaccgtggtcacggcgttccccaggaatggagagagtgcgttggcctccttcttcggcggcaagaggctgatcagacaggtcgagacggtccggaagtccttcagggagccctccgcgacatactgctacaggcccatctgggtccctggtagcacccctctctcctgcgtcgacgagagtcttctcgaagacttgggctttgtatcactgcggcctcgacatctgacccgttgagcctgaagcctaacatgttcgcggaaatggcgactgccggtgatcgactctcgctgcggcgtgcatcttcatatcggaatgcctgatcaacgatcgtggtcttccacacgaccttctggtacaccgacgtcgactagcagaagttcagctacaccatcaccctactgcatcgtccatgctcatcctctgcagctggagcgaggatcaccgtctggactgacatcatcatcctcggctgcgagaacaccgacatcatcttccccaacaactacctcatcgtctccgacgacggtgaccctggcggcctccgtttggaccctgtcggctgattcaaccgctttgcggtgaacatctaggccttgcgcttcgaggagatcaaggacggatatctcaccat

SEQ ID NO: 76400 - DNA, 227 bp, Zea mays
  unsure (1)..(227): unsure at all n locations
  Clone ID: MRT4577_169705C.1
ccgggnacttacccgtagtttctaacttccggcgagctccaccattagcaacccttgcatcgcagactacgctcgaccactgccatgtaagagagacggcgagtagaggtctacgagaacaacgggcgcgcacgctgagaggtcatcgactaacgccgatctactgggttgtcgctgcgaacacccgactgtataagggatacagcatcctcacgcgcgaccactct

SEQ ID NO: 76401 - DNA, 825 bp, Zea mays
  unsure (1)..(825): unsure at all n locations
  Clone ID: MRT4577_169706C.1
ttggtaccctcgaggccggccgggccccttcacttctcgctcatccccttcacccctttcccttgtgctgactgcggaagccgaacaatgccgtagatcagagcagcgcagcccccgccatgctgctacgcgccgcgctccacctcaaccgccttttctccactgacgccgccctcgcacccccgaagctgcggaacctgccctaccgtctccgtcacgtcgccgtccccgccgcgcgcgctgtcgtctccgagtacctccactcgacgcgctgcctcccgtcctcccacgccgactccatcgccacgcactccccgcgctccctcttttccttcctcgccgcgctccccaccgtgccgtgctccctccccaccgcggagtttcccgccctccttcgccgccacctcaacttccacccgctcaatgagctccccttcttcctcgaatcaatcggcgggcccaccgcggcgcccccctgcttcaactccatcttcctttccgaccatccctccctgctcggcgccgtcgccgcgctcgcgcacttcggattcccgtggtcacgcctcggcctcctctaccctggcgtcctcctcgacatgcccccggacctcatctccacgcgcctctccgttctcgagggccgcctccacgggcttcctcgcgccgccatcatcgccgcctgcctcaccttcccatcacttctcgaggggggatctatccgattatgacctactcattaaggatatcgccaccacgttcataggattgggaccggatttgagggccagcaatgacattgacgcgttctcggncggtgtgccggag

SEQ ID NO: 76402 - DNA, 708 bp, Zea mays
  Clone ID: MRT4577_169707C.1
tttgcgaagccaaaacgcccattccccttcgccctcttcgaccctagcaagaaggcggcggcggagatggtgtactacgcgcttttggtgggcgcagagctggacggcctcaccaacctgcagcccagcggcggctgcgacgaccccagcttcccctactacctcaagtgcaagctttgtgggagagatggaacaattgtgatgattcctggtcaggggacgccacttactattgagcagagccagaaagaagagaagacttgtttgatggtgtttgactgtagaggttatgaacctgttgagttttcttttggagctggctggaaggctgagtctgtgcatgggactccttttgaaattgactgctctgaagatgaattttctgagtatgatgagaagggagaatgccctgttgagctaagcaagctgcagtcaacattcaaagtggtgaagaagcatgagaagggtggtaagataagatttgtctagatccagtgacttggagtctgtcgggtattggaatcggaggtgtataaatggtacatttgggctaaaaggttgtgcgtaatcagacgtcccttttctgtctattgattctgtggatgccgtgaaccatgtgaagctttcggtgacagtgtccacagaggcatttgccctggaccgattgctattgttctgtggtctgaggccatcggaaccgatcttttt

SEQ ID NO: 76403 - DNA, 178 bp, Zea mays
  Clone ID: MRT4577_169708C.1
gaaatagcagacctatctgctgttcggacggggaggatgatcgaaggaatcctgctcaccaagtttgacaccaccaacgacaagggtggagcatcccttcccatgggctacctatctgggagccccagtgcacgttctccggctgaggtcagggcctacacggacctgaacaagctgc

SEQ ID NO: 76404 - DNA, 898 bp, Zea mays
  Clone ID: MRT4577_169709C.1
gtccttcgtattgcccttcctatagccgcacgcatggcgaaccgaagcgaagccaaaacgcccattccccttcgccctcttcgaccctagcaagaaggcggcggcggagatggtgtactacgcgcttttggtgggcgcagagctggacggcctcaccaacctgcagcccagcggcggctgcgacgaccccagcttcccctactacctcaagctcaagtgtgagaactgcggggaggtcaccgccaagtccacctacgtcactctcagcgagcaagtcgacctgcccaagggacatggcaccgctcacctcgtccagaagtgcaagctttgtgggagagatggaacaattgtgatgattcctggtcaggggacgccacttactattgagcagagccagaaagaagagaagacttgtttgatggtgtttgactgtagaggttatgaacctgttgagttttcttttggagctggctggaaggctgagtctgtgcatgggactccttttgaaattgactgctctgaagatgaattttctgagtatgatgagaagggagaatgccctgttgagctaagcaagctgcagtcaacattcaaagtggtgaagaagcatgagaagggtggtaagataagatttgtctagatccagtgacttggagtctgtcgggtattggaatcggaggtgtataaatggtacatttgggctaaaaggttgtgcgtaatcagacgtcccttttctgtctattgattctgtggatgcccgtgaaccatgtgaagcttgcggtgacagtgtccacagaggcatttgccctggaccgattgctattgttctgtggtctgaggcatcgaaccgatcttttatcttgcgctatgcttgaaaaaaaaaaaaaaaaggccctag

SEQ ID NO: 76405 - DNA, 311 bp, Zea mays
  Clone ID: MRT4577_16970C.1
ctttctccagctctctgataagctagccagcgtcgtcgtcgtgtcttgctaggtatgagctctatctcgccgccctgcagacgctgatcgagtgagggaattcagcagcagcagctgcaggtagcatagcatagatatgactgctgccgacgtggatgccgtcaatgacatcgtcgaggagaaggccgtcgagccgctgccaccgtcgaccgtcaagccggccgacgactactacaatgccatcgtctctcttgtcggcaaggactctgctgctgggaaaccccctacagctattatcggaagctcaactg

SEQ ID NO: 76406 - DNA, 707 bp, Zea mays
  Clone ID: MRT4577_169710C.1
ccgggaggtgacggcaagggcggcaaaggtgacggcaagggcggcaaaggtgatgacaaggacggtagcaagggcagcagcaagggcagcaacaaggccagtggctaggcgccactggttttgaatgttagtatagataggtagtagtagaagtagtattagtagaataatgttgtagtagttagtagtatagtgtagttaaatgtaaagtagtagtgtaatgtatcgaacagtgggaagaagaccaactcataatgtgttggtttttaagtttggtaatacttcccctccttttataatgaagaagatttcatcccattctctgttcatttctttgctttcccatcgctccttttccagtcggttggtcgatcaagcttatgcttaacgtagccgttgttcttggaagtaatgcttgagtaacgacttggaatcatcgagtcgcattttagatttgcttgcatattcatagagaaaaaacggctgatttactgttagtattttcagaggtagtaaccgagtggttctttttttgcgacgccggcattttagaggtaacagccgagtccttttgagccacgtcgttgttttaggaataacagccgagtgattactggtgacgtcggcgttttagaaataacaatcgagtgataacgggccacgtcggtgttttagaaataacgaccaattgaagactggtaacgtca

SEQ ID NO: 76407 - DNA, 808 bp, Zea mays
  unsure (1)..(808): unsure at all n locations
  Clone ID: MRT4577_169711C.1
cattgggacctcgagccggccgggattatttcactccacatccacccgccccatcccctaatacaccgactctcagaactagccgttcgagagtctatacaccgccttcccactcaccctcctcacactcgcacatccacccaccgcagtcatgggtctcacattctccaagctcttcgacaagctatggggaaagaaggagatgcgtattctcatggtcggtctcgacgctgccggaaagaccacgattctctacaagctcaagttgggtgaaatcgtcaccaccatcccaaccattggtttcaacgtcgagactgtcgagtacaagaacatccagttcaccgtgtgggatgtcggcggtcaagacaagatccgtcctctgtggaggcattgcttccaaaacacccagggtatcatcttcgtcgtcgacagcaacgatcgcgaccgtgttgtcgaggcgcgcgaggagctccagcgcatgctgaacgaggacgagctcagggatgctcttctccttgtctttgccaacaagcaggatttgcctaacgccatgaacgctgctgaaatcaccgacaagcttggtctccacagcctccgacaacgtgcctggtacatccagtcgacttgcgccacgtctggtgacggtctgtacgagggtctcgagtggttgagcaactccctccgcaaggccggtcaccagtaagttcgccgctggggcgagctgtaatgtagcgagtcacgaaaaatgtcaagtgcctgtccctgcccaggcatctccataacgaacgcgcgntccgcatgccacgga

SEQ ID NO: 76408 - DNA, 1146 bp, Zea mays
  Clone ID: MRT4577_169712C.1
aggccggccgggccggggaagcgaaagcccaaatcccattccccttccccctcttcgtctccgtcggtggcgtcggaccgaacccgagcccggagccctaactaaccctaggaggcaggcggcggcggggatggtgtactacgcgctgttggtgggcgcggagctggatggcctcaccaacctgcagccccgccacggctgcgacgaccccaacttcccctactacctcaagctcaagtgcgagaactgcggggaggtcaccgccaagtccacctacgtcaccctcagcgagcaagtcgacctgcccaaaggacatggcgccgctcacctcgtccagaagtgcaagctttgtgggagagatggaacaattgtgatgattcctggtcaggggacaccacttactattgagcagagccagaaagaggagaagacttgtttgatggtgtttgactgcagaggctatgaacctgttgagttttcctttggcactggctggaaggctgaatctgtgcatgggactccttttgaaattgactgctctgaaggtgaattttctgagtatgatgagaagggagaatgccccgttgagctaggcaagctgcagtcaacattcaaagtggtgaagaagcatgagaagggtgggaagactagatttgtctagaccgagtgacttggaatctggcagatattggagttggcggtgtgtataaatggtagatttgggctgaaggtcagcgtgatccgacctcctttttcttctatctgttgattctgtggatgccgtgaaccatgccaagctttcggtggtagtgtccacaggggcattaccctgtaccgaaactgatctttataacttaccaccaatgctcgaacatgttgctggttgctggtatttttagcactgttctctctggctaacgggtctgaagacatctcaaggggatatgtggtgcaatctcacttgtggatgttgattgtggggcaaccttggcttgctataatttttagataccgtttagttgactagcattagcacgctcaaatgcacgcttgtgtgtgtacccggtgctatcgacgtgacaaaagctctcgtcaactttgtgctttgttttagcgcacgcatggagatccaagaatatcttggcc

SEQ ID NO: 76409 - DNA, 1072 bp, Zea mays
  Clone ID: MRT4577_169713C.1
gccggccggtccgggcttcgtattgcccttcctatagccgcacgcatggcgaaccgaagcgaagccaaaacgcccattccccttcgccctcttcgaccctagcaagaagacggcggcggagatggtgtactacgcgcttttggtgggcgcagagctggacggcctcaccaacctgcagcccagcggcggctgcgacgaccccagcttcccctactacctcaagctcaagtgcgagaactgcggggaggtcaccgccaagtccacctacgtcactctcagcgagcaagtcgacctgcccaagggacatggcaccgctcacctcgtccagaagtgcaagctttgtgggagagatggaacaattgtgatgattcctggtcaggggacgccacttactattgagcagagccagaaagaagagaagacttgtttgatggtgtttgactgcagaggctatgaacctgttgagttttcttttggagctggctggaaggctgaatctgtgcatgggactccttttgaaattgactgctctgaagatgaattttctgagtatgatgagaagggagaatgcccggttgagctaagcaagctgcagtcaacattcaaagtggtgaagaagcatgagaagggtggtaagacaagatttgtctagatccagtgacttggagtctgtcgggtattggaatcgaaggtgtataaatggttcatttgggctaaaaggttgtgcgtaatcagacgtcccttttctgtctattgattctgtggatgccgtgaaccatgtgaagctttcagtgacagtgtccacagaggcatttgccctggaccgattgctattgttctgtggtctgaggccatcggaaccgatctttttatcttgtgctaatgcttgaacatgctgctgattttttttagcattgtgactgatggctctgaagacatctcacgaattggaggctccgaaccattactagccggattgattctctaatttatactcatttcgttccaatgtataattcgtttgactagctcatcttaataaaaaaattcataattattgtccagggaaaaa

SEQ ID NO: 76410 - DNA, 445 bp, Zea mays
  Clone ID: MRT4577_169714C.1
aattcggcacgaggctgaaatgcccgtactctgtattgcctactgctttggatacctctaccttttgtctcagacgatgacgttcgaggatctgcccttgcgcgaggctctcaagacgattgcgttcaccaccgatgagtgctctcgcaccactattgatttggagacctcacagaagtgtcgctacgaccagtgtgcataggagagcgcttatgtcttacaccaggcattgactattcgttacctggctaaacctatccatatctggcgttcgctgcgcataatacgatgcggctccctacacgatcaagtgttatgtggggcaccaaatttacgtttgccataccacccatttacaaaggattaaagtgtcctttttgagctatatcatcgatgcataactttgtaatgatcacatgatattaatgatatctttctgaaaact

SEQ ID NO: 76411 - DNA, 1223 bp, Zea mays
  Clone ID: MRT4577_169715C.1
ccggccggggaatgaagcgaaagccgaaatcccattccccttccccctcttcgtctccgtcggcggcgtcggaccgaacccgagcccggagccctaactaaccctaggaggcaggcggcggcggggatggtgtactacgcgctgttggtgggcgcggagctggatggcctcaccaacctgcagccccgccacggctgcgacgaccccaacttcccctactacctcaagctcaagtgcgagaactgcggggaggtcaccgccaagtccacctacgtcaccctcagcgagcaagtcgacctgcccaaaggacacggcgccgctcacctcgtccagaagtgcaagctttgtgggagagatggaacaattgtgatgattcctggtcaggggacaccacttactattgagcagagccagaaagaggagaagacttgtttgatggtgtttgactgcagaggctatgaacctgttgagttttcctttggcactggctggaaggctgaatctgtgcatgggactccttttgaaattgactgctctgaaggtgaattttctgagtatgatgagaagggagaatgccccgttgagctaggcaagctgcagtcaacattcaaagtggtgaagaagcatgagaggggtgggaagactagatttgtctagatcgagtgacttggaatctgacagatattggagttggcggtgtataaatggtagatttgggctgaaggtcatgcgtgatccgacctcctttttcttctatctgttgattctgtggatgccgtgaaccatgccgaagctttcggtgatagtgtccacaggagcattaccctgtaccgaaactgatctttataacttaccaccaatgctcgaacatgttgctggttgctggtatttttagcactgttctctctggctaatgggtctgaagacatctcaaggggatatgtggtgcaatctgagttctttaaagggcatcgtcacttgtggatgttgattgtggggcaaccttggcttgctataatttttagataccgtttagttgactagcattagcacgctcaaatgcacgcttgtgtgtgtacccggtgctatcgccgtgacaaaggctctcgtcaactttgtgctttgttttagcgcacgcatggagatccaagaatatcttggccaaagctgcatgtttcttttcatttgttccgccaaaaaaaaaaaaaaaaaaaaaagcggcc

SEQ ID NO: 76412 - DNA, 725 bp, Zea mays
  Clone ID: MRT4577_169716C.1
ccctcgagttttttttttttttttttttttttttttttttttctttttttttttttttttttttttttttttttttttttttttttttttttttttttttggggccccaaaaaaagggttaaaacccaggtttcccctttttcctgaaggccttgtttggggttcatttgctaaaacaaagggccctccctttgggggggcccccttaaaagcccaaagcaccaaaagggcaaggggaaatccaatttttccccacccgggcggtttttttttttacaaaaggggaggggccccctttcttggggggggggccccgatcaattggaaaccaaaaccaagggggggggggccctaaaaaattatgggcaaccaggcctacaggaagttttgggggcccaatttccggacatagggcttttcctaatttggaaacccccccctttgggggggggtccccttggtttaaacgcattcttttttaagttcagccagctcattttgggaaatttcaaattaaagcttttcctcgatttgggaaaaaccccccttccaaaagccaagttttttgttaatctgggaaaactttcccaaaaggggggccatgttttttttggggctcctaaaaaggggtttttaaagggccttctaaattttcaaaaaagcttcctttttaaagggtttatttccaagatgatctttaaaaccctttttttttttgggttgtg

SEQ ID NO: 76413 - DNA, 481 bp, Zea mays
  unsure (1)..(481): unsure at all n locations
  Clone ID: MRT4577_169717C.1
gcggggcaaaaccgcccacgaagaaccccgccggggggggcagcgggcacncaaccagcaccagcgcgggccgcccnncgcncgccgccgccaggggaggggaaagnncaagggaaagcccaccggccgccgcaaccccnccacaccggaggagaacgcngcnggnaccccaggnncgcccncgcaccgggggggggaangannaanaggaagaggaggaagaagaaagagaagagncagaggaggaagaaccngaagacgagnccgangacaaaccnaagcanaaaggaaccgagggnnaaanncagaaagaaaanccaaaccnagnaaaagggaagaananaaaggccaaggaaggngancccggaaagacaacggaacncacaaggcgnagaaagggaggagccgggagaaacaaaaagcccaggaaccggggaggaaaccgcaggagcaagggaaaaacagaacaagcaccggaaag

SEQ ID NO: 76414 - DNA, 1742 bp, Zea mays
  unsure (1)..(1742): unsure at all n locations
  Clone ID: MRT4577_169718C.1
ctttcttctatctttttgggagaattttattgattcatgccttgttcggttattggcattacatatggattggatgagattgaaaaaaattaagaagaagtttgatttgtttgggatttaaactcactcaatccatatatatggattgagaactaaccgaacaagaccttacctggctcagtgaatcgcttattgaatgatgcaattgtggaacacatgtcattttgctcatgcaacctacgaacattcgagtctagtaacaactaacaagtctcatggtgttctcccaccggccgctccgccatatcatctcttccagttccaacccagtcatcttccgaccgtacgcaagtacgtacgtatacatggtacatggacgcattgcagcttgcaggtgtctgtatgtacgccgtacggttgccgtcttgtactcggaaaagggaactctgatgggtgcgcacgcgctccgcgtgtcacttgaacaaggcttcgatctccctcctgtacttgtctgtcactttgtcccttcttattttcatggtgggtgtcatcagaccattgtcaatcgtgaacggttcgtcgacaaccaaaattggcccgacacggaaggagcagtgcgcggtccaggttctcaattcatcatatagcatgttcatgaccttatctttcgctagctcgccatcctcaccaaggatggacttcctttttgcttctgccagaacttcatcattgttgggaacaattatggcaccaagacgccgttgatcctggccgatcacaactatctgattaatcaaggtactcctgctggctgcttcctcgatctcagcaggttcaacattttcacctgtagataggactattgtatcctttgcacgcccttcaagaacaatcatccctccacactggcgacttggccccatggcatgatgaggtactatccaacctacatctccagtgctgaaccaaccctcttgatcaaaagcttcatttgtagccgatgggttcttatagtatcccttcattacttgtggtcctttaattttcacaatcccctttgaaccatctggaaggacctcaccagtctcaatgtcaaaaatcttgatttcagtatgctttattgggtgaccaactgtcccaagaacattacagaatggtcgtctagcagcaacaacaggagaagtctcagtaaggccatagccgttttgtactttaatgccaatggcctcaaaaaacttatcaacatgcatcggaagacttccaccgccactaatacncagcctttgaaatcccgattgctgaatgaattttcttgtatactagaatcttcgccagattatgtaaaggccaaagaaatgcagcaaccaatcttgcccacagccacttcatcatataggcgatgactgatggtttgacaagattgtttgataaaactgttccctcatagatcttctttgcctccatatataggaaacttatcttgataagtgaaagagcaataatttttcgagcagcagaactggatgaaatctgcctatgaattgaactgtacaaaatcaagaagaaaaaggaaatgggcagaagtctttccatataaagtgtcactattcgcttaaccattcaacagttaaaaaatgctacctgcatgcaaccattagtgaactgaagtgtccctattagttgaccaatcatttaccgtagtacatatgttattgagtctcnacagttccaaaacnnccggc

SEQ ID NO: 76415 - DNA, 714 bp, Zea mays
  Clone ID: MRT4577_169719C.1
agcaagacgaacgaacgagctcccggtcgagatcgagcagcagtacatacgtacacaccatcgtcgcagtgcttttcataacttaattcttactccgattccgccaatggcaacagccaacaaagcgtcgattctcctcctcgccgttgcggtggccaccgcggcgtgctcgacgaccgcctccgcgcagaccagcaggctcggcaagctcgtcgtcaccggcgtcgtgccgtgcaacaccggcacgctgatcgacgccgccacttctccggcattcccagacgccaacgtggagctgcggtgcggcggcaacgtggtggcgggcgggacgacgagccgcaacgggtcgttcgcgatcgaggcggacctgaccaacgcgctggcggcgctcgtgggcacctgccagctggtggtggatacgccgctggccaagtgcaacgccagcctgccggcggcgggggcactcgcctcctacctgcagggctcgctcgccgggatgctcggcggcgtcttccgcctcgccccggccggtttctccttccgcatgaactgacgacgacgaccgtgcataattcactgggttgcaatatatgcatcagtcagtattatatctatctaaaagaacaaaactaaaaacttccatgtttatgctggcgacggaccacagttacaaaatacagtaccgtacctcaaaataaatgagcatggataagt

SEQ ID NO: 76416 - DNA, 619 bp, Zea mays
  Clone ID: MRT4577_16971C.1
aagtgtcttcatattggcattctactcctgcaagcgctccagcggggcaagctagtccacatggccaggctgctcctcctcctcctcgtggtcgtcgacctggccttcagctcgccggcggcagcgtacgagcggcggcggaacgccatcacgcacgtcaaagggttcgacggccctctgcctttctacctggagacggggtacgtggaggtggacgacacgcacggcacggacctcttctactacttcatccagtcggagcgcagcccgaaggaggaccccctcatcctgtggatcaccggcggccccggctgctccgcgctctccggcctcttcttcgagatcggccctctcaagttcgacgtggccggctacaccgaggggttcccgaccctggtctacttcgaggactcgtggaccaaggtgagcaacgtcatattcctcgacgcgcccgtcggcacgggcttctccttcgcgcgggaggagcagggcctcaacgtcagcctcaccggcaccggcgcgcagctccggatattccttgagaagtggatcgccgaccaccccgagtttgcctccaacccgctctacatcggcggagactcctactccggctacaccg

SEQ ID NO: 76417 - DNA, 341 bp, Zea mays
  Clone ID: MRT4577_169720C.1
gttcatggaagaaaggtgaaaaaaagaaagattgaaaaaaaaaaaacaaaaaaaaaaaggaaaaaaaaaacaccggcaaaaaacccacccccaagcccccccccgggacaaaccccccccgggacagcgcacccgaggaacacggcccacaggttgacccccaaaaaccaggacccccacggcccgggcaagggccggaggagcaacgaaccgccgggggaccggacggcagacagcccgggcaggaaaaacgggaccggcttaatcgccgacggctggggcctcaagaggtgcgggcccaccaagaacccccccggggacgaccccaccacgagggggcc

SEQ ID NO: 76418 - DNA, 2178 bp, Zea mays
  Clone ID: MRT4577_169721C.1
ggaatatacagcatcatttcgagtctgtttcccgttttaatactagcaaactgatgaacactgagaagcaaaaaggcctaaggattgtaacagaaccaagaaatctgtcatcagcgctaacttggttttctgttccggaggtcagaaaacaggtatatatcgttgggaactctgaacctcgtgaaaatattggcgttcttaatgaacttatacatgctcgtgatgaacttgcaaagattgtgggttgcatggctcctgctgattctgccattcgtccgcacatggccccgccgcccctggtggtttgctcatttcttgaaaatttgagcaacactgttaagcataaagctgaagaggaatttaagaccatacataatttcaagagaagaacatgtaatgaaaagagtgccgatctagaaccctgggatgaggattacttcattggaatgatgaaatcatctgtatatgacctggacgcttcagttattgcaaaatactttcccttgtcgcagtgcctaaaagggttaaatgttctcgttgaatcattatttggtgcaacatttcatcaaattcctatgagggatggggagtcatggcatccagatgtgataaagctccgtctccatcatcctgatgagggtgatttaggattcatgtatctggacctctactccagaaaggggaaacatccaggatgcgcacattttgctatccaaggggggcggagattatcagactcaaactaccaattgccgatcattgccttaatatgcaacttctcaggtgcttgtagaaaaactgcaaggcttaaccatggggatgttgaaactctttttcatgagtttgggcatgcccttcactctctgttgtcaagaacggaatatcagcatttctctggtactagggttgctcttgatgtggctgaaaccccctcaaacctatttgaatattatgcctgggactatcgtgtcttgaagacatttgctctagatgaaacaactggagatgcaataccagaaaagctggtaaaggcactaaatgcttctcggaacatgtttcctgctactgagctccagaggcagatcttctactctataatggacctaaccttgtttggcgagcaatcatccaagcctatggacacgatttccactgttgccgatttgagaaggaagcatacaagtgggaaatacgcagaaggcacacactggcatacacgatttactcatctcgtaacctacggtgctggctactatacctatctatatgctagatgttttgccacaactatatggcaagaagtatgccaagaagacccgttgtcccgcagtgcaggcagtgccatcagggacaaattcttgcggttcggcgggtcaaaggacccatcatccctgctgaaggattttgcaggtgatgccgtcattagaaactccgggagtggaataatcccgaacgctagttccttgtgcaaagaaattggattgtgaaatagcactgtgggggcggaggctggcatctttctgcttgagcttggctgaagggccaagaactaaacctcgagggcttgaggtagtttgagggagattggagatgatttaatcctctcctattcaattcacctctaaccggacaagtccgaacaagtcatgaaggggcagagtcgctggagttccggtgcttgacctctcggcatacattaatggtgtggtgctagcggaagatggttctcctagacatactttcttcaaagtttcacctgcggatggttttgcaatctgtcaaattttactagaggacggttgacggtaccatattattactcccattgcctgggatttttccttcaaaatgttatgatgaagtctgtcagccctgtagcttatagcactgattcataggagccataggtcttccttgctcgtttcatggaaatgagaccccgtttggtaaagattagtgcctttatttttgtcctatttagtctctgaattgccaaaaggtgggactaaaacataaacagaactattttagtctctagtctctcaaggagtgactaaaagagagtaaaccacataaatttcaaaaaaaaaaaaaaaaaaaaaaaaaactgccttttgtctctcctttattttagttgtactaatagtgtgagaatgctaaaagatattttgcccctct

SEQ ID NO: 76419 - DNA, 747 bp, Zea mays
  Clone ID: MRT4577_169722C.1
cctcgagccggcgggactttttctctttttctttgcgagaccaccaagaaccaagcgagaagctacttatctgacataggattcggacatggaaaagtgatgcacgtccacgggatggatagatcccttaacagctctgccatccaagatagtgccgacgtctgcatgcaacactgacagcagttcagaagcttcccggtaccaccctagatctgatgcccacgaggacatccgcagctgttcgaagacgactgacatgctgatcctcaaccagaccttgcacaacatcctcatcaaacatctagcccaggactacaaaactgctttcctctcccacaggcgtacgatgcttgacctccaccacgctgctgcaggtataccttgtctgcctcgttgtgacgacatcatcctgcgcgccatccatgctaacggcgtgaccatcatgacaaaggacattctcctggcaaggagcaatccggtcgagaggcgctaatcgccacatcaaatatagttacaaaaacatgaattcctgaagctattgctaatctggggccattgcaaggacatatgagtagggctgtgccttgtggatcataagcaactcttttgctactgttgatgctacctttgctggtgtcattgataaggtcgaatacttaacttaactataacactgacatgctggactaacagaggtattggctcttctgcgacttgcactacaatgctgaggtcgattcgttcact

SEQ ID NO: 76420 - DNA, 163 bp, Zea mays
  Clone ID: MRT4577_169723C.1
ttttccacccccccggctcgcgaacgccctccctgccgctccgccgtgtcgcgtgggagtcgtttcgcaaaagtctgcttcgcgagcggtgaggagtggagtggagtgtggcgtgttccccttcttccatggccccaagcattgctatcatggtccgtgccta

SEQ ID NO: 76421 - DNA, 415 bp, Zea mays
  Clone ID: MRT4577_169724C.1
ctgcacttgcatgcagcaatgttaattttttgtgttcttgccacaagtcggatgcccactttccagacacatatatcactcaattccaaaccgggggcacgatccaaagctgcgagccctccagagattaaacgtgcaatctacctaccccacacacacgttaagccactgcgagacaacctcgaaaggttgatcgccatcctggttcaaacacataaattgctgcccctgcaccactcccctgaaaacagcgatccgaaaagcgcaccctggctcctcgcctgagccaccgacacaggagaatgccacactgtaactatgcttcaccgtaaggccattaccccatcagtggaactgtggcctgttaaaatccaacttggggccaagactgctgaacttgcacccaccaccgctt

SEQ ID NO: 76422 - DNA, 464 bp, Zea mays
  Clone ID: MRT4577_169725C.1
ggccgctttttttttttttttttatttttttttttttttttttttttttttttttttttttttttttttttttttttttttttttttttttttttttaaaacccaaacaaggggggctcttacaaagggggggcaaaccaataaaggcccaaacccaccaagggccggaaaaaaggaaagcgtgacaaaaccaaaacctgcttaaggcagggcccccttgacaaaagacaaaccacctgaggttgctaaaaaacgcccccatgggcgggggcccgcaatatggggcaaaccccccaacaggggggggacaacaccagagggccaaagcttttccgggttccctaaaaaccccggaactaggaaggtttcttttttcgagccccgaccccgaagtaggaaagggacccgtcctggccctgacccccgagcacaggaccaacccggccaaattccgggtccagaac

SEQ ID NO: 76423 - DNA, 420 bp, Zea mays
  Clone ID: MRT4577_169726C.1
ctccgctcgccccgcggttcccgcttgctacagccctccggtcgactcgggtcggcctcttcccagttcccacttcgccgccgctcccccgtttccttcaccccttctcctgcagtcctgcgcaccttcctcccagagtcccagtcaaaccctgctcggaagcaaacggactttggatcctcggctttaacactcgcgtaccctgctggaggttgttttgtatcatggagagtacagacaagaatgacaaaaaaattgctgtcacagaagagtcttctaatcctggacaaaattgtgaagatgacggggatttttcaatgaaaactgaaatgttaaatgtagaagaagcaccaagtttctcgaatgacaaattaaacaacgaatcagaagtgcagattcaagagggaggtaatgattcag

SEQ ID NO: 76424 - DNA, 1232 bp, Zea mays
  Clone ID: MRT4577_169727C.1
tctcccgtttctctcgtcagtttctccgctcgccccgcggttcccgcttcctacagccctccggtcgactcgggttcccacttcgccgccgctcccccgtttccttcacctcttctcctgcagtcctgcgcaccttcctccctcccagagtcccagtcaaaccctgctcggaagcaaacggacttcggatcctcggctttaccactcgcctcgcggacttcggggtttagtttgggacccgttgctccggagttcttcttaaggtaccctgctggaggttgttttgtatcatggagagtacagacaagaatgacaaaagaaatgctgtcacagaagagtcttctaatcctggacaaaattgtgaagatgacggggatttttcaatgaaaactgaaatgttaaatgtagaagaagcaccaagtttctcgaatgacaaattaaacaacgaatcagaagtgcagattcaagagggaggtaatgattcagaagagggcttaaacggacaaatgaatgaaaggacaagctcagatgtcatggaatgtgcaagctcaaacgagatcacaaaagagaatctttctgaagacaaaactgaagagccagtatttgatggaactgaggttcttgaaatagaagaaatgaggcgttcttccaatcaatctggggaacttgactcagaggctcaggggtctgtactcaatgaccgggctgttgcaataaaaaaatttgttaaagaaaggagtgcaattgcagtttcaacatttatgcggcgcctttctggcaaaaaggatgagaatgaatttaaggctgaagctgacaagactattggttcagaatacatggattgcgagaaaaccaggacagatgctgaatccaatcctaaagaggtgcaacagaaatctgtggaaagaactgtctggaacccactgaacttcattaaaattggccgggattctgatacttttgtaactggggaaagcgtgaatgaaaatgtgcctgggttggtggaaataccaccattggagggtaggataataatatacaccaaacttggatgtgaagattgcaaaaagattcgtctattcttgcatcggaaaaggctcaaggatgttgagattaacattgacatcttccctggtagaaaggtggaattggagaagaatactgggtcattcactgtaccaaaagtgtattttaatgacctactaattggaaggttaattgagttgaggaaa

SEQ ID NO: 76425 - DNA, 114 bp, Zea mays
  unsure (1)..(114): unsure at all n locations
  Clone ID: MRT4577_169728C.1
tgacttcnctaattcnccccatccttaccaccctcgttaaccntaacanaaaannntgcatacccccattatgtaaaatccattgtggcatccacctttattatgcagtgctct

SEQ ID NO: 76426 - DNA, 476 bp, Zea mays
  Clone ID: MRT4577_169729C.1
ggaaacagggggcctgatggccgcgggatccactggcgtgacgcgccagctcagatgcacgcgctttaccgtcaccggggctgtatataactcgcttgggaagttgcaactgagcttactttatattatatgcatgatagtaatgggggttgaacacatgaggaactttgtaagggtgatgacaaccagtcagggctgcagcaattgagacgtgtcagtcataacaaccaaatacatgtacatagttcattgagaccttgtcgtaatcaagatgatacttcaacttctccccaatgattggagatgatgcctttagacaagaatgtgtcaacacatgtaaaactagatttgctcctagtagcaggatgactcaaaacactgaaaaaacttgcgccccctggacagaacatgtcttatggaaaggctgcttgttggcgtatgtacctgcaagagtaacccgtaccatcctgagcatt

SEQ ID NO: 76427 - DNA, 364 bp, Zea mays
  Clone ID: MRT4577_16972C.1
cggacacaagaacgaacgacaaaaggaccatttccacacacaaacagctcagggcacaccagacttttttttttggtttgtcctcggactcctagctccagtggagcaaaagataagagttaatccccaaggaaagttgatccggaagcttctacgggcaagcaaggcaaaatagctgtagaggatgaagatgaagagctagcacgggcagtagcagcttctctagaggagagtgaagaagtcattgaagcatcagacgccagttatgacatggctgaagctgtaccctaagaggaaaatgagcccaccctaaacaccaatcctgattaccctgcttttcctgaagaacctacaggaagcaggg

SEQ ID NO: 76428 - DNA, 224 bp, Zea mays
  Clone ID: MRT4577_169730C.1
accacgcgtcctcgcgctcacagtttgccttttagctcacgccaactactaccttgtgcacggacacttctcccaccggaccactacatacctcaacgacctactaacctatctgcaacacatgcagatgaaaaaggtacgttgcaccaacatggtcgccgatctctcggctaatctgcacttgtcatccttggttttcgacatgcatcccacagaggctaaca

SEQ ID NO: 76429 - DNA, 282 bp, Zea mays
  Clone ID: MRT4577_169731C.1
atgcctctcgcggaatcggcacattctaaacgaactggggtaaatatgatcctccgaaaggcagagctgagctgggaaatgggaatgcacgtctctactctccacagtctactctgtctacatatggacccaccatttgctcatctgaccgtacacaaaaatagtagcccgaagtcgtatgaacggaagcggcgtggcagcgctgaggccttctgggcttccaagagacacttcggtggtgcgagacgccgacgcgtacacccaaagcgggagctgccgtga

SEQ ID NO: 76430 - DNA, 224 bp, Zea mays
  unsure (1)..(224): unsure at all n locations
  Clone ID: MRT4577_169732C.1
gccggggcgcacccggatccgcgtgcctttcctctcctacgctggagaatctctggcgtcggcggcggactagtaggagcagcgagcagcaagatgtggcggcaggcgcacggctctgccctgctgctgtgcgacntgcgagggcagcacgtggtcgtcgtcgccgtcctccgggctacgagggcggcgcccggggtacacgccgcgatcttccccgagggtaa

SEQ ID NO: 76431 - DNA, 281 bp, Zea mays
  Clone ID: MRT4577_169733C.1
gcggctacggcggtggcggtggaggctacggcggtggtcgtggaggctacggcggcggtgggggatactgtggtgcaaaccgcggcggcggcatactgcaacaacgacgggaactggaggaactgagcggtggggtccgctgaggcctagttatcttgttcgattctgctaccgcgttcaccctagtctggagggggtttatcttcatctgcggtcgtctcgtgtccggatgtatcgattcgcgttcgttgatgttgatgcccatctgtgtttttgaccgc

SEQ ID NO: 76432 - DNA, 505 bp, Zea mays
  Clone ID: MRT4577_169734C.1
gcgtcgcgcacacgatggacgagttctagatcatgatctatgactggtgaggcttggtccatgtttacgatcggccagtgcgcacgccacaggttgcgacagtggagctcaaaggaggtccgcaacacactgctggagactactgttgccaagctgcttgacaggatagtcggcctgatagctatgtgcatcaccaattgctcccatgtcggttctttggcgtgaatgttgtttgccatgctgatagaaccaatgattctgcctcatgcctgtggatctgacaaggttactaacgatgatagatgaatctgatgagcactcgagatctgctaggatactcgcatggagatgtgcaggaaacatttgaattcgagctagtcttcatgcatgtcgccatggagaacacaagcagcatgttaggaaagtcaggaatgaagacagttgtcaatcggctcgacgcattatttggagcagtcttggaatctgcacctgttggttcagctat

SEQ ID NO: 76433 - DNA, 863 bp, Zea mays
  Clone ID: MRT4577_169735C.1
cctcgaggccggccgggacaccgggtcccggcacactaattcgttactccccgctctctctcctccgcccccgcctcgtcctccgaccctccgccattcccaaagcacgctccgctttccttttgtttactctcccgcatcctcctctcgtttccctttccgcccatgcggatccgtctcctcgcatccgccgccgtcgcccacctcccccgcgcccgaatctgacccgggcggagttagggatgggggcagaaggggagggggcagtggaggaggccacggggttcgaggtgtgcatcgtgctgcccaagctctcccgcgccgccgcgacggggcccaccgaggactgcgtggcgcggctggtgcgagagctcgagggtgccggcctgctcgtcgagcgcgtccgcggcgtccccgctgagttcatcaagctggctgcaccaatggggaccctggggagagctgctgctgatatgcagatgaaaaagctaacctacatcggaatggagcttcaatttcaatgggaccaggtcgcagcattcgttaggcagccagatggttctctgtttagctggagagagcggtattgctgcttccgctacttgatatgtggcattgtgaacaagacaaactctgaaatagctattaaatttgatggtaaggagttccattggaagcaaagtgagtccttattgacaatgctggaagctgaaggagttgtaaagcgaatattccctttgcatgatgaaattaagaggaagcaactcctgagaaattgggcacttaattggcttgacttcacatggcaaccctattgatgagatttactcctactttggaacaaagattgcaacatactttgc

SEQ ID NO: 76434 - DNA, 363 bp, Zea mays
  Clone ID: MRT4577_169736C.1
gccaggcgttcggccacgagtgcgtccacgagtgcgagcacacgcacggccgctcgtccgtgctcgccacgctcaggcgttgtccacgcagtggctcaccggagtgacctggaaggacgcctgcaacggggacttggtgtactgttcatcactagcagtgtcagtcgctgtcgcgcatcatctataccctcatgaagaccgaggctcatgagatcggctacatctagtctcagcgaagctgctaacatgacatggagaagaagctgctcttcaagcggatctacttgcacccgctcggcctggagctcgaccctgacaagactgagcgactgcagctgcgagagatcatagcacagcgctgac

SEQ ID NO: 76435 - DNA, 316 bp, Zea mays
  Clone ID: MRT4577_169737C.1
gcttttggtgcggacagctgagcgagcaagcctgggccctttcgaagtagaagctgtgtctgatccacatgtctcagattccggagggagttggacaagaactggggatcctgagatgagtatgacagcaaatacggtggactggtatagtttcggacccggatatgaattggcagggatgccatattggaggttgcgtgcggttgaaggtgaatacactgatgagttagacgacaatgactacatcaaacaggaatagggaactttggctgctggtgccactagtgatacagaggatgaatcattcactgccgga

SEQ ID NO: 76436 - DNA, 201 bp, Zea mays
  Clone ID: MRT4577_169738C.1
ccggctgataccggtcacccacctcgccagcccttcctcctcgtcccgctttttaacactgaatcttatccgcggatatgaaacacggccatcaatagcaattgcaacacatcgtcacactttgaagtctgttacaacacgattacactacagtggtacatgcacttttactcattggacgctaatttactacaatagctc

SEQ ID NO: 76437 - DNA, 569 bp, Zea mays
  Clone ID: MRT4577_169739C.1
ggcaccaaaaggaaatttcctccctcaacctttgttaaatacctttgcaaataaaaccggggtgttttgaccaccatttttggccaatggggggctccaaccattttttcccaaattccaaaggggaacccccccgcccccccccccatggggggggccccttccagggtttcctcaaaatacctcaccctttaaccccccgcaaacttttttttacccggttcctaaatagtcatcccccttgccccccttgttttttgccccctttgcccccatttctttatattctttttaaaaagcacccaattcctcacgggcctgggaaaactcacctttttccttcccctccccgacttcccagtaaaaaaacccccttttggcgtccataagggcaaatttggaatcgatgcccaaaaaccccttaaaaacgggggttttttttttttttatacccccggccccctggacctttgccaggtcccctccagggacaacaaacgggggttggtttttaatcccacccttgaatccgggggggccccagcccacaaactggacagtttttttgg

SEQ ID NO: 76438 - DNA, 1270 bp, Zea mays
  unsure (1)..(1270): unsure at all n locations
  Clone ID: MRT4577_16973C.1
tgaagcanatgaaaacgcatcggttacgccatccacgtcgtctgaaatcaggtggccgtcggatttttcgtggacgctccctagcggctcggcgtctccatgtgccgtgaaggttccagaacccaggggggtcgtcttcctccacaagatctgccaaagatcctctcggatgcccccgcccacccatttcgccagtcgccatcgagctctcgcttccgccgcccgctgccgctgtatcaccccggtgctgagccctaggatgtgactggcggacgtctctatggccgagccgtaggtggaggcggcacctcggcgccgtgggagatggaggacgatgacaccgagggtgtaggcgagagcacctgtccccccgccgccgaccgaggaggctcctcctcggccggcggcggcggcggcgactcgcacggttacactgacatcgagaaggaggtcttcgaccgtctcatggagaagagaatcccggaggtcgtcgcggacccggtggccttccgcgaagagctccaccgccacttcgagcgcctgccgctgagctacgccatcgatgtgaacatcgacaaggcggaggacatgctgctgcaccggaggattctcaacgaatgcgctgaccctgaaaatcgccccatcttccatgtgggcttcctgaactgcatcccgccctcgttggatccacagtataacactcaatccatctctacgagcgaaaacggtaattgtgggggttctcaggattccactttgaggtacaggctatgacccacgcactttgcaacaccatggtgaagatttttacctttggtgcaactttaaatcaacctcttgtcatctgtagtttcgattagcctttttgaaaaaaaagttgtgccttgtatgagtatttttgtggtgttatgtcttgcttgctaaaaacatatgcttatatatatgctgcacagaaaatttgagccatgcgaagggatcgaggacctcagtttaactggacaaaaggttgtgggtgactatgtggccggttcttcgaggggagatgtagaaatcctccatgttcatgaaattattttttctaccattgacaaaccaaagctcctcgctcagctatctgctttgttatctgaagttggactgaacatccgtgaagctcatgtcttctcaacgactgatggcttttgttggatgtatttgtggtgatgactgggatacaaaggaaacagatactttgctacagattctcaaagagacagcggcacgaaatcat

SEQ ID NO: 76439 - DNA, 297 bp, Zea mays
  Clone ID: MRT4577_169740C.1
ggaacaaatttaaaacaagaggtgcttcccctgacagggtataaaacaaggggggccaacaattggatgaagcttgacctataaagccatgttcgaaagaaacttggatttttgaagggacctaaaaacagggccgggaacaaaagggggggggggaaccaaagcccccgttggcgtcacgattttttttagggaaaaaaaaccaacttttgcgggaagaaacaaaccaaccatggggcccaaagttaaaagggggttaagcaattccacgcctctttttttggaaaaccccccccc

SEQ ID NO: 76440 - DNA, 1533 bp, Zea mays
  Clone ID: MRT4577_169741C.1
atcaccaaacgggagggcgaggggcaacaggacacacacactgacctagcaccagctcgatctcacaggatggttacgctatgccatccgattcggatccgagcaagcgggagcaccgcgagctggcggaggagaaatgcggcggcggcggcgaaggtcctctgctccgtgcagcaaatgccgccgccgccgccggcggccacggctgcccagagcacgatcaaggtcgttatcgttggggcaacgaaagagatcgggaggacggccgtcgttgcggtgagcaaggccaggggaatggagctcgcgggcgcgatcgactcgcagtgcattggcgaggacgcgggacagataagtggcatggacgagccgctggagatccctgtgctgaacgacctcaccatggttctgggctccatagcgcagtcgagagcaaccggcgtggtggtcgacttcagcgagccttcagctgtttacgacaatgtcaagcaggcagcggcgtttggtctgagcagcgtcgtctacgttccgaaaatcgagctagagacagtgactgaactgtcagcgttctgcgagaaggcaagcgtgggctgcttggttgcgccaacgctgtcgattgggtccgtgctccttcagcaagcggctatacaggcctcgttccactacagcaacgttgagattgtggaatcgagaccaaacccatcggatcttccatcgcaagatgcaatccagattgcaaacaacatatcagaccttggtcagatatacaacagggaagatatggattccagcagtccagccagaggccagctgctcggggaagacggagtgcgcgtgcacagcatggttctccctggtctcgtctccagcacgtcgatcaacttctctggcccaggagagatgtacaccttacggcatgacgttgcgaatgttcagtgcctgatgccaggactgatcctggcgatacggaaggtggtgcggttcaagaacttgatttatgggctagagaagttcttgtagtgaacaacaaacaaccaatgcaaaacatcgacaggcaacaggcaaggcagatatcatctgacgtcgcaacaaccaaaacgacagagatttggaaaataaaggctgcacagaagacgtctggggttttgtgtgcaccaggctgcgcagagaacgtctgtcattttgtgtgcaccactacggcactacctgctgagcgcgatttttataaaaaaggcatgggagggagatcatacacaggaaaagtcacgaaggaaaaaggggtcacatggacatacaggtattggtagcataaccaaaacaatggatctgattctgcgattcggttccatcggcatatgcttgttcagaagaaagttgcatcgggacttgaagaaaaggagggtctagtttgcgttttgtaaccgagactgcgtaattcggcatgcgtatggcaatccaaattgcgccagactaatccagattcaattttataaaatggataaaacataaaaaagacataaaaaaaaaaaaaaaggc

SEQ ID NO: 76441 - DNA, 388 bp, Zea mays
  unsure (1)..(388): unsure at all n locations
  Clone ID: MRT4577_169742C.1
cccacgcgtccgcgcttcttccgcagaagaacaaggagaaaagggaggggttcgtcacgaggaggaggaggaggaggaggtgcgtcgttccaatcgaaccccggcgcacaatctagaggccggggtggatcatcatcctcaccaagacagaactccatccccgttaaggtgttaaacattaatcatggccacaccgccagacggggcgcccgctggacctgatgacacgtcgccgccgccttcttccaactcgtcgacgccgcctccttccgactcatcgacgccgtcacccaagtcctccggctcgggctcgccgtcgccatcgccacccgcaccgtcgttgtcgccgncaccaccggcgtcgccgcaagatagcacggcgccagcg

SEQ ID NO: 76442 - DNA, 316 bp, Zea mays
  unsure (1)..(316): unsure at all n locations
  Clone ID: MRT4577_169743C.1
ttctccacgcgtccgcttgggcctggtggcgggcggtccgcctcacggcgagaaccgacctgagtggaccgcttctgccggcgatgcgctcctggccttaattggccgggtcgtgcctccggcgccgttactttgaagaaattagagtgctcaaagcaagccatgtcggcgccgccgggttgggggtgggggtaatttggtgtggcagcacccaggattatgcgctgatctttatcttttagtttggtcgtccggttttttttttttcttacccttttngagtctgtgctgaagctgctgtgagatttgctgtttt

SEQ ID NO: 76443 - DNA, 220 bp, Zea mays
  Clone ID: MRT4577_169744C.1
aaacccaaaaaggggggtaggaaaaaaaaggtactcggaaagactgagatacaaagtattacgtacattggcggggatgcttacaatcgggggacaaatggccccaaactgaaaccacacatttgcgacttttattgaaaaaaaaggcaggcggggggaaaaaggattcacaaattgggacgggccacatttaaggccgggggggacacaaacccggaca

SEQ ID NO: 76444 - DNA, 357 bp, Zea mays
  Clone ID: MRT4577_169745C.1
gtgccgcctcagcccgccgccaggagggtgcaggagagtgtcgagaagctgaaatggctcctaaagcggctcctaccaagagagggggaggccaagagccaggccttgaagggggccaagggtgagagggctgcgtcaaccacgaggaccaacaagatccggtccgacaagatccgggcggggggggggggggcgccgcccccgacccggtggagggctcggggaccccacgtgcccacgacccaactctcccggtcgggacacgctcgtatcagcccaacttcgtcgggtccgcttcgccgcggactgtgcgatgatgggggttgaggcagacagcgctggggtcttggggggggg

SEQ ID NO: 76445 - DNA, 1097 bp, Zea mays
  Clone ID: MRT4577_169746C.1
gctagtcagagagagagagagagagagagagagagagagagagagaggcggggggcgggaggatggctttgctgcagagccagagcctgccaggcattggctgctgcagcagcagcatcgtcttggcacgagcgagggtgcagcagtgtctggcagcggcgtcgcactcacaggcgcccctcctgcaggccaatggcggcagggcgggcctcccctcctcctcctcgatccttaaggctggcaatgcgatcagcttcagccggcggagaaggagagacctgcgcgtcgtcgcggaggcggccacggcggggacggccaaggtcacgccggcctcgtctggcggcgtcagcctcagcgacgtgctctggccttctgccggtgagtctgaagaaacgctggtgcttctgccggagcattcctggccatggcggtactggggaaaatggaccagatggtggcgttcaagggagtatccttgacgattgcgccccttggagcagtctgctgcgtgcttttcagcgctccagactcgcctgcggccaagaaatacaatatgttcgtcgcgcagattgcttgcgcggcctttggcgtattagccctctcgttgtttgggcctggctggttagcgagaggcgccgctctttcagcctgcatagcattcatgaccctcgccgactacaacatccagaaggagagcaccctccacctggtgctccgcttgcgaggtggtatgcagatctttgtgaagaccttgactggcaagaccataaccctggaggttgagagctccagctgcgagcttgcccctcttgtttatcgatggccccaagtttcacagtttgcagctttggtacgcgcttttccctggagctgcaggctgcatcgtcctttgcttgattcaagaggtggtggtttacctgaagaagaacttcaagttttgactcaagcagcttgacgctatggatttttgtggaagtggtccgattaattattcaatcatgtaacataaattacattgcctgcatttgcgataaagttgtgaaaatgaaggtttactgtctcctgtcttggttaaagaagaaagaagactttccttg

SEQ ID NO: 76446 - DNA, 345 bp, Zea mays
  Clone ID: MRT4577_169747C.1
aattccctgttcgaccgactcttacttttatcttctgaaaaactcatcacatagagtttaatcctaagatatcataattgcactatagtttatttcggaccggtattcaagttacatattatatcatatacatatatataattattactaccatttcgataatacatatcaatactaaactatctattaagatttattacaactaaattatctacaattattaacatctaaattaaaactatacattataatattctactaaccataaatctctttcaaaaaaatcaaacctggtccatcacataattatacaattcaacatacaattcacctatcataatatca

SEQ ID NO: 76447 - DNA, 505 bp, Zea mays
  Clone ID: MRT4577_169748C.1
aggtttaccttccatcccatgctatcccatcccatgcctccatgttcagtttgaaagagggagacctcagaaacatgttcgtacatatggcagtaaaacatttaccaccatacattatgagtcgatatctgtgtgacggcgatgcctacactgccctttttgcctttccaaatcttttggcaaatacacaaccgccttgctaagtaagcggcaggccaatggctaagcgacacacaacgacgtttgcacggacaagggcatttaccactgacagcgaggatgtcgtcgttggcgctaaactattggtgcaggtgcagcttaattaattaatcgattgattgcatggataatcgtaattctcctcctgatcagcagctccatctctagctctgtgtcgtcatagagaccactgaaaagatgaggagctgagaagatcgatgacagacgatcattgaggcggtggattgatggggcccaatgggggcatgcacaatgatgatgccct

SEQ ID NO: 76448 - DNA, 254 bp, Zea mays
  Clone ID: MRT4577_169749C.1
ttctggaagcccttcaagtaccagggcctgaccattggggtcaagaaggagatgccccggagcacgctggactccttcatgcagcccttccagagcacgctgtggctgctggtggggctgtccgtgcacgtggtggccgtgatgctgtacctgctggaccgcttcagccccttcggccggttcaaagtgaacagcgaggacgaggaggaggatgcgctgactctgtcttcggctatgtggatctcctggggcgt

SEQ ID NO: 76449 - DNA, 838 bp, Zea mays
  Clone ID: MRT4577_16974C.1
ggaagctggaaatgtccccaatggtgacgaggcacatcatccagcagaggctacactggacctcgctagagagcgacataagcttgtgatcgccaacgaaatcgatcaagtgaatgagaggctacaggcccttgaggcagacagggagtacataaaacagtgcgtgagggccttgaaaaggggaggcgaagggttcgatcttctccaggagatattgcagcatcttcgggacctaagaaggatcgagcagcgcgcgaggaactctggggagctttcgcctcattacctacatctttacacggactgaagatcagctgcaaagtctcatgcccaatattgcttgaagatggaaaccataggacaatgataagggaaaaaaaaggattgtcgactaataactagcattgtcattggagaggtttcgttgttggttcccggggaggagaaaggagctactcctggaactgtcacagtctgttcggaaacgccatccggaaggcagatcgcggagcaagtctgtctgccttccaaggtccagggttggtgagctggccgggtccatgggggtgtgcttgtgggttgtggcggcaatcatggccctgtgcaagcttctaaaagaattcatttatcctgaaaacatgccgatgccagctttgctgccggatagagtgggcttcactagtttttttatatttctttctttttcctcctaaattcttttcctgtaaatcctctagctgtatgtaatgtgctttgggcttctgcaatgatgagggtgttgggtgtgtgcataaaaaaaaaaaaaaaaaaaaaactcgagagggggccgcgggtaccc

SEQ ID NO: 76450 - DNA, 337 bp, Zea mays
  Clone ID: MRT4577_169750C.1
tcatttctcaacctctctctgtctgtctctctctatctctctcggtagtccgatggaccaaaccatgttgggctgccaggtcggcggtggcgttctgctagggtggagccctttcgacgagatccgtatctttccgtggactcccgagtcgctaatgacgcagatcgacgcgtgccattgtttacaccgtgtacgctcgctcttgcgctctccttagacccttccaaagtcttaaatctggtgtcgtccgagatcgatccctagggccagggggtccggtgagccttccctttgccttcggtctggtactacgcgagggtcgcggatcaatgcgtac

SEQ ID NO: 76451 - DNA, 280 bp, Zea mays
  Clone ID: MRT4577_169751C.1
gacgaattcaggctctcgttattgataacggctccggcatgtgcaaggctggtttcgccggtgacgacgctccccgcgccgtgttcccctccatcgtcggtcgcccccgccacaccggcgtgatggtcggcatgggacagaaggactcgtacgtcggtgacgaggctcagtccaagcgtggtatcctcacgctcaagtaccccattgagcacggcatcgtgaccaactgggacgacatggagaagatctggcaccacaccttctacaatgagctccgcgt

SEQ ID NO: 76452 - DNA, 506 bp, Zea mays
  Clone ID: MRT4577_169752C.1
agataataaatactgattaaaactgtgatacaaataatcatagtcatgtatttaaaaatacagaaaataaaaatgagtaaatttagcccattcaaacatgtgggcgaacagcccatgcggcctagccggccagcgcggcccaggcggtcaggcagcggcccaaccggccatacaagagtggcagttagggtaaaaccctaaccgctcctcctttcccagagccgccggcagccctggcggcatttttcgcggcggcgcgtggatccggcctgcgcggttccacagcggtgccaggaacgcagtctctcggcggcaggcggacacggactcggcacgtggcccccaggcggcgagtaggctggccccccggaggggcgggcgctctggccaggcccaggtgagcgcgcgccacaccgtagcaggatccagccatggggcggcctttgaacggagagtccggacccagcagtcccgtgggcgtgcggtctgacatccggcaccaacag

SEQ ID NO: 76453 - DNA, 1271 bp, Zea mays
  Clone ID: MRT4577_169753C.1
ccacgcgtccgcatacccacagcccacggtcccataccacacgcgtacgcggcattctcctcggcgcgggttgccgagacgcgtacgcggcattctccttgggtgcgggggttcctctcgagtctcggcaacgacgaaaacgaaaataccgagtcgagtcagcgatgaatcccttcgccaaaaaaccaacaccgcgagaggtgatgcggagcagcaagcgggacctgacgaatgctacgcgagggatcgagagggacattgcgtcattacagcaggaggagaagaaactcgttgctgaaattaaaaggacagcaaaaactggcaatgaggcagcaacgaaaattctagcccgtcagctgatcaggttaaggcagcagatttctaatttgcaaggtagccgagctcagattcgggggattgcgacacatactcaggcaatgcatgccaacacttcagtggctactggtttacaaagtgcgagcaaagcaatgggagctttgaataagcaaatggaacctaccaagcagatgaaaataatgcaagaattccaaaagcagtcagcacaaatggatatgacaaatgagatgatgtctgattcaattgacgatgtcttagacgatgaccaggccgaggaagaaactgaagaacttgctaatcaggttctggatgagattggtgtagacattgcatcacagttgtcctcggctcccaaaggaaaaattgctgggaagaaggttcaggttgatgaaagttcggagttggaggaactagagaagagactggctgctctaaaaaatgcataagatctgtttacaaccctctcctctatgcacatagcaagcctgtcgtgtaccttaattccaaatcttcattcgacacgcaaagtcactgtgatttgtatgtatcaaaaggaagatgatgcaaacccccaagtttttgggcgaatcgatgttgctgctgttcgtacacactcacgtataagatggggctgtgctgccttattagcgacatgattcagagcaagggattccatagtcttgtaaagaagtttgattatttttacatgacagctttttgtttttggtcgttcgttacatgaaaaaaaaaaaaaaaaaaaaaaaaaaaaaaaaaaaaaaaaaaaaaaattcggcacgagctcgtgcgtttttttagccttgtgggaacttacagtaacgccgcacgtcatttttttaagtgcctaggctttccttgaattggttgcttcccccctttcttgccatttcgccccc

SEQ ID NO: 76454 - DNA, 281 bp, Zea mays
  unsure (1)..(281): unsure at all n locations
  Clone ID: MRT4577_169754C.1
cctcgagggcggccgggaagaactgtcaaaaaagaggancgccacccccagtatccccccaggcggggaggcctggcaccgaaggacacaccgcccacggagaagaatataccgcagacaccaaggcagcgacgaccagagcggaccgggaggcccagaaaggcggagagagaccggccaacgcagggcaggtcaaggcctcccacgggagcgagagagaggcggagggcggccaagcgaagcaggcaagagatgaagacgaaagagaggacagcagacca

SEQ ID NO: 76455 - DNA, 1689 bp, Zea mays
  Clone ID: MRT4577_169755C.1
gtcggttcgcccgcaccgtttcccaaaccctccggactcgaacccaacccacgcacccacatcgggagacgagccaggccgagctctggaagagtctccggaaggcccgcaccgtcgatggcggccgagggcagcggcgtccaagagacgttcgaggcgcgggtgaagcgcctgttcgggtcccgcctcttcgacgccgtcccggactcctccttcccgacggcctcctggtccgtggccgcgggcgacgtcgagcgccaccgttggtcgaagccgtcggaggcccgcgacgcggaggaggaggcagcgggggaggccggccgcggggacacgccctgcgtctccgcgttctacgacgccaacgggtgccttcgtggccggaggcgcaggtccaggcaggaggagttcgaggggaacctcgacgacctagatgaagacgaggaggaggacggggagagggagaggaatgcggcagaacaggacgaggaggagggggttagagttaacatcggcctcgaccccactctggatcgggaggaagaggaggacaagtatgacagagaggcctttggcagagaggaggctgctgaccgcgtgtacatgcacgatataatggatgacggtataaacatgagcatcaacagtatagtccctgacctccttgatgattccattgaaggggtgtaccgttttaagaaggatcctcgggcagatatgagggcagcatctgcaagactcagagaagacgatgggtctgctaaagatggtgactctcactatgccactgaagcgaaggacttcctgaatgtgggaattcagacaaagaaagctgtggaggaagtaaatgtaaaacctatactgaagaggaaggaggagcaagcggatttgaaaccaaggaaacgtgtccggtttgatgctaatgttaaggatcgcgagtcggatatgtttgaacgtgatgaagattctccaatggttcctcaatccatggaagtagtcacagggaaggagagcacgcctactttgtctgtgtctcctggtgtccctgactatgtaaggaacccttcaaagtacacccgttacaccctggatgtaccagagtctaatgatgactcgaacaggacggctcttgctgacctgcatgatctgttagggagatcagaccaaaacaggatacattctgagactgctgttgagattcctagctcagtcacattcatccctcgcaaaaagtcagtggatgccatggcagtggatgacggtcccagagctattgattccaactcatctgtaattggattggtagcaggtgcctctgatgaacctgatcaatgcgagatggatgaagatgacagtaatttatcgtcaacgccacagatgcatacaaactcgaaggcaaactctcggcgttacaggtcaagtagaactgatgatgatgagtaaaattgagggccccagggtacctagtctgatgtttgtttaagaagtttttaagtttcggaatacttatgtaaatcaggatatatgtgtgctcttgtgctttgatcttgtgatctgagctaaccaactatgtttaagtacgtttcccccatatactttgttatataatttcttatattgggatttgagcgccacatagtatgtcaatattagaaattttcagaaacttcactggtaagttgtcttagctga

SEQ ID NO: 76456 - DNA, 137 bp, Zea mays
  Clone ID: MRT4577_169756C.1
catcatcagtctccggcccctcttcctcgtcgttctcttggcgtcgctgcaatgcggtgctgcgacggcggctgctgggtaccggagttgcgcgcgtgggttctggtcggcggatcgtcctatcaagttctccgggg

SEQ ID NO: 76457 - DNA, 375 bp, Zea mays
  Clone ID: MRT4577_169757C.1
cacacctttaactgggtgtgtttttttagaaacatcccccctccttcactccacgggatctgagggtaccattgtttacaactcctttggacaggttcaatgagacttagtttatggctagctgcatagaaacctggccacacacctgaggggcatacactggatgttgatcgagcctgacttgggcttagagggggccgttgttccaactgacacgcttgtccgtgaatcatctccttctgggctttggcttataaccccaggtgtggcatcccactccggggggatgcttctaacgctactagcttgagctcgccaagtttccgacgccagaaaggaggtaatacacattgtgcactggcacaaacggtatcc

SEQ ID NO: 76458 - DNA, 275 bp, Zea mays
  Clone ID: MRT4577_169758C.1
agttattttgaccttgaggactggtaaccttttcctagagctctggtttgaaccgtatgtattgcttcctcagttcctcttggactaactcatttgtgttacttcactagtgaaatcatagttcacatataattttatgttcatgcgaattatcacatttgtgtctctatatgtaatttggctttttactgcataggagttgctgtagcttttaatcgaatgaatcttgttatgggatcagactaatcatatggttcactgatgtacactccgac

SEQ ID NO: 76459 - DNA, 562 bp, Zea mays
  Clone ID: MRT4577_169759C.1
ttcagctctgccgcgcttgtcgtctgcgggggtaccgtcggctctctccgccgccgttgaccctggcgaatagatgatcccctgtctccgtcatcccaggatgagaaagttaggggataagatgcagctgattagggatttcttcgtttgtgggtaagttctaggttgggggggggcgtgttttgatcaactagtctcgacccagtccttggattgcatgtttgccagccagtggattttgagcatttcaggacggagaagatcatatcaacgctgaatatcttgctttgctggttagtaatctctgtgtgtgcagtgcaattaatcctgctgtgccgtatccttctggtttgaagaattttggtttgtggttgcattgcatcgaaccgagcaagtttctataactgaaacctgaaggattccagactcaactttttgcgcggcaattgtgctcgaatttgccagtatgccatcagatagttttgtgttgctttttgactttttttcagatgaactttaacctgggattaaaatggtttggtacagaaaactcaagcttttg

SEQ ID NO: 76460 - DNA, 1472 bp, Zea mays
  Clone ID: MRT4577_16975C.1
tgaaagcagaatgaaaacggcatcggttacgccatccacgtcgtctgaaattcaggtggccgtcggatttttcgtggacgctccctagcggctcggcgtctccatgtgccgtgaaggttccagaacccacggggggtcgtcttcctccacaagattctgccaaaagatcctctcggatgcccccgcccacccatttcgccagtcgccatcgagctctcgcttccgccgcccgctgccgttgtatcaccccagtgctgagccctaggatgtgactggcggacgtctctatggccgagccgtaggtggaggcggcacctcggcaccgtgggagatggaggacgatgacaccgagggtgtaggcgagagcacctgtccccccgccgccgaccgaggaggctcctcctcggccggcggcggcggcggcgactcacacggttacactgacatcgagaaggaggtattcgaccgtctcatggagaagagaatcccggaggtcgtcgcggacccggtggccttccgcgaagagctccaccgccacttcgagcgcctgccgctgagctacgccatcgatgtgaacgtcgacaaggcggaggacgtgctgctgcaccggagcattctcaacgagtgcactgaccctgaaaatcgccccatcttccatgtgggcttcctgaacgtgagttccactgctcgatcgcgtctccactgtgctttggcttctcactgaaaggccaaaaacgcgccagcacagactgggatcgtatctttttttagaagagactgagatttttgttctgcctctgtatgaccagtgcatcccgccctcgttggatccacagtataacactcaatccatctctataacactcaatccatctctacgagcgaaaacggtaattgtgggggttctcaggattccactttgagaaaatttgagccatgtgaagggatcgaggacctcagtttaactggacaaaaggttgtgggtgactatgtggccggttcttcgaggggagatgtagaaatcctccatgttcatgaaattattttttctaccattgacaaaccaaagctcctcgctcagctatctgctttgttgtctgaagttggactgaacatccgtgaagctcatgtcttctcaacgactgatggcttttgtttggatgtatttgttgttgatggctgggatacaaaggtgatttaccatagtatgattgtgtagtgctagcttgcttatctatgtatacttggagcatgttctgtaatctgtaggaaccatttttttccctgaaagaaactacagcaaccatttaggtcgcttgaacgttattgtcaaaaacataattaccagctggataatgtcatcattttgtccaaaaaaaaaaaaaaaaaaaaaaaaaaaaaaaaaaaaaaaaaaaaaaaaaaaaaaaaaaaaaaggggggagcgatataaaaaaaaccaggggtgaccccct

SEQ ID NO: 76461 - DNA, 175 bp, Zea mays
  Clone ID: MRT4577_169760C.1
cgctgggtattctctaatctaagccctatacatacgcttgggtaggatactcgataggatcgttggaggttttgggatgtttaatatgacgtactatacgtgatctactggatatgactatatattgtaccggtgcggcatgacgactctactggtttggatctaagcgaataca

SEQ ID NO: 76462 - DNA, 489 bp, Zea mays
  Clone ID: MRT4577_169761C.1
attgagtgttcaccagatacatgtgttagagtgacgcactaaccagttcaactcaaaagcttaaggtgatggaagaaggtagtcaattcacttatacacattaacaccctactcacgtgcagccagagagaaatacacaaacatggaaataaatgggtggaggcacaaataaagcctctatcaggattcaaactcgagacatctgtctttgatatcatgttagagtggacatactaaacagttcaacccaaaagtttaagcctttagaagaggatagacaatcgagttatacacttcaacacccccactcacgtgcaaccgagagaaaggcgcaaaagtagaaataaatgggtgaaggcataaataaagcatctatcaggattcgaactcgagacctctgactttgataccatgttagagtgaatgcactaaccatttcaacccaaagcttaacctgatgatagaaggtggggaatccccttatacact

SEQ ID NO: 76463 - DNA, 292 bp, Zea mays
  unsure (1)..(292): unsure at all n locations
  Clone ID: MRT4577_169762C.1
gctggagctagccgccncnattttctttttttggggaaaatggtgccaggacttttgacaatcaattgtacagttttgagcccccacaggcacccacacccattgacccattttttgtccccgttttacttttccggggcgtcgtgcagttcatgagggtttttagttgtttttaccggttacaccccttcgggcttttggaaaccaccaagagggactttcaaatttacagaccgccggggaccccccagttttccctcccaatttacatgaactggcatttttgggcttt

SEQ ID NO: 76464 - DNA, 369 bp, Zea mays
  Clone ID: MRT4577_169763C.1
acccactcgtccgtggagccccccgcttgttccgccatttatcatcgcccgaacaaagctacatccggcagacatttttaaaaaggcggggggcccaacaaaagatccccaacaatcaatcccaagaaccatctccagatcaatcacctcaataccacccaccttctcaccatctccaaacttcttcacttcttcccatgccaatgccttcaacgacatatctcaatctaaacactttactcaccatagcatcatttctcactctaatcttctattcttactttaacaacaatcttacatctaatacttatccttttctttctcaattccattaaattatcataaatcatcaacaatataacacacatt

SEQ ID NO: 76465 - DNA, 448 bp, Zea mays
  Clone ID: MRT4577_169764C.1
gtaacgatgcgtctctaagcgtggaggagagcgtcccaacagctggatagcgacgtgtactacctgacccctatcacacagaatggctcgattctgaatagcgcagtagctatgagtttgtcttttctatctgctggtccctgatgatgcactattagataggagtggaactagttcacgcctgcacccagagctacaggttcgccaaggttttctaactttatatacggaacaataggaccgctattcttctcgagagaggagactgattatgcatgcgaaataagtgttttgtgctctaatgaaaagtgcacgcttgatgcctaatacttcgtaggacgaaaacactctagagcgcaagttatatgtcacctcctgtacctaggaatgcttaaggttacattgcacattatggtctttatgaaaccacgcacctttgttgatcttc

SEQ ID NO: 76466 - DNA, 375 bp, Zea mays
  unsure (1)..(375): unsure at all n locations
  Clone ID: MRT4577_169765C.1
ccgcccgtgcatggcggcattacgcctgctcctcgtcgcgtctagtgtccagcnngaagggggaggataaatacggaaggcggggggcagagtgcaatcgacccctcctgcgccgacctgggatcgcgcgcctgtcgnnncaccgccgatgctggcgggcgcccgtccatgggcgggggggcgctgactcgtcgtacgctgcatggccctggtggccgttcgtctgcccctcctgaggggagggaggacgatcctacgcgccgtcagcgcgagctggtcgggatcgctctactgtgccaggaggaagacgagagcaggttcgtgctcagcgcatccgaggagcctcgggcgggttcgcgcgcaacgacccggcac

SEQ ID NO: 76467 - DNA, 375 bp, Zea mays
  Clone ID: MRT4577_169766C.1
ttttgacacagatggcattaattcgtgtaactggtgtccaaggaccaggaatatagatacatccaccgaaagaagagcagccgccataatgcaacaaaagaaatacgaagtgcttagaacccgaaaagcctccctttctttttcttcttctcatcaggcttgaggctagttcccgaaggggtagctgaaggggtcgaagaatgtgtcgaagaataggaatttgttggcgagatcttcgcaagcttgaactggccttgcggtacccgaagggaagcaggcgcttgctgctttgggggtgctggtggtggtggatccttggtgtagtacttctcgttgtagtatgcctggaacggtctcggttgagcatcctcacgg

SEQ ID NO: 76468 - DNA, 523 bp, Zea mays
  Clone ID: MRT4577_169767C.1
atcatgtgctcaacagaggttgaggcttataagatatataacataataagaatgcgaatatatttaagtatatatagaaacacattaatttcaacataacatatcaaccgttagcgagacagtcaagcacacaaaagcataatcatgacagtaagtagatataaagaattattgccattcgatcacaaaagagtgtaattatcagaacaagtagctctgttgacagtgaggcaaaaaatacgggcgacccaaaaaaactgaacatacgttatcaaggcactttgttgaagtccgggaaagaaaaaactagaagcgaccaaataacaaatgaacaattgttctgtgcgggaaatatggattatgaaatcccagaaactatcaatagtcaataaccatttagaactgctagctaccaactgtggtgacatttacaaacagaagataactgaaaaatagaatggtttaccacctgcaaaattttggcaggctatggttctctgcaaattaatagtcagaaatttat

SEQ ID NO: 76469 - DNA, 136 bp, Zea mays
  Clone ID: MRT4577_169768C.1
ccaatcgcttccaacgacctttttatatccaacaccttcacctgacaaaccggaaaaattaatttaactcttaggaggttctccatccaccaatcctatcattttgttactcaattcccttacctcaattatccat

SEQ ID NO: 76470 - DNA, 876 bp, Zea mays
  unsure (1)..(876): unsure at all n locations
  Clone ID: MRT4577_169769C.1
ggccggccgggaaaaaaaaaaaaaaaaaaaaaaaaaaaagtatgcgaccattgactggcatgacttcagcgtcattgcgacagtcatttttgatgaggctgatgatgctgcggatctccctccacctgctcagctgaatgatctacagtcccagtctcttgaacaaaaggccgccgtttcattatctacacgtcgtctggaggaggccatgcccgacgatgtcacatactataatgtcactcagcagcaggtaccaccgtctccaatgcaaccaaattacgccccaactgcaccacccgtgcattcgccgtacggtgcatcgccatatgcgcctcctcctatgcccgattaccgaacaccagcgcagatatcacgcgaagaggagcaggcacgattggccaaggaacgccaggcagaaagcgagcagcgcgcacgcgcacaggctgctgccagaggagcgcctggtcgcatcgtcacagactacgtcccccgcgttgccacaaagaaggcaaacgtaccaatggccgtgtgccctaactgcaagcagcaaattccttccaacgagatggatgagcatattcgaattgaattgctcgatccgcgctggaaagaacaacgtgataaagctgaagctcgatactcgacgacgatcaacaccgccgacgttgcaaacaatctcaagcgtttcgctagtcagcgtgaagacatatacgacggtgccactggccaatcaatatccgccgaagaagagggctcggagaaagaggctgncatgtcatatgatggacagccagatcctgcaaaggatgctgcccgcttatcgcagatgcagagcatgaacgtcccagagcagcttcgaaggatacagggaaagca

SEQ ID NO: 76471 - DNA, 322 bp, Zea mays
  Clone ID: MRT4577_16976C.1
cccacgcgtccgaaaaataaaaaaaaaaattataaataaaaaaaaaaaaaaaaaaaaaaaaggaaaaagaaaaaaaaaaaaaaaaaaaaaaaaaaaaaaaaaaaaaaaaaaaaaaaaaaaaaaaaaaaaaaaaaaaaaaaaaaaaaaaaaaaaaaaaggggcggcctttttaaaggttcaaagtttacatccccggattttaaaagtaaaaccttttttatcggcaccccaaattcaaattaatggcccgctttttaaaaaggcttagttgggaaaacccttgggatgcccaaatttaatggcttttaggaaaatccccttt

SEQ ID NO: 76472 - DNA, 390 bp, Zea mays
  Clone ID: MRT4577_169770C.1
cggacccgtgggcgtaaaagcgacaccgatggcgggcaactcaatcatgacggacctgcaatctacctcggagcccactggtggaggacgcctatctaggccctgcacgagccgggagcttaccaccatgaggatccaggcattaaaaagtccatgccaaagctccaagttgacgagcaagatatgacaacaacccctgtacaaataactggggcaacaactccggccaggacttcggtatctgcctactataatacaagggccactagctcctgaagcagagttggagcaccacaacctccgaactgtagacacccctgggacattaccccaagaccatagcctgataacttgcctaacttatggaggggggccaaatacgtgactcct

SEQ ID NO: 76473 - DNA, 382 bp, Zea mays
  Clone ID: MRT4577_169771C.1
gaacagcctggacgagcacacaagtactcatatttcttttcacgaatatttgatggtcggataggaactttgtgtgtatggcatcggcaatccaaagtatccaatcctgatttcactctctatgcgatagcacgggagcagggttcttgttacgtagacagatggaagtgcaagctctctcgagaaacatcaatggcgagtagaagcggcactaagaagtagaaacatgagtttgagcaatttcacacggacagacggcttgcacacagacaacaaggtggaactgactcaatatgagcatttacaatacaaatgtttaacgaaactctgatcttgaataactgatggtgcattcctgatcttcttagatagtctgcatgct

SEQ ID NO: 76474 - DNA, 253 bp, Zea mays
  Clone ID: MRT4577_169772C.1
gtcgcatggaaagagttttgcaggtctaggctccttattgatgaatattggttggaaaaagggaaggactggaaatggatgctcaaatgcaacgcaattgttttccccgaaggatgtaccaataaaagcggacctggaacattcgaagagaagaatggaccatacttcggcgattggaaagagaacaaacaagatggttggggaaagaagatcttcgccgataagagtgtttatatgggtcattggaaagtta

SEQ ID NO: 76475 - DNA, 300 bp, Zea mays
  Clone ID: MRT4577_169773C.1
accgctcggacgtgcgcgcttaacgcaacggctcagccctcagaccgagcaccaggcatcggattctgatcgtaccgccggtggactaccgcttgagttggcagcagagacttgacagtggctccaacaaggcaacacattccatcggcaccaacccagcgcggcgccaccggcgacccgtgcccactttctaggagagcgatagccacggagctgacctctgcgcaactgagcacgtactactgcacctgcacgctcaaggccatctacgtgctcattgcgcggcaaggtctacgacgt

SEQ ID NO: 76476 - DNA, 429 bp, Zea mays
  Clone ID: MRT4577_169774C.1
caaaaataggaggccggaggcgggcgaggaacgtgaataaaatatcattcggagaaacaagagaggccggggaatcgcgtcggaattccggcgaatcggcgggatccggccgggatctgcgcgccggatgaggggtcggcaccatgaaatggtccacattactcagtaaggtcgtcttcgccggcggccagcagcagcagccgccacctccgccgtcgccgccgccggagtctccgttccacggccagcaggtggtccaggacctctccaccccgaggctcagctccgcctccaccggcggggacgagggcggcttcgacgcggcggccgggagctcgccctctgccgctgcgtcctctgccagggggagaaatgaattggagtcgaactttaggagattatgggaagaatttcgctcttccagctctg

SEQ ID NO: 76477 - DNA, 131 bp, Zea mays
  Clone ID: MRT4577_169775C.1
tcacatagtctctccactcgagctagctactgtgcgactaccatagttgtaacatcagtttacagctcaagctgcaacatttgggacaatcttgcaccttacggttctcatgcacgctgcgtttggggcct

SEQ ID NO: 76478 - DNA, 335 bp, Zea mays
  Clone ID: MRT4577_169776C.1
gagaccggagaaccaagcaggtgggaataaaaaaatgggggggtgggtcctatacaacggggtaacggaatcaaggcaccgtatgggtgcagaaatgaaaacagcacaagctagggattattttaacactaaaacgcgaagaccaaggggtgggacaacgggccgggggggttcattcagccggtgaagtggagctttttttcgccgccggcctgctcggcctccctggggcccttcctcttctcgtggtgttcgggggaggcgtcgccgccggggccgacggccgtcgtcggcgcgtccttctttttgctggtggggcggggcgcgtgctccgg

SEQ ID NO: 76479 - DNA, 465 bp, Zea mays
  Clone ID: MRT4577_169777C.1
gacgacccaaccctctacatagagtcgtatcatcatcatgaccgagcagaccagcaacaccggcaccgccccagtccacaagcccaactttgtggaaaagatcgtggacaagatcaagcatcacgggcacggacacggccaggaccagaaccagcactagcaacctgctaccgctaatgattcccaaaagatgtgccacacctatggtggtcccgacaacgaacacgacaatgcctatgttgctgaggcctcgattgtgggagcccatgcaattccccctatgacgtttcacacagaagcacaccgctctgaccatgtatcctctggagcaccccgctctcagactcagcctcaggcagcacaagcgcaacagacctcgacatcgacgggtgcgcacgggcactcgccaaatgagccattccatgagtttggtgatcgagtggccggacatgatctccattccgc

SEQ ID NO: 76480 - DNA, 793 bp, Zea mays
  unsure (1)..(793): unsure at all n locations
  Clone ID: MRT4577_169778C.1
tgtttggtttgagaaatgagctaatctatcatcttcttacttctgtcctttttgtttggtttgtggaatggaatgagttgatccatcaccatctcattcctcatagttagttaattagtactaatatgtggaataaagtcatctcaccaaatttgaggaatgaactcacgatgcaccacttcattttggatggaatgattcctcaaaccaaacactccataatagtgtgtttggtttatggagtcattctatgtttcatgaggtgatgcatcataagttcattccatcaattttggtagaatcaactcacttcttatgtatatactaattattagcttatgaaaaatgaggtggtgatggatcaacttattctatttcacaaaccaaataaaaaangtgtggagtggagaagaangatggatcancttcattttcctcaaaccaaatagaactctaanggagcccatannaaaggaagtaactagagtacnnttggactggtagctanncgacggtgacgacgactgggcgaagcggcccggcagacgcacgcacgcgtagcacgtcgtggcgtcaaggtcgaccggccggcggcgggaacgtacgatgattgcctgcggctttcgtgatcgatttgtttactgtgtcgcgccgcgcgcggtaccccattccgttaaagaaacgtcgctaagctagaggagcatgcattcgtccattatgagcacacgtaatcatagtggtgcgcacgttgcttctgctctaattcatttctgcatgcacccgtacatcatac

SEQ ID NO: 76481 - DNA, 476 bp, Zea mays
  Clone ID: MRT4577_169779C.1
ccccggccgctcgagccggcgggccgggattttcaaaaagggctcctctcaacatccctttccgatcgggtcactctccacagcacaagacccggaacagccagaagaaaatgatggagcaccgagcccacgagtacacaccatggacctggatccgagcttgcactaccacgacaacgatgatgactgaattccccactacctggacaagaaacacaacgacgtgccgctccgccatcctcaccgtcaccgccatggacggcgagacggcgagccctgtaccctagcccacgctggatagcacggggcacacggagcgctagttgttgtgcctcacgggggtgtagacgccgtgaatgctgaggaccacgagggccatggactagatgtagcccaaggaacctgccaaccgcaaccacattgttcgtgcgccatgccttcgtcgacatgaagaagacccctcgatcttgtacacc

SEQ ID NO: 76482 - DNA, 332 bp, Zea mays
  Clone ID: MRT4577_16977C.1
aaacaagtcctttaaaaaagtttaaattgaacatggggccccatccccattttaactaacttatgccatttttgtttgggacagggtttgcctcactaaaaaacaattgatacccagatgattttggtggtttcaaatttaggtggcggacaaacttgttcccggaaccccccccccccaggaaatttccttgggccttaccgaaatttaaaccttgttgcccccgggaaattttttggccccctaaaattttactcccggggccctggtaaaaaccacatttcccggggggttttttttttggggtttgacggttttttttcccatggaaa

SEQ ID NO: 76483 - DNA, 995 bp, Zea mays
  Clone ID: MRT4577_169780C.1
gggggcacgctcgccggcaccaccaacggcctgcgcatcaagtcgtactaggactccaagtcgtcgctcaagggggggcggttcctgtaccaggacgtcaccatggacaacgtctcctaccccatcatcatagaccagaagtactgccccaacaacatctgcgtcaagtccggcgcctccaaggtggccgtcaacgacgtcgtcttcaagaacggccacggcctgcgcatcaagtcgtacgaggactccaagtcgtcgctcaaggccagcaagttcctgtacgagggcatcaccatggacaatgtctcctaccccatcatcatcgaccagaagtactgccccaacaacatctgcgtcaagtccggcgcctccaaggtggccgtcaacgacgtcgtcttcaagaacatccacggcacctccaacacgccggaggccatcacgctcaactgcgccaacaacctgccatgccagggcgtgcagctcgtcaacgtcgacatcaagtacaatggatccggcaacaagaccatggccgtctgcaagaacgccatcggcaagtccatcggcttggcaaaggagctcgcctgcatctgaaccaattgactaacatgcatatattatatatataatcactcttcgtaacctctctctttctcacgtactctcaagtctccaccgaatatataatccgctggtttgtattttctttcttctttggatcatcacaaaaccaaccgatgtaattattattagaccgacgcctcacaatcttggaacttattcattatgctagtgtatatctgtaatcccattccataatgttaatgttgatttgtggtcaaaaaaaaaaaaaaaaaaaaaaaaaaaaaaaaaaaaaaacaaaaacaaaaataacaatgctgatacatgaaactaagaaactaaaaaataaaatacaaaaattaaaatcaaataattaaaaataaaataacaaaaaaaaaaggggggcgttcttcaaa

SEQ ID NO: 76484 - DNA, 194 bp, Zea mays
  Clone ID: MRT4577_169781C.1
tacacgatcgacgcatgcctacgcgtgcaggccgtattatctatcaggcatactcggactttgagcgaggatactgacagtcatgatacctcgacggatctgacagaactctggcctgacacacatcattcacattgctgcactatcaactttcgacagctggattggtacctaacatggcggtaacgatcgac

SEQ ID NO: 76485 - DNA, 279 bp, Zea mays
  unsure (1)..(279): unsure at all n locations
  Clone ID: MRT4577_169782C.1
aactaaacaacagtgacctccatccaaaccttcaaacgaacatcctatttaccatgttcgatcatcgatccaagcaagctctctcatccagctaactaatggaagtagctagcaaacgtacgtattcttcttcaccatctgtttcttggggaaattanaccccagtacgcgtacgtcacaatcgcgcgcaatggagaaggagaaggagaagtccagggccaggccgtcgaggggccactggcggcccggcgaggacgacaagctgcggcaactcgtcga

SEQ ID NO: 76486 - DNA, 277 bp, Zea mays
  unsure (1)..(277): unsure at all n locations
  Clone ID: MRT4577_169783C.1
gagaagaagaggggggcgcccggagcgagggcccggccaacggcngggcgcaggggacgacgcaccgcggcggcaggccgggcggcagcagcgaccgcgcgagagagcacagccaacgaccagaggaaccgcacaacgcggaggggcgncgccgcgaccgacgccgagcgcccgagggaagaggcggccaagaaccagggcgccangaaccccancaacaccgcggcggaggccacgcggcngaccgggaggaggcccagggaggcgacgggccaga

SEQ ID NO: 76487 - DNA, 610 bp, Zea mays
  Clone ID: MRT4577_169784C.1
cttgcgagggagactcgcacgataaatgcaccatttcccgtatgcaccaccacatatcagagaggtaggagtcctgcgccaccgtcagcgccgccgcgtcgtccaccatcgtttcccgcggcgcgatcgccaggctcattgctctagggctggctgtgctgaggccgaggagcgagagggtgctgtgcacctacgccaaggacttggacccagtcatcaccaagggcgcaagcgagtcgctgctcgccacagcggacgtgttgaccgcgcccgaggcggccccgatggccctctacgtacgagcgcatgtgctccgagtgcaccgtgttgaccctcgggataatgaacaatgctgctggggtggatcctcctgggggtcttcatcctcatctggtccctctactacatctacactctctgacctcgacgaggactaggagatcgatgacctctcgttctagatccacgtcctctcctgctagtgatttggacgcaaactgtgtgtggtggtcatcggtgtatatttatcacctgactatttgcatctaaaataccttcctcttccggtaataatgtttgaagattacgaacccctggaaccaatagtgcg

SEQ ID NO: 76488 - DNA, 1067 bp, Zea mays
  Clone ID: MRT4577_169785C.1
tctgaagctcatccttgtcagtgaacccctgagggacaagctgagggtgagcctgagctgccggcttgtatgccaccccccaagccagcggcaccttgatgcctccaaagagaagagtgtgtctcatatatttgccagtaacttcaaatgctcgcctgtagttctccttttcgaaaaaaggaaggtacgatcatcaggttatctcgtgaacgattccctgaccgtggaatgcacggtcaccatgctacgcgacttggacgccacggataaggagcagcacctgccggtgctaccgccctcggacctgcaccagcacctcggcgagctcctgcagaccagcgatggagcggacgtcacgtttcgtgtctccggggagtccttcgccgcccacaagatcttcctcgccgcaaggtccccggtcttcaaggccgagtgcttcggaggtgtggagttaggtagccccgcttctgtttataacaaagacatggaggcagctgtgttcagggccatgcttcacttcatgtttaccgacatggccccagagctcgacggtgcccaggaccaggagcctgaggccgcggcggccatggctcagcacctactggtagccgctgacaggtatggtctaaacaggctaaagctgatgtgtgaatgcaagctctctggtggcatcgacattggcacagcggctgcgacgttggctttcgccgagaagcacgactgcccgctgctcaaagccaagtgtcttgagttcgtcactaagtcgcctgagactcttgatgctgtcctggcgactgacggctacgagcatctggtggcaagttgccccttggtgctggctgaactgctgagggctgcgcgtggaaggaagatctgagctcgcgatgatggtttacgttgacagtcctcatgtaacgagttgcttggcttctccacttgtgcttgtcatgtatgtgtgcacacacatgagacgggcagctagcattattttctgtggttagatctcgttcggttttgtgccagactctgcttcagttgcaggttgcagctagtgcaaaaagattcag

SEQ ID NO: 76489 - DNA, 282 bp, Zea mays
  Clone ID: MRT4577_169786C.1
attccagatcaccaatgaccaaggtcgcaaagtttaggcacgaagcgcaacaccttgcaacacggactaattcagatgacggcggcaggtaaaacgaaacgatggggcgatgaaaaaagttaggtattgataaggcagtaacgtggccgcttcttgcctggtggggggcggcctggtccgcgttatgaccaggcgaggctttagtcctcaccacacatgatttcttcgacgacataccagtctcttaggtcacggagcgctatcatctcacaggggggatcc

SEQ ID NO: 76490 - DNA, 527 bp, Zea mays
  unsure (1)..(527): unsure at all n locations
  Clone ID: MRT4577_169787C.1
cggacgcgtgggcgtcctcgggccagtgaccctctcctgcctgaacgaggggaagaggtgcctgaggcatcatagatggatataccaggtcggcctgaaaggcgagtcgctcggcctacacaccgtgaccggaagctccgccgtggaatgggccggccccggcggcggcacgcagccgctgacttggcacaaggccctgttgggcgcgccggcggggagcgatccggtggccctggacatgggcagcatgggcaagggccaggtgtgggtgaacgggcgccacgccgggcgctactggtcgtacagggctcactcccgcggctgcgggcggtgcagctacgccgggacgtaccgcgaggaccagtgcacgtccaactgcggcgacctctcccagagatggtatgcgaacctgtttcgcacggagagcacgcgcgcttgggatttttcacacttgcgttgcgttggcgttgcgttgcaggtaccacgtgccgcggtcgtggctcaagccnagcgggaacttgctggtg

SEQ ID NO: 76491 - DNA, 233 bp, Zea mays
  Clone ID: MRT4577_169788C.1
agaagtgtctctggtaacgctgtccggttggatgtggtctacaggcttttgttgtgaccatggatgaagtctcattcacatgaccgcagatcattctcagctcgggaaacgttgtagcgttctaaatgattaccttaatcagcaggaccatcccaaatgtccagctgtccagaagcacgttacggctagtgatgcaaccttccaactggatcaccatgggtctgacagatgca

SEQ ID NO: 76492 - DNA, 604 bp, Zea mays
  Clone ID: MRT4577_169789C.1
cccccccccccccccccccccccccccccccccccccccccccccccccccctccttctttttttttttggggaaacaaacccctccacaataatattatggagcaaacccgggccacccctggagtttgtttttactttggaaaggttatttagcccataaaaattcaccaggtggtggggggcatcaaaaaaaggggggtttaaaaaaaccaggaggggtacttttccttacacaaaaaggggccccatcggttgggattatttgggggggaaaaaatcaggaaactagtacgggggcaacaggggtgacacattatgcaaaagccgccaacagctccctttaaggtgggtgggggatcctccgttccaactttggcctgaagggcctgaaaagcccctggacaggccatgccggaaaatccccaagggcacaaaaaggaggcccttcgatttggttcgggaccccaggaagcatgggaatttcccccagtttgggggaaccaaccttgggccttcccatgatcatccagagccgggggggcccctcttgggagggggggccctggccccaatttttatggttggaaaaaaagggcagccta

SEQ ID NO: 76493 - DNA, 432 bp, Zea mays
  Clone ID: MRT4577_16978C.1
gccggccggttcgggacaagctcgtcaacttcacgcacctcatgcccacccgctacaccctcgacgtcaactttaaggacgtcccatcgggcggacccgacgcgctctccacccgggaaagaagccaaagactgcatggccgccaaggcgcgcctcgaggataggctcgagaccggcaagaacaggaggttctttacctaactccgacttcttgctcagcggggcgatgtgcggaatcacccgaccctcgcgggtgtggtgctacgacatctcgacgatgtccccgtcgcgcggcctgtcgttatgcatgtcgaccgcgacaccggcatctagatctttgctgtctctgctgtatacggagcttgcctgaggtcaccattgaacgaatcatacacttgtgcggcacatctgaaacatacacaacgacccgta

SEQ ID NO: 76494 - DNA, 291 bp, Zea mays
  Clone ID: MRT4577_169790C.1
cctcgagccggcgggatcttctccaagctccccagaccatgtccccaattatcttgcctccgtcatgataggtgagaaagacccgatcgaggaggaggcgatgtcatgccgcgtaaagggcggaaaaggtctagtgaagggaggacacaagcgccaccggaaggtgctccgcgacgacatccagggcatcaccaacccggcgatccggaggctgccgtcggaggagccgtgcgaaacacatctcggggatcatctacgaagaaacacgcggagtgctccagagcttactca

SEQ ID NO: 76495 - DNA, 305 bp, Zea mays
  Clone ID: MRT4577_169791C.1
ataaattaacccgcaggttttttaaaacggcgttttacaattaaaaaaaattttttttcaagtcgaaaataacttaaataaccaacccaaacacttaaaccaaccaaatgaaaacttttcaaaattacctacccctgcataacacacaactatttctcctattatttgcaaaatttcattaaccacaacccccataaatccctcaaaaactaaaaacatcaccaccaccattcaaaatggcacccccttcttctctttcttaataacgatccccttcctcaatatttttccctctattccccact

SEQ ID NO: 76496 - DNA, 246 bp, Zea mays
  Clone ID: MRT4577_169792C.1
tgctatcttttcgtcaagttcaggaacagcgtaatggtactcatgtggtgagatggggaagctgctgccaaactagctgctttctgcaagtgctgctacggcgaccattttcccgcaatgctcacaagctcctatagcttcccttcttccatcaaggaatgcataaattgaagctcaattgcgggaagcacttgatgcatcatgacacaaagaggctgatttgaaaaacttgaatgaaaagacttt

SEQ ID NO: 76497 - DNA, 867 bp, Zea mays
  Clone ID: MRT4577_169793C.1
aagcaacagtatcgatatgatcttctagagtagataatgatttctttgtcctttgtcctaatccggccaaataagtcgtaatttgcgttttgtacgtgaatagacgaacctaaagaaatgtcttttcttttcgcactaataaaaccgatgatgggggagtgtagtcgttgcatatatgcgcggcgcgtaccaggaccccgtaggcgaagccctcgatgacgttctcgacgacggtgacggcggcgagctccacggagccgatgtggcccacgaagcccacggtgacgaagccgatggagaactggaagacggcggtcaggatggccgggaacgcgatgtgccacagcagcttcgactcctgccagctcttgctcaccaccgccgccttgcccatgcccatgcccatgtgacgacgacgacggcatgcacagccttgctatagctagctcgctggagatcgatatatcacctggacggctggacttgcttagctattagctagcctttttttcttgatcggggtatgatgaaggacgacgcacatgcagtggaagcaatggaggagggagaagagagaagcagccaagccagcggacacaaggttgttagctggagctctcagctctaccactactaccagcggctacttaggttgggctggccggctggatgggtgctcttcttatatatagccttctctctcttttggaggctggagctgaatccaagtaggcaagtctcggtaccaccaagtctaccgcatcagtttattcggaccgtcttctggatcatgtcgtagatgatattatttgacactgtttgaaccataaccttttaaataaaagatttgctcccgtaaaaagagaa

SEQ ID NO: 76498 - DNA, 175 bp, Zea mays
  Clone ID: MRT4577_169794C.1
cgcggcgggatatgaacgcgcaccagccttgatgaagcccaggcccggcagccatcgcggtggaaggacgcatgcaatgtgtgaagttcttgctctacgtcctcctgctggccttttgcgcctgtgcactgggactgattaccgtgggtgtcgtggcacaacctgtcctgagtca

SEQ ID NO: 76499 - DNA, 390 bp, Zea mays
  Clone ID: MRT4577_169795C.1
ataggttgtgatattcttttaggttcataatatgcatgcacagaaaaactaaaaggattggggtgggattagacgctcaaagaagagatagaggatgtatagatctgatgatggtttggtgtgattcctggaatctcaagacgcctgccatctgaaaaaacttcaaaatggaagtaagatatgatgacaagctgactgcctttgcacaaaggcttgagatttccccaccaagaaggtttgggacttctacttcactatatggggaaaatatcctatgcaatcacttatcctggtgcacacatgcaatcaagcgatctgatgcatctgatctagatctaattatgactgttattttatatttaaccccttccacctaaaacatagtaccta

SEQ ID NO: 76500 - DNA, 830 bp, Zea mays
  unsure (1)..(830): unsure at all n locations
  Clone ID: MRT4577_169796C.1
tgggaccctcgggccggccgggccgaaacgtttctttagtctttaccctaaccttccgcgaaggcacacagccgccgccgtttcttcatcttcgtcgcagcgccggcgctccatcttcccctcccttccgtactcgcgctcggcacgcgggcaacggcagcggcgctcaggctctcagcgacggcgtcaacgccttcccctcccgactctcgccagtcgcctcgcgcccttgcctccgatcctccgcacaccggccggtgacccagcgttcagttagtggtccattgaagtgtagctgtattgctatcttcaactgctggggccatggcctacgagattagtgagatcaaaaagattggcataggtctggtggggtttggcatcctattctcattccttggtgttatccttttcttcgataggggcttgttagctctgggtaatcttttcacaaagaaggcaaaccttaagggatcagtgcctttcttcattggtttgtttcttctgtttgtccgttggcctgttgctggtataatcatggaactatatggatcttttgtgctcttcagtggttatgggcctcctatccaggccttcctgtatcaaataccaatcattggttggattctgcagtacccattccagctgcttggtcagttgaggcgtaaacgcacctgaaatgttctgcaactgccaagatactctntgactcttcatggttaaagtaccgtgtttgntgngatgtttatacatgattctcacttgtacccttcatccttcacgttgcgtcttcaactcttgtgcatattcgtactctgagtcattctgac

SEQ ID NO: 76501 - DNA, 771 bp, Zea mays
  Clone ID: MRT4577_169797C.1
gatcgtcaaatcaaaaccaccgtaaacatttttagacgtcacggacccagcttgtcatgccctgaaaactaggtacaaatctttttgaacggacaactatcctaatctgaagacagggaacacagtaataaatcattgttccagacattaacagcatcacatttccaaccaaaacaatggaaaaaggcatcactcttcagctgatagaaccatatgtcactatccgcaacgaaattcaaataccaaaggcgtctcaccatatgaacattgcatctgaaaaaaatgaagcagatcacgcgtggtattcatcaggtgggctatcaagctccactgtaagattttgttttctctagttttcttcaagggttccgtccgtgcaacttgcaaaataatttgtcaaattgtgtccagattccagaatcagaaataaatcaggtgtgatcactctggccccattgttgttgtgatgaccaaaaggcactgaggtctttaaccatgaagagtcaaagagtatcttggcagttgcagaacatttcaggtgcgtttacgcctcaactgaccaagcagctggaatgggtactgcagaatccaaccaatgattggtatttgatacaggaaggcctggataggaggcccataaccactgaagagcacaaaagatccatatagttccatgattataccagcaacaggccaacggacaaacagaagaaacaaaccaatgaagaaaggcactgatcccttaaagtttgcctttcttgtgaaaagctg

SEQ ID NO: 76502 - DNA, 1392 bp, Zea mays
  Clone ID: MRT4577_169798C.1
cttcactatagggtgattggcctttctcagttagttcggcaccgcgaggcctttctttagtctttaccctaaccttccagcgaaggcacacagccgccgccgtttcttcatcttcctcgcagcgccggcgctccatcttcccctcccttccgtactcgcgctcggcacgcgggcaacggcagcggcgctcaggctctcagcgacggcgtcagcggcttcccctcccgactctcgccagtcgcctcgcgccctagcctccgatcctccgcacaccggccggtgacccagcgttcagttagtggtccattgaagtgtagctgtattgcgatcttcaactgctggggccatggcctacgagattagtgagatcaaaaagattggcataggtctggtggggtttggcatcctattctcattccttggtgttatccttttcttcgataggggcttgttagctctgggtaatattttctttttaactggagtgggtctgttactcggttggcaatctatgtggcagcttttcacaaagaaggcaaaccttaagggatcagtgcctttcttcattggtttgtttcttctgtttgtccgttggcctgttgctggtataatcatggaactatatggatcttttgtgctcttcagtggttatgggcctcctatccaggccttcctgtatcaaataccaatcattggttggattctgcagtacccattccagctgcttggtcagttgaggcgtaaacgcacctgaaatgttctgcaactgccaagatactctttgactcttcatggttaaagtaccgtgttgttgtgatgtttatacatgattctcacttgtacccttcaatccttcacgttgcgtcttcaactcttgtgcatattcgtactctgagtcattctggcattgtccctttttgcgagcaggctatggtttattgttcatatttagacaataagagttcataagttgatggatgctccgactcttgaagcaggacctcagtgccttttggtcatcacaacaacaatggggccagagtgatcacacctgatttatttctgattctggaatctggacacaatttgacaaattattttgcaagttgcacggacggaacccttgaagaaaactagagaaaacaaaatcttacagtggagcttgatagcccacctgatgaataccacgcgtgatctgcttcatttttttgtcagatgcaatgttcatatggtgagacgcctttggtatttgaatttcgttgcagatagtgacatatggttctatcagctgaagagtgatgcctttttccattgttttgattggaaatgtgatgctgttaatgtttggaccaatgtttttatacaaaacacacccaaaaaaaaacacacccc

SEQ ID NO: 76503 - DNA, 580 bp, Zea mays
  Clone ID: MRT4577_169799C.1
gccggccgggtcggctgaggcgctacatgatccgactcaccaaccctagcccgccgctccgagccatggatatcgacctccccgcctccggcagtaactgcaacaccacctggccaccgccgaagacctaccatgtttatctcaaaatccttgtccagctctaccgcttcttgctacaagacgaccaacactaactctcatgtgtgccttctccaaagactcttcatgaaaatcaccaatcctccaccatatctccatgcgcccacttgtcaaggtcatgcaaggacatgataacacccttgctatgaatgtccgcccacacacaaatgacaatacgatccaacagatgccagtaatgacggctactgccctgaagttcaccgaaacagatactaacagtattgtcaatgctgccgcacagtgcctcacatttgaccaacttgctctccttgctccacttggcgaaaacatcatcctcttgacagtgcccaagaatgcgcgacatgctcatatgatcttcggcaaggatcctgtgacgccggacaaccacgacatgccatatgagcgctcagagacaacg

SEQ ID NO: 76504 - DNA, 425 bp, Zea mays
  Clone ID: MRT4577_16979C.1
cctacagatctgaggcgttctttacctttgctgcatgactgatacatgatagatgcctgaatcgcgatcggccctattggtctaattggggtgccaaacagaatgttttatgttggtataggcatggatagggatagcattgcatcttggtggggaatttgatcctttcttcagccaaagcgtttaacacgcacagcttctggggaggatgaggcctggttactactatatgagaaggcgggtcggcccatgaaatgggaatatggcacaaaaagagaacagggtccggacttctatatttgctacacgtgctactctgatgtgggagtagtctgatgcaaaggacagccaccaaggcgctcgctgaagatctctgcctgtaggctgggctttgctgaagggcgatctttgcttttcatttaacg

SEQ ID NO: 76505 - DNA, 584 bp, Zea mays
  Clone ID: MRT4577_1697C.1
ctcgaggccggccgggaatatccgctttgaacactggtagggtgttgctcgccgacagccagctcattaagcctcattattgtgggggagcccccacctccgctaccatcatgcccgtgcggaatcgcgggcacgtgaacaatcgccagattccaaggccacctcggcggtcacgctccgaatgcgaaagctactgatcgagcgactcctgtcccggaagcaattcgagatagagatgatccaccccgtgcggggcaacgtctccaaggggaagtcgaaggaaagggttgccaaagcgtacgagacggatgacccaaacaccatctttgtcttcaagttcgcgcacccacttcggaggaagaaagtccgctggtgtcggactcatctacgacaacctcgaggctggcaagaagtacgagacgaaataccgcctcatcaggaatggtcttgctactaaggatgagaagtcccgcgagccaatgaaagagcggaagaacagggccaagaagatccgcggtgtcaagaagaccacagctggcgacgccaagaagaagcaaacgttcgattacatttgtattactgtt

SEQ ID NO: 76506 - DNA, 374 bp, Zea mays
  Clone ID: MRT4577_169800C.1
gacacagagctcgaccctccctcccctttttttgttggccaagcctgaccaagcgcattggggtcagtcatgggagcggcaggaggccgaagccccgtgcctgcgctgtcccaaaaggagcaggacatacagatgatgctcgccggcgacgttcaccttggcaccaagaactgcgatttccagatggagcgctatgcctttaagcgccgcaccgacagcatctacattataaaccttggcaagacatgggagaaactgcagcttgcaacgagggttatctttgccatatagaacacgcaggacataatagtgcagaccgcccgcccctataggcagcgtgctgtgctcaaaatcgctcagaacactggcgctca

SEQ ID NO: 76507 - DNA, 161 bp, Zea mays
  Clone ID: MRT4577_169801C.1
cgaccccttggccgaccccttggccgaccccttggccttattatcccttgcctggaaaatattaacaagggccccaggcttaaggcctgtgaccttggtaccggtttccatgggaaaaccattggaggtaattacccttgccccaaaaggaaggctaccct

SEQ ID NO: 76508 - DNA, 425 bp, Zea mays
  unsure (1)..(425): unsure at all n locations
  Clone ID: MRT4577_169802C.1
tcgaccaaatggaactagataagactgtcgatgcctccaaggatttgttggctcaaattatgcaccctctaatactagggcaagtgaacaacttttgcagaaggaatcctgctcgcagattacaagcctttcatgggctggaaacataaatggctttaaagaccgagagaatgtaagattcttgggtggtgggtcgcgacaataagctgggacatttactaacttatgtgcagggnactttaattagtaaggcgtcaattggccgcgttcggcgtcccttgtgcacttgtgctaggataaccattgggagtgaactggcttggctttatacaatgcaatttcccttttttcccccattcaattatttttaatggtctgttgggccttggaccatactgattttggacaagaatagatatttgccc

SEQ ID NO: 76509 - DNA, 182 bp, Zea mays
  Clone ID: MRT4577_169803C.1
gccctttccagctaacctttcaatcctagggttaggtgaccttgggaccgggtggcgcccaatgctcatatcaagccggcggcgtacaatccggtgaagttggtgcccacggccccggcctagaaggccccctgtgcggagatgcccaagacggagaagcgggtcccggccggaaaatcccc

SEQ ID NO: 76510 - DNA, 361 bp, Zea mays
  Clone ID: MRT4577_169804C.1
aaaaaaaaaaaaaaaaaaaaaaaaaaaaaaaaaaaaaaaaaaaaaaaaaaaaaaaaaggagggaaaaaaaaaaaagaggagaaaaaaaaaaaaaaagggcaaaaggtatgggggctgccggtttaaaggctccaggtttccgaccgcgtgcttgcaacataatgccttttttatagggtacccaaaattcaattaactggccgtgtttttacaacatcgggactggaaaacccctggcgttccccaattaaatcccctttaagcacatccccttttttccagttggggtaataacaaatgggccctccccaatcgcccttccaaaaaatggcaaatcctgaatggcaattgggacccccct

SEQ ID NO: 76511 - DNA, 712 bp, Zea mays
  Clone ID: MRT4577_169805C.1
ccggcgccccctctcgagttttttttttttttttttttttttttttttttttttttttttttttttttttttttttttttttttttttttttttttttttttcaaaaaaaagggggggccggggttttttttcttggtttaaaagcttaccaacaaaggcggaaaacccaaaaccggccctaaaaacccccctttttggggggggaccaccaaaaacaaaagggggggggcaaaaaaaaaaaaaccccccccggggaaaccccttaaaaaggcgggttaaaccccgggaaccccccaaaggttttttacgaaaaaaaagggccccctaaggaaaagggttcccccccctgggggggccccccccccccccaggggaaggggggggccccccttcaaaaggggccgaagccccccctttggaggaaccccccgtgcccccttttttgggggaaaggggggaaaaaaaccaccccagcccgaaaaaaaaagttcccctggaaaatttgggggaccccctgggggggaaccgccccgggccccaacgtttaaaaaaaccgggaaaggggctgggcccccccgagggcgaaaaacccctgaacaagggccgggaaaaaaaggcccttggaaaaaatcctttgggaaccctgccttggaaaataggccccgggggaggaaacctggggggggcccctgcggaaaaaagccccccccc

SEQ ID NO: 76512 - DNA, 422 bp, Zea mays
  unsure (1)..(422): unsure at all n locations
  Clone ID: MRT4577_169806C.1
ctctctctctctctctctttttttttctctctttttttttttttcctgttttttttttttttcttttttttttttgcgtgtcgcgtgcgcgtttcgagcgccggctggggctctcttttgcgcttttttggggcgcgctcgcgcgcgccgcgctcttgggtgcctcctgtttttctgtgtgatgcgcttgcccgggcccgcccggtgacaatcctttctctagcgtttcatggggggggtgccgagggggggagatagcggacatctccccccttgctctgactcgccctttgccggtttgtccccctggggctctctccgccttctgcngttgacaacgccccttcacacgcggaagaggggtttggtccctctcgcgctctctctctcgctctctctctgagcctgggcgctcgggtgcg

SEQ ID NO: 76513 - DNA, 456 bp, Zea mays
  Clone ID: MRT4577_169807C.1
ggaacccccgagccggccgggcgcacgggtttgacggcccaaccggggcgggcccgcgcgggccccacagctctaggtccgccctagcgcgccgcaacgccgtgccccactctcccagcaacctgctgctgtgtctccggcgacgccagaaccgtctctgcaggtgcagggagggacccctctgatgagtcagttgctgcgggggggggggggcacccgccttctctcccccaagccgcagagcccgcgcgatgccgccgtgacgtgggtgcctgagggcgcccgctgcgtgctgcggctccggcccgagcccctgcccgggcgcaccaaggaggcgcacgccggcctggcgcggtcgctcggctgtccggcccgggaagtgcccgtcggccccggcgggccccgctgggcggggtggggcgccctggcgctgcgcctgccgggggctcccccggg

SEQ ID NO: 76514 - DNA, 443 bp, Zea mays
  Clone ID: MRT4577_169808C.1
gcaccaactaccagttctaattatgggttaaaaactaatatgttgatctggaaagggggcaactatgggatatgggaaaaacaaacaagcaggggactgccacctgccaaaactagatatacatggatggacttaaaccaggggcataaaactgggtacaaatggtggaagggggcaaagtctagggccttgagcttaaaaaccgactccaaatgcccctttagggggggaagctccctcaaccttggaatttcggccctccgtttggccttttgggccatttgattaaacttgttcaccctggcaagaaacaacttggcatccggggggtgcaacccggggagcgtcctttgggcgggggcccacttgagcgcccttttcttctttccgaagtccttttttcttggaaaagcaatcctttggtcaaagacaaaatcccaccc

SEQ ID NO: 76515 - DNA, 363 bp, Zea mays
  Clone ID: MRT4577_169809C.1
ggccggcaccctaccccctttatcccttggttggccaccccctctcctctcatggcaggcacgcgccatttcttcctcctgcctagatctccccctcccccacgcagcaaggatcgagatgatgacgagcaagaacggattgaagagaaaaaaaggatcacggaaacgttctaccccgccccccccatctatggaaaatcttctggggaaacccctaggggcttccactccaaaccttgcttagcccattcctctttcttcaataaaggaccttgatcaaggtggggaataagggaagtagcacaccgtcaaccttaattttcataatacccttgaccaggaccaaccatgattcaattaaaa

SEQ ID NO: 76516 - DNA, 367 bp, Zea mays
  Clone ID: MRT4577_16980C.1
cccacgcgtgcgcggacgcgtgggctcacccacacctccctcggccttgcgcgaggcgctgcacctgtttgggggggtcgaactctacaacgcctactaggcgccccacctaccgaaatcgcacatcctgctcttcctctgccacctgcgatgcctccccgaggcccagatgcacgacgagatgccgctcctaacgctgtgttagccactcccgtcgagcgacgacccgcacgaggcgaaccaggtcgccgcccgctacgccacacgcgaaccaggaggccacgcgcacgtacacttacctagccgtgcggaccatgcccaagaggtaccgagcctcgcaccggaagccggccatgacccagctgca

SEQ ID NO: 76517 - DNA, 315 bp, Zea mays
  Clone ID: MRT4577_169810C.1
ttcctatccagtctgtagacttctacggtttgggggatcatgttgtccatttgtgtaaatgtagatgttgacccgattggtatttattctaatatgtattgtattttatcgtatactatcctgtctgacgggtggggggtgggaagtataccactggttgcaaccagggcagctgcaggtttagatcgcaggcagcccaggaagcaagagaagcagctctcgtgagtcactctagatggcagcctctgggtagccacatcctaggttgttacctggaaccagaagccagacagtgttccttgtcacactcactca

SEQ ID NO: 76518 - DNA, 705 bp, Zea mays
  Clone ID: MRT4577_169811C.1
ccccaaaccatttttcggtggcagcgctgtccagcaaaaacgagcggacggatccgcccccgcccctctcgcgactgcaagcggccgtccagtcgcgcgggcagcagggggcggccgtccgtccaggcgcaggcgagcggccgtccgtccagcgcaggctagcggccatccgtccaggcgaactacgagcaggcgtccgtccaaacgaactgtgagcgtccgtcctggcttccgtccagcgagcggcacaacttttctacgcacaacacattccaagaaccgccgttgattttgatcttcgattcacatatgtcttggctggttgggagggttcagcacatgatgctttagtactaagagatgctttagagcgagagaatggccttcgtgtaccacaaggaaaattctatctagtggacgctggatatggagccaaacctggatttttgcccccttttcgtgctgtccggtatcacttgaatgaatggggaaataatccggtacaaaatgagaaggagttgttcaaccttaggcactcgtctcttcgtgtcaccgtagagcgtgcatttggttcactgaagagaagatttaaaatacttgatgatgccacaccattctttccattttctactcaagtagatattggtgtaccctgctgcattattcacaactgggtcatacaagatggaggcgatgagctgatca

SEQ ID NO: 76519 - DNA, 1491 bp, Zea mays
  Clone ID: MRT4577_169812C.1
tcatccttatcttggcggcggcgcaggcgcaggcaagcggccgtccagtcgcgcgggcagcagggggcggccgtccgtccaggcgcaggcgagcggccgtccgtccagcgcaggctagcggccatccgtccaggcgaactacgagcaggcgtccgtccaaacgaactgtgagcgtccgtcctggcttccgtccagcgagcggcacaacttttctacgcacaacacattccaagaaccgatggacaaggcgaccaagcttttgatttatggtgcttcagcacacatgttgttgtccatgatggccatggttattgagtctagaaaaagaaaaagagatagtagaagagtcggtattacttatgggccaatggaggaaagggataggatgagacttgattatcttaacactaaaatatggatgagtgatacaacatgtgtgaacatgcttagacttagtaggtctagtttctttcgcttttgtaagggctttagagaccggggtttacttgaagatacaatacacatgtgtgttgaggaacaagtggccatgtttttgaacacagtgggacacaaccttaggaataggttggtgggaacaaattatggtagatccggtgagactgttagtcgctacttcaacaaagtgcttcgtgctattggagagctacgagctgaacttattaggccaccatcattagagactccatccaaaatagcaggaaatccaagatgggatccctactttaaggattgcattggagctattgatggcacacatataagagcttcggtttccatagatatggaaccttcatttcgtggtagaaagtcttatgcctctcaaaatgtaatggcagccgttgattttgatcttcgattcacatatgtcttggctggttgggagggttcagcacatgatgctttagtactaagagatgctttagagcgagagaatggccttcgtgtaccacaaggaaaattctatctagtggacgctggatatggagccaaacctggatttttgcccccttttcgtgctgtccggtatcacttgaatgaatggggaaataatccggtacaaaatgagaaggagttgttcaaccttaggcactcgtctcttcgtgtcaccgtagagcgtgcatttggttcactgaagagaagatttaaaatacttgatgatgccacaccattctttccattttctactcaagtagatattgttgtagcctgctgcattattcacaactgggtcatacaagatggaggcgatgagctgatcattgaagaatctaattggccaattcataatcatgctacaacatcaagtggccaagctagtgaacatgcattcatggttaatttgaggcaggaaataacaaatcagatgtgggaagatcgtcaaaaccactatgcttcctaatttgttattgtttttcttgctgtaatttttatttatggacattaatatatggacttaattaatgtattcat

SEQ ID NO: 76520 - DNA, 2586 bp, Zea mays
  unsure (1)..(2586): unsure at all n locations
  Clone ID: MRT4577_169813C.1
gccgtccgtccgtccgtccgtccaggcgtccagtcgcgcgggcagcagtccgtccgtccgtccagccgtccagtcgcgcgggcagcagacgcagacgagcggtcgtccgtccaggcgcaggcgagcggccgtccgtccaggcgtccgtccgtccaggcgtccgtccaagcgaactggtggggtggtccagcggccgtccgtccaggcgttggattccaagaactggtacttttctatgctcctcttcattgtgctactagatcaggggaacagatgcttgaggtagtagatcgtattttctggagttccgtcggccgtcgcattttctggagttcagcggctcggcggctcgcttcgcattttctgctgcccacaaatctgatgctgagtttttaaacaagcctttggagaactataaggaaatgttcactgtctttggaaacaatatggctacaggaaagtatgcaaaaggatcaagtgaagctctaggtactgaagatagaaacagtatggctgaaacagagattgatgagggagatgttaatgctgttcctagtcctatagatgatattggggcttcatcctcagctcctagacctaggaagaaggcaaaggttactagtattgactcgaggccggccgggatcccctcttattcttatcttggcggcggagaaaagtgcggcgcaggcgcaggcgagcggccgtccagtcgcgccggcagcagggcgcaggcgagcggccgtccgtccaggcgcaggcgagcggccgtccgtctaggcgtccgtccaagcgaactggtccaatcgtccaggcgagcgaccgtccgtccaggcgttggattccaagaaccgatggacaaggcgaccaagcttttgatttatggtgcttcagcacacttgttgttgtccatgatggccatggttattgagtctagaaaaagaaaaagagatagtagaagagtcggtattacttatgggccaatggaggaaagggataggatgagacttgattatcttaacactaaaatatggatgagtgatacaacatgtgtgaacatgcttagacttagtaggtctagtttctttcgcttttgtaagggctttagagaccggggtttacttgaagatacaatacacatgtgtgttgaggaacaagtggccatgtttttgaacacagtgggacacaaccttaggaataggttggtgggaacaaattatggtagatctggtgagactgttagtcgctacttcaacaaagtgcttcgtgctattggagagctacgagctgaacttattaggccaccatcattagagactccatccaaaatagcaggaaatccaagatgggatccctactttaaggattgcattggagctattgatggcacacatataagagctttggtttccatagatatggaaccttcatttcgtggtagaaagtcttatgcctctcaaaatgtaatggcggctgttgattttgatcttcgattcacatatgtcttggctggttgggagggttcagcacatgatgctttagtactaagagatgctttagagcgagagaatggccttcgtgtaccacaaggaaaattctatctagtggacgctggatatggagccaaacctggatttttgcccccttttcgtgctgtccggtatcacttgaatgaatggggaaataatccggtacaaaatgagaaggagttgttcaaccttaggcactcgtctcttcgtgtcaccgtagagcgtgcatttggttcactgaagagaagatttaaaatacttgatgatgccacaccattctttccattttctactcaagtagatattgttgtagcctgctgcattattcacaattgggtcatacaagatggaggcgatgagctgatcattgaagaatctaattggccaattcataatcatgctacaacatcaagtggccaagctagtgaacatgcattcatggttaatttgaggcaggaaatagcaaatcagatgtgggaagatcgtcaaaaccactatgcttcctaatttgttattgtttttcttgctgtaatttttatttatggacattaatatatggacttaattaatgtattcatatattgtgtgagattacttcttgctatatgcacattaatgtatggacttatttaatgtattcatggacatcaatcatttatgtcaaaattcttcatgggatgtatatgtctggacataaccatattgtgggcacttaagtttgggctaattggtgagcgctttgtggaacaagctgatggtagtgtccatgttgtgtggacttctgcaatgtccgcttgcatgctcagtaacctagcaagccttgtggttgaagggatcaggncatcancaggcttcaagaaagttcaccttaacatgtgtgctaaggctctaaatggctatttcaagatgaagctcactggagaacaagtgaagaaccatttgagcatattgttactatatttcagcatattacttttacatgtactgttaatatattttagcatattacttttacatgtattattactatatttcagcatattacttttacatataa

SEQ ID NO: 76521 - DNA, 657 bp, Zea mays
  Clone ID: MRT4577_169814C.1
cattgggtacctcgaggccggccgggacgttgctccgcctgcgatgtaggaaaaggaagatgatctactacggtcagcagcccctcgtaggcgtatcgccgcagcaaggctactcggggaaggacggttacccgccagaggggtacccgacggacggctaccccccgccggggcacgggtacaccgcatgaggactacccgacaggagggatacccgccggaccacgcggcaggcgtgctccacagccagacagcattagcagcgcggccttccttcatggaaggatgattggctgccctctgctgctgctgactcgtgcacgcctgcttctgacgtatccatccgcgccgggtacaacacggatgaaagcgaaacagcaaggttacggaagagctgcaactgggccgtgctattctaggtctgccctgcgtaatcgccctcatttctttacgacacctatctttgtctctctctctctctctctgttataagactactggaaccctgtcgatgcccattggattacactagggatggggcgtattctgcggatgcgccgcgcgtctgtggagagtcaagatcaaaccatgggagtattgtattacgtggcttccttatcctgtaggagtaatgttctagatgtcttggcttcagtg

SEQ ID NO: 76522 - DNA, 1482 bp, Zea mays
  Clone ID: MRT4577_169815C.1
atgcccatcccaagtcacgaattcctatccggcaggtacgccacagcttccataatgctccggctggccttcccgctcgtctcccatctcccacgccggaaaccgtccgcaatccgcccacgccctccacccgctcgacgatatgcctccgcggccgccgtcaccgcctcctccttctccccacctcactctcccttgctaccgccgctacccccggcctccgcctacgtccaccttcccttctgccgcaagcgctgccactactgcgacttccccatcatcgccctcggctcatcgtcagccccctcccgtggcgaggccgcggaagaccccaggatcgttgactacgtgaacctcttgctccgcgaggtctccgccacgcgcccggtttccgacgatggcgtgccgctcgagaccgtcttcttcggtgggggcacgccgtcgctcgtcccgccgcgcctggtcgccacggtcctcgacgcgctgcgcgccaggttcggcctgtcggcgcgccccgaggtctccatcgagatggaccccggcacgttcgatgccgccaggctcaaggagctcgtgggcgtgggcgtcaaccgcgtctcgctcggcgtgcaggcgttccaggaggacctgctgcgggcgtgcggacgcgcgcacggcgtgaaggaggtgcacgaggccgtcgcgatcgtgacggcgtgcgaggggctgcagaactggagcatggacctcatctcctcgctgccgaatcaaaccgaggagatgtgggaggaaagcttgaggtgcacggtggatgcaaggcccactcacgtttctgtgtatgatctgcaaattgagcagggcaccaagtttgggcagatgtatactcctggtgtctttcctctgccgagtgacaccgaatctgcaaacttctacaggattgcttcgaagcgactttctgaagcaggttataaccactatgagatcagtagctactgcaagcctggatacgagtgcaagcacaacctaacatactggcaaaaccgacccttctatgcctttggtcttggatctgcgagctacattaacggtgtgaggtactccaggcccagaagaacaaaggagtatgcagaatgggttcagaagttagaggatggaacgtggagacatgagtctagaagctctgatctgaaggacatggcactggatgtggttatgctatcgctgagaacagcttgggggcttgatttgcaaagtttcagtaaatcctttgggaaaagcctggcgctatcactgtgtaacacatttaagccttttgtggagagtgggcatgtaattgcaatggatatggatcgacaagccttgccacatactgattttgagttggacctgcaaaatgaagatggttttggaagcagaattgcattcatccgtctcagcgacccagatggatttttgttgtccaacgagttgatttcacttgcttttgggattatctcaccttga

SEQ ID NO: 76523 - DNA, 358 bp, Zea mays
  Clone ID: MRT4577_169816C.1
gtgacagttgtcatatgctcgtctcaaagatttagccatgcatgtgcaagtatgaactaatttgatctgggaaactgcgaatggattattaaatcagttataggtcggttgatggctcgtgctactcgtataaccgtagtaatcatagagctaatacgtgcaacaagaccccgacttgcgggaagggcgcatttattagataaaaagcttacccgggctcttcccggcgatccgatgattcatgattacttgaccgatcgcacggccttaatgccggcgacgcattattcaaatttctggcctatcaactttccatgggaagatatgggcctaccatggtggtgaccggtgacagaga

SEQ ID NO: 76524 - DNA, 700 bp, Zea mays
  Clone ID: MRT4577_169817C.1
cattgggacctcgagccggcgggaagcgtctcatcagaggagcagctggacgaccatgggctcgccgctgctcaagtcacactctcatgatagccgccgccaccgccctgcactccgcgaggagagtcgaccgctgcccgtagacaatacctctgggctagctccatgaccacggcatcacgaccggtcgttctaagagatgcggctcagcggaggtgattggcttcccgtaacaggacgagtgacgctgaaggcgacaaaggaggagcacgtggacatgttcagcgactacatggagaccaacttcatctgccatctcaaagacgcaggcctcgagatggatgataccttctacgatatggacacctattgccgagactgctacttcgagagcgtggatgatcccgactactatggtgaaaatgacaggactcagtggtggcaaatccatcgcgtgctgatgctacgacaaggaagaggaactgtaggcatatgagaggtaagaattgttcgagaaggacttgctctatgagattgaacaaaaggtggaaagtctcatatagctggacgaggtgagaaaagatgcaccactcatgaagcgatcacgatagatgatgttgtactcttcacctctgtatatgatgttcagtagcacataagatcagacttctctttactgccatgctccatattgtatatg

SEQ ID NO: 76525 - DNA, 319 bp, Zea mays
  Clone ID: MRT4577_169818C.1
gagctcactagttggtggccgccctttttttttttttttttttgatgggcatttttaggccttgtttcgcatttataccacccggtacctccacattattaataacgacaatatgtatgaaatatgtgccgggaccaaaaagatattaaaatccgcgaaaggggcaaggggaaaaaactcccaaacctagactcttcaacgggggtacaaaacggcccatcaaaatccaaaacatgtgcaaaaaccctcgtgcgggaacccccccgaggggtaagagagtgaaacatcaaaaacgcgcattaggcagcccccaaccccg

SEQ ID NO: 76526 - DNA, 549 bp, Zea mays
  Clone ID: MRT4577_169819C.1
gccggccgggctcgcgactaaacagaacgtgtctgatgattgtgtcgacggtggaacttggaagcgtgcttgtctcactaaaaaaaaaaaaaaaaaaaaaaaaaaaaaaaaaaaaaaaaaaaaaaaaaaaaaaaaaaaaaaaaaaaaagaaaaaaaaggcccctagagaccgcgaaatcaacaaaaacgggcgcctacgcccgcgagcgttaaaaaaatatcgaattccccgggatgcccgacttccaagtcgggcttatcgaaccccttcgacctcgaggggggcgccggaccccatttcaccgtacgacgggttaaattatggggactgccagatcgctggttttacccgacttgaccggaaagcccctgggcttccccacttaaattgccgtgcaaaccaaccgcccttcgccaattgccgttataaagaatagggccgcctgaatggcccatgccaatggtagccgttcctatttggttaaagtaaatcgaaaacgttaataaacctgtaaaaattcaagtaacaaatttggcaaaaaccgctca

SEQ ID NO: 76527 - DNA, 275 bp, Zea mays
  Clone ID: MRT4577_16981C.1
ctcatgttggtgaatttattcactgcttggagctgttgtggagttgtagttgggttatgggtttttcactggtccagaaatgggctttggtgcagatttatgtaattcccactttgcccagagtacagtccggttcaggcctaacacatacttgataaaccatgcatacacaaatgctcatttgcatatttgataatcaactaatgcagtcaatctacagtttgttaatcgcaatccatctatttgtataatgcaacactattttcaaactgttg

SEQ ID NO: 76528 - DNA, 469 bp, Zea mays
  Clone ID: MRT4577_169820C.1
cttatctgcaaacctcagtgtactgctggcaaactgttgcgacaaggacgcagttcttggtgctggctactgacgggatttgggacgtgctgctgatacaaggacgtggtgacactcgtgtcatcggcgcccgactccgtccaaggcggctaggcagcctgatcgcaccggtgcggtccgagcgtggcggcgcaagttacccgacgtgcatggtggaccactgcgccgtcatgtgcctgtacctgaacctgctggcctcacctgctcccgacgagagcacacccgactgctcccagttcccgaccacatgagggcgggccgcgccttttacacgctggtgcttccctatggcttctgacgagcaactggcaagccgtgttggcaagagggaccaccgcattgtgcaaagctctacatggggtggggccggccaacttcgaaattaagttgtcacgcctgggccgggtgc

SEQ ID NO: 76529 - DNA, 601 bp, Zea mays
  Clone ID: MRT4577_169821C.1
ccggccgggacacatacaaagaatcaaacaaccgtccactactacatctctctctcaatcgatcatatacctctcttcaacatacacccttcgctactactttcaacgacttcatcatgtctgccaaagttctcgctgataaggacgccaacgctaccatgactgagcagccagccgttaaggacgtcaagagcatggagtaccaccgtcaagccttccactccaagatggctgacgacgagactgacaagtatgtctcgccatccgacggcatcatgagcccttgctcccagaagatcaacgctctacgaaacaagcacgccagcaaagccaagcccaaatctctcttcgcccaagcgagcgctaagaaactccaaggcgataacccctttggcgcaaggccagcaccaaccaagggtgccttccagctataaagcatcgtttttatcttcttcgattagagtatatcccactggctcgggatgccccttttgcttttttgctggttagtggctgtagcccacggtgtttatttgaaccgctggaggtctggtctagggcgtttggtgttcacttgacgtacacatatacacgcacatca

SEQ ID NO: 76530 - DNA, 790 bp, Zea mays
  Clone ID: MRT4577_169822C.1
ctcgaggccggccgggccggggtgttgagctcggcaacgatgactcaggatgggtactgtgtgtgtgggttgctgttgtctgggttgtttgtgcgccctgtattggttttgggcccggtttcccttaaaactgggtcaattcttttcttcttaattgagaggcagagttcctgccattacgttcaaaaataataatagagtgttggttttgtggtgcaccatgtggggtagtacttcaataagctacacactaggttcaaacttgaaaaagaaggctttgagaatttggattaagagcatggagtgttaaatggatatgttttctatatgataggatctggtatctccagggatcgattctccttccaaacctaagaattgtcctgagacctgggaggtctagtaagtagtatagggtgtgtggtcattatttgtaatccatactgactagggcatgcaaacagtggacattgaaaagaagtcagttccttttaattcaaaatgtgcccttgcatatacatttgaaaccatgaaatcagattaatttagatgaatgctaaattaagtgtgcttcttgatagttggccaccaaataaattattgctgataattaggtattgaaatctggggacgtcatcttcatacaagaaactatattcaaatatgacgtggtccaaacttgtattcgtcaaacttggtttgctcaagcttctttccttttgccaaagaacacttcaggtgctatgggggtgttcaaaaaattgatgttgggccactccagcttggggac

SEQ ID NO: 76531 - DNA, 321 bp, Zea mays
  unsure (1)..(321): unsure at all n locations
  Clone ID: MRT4577_169823C.1
cgacgacttgctgncgccgacgccgcgttgggggggcgggtaggcctactcgccgctgggctcgccgggcacggcgacggtgaaggcgggcgcggtgctggagcacccggccgtcgtctcggcggcggagacgctggggaagacgccggcgcagggggcgctgcgctggggcgggcagggggggcacancntgctcccnaaaagcaccnacaaagnnangatcangncnaatctcnacctcttcggctggnccttgccggaggacctgctcgccaagttctctgagaacgagcaggaacgggtganncgggcgggcctatt

SEQ ID NO: 76532 - DNA, 444 bp, Zea mays
  Clone ID: MRT4577_169824C.1
gggggaaaaaaaccccccccccttggccgggggtttcccctttagggggaaaaaggaccccaaagggctccggggccccaaatgggccttttgttttttaaccgggttcccccttttgggggggcccgggaaaaaaaaaaaaactttttggggggggggctgtaaaatttgggccggggggcgaaacatttcccccgccttttaaagccggggggggggtttttttttttaaaaacccttgttttccccgggataaaagggggccttggcccccggggccttctttgggggttccctaccccttggggcggcgcccctttatcccccccccttggggggttcctttttttccttttttttctgggcgccccaaaaaccccctttttttggcccctttgggctggcccccggcgttctttggaaaaagtctgggcccccccgggg

SEQ ID NO: 76533 - DNA, 1226 bp, Zea mays
  Clone ID: MRT4577_169825C.1
attaaggacgctctgcacgtattactattcatcttccattgttgctttgctttgcttaccggcaaccatggccagcactcgtgcagcagcaactctccttttgctcctcgcgctcgccggcacctcgtcggcgcagctgtccacgggcttctactcctactcgtgccccggcgtgtacggcgccgtcaagtcggtgatgcagtccgccatcgccagggagaagcgcatgggggcctccatcctccgcctcttcttccacgacacgcccagcttccagggcgagaagatggccaaccctaacaacggctccgtcaggggattcgaggtcatcgacgccgtcaagtccgccgtcgaaaagctgtgccccggcgtcgtctcctgcgccgacatcctcgccatcgccgccagggacagcgtcgtcatcctgggtggtccgacctgggacgtgaaggtcgggcggcgggactccacgacggcgagcttcagcggcgccaacaacaacatcccgccgccgacgtcgggcctcgtcaacctctcgtcgctcttcgccgcgcaggggctttctcagaaggacatggtcgcgctctctggtgctcacaccatcgggcaggcacgctgcaccaacttcagagcccacatctacaacgacaccgacatcgacgctgccttcgcgagaacgaggcagtcaggctgcccaagcacctcaggcgccggcggcgacaacaacctggcgccattggacctccagacccctaccgtcttcgagaacaactactacaggaacctcgtcgccaagaaggggctcctgcactccgaccaggagctcttcaatggcggagccaccgacgcgctggtccagtcctacgtcgggagccagagcgcgttcttcgcggatttcgtggcgggcatgatcaagatgggcgacatcacaccgctgaccggctccaacaacggacagataaggaagaactgcagaagagtcaattagcagatagatagctagggtcactaattaagacccatgcatggctgttgaactgcaagctaagtagtaaacacttgttgtgttgatgtgctcacatgtcgtcttttttttttgggtgaaggatggatgcatgtatcagatcacttgttgtttaattaatgccatttcagtctttgtccaatatactttaatctgcatgagaaaaaaaaaggagaataaaaaaaaaaaaaaaaaagcggcc

SEQ ID NO: 76534 - DNA, 1286 bp, Zea mays
  Clone ID: MRT4577_169826C.1
tcgaggccggccgggccgggagcccatctcattctacagggaagacgaaaacacactgcagctggagcagcactgatatcgaccatggctccagcagcacctgcatctgcgacaaaatgcagcagcggcatcgtcatctctgtgctcttgcccctcgcgctgctaatggcggccgccggcacctcgtcggcgcagctctccacgggcttctactcctcctcgtgtcccggcgtgtacgacgccgtcaagtcggtggtgcagtccgccgtcgccagcgagcagcgcatgggcgcctccatcgtccgcctcttcttccacgactgcttcgtccagggctgcgacgcgtcgctgctgctggacgacacgcctagcttccagggagagaagatggccaaccctaacaacggctccgtgaggggattcgaggtcatcgacgccgtcaagtccgccgtcgagaaggtgtgccccggcgtcgtctcctgcgccgacatcctcgccatcgccgccagggacagcgtcgtcatcctgggtggtccgacctgggacgtgaaggtcgggcggcgggactccacgacggcgagcttcagcggcgccaacaacaacatcccgccgccgacgtcgggcctcgccaacctcacgtcgctcttcgccgcccaaggcctctcccaaaaggacatggtcgcgctctccggagctcacaccatcggccaagcacgctgcaccaacttcagagcccacgtgtacaacgacaccaacatcgacggcagcttcgcaagaacaaggcagtcaggctgccctagatcctcaggctcatcaggcgacaacaacctggcgccattggaccttcaaaccccgaccgtcttcgagaacaactactacaagaaccttgtctgcaagaaggggctcctgcactccgaccaggagctcttcaatggcggagccaccgacgcgctggtccagtcctacgccagtggccagagcgagttcttctcggactttgtgacgggcatggtgaagatgggtgacatcactccgttaactggctccggtgggcagattaggaagaactgcagaagggtcaattaattaataaccaactaataagaaggtcggccggcggtgcacactatctaacagggggcttgctttcagtcgttaattaagtttgtaatctttctacttcgtccacaaaattgtgagatcacatcatgcatgttgtaccagccaaccaaggtgttgagacgatgttgttcatcgtttgaataagtaatccatctttgttcttc

SEQ ID NO: 76535 - DNA, 1406 bp, Zea mays
  Clone ID: MRT4577_169827C.1
gtttcaactcaaagtccaactgataatatatgagctagcagtagcccgggcgagcaggtctcagcgagcccagccctgcaggttttctgctataaataaggcaacaattaataggccaagcaaattaaggacgctctgcacgtattactattcatcttccattgttgctttgctttgctttgcttaccggcaaccatggccagcactcgtgcagcagcaactctccttttgctcctcgcgctcgccggcacctcgtcggcgcagctgtccacgggcttctactcctactcgtgccccggcgtgtacggcgccgtcaagtcggtgatgcagtccgccatcgccagggagaagcgcatgggggcctccatcctccgcctcttcttccacgactgcttcgtccagggctgcgacgcgtcgctgctgctggacgacacgcccagcttccagggcgagaagatggccaaccctaacaacggctccgtcaggggattcgaggtcatcgacgccgtcaagtccgccgtcgaaaagctgtgccccggcgtcgtctcctgcgccgacatcctcgccatcgccgccagggacagcgtcgtcatcctgggtggtccgacctgggacgtgaaggtcgggcggcgggactccacgacggcgagcttcagcggcgccaacaacaacatcccgccgccgacgtcgggcctcgccaacctcacgtcgctcttcgccgcgcagggactttctcagaaggacatggtcgcgctctctggtgctcacaccatcgggcaggcacgctgcaccaacttcagagcccacatctacaacgacaccgacatcgacgctgccttcgcgagaacgaggcagtcaggctgcccaagcacctcaggcgccggcggcgacaacaacctggcgccattggacctccagacccctaccgtcttcgagaacaactactacaggaacctcctcgccaagaaggggctcctgcactccgaccaggagctcttcaatggcggagccaccgacgcgctggtccagtcctacgtcgggagccagagcgcgttcttcgcggatttcgtggcgggcatgatcaagatgggcgacatcacaccgctgaccggctccaacaacggacagataaggaagaactgcagaagagtcaattagcagatagctagctagggtcactaattaagacccatgcatggctgttgaactgcaagctaagtaaacactatgtgagatcgtcgcgttgatgtgctcacatgtcgtctttttatttgggtgaaggatggatgcatgtatcagatcacttgttgtttaattaatgccatttcagtctttgtccaaaaaaaaaaaaaaaaaaaaaaaaaaaaaaaaaaaaaaaaaaaaaaaaaaaaaaaaaaggggcggcc

SEQ ID NO: 76536 - DNA, 274 bp, Zea mays
  Clone ID: MRT4577_169828C.1
ccgcgccgcgccgcttgaggccgccacggcgtgcgcgggcgtctacggcaacggcgcgtaccccggctacgccgccagctgctcgtggacgcggccacgggtgccagctacaacgccaacggggcgcgcgggaggaagtacctgctccccgcgctgtacgatcccgacacggctgcctgcaccaccttggtttgagcaaacgcgcggcgccgtgttttggcatctgtcaccgtaggtgggcggggatacagtgaagtgataatgcgcttgtgtt

SEQ ID NO: 76537 - DNA, 386 bp, Zea mays
  Clone ID: MRT4577_169829C.1
aaaaaaaaaaaaaataaaaaaaaaatttaaaaattaaacaataaaaaaaaaaaacaaaggaaaagagcaaaaccataaaaataatactccacagccttcaccgtctaggacattaacgttccgtcaacgtaaccctttagctattccctcttgaccatgcacaacacagctcatgaacgccaagccggccttacaatccggtaacccgtgatacgttccccacctcaagctgtacctgggcccactgtctttcgagcttggcgagctacctgacaaacgacttcccggacgactactgctaatacacccacatgctgaatgtcgacccggagacgttctccaataaccaatagcttgaagtgatccactctcgatgggtcatgctg

SEQ ID NO: 76538 - DNA, 355 bp, Zea mays
  Clone ID: MRT4577_16982C.1
ccatgcactcgattgagtgatcccaactctcatggtactgttcgcacgagaccatcttgacgaaagccagacccaagaccattcctgtcacagcgaatgcggatgttgagactgatctcaggcatttgatatgcggtgttggaccttgttatcttgatagtgctaggctgctgctcgctagatggaccaaggccaatctctcaaacgtcttagtttgaggatccctgacggtctatgcatatcacacgcttgggacacaatgctgtattatcaagacgcgtaggggtaatgtcacgcatcgtcatgacagcgagcatatgcagcatcacatacgagtaacaatgccacggacacg

SEQ ID NO: 76539 - DNA, 330 bp, Zea mays
  Clone ID: MRT4577_169830C.1
atggctagagtgcggtccactgctagagtagcacatgaaggagaagaggctgggacttctgaggcagcccccatctcagaaatgatgagacgttctaggttgattgtaccagttccaatagaagatgttgttgatgtcgaagctgaaccaaccaacgctgaagctaacagtgaaaacaaagatgatgatggcattttaagtccaagcaaacccaaccatattgagttcggaaaatccatagttaaggcagaagatctggctttaatgaaaaaattaggatattttggagagaatgatgacaaactagttcgatttgctgggaagagatga

SEQ ID NO: 76540 - DNA, 470 bp, Zea mays
  Clone ID: MRT4577_169831C.1
ttgcaaggcaggctatctggagcaggccatgaggactatggcagacatggatacagcatgtcttaaaccagacgtttacacatatacaactcttattgatgcgctctgcaagtcaggggaccttgacagggctcacagcctcttgcaagagatgttagataaaggaattaagccaactatagtgacttacaatgttttgatgaatggtttttgcatgtcaggcagggtagaaggaggaaagaagctgcttgattggatgctcgagaaaaacatacatccaaatgctgcaacttacaattctcttatgaagcagtactgcattgaaaataacatgaagtctaccaccgagatctataaggggatgcgttctcgagatgtagggccaaatgagaatacatacaatattgatcaagggtcactgcaaggcaagaaatatgaaagaggcactatatttccacgatgaaatgata

SEQ ID NO: 76541 - DNA, 583 bp, Zea mays
  unsure (1)..(583): unsure at all n locations
  Clone ID: MRT4577_169832C.1
tcgagccggcgggaaaatcttctacgcagctctactcaggatgagtgcatggatggtgaggctcttgtgttccagatagagaggaacctctagcacagcctccacgactgctctgtaacaagaatcacgtgacagtggtgaccacgctcacaattcttctgcccacacatagacacaacattctagggagtggatgctctgaatgaagatagttccacaatcatcacagagctccctatatatctagtgcttattccgagatgaatcggttgctaatgagcatgctgactcgaatgtcttctcatcgacacgatggagatatctcatggtggcgtgtgaatacgtgtctacaacctcttcactgcaacaaacggactatatccatgctggtgtcgatggatgtatgtgacaaaagaaactcgcggatcgtataggctatagtatcgtcctctagtacttcacttatgatgatgatcgcttagaactcacgcatgtatatacgacttatgagaattatacatgctgctgagtgcaaatactatgcgttttctttataaagttatttctgnaaaaaaagcgggnc

SEQ ID NO: 76542 - DNA, 1821 bp, Zea mays
  Clone ID: MRT4577_169833C.1
tggatcctcgagctggccggggacatcgaatcgtatgggatgctaagttcttgggtttggaggtatttgaactgcttgttctgatggccccactaggttatggagagccgatgcagaaacagagtccggtgcagattctatctcacgtcatacaaatcgcagatctcgacacacaagttgcagaatgaaagtaccgggccttaagttgatggatctaccaggtgtggaggcgctgcatgttccagggaactctgatggacaaacattaatcgttcgagaaggggataatggtgttgcatattcatggaattgagcagagttaaaatgggacaaaattggtgaagtagtggatggacctggtgaagctgctcaaggccaagttcatgatggtgttcggtatgattttgtttttaatgttgatattggagatggagaacccatacgaaaactaccctataatcgttcagatgacccatacacagtcgcggacaagtggctcctgaaagaaaatctgcctttgacatatcgccaacaggttgtagaatttatactgcagaattctggccagaacaactttgttccagatccatcttttcgggatccctatactggggccaatgcatatgtgcctgggcaaccatcatcatcatccaatggtaatactccggaaccaattttcaagcacataccgaagagtggaatgctgtcatttgagacagctcagtttgatggaatcctaaagaaagttgcagagtttaattcaaaactttcatctgactcggaacagaaacaattatctctgtctgagacggagatgtcaagattacctgccatagtgaacgtgttgaaagagacatcattttatcacacaagtaagcttgcagatgctgatatgacattgttggtaaagatattgaagtcttggcctccacaaatgatgtttccagtcattgattttctgagaatgttcgtgttgcatcctgatggagcttctttacttctcaagaccatcgaaactggaaatgatatacttttggaaacctttcgtaaagctgttgcgtcgcctgtacagccagcaaatttgcttacagtcctcaaagctgtgacaaacttgtttggcaactcatgcttgcaccagtggctgaggacccactgtgctgagatcattgattcggtgtcaaactgcaagtcttcttttagcaagaatgcacacttggcatatgccacgcttctactgaactacgctgttctttcgattgaatcaaaggaggaacagagtcaggcgcagattctttctgccgcccttgaaatcgccgaagatgacacccaagatttcgactcaaagtaccgggcacttgtcgcaatcggttctcttatgctcaagggccttgtgaagtcccttgctctcgaccttgatgttaagagcgttgcaagcagcgccaagtcttcaatggaccagaagattgcggaagtaggaggtgacatcgaatcgctaacaagatgactacaataggtttgcgtgcacttggtcgttgcggacattgctgctccttcgcttgaggcgctacagtgcataacttaaagccggtctgtgttgcagaccaattcagacgccctccacgtctctaccaaaaaatcgcaatgggttatgattattttttcacctttgtaaccatcatggaagtgtggattttgggtggtagcgcttagattttgtaaattgaatagctgggctactctgcagatacagttcaatatttctcgcggagggatgcagatcagacacgcaacgaatatttcgatatcaaaaaaaaaaaaaaa

SEQ ID NO: 76543 - DNA, 1016 bp, Zea mays
  Clone ID: MRT4577_169834C.1
gccggccgggtccaaaaaaaaaaaaaaacgggatcgcacgcactcctcatcttatcccccgcctcctccggtcctcccgccgctgttgctcacttctgagtcccgacgcacgagctcccaagagctagccatggcgtccaccaccctctcctccgccttcaccctcctctcccgcccctccacctccccgtgccccgccgcctcgctcccgaggtcctcccacgccgcgccccacatccgccggggccgccgcgccgtcgccgtcgcgtgcaccgccaccgagtcccccaagatcctggagctcggggacgccatcgccgggctcacgctcgaggaggcccgcagcctcgtcgaccacctccaggagcggctcggcgtcaccgccgcggccttcgcgccggccgccgtcgtcgcggcgcccggggcgggcggcggggccgcggccgaggaggaggcccccgtcgagaagacggagttcgacgtggtgattgaagaggtgcccagcagcgcgcgtatcgccactatcaaggtggtgcgcgcgctcaccagcctcgcgctcaaggaggccaaggaccttatcgagggcctccccaagaagcttaaggaggccgtcagcaaggacgaggccgaggatgccaagaagcagctcgaggaggtcggcgccaaggtgtctatcgtgtgacactaggtatactgactccttttttttttcttcttttttttttaaatttctttctttgatctttgcctcccaatcttttgtgtatccccattgtcgtttataaggaattgctgtttgatgatatgactgccttgaattggcagtggatgtgatctgctcgaaaatggtaatgtgtatttgccttcttggctctatcattcattcatgatggtgggcaaatggacattttgctttccttgtaagagcatggcatgttctggcccaaaaaaaaaaaaaaacagtctttgtagtggtttcctgaaaaaaaagtatgtgccgattcactagcttatat

SEQ ID NO: 76544 - DNA, 680 bp, Zea mays
  Clone ID: MRT4577_169835C.1
gaggaggcccgcaaccttgttgaccacctccaggagcggctcggcgtcacagctgcggccttcgcgccggccgccgtcgtcgcagcgcctggggcgggcggcggggccccggccgaggaggaggcccccgttgagaagacggagttcgacgtagtaattgaagaggtgcccagcagcgcgcgtatcgccactatcaaggtggtgcgcgtgctcaccagcctcgcgctcaaggaggccaaggaccttatcgagggccttcccaagaagcttaaggaggccgtcagcaaggacgaggccgaggatgccaagaagcagctcgaggaggtcggcgccaaggtgtctatcgtgtgacactaggtatactgactccttttttttcttttttttttaaatttctttctttgatctttgcctccccaattttttgtgtatccccattgtcgtttataaggaattgctgtttgatgatatgaaatttatattcagtgtgaatgtgacatgcttaaaactggtaatgtagatagccttgtttgcactttttggcactatcattaattcatgatggtggacaaatggacattttgctttccttgtaaaaaccacaaaaaaaaaaaaaaaaaacaaaaaaaaaaaaaaaaaaaaaaaaaaaaaaaaaaaaaaaaaaaaaacggacgcgtggg

SEQ ID NO: 76545 - DNA, 494 bp, Zea mays
  Clone ID: MRT4577_169836C.1
acgcattatacgtactgctgcgactatgacttgagtgacatgcctttatgcactgatactttcgctcggcaagagggggcactgtgctgctatgacatgacttctaatccagtggcagacggaagcaagacttgtgaagataatgctggacacataagttaatattcagttaattttggaaatgaacatagcgaacagggagcttgttttgaatgtctgaatggaggacatatctgcgactacatgatgaatcacaaaaaggacacctgaaatcaatgatgtgaaccatggcatggtgcatgctgatgtatcaaaacagggatagttttcctggaaataagaaagaccagtctgatcctgatggtagctgctgtcaaatggataaacttgggatgggagaaactaaataatgctgctccccttctattataaactaatggtcaagaggtgctgtgcttcgtatgctttgcacctgcgaatactgtgcccctcca

SEQ ID NO: 76546 - DNA, 1028 bp, Zea mays
  Clone ID: MRT4577_169837C.1
gccgcccctatatttttttttttttttaaaattttattttattttttattttttttttttttaggggcctttttttttttttttttacaaggaaagcaaaatgtccatttgtccaccatcatgaattaatgatagtgccaagaaggcaaatacacattaccagtttcgagcagatcacattcactgccaattcaaggcagagatatatcacgcacatacaagctagtgaatcgacacatacacaaatctcatatcatgaaacagcaattccttacgaacaacagtggggatacaagagattggggatgcaaacaaaagaaactaaagaaaaaaaaggagtactcgtatacctagtgtcacgcgatagacaccttggcgccgacctcctcgagctgcttcttggcgtcctcggcctcgtccttgctgacggcctctttgaccttcttggggagaccctcgataaggtccttggcctccttgagcgcgaggctggtgagcgcgcgcaccaccttgatagtggcgatacgcgcgctgctgggcacctcttcgatcatcacgtcgaactccgtcttctcgacgggggcctcctcctcggccgcggccccgccgcccgccccaggcgccgcgacgacggcggccggcgcgaaggccgcagctgtgacgccgagccgctcctggaggtggtcaacaaggttgcgggcctcctcgagagtgagcccggcaatggtgtccccgagctccaagaccttgggggactcggtggcggtggacgcgacggtgacggcgcggcgtctccggcggctgtcaggcacggggaaggaggacctcgggagcgagacggcggggcacggggaggtggaggggcgggagaggaggctgaaggcggaggagagggtggtggaggccatggctaactcctgggagctcgtgcgtcggggagtcgggagtggggagtgagcaggcagcagcgacggcgtgaggaggccggcggataagatgaggcgaacccgggccccggaacggccggc

SEQ ID NO: 76547 - DNA, 458 bp, Zea mays
  unsure (1)..(458): unsure at all n locations
  Clone ID: MRT4577_169838C.1
tcccggcggatcatctagtagtattctagctctacctgctttccccactcgtgctctcgccattcgctcgaaccccgaagaactggcagtggcaggtaggttcgcgctcgtctccgccttccagtgattcccctgccgctgcatttcccccggattctctccggtttcaactgccgtaaggtcgtgcctgtggtttacctaagtacttgcactttggacgaggagagagcttcataggccattcattgctggaggttactagaggatcactactttgaactcattaaagtgtctaatgatggctgctgttttaaaaacaagtggcagtttttgtagtacacaacagcagcattttcagcaatcaagaagggatcagtttttgcatggttcttattcaaatttcaaacattgcanaagcaagaagataataagcctgctccactgtgtgctagagtgac

SEQ ID NO: 76548 - DNA, 357 bp, Zea mays
  Clone ID: MRT4577_169839C.1
acgggccgggcgcccagcgtggccgcgagagggaggggctcgtcggtctctgttccgtccacgtgtgtgatggccaaggcaacggaacagatagtctagagcggggtccggggcaccacaggtgacacgaccttctaggattacattagttaagcagaacttgagattctaaaattttggaggaattgaaaggagcaaacaagggccttacctgctactaggtccgcagacgagggtataagaaggcttgctgtgacacagacttctactaggatccttcttccgctcttaattacaaagacgtttgaaattgcttacattttttcgtgatggtcaatgatgttcactggggaaagc

SEQ ID NO: 76549 - DNA, 575 bp, Zea mays
  Clone ID: MRT4577_16983C.1
gccggcctggtctgggtgaactctatcaactgaatcgctaaacgtgtcttgcccatcccagggcctccaatccatcttgcgattcttgcgagatacgtacatctcatgattccagctggctaaaacgtacgagaaaccgcgcacactcgccaccaccgcccgctcgtgcagcgacgaccgtatggccccgctctggtccgatgtcctagcccactcggccggagaaataccttacgaggcagtgcaagtgtgtgcgtcaccatgaggaggtgagtcgatagctcgacagacaccctaccagaccgactacctgccgcacatgctgctctacagcccgacgaaagagggtaaagagcaccaccgcatgtatccatcctctaacagctctatggtccagagatgatataacaccctgtgattgtagatacgatgttagggatgatatgtgtaattaatgtagtgagagacgaaaatctagaatcttctgttgctgttgttgttgacactgtacggagagatggatatctctgtccaccttagcagattatgatacttgacgaaactattctttgaca

SEQ ID NO: 76550 - DNA, 424 bp, Zea mays
  Clone ID: MRT4577_169840C.1
ggggacaaccaaaacagatttttccattatttaattacaccagttttttacacaaattacacaatttttttgccttccgatacaaatacctgttattaaatcggcgcccaaaaacccatcttttagtttctttttatttacatacaaaaagggggttttcccaaaaccgtttccagggaagggattttttttttttgggggaccttttttttttttgggaataaaaacgggcctttttggggggattggtttttttttttttgtgcccccaaggggttttttttaattatttaaaaaaaaaaaatttccttttgtaaaaaaaatttttccaaaaaaaggcccttccttccttttttttaaaaattcccctttttgggctgggggtggatttaaacccatcctttggtggatggccccttttggg

SEQ ID NO: 76551 - DNA, 390 bp, Zea mays
  Clone ID: MRT4577_169841C.1
attcggctggaggagcacctcaccagtggacattgctccagtcccgcgttcgtctcctcccgcgaaataccttccttctccgggtacacacaagagagtccgagaccgctagctacattaacgctagtcccgcacacgcagagtacgtaatgatcccaagagcgccaggtctcttccgcctcgaggagggagtgggtgcccgtgcctcgacctcggcgccacggcgatggcggcgcccgccggcgacccgcactcgtcgggctccgctcatcatccaccgtcgccgaggaagcagcagctgcccgcggtgctcaggaagtccgcggtgaggattgttaacccggccacggccacggtgagggcggccaagtgccacgacgacggcgacag

SEQ ID NO: 76552 - DNA, 291 bp, Zea mays
  Clone ID: MRT4577_169842C.1
agatgataggaggaatatagctgtcactgttcactagaaattttaaaagtaagtatatattgccagtttcttgattaggtgatctgtcctgcttcttgagaagattctgtggctcttttctctgtcctctgtgctcttgttttaaccctgagtcagcctttctttttcataagaagtagctcaagtattacgcttccagactagatagtggcccgattaccttgctgcctaatacatccatcaaacatactgtatatgaaacaatgatttcatagacatggacatcatacg

SEQ ID NO: 76553 - DNA, 380 bp, Zea mays
  Clone ID: MRT4577_169843C.1
aaccggggcggaccacagccgtccggccacagggaacccgctttcttaatccggtttccgtggccgggggccgcttaacttaagcgccttaaccccaacggaggcggggggaacctttgaagtaccggacccggcttttggggccaatccgggtaaggggttcgatgtccgtttgcccctgatggatccgaaccggttgaccggccccgccggttccgacgccgacattgccattgactgggataccgatgcctttgtgatcccaagttttagggttgaagaatttgttttcggtgactgggaagcttaacgggttaccgatcctgaacaacctccaaggcccagcaaggttccagggaccttttattttggaccacacg

SEQ ID NO: 76554 - DNA, 547 bp, Zea mays
  Clone ID: MRT4577_169844C.1
aagaccgtcataaaactttgtacatgctaatgaataaacacatcaaaaggacaacgagaccaacgggacgctaaaaataaagacatcctctcggctaagaatcacttggacccaaagaacaaaaagcataagcctcgtgacacgaaggcacgggcacagacatgacccaactcattccttggcaataaacatttgcaggaaggacactgagcgatgccaacgatgcatcctgcaaaccaaacactgtacttactttctggaagaacaaccaccttgatattaatgctgatatgatccacagaccggaatgccttgctcatactgtcaacaatcccaaggaacatactgataccacaggagaggacgatgataccatacagatccttactaatatccacgtcttacttctgatggagctgtaggtgactcgtgaataccagcagcttccatcccaatgaagaattctggaataggacctcaggtcagcagaagcgctcatcaccaatatagatgacctgtgcgtcagaagctattagctcttattaac

SEQ ID NO: 76555 - DNA, 734 bp, Zea mays
  Clone ID: MRT4577_169845C.1
cattgggtacctcgaggccggccggggggcgccctaggtgaccgcgcgcctggacctcgtcttcgcggacgggccgttcctggccgagggcgcgtcccccgtggccggcgccttcgacccgccctactacgagtggtgccagttcgtcggcgaggatttcctcagctgcaggaacttggataggtgcttctcctacctcgaggagctgatggctagagaagggccgttcgacgggctgctgggcttctcccagggcgccggcctgtctgccgtgcttgcagggctccaggagcaggggctggccctcactggggttgctcaggtgaagtgcgtgatagttatagcgggggccaagatcagggcgccggcggcggtcgcgagggcgtttgacaccaagattacctgcccatcgcttcatttcattggtgaagaggactttatgaaggttcacagcgaagagcttgtccgagcatttgcggacccacttgtcatacgtcatccgtgcggccacactgttcctaagcttgacgagaagggtctccaaactatgctcacttaccttgacaagattgagagggagatatgggagcattcgtcaactgatgctgagatcgtgggctcaaattaaacattctgcagtaatgaaaaattcacgaatttacagtatatgctcaacaatataaagattaatgggagtttcagttcgaaaaaaaaaaaaaaaaagcaaagtacct

SEQ ID NO: 76556 - DNA, 475 bp, Zea mays
  Clone ID: MRT4577_169846C.1
ctcgaggccggccgggccgggacaacaaatccccgtcgtctgtgactggctggctaggtagctaggtaaccgtgcgtgcatgagcaagcagggcaagaggccgacgacgacgatgtccggcggcgggtcggcggccgagtcgccggcgagctcgtgcgtgtcgtcggacgcggaggacgaggtacagcaggcggtggcgccgaagccgatggtggtggtggggtgcccgcagtgcctcatgtacgtgatggtgtccggggaggagcagcagcccaagtgcccgcggtgcaagagccccgtgctgctgcacttcctccgcggcggcaacggcaagctgccagccggccgtcagtaacgcatcacatatatttttagcattagctaattaagctggctagcagctatagctcttgtgtgttttagttaattaattgctgctgccctttgtagtagtgttttatttttttttatgcat

SEQ ID NO: 76557 - DNA, 462 bp, Zea mays
  Clone ID: MRT4577_169847C.1
tagttctcatctgacgcatttcatttaggttggagaccttactgcgcttgcaatttctcgcaagtgttatgtttcattggaggctctggatctttccttctgccgtgaactgacagacgaagctttggggctgattgtcgacagctgtccatcattgaggattcttaagctatttggttgtacccaggtcacggatttgttcctcaagggtcactcgaacacatcggtcaaaatcgtcggaataggagggagcatactagtgcaaatggatagccgttagtttgattggagaacgacactacattctcctgttcattcagttatctagcttaggattcgaggcactaaaggtcctcaatgtggctgcagcactaagatgccatattcccgggacaacggaatcgaagggaaaagaaaatggaacatggctgcagcactaagcagaacatcaaacgcggaata

SEQ ID NO: 76558 - DNA, 521 bp, Zea mays
  Clone ID: MRT4577_169848C.1
atattagattgttcttgctactagttcttgtcttttacaaccaggaaaacataagtattcatgactttgtttcgattgacgcaaatacaatctttcttatacagttgaatcacgaaaaccggtttttaataaagatatatgttttttaggctaaaattcttcaccaagactatatttattgcttcttgctggcaaccataactctcttgacgatcttgacttcttcaatgaggaaagctctggtgattctgtccttcaagcatttaccgcagaggtgaccaccgtaagctctggagacggatctcttatgttgggagataagtctatatccggtgggtctaagggcggggataccggtgagggtcttcttgcagacggggcagatgggtctcttggctctcttattgatgtgttgagcaacaagtctaccaccgggggtcttgacggttctgatcttgttggatctggtgttccaggcagtggttcttctgtaagtgactctaggtgccattgaatttaat

SEQ ID NO: 76559 - DNA, 394 bp, Zea mays
  Clone ID: MRT4577_169849C.1
tcctacaaaatcaagcgtgtggtccaacataccaaacatctcaaaagggtggatatgcacacttttctgcagctggcagaaacatggtttataagaaacatatatctacacagcctcttacaagatctctatacaatgatcattgaagaccaacacctggaaggaaaacttgtgatattggctacgaaactaaaacacatcatggagactacgtaaaggtgggatcttgaagactagctcatgaaccttattgatgaagatgaccaagctgctactgtacgtgatgagcatgatggatcatactctaatgacaccagattccatgcagataagccatcagtgggtcagcgttgataccttcaggtcgggacagtatgccatgcacagtatgtac

SEQ ID NO: 76560 - DNA, 659 bp, Zea mays
  Clone ID: MRT4577_16984C.1
gccggccggtccggggaaagattggatggcagcagcacacggaagcaggcattgttctgtggcgctgtgccgtctcctcctcgtggttgtcctactagtggtgacgactggtatacttcagttccagactgatccagtcgtctccagcctccaaatagcagctccgatgacgacgactgctgcagctgctggttggccggtgttgaacacggagcagcagcaggctattattaccggcgtcggcggcgggaggaggaggaggaggacgctggtcgggtccagggctccgacgacgtgcacctacaacgagtgccgaggctgccggcacaggtgcagcgtccaggaggtgcccatcgacgccagcgaccccatcaacagcgcctaccactacagatgcgtctgccatctataggccgacgccgacgccgacgtacggcatgcatttccatatcgcttgattttgtatttttggagatgccatcgaagcgttgctgtgcatgcatgggcaacgttaccgctcgtcctgaatgaataagctaagcgcggcagagaagagaacacccactactacttctggttgtaacgctagctgttctatttatctctacctacaagtgtgtgtgcttgttgttcaaaaaaaaaaaaaaaaaaggccccta

SEQ ID NO: 76561 - DNA, 495 bp, Zea mays
  Clone ID: MRT4577_169850C.1
ctctacgcgttcgttctgattaccgttttacaaaaacaggattgaaatctaaccgctcagtcctatccaattgtattgctcccaaacagccgaaaagggtctatacagttctaagtgaagataccaatgtgtcaagccagacttaatcatagcttactgctatgtagagtgcacggtaaacacaatgcccgaggaacctaggatccacgaggacactacaccggttacatttaactgaaggacaccagagtggttagactcgcttaggacactacggagggtacatttatcggaaggatccatggtgagcacgctacactactttcatgctatagagaaagcttcctgggtttatcagaatgcactaggtgcatttgcccggatagtgaataccaaccaacctgtgggctagatcaaacatgtagttcctcagacttattatgatgaattgcgcatcttcgggcctatctttcagataatgtcccacaattgata

SEQ ID NO: 76562 - DNA, 240 bp, Zea mays
  Clone ID: MRT4577_169851C.1
cggacgctgtgcagagaacatcacacggcgatagcagaaccttccgtcggatgatggcttccggcggcgctggagaaggcaatgagacggggacgggtgccgggagcagcctccagagcaagactctcctcaagagccaagcactgtaccagtacatagtggaatccagcgtcttcccactcgaggcggactgcctgcggggtgtccgggttcgcaacgtcagccaccccatggggggca

SEQ ID NO: 76563 - DNA, 735 bp, Zea mays
  unsure (1)..(735): unsure at all n locations
  Clone ID: MRT4577_169852C.1
cctcgagggctcggccgggaagggccggacggngaaaaaaaaaaaaaaaaaaaaaaaaaaaaaaaaaagcacaatggggcttcagcttagcgctgggnccgtgcaaacccctaanccgcccaccggcgccatgggtatggggcggggcattagagtttcgtggccacgcggcgggagccgctttcggtagagcttatagaccctacatacaagatttgtctctacttctactttaatccctggggtgtgcatctcaatgccatgacatgtgttggttcctcctttatatattggtctggtgcttttatattcaagccttctgtcccaatggctaatatatgcctccatttgcttccgccacttggcttcgtcgcttatattcgatccggcaggcgcggggcattcgggagccagccaccgcatgcattgcattacagcccaagctttggcacggaattgtattggacgcagctgggaccggttccnagatgatataaatattatactccgtacaancttatacnnagcatcccaagatggtatntcttgtgtaacccgaacccaagtcaggagtgaatacccggcgggcattcnnggagaaaggtaacacgggcacggcgggcnagctttgagggagtcaacacgagagnnagagactcgagnanngagaaaggggaggggcanttccacannnccgccgacnnggcgataagaaggggnnaggagnnagagagg

SEQ ID NO: 76564 - DNA, 393 bp, Zea mays
  Clone ID: MRT4577_169853C.1
acccaatcaaaccgggtggggccaccaaaattgaaaccccattgtttattcttaacaaagcacaaaaaaactagaacttagggaattcgttacagggcgggggcagataagttaaacaaaaaaaaaaacgggtccaaaaccaggatgggtccaacgtccaggggcaccggtcaaatttattctcagcataaacaagcagcaaaaatgggctgggaccaaaggccattggggaccacccacgatagggggggaaaaatatctctctctactggggcttgaacaagggggggataaaggcgaaaacccgggtgctgtaaccccacccgttggcggaccaaaaaaacaacctgaaaaaaagggcgttcaagggaaaccccgccttgggggttaaaa

SEQ ID NO: 76565 - DNA, 144 bp, Zea mays
  Clone ID: MRT4577_169854C.1
aaactgaaatttatttataggcttaacattttgtgaagaagtatttggaacaagacccattaccatcctactacccgtacatggttccaaatttttattaaactttatctttcgggaataatgatttcgtgtgagcttgagcaa

SEQ ID NO: 76566 - DNA, 248 bp, Zea mays
  Clone ID: MRT4577_169855C.1
ttctatattttttttcttttttttttttcaacaaattaaagaggtgatactccaggatccacaacaggtctcaccccctggtaaatataacaaggcgactgaattattctttttcgcctgaaggtttttttcccccctttccacctgaccatgccccaaaaaaatcatcctgtacaaccctttttgttccttttctcccaaagggctttagaaaaactacttgtatttattcaacatttctcgggttc

SEQ ID NO: 76567 - DNA, 248 bp, Zea mays
  Clone ID: MRT4577_169856C.1
cccacgcgtccggccccatggcagagaagctgaaagaaatgggcatatctgtgagaggagacatagtagcagtcaacgctctgttagatcaccctgaagagcttcaaccaagtgagagtgaatcagatgatgagggccctgaacttttgcaggtgaccagagttgaccgagaaaatatactagcaagtgttgcgtttccaacagaaattaaggtcgatgtgtgcaaaagagtaaatctggacattact

SEQ ID NO: 76568 - DNA, 1369 bp, Zea mays
  unsure (1)..(1369): unsure at all n locations
  Clone ID: MRT4577_169857C.1
tagaagggaaatctttaagccaagagcaagcattgctcatgacaaaacagttggttgctcgctacttggcaaattcaggctttgaaagtggaactgtggtctctattgatgttctttcagaaataataattaagcccatatgtaaattgggacgcaacttgaagcttctaactgacagctacaggaagcaattttcatcaattgaactccttaagatgttcctacaaactgttgggtacagtaacattggatccttgatggagatcacaaagatggggaacagagtggccaactaccctattcatcaagatgcacaagttcttcagacacaaaatgcaatttccattcatgcacagcagcttccaaggcagtttcctccgccaatgcttcagaatttgacaccaccgcaacaacagcagcttcaaaatttgacaccacaacagcagcagcttctgcagcagcagcagtggcttaggcgcaaccagttatgcagcccccgtggtcctcttactatggcagacaagaaccagcctatggtgaatgtgaaggtagagaatactatggattctcaaatcgatgtcccatatgggtcttttactagacaacagcaatttaatataagacagcagcagcaactattgcatcagcagcagcaacagcttcaacagcagcagctccagcaacagcaacaacagctccagcagcagcaacaccaacaacagcttaatcagcagcagcagcaactgcagcaacagcagcagcaattgcaacaacagcagcagcagttcactcagcaacagcaattgcaacaacagcagcagcaactacagcagattaatcagcagcagcaccttcaacagcaacagcaacagcaactaaaccagcaacaacttcagcagcaacagcagcagatgaccatgtcaggaaatcagaatgcacaactagcacagcagttcaaacaagtctcatcaatgagtgcatatggcatgcgaatgccacctgtcaaagtagaagctttccatgaattggtgagcggggactcgtcgctgaagcacgataacgaccctaacaaactcacttctccaaagtagctgcggtgtgcaaaggatagcttttgcggtctgttgccttcctgccccccaacatcatgtctcgcctgtttgattgcgcacaacagcaaaacgaaccgtgtatcgtaaatgtgaagcatttggctaattcactgccttcaaacaaactgatgtcaaatacgannnnnnnnnnnnnnnnnnnnnnnnnnnnnnnnnnnnnnnnnnnnnnnnnnnnnnnnnnnnnaaaaaaaaaaaaaaaaaaaaaaaaaaaaaaaaaaaaaaaaaaaaaaaaaaaaaaa

SEQ ID NO: 76569 - DNA, 204 bp, Zea mays
  Clone ID: MRT4577_169858C.1
accacgcacgcgcacgtacgcaagcttgcctcctatacagccgtcccccttcttttttataccccatttttttttttttctttggggggttttttaataattttatgaatccctacacccctacattaggaaaaccccacatgaatcactcccaacataggtctgataccacaaaaacacaacgatagtctgatgattttctaa

SEQ ID NO: 76570 - DNA, 3010 bp, Zea mays
  Clone ID: MRT4577_169859C.1
ttgggtccctcgaggccggccggagctcgacggttactcgcgcacgacgcctacatccgtcaaccacaacccaagcgctcccccctccccgtcgcctgcaggatctcctcgggccaaggaatcgttcccctccggcgaccttcctccctccctccgttccgtttcggtccttccactgtatcaccggcaaagcaaaggatcggaggccactccgcccggaggagcaagccgactctgagcattggagttgtgcttgttcaaaagtgtgaattgcatggagatgggaatgactcctgatgtaatgtatggacaaaatgtttttgttcctgctactgcaactccctaccaatatggttatgcagaagttggatcacagatggaatggtgtaaccagtcgagctctttaggatatgatggccaagataatttctatccgactgaaggcatgcaatgcgtatactacgcagccccagacaacggatctgtgcatcctacctacagttcttacccttctgatccttctttcgtacccgatggctcatttatgcctcaggagtatgttgctgaccctgctaactccacatgccaaatagcccagacatcctattatattccagctgttcttccttatgcacaagatagtgccttgggaagcgcgaccacacatcttcactccaactccaatgttgcatttcttcctggcataccaggttatgctgcaacatctgcaaatgcagcatttcctttaattgctcccgtcaccacaaaaagtgacattgttatgcatccacatgtacagtctactattgtccctttgaagcagttccaggactatgcaaagccaccaaaggttcagctgcacaattcggttccacagaagcaagagttgccagatagatgtatgatacctgctaaactccctcatgcttctcaggtatcagcacatttgtctggaaacaattgccttggatgtgctgctggatctgatcttcataagtgggctgccgccgagaaattccagccatcttcaaagtcaagtggtcatctaaatggtactggccaaaaggtgcatagcttagttgattctgagaaaccaagcaatcagagctttgccatgattgtgaaatctcacacattaaggctccctgtcggtaatccggatgggacaatcattataagaaccgaccagtacaacagagatgatctccgagttgactatatgtatgcaaagttctttgttatcaagtcaattggtgaggcagatgtgcacaaatcgataaagtatggtgtatggtcaagttcctccaatggaaacatcaagctagatagcgcattcagggatgctgacaggatatcaaggaggcattctactaagtgtccagtattcttgttcttctctgtgaatgggagtgggcacttctgtggcatggctgagatggttggtcctgttgattttcacaaggacatggacttctggtgtcaggataaatggaccggctgctttcctgtgagatggcacattgttaaagatataccgaatggttttttgcagcatatcacactgcagaataatgaaaacaagcctgtgacgcacagcagagatacacaggaaataccatacctccctggaatatctgtgatcaagatcttcaaagacatcaaagtgagggactgcctgtttgatgattttatgagatatgaggcagaagaggcgcaaatgaagccgcacagaagatgcaagctgagttacgatgctccagattttgtacctgtctcccagcgcactgagcagacgaagtccagcagtgtgctggtagacagaacatctgagatacaaaatgtgtctgagaagccgcatgatgctaaggtgatcaatcctcaggagccgcgtgcctctgataagcaggcgagtgaggctgagaaagagaatgaactacaggaaagtcattgcagcggcagtcagaaccaagaggatgcagcgaaaactgcaaccaaccatccaccaggtccaagcttgaaggcggcaggtgcggatgggaaacagcagtactggaagaaggtcgaaaatccaaagcagcatgcagacagcggtgctgcccagggctcactgaaagcacctgaaaagcggctaaatggagtcagcggctctgcgagcacagttccagttccagagggtggcgagcagcagagggtcactgccaaacttgggtctctcaagataagctccaaggcagtggaggctgaccgtaagactagcacagctggtatggagaagcagctaaatggagtcagtggctctgggagcgcagttcctgagggtggcgaggagcagaaggtcaaaatcagttccaaggtagtggaggctgaccggaagacgagcaaagctggtgtggtgacaatcggctcgatgccggtccgggttgacagttatgccgtctagtggccagcgggggggagcttttgtttttatcttttttgcccttctggggtaatctttggtgccccggcttttcatcttcctttctggtagaagaatgcttgtcctggttggtggttctttcctagcttctatatggtatcaaaaaaagaaaaaaaaagagacgacgaatagttagattcttttttcgttgggggtgaaaagctagttttgcaggcaggcagcattctcatggtggtggtttcgtttgtggaaaagagagaagatactataatatgtgttcgttttcatgacattctattaagaaagaaaaaggtaggagattagtaacctgggctcgggtgtgaattcttggtggtgggaggtggccttgtttgccgagagaagaggcaggatcaggatcttatatgagcgttgctacaaaaggtgggaaaaaaagcgagtaggaaaattattaaactctgatgtggcgtgcaagaaagcattgttcaaagtaggatcggagtacgagtagtgtggtgttttggacattcagtagtgaatccggtcgtcctctctgaaggctgaaggagt

SEQ ID NO: 76571 - DNA, 326 bp, Zea mays
  Clone ID: MRT4577_16985C.1
gcgtgcgaatttatttatgctgatttatgcgatgccaaagctgtgaacaaaattgaagccttccgggtgcgggaggcaaccggggaagaactctaccatctccaatgttctctctggatagcggatccacaatggttcttcccagaacccgggcaggctctaattgatatatgctgagtcaggcgacgccaatgctgttaacaaaatagtctactagaacccattcgatgctcttatgcactttgatgctgctgcttatgttgaacagagcacactgtatccactcaggctctaccacaccgtaacgcttaacacgttggcagttc

SEQ ID NO: 76572 - DNA, 825 bp, Zea mays
  unsure (1)..(825): unsure at all n locations
  Clone ID: MRT4577_169860C.1
ttcacccggagctgcgtcttccttccgtttcagcaccgcgcgcaatcggccgctcatcccctcttcctatcgcccgccgccgccgccgccgccgcccgtccgcttcagtacgacgtcgagcaaggggaggtaaaagttcgtttggcgtgcgccatgtttaagaagttctcttcagaagatatatctggacagaatcaagttaaggcttctgtacaacgaaagattcggcaaagtatcgctgatgagtaccccagccttgaacctttgctagatgacttgctcccaaaaaagtcacctatgattgttgttaaatgccaaaatcatcttaatcttgtagtggtgaataatgttcctctatttttcaatatacgtgatggtccttacatgccaaccctgcgtcttcttcatcagtgctataatggctgaaggaaaacaacacgccctggcaattggatatacaaagatgtcagcaaaagacataaggaccatcaacaaaggaattggtgttgacaatatgcactatctaaatgatggcctatggaagatggaacggctcgaatgagtagaattctctgaggggttcataacttgcggcagatcgtattgatggacatatgaaaccagcaggaccctatttgcacagctggtatcgttttaaaagatgaagtactaagaagctttatttacctgaggcaacttgagcttactccgaccctnttggtgtggagtgcatgtcagaaacaggattatgaatgctgtgttcagtgcttttcacaaattgttgtattttcaccagaacaatttccctcaattggaagtgaggaa

SEQ ID NO: 76573 - DNA, 283 bp, Zea mays
  Clone ID: MRT4577_169861C.1
tttttttttttttttttttttttttttttttttggggtggggttttttttttttaacggaaccaaaactaaattttaattttgggttcgatcaaaaacaaaaaagtgccccccctcaacaaaacaaaatgacctcccaactaaaaaaaaaaataacctccaaaacagcaaaccttgttaatccccgatcaataaaaaaaattagcatcacaacccccagtggactggtttacaaatcaaaaaaagaagttctgttaataaaaaacaacctccgggccctgaag

SEQ ID NO: 76574 - DNA, 1293 bp, Zea mays
  Clone ID: MRT4577_169862C.1
cgttgacagatcctgatccagtgtgatatttgggctgctcacagcacaattgggtccaataaagcccagccgggacgcagaggaagaagacccggagctgcgtcttccttccgtttcagcaccgcgcgcaatcggcctctcatcccctcttcctatcgcccgccgccgccgccgccgccgcccgtccgcttcagtacgacgtcgagcaaggggaggtaaaagttcgtttggcgtgcgccatgtttaagaagttctcttcagaagatatatctggacagaatcaagttaaggcttctgtacaacgaaagattcggcaaagtatcgctgatgagtaccccagccttgaacctttgctagatgacttgctcccaaaaaagtcacctatgattgttgttaaatgccaaaatcatcttaatcttgtagtggtgaataatgttcctctatttttcaatatacgtgatggtccttacatgccaaccctgcgtcttcttcatcagtatcctgatatcatgaaaaagttccaagtggatagaggtgctatcaaatttgttctatctggcgcaaacataatgtgtcctgggttgacttcacctggtggtgccttagacgacgaagtcgaggaggaaacaccagtggctataatggctgaaggaaaacaacacgccctggcaattggatatacaaagatgtcagcaaaagacataaggaccatcaacaaaggaattggtgttgacaatatgcactatctaaatgatggcctatggaagatggaacggctcgaatgagtagaattctctgaggggttcataacttgcggcagatcgtattgatggacatatgaaaccagcaggaccctatttgcacagctggtatcgttttaaaagatgaagtactaagaagctttatttacctgaggcaacttgagcttactccgaccctttggtgtggagtgcatgtcagaaacaggattatgaatgctgtgttcagtgcttttcacaaattgttgtattttcaccagaacaatttgccctcaattggaagtgaggaaatccataacgatctataagttatttgatcttacaaaaaaaaataaaaaaaaaaaaaaaaaaaaaaaaaaaaaaaaaaaaaaaaaaaaaaaaaaaggaataacaaaaaaattaaattaaaaaaaaaaattaaatttaatatatgggggcgccccccactttttgaatttttttcactcggatttttttttcgacctggcccctgagggggtccaatttttttttttgggggattttttttaacttt

SEQ ID NO: 76575 - DNA, 205 bp, Zea mays
  unsure (1)..(205): unsure at all n locations
  Clone ID: MRT4577_169863C.1
ttcttatgacacgggacccctttatggcgcgaggggaggcgcatgtgattgcttctgcggagggcttgggtttcgggacaatcttcttgggctcaactgaggttggggctgttgcggggcggggcaggtagtggatggtgtggtggtnctgtttgtccacctctgtctggggggggggggggggggggtttttttttttctatcc

SEQ ID NO: 76576 - DNA, 638 bp, Zea mays
  Clone ID: MRT4577_169864C.1
agcagtggtaacaacgcagagtacgcggggaactccaaggcgaaacaaaaagccttaactagcaccattgcacagctaaatactgagaagaatgcagctgcgcttcaacaccagcaggctgtggagcatgattcggaaggcgaatctcacctgccaaaggtacagtcagagctagatgagactgagcagaaagacagctgctgacacaagatcttgagaagaagcatgacgaagcggtgaatagccattttaagcggctagatgaatgccgtacggcgcatgctgaattgtagcacatctgcctcatgacagagggtctacattagcactggcctcattaacctcattatgtgcatttgggatttaaggccaaaatccgcattcctctgacggcaaatattgaggggggagcagtctatagtatatagaactatgataaagcttaattgacatatctttttgatcatatctctttcatttggtacatgtgcatatttcttattcttcttgtgccaaagctaagactaatgtgcttccatgagtatttcttatgttaggcttaaattgaaagggaaaaggggttttcggcgaagaagacgcttccactcccactccatggtatttattaactttgccgg

SEQ ID NO: 76577 - DNA, 467 bp, Zea mays
  Clone ID: MRT4577_169865C.1
tcgtccacgcgttcggatcactgcaaataatgacaaagacccagccaaagagagggtacagatatactaattcttgggaactttactttatttttacgattattagctttacaagtatgctagacttttttcttcaccttttttatgactaaaatgtctaggactttttgccttattcatttaagagcagtccaactacatatcttctatatatagactgaagttaattatcttttgcataagctctacagttaggttccaaaccaggatcttgcttgttagccaataaactactatagaacttcacttgtcaaacccataatgccctgaggtacatatcttgttatggatgaacatcatctggtatggtttgaactaagacaacgttcattgcgatcaggtggatccaaaaccccagttgggggttccagtgaaggaaaagctcacgaacttgtgacgaactgggc

SEQ ID NO: 76578 - DNA, 262 bp, Zea mays
  Clone ID: MRT4577_169866C.1
tgaggattttggctctgtttttttatgttctttgctctagatctttgcatcttctctgactctggatttactcgtgttgcacgtttgtcatgtgttgttgccggcgtaaccggtgctccggcctagacctagccgtgagaaactggtgcgccggtgatggagagtcaacatgatgcgaccttcgtcaaccatgagctcgtcatagataggtttttaatgagacatccattgcattagctcaggtaatctatatatatcatct

SEQ ID NO: 76579 - DNA, 284 bp, Zea mays
  Clone ID: MRT4577_169867C.1
cggactcgtggtctgacgcgtgggcggactcgtgggaaaaaaaaaaaaaaaaacatggagtgaaaaaaaaaaaaaaaaaataatacaacaaccattctaaaaatacccttctttcgtactcaaatctacaacatcttaaattttcctattgaacctcctatctttaatatcccgacctacgttctacaacatcttaactacaacttccctttccttcccccacatattcttctttcagttcatcctttttacgaacactgtattaaatacctataattccccaa

SEQ ID NO: 76580 - DNA, 577 bp, Zea mays
  Clone ID: MRT4577_169868C.1
ggccgcccttttttttttttttttgcgattcgaatactgctttcttcatttctgttatataacccatgctctcatcccccccaaaaaagaaaatgggacactcatgctttcaccaggggcgataatttttttttctaccaaaaccataagggttatttaccccctttttattgccccacgccctttgatactgggggaactgaccccgtcgtcttgggggtcccggcgaccattttacttacttaagggaaccccttcaccccgggggcctttaataggggggggggggggggcgggaaacatgagcttttttatggaagccccctcctttgggggcccctagggaaggccctggggggggcctttcaccccaaaaaaaattaccccgcggaggggccccccgacaaacccgggcaagagaaaagaaaaagccccgagccccgaattgggaaccgctttgggtaaaggcccgcccacaaaggccttctagggaaaaccccctaaccccgacaggggggtggggggcccctcgggggggccctcccccccccgccccgggggagaacccccccccccc

SEQ ID NO: 76581 - DNA, 238 bp, Zea mays
  Clone ID: MRT4577_16986C.1
aatgctaaataggataaggagacccacccggggcgactgctctccggacccggaggcgcccatggcgttcgccgccgtcctccgcgcccgcctccttccggtgcccactccgctatccagctcctcgccgccgccattcttcgccccttcggcctacgtccgggtaccgggcctcacagcagcagcagcgcgcaccggacggtaccgacgaccgggcgggcgggctcaccgggcgggc

SEQ ID NO: 76582 - DNA, 734 bp, Zea mays
  Clone ID: MRT4577_169870C.1
ttgggaccctcgaggccggccggtcgattcccttactccactcgccgcccgcggctgggctgcgctgcgcatcgacgacggacgacgacacaatcacccccaccccccgtccaatcagcagcggacgagggacgaccacggccccccgtctgccgcacgcgcgcccgctctgccagctgctgctactactgctaaacctcgcccaccagtcgcgtgaggaaatagcaacctgcttgagctcgttcgctcgctcgcctgccttcttccctgggcaagctagctagctaggatcgaggaggagctctgcccggccatgcagcgtggggatccgctggtggtgggccgcatcatcggcgacgtggtggaccccttcgtgcgccgggttccgctccgcgtcgcctacgccgcgcgcgaggtctccaacggctgcgagctcaggccctccgccatcgccgaccagccgcgcgtcgaggtcggcggacccgacatgcgcaccttctacaccctcgtgatggtagatcctgatgcgccgagccccagcgatcccaacctcagggagtacctgcactgcatgctacaacacacgtactgtcaggatcttgtctacattctccacctcgtacggctggtcactgatattccggcgacgactggagtatcttttgggaccgaggtcgtgtgctacgagagcccacgggcggtgctggggatccaccgggtcgtgttctgctctt

SEQ ID NO: 76583 - DNA, 336 bp, Zea mays
  Clone ID: MRT4577_169871C.1
acatagagacaaaaaaaatgagggaaattaccgtagtggaagagggcgcacccattaaaatcaatctggggagccccggattgaaacaaaatatcacagccctggtggggtttattgaattcaccctggggggggcatggcacgctttattcagttgagggggttggtgaaccaactgaccttgttggctagggcccttttttcggtcttgacggcgaaagggtcgggggtgttatacctgcaggcaaacccgtgctccactccctggaagatcttggcgcaaaagggaaccttttttctttgacgctgtacatgcccgaaccggtccactttttt

SEQ ID NO: 76584 - DNA, 1272 bp, Zea mays
  Clone ID: MRT4577_169872C.1
cccggccgccccaaggctccattagcagggccctgttgggcggcctctgcccacagcccctcctctctctctctaagacgggaaactgcagcacatattaattagtaactagctaggtagaagaagatgagctcgtcgatcagcatgatggaggcgagaatgcctccggggttcaggttccaccccagactggatgagctcgtgatggactacctcctacaaaagctctccggccatggccaccatgccggcgctgccatcgtcgtcgacgtcgacctcaacaagtgcgagccatgggacctcccagattccgcgtgcgtgggtgggaaggagtggtacttcttcagcctgcgcgaccgcaagtacgcgacggggcagcgcactaaccgcgccacgcactccggctactggaaggccaccggcaaggaccgcgccgtcgtcgtcggcggcgaggtggcggtggggatgcgcaagacgctggtcttctaccggggccgcgcgcccagggggaagaagacggagtgggtcatgcacgagttccgcctccacccccatgccgcgccgtgcctgctagcagcagctgcgccaaacaaggaggactgggtgctatgcagggtgttctacaagagcagaacaaccagcccaaggccagaatctgaagacgcccgggacggcaccccatcagctgaaccgcaactgccggctgccctgccgcttgcgcccctcgctgacacctacgccgccccaacggttgcagagcaggtgtactgcttctccggtctgccggcactgccattcagaagaccagtgagccttggggaccttctggagttcgacgcctccgagaaggaatctgtcacgacagcgatgaccagtgtctcgaacaacactagttcagtgctggagctggctccaaattgcaactggaaccaggaaaatggcatgtcacggatgtggagcccccttgggatatgagatagatctgtgttgtttgctggatctggatgtatggagtgttagtactgagtggccagtagggttctgctgcttagatttgattagcagtgtgacttgcagattgtgtagattagattatccgttattggactaatggcttggcgtagtatttgtacatattgctactgaaggaacagtgtccttatccttgtttggcgtagtatttgtacatagcacctgctaaacttcagacaatcagtgaaagacaaatgtgtacattgtaacatagtgttaagaaactctgagagttgctcc

SEQ ID NO: 76585 - DNA, 281 bp, Zea mays
  Clone ID: MRT4577_169873C.1
cccacctcgtgcctcccctcctctccccttgccctatctcgcgcgtcctccctccgtgtcgtactctagtctgctagggcatggcaaaaggttgagcaccggcgaaaaatagcaggtggcagataaacaggaggagatggtgaatactacaagtaggagtacaaggaagagagctaatctgcccgtgaagatgatagtgaattgctcgggtgtggtggttagggcaggtcacgaggttgggaggcgggctgatgatggaccagggcgtggtgctccctggc

SEQ ID NO: 76586 - DNA, 308 bp, Zea mays
  Clone ID: MRT4577_169874C.1
ggggtggtggtttttttaataattgttgtcggggggggcatcctttcttcatacgacctgccctcactacactcctacgactccaatgctctggccattatcaatgaagtaccacatgattttgttttccatagccctgccccttttttttgtttgctccggggataacatactatctctctcttccactagctcgtaaagggaggagaggctctctcttatcaaagcttgtttaacagaatgaggaggacaaaaactgagaacaagcctgctaggaaagtctccgctgttctattttcgtaaaacac

SEQ ID NO: 76587 - DNA, 161 bp, Zea mays
  Clone ID: MRT4577_169875C.1
ataacccccgtttcccccctccacacatttttattatgccaaccaagaaaagccgaactgaaatatcacacataacacgtacgctagccacacccttgctaattatgaacggattattgactgacaccaagtaaaaatacccgagcaaccatatcgacggc

SEQ ID NO: 76588 - DNA, 225 bp, Zea mays
  Clone ID: MRT4577_169876C.1
aaaataaatctcagtcaattatagagattatttctaggaaacacatgacagcatgagggcaccattgtcttagtcatacaatttataatctaaaaaacggcacctgcaacgatgggtggctgctaggcaggattcatcaaagagaagtgaatatattgcaacaattggcgttagtgctgcaagaaggaaaccaccagtgggttcgccactgcaaaagcattaaat

SEQ ID NO: 76589 - DNA, 172 bp, Zea mays
  Clone ID: MRT4577_169877C.1
cgctcacgcaagcatggttaacgtccctaaaacccgccggactttctgtaagaagtgtggcaagcaccaaacccataaagtgacacagtacaagaagggcaaggattctctgtacgcccagggaaagcggcgttatgacaggaagcagagtggctatggtgggcaaactaag

SEQ ID NO: 76590 - DNA, 454 bp, Zea mays
  Clone ID: MRT4577_169878C.1
attcggctcgagcgacatgatggcgcgcttttacaatgcgatgagagccttgatcctcctgggcctcttctgcatcctgcatcctgagaaagaaacgtagggcgacgcttggggactccacgggcaggagcataaccgacgacgcgagtgaccccaaccagctcctggagagggtggccctgtatacggagcacaagatcggggacctcaaggaccggatcgaggactgcgatggaatgtggcaccgtaagaacaacaacaagctcaattgggggcccgtcggcggcagccagaagaagcgggaagggaacaaggagcgggcgcagaccgccctgctcaacatcagcacaggtatcgcggaattcttcagtcgcatgtggacagcctcaggaaccagtacagcacctacagactgatcgaaatgctggagagctacggcaggaccatctagagc

SEQ ID NO: 76591 - DNA, 383 bp, Zea mays
  Clone ID: MRT4577_169879C.1
agaggcgtcccttaaacataggcagctaaatcggtagttcgattggacccttaacaaccttgaggagccatggacaaccgtcgggggtgggtataacgagaatgcatatctctgaccggtattttgcggtagactgatctacaactgatgaagggagtctctcgggataaagcgtgatcagagatacaattaccagcgccctgtttttgtgtacagactacttatccattcccatttaaaaccagcacgtaccccatatgttgttcttagaccttattaataactcaatatacttgctcttccccctgatgtacaaaacaaaacttgcaggctctttttagatggttgatagagcgttgtttcctacaacaaaactaaaaagg

SEQ ID NO: 76592 - DNA, 490 bp, Zea mays
  Clone ID: MRT4577_16987C.1
ggaaaaaaaaggggactttaggtgaattccttttttaaacatgggctttttaccttaaaaaaggggttgggccccccttgggcaaaaagaaaggccttgtggggataccccaatgggggcgaaaatttgggcccctcctgtaatcttttcacctaaaatattaccctaaatttggcccaactgtttcttggagattaaaaattttttctttggtttttaaacaacccaccgtatgcggaacggggcgttacaaaaggccctcttcagggaaattcccaaaagggaaaaccttccatgagaggttgcacttccctgggggcatggttctaatgattggcccccggaaaccaaagtccattcttgcctggaaaagcagccactagtttcctgggcggtacagtactccccccggttgtggaatcaccctcatttttcccccttttttgaaggtggatgtcctttggatccttccccccgggggggaaggcct

SEQ ID NO: 76593 - DNA, 289 bp, Zea mays
  Clone ID: MRT4577_169880C.1
cagaaaggaagcagccatgcaagtgctaacgaaacgctaccccaagaattgcctgctgaaggtcatggatcggtactcggctgtggtgcggaacatggagcaagtggtgatgatccccagccttctgagggatgtggagctgagtgggtacggaggctcggtccaggacggagcccccgatctctatacctacttcaccatgctcaagagcatctgtgtagaagtagaccacgggctgctgccgcgggaggaatggcaggccaaggtggcaggcaatgaaggcagtgag

SEQ ID NO: 76594 - DNA, 298 bp, Zea mays
  Clone ID: MRT4577_169881C.1
agcacaatggagatggactctggatccctgcatctgaaagaaaaaggcaagaaaatgcagggcagggaaaatcctgaaggtcttcactgaccatgaattaaaatcctaattgacagttttacaaacaaaaaccctcgttttagtacttgtgttgtttttgtttctgttttaacaagcttagatttattattgtgccttttatggaagatgaggaagaaataggaaagcagtaaaatgaacaatgagaatctgttacccaaactgatataaactccctcagaaagaaagatactactcc

SEQ ID NO: 76595 - DNA, 2735 bp, Zea mays
  unsure (1)..(2735): unsure at all n locations
  Clone ID: MRT4577_169882C.1
ctcgagccggccgggnnnntgccggccgggacggacgtcgagtcgtcgatacgcctgaaccccagctttccactcgcctcgctcgcccctttcgcgtccaccgaccccgaccccgatccccgccggtgcttcgccaccccgatccccaccgcgcgatggcggagccggctccggctcccccggtgaccgcgccgctggtggggctgctgtacgacgagcggatgtgcgcgcacgcgacgcccaacggggaggaacacccggagaaccccgagcggctgcgctccatctggcgcaagctcaacgccgcgggcgtcgcgtccaggtgtgtggcccttaaggcaaaggaagctgaggacaagtatatagcttctgttcacagcaagaggcatataaagctgatgaaggaaattagctcaacaatatatgatgccagcaggaacaagattgctaggaaattcaattccatttacttcaataagggttcctcggaatctgctgttcttgcagctggttctgtcatagaggtagctgagaaagttgctgcaggtgagttaagttctgctattgctctagtcagacctccaggccaccatgcagaacatgatgaggctatgggattttgcctcttcaacaatgtggcagttgcagctaattatctcttaaacgagaggcctgatttaggtatcaagaagatattgattgtcgattgggatgttcaccatggaaatggcacacagaaaatgttttacgatgatcctcgtgtattgttcttctcagttcacagatttgattatggaagcttctatcctgctgaaggggatgcttctcattgtttcatcggggaagaagctggtaaagggtataacatcaatgttccctgggagcatggcaagtgtggtgatgctgattatattgctgcatgggaccatgtactgcttcctgtcactaaagtttttgatcctgatataattctggtatcagcggggtttgatgcagcattgggtgatcctctcggtgggtgctgcattacaccaaatggatatgcactgctactaacaaagttgttaggatttgctcaaggaaggatagtgatggcccttgaaggaggttataaccttaggtccatagcgaactcagtttgtgcttgtgcaaaagttctcttgggagacaaattcacattcaacactccagagatgcaaccatttgaatctacatggagagtaatacaagcggtacgcaatgaattgaagacatgctggcctgttctgagtagcaagttgccagaaaatgtatcattgaggattaagcctgcaccaagcgagctctacgcttcttctgattccgaatctgatagtgaagatgttgatgagctccttggcactgttgcatctgtcaatgttattgaagctactggtgttgctataagtgaacacctctcaaagatgaaacttgatgatgacagccttgcagtgaagactaactcaagttgctcagcagcagaacagcatccagttgattcagtaaaagtacataacaatgcatctgttgtgctgaccaaaaaaatatctgatttatctcttgagtggcgatcagatttatcgaaaactgatgtctggtatgccagttttggatcaaacatgtggagaccaagatttctatgctatattcaaggagggaaggctgagggtatgaatataccatgctgcggatcacgtgacacaagctcaccaaagggaaccgtgtggaagactgtacctcacaggttgcttttcggtagatcgtctaccccttgttggggaactggtggtgtggcttttctcaaccctgagataaactacaatgagaagttgtatgtctgcatgtacaaaataacgttggagcagttcaatgacatcttgtttcaggagaatcgtttagtgctggaggatggcaaagacggaaacactgtgtatcctgactctcctttgattggttcatctgaaatcaagtttatatctacaaacagagctgttcatcttgaacctattaaggatagctggtactccaatgtactttatcttgggaatgaggatgaagttccaattctaactatgacgtgccccgcatcagatattgagaggtataaatctggtgagctgcgtttagcacctccatcagagacgtatgcggccactctgataaagggactagtggaaggcaagcaaatggatgcggacggagctgccagctacatcaacgctgctgctgcaagagccttgtgaaggctgcttcagcgtgtgcttttgtacagccagtaaggagtagtaaggatacactatctgttagcgtggcgacaccaggaaaccttcattgtccgcaaatggagaacttggatccaatttgaattgggcagcatgattcgagctcgccctagcttgattactggtgaacggtgatctcccctggctggttgattctgggagaaacactagctgtgtcggggtggagcaacactagttggcggttgcaacaggtgctctcactgcactggtatcgtgcttgtctgacataccgtagtatttgcatggcatgctggtgatgttatttgtgcaattactgcattatgttctgttgccaaaaaaaaaaaaaaaagcggccccatatcccatccatcacagctagctagcgttcctaatcaccgacgaataatctcttcttcacctcactaacaccgagctagcagctcgctctgtcct

SEQ ID NO: 76596 - DNA, 255 bp, Zea mays
  Clone ID: MRT4577_169883C.1
ccgcaatatccgggtcgacccacacgcgctcttataccaagcctgattgcgggcagacatagacgaagtgtgaaacaacggcctacaggccgctgattgcctaatccatcgggtctaccgcgcctaaaacaacaggcaccatggcaagagcagacgactttaacctcccaagactactatatgcacacggggcaggacatgacatagaggggcatgacagccacgatgagcatggatgagcagcatggaggcagc

SEQ ID NO: 76597 - DNA, 278 bp, Zea mays
  unsure (1)..(278): unsure at all n locations
  Clone ID: MRT4577_169884C.1
cggncgcgtgggcggncgcgtgggcgggcgcgtgggcctgatacaaagaccctcctccacctccactcccagcagcaagctcaagcaagcagccaccacaccaccagcagtgaacagcggcagccatggacatgggccggctccagctacagctccagcacgcggcctcctcgtcctccacctcggcgtagtccttgtcctcgtccgagtcagaacaagctggcctggtccccgttcttcccgcagacgaccaagaagcgccctgtgtggcgcaccaa

SEQ ID NO: 76598 - DNA, 438 bp, Zea mays
  Clone ID: MRT4577_169885C.1
ttttttttttttttttttttttttttttttttttttttttttttttttttttttttttttttttttttttttagggtaaaccaagaggggggttaacacgagaggggggggagccccggaagacaagggcaaaattacagggggcacgggggggctaaacgccaacaacttcacacgggggcgaaggggggaacaaagggcaaatccggaacaggtcaggcctttacagagaaaccctttcaaacaccgggggaaagggaaacccccaagaacgaacaatggggcaacgcaggggccattttgaccccagaaccagacaacttatttggcacaaaaaacttctcgcacaaggggagaccgggagacgaaaagccatggccccaaaccaggggggcccagcggacaacacgggtaaaagaaccccacaaaaccatttcc

SEQ ID NO: 76599 - DNA, 191 bp, Zea mays
  Clone ID: MRT4577_169886C.1
ccacgcgttcttttccttactggcaatcctgtcgccttattaactgcagcgctcttgtggggggcagtcgagacttccttttggcacagaaaaatgcaccacccctgataagtgtaccgccgctgatgggttaagtagacctggctgtgattctaattgaacgcatctaccttgtttattggcttgatttc

SEQ ID NO: 76600 - DNA, 325 bp, Zea mays
  Clone ID: MRT4577_169887C.1
gggaaatcgaaaaaacccgagtcattttattcattcaaaaatataagcaggggtcacgagatatacaggggctactaggagggggggactacactacaaggtggaacaattggcgggggcgtaatgttttaaaccacaggtggtggctacccgtccaaggacgttgcaaagttccccacaggcttggagttcatgacggggtggtcggcgccagcgatctcggggacctccgtcgggccaggggttatggccaccatccagggctggattttcttggggctggagcaatcggccttggccaccaaaaaaacctttctgacggacc

SEQ ID NO: 76601 - DNA, 854 bp, Zea mays
  unsure (1)..(854): unsure at all n locations
  Clone ID: MRT4577_169888C.1
gccgggctctttaantctaaatccgaaagccggtcatatctcaagacgatttattttcgaatcatgcgtagggaattattttcgagcgaaatcaaatcatactcttggccgagtttatcgcccgatcttctgaaatctatttcgctttgttctctgtagagacgaattccgcaggaacatttttattccagaaaatatttagcgcagcccaattacgtgttttgggccaagcccagcccagcccagcccatttggcccactagaaaaccctaaccctagtgcccctctataaatatgaatccctctcccttgcacttggctattttccattcccacccctccattttttcagccgccacaacctttcctccctgtcctcttctcccacgcgcaacagcaaggcgcccctttcttcctccctgctccacggcagcaagcatggagcttggctcctctctccatggcgcacctcatccctttcctctgcacggcgcccttcctttcctttcctgtccaaggcgtggacaccccttctcccatggccgagcagcagctctgcatgcccctcccatggcgagcaggccctcttcttcttccatgggcgcgggcctccacctccttgcttggacgctggccaagctcccttggagcaggcgctctccagccatggtgcgacctccattatttccagggccgccgagctctttcccatggcgtcccttccctccagcgccccctgctccacgaccagcactagcgagcggcctcaccaaccttgccatggcactgctcgtcgaggatccccttgcaggtgccatcgtggcctcgncgggcccctgctcgcagcgagctca

SEQ ID NO: 76602 - DNA, 257 bp, Zea mays
  Clone ID: MRT4577_169889C.1
aaaatcatctccatgtaggattctttcttgtcgtgcttgtccccttccttgtatagcttgttgtccatgtccttgagtgcttcattactggttcttcagtccttcatatgcttgtccttcattccatacaataagaatttcattaggtagcaatcagtcccaaatttgacaaaactagaacttaagaatgacttaacttataactgaagttgatgtgtgtgtgtgtgctctttttataggtccttgaaacatatgag

SEQ ID NO: 76603 - DNA, 1636 bp, Zea mays
  Clone ID: MRT4577_16988C.1
ccggcccggggtcggctccaaagcaagaccctgttcagccacacgctctgtcttggtcggtctaagtgttgtcctcacggattcgcgatgccgcacttcgtgctggtgcctatgctggccgcgggccacgctggtccgatgctcgacatggcccgcgctctggcaggccgaggcgcgctggtcacgttcgtcaccacgccgctgaacctgctccgcctcggccgcgctcgcggtgatggcgagctccccatccgcttcctcccgctccgcttcccgtgtgccgaggccggtctacccgagggctacgagagtgccgacgcgctgccgggcatcgacttcctaaggaacttccacgacgcgtgcgccatgctccgcgcgccgctcgttgcgcaccttagggaggccgacccgccggtgagcggcctcgtttctgatacctgccacccgtggactggcgcggtggcgcgggagctcggcgtgccgcggcttgcgttggagacattctgcgctttctcctcgttctgcatgcgccagatgagcatccacagcgtcttcgagggaatcagtgaccacaagcgccccgtgcgcgtccctggcttccccatacacgtcgagatgtcgagggcgctgtcgccggaaaacttctcgggtttcggcaaggtgttcgcggacgaggtcatggctgaaaacgcgagagccgatggcctggttgtcaatagcttcgcagagctcgagcccctcttcgttgatgcctatgaggcggcgctcggcaagaagatatgggccgtggggcctctctccctccagcacaacatcaacatgccgctgtctgcgacgtctggctctgatgacgcgaccgccgtccgctgcgggagctggctcgagcagaagaagccccggtccgtggtgctcgtgagcttcggcagcctggcccgctcgtcgcagccgcagctcgtggagatcgcccacgggctggaggcgagcaaccgcccgttcatctgggttgtgaagcccgccagcctcgccgagttcgagcggtggctgtccgacgacggcttcgagcgccgcgttggggacagggggctcgtggtcacgggctgggcgccgcagaaggcaatcctgtcgcacccggccacgggcgccttcgtgacgcactgcggctggaactccgtgctggagtgcgtcgcggcggggctgccgatgacgacgtggccgcacttcggggatcagttcatgaacgagaagctcgtggtggacgtgctgcgggtgggggtgcccgttggcgtgaaagacgcgacgcagtggggcgtggagatggagggcgtggtggcgacacgggaggatgtagagagggctttggaggcggtgatggacggcggggtggtgggggcagcgcggcaggcgagggccgccgagctcggcaggaaagcgcgggacgccgtggcgcgtggcggctcgtcggatcggaacatggcgcttctggtggacttcgttgagcagatgaaggccaccgtgtgacaatgtgaggaggataagaatatttgaaataatacataatgtttttatcaattgggtaatacagttattaatgtggtactcgcgttagtgcaacaaaaaaaaaaaaaaaaaagcggcc

SEQ ID NO: 76604 - DNA, 475 bp, Zea mays
  Clone ID: MRT4577_169890C.1
ccggggggggttttttttttttgagtacaatggggctttgcgtgagtgattttgtattttgtaaaaaagaagaggacccattttttgtatgacctttgtttttttattggggacaaatcgttttgtttgttctgcgcgcaaataccaaatgggtggggaagaactcatgaaatgtttttgtttgttgacaactcattatcaattctgtaaagggtgaggccacacgcttcagaattgtgagaaattgtcgagtgaattaaaaatttgaatatctctgagccagattgatggggcctttcgaaatatagaaaattgggggtagggggaaggaaaggatcccatattaagataaagaacacaagatccacgttccatgaggaggcgaccgtgacaaggggtcctaagctaagaggggctcactaagggaggggagggtccccgccttttgctcatagagcttgaacagcctttaata

SEQ ID NO: 76605 - DNA, 559 bp, Zea mays
  Clone ID: MRT4577_169891C.1
gccggccgggtcccccacgcgtccgagaaaagcttctactagctacatatatatatatataccagccgatgaaccatgcatgcagtcacatgcggcatagaattagcagctagcgacggtgaggaggatcgaaaggaagaagacgtacgagatgaaaagagagcgaggcttacatggcgatgagagtggtagctctggtagccaaggatgacttgcctgtgtgctggccacgctcccctcatgcaaggaccatctcgtgtcgaccgacgagcgagcgagcgatcgatcgatgagaggatgacgaagcttggggtgtacgttggtctctcacgggcagtctccttggctagccctgactcactcttaccgcccatgctagcctctgcatctctcgtgttgctgtacagattactggtcagtgacctagctagtatgcaagacaatgcgcttcgtcagcatgtcacgagcgatgcacgacatgcatgcatggacgacgcatgtatatggttcagtatatatgttctatttcttcgaaaaaaaaaaaaaaaaaaggccccta

SEQ ID NO: 76606 - DNA, 368 bp, Zea mays
  Clone ID: MRT4577_169892C.1
gacgcacacacaacacaaccggtccatttttaaaccaacactgacacgacttatgacacgaacaggagattctttgacaacctccatttgggggggggggaccagacgacgcaggcacattgggaggttaaacgacccatggcttactggccaccacggggacggggcacaagggggggggggccctccttttggatggtggagtctgctagggggcggccatcctccagctgtttggcggcaaaaatcaaacccttttggtccggggggatgccccccttgtgctggatcttcgccttcacattggcgaggggggccgggctctcaacctccagggttttgggttttccaggcaggggctttacaaa

SEQ ID NO: 76607 - DNA, 745 bp, Zea mays
  Clone ID: MRT4577_169893C.1
cattgggtacctcgaggccggccgaggctgtgcttcgagataccgctttgctctgcttgccgctctccgcctctccccgatctccactcgactcgtgttggcttggcttccacttccaactgactcgactggattcgagcgcccgacgtccgcggagacttggccgcgagcctgcgttcgaatcctgaggacgagatcgccagagccgccgggaccgaccgagttccggctgccaatgccggctctgctcttgctgctcctgttggccgcggcgccggcgccggcgcgggcgggagacccgtacgcctactacgactgggaggtctcctacatttcggcgcagcccctcggcgtcaagcagaaggtgattggcatcaacggccagttcccgggccctcccctgaacgtgaccaccaactggaacgtggtggtgaacgtccgcaacgcgctggacgagccgctgctgctcacctggaacggcgtgcagcagcgcaagacggcgtggcaggacggcgtgctcggcaccaactgcgccatccccgccgggtggaactggacctacacgttccaggtcaaggaccaggtcggcagcttcttctacttcccctccacgccgctgcaccgcgccgccgggggctacggcgccatcaccatcaacaaccgcgacgtcatacccatcccctttgcctttcccgacggggacatcacgctctttatcggtgactggtataaccgtgggcacagg

SEQ ID NO: 76608 - DNA, 379 bp, Zea mays
  Clone ID: MRT4577_169894C.1
caacgggcacggcggatgaaggccatccatatactccgagcctggtgtgtaccaaacactcatcctgtcgctgccacctaagatacttgagatatcgctctcacgtgtcagtttttcacttccgtgcgactatgctatgtacaggtctcaacagatcgacaggctctctatagaaatggtcagttcataccttctctgctgtgcgttagctctgaacatgcacaatgactactgactagaaagggcagctgttgtcccgtgcatacgatgctattcgcctcaaccttggacatctgaattcaaaatatcgtatatatagctggcatctagctagtgttgatgaggatagctgaacaaactgtatcactgggcaactgat

SEQ ID NO: 76609 - DNA, 257 bp, Zea mays
  Clone ID: MRT4577_169895C.1
gggggcatcggcccacaacaattttatttaccaccaggaagtcccctgtcccttaggataccaccatttcaatccaacatccagttgtttacctttggcgggatagggcgcccaaaggggccccccctgatttggtatgttaaaaagaacaacaccattcactacgacaggggtccaggggcgttgaaagtaaaaacactaagcacaagaaaactttacaggggcaaactttatatttttcaccaattctcgcttta

SEQ ID NO: 76610 - DNA, 258 bp, Zea mays
  Clone ID: MRT4577_169896C.1
ctttgagttaacttcatagcgtagggaagcagcactgtgcaggtttcagcatttcagataagggcataattaattgtgtaacttaatgccctgttattcattgctgaggttcatataaagactagaaaaattgaaagatgggtttgggcgacattttcttcccaaaagatcaagtaaggcgtaagaacaagtatgggaggacagctagggaacatacttgccatgtcatagattggggaacattttggtccccggttt

SEQ ID NO: 76611 - DNA, 1923 bp, Zea mays
  Clone ID: MRT4577_169897C.1
atggcccaagggcacatttccctttcacccgtccggccaccggtcccagaggacgcggcggaccgagtcgtgccgaggcttgtcgcggagaaggagaagaaggacgcaaaaaaggctcgagctcgcgagaggatgctagctcgggaagatttggagaagcgtcgtcggaggcaggcgagggatgggctcctgagggagccatcgccggagacgcctgacgacgacgatgatgatgatgacgatgaagacgatgatatggcggcccatcttggcctcagcccggacccgagactgggccaggggtcgccgagtcagcctccaagtgggctggcaccctcagcgcctggggccgggacaccaaggtcccaatccgaggagcggaggcagaccgagggggtacttgaccctttggccgaggcaattgttgtgacttcgaggggtcaggccgatccgcctgccccccaagagcaggtgcccccgctggctgcacaggaggcagcaagcggaaccagggcttggctagtctggccccaacgaaggccctcaagacgaagccggcttcggcggccagtgctgcggcgcgccacgccggttggttggcctccgcacaaggtgctctccagcgggggggcccaggtggcgcgagttgccatggggcaagcctcccaggctgacccccatgttggagcggccatcacgctgggggaggctgctgacgcggccgtagccctaggctcggctgacttgtcgccggtgtcggcgtcgactcctgctggggtcgtcgctgattcgcccgtggagctgtccgtcactgccgacgtcatgacggttgaggcaccgccgcccgtggtcatccccgacctctccgttctcagccaggaggagggggcgctcgacctcagtgagtggggtgggcggccgctcctgttctggagccgcagcacctcggattcagaacccctcctctccctcaacgatgagctggaggagaggtcccgggatagttttcgtgagtataccgaggcggcgatgaggtcgcttcggtcgaccatggagatcctttccagggacgttcccagggtcttccaagaacttgcagacgtgagcaccgccaagtcgctgttcctccgacgtgagagcgacgtctgggattcgttgtggtcccagcgagtcgtgcttactgtggccaatgagcgcctcgcccaacggagcgccgaggtggtggaccttcggctgctctgcgatgagctgaagtcggaggcggtgttggcacaagcggaggctttatcggcccgggagctggtggcttcccaggccgaggagatgcggttgcggcagctggagcttggccaggctatcggtgagcgggaccaatctcggagccaagctgtcaaggccgtgagccgggctgaggcccttaggggtcagctagctgaggctacggagcggcgagccgaggcatccgtttgggctgaagggtttgagacggctcttgatgagtccgtcaagaactgcaaggcgcttgccgaggcggatgagcagaaggagggcgagcgtgtggccatgtccgaggccatctcggctttctgccaggcctttggcctcgacggcgtcccctcgggtagctcccccagagtcatctgcgggccttgggcggccatgcgggccttcgccatgctcgcttcccactacgatgtggatctggagcgggttagcgaggggtactgcttacccgacgatgaggaggctgccttagccgaggtccagaggcttgacgcggctgtcgagggtccaagtgcggcgctggcttcctccttcgaggtggaggtccttccgcccgtgtcgccgcctggggccaggccagattctgccgagggtggaaacgacgccgagggtgccgctcctccccctgccgctgtctga

SEQ ID NO: 76612 - DNA, 477 bp, Zea mays
  Clone ID: MRT4577_169898C.1
ggtggttttttttttttttttttttttttttttttttttttttttttttttttttttttttttttttttttttttttttttttttttttttttttttatttttttatttttttttttgtttttaattttttaatttatccaactttttggggggggggggggtggaccccaaaaaaaacacctttacaagcgtgggggccgccggggcctggggaccggcgcctggtaacctcccccaattacgtttaaaggggttttttggggcaaaaccttatcctgttactattttttgcctttgccgagttggtatccctaaatttttgcctggggcccctgaagagtgacctaaattacaaaaataggggggtttaaaatgggggctaaataagatgaaaagctttccggtgagaaacctttttgcattggggaaacccccacaaaaagccgcctgaataaaaaaagcaaaacccggggggg

SEQ ID NO: 76613 - DNA, 2769 bp, Zea mays
  Clone ID: MRT4577_169899C.1
atggctgataaggtgaccgtcattccaccgcacgacccgtggcctttctccaccgtcgctgtagaggatctggagaccctcgttgtcgatggtctgctccgtcccctcttcgatgggctgcagccggagtggatggccccctcaagcgaggctgtcccggctccgccatcggggtatgtgctcagtttcatccccttccacgagcgggggtttggagtgccagtgagccgcttcatgcgggcgctcctgcaccactacggagtggagctgcataacctcaaccccaactctaacgcgcaagcggccatcttcgtggcggtttgtgagggttttttggggattgaccctcactgggatctgtggacccatctattttccgtggagttcttcaccgcgacgacggaggcaaagaaggtccgtatggcggtgcgggccagtggctgcaccctccagctaaggcaggggcgcacgcagcagtacatccctgccacccttgcatcttcgaacaaggggtggcagaaccggtggttttatctccggaacgatggcgggatgcttccatcgttttctcgacgagtggtgaccgccgccggcacaaactggcgctggggggccacgcgcgagaaacaggagaagcttcagcctatcctgcaggccttgcagaagttacgagatgcgggccttaccgctgcgggggtcgtcgccgctatccatcgtcggagggtgctccctttggccgagtggcggttgcggctcgcggagatgaggccgggggtcgattcggaggactcgcggatgtcctcgacatccctctccgccgacgacctcctcaagcgggtgacaaatacggtagggaggccggatgccggcgcccttagccagcccgcgatgtgtcccgaccgtgggtatgtgtcactggggttgaggatttataaccccgtccggccaccggtcccggaggacgcggtggaccgagccgcgcggaggcttgtcgcagagaaggagaaggagaagaagaacgcaaaaaaggcccgagctcatgagaggatgctagctcgggaagctttggagaagcgtcgtcggaggcaggcgacggatgggctcccgagggagccgtcgccggagacgcctgacgacgacgatgatgacgatgacgacgaagacgacgatatggcggcccgacttggcctcagcctggacccgaggctgggcctggggtcgccgagccatcctccaagtgggctggcaccatcagtgcctggggctgggacaccaaggttccaatccgaggagcggaggcaggccgagggggtacttgaccccttggccgagatagtcgttgtgactccggggggtcaggccgacccgcctgccccccaagagcaggtgcccgcgctggtcatgcaggagccaggtccctcggccgtcgtgacgatgcctgggcaagccgctccctcggcgcctcgggcgtccgaggcggaaacggtgctgaagccggcggcggggcaaccttcggcagcgcctgcggggataggggcccgaggggcctccccacaagcacgattggccttggtccggagctgcaagcgaaagcagggcttggatggtctggccccaacgaaggccctcaagatgaagccggcttcggcggccgggggacccgacgccttggtcgaggggcgtgcagagccatggcccatcttggggagcagcggccttatccccgtgcagctcgacctcagtgagtggggtgggcggccgctcctgttctggagccgcggcacctcggattcggaacccctcctctccctcaacgatgagctggaggagaggtcccgggatagtttccgtgagtataccgaggcggcaatgaggtcgcttcggtcgaccatggagatcctttccagggacattcccagggtcttccaggaacttgcggacgtgagcaccgccaagtcgctgttcctccgccgtgagagcgacgtctgggattcgctgcggtcccagcgagccgtgcttaccgaggctaatgagcgcgtcgcccaacggagcaccgaggtggcggacctttggctgctctatgatgagctgaagtcggaggcggtgtcgacacgagcggaggctttgtcggcccaggaacaggtggcttcccaggccgaggagatgcggcagcgacagctggagcttggccaggctatcggtgagcgggaccgatctcggagccaagctgctaaggccgtgagccgggctgaggcccttaggggtcagctggctgatgctacagagcggttagccgaggcccttgggtctgcccagtccgcccaagccgaggcctcgcggcagcgcgcccgggccgaagggttcgagacggctcttgacgaggccgtcaagaactgcaaggcgcttgccgaggtggctgagcagaaggaggccgagcctgtggccatgtccgaggccatctcggctttctgccaggcctttggcctcgacagcttcccctcaggtagctccccccagagtcatctgcgggccttgggcggccatgtgcgcaacagactccgcggggtgctgcaccatggcgttaggtgggccttcgccgtgctcgcttcccactacgacgtggatctggagcagggtccaagtgcggcgctggcttcctccttcgaggtggaggtccttccgctcgtgtcgccgtccgaggccgtgccagatcctgccgagggtggaaacgacgccgagggtgccgctcctccccctgccactgactga

SEQ ID NO: 76614 - DNA, 565 bp, Zea mays
  Clone ID: MRT4577_16989C.1
ggtaccggcgcccctctcgagttttttttttttttttttttttttttttttttttttttttttttttttttttttttttaaacaaacagtaaaaagaatctttgttttttttgctttccgatctgtttcatcactcggaaaacataaaatcgaatcggcccctttaaaacccgagcaaaaaaaatccttatggcgcaataaaatagggggacacattcccccgggctgtgggggggctggggcacccataatgggggggggctcctgaccccgtgggggacgcaaacaccaaaaccggggccgaacatccttgcccccaacacccatccttaaaccatttcttgcgccgggcccccgttgtccgccggaattaggggccccgggccgacaaccaccaggtgcgtaaggaagcccgaccgttgcacgaaccccgggagctccccgccctccggggccgccccccaaacgggggcctccgggtccaggaaccgcggcgggccgtccaagggcacctcgcccaaccacgcttggggggacacgacccccccccggggggggggacccc

SEQ ID NO: 76615 - DNA, 555 bp, Zea mays
  Clone ID: MRT4577_1698C.1
ctcccccccctcctctctgtaaaatgacttattgtaaaacccaaaacgggaggaactaaacataatttctaccgtgaacccacatacactttttgtgaagggtaactaaaagctcataaatattgtttcaaaaaacaccacccgtgacgaatggataacttttatactcaaatgagatcttgttttcttctttgttccaagaggtaatatccaaaaacacctttgggttgaaagttgctcccccctggaggttcacatataggtgcaacacctttacctcacaattagaaggtataggcctatacggcaaatcagcgtataaccattggtagtaaagggcacggtcctctggtggagtcgaggacctgttaatacaccatggagttccattacgcccacctgatggtgaaccttctgctgcgacctgataaaccgcctacccgacgccgatgtaaaccccggcactggttagaaaaccggaaacctatatgcttgaaaccccccaaccctgaagccggaaaaccgagaaaccaactgttagaaacagtattcaga

SEQ ID NO: 76616 - DNA, 1356 bp, Zea mays
  Clone ID: MRT4577_169900C.1
atggggcaagactcccaggctgacccccccattggagcggccatcatgccgggggaggctgctgacgcggccgcggccccgagcccgcctgacttgttgtcggcgccgacatcgactcccgccggggccgtcgctgattcgctcgtggagccacccgtcgtcgccgacgttgggatggttgaggcgccgccgcccgtggtcatccccgacccccccgttctcggccatgaggtgagggcggccgtcgttgccgagctcaaccccaatgagtggggtgggcagccgctcctgttttggagccgcgccacctcggattcggaacccctcctctccctcaacgatgagctggaggagaggtcccgggataatttccgtgagtataccgaggcggcgatgaggtcgcttcggtcgaccatggagatcctttctagggacgttcctagggtcttccagcgggccacgcttaccgaggccaatgagcgcctcgcccaacggagcgccgaggtggcgaaccttcggctgctctgtgatgagctgaagtcgaaggcagcggcgtcgtggacagaggcagcgttggcacgagcggaggcttcgtcggcccaggagcaggtggcttcccaggccgaggagatgtggcagcggcagctggagcttgaccaggttaccagcgagcgggaccaatcccggaaccaagatgtcgaggccgtgagccgggctgaggcccttaaaggtcagctggctgaggctacggagcggctagccgaggcgtccactcgggccgggaccgttgcggagagcctggccgtggccgccgggactgctcagtccgcccaagctgaggcctcgcagcagcgtgcccgggccgaagggttcgagacagctcttaatgagtccgtcaagaactgcaaggcacttgcccaggcggctgagcagaaggaggtcgagcgcgtggccatgtccgaggccatctcggctttctgccaggcctttggcctcgacggcgtcccctcgggtagctccccccagagtcatctgtgggccttgggtggccatgtgcgcaacagactccgtggggcgctgcaccacgacgttaggcgggccttcgccgtgctcgcttcccactacgacgtggatctggagcgggttagcgaggggtactgcttacccgatgaagaggaggctgccttagccgaggtccaaaggcttgacgcgactgtcgagggcccaagtgcggcgctggcttcctcctttgaggtggaggtccttccgcccgtgtcgccgtctggggccaggccagattctgccgaggctggaaatgacgccgagcatgtcgctcctccccctgccgatgtctga

SEQ ID NO: 76617 - DNA, 303 bp, Zea mays
  Clone ID: MRT4577_169901C.1
atggcggccgtcagcccgcccgccggcggcgaaatcaacgacatcttcgccacatggcggaaggacaacatccgggcttgtcccgtcacctcccccaccgacgggggaggaggcggggcaaccatggccaagcaggaggtggcacctcatcggctgtcaagcaagtcgacaacgccggtgccccagcgggggacacgtcgggcgttgtcggggaccataattaggggtaccctcaaggctcctaattctcagctggtaacccccatcagcatgaagctgcaaaggcctgatgggtgcgattaa

SEQ ID NO: 76618 - DNA, 153 bp, Zea mays
  unsure (1)..(153): unsure at all n locations
  Clone ID: MRT4577_169902C.1
tttttttttcatcaccaatgtctttgtctatttcctgaagtataaatntttttttttttcatcaccaatgtctttgtctatttcctgaagtataaatntttattccagtcaaaattttgggacatgcgtaatcactgaaaatgtgactgtcca

SEQ ID NO: 76619 - DNA, 894 bp, Zea mays
  Clone ID: MRT4577_169903C.1
atgaggtcgcttcggtcgaccatggagatcctttccagggacgttcccagggtcttccaagaacttgcagacgtgagcaccgccaagtcgctgttcctccgacgtgagagcgacgtctgggattcgttgtggtcccagcgagtcgtgcttactgtggccaatgagcgcctcgcccaacggagcgccgaggtggtggaccttcggctgctctgcgatgagctgaagtcggaggcggtgttggcacaagcggaggctttatcggcccgggagctggtggcttcccaggccgaggagatgcggttgcggcagctggagcttggccaggctatcggtgagcgggaccaatctcggagccaagctgtcaaggccgtgagccgggctgaggcccttaggggtcagctagctgaggctacggagcggcgagccgaggcatccgtttgggctgaagggtttgagacggctcttgatgagtccgtcaagaactgcaaggcgcttgccgaggcggatgagcagaaggagggcgagcgtgtggccatgtccgaggccatctcggctttctgccaggcctttggcctcgacggcgtcccctcgggtagctcccccagagtcatctgcgggccttgggcggccatgcgggccttcgccatgctcgcttcccactacgatgtggatctggagcgggttagcgaggggtactgcttacccgacgatgaggaggctgccttagccgaggtccagaggcttgacgcggctgtcgagggtccaagtgcggcgctggcttcctccttcgaggtggaggtccttccgcccgtgtcgccgcctggggccaggccagattctgccgagggtggaaacgacgccgagggtgccgctcctccccctgccgctgtctga

SEQ ID NO: 76620 - DNA, 558 bp, Zea mays
  Clone ID: MRT4577_169905C.1
ccctcgctaacccgctccagatccacatcgtagtgggaagcgagcacggcgaaggcccacttgacgccatggtgcaacaccccgcggagtctattgcgcacatggtcgaccaaggcccgcagatgactctggggggagctacccgaggggacgccgtcgaggtcaaaggcctggcagaaagccgagatagcctcggacatggccacacgctcgacctccttctgctcagccgcctcggcaagcgccttgcagttcttgacggactcgtcaagagccgtctcaaaccctgcagataacaagacaacattcttcagacgcaagaagaagaatggagacaaaaacaaagtcacaagcgggcaaaacataccttcggcccgaacggacgcctcggcttgccgctccgtagcctcagccagctgacccctaagggcctcagcccggctcacagcctcggcagcttggctccgagattggtcccgctcaccgatagcctgaacaagctccagctgccgcagccgcatcccctcggtctgggaagccaccagctcccgggctgac

SEQ ID NO: 76621 - DNA, 407 bp, Zea mays
  Clone ID: MRT4577_169906C.1
ggaaaaaggggggccaacggttttgaaacattttccccaaaaatccccataaaaaatttgggatcaccccaattttttttgggctgcttaaaacccccgaaagtgggaggaatttttttttaacggggacaaaaaacctttttggcccgttttttaatccccaaaaaaaaccggcctaaaaggttggggggacataaatgttttaggggtttttggacccccaccccctgaacccttcccgggggggttttttaattttttccccttgggcttgtcctttctccactcccatggtttttgggggttaaaacccccccaaaggccctttgggggggggtggggttttttttcccacttggccaactccgggggtttatttaaaggggggttaaacccctgggtccccc

SEQ ID NO: 76622 - DNA, 449 bp, Zea mays
  Clone ID: MRT4577_169907C.1
cacaaaaccaacgcaggtagaatgggatggaaatacttggtaaacattcaccaaattgattgagaaaagacccaaacggtggggggtttcgaaaaagccgttaacaaaagcacgcactctttgtgaatacatgaaaaaaagctcattttcattggtgtccaaattttaaaggtaaaaatcagacactgtctattcttacacaaaacaattttgacctttacacaaggagctggcggatactgtatgaccaccaccctataggccatgaaaaagttttcatatgtcaaacccacaaaatttgaaaaaataaaaccctgcggatgtcggaggatttttaagcaaaacactttgcggggggacaagtatgacagcccaaattggggactttgaactgcatccgtgaaacaaatgaaaaaatctggtgaacgaaggcctgttttgatgaccct

SEQ ID NO: 76623 - DNA, 1785 bp, Zea mays
  Clone ID: MRT4577_169908C.1
agacaggtttacgcgctgacaagctgcccttccgcgaactacacgttcgacgaaatgccgccgcgacagtcgggaccgcttcatcgtcaactgagattcgcctagcatcttctcggattccttccccaactttcgtccccatcagcggacctactcgagatcgacgagacacgtcggagcccggttcctaggcgtcccagcgcccgactggatctcctggctcgggccgccttgatggtccctggggtcggtccggggtggagttcgaggcgatgagcaggcttgcgtcggggctccagcgcttgcggaggtcgtcgtcgcagtgggaggtgctgtggtcggcgctcgcgtcatgcggcctagtgcttttctcgcagctcgccgtggcgatggttccccgtctcttccctttcctctccctcctcgccatgctccccatcgcggggttggtgttcatcgcggctatcgtgctcggccgcctgtggaggaggttcatcggggtggcggcgtcggccccgctcttcgtgctcttcaacatcctcctattgtggggcgtttacgtattcgtaatccggagagaaacttcttctctgctggacatgctaataaatgcagagtgtgcacttcttctgtggggattctacaggattttatctggtgatcctggtattgttgcttgtgattcttcatatttggaagaagctggctgcaaggattttgtggaagctatatactcgagtgagaaactcccaatgctctcaagggtcaggcagtgtacctggtgcaaagcaaacattaggggctatgaccatcattgtcctgcatttggtacttgcataggacagaaaaatcatcgtctatttatggcccttttgacaggatttgttgttgctgaatcaacatatacgatgtgctcaacaaaatatattaccagatgcatcagttcagggactataagatcggagaatcctgtatctttaaacatagtaatcagtacaacgctcttctctatcctccaggtcctctggcagatcctccgtgctgttaccagattgtattcttgatgtggcacatatattgcatctgcttcaacatcaagacagatgagtgggtaatttcaaatttcccatgctttggagtcttcgttcatcaattgcaggtcgtcttctcgttagctgtttcttgtagctaaaaggtgagattttccagattaactggaagaaatatcctgaattccagatgaaggaacaacctcgatcagattctgaagtcaaatttgtgaacccatatgacaaaggcatgcctgtgtaacataagagattttctaaagccagaatggtagacagccagttttgagtacgaagacctggaactagaaagatgggaagtctgaagtgccgttataactggatggaagcttgtttccttgttggctatagattttcaggaatctattctgatgttgtagccgtttagttgagattccagatttatgacagcgaatctggttcagtaaactgaaccaaacacactctgaggatcattgaactccctgtagtttaatgtgcaagtagcatttttttataagattacttccgcccgggaattctagtcttttcacttcagaactgatttggtgagtagggaaatagaggggatctatggggtcccttactattcatatggagttcccatcgtgatcctgcattttttcctgtctggtcttcccaaagggccttgcagggatttgaatcaatttgaagggaattgcggtgcaaaaagaaa

SEQ ID NO: 76624 - DNA, 1277 bp, Zea mays
  unsure (1)..(1277): unsure at all n locations
  Clone ID: MRT4577_169909C.1
tcccagaccacggctttgagaatngctttttgactttggcagcaaaaattgatgccctcgtctcgggccgggagacccctcgctccccaaaaccttcacaaaaaaagccacccaaaaaaatccgtttcataactgaaaaaatcaaatagaaaaatcaagtgaagccggtaaagaaaaaaatggcagtggttggcctatccagtgctttcgctcctctcagaggttcttggatagccgtaaggatcaggcagggtggccaacgtgcagggatcagcttgtgtccatctccaaggagcaggaggagctgcgcggcagtggttcgggcggaggtgagcttcgtggacgccgacgaggcgaagaggctcgtgggcgaggagggctacacggtgctggacatcagggacagggcgcagcgcgagagggcacacatcaagtcctccacacacgtgcctctcttcattgagaaccaagacaacgacattgggaccatcgtgaagcgccagctgcacaacaacttcgcggggctcttcttcgggctgcccttcaccaagctcaacccggacttcgccctgacagtcaaggacaagttctcgccggaaagcaagctgctggttgtctgccaggaaggtctcaggtcagcagctgctgcagatgcactggagaaagaaggcttccaaaatattgcatgcatcacatcaggtcttcaaacagtgaagccaggaacgtttgaatctgtggggaaaagtgagctgcagaacgcggggaaagctggccttgtgaccatccaagggaagatttctgtagtccttgggactgtattgattagtgcctacctgtttataacattcttcccagaccaggctgagaagctttttgacttggctggcatcagcttgtgatcagagctgatgttcttcggtactccacttcataatcaggatggttgatcaagtcagattcactcagatgtttccagactgaaaaggaatttttgctctgtgtactattagggaattcttgagagattagcacttaaattctttgaaacatcccttttctcgatgtacctcctatatatatcgtatgcttgattcatctacatgtttgtgttgctttttgaagtatctagacctgcagttatgattcaggatttcaaatagaagctttttatccatctaaacataaaaaaaaaataaagaacattgaccctgaaagattatgtagaccttgataccaattgcagttgcagatgaaatgattgtcttgtgtaatggtgt

SEQ ID NO: 76625 - DNA, 253 bp, Zea mays
  Clone ID: MRT4577_16990C.1
cccacgcgtgcgtggacttgttttgatttagaacgcgagcagccggcctgcaattcatgtgttggtgggcgtacacacaatctaccatcttattttaagaactatgcgagctatgcctgaaaatcgattgtccgctacatacatgctgatccaatcaatgaactccggaccatatcctggtaacatctctatatataatgcattttccactattctatagagttttacactccaaatcattacatgttgataa

SEQ ID NO: 76626 - DNA, 404 bp, Zea mays
  Clone ID: MRT4577_169910C.1
cccggccgccgcccctttttttttggggttgtttaagacacaattgggggatctacaccatccacatcctcacatgagaaaagaatccgtactcaatgctgggcccactacacaagggcccattcccaaggacatacatggcgtgaaaggaacatccacagacctatgtcaatcaccctgctatgggagccttcaaaaactagaaaaaaaaagccaccactgattcctgaaaacccctacataacctcacaccgagttaggtttgtcaggcagcaaccaagaggtcgggctgatcaggctacaaaaccacattccaactatgaatccagctatgacctgcatcaacatgagccaggacaaggcccgagggctttgattgcatcgatgagcaggccatacacctc

SEQ ID NO: 76627 - DNA, 117 bp, Zea mays
  Clone ID: MRT4577_169912C.1
tcacgacaagatggcatgcacagacaatgcgatgatagccatgatcctcctggtcgctctctgcatcatacatggtgaaaaggaagagtcgaagtgcatcgatgcgaaagcgtccgg

SEQ ID NO: 76628 - DNA, 382 bp, Zea mays
  unsure (1)..(382): unsure at all n locations
  Clone ID: MRT4577_169913C.1
agggtccaatggaagctgtttttattttaaaattaaaaagaaaagggggggtccccctttcaataaataaaacccctaggggggaaagattggtaaaacccaaaaaaaaacctttttataccggaaaaataaaaaaccgcttccaaaaactaatgacttggaataaataaaaagcntggagaccgtcctaacagggaaggggtcccctgggaggcaccggaaatgacggggagcaggttgttcccaaaggggccactaaagtgcttgggaagagtttcaaaggggcgctctccggggacgctgggctggataaaaaaagggaacatggaaaaaatggccagccggccttttttgatctcccggaaaaaagggtcgacccggg

SEQ ID NO: 76629 - DNA, 380 bp, Zea mays
  Clone ID: MRT4577_169914C.1
gacgcggaagacgccgccgaatggggaggagacggggggaagcccgcggaagaaatctccgcggcccgcggaggctctgcctgtggctatggttcctgtggaagcggcagtgggggccagcgatgagaagctgtgcaagtgcaaccacgccatcactgacagtgatatctgggaactggttcattcgctaacgaccaaggatgcgtggatttgctgtgcttgtcggcgcaaagacgagaagagggacctcttgatctgcgtgggatgctacagccatctctgctgtggggttggatcaattgcttacccgtttgggcactctcgatcacacgccctgaagaagaagcactggtttgctgttctgtacagtgatccataaa

SEQ ID NO: 76630 - DNA, 283 bp, Zea mays
  Clone ID: MRT4577_169915C.1
gcaaccgggggcagacgagcgcttagactcacagcggacgcctgcccagccacaggaggtctattctgaaggcgccttcacagacgtctggccccaggcaggtacatttatgtcgcacgcccagcaagcctgaccggcgagacttgtgcgataccaccataaaccgccattctcgcaggctcggttattgcagacatgcttcacacacgcgggcgaaggaccagcgtggctcgcgtagggactggggtttaactgcgtcacgcgtcagacactgacggcaccc

SEQ ID NO: 76631 - DNA, 181 bp, Zea mays
  unsure (1)..(181): unsure at all n locations
  Clone ID: MRT4577_169916C.1
cgnntccgcaaggganttcttgcctaagaagcatttcggttgcttttcggaccctgnnnagaccactcnnggcctcaaacagtggcgttcgttgatacttgtgccaaggggcagctgcagnntatctcaaatgannaatcaagggcattctcgtcnnngtggctgcgctttcnnncagtgg

SEQ ID NO: 76632 - DNA, 826 bp, Zea mays
  Clone ID: MRT4577_169917C.1
gggtactcctccgaggttctgccgggtaaattactgattggctgattttgtgacagttgatttacgcaggatatacctgcaagcaaggatggttctttacgcaatgtattagtgatcctgagttaaggtatgctagctgtttttatctttgggtaatgaatcgtacattttacatctacatgagtgatacctcccatggtcaagtgataactttaatgtcagtttttttctaaaaaaatccactattagggctagtttgggaactttattttcctaagagaaattaaactaatttcccttggaaaacgaaaatctcttggaaaaatggatttccaaactagtcattaataataatgtgccgacaatgtatccttcaactatggcctaagtccaaaacattgataagggtcatctttaagaagtttgatagttaggatttaatgttttagattgtttcagtgttgcatgtttgtatttggactctactatagttgaaggttggaatttttccatttgaaatatgcaaatgggttttcttgcaaacagtagcaactgacgttatttggacaaaattctctaaaacgtgactgtattagttttgttagaatgcaagtgcatcactcacctctttttgggttggataggttgatgcattcaacttaatatagtatcaaaatcagaggtatcgagtttgaatcctcgttaacgcaattaaatgaaataattggttgttcgctctactctacatatgaggtatgagagagccttgacgtgaggagggttttaataatgaattgcccacctctttatattagcttaaactttt

SEQ ID NO: 76633 - DNA, 216 bp, Zea mays
  unsure (1)..(216): unsure at all n locations
  Clone ID: MRT4577_169918C.1
gaccacgcgtccgcacaattctaacaccatctagcacacaatcttcatttctcctttaagaaaaaacacaaaggacccgaccactcangcatcatttattaccntcaacatattcatatcttccacttacccaccatccatgttttccaatactttaactccactcttctgtttatttcgctgcaccctctttattatacacaacacttgatccac

SEQ ID NO: 76634 - DNA, 563 bp, Zea mays
  Clone ID: MRT4577_169919C.1
ccgggcccattattgaatcctatcgaggtccgtgctgatctgctcttcctgtactgcttctcctgcctccgctaggaggatcgttggagaggacttggagagagcggccgactgatcaacataaggaaggataaagaacacgaagctggttgcacagccaccgagagacctagtactatgaataaagaactggggattgttatgcactgattggaccataaacatgaggtggaatggccacaaggacatgatcactgaggatgatgatgacaagctgggtgcctcctctattgataagattgtgaacgtgatggaccccaggatgaaggacacctgctgctgaggaggacatgaaagaagcctgccggccaagttgacatgcacacaatgaacttgcagtacgctgctgatgttggccaacccatgaacaagctaggcggagaatctccaaaggcgagaaggtagacccgaacacccgcaaagcctgcatgaacagggatggacttaccaaatacaactagcgcgggaagaacatgaactgcacactacatcggtactccgac

SEQ ID NO: 76635 - DNA, 218 bp, Zea mays
  Clone ID: MRT4577_16991C.1
gagcattcataaacacaccaagcgaagcgctctagcaacgacctatcaacaattgctaccgggatatgagctctacttgcgcttcttgcccttgttgtctagcacatcacatgccttcattattgcacattgcttacttgctcctagagccattattctagaaacgctcctaccccttactgcacgctgctatgtacaccgagctgttgaagcaaaca

SEQ ID NO: 76636 - DNA, 416 bp, Zea mays
  Clone ID: MRT4577_169920C.1
aatcctccggtaacagcaaggctcaccagaatgcggcctctcctcagcgccgccgccgccgccgctgtcctcctcctcctcctccccctcgccgccggccagcgactccgcggcttctcctaccagctcgactgccgcgccgcgagctcctccaccgacagccgcggcctccgctgggaccccgacggcccctacgtctccgccggctccgcccgcccgctctccgtccagggcctcctcgaccccgccctcgcctccctccgcgcctgcccgtaccgcaccaacgccaagttctgctacgcgctccccgtcgaccccaaccgccgctacctcctccgccccaccttcttctacggccccacctcgacggccccgcccgtgttcgacctcatcgtggacggcaccttctggaccgc

SEQ ID NO: 76637 - DNA, 147 bp, Zea mays
  Clone ID: MRT4577_169921C.1
ctcacacggactaacacgatttcaggcgcgtgtcaacaacacagatctagtcttatctatgggagtcctatgcaagcccaattatctcatggacacatttaaaaatgaatgcatatttttaatgaataatggttcaaaaattaaatt

SEQ ID NO: 76638 - DNA, 367 bp, Zea mays
  Clone ID: MRT4577_169922C.1
ccgctgtagaaaaacatgaaggtacaaaaaaggaggcaatgtttcgtgtcatgccgcaactaaaagtccattcagggcggaggggagctgggctacgctatctaagaacaaaaagtgggacgaacaatgagcatgttgccaagtaggtactcacgtataagttactccagtctaggtatatcgagacctttccttgcggaaacaatgtggcatgttagctgacgtgctagagagcaagatgaacacaaacgtgaggaacagttacgcatgtaatttgcgcggcttgtatgatggctatagcacctgctggaactggatgggcccagcggcggacgtggtgcccaccgtgttcatggggggcgcggtg

SEQ ID NO: 76639 - DNA, 242 bp, Zea mays
  Clone ID: MRT4577_169923C.1
gcacgcctacgtaaggtcggaattcggttcgagctcaaactacattcgcacactttttgtctttcccacccacacccttaaacaagggaggggtttctttaaaacacggagggggtacctaaaaccccaaccatggtttacagccattgcacctaacaaatgcccatacagcctgaaaacttatgcctatctactttactgtatccttcccctgttcagggctggtctggtctccacttccc

SEQ ID NO: 76640 - DNA, 129 bp, Zea mays
  Clone ID: MRT4577_169924C.1
gactctttcttcttttttttatctctcggtagctaggatgttaatcctattagaaatacattatgtctctttatcgtgagaatagggcgccgtcaatctcggggttgaggatacaatgccgatctatgg

SEQ ID NO: 76641 - DNA, 308 bp, Zea mays
  Clone ID: MRT4577_169925C.1
gagactgaagtcgggattgtgctcgagcacatgtccagcctctgtcctagcatttatgttacagaagaccgcttggaagactccgctgtcgcaagcgagagccattgtgcttgatcggactagtgacgtctaaggaacggggtgctctggtcagcacggccattcatgtacctctggctcagcgaagacaggatgtggaagggggtttgtcacaaaggaagggttgctggctatcatgtaagacagttcatttgaagccagcatcagaagggtggattgtgaaccctgctgcttagagcgtagtgagt

SEQ ID NO: 76642 - DNA, 201 bp, Zea mays
  unsure (1)..(201): unsure at all n locations
  Clone ID: MRT4577_169926C.1
gtgtatgcctcacggctgcgaggcacaataatatatggaatgtatatccgctggacncgncggccctagacgaggctacaaacaaaaggggccctcacctgggaaacacacacagaaagaagacaatgaacacgcctctgcgcacagagatctacgatggccatatgcagaggggggggaagaaacaaaggccgcccctag

SEQ ID NO: 76643 - DNA, 1494 bp, Zea mays
  Clone ID: MRT4577_169927C.1
cctggatttactttgacggctcgcacagtcgcagctggtcattcctgggaggaactgcagaaggaccttgatggcttgctatctacatggaaaggaataactgagcatgctcaatctgctgccttggctgctgatgagggtgtggaaggtgctgttcctgtaatgttgcacagagcgaagggtcaaactttatctgttgttcaagacgattttaatgaaaaggtcaagaggctggttgtggattctcctcgaacatatcatgaggttacaagctatcttgaagaagtcgcacctgagctctacagccgagttgagctttatgagaaaagaaaacctatatttgatgaatacaacatcgagaaggagatagacaacatcctttgtaaaagggtaccactaaacaatgggggttctctggtcatagaacagactgaagctctggtatcagttgatgtgaatggtggtcacagtatgtttggtcagggaacttcacaggagaaggctattttagaagttaatcttgaagctgcgaagcaaattgcccgtgagttgcgcttgagggatattggtggcattatcattgtggattttatcgatatgtcagatgattcgaacaaaaaactagtatatgaagaaatgaagaaagcagtagaaaaggatcgatcaacagttggtgtttcagaactatcaaagctaggtttgatggaaataactagaaaaagggtccgaccaagcgttactttcatgatcagtgagccatgtacatgctgccatggtactggtcgtgtggaagctcttgacacatcgttttcaaagatcgaacgtgaaatatgtcgacgtcttgctgcctctcgacgaaaatcagaccctgagaaaccaaaatcatggccaagatttgtgcttagagtggatcatgagatgtgcacgtatttgacgtccggaaagaagacaaaactaggactcctgagtagctcccttaaagtgtggattttgttgaagattgccagaggtttctcccgtggcgcttttgaactgctaccgtactcggagaaggaaaactactctatggagaaagaaacatcagagttgccccaaaaagagtccaggcccaagctatctgtctttcctatcaagaagtggatgagccgggccaagcgtgctaagtgattctcttttattagcatggggccttcctttgtattcacaacttagaatgagtaaagattcaggaagaggatcattcttttcgttcatgaaatctcagcgtcggatatctagagatctctcgaccagcttttgtttacatttttttaggaattcaggcaattccatgtttagtttaatccagaaaattttcagcaaaaatgtgacgatatatataactgtgcaaatctagtacccttaatagtagtagatctcttaaatggttcttagtgttaccataagatacataatatatttatcatgagaagactgcgattactcttttaagtt

SEQ ID NO: 76644 - DNA, 179 bp, Zea mays
  Clone ID: MRT4577_169928C.1
gggaacagacactataacgcatcctctcactctctgttctctgaccttaccgggagcgtattagctaatgcggctcatattatgctctgttcaacatgtcatgatgccataccattaacatatcaccttccctacaaacaacacctccaagccaaactggcattcgagtagtcatgtct

SEQ ID NO: 76645 - DNA, 302 bp, Zea mays
  Clone ID: MRT4577_169929C.1
ttagagatttagcagagccagcaagagggatctgggaggaggtaactgatcagatatggatcccaagcagttcccaaaggcttacctctcttcaactggcatcttcggtgtttctggctcatgtcatgcttgcacactccattgacacataactgcggtgcacaggagggggcttcctcctcttcgagtcagccctggcaacctcaacatgtgtctcaggggcagcagaagccaatgtctccttaattgggctgcatcgactctcaaacatcttggtcaactggatggacatggcgggcaca

SEQ ID NO: 76646 - DNA, 505 bp, Zea mays
  Clone ID: MRT4577_16992C.1
gaattcatcagggctttttgcggggaggcttgttctccctaaattttccaggtcccaataaataatcgtccccaggggcaacttttcccccttaaacagttttcaccccaacttaatgaagccttttaaagtcccatttgccgggaaagggtaatcagcttatacatttttacccccttcctcccccctaatcgaaaaaaaaaaaaaaaaaaaagggcggcccccctttttttttttttttgttttttggtttttttttttgggccgaaaaaaaccttcctccacgctcccccccatttttaactttgcccaaaaaatgtccccccccatgggtgaattttccccattacctggggccccccccaaaactttttttttacctttccccttaataaaaatttgccgttccaaggcttttttttctccccgggtttttctttttattcctaaaataagcccttgaatcggcaaatcccggataaaccaacgaccccttttttttttt

SEQ ID NO: 76647 - DNA, 1072 bp, Zea mays
  Clone ID: MRT4577_169930C.1
cgggcgcccgccggctcgtgctgggcgccggccgcggccggcgcccgggcccgcgccggctcctccggcacgcgcgcctggcgcccctccccccgcccccccgcgcgctccccctgggcgcccgtgcgcccgctccgccgcgctctgcagggcctggacccgctgacggcggcgagcatgttcgccggcgcgcggtgcatcggcgagaggaaggttaacggggaggactgcttcatcctgaagctgagcgcgggcccggagactcttccggcgcgcagcgaggggctggcggagatcatccggcacgtgctgttcggctacttcagccacaagtccggactcctcgtgcacctggaggactcgcacctgacccggatccagtccgccaccggcggcgacgcggtgtactgggagacgaccatcagctcgtccgtcgaggactaccgcgccgtggacggcgtggtggtggcgcacgccgggacggtccgccgtgaccctgttccggttcccccgccttgcccaccccgtaaggcgaggccgccatgagccacaccaagacccgcatggaggaggcctggaccatcgaggaggtggcgttcaacgtcccgggactgtccgtggactgcttcatcccgccggccgacatccggtccggctccgtcggcgaggcttgcgagctgccgtcccagccccacggcgagcgcgccaggaccggcgccgccgtgcacccctcgcgcgtggccgccgtggagcgcgctggcactgctgccggcgccggaggccgcggcgagaaggtcatgtggagagtgcaagtgtgagaggaatggcgcgcatcagttagcagcggcagagagaattgaaaccgattgcccgattctaatctgtccatactagtagagttttaattttcgccagcccaagtcatgaatcaatcaatcaatcgatcgaatcacactaactcgctgcatctagtagtagagagctggtttaggtttctgtaaataggagcataaacgatcccaggccgtcactgatgtcttgtcctcgggttggatgaatcttttatcctctg

SEQ ID NO: 76648 - DNA, 428 bp, Zea mays
  Clone ID: MRT4577_169931C.1
tcgtccacgcgttcgtccacgcgttcgaaaaaaaaaaaaaaaaaaaaaaaaaaaaaaaaaaaaaaaaaaaaaaaaaaaaaaaaaaaaaaaaaaaaaaaaaaaaaaaaaaaaaaaaaaaaggggggggcctttttaaaaaatcaaagtttacttccgcttgaatgaaacttattattttttttttagggaaacttaatttaattttattggccggggtttaaaaaaattgaaatgggaaaaactttgggtttaccaaattaaatagctttgaaaaaaatccccttttacccagttgggaaaataccaaaaaggcccgccccaattgcttttcaaaaaatttgccaactttaaatggaaaaaggaaccccccttgtaagggaaaataaagcccggcggttgggggggtaacccacaggggaacctttaaa

SEQ ID NO: 76649 - DNA, 117 bp, Zea mays
  Clone ID: MRT4577_169932C.1
cccaatacttcagagagagctccttctcgtcgtctgtctccatggcccgctcgaccaagaccgtcgccgtactcctcgccgtggtgcttctcgcgctggtcgcgtccgcggcagcca

SEQ ID NO: 76650 - DNA, 304 bp, Zea mays
  Clone ID: MRT4577_169933C.1
cttcccatgctaccaagatatggaaggaaacaccgccgccgccgcgccttccattccagtactcgcggaggaaaggaacaccatacagcgccatggtcacgtcaacaaccgccgacgacgtgctgtccccgccgtccgtggacgggcttcgactgacgccgtctccccgggagcgcgtgtcgttccgcgcggcgagctcgcgtaggcccctgccagccctcgcgcatctgagaccgtcactgccgatctggctgagcacgggcgcgacgctcttactgggtcgctttgacttcttgcactttcc

SEQ ID NO: 76651 - DNA, 326 bp, Zea mays
  Clone ID: MRT4577_169934C.1
gggaatttttgggctgcttgttgccgcactctttttataaagtcgacccggccggacctaattttaatgtggaaagaacccccaccacgggagactgggagagacacagaggggaggggggggttcctcaaagagacccaaacccaagcacagaacactagcgttccctcaccagggcgtgcattccaacagccatggcgatggcgtacaaaatggcgacagaggggatgaacgcgaaggaggagtgcccgcgctggttcatggagatgaagtggaagaaggcgcaccgctttgtggtgcacaaaatccacgagcggtggtgcgcc

SEQ ID NO: 76652 - DNA, 284 bp, Zea mays
  Clone ID: MRT4577_169935C.1
ggggacactcaatacaggagccatctgtttcaactttcatatgtatcatggaagaaattgttttttctatttttttttgaagtatgcagcttgtcattcaggaatggcatactctgttgtgagcttgaagcagtcaattttgaatccaaatgatgttaagtgcaacagcaaatcatagccccatggtgccacgcttctgttattgtgcatattgatgaatctgacaattcaatagtggtctctcttgtcatcctatggaccctgataatgtatattgtccggac

SEQ ID NO: 76653 - DNA, 315 bp, Zea mays
  unsure (1)..(315): unsure at all n locations
  Clone ID: MRT4577_169936C.1
ttgcttnnttccgccgttttttgtttttttttgacagtctaaaggaaaggggggggggttacattgggtcgtgggcgagcttaatcagtgtgttgctccagatccattttattgggatgacaaggttctcagagaagcggtcattaggagccttgggctctgtgtcttaatacagcatgttttctaataaaattgggctggctaagatgcctttctgagatcattggcaggggtggatggcgtgtgtcgggccctatccaaggttgtcaatgggttctcttgcccgagatctttcttctctcctttctttccccc

SEQ ID NO: 76654 - DNA, 175 bp, Zea mays
  Clone ID: MRT4577_169937C.1
ctgaccgcactcttacttttactattttttttacactatttttttttttttttcttactttattttttttagggacagttttattctatcattctcagtgatcaatactcctcactatacataatatacgaatactattattaatacaaacctcaatttaatgatcctctatcaa

SEQ ID NO: 76655 - DNA, 277 bp, Zea mays
  Clone ID: MRT4577_169938C.1
gtctgtgtctttatcatgttcatgccaccgtaatagaaggtaagcccgacctcgggaagatagtgatgtccgccagcatctaccgtcagcgcaagcctttgcgcttcatggacggtgtctacatgcactatcaagtatatgctggtgtgaaagtgaatcccaaggttgagatgaaaggttctgtattcactggacctatcgtcttggatgttgcttgaccttcggcactaggttcgccagtgcattaaatgccaattgtttgagagtttggtgtaat

SEQ ID NO: 76656 - DNA, 327 bp, Zea mays
  unsure (1)..(327): unsure at all n locations
  Clone ID: MRT4577_169939C.1
cccccccccccttttttccttttttccaccaacacacccccacagaccaaaagccggcgatttcaaacatgntccccaaaacccccaacccatcaaggtttgacggaacccttttattacaaaattccaccctaccttaacaatctttccctcagggatggggcttttcgtcttatttataataagaagaacccccattccccctactactcctctttttaatccacaacctaattaatatcctccacctcaaattttatatattaaaaccttgcccttctttcatgctttttttttctatggaccccgctctttttttaaaaacca

SEQ ID NO: 76657 - DNA, 303 bp, Zea mays
  unsure (1)..(303): unsure at all n locations
  Clone ID: MRT4577_16993C.1
gggngggaatccccggccaaccacacccttccagccctcttacctattttcgccgtcctttttctcatttaaagaacttcccaacgaaggagcggggtcttaataacaacaacggggagattcccaacccactgttccctcaacccccccaacctaaacataataaccaaccacttttagttggtccccccccttccctactttaagaataagaaccttttctacagtaaaaatatcccccccctcctcccccctataaaacaaattcttttctttaagatccttaactttgtttccccaaaa

SEQ ID NO: 76658 - DNA, 251 bp, Zea mays
  Clone ID: MRT4577_169940C.1
ttttttttttttatggtgtctttttattcattggaaagaaaatacatgcagtgagatatggtcacaaactgattgaatcaatcacagcagattgaatcaatcacaggacgtccaagaaaatctggggccatgtgaacaggctagacatgcagggtaccagacttaaccactaatcaatataaactaccaaatatactaaacgtgaggctcatggtcttatttctaacagaggaaggacactctatctctag

SEQ ID NO: 76659 - DNA, 954 bp, Zea mays
  Clone ID: MRT4577_169941C.1
cggacgcgtgggcggacgcgtgggcggacgcgtgggggcagacatcgtctctactgatggacatatatgatttagcttgtggcgatacatgttatgtccactagagaaacgatattctgagacactcgccttcgcccaagactgccttatgattatcgctgatatggacatgtggtacatgcttctctacccttagaagtctttcactccgaatctcgggacgagattcttttaaggggggagggctgtaacaccccaggtgtttatattatgctcgacaacgagtatggattcaagcacgtaatatcagtggacaaaacagatgttaaattttaaacatcttcgccttttgcgattttaatatcgcattggtttcgtctgtcgcgagtgtgacgtcattttttttttatttttatctgcccgggctcttccgaaattttcgtgatgttcgggacattgtcattctgaaaatcggtgcatccgatgattaattaaaattcatcgccacgcgaatccgaattcagaagctcgacctcattctacgcctttttatcccggacagattaatttgaactcgacgactaaaatactcggtgcaaaataatctgaatcgtgcgtcgtctaaatgaaatcgtgcgcgaggatataattcaatttattcttcgacacgctgttttggcgacaaaattgcgtatacatttacggctctggtttcggctaatcacgctgagtagattaaaataccgaagccggactcgttgtaaattggtctgtttacatcgtgatcggaatagtcacgaaaactacccaacgagattcggacagaaccgtctacgctgttattcctcggatttccgtttcatgattcgaaaaatggataagtagttgaatagtgtatcgacccagtgggtattgctaaaaatccagacgcaaaaatatctgcgcatttctaat

SEQ ID NO: 76660 - DNA, 530 bp, Zea mays
  Clone ID: MRT4577_169942C.1
aaaactgagaaagaaacgtggctagttataaatatacaaacatagaatatatacattctgattcagtgtttcattcacactgaccctctgatcaaggtggctgtacatgccccatgtatatcacaccagtacggtacatattgctagcatatttttcttcgtcattttttttgctttcctaattaactactacagtgctatactgctacgtttccatacctatgaaaacagagaacgaagactgaagtacgtagatggcgactggcctaagacttaggacgcgatgagaattgctggggagattagataggaagccagagcggcttctcatgttccagataaccccagcaacccatgcatcttgccgatgaacaagcgatcaagcaggggaagagagaaaaaaaacaggagtactcgatctcaaggcttccgcttgtcatccgatgatctcgtctgggactgccttgaacctcgttcgcttctctttcttcaacgccggagccggcgccgggttcttgccggacatcatc

SEQ ID NO: 76661 - DNA, 291 bp, Zea mays
  Clone ID: MRT4577_169943C.1
taccttccttgctgatgctaagcagacacagttggagggcagtgagcaaccaagataaaaaggatacactatgctgagcccaacaaaacccagccacatggagatgttgcaatgtactgagacggccgacgacatggctaagacggataacttgggctactttggggaggcctgcagagaaatctcgtccgatgtgctgcggaagaggcgaattccagatccaaaagacgatgaagtcgctagaggctaaaagttctctttaaggcaggactatccctgaacactacatga

SEQ ID NO: 76662 - DNA, 231 bp, Zea mays
  Clone ID: MRT4577_169944C.1
gtgcctgttctaaacctttggaataagagccatttatgcctagggacaggtacattaggcctgtattacattataccagcgacatgcatggagtcctatgtggctagaaatagctgacccagcaattcttttgtgaggcgggcatcgtacaacatcttggtggattagcctttaccacgatataacgcgtgctgctatattacgcacggtctgggttcatgttgccagctc

SEQ ID NO: 76663 - DNA, 552 bp, Zea mays
  Clone ID: MRT4577_169945C.1
acgcgcgacacttcttctcggagatgctctgaatgaatggactcatttatccataaacccgcttgctctatgggcctgggccgcgctcctgatgaacgctatctccacgatacccgctggcgagcttgacggtgtccgcatagtcgctgtccatgcgcctaaagaagggcatacgccccggatcagcatcgctcgccatcgctcttgctcgtctccgcgtgtctcttcaacgacgactccttgtactgggcgcggttgatcttcttcctgcagaggggccacattgatcttctcttcgaggaaatcacacacctctgacgacagactacatcgatcatcggtgactgccatgtctcttggttggagcttcatggtctgtgctgacctagcccgatcgccgtttgaccgcgtcgcaacgtagactgatatgtgatctccacttgccgagaaaaggatcccaataagagaagtgagccgttacaactcacaggatgagaagtatcgatgctgccgggtctgcattctgttgtgtcatcttttgctccattgcct

SEQ ID NO: 76664 - DNA, 359 bp, Zea mays
  Clone ID: MRT4577_169946C.1
ctttcgtgttctagatcgcgagcgggcgccttgttttttacattagaagaggcccacgtgaacatccaaacaaccagctagcttaagcgacccatctgttgatctcgaaacaactccatccggagcccagccattcgcagatccctcggatgaataagagaaagctgcaaaacataaagggaggagccgcgaaactactaacgctgggggcaatctgtgagaagatccaagcacttgcatccaggctgcaaaatctgaaccaatttttacctcacaggtggacaaaggcttgaaaggaaagaatgagtctagccgagcccgagactcaaattctgtacagaggttttctaaaggaaacc

SEQ ID NO: 76665 - DNA, 1250 bp, Zea mays
  Clone ID: MRT4577_169947C.1
ggaggttgccaacctcgcgtccgtgccggccctgggcttcctgtgcttggttggtgtcatgggttccaccggtttggaattggagtttacggaggatggcaacggcctgcatgagccgctgctgctcggcaggcagcgcagagaggcagaggaggagctcggctgtctgagggtcactccctacgctgatgctgggatcctcagccttgcaacattgtcatggcttagtccgttgctctctgttggtgcgcagcggccacttgagttggctgacatacccttgctggcgcacaaggaccgtgcaaagtcatgctataaggcgatgagcgctcactacgagcgccagcggctagaataccctggcagggagccatcactcacatgggcaatactcaagtcattctggcgagaggccgcggtcaatggcacatttgctgctgtcaacacgattgtgtcgtatgttggaccttacttgatcagctattttgtggactacctcagtggcaacattgctttcccccatgaaggttacatccttgcctctatattttttgtagcaaaactgcttgagacactcactgcccgacagtggtacttgggtgtggacatcatggggatccatgtcaagtctggcctcactgccatggtgtataggaagggtctccgactgtcaaacgcctcacggcagagtcacacgagtggtgagattgtgaattacatggccgtcgatgtgcagcgtgtgggggactatgcatggtatttccatgacatctggatgcttcccctgcagatcattcttgctctcgccatcctgtacaagaacgttgggatcgccatggtttcaacattggtagcaactgtgctatcgatcgcagcctctgttcccgtggcaaagctgcaggagcactaccaagataagttaatggcatcaaaagatgagcgcatgcgcaagacttcagagtgcttgaaaaatatgaggattttgaagcttcaggcatgggaggatcggtaccggctgcagttggaagagatgaggaacgtggaatgcagatggcttcggtgggctctgtactcacaggctgcagttacatttgttttctggagctcgccaatctttgtcgcagtcataacttttgggacttgcatattactcggtggccagctcactgcaggaggggttctatccgctttacaacgtttcggatcctcaagagcctctgaggaacttcccggatctcatctctatgatg

SEQ ID NO: 76666 - DNA, 227 bp, Zea mays
  Clone ID: MRT4577_169948C.1
gcgtggcttggcttggcgctgccctccttgccgcgttgcccttaggacgcccgtcgtgtcatcctgcaccggtaaggggtgggactgtgcttgagcctccatgctggcccggtgtggccgccttggggggggggggcccgtttatgataccatttgctgagggccccttggtgtcgcccttctgcctagcctccgccggacccgcgcgtgttggttgggtggcgccc

SEQ ID NO: 76667 - DNA, 351 bp, Zea mays
  Clone ID: MRT4577_169949C.1
ggtcgggtggtttgtcttgggatttttggtttggtttttgaaggggaaccagttttggggggggggggggggattaaagctggggggaaataaggttataggtggtgggggggggaaatggttttggggtaaaaattgcaaaaaaattacagagcgggaagaataaagggtaaagccaggggggccaaaagagggggctaaataaaataaatggagtgggggtaactggccgttttcaagtaggaaaatctgatgggccagttgctttaaggaattggccaacgcggggagagagggggttggtgttttgggcgcaaggggggttttttttttcaacagggggaggggaaa

SEQ ID NO: 76668 - DNA, 581 bp, Zea mays
  Clone ID: MRT4577_16994C.1
atttttcatcttgatgtcccatcatgcctaaataaatcttactcatcatctcctttttggcccgcactttccgacgcaccaggacgctcctccgtcggcaacgagccgaggaatcgagtaggacactcatggcccatccgccacgtctggtccctgcggaacggagctgtaagcaaagctcaccgcttacaacccggtagatatcgcatctccctggacacccccttcaccacaagagaacaaacatgtggatccgaaacctagctagtatccagcgcctggtgggctgcactggcgaggatgcagaagatgacctacgatgtccggatgtcccttgtctccaaaatatgagcggctgatggtgcctactgtgcccaatacttcgaggtcaccgacctcggcgacgtccgcgatccgcgatgtcacctgtacatgtgcacagatgattcacatctcgaccgacgccttggtgggtcagaggatctaaacttggtgtagtctatgatcacagtacgcattctattatgtagagacgtactgctccacgtcatcctgtgtttatgacaagacagtctgagcat

SEQ ID NO: 76669 - DNA, 2094 bp, Zea mays
  Clone ID: MRT4577_169950C.1
ctcatgtgaaaggaaggagacgagatggagagaagcaaagatggaatggtaaacagtggaaacaaggacgtctctggataacaatgttgaccgagatgatttacaaagaaaaattgtgaggccaccagcaaatctactggtgtttgaaggggacgttctggatagtgaagcgagtgagctagactcatatttgttatcaacatgtgatttttatggagatttccttctgctggatccttgtgatgcaccatctgtttttgactttctgcaaggaaaacattctggtaaagaaaatagtgtggctcgccaaggcagtccagcaccttctaaaagccaagccaatgttttcacttccccaaatgcaagatcagcgggcacaggctgtaaagccgcctctggaaaagtcctaggttttctagattcaactcagaagaatcctgaccaaccttcaactcaagaaaccagtccagatgacaaacattggtctgatcctgttgaacctaactttactgatgatgttgaaaagcctcacccagacgatataggggatcctgttggagattattctgatgacgaggatccgtggaaacctttaaatccacatgaacctggcagcttaaagattcggccttacaggagagtgaaaggttctctacggggggttattggcactttgagaaagaaaactctcacatctatatttcctgtggcaaagatggttggtgtcatcatacctgaacatgctaaatcttttgaagcacagcagtctcagcaggaggaacattatggttcccaatcaccccctcgttttgaaaagtatttggcatcatttgaatttggagaagaaaattccaatgtgtttggagatctgaaagatgacaatggatccgatattggcattaattttgattataatgatccagacatgccaaacgacatagatgttgatcctgacgttccaacatatcctgacgagattattgctgcaactcccaaaggtactcatggtacacaggatgacagagatacacgtgaaagcctcgatgacttgtgtcggtcacatctgaatgctctccttgccagcattgctgaggttgaaaagcagagtgagatggatgctcgagtttcaacatggaaagaaagaatcgagattgccttggaagagcaggataaaaacccaccttttgatatcggttcatacggggagcaaatccttgacgcgctttcatcaagaactgacagcacaggaactgcatcttttagcgagattgtttgtggcagaccgaagtatgaggttgccagaacattctctgcccttctccagctggtaaacagcagaagtgtttatctggacaaaggacaagccacgaatgagttggtgtgttacacagctgagaatccattccatgtaaggctcatcggtcccaaccggaggccagagatggaggcacactttgctcggaagagagtcaagtccccactgcgaaacgctggcaaaggtggtgagtcctccctggcacgacatgagtgccccaagaagccattgcataaaaatggcaagattcaagtcaagacggcgatcaggttgactccagacgggaagcgaaggcgaaggtcagtcactcatctaatgcagccgatcaatctggaatccagcggatgaatgccaatggcagactgactcatgggcatctagagcctgatcgccaatggcagactgactgatgggcatctagagtctgattcttctaattgttgcaacttcagtggcggtttcattggcaggcaacgactgctgtgcaatcagctctcttgacgagacagtgaccatggttcctggttcagatggcgtactgctgacattaggcctagctagcgggtgtacatgtaacatgtacaatagttcattgtgctgttttgtacgtatttgtatcagctctcaagcctaatgctaacagggcaagatttgtctaccgacttgccgttttatagctaatgatattggtagattctttcctggttccaaaaaaaaaaaaaaaaaaaaaaaaaaaaaaaaaaaaaaaaaaaaaaaactcgaggaagggccgcggtacc

SEQ ID NO: 76670 - DNA, 250 bp, Zea mays
  Clone ID: MRT4577_169951C.1
atcgcgccagaccacacgccgacagcgacttctgcaccagcagctgggagcgcgcgaaacgagtcggaggacaggcagaagccgaaggcggatgataactacagcggcaactggctgaacccctgggcggagcccttcaggccttctatgacgctgtaccgatggctggtgaccatggaggcgacggctgagcatgatgatgaggactctttgcgagagtggtggcacctggtgtgcgtctgcacgaact

SEQ ID NO: 76671 - DNA, 240 bp, Zea mays
  Clone ID: MRT4577_169952C.1
tccacgcgttcgaagagattcgatgatttaaaaacccacacgacatgcatacgctggtgtagacatggattctctctgaagcgcgctggacactgtttaatcctgcaccgtgaggattagtctgtgtgagcatggctgccgtccgtatcgccgttactgctcccagcgtcgtctcccatgagttgctactcgatatcagatcttcttctctattctttcttaccattctctccaatagat

SEQ ID NO: 76672 - DNA, 327 bp, Zea mays
  Clone ID: MRT4577_169953C.1
cccacgcgtccgaaaaaaaaaaaattaaataaaaaaaaaaaaaaaaaaaaaaaaaaaaaagaaaaaaaaaaaaaaaaaaaaaaataaataaaaaaaaaaaaaaaataaaaaaaaaaaaaaaaaaaataaaaaaaaagaaataaaaaaaaaaagggggtgaacttttagaagataaaagtttatgatcgggtatttatgaggactaacatttaattaaggggagctaaaattgaattgatgggacttgtttataaacatgatgtcattggaaaaacagcgggctgaccaagataaatcccatggtataaataccatttttgaaaagtg

SEQ ID NO: 76673 - DNA, 463 bp, Zea mays
  Clone ID: MRT4577_169954C.1
aattcggcacgaggctaaggctattctctcctccttgtatctcctttctcccgtgcacacatccgtccctccatctagggttaccaggtcctctgcaccgatggccttccctcggacctacgcgcgcaacaagatgatgctcgacaagaatctggggagaccgctggaggagggacccaaggccctcatcagtcctcgccagcgacgccggttccgacgagagccagaacatcccgcgcggcctcagggaccactccctggtgttcatggggaacaacacgctcatcgggtgctgaccctaggtgtacgccgagaagaccggtatccactcctttgacccgttcatggacctcctggtcggcaacgtaggcctcatcttgaccaacggagacctcaacgaagtgcaccaggaggaccacatgtacaaggtggtggctcctgctcgtgttgctctgggtgctcc

SEQ ID NO: 76674 - DNA, 279 bp, Zea mays
  Clone ID: MRT4577_169955C.1
taagcattccaataacaccttccgaaaacctggagtgtaagagctttgtttctttatgggactcccctgtgattgcagtaaattactgtattgtaaattctcagtgtggcacttacctgtaaatgcaatgaaacttttaattatttttctaaaggtgctgcactgcctattcttcctcttgttatgtaaatttttgtacacattgattgttatcttgactgacaaatattctatattgaactgaagtaaatcatttcagcttatagtgcttaaaagcat

SEQ ID NO: 76675 - DNA, 678 bp, Zea mays
  unsure (1)..(678): unsure at all n locations
  Clone ID: MRT4577_169956C.1
aattcggcacgaggccgggatcccgcccggacctcacccggcgatatgtcgacggcggctcccgcgccgggctccacggccacggtgcgggtatccaacatcccggcctcggccatcgccgcagagctgctcgccttctttgactccgccgtcaccatcgctggcgcgaccttcgcctgcgagatagtcgccgctcaccgcggctggctcagccgcggccacggtttcgtccagtttgattcctccgccgccgccacccacgccatcgacctcgcctcctctggccgcctgccccccttcctcggctcctgcctatccgtctcccccgcccgcgctgacctcctgccccgcgcgcccgacctctccctccgcgctgccagcgcgagcctcattctaggcaaccgcgtcgccgagcgcgagctggaggtggcctactcctgcgacggcgtgcgggccgaggtcatcccgaggatgcggcgtgtggacctctacctgaagcacgattcccagagctacaagcttgaggttctctttgaggacatcaatgagtgctttgggtgccacctcgatgggacgggcgccatcttgctgcagctgacttatgcaccaagaatacacactgcaatttctgggtctacagttaaatcaagggttacagatgatcgctntcatgcatgc

SEQ ID NO: 76676 - DNA, 291 bp, Zea mays
  Clone ID: MRT4577_169957C.1
taagcccgagaacgtgctgatccgtgccgactttcacgtcacgctaaccgacttctacctatgcgggcttgctcactcatacctgccttcgctcctctgcttaacctaaacggacgaacttctatcaagctccaacctgtactggtactgccgctacctcaaccagctaccgtactcgctctactaccgcatcttctaccgcgcagctcatacactttacattatctagattgtcttcgcactcacctagcttcacgccattgtcctcgattaccgggcacataatgactt

SEQ ID NO: 76677 - DNA, 531 bp, Zea mays
  Clone ID: MRT4577_169958C.1
ttttttttttttttttttttttttttttttttttttttttttttttttttttttttttttttttttattggaatttttttttttggtttatggtcttttaattaatccgttgccattcctttagtttttactttattaactccacggaaaagcaccagcacaggagggcccggaaaaaaacaaggtgtcgaaaaaaccggggggaaaaccgggggggaaagcaaaaacacgcgaagccccgcccgaccgggcggaaaaatgggggggaaaaacggaggaaaaaaacggggggaaaacaaaaagcccccggcccttgaaaaacccgaacccaatttgggggggggggggggcctaaacccaaaaaggaaccccttccaggagccgccccaggccctgcttaaacccccattaaagggagggggggccgtttccccgacgcggggggccccctgcgcgaacggaaagaagaaaaaagggggcgggggaacaaaacgccgggcaaaaaaatccgaacccgggggggaacccggg

SEQ ID NO: 76678 - DNA, 210 bp, Zea mays
  Clone ID: MRT4577_169959C.1
atgggagtgttgggacaaagaaaggaaagaaatggtgactatcaaaatcattacgacattaagaagtacatgggtgctgcaataatagaaattggcatgctcgagcagcttgcaaaatgtacctcttaccataatctcttccattttaacgataatcacaagaattcaagtggtgcctatattatgagaaagaaggattttggcttctaa

SEQ ID NO: 76679 - DNA, 3175 bp, Zea mays
  Clone ID: MRT4577_16995C.1
atccagctaaagaagcgatctaagctccggcagcgtcgcgacagagtgagctagtgagtagcacgacaacaacaatggcttccctgaaggtcgcgaagcccagcggtgttgcggcgcagggcaaggagccggcgcccaagctcagggagcacggggacgaaaccgtcagtcgcgaagagcggtggcgttaagaaggctgagcataagccccggcgaaccaaaaggaaggtgaagagcagcaaacaggcgggggcggccaaaaagggacgttcagctcgtggggagtgtcatgcttcttccatgcatgagtgaatccatgccatgcggtgaatgtagatcttgctttgttgtgtcttccatgtgccgcggagcggtaccctcggggccgggacgcttcgtccacagcccaactacccaagagcagagggcagaggatgcctcttgccgcaatggcgtcggcatcctcctcgccctgctcgcggcatcctctgatcttggtcgttctcttgtgcgccattgccgccatctctttctcttcctctgcggctgctggaaccgttggcggcggcacaggcggactgggccccatcagcaccaacgggaagaactacaccaaggtgtgcgaccccgcacggttcgtggcgctggggctcgacatgtcacgcttccggtactgcgacgcgtcgttgccgtacgccgaccgggtgcgcgacctcgtgggccgcctcgcgctggaggagaaggtgcgcaacctcggggaccaggcggagggcgcgccccgcgtcggcctgccgccgtacaagtggtggggggaggccctccacggcgtgtccgacgtcggccccggcggcacgtggttcggcgacgtggtgcccggcgccaccagcttcccgctcgtcatcaacagcgccgcggcgttcaacgagtcgctgtggcgcgccatcggcggcgtggtgtccacggagatcagggccatgtacaacctgggccacgcggagctcacctactggagccccaacatcaacgtggtgcgcgacccacggtggggacgcgccagcgagacccccggcgaggaccccttcgtcgtcggccgctacgccgtcaacttcgtccgcggaatgcaggacgtcgacgaccgcccctacgccgccgccgcagacccgttctcgcggcccatcaaggtgtccagctgctgcaagcacttcgccgcctacgacgtggacgcgtggttcaaggccgaccgcctcacgttcgacgcgcaggtggaggagcgcgacatggtcgagaccttcgagcgccccttcgagatgtgcatccgggacggcgacgccagctgcgtcatgtgctcctacaaccgcatcaacgggatacccgcctgcgccgacgcgcgcctgctgtcggagaccgtccggagccagtggcagctccacgggtacatcgtctctgactgcgactccgtacgcgtcatggtccgggacgccaagtggctcaactacaccggcgtcgaggccaccgccgcggccatgaaggccgggctcgacctcgactgcggcatgttctgggagggcgcccgggacttcttcaccacctacggcgtcgacgccgtccggcaggggaagatcaaggagggcgacgtcgaccacgcgctcagcaacgtctacaccaccctgatgcggctcggcttcttcgacggcatgccggaattcgagtccctcggcgctagcaacgtttgcaccgacaaccacaaggagctggctgccgacgccgcaaggcaggggatggtcctcctcaagaacgatgcccgacgcctaccattggaccccaacaagattaattcagtgtcgttggttggcctgttggagcacatcaatgccacggatgtcatgctgggagactaccgaggtaagccatgcagaattgtgacaccatacaacgctatcaggaacatggtgaatgccacatacgtgcacgcctgcgacagtggggcttgtaacacggcggaagggatgggcagagcatccgggacagcaaagatcgccgacgcgaccatcgtcatcgccggtctgaacatgagcgtggagagggagagcaacgacagggaggatctcctgctgccgtggaaccaaagcagctggatcaatgccgtcgccatggcctctcccacaccgatcgtcctggtgatcatgtcggccggcggcgtggacgtctcgtttgcgcacaacaacaccaagatcggcgccatcgtttgggccgggtaccccggcgaggaaggcggcacggccatcgccgacgtcctcttcggaaaatacaatccaggaggacggctgccgctgacatggttcaagaacgagtacgtcaaccagatccccatgacgtccatggcgctgcgtcccgacgcagcgcttggctaccccggccggacgtacaagttctacggcggcccggccgtgctctacccgttcggccacggcctcagctacaccaacttcagctacgcgtccggcaccaccggcgccactgtcaccatccacatcggcgcctgggagcactgcaagatgctcacctacaagatgggtgcgccgtcgccgtcgccagcctgcccggccctcaacgtcgctagccacatgtgcagcgaggtggtgagcttcagcctcagggtggcgaacaccggcggtgtcggcggcgaccacgtggtgccagtgtacaccgcgccgcctcccgaggtgggcgacgcgccgctgaagcagctggtggcgttccggagggtgttcgtgcccgccggcgccgccgtcgacgtgcccttcgccctcaacgtgtgcaagacgttcgcgatcgtcgaggagacggcgtacaccgtcgtgccgtcgggcgtcagcacggtcgtcgtcggagatgacgcgctggtgttgtcgttccccgtcacgatcaacctggcagtgtagactacttgtctgcaggactaggcgtttattgattctttttttttactcaaggtaataactttaaaccattaaatgtggcgggcgagaaagtggaagcaagtgtaattactttacacagtgctatacaaaagcagaagcagatcgatccattaattgtcacatgatttgtatccctgaaagcagaacgggtgaaaaaatttactattgctgttttgcgcctttgcggcacagtt

SEQ ID NO: 76680 - DNA, 385 bp, Zea mays
  Clone ID: MRT4577_169960C.1
gaactaaaaatatgattttgacccataaaatgaactaattgcaatcatctaaatatgatttacaataatctaaattaaacagatcctcatgctagtaatttttctcattgaactaattacaatcatttgaattacaatcatatggactgtagtagcaacttaaaatatggataataaaaaacagaaactattaaacagaaactatgattgtaattaaatagaaactatgattgtaattaaacagaaactatagtagcaacttaaaatatgataaacaccgtgaggacaacactggaccaagcgccacattgtttgaaggacctgacaacgaatatgatggaacgtggcacttctagttcagatgaaggacaatttaggcctttct

SEQ ID NO: 76681 - DNA, 829 bp, Zea mays
  unsure (1)..(829): unsure at all n locations
  Clone ID: MRT4577_169961C.1
gtctgcatagagctatgagacatcatcgcagcttggatcctcctccctctcatacatcgtcgatcccataaccgtcttctctttgaggctgctgtgctgatgaaggcagagccatcgtttccggataacgctccgcatcctctgcctttctttcctctgggttagaacaacactaggtggttttgagacatgggcgacgaggatagcgcatactatctcctggagagtaggttacgcgatccaagcgctgacccgactgatctacccttgtcactcttcaaatcaatcaccaataatttttccgataaagaagtaatcggtagcggaggatttggagtggtttacgagggagtgcttcccagtggaatatttgttgctgtgaagaaactttccgacgctttagttgaagacaagttgtttcaggacgaggttgcttgtctcataagggccaagcacagaaatatagttcggttacttggctattgtgcagacacacaaggaaaaattacagaatacaaaggggagctcataatggcgaaagtacgagcaaggctgctatgctttgagtatgtatctggaggtagcctggacatgcaccttgaagatgaattttgcgggcttgaatggcatcaacgctacataataattaagggaatttgtcatggcttgcgccatcttcacgaggaacagaaaattatccatatggatctcaagcctcagaatatattgatggatcctaatatggtaccaaaaattacagactttggattgtcaagacttattggcatancacaaagtcgtattatcaccatgaacaattttggaacac

SEQ ID NO: 76682 - DNA, 670 bp, Zea mays
  unsure (1)..(670): unsure at all n locations
  Clone ID: MRT4577_169962C.1
ggtaccggcgcccctctctcgagtttttttttttttttttttttttttaaacaaaaaatgctcaactgttactctccgtctaattcttgcatggattggaagggacccaagccctttaccgcagcagctgcgcaagagcatcagccggtctgaagttggcgtcgtagcagtaagtatcggtcggatcgggtcagcagctggcctcactgtctggtgccgccgaactcggtgtcgtacacgggggagagctcgaagtcgtcgtccgtcgcggccggcacgttgaggtcgatggacatggagctgtcgtcgcatttcgctgctgccgtccaaggggacgggggccgcggggncgggcgcgccggacagcatgtgcgcgcgcttgtggccgcccagggcctgtccggactcgaacacgcggaagcagaacgggcactcgtggaccgccgggccgttctcggcgcggcgagccttggacgacggcgcggctggaggcggcaccggcaccggcaccggcacgcacccgccctttcctctcttgacgctggcgcggtggccgccgagcgcctggtacgaccggaacaccttcctgcacgcgccgcactggtgcctgcccgtggtccgagcgcgcgacgccgtgctcgtgatcggcatcgtgcgcgccgacgaacga

SEQ ID NO: 76683 - DNA, 486 bp, Zea mays
  unsure (1)..(486): unsure at all n locations
  Clone ID: MRT4577_169963C.1
agcgccggcacccccggcgaggcggaacagaaggggaagaaggaggacgngcgcgccgaccacaacgacccgcccgacgatttttatattatcacccaccactccggaatgcatggcctccatccccaccatcaatttcctcctccataaaggcgccaaggtcatcctccccatccacctgggtcgtccaaagggtgtcaccccaaactacagcttgaagcctcttgttccacgcttgactgagctccttggagttgaactcgtgatggccaatgattgcattgcttaggaatttcagaaattggctgccgctttgccgcaacgtctagttctgctcctatagaatgttagattctacaacgagaaagagaagaacgaacctgagtttcctaaaaacctaacattatgtccctcacctttatctcaattatgctcaaggcaccacacacatatcttatgcttcaaccgaaagacttaccaattatt

SEQ ID NO: 76684 - DNA, 313 bp, Zea mays
  Clone ID: MRT4577_169964C.1
tgggtacctcgaggccggccggggaacggatcactaacacaagtacagtcataagcatgcgagcgtctgctcctactccaacggactccggagcaaggtagtagagagagatcgccgagtccccttctcgaagtggggggcgcggctgcgctccctcctcgagcgagatctgtctggacacacagctatctgacgaaatggtggagatctgctgcatcggagctggctatgcctagagggccaagcatggccgccacttgccctacggtgagccgcacaaggggggcgccaccagccgacatctacaaccccc

SEQ ID NO: 76685 - DNA, 315 bp, Zea mays
  Clone ID: MRT4577_169965C.1
ctgcaaactacatctaatcctaagaatttctccactgacacagtgaaccaagaggcacgccacacttcctgtcacattgatctcccgtttacttaactattgccctgacaccaacatttcaaacgagccgatattcttgcactcaatacatcattccttagtaacctcacagcctcttactttctcaactaccatatttcacactctcttccaacacaaaccggattcttcaacacatatcatttccaaacgacctatctcactcagaatgtcatgctcatctatcctacaggctccatcatcaacctgaactac

SEQ ID NO: 76686 - DNA, 347 bp, Zea mays
  Clone ID: MRT4577_169966C.1
tttttttttttttttttttttttgggtttttttttttttttttttttttttttttttttttttttttttttttttttttttcaccgggggaactggggaaaacaattttttacaaaaaaccccgggggagggccaacaattccgtttttccactggggggggtcccacccttttgccgggtggggtttttcacataatttatcacccgttcaagaacgggggaaacatcctgtttaatggtgagaccccatcggtttggcatcaaaggggttttttttccccaacccccaatttttaaacccaaaagggggtgtacaaaagcttgggtgccccttggccgggaaggg

SEQ ID NO: 76687 - DNA, 231 bp, Zea mays
  Clone ID: MRT4577_169967C.1
gccggccgggctgcgacaccacactgtacgcaaaccacctctcacctcatcgactccaaatcgttagaagtacgacgccatcgacagggctcgatcagctgcccattgctctcctgagcgctccctgataaaggcgactccagtacatcattaggctgcccatgctatacaccaccggctcatctaccgcctgcggtctatatgccgcctccggatctatctgccgcccca

SEQ ID NO: 76688 - DNA, 342 bp, Zea mays
  Clone ID: MRT4577_169968C.1
tatattatattttcttttttttgtttccaccaaacgcacagccggattattgaaactaacgtaggacattagataaatacggaaatattgcatgcatgaaacattaattatactgatgatcgaacacgacacacaacatttgagcacccatgcaagctgctctttcattcaaaagattcccaggagcagagactacgacaacttccttctgatcctgcatgcatgtaaccctctaaccacgaaagacgttgccgcaactaggctcatgatcctacttctaattggaagtaaggccggcaacgaaattaccataaacgatgctacaaacgcccaatccaacaa

SEQ ID NO: 76689 - DNA, 443 bp, Zea mays
  Clone ID: MRT4577_169969C.1
gggttttggtttttttttttttttttttttttttttttttttttttttttttttttttttttttttttttttttttttttttttaaggggcatttaaaatgcattacccctaactaacaaaccaccaaacttacaaccccaaaaattggggggggggggaggtttttttttaaaaaacaaaaaaattggcccctaaaaccctaaaagggggcttcaacttccaatttgggggccccactttttgcccaaaaccaaaaaaaacctgaacttttaaatgggaaaactcttggcgttttcccccttgcaaaacttaaaaataatttttgccccctttaaaaactttatttaaggggacccccccataacaggaaaccccctaaattgaaaaatgctccatggcaccaatcaaggggggaaaaccggacccctttggcaggtccggg

SEQ ID NO: 76690 - DNA, 605 bp, Zea mays
  Clone ID: MRT4577_16996C.1
aattttatttttcaattgcttgtctgcaagacaagtgataattgcaataagtaacatgatatgttaaccagaaggtatgctagcaccagaaacatgatatgcccagaggtttttacgcggcgtcggcgcatgaaacacgatggtggtcaccttttttctctcaaacttgggcagcatatataataaataagttactacatccatcctataacttactttcaccacgttttagctctgtcgtggacggctggacccacatatcagtggctcatcgccatcgacgtgtgggtaaaaaaaaagagagggaaggggggaagggtggaggtcgcatatgcactcctctgtccacggcggcatgtacaaaactcaggacggacgacggccgccgtcggcggctaatgctggtaggagccctgcgacgccggggacggcacggtggaggcggtccggacggtggcggaggaggcggtggtggcggacgacagtcgcggcgtggccgtggccgtggggcgcgcctgcctgatcaccacggtgggcaggcccgggctgcgcgcccgccgctgctgctccttcaccagctccgccgcgaacgcgtccagcttctc

SEQ ID NO: 76691 - DNA, 1290 bp, Zea mays
  Clone ID: MRT4577_169970C.1
tttttttttttttttgtgccacatacatccgcgagagaaacccctcgatagcccgcagcattgcggcgcgcgagcacaccgaaccacccacctcggcggcggcggcggcggcttttctgcctgcgaagagagaaaccaaggagaggggcaactcggaagagggcgaggatgcctcggccggagttccaggcgccgccggatgtgttctacaacgagtcggaggcccgcaagtacaccacctcctcccgtatcatcgaaatccagtctaggatttccgagagggcgctggagttgcttgctctccccaacgatggcgtccccaagctacttctcgacataggatgtggttctggacttagtggtgagacattgacggagcatggccaccactggattggctacgatatttcaaagtctatgctcgatgttgccttggagcgtgaaacggaaggagacctcctacttgcagatatggggcagggcttgggcttgcggccaggagttattgatggtgcaattagtatttcagcaattcagtggttatgcaatgctgacaagtcttctcatgaaccaagattgcggttaaaggctttcttcggttcattatatagatgcctagcaaggggagcaagagctgttctacagttttatgctgataatgtgaagcagagtgaaatgattgtgacttttgccatgcgtgctggttttgctggcggagtggttgttgactggcctcatagttcaaaagcgaagaagtcctaccttgtcctcacttgtggaccaccttcagttactacatcacttccaaaaggtaaaggtgaaaatggtgaggcgtgcagcgatgatgacgataatgagagcagtggcgaagatggcgacagaacagtgggcatatatgaaaggaataggccgaagaagcggcagaagacgaaaaagaacggcaaaggcaaggactggctcctgagaaaaaaggagcagatgagaagaagaggacatgatgtgcccgccgacacgaagtacaccgggcgtaagcggaaaggctatttctagctctgtgcaatgcccccttgcctgcaatgctggctgttcagttatgatgctagttcatttagcagaagcagaaggatttttgtaaagggtgaagcgaggagttgtactggtattcgggagtcattgcatttttagacaacgatgtgaaactgtcatttttgtagaacgtggatgttgagatgaatacagttggtttgcgtgaaaaaaaaaaaaaaaaaagcggccgcccagactttggct

SEQ ID NO: 76692 - DNA, 254 bp, Zea mays
  Clone ID: MRT4577_169971C.1
acgcgacgcgtacgattgacaccagcttttcacattaacagcagaatccattaacatcggtagagtatcaatgccgaccgagatattgtgactgcttatgctgcttgctctatctacatgtgctgataacgctacaattctacctttacgctgacaagcttatcaagcattcctttgtgcctcgaacactccaataattaatcgcttaggatgcgaaaagccagctcttcaagcatattagcttaaacaagcaa

SEQ ID NO: 76693 - DNA, 188 bp, Zea mays
  Clone ID: MRT4577_169972C.1
cttgccttcccgatgacagcctcacggaagacttggtttttgataaataaacccaaatgtttaggtttattctcgatcagtggtaaggtgaatcacacacaaaaggtaacattgcacaccatattaagtttggttttggaagcctgttttatttaaaggttataatccaatttcatcggtaagagttg

SEQ ID NO: 76694 - DNA, 192 bp, Zea mays
  Clone ID: MRT4577_169973C.1
tggtttttcttttcaagagggagctcactaagggggggtctatttgtatttgggaggtcatgtgaactgaccaggccgccatacgagctgggattggaaggtccacttttgcaaggataaagcttcatgcccctccaaccgacatacttgctgttctacaccatctcaaacttcttcttgcaaaaaatgaaa

SEQ ID NO: 76695 - DNA, 1801 bp, Zea mays
  Clone ID: MRT4577_169974C.1
ggaaaaccgattccccgcctcggtgccgggggaccacaaagctgacctgcggaagcgcgaggaggacgaaagggaccggacgaagctacgcgctgcaccgaccgaccaaaccctaggcgttcggcgggcgtcaccacggcggcgaagaaagggtgcctcgcgtcgccttggtgtccccgaagtcgtcgacggtgcagctcgatccgcctcgtcgagcatgtcgaggagggtcccttgcaaattcttcttgcatggagcttgcttcaaaggagattactgtgaattctcccatgactgcaatgatcaaccagataatgtttgcactttctaccagaaagggacgtgcacctttggtagccgttgcagaaatgaacatgttgaagttcattgtaactgcccccaaccagcaaccactgtagcgcgtgcatcctccaattcttctcagctagttgcttcttccagagatccccattgcagcgaatgccaaacggatttatgtgaccaaacacagcagatttgcaagtcaacagcagcactttctgcacatcaacctgcatgggttgttgattatcatgaccatgacactccagatgatactacaagctggccgttgcaccaagctgtgcaaaatcaaacatcacaatatcctgttcatctgccaatttgctcttctactgctgatggcacttgtccttatgggaaaggctgttctcagatgcatggagatctgtgtgcattctgtgaaagacagtgcatgaatccttatcaatctgatgaaaggggggtacatgtcaagctatgcaagaaaaacaatagagttcttgaggccatgagaagaagtgaagacatagaatgtggtgtgtgcttggaccgtgtgctttcaaaacctacggcagcagaaaggaggtttgggctgctatctgactgcgaccattccttctgtatctcatgcattaggaattggcgtagcacctctcctacgtctggcatggatgtcaactctacactcagggcttgtccaatttgccgcaaattgtcatactatgtagttcctagcattacttggtactcctcaaaggaagaaaagcaagaaattgttgaaggttacaaggccaagctcaggtctattgattgtaagcactttgacttcggaaagggcacttgtccatttggaagcagctgtttttacaagcatgcctacgatgatggccgtttggaagacgctttattgaatcatcatgatgccgacgatgcaagcgcagcgattgccaaacttatgaggttgtcgtacttactgactcggctgcatgtgtaaggaaactcaaacgtatctttgagcaaacattgctgagttcgattggagttcgttgaccgagcaggcaaccttggatttcgctttgtaatggatattataaaaaacatccaaaaaaaagagggcagtcatttctgaattttatcttttcgctgaatgttcaaatcatcagaaggaagcagtcccaatcgtgccacttccacttggaagctagcattttctatccgggttggtacctgattggtggttgtgaccaaacttaactatacccaatactggtgatcctcgtttgttgcagcatctctagcatttcgtttttccagccccgagaaatgctctattgctctgtaattgaagagtggagaaatgttaatctcgatctttagtgctgctcgcctgctatggcgcgtggaactaagttcagttaaccccagctatgggtattctttaccacgaaatattcatctcttttattgagattgagagaac

SEQ ID NO: 76696 - DNA, 866 bp, Zea mays
  unsure (1)..(866): unsure at all n locations
  Clone ID: MRT4577_169975C.1
gggtaccctccgggttcgnccgggncaaatttggtgagaacgcaaagatgatgtctgatcctatgtggatgcggaggctccaacctactcctgagccactggggaggttgttcacatattcaggccacttgtatatgtacttctgatcagaaagtttggaatcaaatcgtggaccccgtggctagtgtcgctagctgtggaactcacaagtctaggcgtccattcccatgcaaccgatatgaatcacagattagggaaagtgcatcagctcagttctgctgagagggatgagttgaaaaggcgaaagatgatgtgggctctttatgtgatgagagatcctttctttgccagttacagcaagcgtcacctcctgaaggctgaacaggttctgaatccggtgccattgattggcttccttacagggaaacttgtagagctactggaggggattcagacgagatacacgtacacatcaggttcatagagatggccaatccgagcctgctgctcgcctctcgatttgccctggcggacatgtgctttgtgcgagttagttgatggttaatggctaggaactggtgcttaatcctgaaacccgtactgctgtttttcttgccaactgtggcatcgtcgtcttgtggctgcgaagctgcagccacttcgttcgtgtatggcggcagataagccaattcataatctaagtatatagatataaatagtagtattaccggtttgtttgtatttgcgatttatcgtgacctgatggaacataatgtgtatacaccgaaaatttatctgattccaaacatcagccaaaattggatgccacgtgccaatgccagtaagaggcagataaaaaaaaanaa

SEQ ID NO: 76697 - DNA, 479 bp, Zea mays
  Clone ID: MRT4577_169976C.1
gttacatggtttttttcattttttttcttttttcctttcacagttttttttgttgattcagacttgtttttggttttgttcattatcatttgaaccgacagcacgaaggggggggggaacataccgtgctttctttttgccccccagtgtgggggggggggagaacacaagttatagtgccatgcaaattgccactctttttttatgacaagagttagggaccagaggtcaaccacaggattcgccggcccaaacacctttatcgtatccgccggggggggagccgccaccaacaccgattttttcgacggcggcggagtctattttcgagccgatgatggggccggcggccagcccaacgaaagtgccgacggggagcccctctggtcccgacccaagcccgttgcgggcgggcctctctccagcgcccttttttttgtagccgtaagcggactgcgcacggtaaccgtacgcgcccg

SEQ ID NO: 76698 - DNA, 428 bp, Zea mays
  Clone ID: MRT4577_169977C.1
ggccgcttttttttttttttttttggttttttttttttttttttttttttttttttttttgtttttttttctttctttgcaagcacaaagaacaaacttaagaaggatgcaagccataccggtcaagaaaaggtttgggcacaacccagaggacacaagaggcccagcaaaccaacgacgcgaggagggggacgacagccacagaagccaacggcggctagccaaccacgaccccaaataagaggtacaccagcagggcaccggaacacacacatacccacgtgcagggcaagactaagtgaaccgtggtggactgaccaccggaagcgcgcatgcccaggtagagagggctctcatcgtggcaggagggctagcgagagcagcggccagtctgcacgccgcaccctgataagagaacgggcggagga

SEQ ID NO: 76699 - DNA, 756 bp, Zea mays
  unsure (1)..(756): unsure at all n locations
  Clone ID: MRT4577_169978C.1
agagagagcgccaatcctccccatcccgaccgccgcccccacctcctgggccgcctcgcggcgattccgtccgcatctgaccccgatcccaggggcatcgtcctcacctcctccgccagctgccgctcttccgtcctcttccgcagcttctgcgtggggaagaggcggtggcggccgaaccagcgtagtcgtcgccgacgccgctgccagccgccatggaggcgtacaagctctgggtgcgcaggaacagggacctcgtccgatccctcgagtccctcgccaacgggctcacatggatactccccgagcgcttcgccaactctgagatcgcaccggaagcagtgatggttgccgagaagccaactttggcaagtatttggtctgctaaaggcggtactgggcgcttgtttgttttaggggaggttgttcacatattcaggccacttgtatatgtacttctgatcagaaagtttggaataaaatcgtggaccccgtggctagtgtcgctagctgtggaactcacaagtctaggcgtccattcccatgcaaccgatatgaatcacagattaggaaaagtgcatcagctcagttctgctgagagggatgagttgaaaaggcgaaagatgatgtgggctctttatgtgatgagagatcctttctttgccagttacagcaagcgtcacctccctgaggctngacaggttctgaatccgntgccattgattggcttccttacagggaaacttgtagagctac

SEQ ID NO: 76700 - DNA, 1722 bp, Zea mays
  Clone ID: MRT4577_169979C.1
cggacgtcttaactggagagagcgccaatcctccccatcccgaccgccgcccccacctcctccgcggccgcctcgcggcgattccgtccgcatctgaccccgatcccaggggcatcgtcctcacctcctccgccagctgccgctcttccgtcctcttccgcagcttctgcgtggggaagaggcggtggcggccgaaccggcgtagtcgtcgccgacgccgctgccagccgccatggaggcgtacaagctctgggtgcgcaggaacagggacctcgtccgctccctcgagtccctcgccaacgggctcacatggatactccccgagcgcttcgccaactccgagatcgcaccagaagcagtatatgcactactgggtattgtgagttctgtcaatcagcacataattgatgcgcccactgagaatcactcatttgcctccaaggaacaatctatcccatggggtcttgttgtctctgtactaaaggatgtggaggcggttgttgaggttgctgcccagcactttgttggcgatgatcgcaagtggagctttcttgctgttacagaagcagtgaaagcaggtgtcaggttagctgcttttcgggagagtggatacaagatgctcttacaaggaggggaggtggtaaatgaagaagaggtgaccgttcttgaaaataattatggagtaaatggtaatggagtaccagccatctatccgatggatggacatgcagaaaatggtcacaaaactatggccaagggtctggatggtaaaaatggatttgtatctaagagtcttgagaaaagagcagtagctgctttgaacaaatttggtgagaacgcaaagatgatgtctgatcctatgtggatgcggaggctccaacctactcctgagccaactgtgatggttgccgagaagccaactttgacaagtatttggtctgctaaaggcggtactgggcgcttgtttgttttaggggaggttgttcacatattcaggccacttgtatatgtacttctgatcagaaagtttggaataaaatcgtggaccccgtggctagtgtcgctagctgtggaactcacaagtctaggcatccattcccatgcaaccgatctgaatcacagattaggaaaagtgcatcagctcagttctgctgagagggatgagttgaaaaggcgaaagatgatgtgggctctttatgtgatgagagatcctttctttgccagttacagcaagcgtcacctcctgaaggctgaacaggttctgaatccggtgccattgattggcttccttacagggaaacttgtagagctactggaggggattcagacgagatacacgtacacatcaggttcatagagatggccaatctgagcctgctgctcgcctctcgatttgccctggcggacatgtgctttgtgcgagttggttgatggttaatggttaatggctaggaactggtgcttaatcctgaaacccgtactgctgtttttcttgccaactgtggcatcgtcgtcttgtggctgcgaagctgcagccacctcgttcgtgtatggcggcagatgagacaattcataatctaagtatatagatataaatagtagtattaccggtttgtttgtatttacgatttatcgtgaactgatggaacataatgtgtatacagcgaaaatttatctgattccaaacatttgttgtttaacagcgaaaacaaaaaaaaaaaa

SEQ ID NO: 76701 - DNA, 1725 bp, Zea mays
  Clone ID: MRT4577_16997C.1
atggttatgaaagacataccttcatcattgcagcatacgataaaaaaggagaatcatatggaatctcccttgcgcgtagcttcggcgctgcgtcaaccttcgtattctttgtgcttctcacactgtggttctgatccgaggccgaagattactaaggaaattctagaaggcttatctgaagatactgatgacagcgacaattatgatgcggaaagtggaggcgaagactctgaagatcggccctggcgaccaagtcatgcagtcttcgggaaatcgaccatcaaacagagtcatcttgataatatgagaggaaggtattttcgggatttgtctattgtgggggctgacgcagacagagccgttcctgctcccgaagaaaacgaagtcgtgatctaccgaagcttcttcaaagctgggcttcggttcccgttgagcagatttgttgttgaagttttaaagacatatcagattttccttcaccagattactcctgaagcaattattataatggggatcttcgtctgggctgtgagaagtcaaggtctggagccaagtgcaaaatgttttagcagcatgcatgaactttcgtatgagacgaagccctggggtaaggaacagtatcataacaattttggttgctatggcttcgtttctcgttctggctcaagctaccgagtaccaacttttcggaagaggtggcccgaggcctggatggaagagtggttttatgtaaaaaatgatttcaaggcgagagaagatattaaagagatcatcatgcgaccaatctggtcccgctttggcctccgcaaaccgaaggtagagattgatgaggcggccgaagcataccaaagggccttcagcacagtttgcgcttttatcgggacgagagatttagttcaagaacatgtagcatacaggatatggccactgatagacagctcagaaatgtcaaaggaaaccatcactaaccctagcgaaggtggtttggttcgattgaaatataccttcaggtttggagaccaatttatcgaaccagacgatgactggctgaagtgtgttgaaaatactagtgatgagctacttggagcatactccaagtctgaagataatgcactatctgcagccttcgggagccaaaaaaagaaaaggctaaatagagtttttgatgctattggatttgtgtaccttgactatcgctacccgccacgagggcagaaaagaaaaggtacaacttctggaaaagtcgctgcttcagctgctccaagcgagcctgcgctaaagaggaaaaaactgaaggtccttacccaccgaccgcgctacattgaaccggccatagtgcctctatctggcggggaaacttcttcagctgctgcaccaaaggagcctactcctcctatacagaaggctgaagaactggctacaatgccgaagactgacaaaattgaagaaccgagaaccgaagagacgaaaacattagaagttctaagcccttcggcaggagtggaggtgccgaagacacaaaaaggtctagcagcaacccctaagagaaaaaggatggctagtgtattagatgtgctggagacgataaaagcttcaggctctactccaggaaaaattgcccaggcttcgaaaacacagattgaaaccgagacaaagttgaccgaagccgaagctatactgagccaagccgacgccgaagctgggccttcagagcccaccaaatag

SEQ ID NO: 76702 - DNA, 482 bp, Zea mays
  unsure (1)..(482): unsure at all n locations
  Clone ID: MRT4577_169980C.1
gnaagccgtccttggctatatcgccagggtagggggcttgctcatactggactggcaccggatgtgtggacaacagatggcaaccgagccattgcaagagctgtatagctagggccaatgcactctggagaccgagacctgatggaatgaacgatgcagcatgctgtactggctataggtaagcgtaggggcattgctgtcccttgcgcaaagcttaactgaagataaacgcgctggtatattactccacactatcggtcgcaagggcacacatataatcggaagttggtgcgagagctttaggcagaacaatcaaagatttggggactatggaggcagcaatggtaatggacaaactagaaacgaaaagccgtatcatatccaaccctcttggaatgtgcactcataagctacaactaggatcgagctaaacatgaaaagataaggcgccaaatgtcgcggactctgtgctgctgctcaac

SEQ ID NO: 76703 - DNA, 450 bp, Zea mays
  unsure (1)..(450): unsure at all n locations
  Clone ID: MRT4577_169981C.1
gctatgtcagagaaactggatcgtttggagcttgtnnaggaatcaaaagataagcaattggaagagcttcatggactctatgaatctcagaaagtactgagtgcagatctaagtgatcaacttcagacattacagaaaagaatgaaggaaacagagtgcaccctagcggatcttgaaacgagatacatgaaggcaaatgatactattaaggagaagcaatatttgatagaaaatcttcttaaatcagaaaaagttcttgttggtgaagcacaaacactccgatcagagctggagaatacagcaggggatctacatgggctattttcaaaattagaaaggaaggaaaagatcgaagacaaaaatggaagtataattcaatatttccattcccagctgatccaggaaatgaatgtattgcatagaacagtctcaacctcggtctttcaacag

SEQ ID NO: 76704 - DNA, 452 bp, Zea mays
  Clone ID: MRT4577_169982C.1
aggggcccaaagggaagggggaaacgaggcttggcccaagttccagtttactaccctcaccacacccccccccccgagaacaaatataattccctcttcaacaagggaaaaaaaggcccacccccattgctaaacctttttttgcttctcgcccacaacaaggggaaacatccccggctgaatccttgcttgccccgtcccaaaaccccctggggctgcaccctggccctgcaaaaacaaatcccccacctacccctaaaaagggcaaccaaccagggggattccaccccccattgcattcattgcaaaaattggattccggaaaaacgaccacgacactaacactgccaccggaactttaagggtgcctgcaaccttaaaccccactgctgttgttgaatggatgacctaaaaaatggaaaagttaagggaaaacgcaagccccccccaac

SEQ ID NO: 76705 - DNA, 397 bp, Zea mays
  Clone ID: MRT4577_169983C.1
tacacgtccagcaacccggactccaagtacaaccagaccagcgccagagaccaggcaagtgtgacctgcatgctttgcttagcttgctctagggctcttggctacgtataccctgcaggtttgagttactgactgatcgaatgctgaggttgagctaggtcgaccgtaaccgagttatttgccttcacctaaaaatcattcaaacaacgggctcggtgaatcgttgcaacatcagaagggctcctgatggttcatcatccattgatggagattgatcaccttgaagatttcgtggctggcgaatctagacacatcatatgcacacgttgcatgaatgacctactcctacttgtcaggaactgatcactggcttagaacttgcattcatttaagcaac

SEQ ID NO: 76706 - DNA, 732 bp, Zea mays
  Clone ID: MRT4577_169984C.1
gggtacctcgaggccggccgggccgggccgggcttcttcttcttcttattcagacattatcaagaagttggcagcagcagcggcagtagccatgggcatcctggaccacctgtcgcatctgtgcagcatcacggagacgaaggaggcgctcaagctcaggaagaagcggccgctgcagactgtgaacatcaaggtgaagatggactgcgaagggtgcgagcgccgcgtgaagagcgcggtgaagtcgatgcgcggcgtgacgagcgtggcggtgaacgccaagcagagcaagtgcacggtgaccggcaacgtggagcccgccaaggtgctggagcgcgtcaaggccaccggcaagaacgccgagatgtggccctacgtgccctacgcgctcaccacctacccctacgtcggcggcgcctacgacaagaaggcgcccgcgggattcgtccgcagcgcgccgcaggccatggcggaccccggcgcgccggagctcaagtacatgaacatgttcaacgacgacaacgtagacgcgtgcacagtcatgtagtttcttctcttcttctctttccgtggatcgatcggatatccctgtcactgtcatcaccggccggccggccggccttattattattcctactgaaaccaacgtcaattatatccgttcatgcaaaaaaaaaaaaaaaacacgtctcctccgtgggaaaaaaaaaaaaaaaaaaggcccctagggcc

SEQ ID NO: 76707 - DNA, 462 bp, Zea mays
  Clone ID: MRT4577_169985C.1
atgaagcggctcacgcaggatgaggaccaagagcaggagcaggagccgggcgtcgtcgtcagcgtggcccagggggtcacgctgctgctcgcgcgcagcggcggcggcggcggcggcggcgagccgcgggcctcgccgcgcgtgttcgagtgcaagacgtgcagccgccggttcccgtcgttccaggcgctgggcgggcaccgcgcgagccacaagcgcccgcgggcggcgccagccaaggcccgcccgcacggctgcggggtgtgcggcgtcgagttcgcgctcggccaggcgctgggaggccacatgaggcgccaccaccgcgccgtggccgaggagtgcgaggcgcgggacggcgcggcggctagcgcccacgggatggacgtggacgacgccgaggcgaagccggaggaggaagcgacaggcctgctgcgctttgacctcaacattgccccatcatga

SEQ ID NO: 76708 - DNA, 1381 bp, Zea mays
  Clone ID: MRT4577_169986C.1
ttttttttttttttttttcgcttaattcacattcctcttgcattggctattaaggttctttcgatcgatatgatacagtacgaagatcgatatgcactagctagctcgtactactacacatgatacgacgatcgagagactatacatatgcatgcatcacatgactgtgcaggcgttgacgttctcgtcgctgaacatggacatgtacttgacctccggagcgctggggtctgccatggcctgcggcgcgctgcggacgaagcccgcgggagccttcttgtcgtaggcgccgccgacgtaggggtaggtggtgagcgtgtagggcacgtagggccacatctcggcattcttgccggtggccttgacgcgctccagcaccttggcgggctccacgtacccggtcaccgtgcacttgctctgcttcgcgttcaccgtcacgctcgtcacgccgcgcatcgacttcaccgcgctcttcacgcgacgctcgcaaccttcgcagtccatcttcaccttgatgttcaccgtctgcagcggtcgcttcttcctgagcttgagcgcctccttcgtctccgtgatgctgcacacatgcgacatgtggtccaggatgcccatggcgccacggccggcggtatatatatgttgttgctgcctctcgtcctcttctgttgtgagctagctacttagcgcaagagcaggaggagcacgcttgtgtgaagaagaagaagaagaagaaagagggatgaagccggcggcagcaacaacatacaccgctggccgtggcgccatgggcatcctggaccacatgtcgcatgtgtgcagcatcacggagacgaaggagggggtgagagctcaggaagaagcgaccgctgcagacggtgaacatcaaggtgaagatggactgcgaaggttgcgagcgtcgcgtgaagagcgcggtgaagtcgatgcgcggcgtgacgagcgtgacggtgaacgcgaagcagagcaagtgcacggtgaccgggtacgtggagcccgccaaggtgctggagcgcgtcaaggccaccggcaagaacgccgagatgtggccctacgtgccctacacgctcaccacctacccctacgtcggcggcgcctacgacaagaaggctcccgcgggcttcgtccgcagcgcgccgcaggccatggcagaccccagcgctccggaggtcaagtacatgtccatgttcagcgactaggaattttaactcctgcaccatcatgtggtgcatgcatatgtatagtctctcgatcgtatcatgtgtagtagtacgagctagctagtgcatatcgatcttcgtactgtatcatatcgatcgaaagaaccttaatagccaatacaagaggaatgtgaattaagcaatct

SEQ ID NO: 76709 - DNA, 364 bp, Zea mays
  Clone ID: MRT4577_169987C.1
gtgggaaacatagaagggcaaggggaataacccattggcaaagcgggggaataaatttttacaacagatgtttacaaccgctctatgaaagctggatgagccccgtttattttataccccccacagatgccactccctgcagatcacaggatagcagtggcacacatgccctactactccttgccagaaaagcgtttaaaactggttacccttgtggccgtcctcaccctttttaaactcaaaaccgacctccttgtagtcctttttgagcgcatccagattcttacgagccttggagaactcgcccttcttaattccctcaccgacctaccagttcacgaaggccctcctttgcttacattag

SEQ ID NO: 76710 - DNA, 298 bp, Zea mays
  Clone ID: MRT4577_169988C.1
tcctctaagcgcccccctttttcccttttcttatcttccccccacacaaagcaacaagccaggtctaaaaatattgtacagccacccccctacacttttatattcctttcctttctcacctacatattctaaacccattctaacaaaatttttttcttacagccatccagatatcaaccactacgtacagtcatctactacctgctattacatatccatcgtaacctgcaattttcaattactcatcgtcttcatcatcccactccaactttttcaacatcaaagcacaaattttcaa

SEQ ID NO: 76711 - DNA, 368 bp, Zea mays
  Clone ID: MRT4577_169989C.1
caggttgatggtgatgtccacatcctgagcctggatcgtggccagcctcgcactttttgtaaattttaatttaacgactgcattttattttaaggaggggaggtcgggtccacatgcatgcacccagggaatgctttagaactggggaaaaacttcttggatgctaaaaatccaagaacacacgggacaggctgagatggcgtcggggctccatgcatacgaatgaataaaatatatggttgggtcggtgaaacggcgcctggaaatgaaacccattatgcttcctctcaggctattgcggtgccgggagggggcttctgagggtcgcatcccctgaaataggcgcgtgggtcccctttggcgaccca

SEQ ID NO: 76712 - DNA, 628 bp, Zea mays
  Clone ID: MRT4577_16998C.1
cgggtggtgctggaggtggtgcaccgcggcgggggacgggtagtactcctgcgccgccgccgtgtagtgcggctgcgtcgccgggtgcgcgccgtagatggcctgccccgccgcctgcgacgcgtactccggcgggacccagatgccgccgaggaccaccagctgcggcgcggcggtcgccggtgcgggcggcgccggcatcggccgccgcgtgtgcagcctgtacttctggagatggcttttcacctcatcattggtcaatccatccaccttcatcagctcgcggatctgcttcggggtcgccacttgagcaccgccgaggatctggagggcattgacgaagcggcggtgcagctccggcgaccagcaccgccgcgccttgcggtgcgtctgcggcggtgccgcctgctgcccttccggcgcgggcttgacgaccccgctctggacgacgtctctccgcgcgctcaggacgccaccgttgttgctgccggccgcggcggcgtcaaggtacggcttcctgtcagcgtcggccgcgtccttgtctgcgggcgcgagggcgagctccggcagcgccgccgcctcgccttccgacgcggtctattccttggcgaacgggagggacgcgccg

SEQ ID NO: 76713 - DNA, 354 bp, Zea mays
  Clone ID: MRT4577_169990C.1
gacatgcttacgaagcagaagctgctgcctccgtgacgaggcacgccgtgttgctcgtcttccatgactctgatgcctgcctgcttcgctcccaccaccccacaccttaatcgatggattaggaattaacctgcagcgcccgtccaggtctcgtgagagatttatatgtttggatcagattttagtttcttgaggcagatgacgacatgtgcatcctgcttgagatgcagaagctgcctcccagaggcttagccatgttgctcctcttccatgactctgatgcctcctcgtcctctcccatcatttgtgttttgttttgtattggtttttttttgctgtcttgctggcagtgat

SEQ ID NO: 76714 - DNA, 565 bp, Zea mays
  Clone ID: MRT4577_169991C.1
cctgccgggctgtcgctgcgttgctcgcctcgggtcataccgtaagcggggagtggttgcatccgctgcaagcgtgagtatggagcgctctcgctgtctgcgaaggatgctcataatgccagatcggcgggcatgccaaggagaggaataggaatggcacgtgagactgtggaactatagatatgattgcagaattttgacccacagatggacaagcgttgtcaggtggctatgtgaagaacacccatatgcacttgctgcaaagaaaacgtgggcatgctgggggatgcccacacatgttgaggacggccgtgattagttacttgactacatggatgcagacgctctgaagaaaatgaacagaagcaggcacctctgtaagaggctggccatgaagtaccatgcttgattggcatcagaggtcatcatcaagcagattccccggctgcttggtcctggcatcaacaaggcaggcgatgatcccagaccctggttactcaccaggaatacctggagtccaaggtgaacgagactaaggcaaccgagcaagttacatgtcaagaag

SEQ ID NO: 76715 - DNA, 334 bp, Zea mays
  unsure (1)..(334): unsure at all n locations
  Clone ID: MRT4577_169992C.1
attattatatttttttatcttcctttttttggggnttggtttattaccccaaaacttttttaccttataaaaaagttttgcacattgggctaaaaaaaatcctataaagggaaaaacaatttcttctccatttgcatgtttcttttttcgggcattatgttacatgggcccacactccttacattacctatgctggtatacccttacccacaaacgtacatgcgcttatccgatatcatttaattcagggccctaaaacattgcatggggcgaacaacttggcactgtttttcctgggctgcctgggggcaattccgacccctgggccgaccct

SEQ ID NO: 76716 - DNA, 270 bp, Zea mays
  Clone ID: MRT4577_169993C.1
cagcgatgtctccaccaccgctgctgcaacccctgctgctgatgctgcctctgctgaatgtggagccttccggggccacactgagccgcatccctcttcatcgagtccaacctggacgcaggatcctgaacctactgaggggatggagagaaccaggagagctccccaagttgggggccccatcccctggggacaagcccatcttcgtacctctctcgaactacagggatgtgcagtattttggggaaattgggctgggaacgcctccac

SEQ ID NO: 76717 - DNA, 225 bp, Zea mays
  Clone ID: MRT4577_169994C.1
aaaaaaagcaattaaggggcccaacgtggggggtgcttttaaggctcgaaccaacaatggggacaacaccaccggggcccgtcctttaattatttccccccccccggcccggaagttgattgcaacgggggcgagctaagttgaggcaaaccttgggggggggcatggatactcatatggcccacacctttgtatatagacttggggggaccagcgtgggggccc

SEQ ID NO: 76718 - DNA, 712 bp, Zea mays
  Clone ID: MRT4577_169995C.1
cctcgaggccggccgggaacactcccttagacttactgctattacgatatcatctgcctgcttgattccgaacgctttgagatctgaggcatgaatatacctctacctgctttacacccacgtgagaagaacatccgaaccataaggcttctcgaaacaatccattctgatccatgtccctctgtgtgtgacaagtagagctattcagtcaccgagctgcatatactagcaatgcgcgtgcctgggcacagcgctgcccaagctgccgcgcacctgcctcttcgtgttcatccgcctctcctctgtcatgggcgttgaatccgacggaaatctgcgggatcgtcttctcaggcctacgctgacgaggcatctcatccgagattccttgtgcagctgaccaactggtgaccgccgggttccatctctccgtgttcacctgaaccccgtccggttcccacgccgtcatggagatccgagcaaatcagcatgaatgagaaagtggatgatcacccgacgccagctaggtgttctcataattcgcatggagcgcatctgcgcgttgatcatcacggattctggtgacacgcgtgtgcacgcctatagtttgtgctgctgatcatatatgttaactgcaagatggactcgatcctcatataactctaagcacttcttctacacttcataatgcggaagccacttaagctagaatata

SEQ ID NO: 76719 - DNA, 256 bp, Zea mays
  Clone ID: MRT4577_169996C.1
ggaggggggcggggggggcctaaaaaaaaggaaaagctttacacagagaagcaagagatgccagcagatccatctccattcgaatgcggcggcgccggtgatgatttccgggggccagggaacaaccttcttaactacatgagcgggggggggggatcaccttttttttgggggccgcacaacgataggcacgcgctgcggacttgtaaaagtagctcaccctctcgtcatctaatcgataaccttttttccctat

SEQ ID NO: 76720 - DNA, 230 bp, Zea mays
  Clone ID: MRT4577_169997C.1
aggagatggcggagcagatcgccaaggacctcgcgttcacggagaatgcggagccactggggaaaaacgtggtgtccccccgggaacaacaacaacaacttgacccggaaaaataccttgccaccattccacaacttattccaaaaccggaagttgtgggccttgccgaaccggttagccacgccctctttccagaaccttgcaatgtcgccattcttggggggcttaac

SEQ ID NO: 76721 - DNA, 550 bp, Zea mays
  Clone ID: MRT4577_169998C.1
cccgggtcgcccctatcttccggcgcaacgtaccctggacgcagaagtgaggtgatctgtcatgtactaggccgggcagagggattgagaccggattcagaaccacatccaccaaacatgatcctggagctcattctaccagctcgctaaccagctgtctgagcctaaggcaaacccaaccgtcacatcacaagggtggctgcaggagatcaacattatgttcaccattgcaatcaccatcttcaacataaccttcacactaacaactgagcagtctcattcagaaactgcaaaacggatgcataaccggatgcatgaggtgtgtcatggcatatgacatgccacctccgtggagtcctgtctacatttttgtggacgcttacaagacagcttaccacacggtgaacgactggcttggctacaggattatcttatcagaatctacatcactgtgaagagcattctcatctttatatatacattaccgtattgaataggaatgtgtattcaatagattataacagtaatgcccacataactctgcaaataa

SEQ ID NO: 76722 - DNA, 209 bp, Zea mays
  Clone ID: MRT4577_169999C.1
attagtaggataatggcaattctcctagtaatgaacccaaagatagggctgagatcatcaaaaagaatgttctttcaccatttttctttcatgaggagggcgttcaatgctacaggggttctatattttttttatcagaccaggatgtttcttctgtgggtgagtttatccaagctgcaactcttgttatccaaccagctctttacttt

SEQ ID NO: 76723 - DNA, 181 bp, Zea mays
  Clone ID: MRT4577_16999C.1
tggacacaacatcgtcgacaatcacgacctacttctatagcttgttttcgtttcatcctgagtgcgtcggtctactctttgtcccagtctggtgattagaagtctgcaaattctgtctgtggaattgtcacctctccaactttggactctttaagtaaatgcggttggtcggtacacagcg

SEQ ID NO: 76724 - DNA, 402 bp, Zea mays
  Clone ID: MRT4577_1699C.1
ataacacttgcccttcttttggacaatcaaatggagggttaactttcattacgtcgggtgcaaccaacattgatacactgagcatatttaagctacttaaactgaaatgtaaaaccatactacagtgcccgtgtacactaactttaaatagaccgattataattaacaaactgggacgtaaagaactacttaatactaaccagaatgaaaatactaggaagagtactggaaactatactaatcaaaatcaaaatgtagtcggagatatgaaccaagcgctatggatcttcagacaaaaatgacgattagacaacaaatgatgcgggcaaacgaatatagaattgcacatacacatgagtaaaatacgacaactattcatactgaattgtaataacacgttat

SEQ ID NO: 76725 - DNA, 431 bp, Zea mays
  Clone ID: MRT4577_169C.1
atcaattgactctggttccctaaaaggatttcctagtgattgcaaagaagcttcaaagcttgttagtcaacatttctattttctgacttctgatgacggagaatatactatttgaaaactgctatgattcaaattatttctgcagaatcttgtgtgccgaaagaatctggtaattgataagagcatccacactgcatatgtccgagcaatcagatctgcacagcattacatttatattgagaaccagtacttccttggctcttcatatgcttggccatcctatgtgaattcacgtgctgataatctgataccattagaactggccctcataattgcaagtgaattcctatattgatggccaaaatttggcagaacaatttaaccaattgtgaggtcttctgagttctttctctctgcaaacattccatgtt

SEQ ID NO: 76726 - DNA, 328 bp, Zea mays
  unsure (1)..(328): unsure at all n locations
  Clone ID: MRT4577_16C.1
tcgnaaaaaaaaaaaaatatatattaaaaatatttttttttaaaaaataaaaaaaaaaaaaaaaggaagagtaatttaaaaaaataaaataaaacttaaataacgggcgccctctttataggacccattctttctttcccgttcatgcatctttatatctttttttttttttcccctaaattaaatccattgccccccttttttcaccttcttcacttgaaaacccctgtctttccctaactaaatctctttgcaaaacatcccccttcctcccgctcgttttttaccaatttaggctccttacttgatcttctttttccaacttttt

SEQ ID NO: 76727 - DNA, 253 bp, Zea mays
  unsure (1)..(253): unsure at all n locations
  Clone ID: MRT4577_170001C.1
cctcgaggccggccgggttcctaaatcctaatcccctccgcctctccccttcaccccacgtctctctcgccgaagggctncncggccngggtcntctgcttcccttgtatcttcccgggggtgcagcagcagtgcttctactaggagaagcgcaaccgtgccaagagtaaccaggacccctctttattccaagaaccagtacaaaccgcctcttcggcctcttacgagtaggtcaggagtaaggcgatcgttg

SEQ ID NO: 76728 - DNA, 164 bp, Zea mays
  Clone ID: MRT4577_170002C.1
aggtagggactgttttgatcaaaagtgcgtggccatccaacggaaaattttgtgtaaaaaacggaaccaaacatgggcatcaaccctaaacacccatattccggcactataaactcagtcgcatccccgagatcaaaaaccccgacggctccccaggaccccat

SEQ ID NO: 76729 - DNA, 219 bp, Zea mays
  Clone ID: MRT4577_170003C.1
cgagggcctccaaattgttcatgattccaaggtagctttccgtaatccaggaaaaggtttcgcacaaaaatcacctgacatcggtcccgtgaagccccgtttttcatctcgaaaacggcttcttttacaattcatgaaggccaggtcccaagcttgctgtcaaaattgcaacagcagtaccatttccgctacggctctccgggagacacctggggaatc

SEQ ID NO: 76730 - DNA, 635 bp, Zea mays
  Clone ID: MRT4577_170004C.1
gcacctgccattccccttttttcctctccactcacagcggaccggaaaatctctccggcgccgccgccgccgccgccgccggcgaagcgccatcctctccggtctcttctcctcttctcttcctccgtgccttcacctgtctcgccggggcgccacatccccgcctccgaagcaccatcccactcgcaccctgcctccatcgggaatcaatctctccgccgccgccggcgccgccatgctccgcctccgtggctgcatcctcgtggcggctcctctcttcccccgccacctcccagggcccccctctccaccgccccctctccgcggccgccgcgcccggcgtttccccaaaccctagcttcgccgccgacgactacctcgtctccacctgcggcctcacccgagcccaggcactcaaggcctccgccaagctctcccacctcaagtcccccgccaagcccgacgccgtcctcgccttcctcgccggcctcggcctctccggcgccgacgtcgccgccatcgtcgccaaggacccgctgttcctctgcgccagcgtggaaaaaaccctgggacccgtcgcaattgagctcgccggcctcgggctgtcgcattccgagaacgcgtgccttatcccg

SEQ ID NO: 76731 - DNA, 344 bp, Zea mays
  Clone ID: MRT4577_170005C.1
aacatgcctgcaacttcgccgtcgaccttccttcacgaatgtggcgttcgcatccggactgtgccccagttcgaatcgccaaagaccgggtacaacccccaaattcttgcgaatcggttggctgcaaaacaccgtgtacattaacttggtcccttaaagcctgccttggggaatcctttcaaacctggccttttgaaaattattaccagtccatagacagtggagccaccaccaggaccacttgaaatggaaaagcttttgcctgaggaaatagtcctcctagaaagaacactacctgatggaagcacaaaccaaattttattttattaacccagagatcttga

SEQ ID NO: 76732 - DNA, 354 bp, Zea mays
  Clone ID: MRT4577_170006C.1
tatttaatgttgttttattggtttttttttttggatcccccaaacaacccatttatatacaggttcatttcccgataaaacattccaacaaggcctgaggccttcataaaaaattatttttcctggctatcataccaaggaacgaggactgcctcataatgctgccaacctacggaagagaagctctaatcaacttcctgggtggcccaaatgactccaccccaagacccttcttataaacatttgggcaaagttcataagtatcgagcttagaaccttgctttggtttaccaatggcgagcaaaagaaggttcccggactttttcttcataaccttggaccaaagagtatttg

SEQ ID NO: 76733 - DNA, 136 bp, Zea mays
  Clone ID: MRT4577_170007C.1
gtgacggaagacccggtcgaaggtatctggacgcctctgtgttggtgtggaatctaatcggtactgggattcacggtttagagggactagagccagcagcaacccttgctctgattcataccacggacccagtgcc

SEQ ID NO: 76734 - DNA, 1051 bp, Zea mays
  Clone ID: MRT4577_170008C.1
acctcttttccccagtccccacaaagtttctcctcgatcctcatctccctctctcgagtcaagagcagagcagctaccaaacaagctctcctttcgcttccgatccatggagctcgacgccgacaacctgagcgccaccgagctccgcctcggcctgcctgggaccagcagcagcagcagcgacgactggcagaagaagccgtcgccctccgtcggggccaagcgcgctctggacgacggcaccaagagcgaggcctcggggaccagcccggccgccggagacctcgacttcgaccacgaccacgacaccgccgcgcctcccaaggcgcaagtggtcgggtggccgccggtgagggcgtacaggaagaacaccttccaggcggcggcggcggccaagaaggtcgagcagaagcagaagcagcagcagcagggaggcctgtacgtgaaggtgagcatggacggcgcgccgtacctcaggaaggtggacctccggatgtacaaggggtacagggagctcagggaggctctggacgcgctcttcaccaactccctctccgcggcggcagagggcggcggcgaccaccaccagcacgccatcgcctacgaaggcaaggacggcgacctcatgctcgccggagacgccccctttgtgcccttatgttcatctcttcgtgcaagaagctgaggataatgaagggctctgcctctgaggccaggtgatcgctgatccatacataaacagaggctacagacacgccacctgggaacgcggatccaagagcacacacggatcgtacgtgacgaggaaggagggaggagctgtgtggcttgagctctccagtgttgtacaaaggcatgtttctttctgaacccaaaagggagaaagatgtatgaagcgtgtatataaaatcttagctagcagtttgttttcaaactgtgttttgtaaaaaaaaaaaaaaaaaaaaaaaaaaaaaaaaaaaaaaaaaaaaaaaaaaaaaaaaaaaaaaaaaaaaaaaaaaaaaaagaaaaaaaaaaaaaaaaagggccccta

SEQ ID NO: 76735 - DNA, 221 bp, Zea mays
  unsure (1)..(221): unsure at all n locations
  Clone ID: MRT4577_170009C.1
tttttctccttgacatctnccgccacccgcctctacttacatccggccggcgtcttcttcattaatgtacccggcctcttctccaacatcggtgggaaggaaggatctactcattaaggactacacctacgaccataatctgtccatcttcaccgncatctcctctttagtgaatccgatcgtccgagaggccatgggctcggcgcatgatccgntctaca

SEQ ID NO: 76736 - DNA, 411 bp, Zea mays
  Clone ID: MRT4577_17000C.1
agaataaagggtaacgctttggtggcccacttttccaaaaaaattcgggggggggggcttttgttttcgggggaaaaaaaaaaacctttgctttgaaggattttaactggactgggggggggaattcttttttaaaacctggggacttaaaagggggggcacgttttccatgggaacaattattggaccccttcagttttttttaccaaaaacacgctttttgggaaattaaccttcccaaacctttgggccttgggctttggggtgaaaaaggatacaacggggcaaaaattatttgaaaattaaaagtttctggcctggggagggaatttggttttggggggacttttagcctgaaccttacttaaaaatggggggcgggagggaaaaattacccctaaaatttaaaaa

SEQ ID NO: 76737 - DNA, 1496 bp, Zea mays
  Clone ID: MRT4577_170010C.1
cattgggaccctcgaggccggccgggacctcttcaatcccagtcccacacaaagtttctcctcgatcctcatcttctcctactcatctcctccccctccctccctccctctctcgagtcaagagcagagcagctaccaaacaagctatcccctttcgcttccgatccatggagctcgacgccgacaacctgagcgccaccgagctccgcctcggcctgcctgggaccagcagcagcagcagcagcgacgactggcagaagaagccgtcgccctccgtcggggccaagcgcgctctggacgacggcaccaagagcgaggcctcagggaccagcacggccgccggagacctcgacttcgaccacgaccacgacaccgccgcgcctcccaagtaagaactagaccccccatggcgcaagtggtcgggtggccgccggtgagggcgtacaggaagaacaccttccaggcggcggcggcggccaagaaggtcgagcagaagcagaagcagcagcagcagggaggcctgtacgtgaaggtgagcatggacggcgcgccgtacctcaggaaggtggacctccggatgtacaaggggtacagggagctcagggaggctctggacgcgctcttcaccaactccttctccgcggcggcagagggcggcggcgaccaccaccagcacgccatcgcctacgaagacaaggacggcgacctcatgctcgccggagacgtgccctgggatatgttcatctcttcgtgcaagaagctcaggataatgaagggctctgcctctgagtctgaggccaggtgatcgctgatccatacataaacagaggctacagacacgccacctgggaacgcggatccaagagcacacacggatcgtacttgacgaggaaggagggaggagcagtgtggcttgagctctccagtgttgtacaaagacatgtttctttctgaacccaaaagggagaaagatgtatgaagcgtgtatataagatcttagctagcagtttgttttcatttgtatgagctgccgaaggctgtaaaaaatgaaaaagaaaaaagaaaagggaatgagaaattgactagaaaaaaaaaaaagggcggccgccaccgcggtggctgattgtgatttttaatttcaccccctttgcagtatgttcatcttttcgtgcaaaaagctgaggataatgaagggctctgcctttgaggccaggtgatcgctgatccatacataaacaaaggctacagacacgccccctgggaacgcggatccaaaagcacacccggatcgtacgttacaagaaagaagggaggaactgtgtggcttgagctctccagtgttgtacaaaggcatgtttctttttgaacccaaaagggaaaaaaatgtatgaagcgtgtatataaaattttagctagcagtttgttttcaaactgtgttttgtatgagcgatcgaaggctgcaaaaattttaagaaaaaaaatgaagagggattgag

SEQ ID NO: 76738 - DNA, 348 bp, Zea mays
  unsure (1)..(348): unsure at all n locations
  Clone ID: MRT4577_170011C.1
ctaagccattgcccccctctatcggctcgggcgagcccaaggttgcaggacaaccctgttngtgggagagagttacgaagaaacactgtnctacaaatcaaaccgatcctaaggatgaagcggtctatccagctgttgagctggacttagagtcggatcttgtcttacactagggagaggacctgtgattcgagctatgtgcgacgcttaccagatgacgcattcgattggacccaggctaatttaatagacctgggcggctaccctataatgtgcgattcccacccgatctggggactcgaccgatgtgcgtcaaggttacatcagcctatggcaacacaggacatt

SEQ ID NO: 76739 - DNA, 456 bp, Zea mays
  Clone ID: MRT4577_170012C.1
atggcccctctgaagggttcgacagccgccccagagcatgcagagtcagggatgaccctgggtacgtccgttacatggccgaggctcgggctatgctcccaaggtaccctaggacatttccgagaccagcgggaacgactttgtaacggaatcccaccggagggaggcatcgagcccttggaccctatcgaatgggtccgggtccggaaaatcaccttcaggccgcatgagggaacaacaaggccgaccgaggcatcacaaaaagaattaagacctcagaggagtcaaaccactcctccgaggcctcgggggctacacccggcgggtgcgctcgcgcgcacccaccggaacaaaatacaaccgagaagggccagtccccttgaaaaatccggcagaacctccaagcgagtgcccacactccctttgaggctcaagggctactgtcgggtaccgtaa

SEQ ID NO: 76740 - DNA, 607 bp, Zea mays
  Clone ID: MRT4577_170013C.1
ttttttttttttttttgctacatatttttatatccgttcgtagacactagacatgatattatcgagctggctcgcgagctaaacgagccagctcaagttggcaaacgagtcgagccaagttggatctttagctcgttaacataacgagtcgagctgagccagctcgttattttaacgagccagctcgtcgagccgagtcgagccagctcgatatccacccctgctttcggggtacgtagttcagtcaagggctttgaaatgacaccgaaattcctcacacatttccggtaataacccggccaagccaagaaagctgcagagctctttctgattagctggcactggacactgaacaataggagagatttttgctggatcagtaattttgccctattcactaatgttattacccaggtaggcagtctggcaattggcaaaggagcatttgtagagctgtatcttccatcgggtcaactaaaacacgggctaatatatgattgtgttagaatgagatcacatgtaaatgttttgggagggaaataattgtccatgctgagaacaggggaacggcaagtgaacatggcaataaactcgagtcacatgcact

SEQ ID NO: 76741 - DNA, 951 bp, Zea mays
  Clone ID: MRT4577_170014C.1
atgccacgtcttctcgagactacagaaccagtgcagcgacttgaggtagccccgcgcatgacccaacagtgccaattaagtgcgacggtcacgggtcagtcagccgtggggatagacacgacagtcggtatgaccataggcggaccggcggtaattgcagcaacaggcggaggcagcggcccaaccaccaaccaggccctggtcccacctacaggctcgcatcctcccctgaagcggggttcgaaggctggcccctcgaagggattcgacagccgccccagaacatgcagagtcagggatgaccctgggtacgtccgttacatggccaaggctcgggctacgctctcgaggtaccctaagacatttccgagaccagcgggaacggtttgtaatggaatcccaccgaagggaggcaccgagccctcggaccctatcgaatgtgtccgggtccagcaaatcacctgcaggctgcatgagggaacaacaaggccgaccgaggaatcacaagaaaaattaagacctcagaggagtcaaaccactcctccgaggcctcgggggctacacccgacgggaaaacaacactatttaccccgttccgactactgtgccaaccaccagggtaagactaacaacagtgagtcacagcctctcccgagttcagcctcgggcgcaacagggagctccgcctcgcccgaccccacgcctcagcctcaaccttggcctcgggagaaggtctccgcctcgcccgaccccaagccttggcctcaaccttggcctcgggagaaggtctccacctcgcccgacctcagcctcggcctcgggaggagtcacaacctcgcccgacctcagcctcagcctcgggaggagtcacaaccttgcccaacctcggtctcggcctcaggagaagtcaccgcctcgcccgacctcggcctcagaccgactacgctatag

SEQ ID NO: 76742 - DNA, 170 bp, Zea mays
  Clone ID: MRT4577_170015C.1
gcagcctctccatggctaacgctccctgtcctcctcacggcgcgcgcccctgcgtaacctccccagcaggccgacctccactgctccatgccgacaccccctgttcctcttctactctacaccattccctctcccacgccacattttatctctgatctatggcacacggc

SEQ ID NO: 76743 - DNA, 746 bp, Zea mays
  unsure (1)..(746): unsure at all n locations
  Clone ID: MRT4577_170016C.1
ggccgcttttttttttttttttttcggggatattttggattacttatggccagtgatatgctggtggtaaactcatagctagcacgaaacccacacctaaacaaagaaaaaaaagacaattccaagttatccaatagcgccgtcatttttgatatatcattaacacaatcgctatcgccattgctgttaccactacattacaccttctcagccttatgagccacgcccccaaatatcttctcacctcccagctcccccctcacaggactaggctctgcacttccctccgcaaccggagcttcgacaacaaacagtggctcgccctgtacatcatccttcgggctcaaccgccaattatgtgcattctgattcacactaggctgtcttcctcttctctttggcaaaggcggtggcacagtggctagctcactggctgcagaactcgtccgacgtctcatctcacgaaacatttcctcgccatcttctgcgactggacgcgcgtcttgaccgggaaagtgagctgcaggtagtagtgttgtcggtgtaaacgaaccccgagggctgtctagatcctctactgattgcttactcgagagcggaggagaggctgtgacgggttttcgtttggtgaggtttgcaaatgtagaggttgctgctgctggaatggcccaagtctgtctcttgtcgttcttgggtaaggggagntgggggttccaggcggcggaagcggctgacctctacccata

SEQ ID NO: 76744 - DNA, 1066 bp, Zea mays
  Clone ID: MRT4577_170017C.1
accttcacttccttcccttccaattaaggaccccattgcgcaataagggaacatgctctcactcccactcccgtccctaccaccccgctccccgccatggcagcactcctcctcctcccgctcgtcctcgccgccagcctaggcttgggcaatgccgacccggctccggccaccatcgtgcacaaggacggcacgacctgcaccctctgcgcgtcctgcgacaacccctgcaacccgtcctactactacccgccgccgtcccctcccccggcgccggtcaccacgccctgcccgcccaccacgccgtcctacccttccccctccggcggaggcggcggaggcggaggccccgtcatctacaagtccccgccacctcctgctgcttccggcggcctgggtggcggaggcttctactacccgccgcccaccggcggaggcggcggcagtggcggtggcgcgtcgcagcagggcggtggtgtgtacccgacggcggcgccgccgccgcccaacccgttcctgccctacttccccttctacttctacagcccgccgccgccgttgcactccggcgcgcgggccctggccgccacctcgccgtccgccgcgtctctgctgccggtgctcctcctcacaagcatgctgctgctgctgctgtgtcagacgccgtgaggggtcgtccagatctgcagagcgagccatcattcaatgcgtgctgcatgcatgcgcgcatgcgctgtttctagtttctacaaggcggtgatcgatccagctggcgattcaattgtggttgggggtggcctgtgtattctaccggtactgaattgtaattgttgtcttttttttacgattcggttcatttcctcgtcctctttcttcttctctttcggattcgtagcacagattgtacaaggaggggggcagcagttagtaataatctatagcatacccttttcatgaagaagtctgttcgcctagctctctagctttctttctcacctctctctctctctgttctacatgggatactgtgcctattttaaataattgttttcattatgaggttggt

SEQ ID NO: 76745 - DNA, 522 bp, Zea mays
  Clone ID: MRT4577_170018C.1
aacaggcaaaatggttttatcaacatcaattcaacctattcaggtaccatagacaaatcgagggcagaaaccggcaaaaaccggacatttctcacaaattggcccccttttgagttagcgcccaccctggggtccaaacccaaacaaggcatgcccctcaaatttgaattacattactgaaaaccggctccaggggaggggaaaatagggggccccaaatagtttggaataggggatgagatagagggtcttggggttctttacacttgaccaaccatactttggtttctgggccaaagggcaacatttttggaagggaaatctcctccaaatatatttaaagcactcccaattggtacatttaccccacttttggctggtttctttatcccctttaaggcggcccttggtgacacacccccaacataaatgaccgggattggggaataatgccccaatagttccacaaggtcctcaataaatcctaaccctttggccttcacattaacaccctgaaccaaa

SEQ ID NO: 76746 - DNA, 723 bp, Zea mays
  Clone ID: MRT4577_170019C.1
actggaaaaacagactatctgcatgtggaggaacacatgctacgcaccaacgctaagcagtaaacactagatgcttctgaggaggctgtcagtatacagtaaatacaacagtaaatatggagtcaaaagatgaataggaagcatttctaacagtcctgagactctttcttttccatacatagttgttcggttatcttgaacacaataaaatctctcaaagccaacttctaagctgagaagattcattagtacacaggcaaatgaaagatagtctatgtaagaaaagatttaggaacaaagaatcagtccaatcattactcacctccgaaaagctgtcgccctacagtaactctagtgtaagcttgaaggaagctcaaataacacgaccaatctaagagcagatcctggatgtaggtgtcgcggccatgcggactcctttggcggtggcgcagtggagggtgactgccttgctctcctagacgtggatggcgcaggcacctatggcaagcgatgaggcctggataaaggagtacaggggaggattggagacggaaggacgacggcgctgtcgtcgaccttgacagcatcgccccgtcgggggtgagtcaaccttgacgcataaatctccttccatcacactgctcgcttggttctagaggagtcacgtggtgtctggccaaggacacgaactgcggaggccgttcctttggctagaatccggaa

SEQ ID NO: 76747 - DNA, 356 bp, Zea mays
  Clone ID: MRT4577_17001C.1
ggggtggggttttttttttttttttttttttttttccacaaaaagccccatttcatattataaaaaacaaacatttgtataagtttgtccactcgcaatgccgctaaggcgcctaaaaaattaacataaaaaccttgctttaaaaaaaatgacccaaaaacctgggtttatttgaaattattttttttgccgcaaaaaaaaactgggggtttttaaccccccttacctttgaaagaattaactggtttgacaacccccaccgccggggggggttggacaccccccaagccctaagggcccattttggggggggggaggggaactttccccaaaggcccccacccactaaaatttcg

SEQ ID NO: 76748 - DNA, 269 bp, Zea mays
  Clone ID: MRT4577_170020C.1
atcttggataaagctgacccaatggatgatcctaacagcctttggaaccaagatgttgcaggtcagaccaggtcggccacaaatcaaaactgtgttcgaccatatcagtctaatcactcagcaactattttttgtgtgtgtattcagtgcagaagggtcaacaggcttcagagaaggttcagcgctagaatttcagaacaaggtcagaaaatattaccttctcagactgaagctaataagaaggaacatgaaattggagcaattagcca

SEQ ID NO: 76749 - DNA, 356 bp, Zea mays
  Clone ID: MRT4577_170021C.1
gccagacaccacgtgactcctctagaaccaagcgagcagtgtgatggaaggagatttatgcgtcaaggttgactcacccccgacggggcgatgctgtcaaggtcgacgacagcgccgtcgtccttccgtctccaatcctcccctgtactcctttatccaggcctcatcgcttgccataggtacaaccatgctctcccacctcactttcctctcacacttcatttttcttggatctgaaagcaaccagactccgtgccgccgataaaggtgcctgcgccatccacgtctaggagagcaaggcagtcaccctccactgcgccaccgccaaaggagtgcgcatggccgcgacacctaca

SEQ ID NO: 76750 - DNA, 115 bp, Zea mays
  Clone ID: MRT4577_170022C.1
atgtaagcatatttgataaaatggcaattccaaataccaaagcagaggtttaaatttctacgagttgatctaacagtagagctgtaaacctttgttttggtacttggaattggaa

SEQ ID NO: 76751 - DNA, 500 bp, Zea mays
  unsure (1)..(500): unsure at all n locations
  Clone ID: MRT4577_170023C.1
cgatgggtactcgaggcggnccggagtcagtgatgcacgcaagaagtctccttcttctttacatcgaattcctcgccttcatctagctgagttcccggcctgtctacgagcgaggtgaagcagcaggctacatgcatgccgcgttggacgagctccggctcgacctgatgaccatcactcgccacgtggtgaatgagcagagccggaaccccgtgcccctcggcgacttcactatcctgctctcccacatcctcctcgactgctagttcggcgcctccgctgtcgacactgcctctggtcgccctgctcatcgggttgccctgagcagatctccctgaacgtatacgtgagatgaatttggacgtcctgtacaacgaggtgttcgtcaaggctctcctctgcgtcgaccgcccctgagtgcttgtctccaaggatgacaaggagcgtacgttcttgatccctcagatgtgtggcaggtcctgcgcctgttttgatcccct

SEQ ID NO: 76752 - DNA, 145 bp, Zea mays
  Clone ID: MRT4577_170024C.1
ctacagataattcagtattcttagattaagtcactgacgaaatcatgctgatggatcttagacgcaaatttgtttggggattgctgcctaacaagtaacatagaccattgttgtctcaatgcctcatacgaagctgggccgattg

SEQ ID NO: 76753 - DNA, 319 bp, Zea mays
  Clone ID: MRT4577_170025C.1
gtccacactggtgcttttgcatgggagactaatccggttcaagttccagtcgggacacgagaacccccaccattcattgacagagatgaaagtctgccataagtttgacggattgcaactaagtaaacgtcgtccaagttttagggagactggtggtacagttacagctggcaatgcttctagtacatatgatggagctgcggcattacgtttagtgagtgggcagaaagctcaagagcgtggccgtcaactccatggacgggtaacaggttaagctgatgcatctcaagctccggaactttttacaaccagtccagca

SEQ ID NO: 76754 - DNA, 316 bp, Zea mays
  Clone ID: MRT4577_170026C.1
accttgtctccaagtattggagcctgaccttctgtgtctgctgctcttctacttgtcaccatgaagttcctggcactccttgtgttgcttggtgtttccactattctagtctcttgccaggacgcagggacagacactgctgacacttctgattctgctgatggaaccactgactctggaactcaggcagacgcggctgatggacagcaagatgctgagtcctctgatggaactagtgatgccggcgatggtgatgcgcctgctgaccaggatcaggaacagtcagctgtgcttgcattggttaacacactgaaag

SEQ ID NO: 76755 - DNA, 238 bp, Zea mays
  Clone ID: MRT4577_170027C.1
tctgtttttgcgtacgatcccatcgtgcggtacaggtaatatacacccaagctcgatggctctatgtcgaggtgcaactcctgtgcatagggtactgcaagatggtgcagcacaaacaggtgtgtgccttgcgtatgctgaccaagcattggatgcaggtgcagggattgcgtgtgaaatgaatcttgtcgacgaatgggaacaggcaccagatctaccttatatgctggatcatgca

SEQ ID NO: 76756 - DNA, 233 bp, Zea mays
  Clone ID: MRT4577_170028C.1
aaacgctgggagggatcttaggacgcgggtaactgataacaggcaaaggtggatccacataacatgataaagtatatgtgatatgaatcagtgccacagattcttataagagccaagctaccatgcgttaccatgtccaacggagagcgggcgctgtatataaacacacacaggtcggggcaagtaaaaattgggttagtagccgctcaagagcacgatagagctaccagatg

SEQ ID NO: 76757 - DNA, 169 bp, Zea mays
  Clone ID: MRT4577_170029C.1
aacccattaaataaatccagataacgagggcaccttttaacgtacaataacccctaggatagccctaacaacagcgaaataaactggaaaaagaaggagggaagcatgtacatgtaagatggaacagacacgacccataatgcaaattgcactatgaaaaggcgaaaag

SEQ ID NO: 76758 - DNA, 344 bp, Zea mays
  Clone ID: MRT4577_17002C.1
aaaattgtgcttttttatttttgggatgcctcgaacattgtacataaaactttatcattgggcggggaccaccaccaattataaaagagggcccacaatgatgggatgctggaaaaacgcagaagggcctggcaaagaaagttggtaggggggaaaaaaccgttgaaggtggaacatggtgccggcgttaggcgcagagagccaaaggaacggggaccgctggggttgtggctaaaaggtataaggcctcacaccagggagctggttgaacgctagtacgggcggctgctgaaaagaaacaatagagtttaagggtgccggtgggccgaccgtaataaaaagaa

SEQ ID NO: 76759 - DNA, 438 bp, Zea mays
  Clone ID: MRT4577_170030C.1
cggacgcgtggtgcgaaatcgaaacccaccctcgagcgacgccaagcggccaagacggagaggagaacaattggggacggggaaagtccagggggaagccacggccaccggcgcgatgaaaccgtcgctgtcgaagaagaagggcaagaagaagaagaagtcctcgctgccggccgccgcaccggcccctccgccggcggagggcgctgcggatacggaggcatgtcccccgctgcccggaaccataaccctagccgctgccaccgctgctgcggcggtggtttcggagacggagtccagcagcagcggcgaggcctcgacgtgtccatccgcctgcttcaccgcaagctcgtctgggaccgcgtcctcgcactccttctctgccttgtcctcgtcggcgtccacagcttcgtcgtcggccgccggcgaggagcggcg

SEQ ID NO: 76760 - DNA, 831 bp, Zea mays
  Clone ID: MRT4577_170031C.1
gatatttcatatatgcatgttgcgaagattaattacaatcacatatacacatggaaggaaaagagatcgttctagtcaaatatatatagtctatgtgtgcgaccttagatctcatatgttattccaaccttaagtagttggcctcttggaatggatagcatcttctctccattccttgagttcttccttaggaagctgtagacgtagttgacaataatcttcttgaacaagttggcatgaggcttggctactacttcactctccccaattatgtaaacaacaccattgtccacctcgcgttggatgatcttttgatcttcctcgatcttcaacatctcctccaggttcattttccctgtctggaaatgtgccagtctactgctcatggagaccggatgcattgtgagctcggagaatgactgggctggtgtgagcatctcctcggcatagacagcatgtcctgacgagtgcttctcccaagaaaagctgtccacccgagcactgtggaagacgatcttgaacggctcatcaccgacaaccccgtagaggttgaggtccctgacgtakactgggaggtactcgacgaggacgccgacgaaatcagcggccgtctcgagcgcgtcgsggtacccgtacctcgccacgcaacggaacaccatgaactccttgggctcgacctggcggaagaggaagcggtccgtgacgtggacgtggggcaccggcaggctcttcaccgtgatgaagacgacgacggagtggatggtggggatcttgccgacgaggtgagggaagatgggcgggatcccctgcaccagctcggtgtagaagagg

SEQ ID NO: 76761 - DNA, 293 bp, Zea mays
  Clone ID: MRT4577_170032C.1
gcagtggaacaacgcagagtactctgttttttttgttcttttctttgttggccggcgcacgcccgtgtggaattacctctgcgtttttccagcaggctctgacgtaaactttggcctgcgcaaggggaaaaaagactggacaagtgagttaaaatccaaatgccgcccttttgttggggttatatagtaaaatacgtgcctgattattgtgcggctctgggaggaacgtgataaccccgcgtcctctgcgttggtacccctgcttaggggcgagttccggcgccctggcggcc

SEQ ID NO: 76762 - DNA, 710 bp, Zea mays
  Clone ID: MRT4577_170033C.1
aattcggcacgaggcctcgatcagtgctcccgcagtagcatgccgcgtcgcgccggcgcgcgcaacaacctcggttcttcccgcgcactcgcggcggccgggatgcaggtcggtggtgtggcggtgctgggccgcgacgagggggagacggaggcggtgggcagggctgcgggcaaggtgccgcataagctgcgacgtcagccagccgtcagccgtgcagccagattctgagagctctggggagggattggtggcgcaggacgacgggccgcggcggccgccattcgacatcaacctcgccgtcgtgctcgccgggttcgcgtttgaagcctataccagtcctccggcagatgtgggctggcgcgaaactgatgcggctgactgtcagacagtgttcctgtccgatgtgtttcttcgtgaagtatacgatggacggcttgtcgtcaggctgaagaaaggcataaaccttcctgcaatggatccatggggtactagtgatccttatgtaattctacaactgaatggccaaactgcaaaaagccaaattaaatgggcgacaaaggagccaacatggaatgaagatttcacgtttaacattagaaaatctcgtgaaaatcttctgcaggttgcagcttgggatgcaaaccttgttaccccacacaaacgcatgggaaatgctggattataccttgaatcattttgtgatggta

SEQ ID NO: 76763 - DNA, 262 bp, Zea mays
  unsure (1)..(262): unsure at all n locations
  Clone ID: MRT4577_170034C.1
tggataacccacgccagaaaanncataaagacacctttcaaaaaacacaagagccccccctcccctttntccctcctctattctttttaccactactccctaccacattgatctttaaagccacattattacacacttttttcatgcttaatcacataatatagtatctccctatcaatcataattccaaaaccacttatcccgtctcattcttaccatgccaacttcatatcctttttctctatataccctaatattttta

SEQ ID NO: 76764 - DNA, 701 bp, Zea mays
  Clone ID: MRT4577_170035C.1
atagatgtcttggtgattgtggcgatacacgcatgtcaacgtaggaggagcaccaccagcacgtggtggcgaggagcgacatcccactcagcgcttgcaaccatggataagggcattgaagaagcacttgaacaggctcaatgcgcccaagaattgcatgctcgacaatgttggcggagcttttgctcccaagccatcttctggacctcacaagtgcagggaggggcttcctctgatcctcatcatcgggaacagggtccaggatgctcggaactaccgtgaggtcatttcatatcctgatgcaacaccatgaacttgttgatggcaaggcacacgactgacaagacctaccctggtgccgtcatgaatgtcatttccatccctaatacaatggagaactacaggatgctttatgacaccaatggccgccttccggcttcacccaatacatgcatgaggatgacaagcttcaagctctgcaaggtgagggccgttcaaattggacagaacggtatcccctatctgaacacctacaacgggcataacatccgctaccccgacccggtcatcaaggccaacgacaccatctggatcgatctggagacccacaagatcatggacttcatcaagattgacgtcggcaagctgcacatgcagacctctgggtagaacaccgtgttgtgtatgtgtgatcaagaaca

SEQ ID NO: 76765 - DNA, 272 bp, Zea mays
  Clone ID: MRT4577_170036C.1
gctttttctactccgaccagctccccagcgtgtgtttctacaaaatgttggggcccaacccaaccacaattctcgcgccgtacccaccgtcccatggcataccatcctcgactcctacacccattttatctttttcctttaggacgcctacttcaccttcaaatcctattttttgaaacaaacgaagccccatctcccctcactcaataaccccatcttcgcattccaagaagcatcctacaccttcttacacgtgcccaaggatctcccat

SEQ ID NO: 76766 - DNA, 235 bp, Zea mays
  Clone ID: MRT4577_170037C.1
tttttttttttttttttttttttttagcaagtgtaattactgtattcattcctgttgaagatgcctccaacaatcacaacacaatgatacgtgtccaatgtgcacatcgaaaaaacaatgtaattatctgtgactatacattacacaatcatttcatcttacatttggaccttacgttgctgcatgtatacatacatatacattacatagcgtcctcagcttcccatcgtcgttg

SEQ ID NO: 76767 - DNA, 1112 bp, Zea mays
  Clone ID: MRT4577_170038C.1
ggtaccacccctcgaggccggccgggcacaatgccaattgccagcaacccatccatactttcagctgttgatacaaaaagagaagagagaatggcggagccaaacccagagttgagtggtcttattactcaaacaaagaagaaaaatatagtgccaaagttcaccgaaatcttccccgtggaggacacggcctacccttacagcgccttcatcacctccgtccggaaagaagtgatcaaatactgcaccaaccatacaggcatcgtccagcccgtgctgccgctggagaagaatgtccccgagctctggttctacaccgagctcaaaacgaagaccaggtccatcacgctcgccatacgtatggacaacctctacctggtcggcttcaggacccccggcggggtgtggtgggagttcggcaaggacggcgacacccacctcctcgacgacaacgccaagtggctcggctttggcggccggtaccaggacctcatcggcagtaagggcctggagaccgtcaccatgggccgtgccgaaatgaccacggccgtcaactacctggcgaagaagacgacgacgacactagcagaggcggcggaggaggaggaggagctgctgctgctgcaggcagcggctgaccccaaagccgaggagaagagcaacctggcgaagctagtgatcatggtatgcgaggggctgcggattcatggtaatgcaaggggaggagaccttatccgtttggcttccccgtgtcccccaaggtagacgaggggttcaaaaacccccaaccggtgcccatatcggcgctgaagggaaagcaggtgcaaaaatgggacaggatctcgaaacccgttttcaggtggcccgtcgacccgcccgttgagatccccgacatgaaggatcttggcatcaaaaataaaaacgcagctgcccagatcgttgcgctcgttaaggcccaaaactagtgctgctgctgctcctacatatgagaccaccgaggaggtctttgatgatccatccacgtggtccagtaccagtatactcctagtgctagtatataggagtatgttcctgtgcaaataaatacacccggggtacgtggtgttcctcgt

SEQ ID NO: 76768 - DNA, 294 bp, Zea mays
  Clone ID: MRT4577_170039C.1
actgcatacactcgaaatcggcacgaggctctactgtgtgcagtttcacctgtacatacatgttcacctgaacaaactgaatattcccattctagcccaagagtaccatttctcactggccaagatctctacatatatgtaatagtgaaaacccagtctccagtctgatagtgagagcgatgcacactaaggttccaaacggaactgcagaggaagggcatagctcactcacaaatattactttattactttggtgatgaatacaaaatgatcagtgtcttagaaattattcat

SEQ ID NO: 76769 - DNA, 1175 bp, Zea mays
  Clone ID: MRT4577_17003C.1
ccccgcgtccgaaagagctctgaaaagagatggctgtcccacaagttgacaagaaaatgcttggtgaacttgaagccatgggattcccaactgcacgttcagttagggcactccatttttcaggtaattccaatcttgaatctgctgtgaactggcttctggaacatgaaagtgacccagatattgatcggctaccactggttccaagagaaataagcattgaatgcggtgacacatcagatgaagtaagaaatgacgttgaaggaatgagggatactgtgcaggagcagaaacctaaagaacacactgaaactgggagacagaatgagacatcccagctggaacgagaaccaaatgcagatgggcaggaggaagaagatagaaagaggatattagcactatataagcaaaaacgagacgaggaagggagagcaagagggcggatacggagtcaattacaagaggatcagagggagaggattcgagctgctaaagaccttatggaagcaaagagaagtctcgaggaaaatcaaaggaagcgggtgatggagagtcgggtagcagatcaagaggaggagaaaagagcgagggagaggatacgccagcgtatagctgacgataaggcagaaaggaggagacggcttggtctgccgcaggatgatcctagggatcccgccgcaaccatgacgcctgcaaaggtaaagcctgctggacgcgccgtcgttgcgtcagagcagctgagagactgcctgcgaaccgtgaagaagaaccacagggatgaccctgctgcagtggcaagagcgtaccaggtgttgctcaagattgttggcaacgtagcgaagaacccaggggaggagaagttcaggaggatccggctcagcaaccctgtgttcaaggacagggtgggcagcgtgcgaggcggcgtggagttcctggagctgtgcgggttccgcaggctcagcggcatcggctacctggtgatgccgagggacaaggtcgacgtggctctgctcaccgccgccggcgtcgagatcgcgtcggccttggagaacccctacttcggcctgctctccaagtgaagcgaacggccgctgtcgctgcttattgctaaaccatgatgtactgtacagctacaatctggacgatgatatttgatccgttcccctcttgccttc

SEQ ID NO: 76770 - DNA, 623 bp, Zea mays
  unsure (1)..(623): unsure at all n locations
  Clone ID: MRT4577_170040C.1
gccggccggggtacagtaccagagngnnnnnnaaaaaaaaaataacaaaaaaaaaaaaaaaaaaaaaaaaaaaaaaaaaaaaaaaaaaaaaaaaaaaaaaaaaaaaaaaaaaaaaaaaaagggggttcaatttccttccgcaattccattccttttcttcgttccaagcccccggaaatttaaaaaaatgggggtcggtaccggccgggccccgggggggggcctttccccgggggtgggcttttttgggaaatttaagcggcttgggcggaacggggtcccccaaagggggcaccttaagggggaaggcaagggggaaggggttcccgggttttccctccccttctaacttaaagggaagctgggggggaaaaaagggtttcaacccgtggggctggggggagaaccccaaaaacctggggggtttcgggcagggaaatttgttaaacgccggggggcacttgtttgggggggccggaatgttcttcccgggggggtggacaaaggcggggttgataaacgcccccaaggggaacaaccccggaaattggaagaatttcgggttcccgacccggtttttcggggacaattaattcttgttcaataactggaaaatccggggg

SEQ ID NO: 76771 - DNA, 1023 bp, Zea mays
  Clone ID: MRT4577_170041C.1
tgggtacctcgaggccggccggcacaatgccaattgccagcaacccatccatactttcagctgttgatacaaaaagagaagagagaatggcggagccaaacccagagttgagtgatcttattactcaaacaaagaagaaaaatatagtgccaaagttcaccgaaatcttccccgtggaggacacggcctacccttacagcgccttcatcacctccgtccggaaagacgtgatcaaatactgcaccaaccatacaggcatcgtccagcccgtgctgccgctggagaagaatgtccccgagctctggttctacaccgagctcaaaacgaagaccaggtccatcacgctcgccatacgtatggacaacctctacctggtcggcttcaggacccccggcggggtgtggtgggagttcggcaaggacggcgacacccacctcctcgacgacaacgccaagtggctcggctttggcggccggtaccaggacctcatcggcagtaagggcctggagaccgtcaccatgggccgtgccgaaatgaccacggccgtcaactacctggcgaagaagacgacgacgacactagcagaggcggcggaggaggagctgctgctgcaggcagcggctgaccccaaagccgaggagaagagcaacctggcgaagctagtgatcatggtatgcgaggggctgcggttcttcaccgtgtcccgcaaggtagacgaggggttcaagaagccgcaagcggtgaccatatcggcgctggaggggaagcaggtgcagaaatgggacaggatctcgaaagccgtcttcaggtgggccgtcgacccgaccgctgagatccccgacatgaaggatcttggcatcaaagataaaaacgcagcagcgcagatcgttgcgctcgttaaggaccaaaactagtactgctgctactactgcgtatgagaacaacgaggaggtctctgatgatccatccacacatcaagacttgttttgttgctctgcttccacgtggtacagtagcagtata

SEQ ID NO: 76772 - DNA, 1756 bp, Zea mays
  Clone ID: MRT4577_170042C.1
attgggacctcgaggccggccgggtacaatgccaattgccagcaacccatccatactttcagctgttgatacaaaaagagaagagagaatggcggagccaaacccagagttgagtgatcttattactcaaacaaagaagaaaaatatagtgccaaagttcaccgaaaccttccccgtggaggacacggcctacccttacagcgccttcatcacctccgtccggaaagacgtgatcaaatactgcaccaaccatacaggcatcgtccagcccgtgctgccgctggagaagaatgtccccgagctctggttctacaccgagctcaaaacgaagaccaggtccatcacgctcgccatacgtatggacaacctctacctggtcggcttcaggacccccggcggggtgtggtgggagttcggcaaggacggcgacacccacctcctcgacgacaacgccaagtggctcggctttggcggccggtaccaggacctcatcggcagtaagggcctggagaccgtcaccatgggccgtgccgaaatgaccacggccgtcaactacctggcgaagaagacgacgacgacactagcagaggcggcggaggaggaggaggagctgctgctgctgcaggcagcggctgaccccaaagccgaggagaagagcaacctggcgaagctagtgatcatggtatgcgaggggctgcggttcttcaccgtgtcccgcaaggtagacgaggggttcaagaagccgcaagcggtgaccatatcggcgctggagagctcattcaacaaagatgaatggtacgatgactttcatcatggtaactttacttttgatgatgcttctcctctggcagcagaattgcaggctatcccatggccacaatcctacaagacaccccagttgcccatctatgatgggcactcggatccaaagaaattcttgatgagctacgaggcacaaatatcctcgtatgggggtaatgccgccatcatggcaaagtccttcgtcatggcagtacgaagcgtggcccagacatggtactcttctcttcgtccaggaacaattacatcatggcagaagctcaaagacatgctggtcactagtttccaaggttttcaaatgaagccagtcactgctcaggccttgtttcaatgcacacaagatcatgaggaatacatttgggcgtatgttcgaaggtttttgcgcctaagagcacaagcgcccacagtgcccaatgaaattgtcattgaggccatgatcaagggatttttgccaggacctacagctcaatattttgccaggaagcctccacaaaccctggagaagctccttcagaagatgggtgagtacatccgggccgacaatgatttttgccaaagaagggaggaagcctacaggttttctgagatggccaggggcttcggagggagacttcatcccaggcatgtccggtcaattcataactccaatgccaatgatgaaagggccagcaatgttcagcataaccatcacagttctcagtcttcgagcatgcagcagacttctttcagaccaccaacttcgaggggcagaggaagaagttttagtggaggaagccattccccagcttccaagccccagttgccaccaccaccaccactgatccacaatcaacagccagaagggcgcaatcatactcagcaacagcgcgaccttcgggaggagtccgaagctcgcacagtcaacaacattgtgcttgagtcgaagcatatttactaa

SEQ ID NO: 76773 - DNA, 296 bp, Zea mays
  Clone ID: MRT4577_170043C.1
tggtgcggtcctgtcaatgtccctgcaggggagatcgccacgggtttctattgtttgtacttggctggacgctaaagcgacatgggatgggaagccgaccgttgcctggctggacgactactgtggtggctgcggcaacaaggacgtgaccaagccccccttcaatagtatgggcgcatgcggtaacagtaggaatttgctaggatgggctgggttgtgggtactgctcttagatcatacaacgatgagactgtgaagagcttcggcaagcccaaggtggtgcacatgacggacat

SEQ ID NO: 76774 - DNA, 240 bp, Zea mays
  unsure (1)..(240): unsure at all n locations
  Clone ID: MRT4577_170044C.1
tttatttgctgaactcccagaggcgatggaccggngatacaagggaactatgcgagttctgcttgtactactgcatgactatcctgaatttctttgtgactattacttcagattctgcgatgtgatttctttaagttgcatttaaatgcccaatgtcattcctagtgcttctccacgttacatgagacttgcagacccttttaccccctaatcaaatgaatgatttgttggcttgaattt

SEQ ID NO: 76775 - DNA, 1773 bp, Zea mays
  Clone ID: MRT4577_170045C.1
ggaagaattcgagtccaagtcttggagctctcgcattaggcctcgaggccggccggggttgttgaccgccgctggagactgaagggaaagaggaggaagaattcgagtccaagtcttggagctctcgctttaggtgaagtggatctgacctactgtaggggaaagagcaaagtacattatcttgtacaaatgtgcattacgctacctttatcataaaccaaatcatctctgtttctgggaacagcaaccagtaatttcccatgcaacctcttggttgatggatgttcttcctgttgggtcagaaagagaaagtcaaacagatagtcaccctttactcatggagcatgcgattggcatcccaaggcatgatgttgcttctacttcgacacctcatcgagacaataatgatggcatggatcaactgccccgtgattcagaaagttcttctggaacaactgatgcatcttactctccgaatgctcctctagcaaggagagatgataatcgccttcggcgtcagcaaagtctaaattctggcttctggatatcaattgaactagctgtaaatcttagccagattatagctgctatctgtgttctgtctgtgtcaaagaatgaacatcctcatgctccattgtttgagtgggtcattggttatacaataggctgcattgcaactcttcctcatctatactggcgctatctccagcgcaaccagctggccactgtgcaagggtcaaatcagaactacgttccagacaacagctttgagagtagttcttttactgggatttcgccccctcctgtgtctgaagctggtgttgtaactgtatcaaatggagtcttgagaaacaatgtggttatcacaaatccaagggcccaagcttttgctgatcacttcaagatggcgctggactgcttcttcgctgtatggtttgttgtgggaaatgtgtgggtgtttggtggacattcttccgcccatgacgcacccaacctgtacaggttgtgcatagccttcctcactttcagctgcattggctatgcgatgcccttcatcctctgcgcgctgatatgctgctgcttaccctgcataatctccctgatgggcttccgggaagatctggacgaaaacagaggtgctacttcggatgcgatcaacgccctgggcacatacaggttcaggtcaaagaagcctcgtaacggggaggcaaacgaaggtggcggtggagtctttgctcctggaacggacaaggaacgcgctgtttctgctgaagacgccgtttgctgtatctgcttggcgaggtacgtggataacgatgatctccggttgctcccttgcgggcacttcttccacaaggactgtgtcgacaaatggctcaagataaatgcgctgtgcccactctgcaaagctgagatcgacgtcgtcccgaggaccgctcctccagccattggctttgggcgccgcgacagccacaggagggtaggaaacgacattgaatcacaacggcttccatgatgtatagtgagacagcaacttgccttgggcgtgtgtgtggcttccagaagagcaccttgtaaattatatagtgagagatagaaagagattatgtcatggaccaacgagtccttacatgatccagcaagtaatcgcctgactgaaaatatgtcgttgttgtcaatatgtgtgaatgtgtcccaaaaaaaaaaaaaaaaaactctccaaaatgtaccttgtcatagctaccgtgacgtcaattaactaatctattttat

SEQ ID NO: 76776 - DNA, 562 bp, Zea mays
  Clone ID: MRT4577_170046C.1
cgggtttttatcatccttttatattagcgcgtttaggttgatccatgggtttggcacccgttccttccttgcccccggcgccatctttgcttccgtgacctcgcccgtcgatttttcttttcggttgtttattgcaaaacttgggcgcaagatagtctctgattcgttcggctttacgcggtcgaggcgattgtttggcggccagggtggaactgccccttgcccgtggttggtgaggcgattcgtggtcgagagcttccgtttctcttcggaggtgaagtggatctgacctactgtaggggaaagagcaaagtacattatcttgtacaaatgtgcattacgctacctttatcataaaccaaatcatctctgtttctgggaacagcaaccagtaatttcccatgcaacctcttggttgatggatgtccttcctgttgggtcagaaagagaaagtcaaacagatagtcaccctttactcatggagcatgcgattggcatcccaggcatgatggtgcttctacttcgacacctcatcgagacattatgatggcatggatcaact

SEQ ID NO: 76777 - DNA, 310 bp, Zea mays
  unsure (1)..(310): unsure at all n locations
  Clone ID: MRT4577_170047C.1
gaaacctgacccaccacgaactgcctatctgcatccatctttgggccaaccaatgaccgggccaaccacacctgggctctcccctcgagatgctttcacggtgtactgcaagaaccaggaaccttcctgttccctccggcgcaaggggctcacttttaatttctcgagaggggacgctcctttctcggggcagccttctctgcttgttgcctgcactcggctgtcctcttttgattcttggcaccgcgttaatttcgcaaatgcggcagggtgtcngctcaagaggccggcttctgcgtcttgggcgctt

SEQ ID NO: 76778 - DNA, 476 bp, Zea mays
  Clone ID: MRT4577_170048C.1
actttataaaatagattagttaattgacgtcacggtagctatgacaaggtacattttggagtgaacaaagctacagctacagggacacattcacacatattgacaacaacgacacatttttcagtcaggcgattacttgctggatcatgtaaggactcgttggtccatgacataatctctttctctctctcactatataatttacaaggtgctcttctggaagccacacacacgcccaaggcaagttgctgtctcactatacatcatggaagccgttgtgattcaatgtcgtttcctaccctcctgtggctgtcgcggcgcccaaagccaatggctggaggagcggtcctcgggacgacgtcgatctcagctttgcagagtgggcacagcgcatttatcttgagccatttgtcgacacagtccttgtggaagaagtgcccgcaagggagcaaccggagatcatcgttatccacgta

SEQ ID NO: 76779 - DNA, 1068 bp, Zea mays
  Clone ID: MRT4577_170049C.1
ctttaggtaaaaatttccgttccgctagagcgatgctcccgtgtttttatcatccttttatattagcgcgtttaggttgatccatgggtttggcacccgttccttccttgccaccggcgccatctttgcttccgtgacctcgcccgtcgatttttcttttcggttgtttattgcaaaacttgggcgcaagatagtctctgattcgttcggctttacgcggtcgaggcgattgtttggtctggttctggaacctgggctgctcttgctcttggtggcgttgagtccaaatcttggagctctcgctttaggcggccagggtggaactgccccttgcccgtggttggtgaggcgattcgtggtcgggagcttccgtttctcttcggaggtgaagtggatctgacctactgtaggggaaagagcaaagtacattatcttgtacaaatgtgcattacgctacctttatcataaaccaaatcatctctgtttctgggaacagcaaccagtaatttcccatgcaacctcttggttgatggatgttcttcctgttgggtcagaaagagaaagtcaaacagatagtcaccctttactcatggagcatgcgattggcatcccaaggcatgatgttgcttctacttcgacacctcatcgagacaataatgatggcatggatcaactgccccgtgattcagaaagttcttctggaacaactgatgcatcttactctccgaatgctcctctagcaaggagagatgataatcgccttcggcgtcagcaaagtctaaattctggcttctggatatcaattgaactagctgtaaatcttagccagattatagctgctatctgtgttctgtctgtgtcaaagaatgaacatcctcatgctccattgtttgagtgggtcattggttatacaataggctgcattgcaactcttcctcatctatactggagctatctccagcgcaaccagctggccactgggcaagggtcaaatcagaactacgttccagacacagctttgagaagagttctttttactgggatttcgccccctcctgtgtctgaaac

SEQ ID NO: 76780 - DNA, 1608 bp, Zea mays
  unsure (1)..(1608): unsure at all n locations
  Clone ID: MRT4577_17004C.1
accgccgacaaccttcaataacgtatttgacttgggattacacacactgctactatttgttttctcttaattcactagccatttcggctaaccagatcatcaaagaaaaacaatggaaattaaatcagctagcgatgatgcaagctacgcgcatcactagaacgacgtagtggtaattatcgatcgattaatgcctagttaatttaattaaagacgactgcacatatatactaggcgccaattaatgatctgtgcgtgcgtatgttttgaactgcacggaagctaggacgtacggtcgatcaggaggtggtgacgaacggtttgtacactttgaggtcagagacgatcccggcaacggagcctgcggcggaggcgacggtgatgacgaggcaggcgacgctgagcagctgcaggcacacccaccgcgtgctccacctgggcaccttcttctgcacgatgtacatctccacggggaagtagacggtgagcggccagaaccccagcgcgcccaggagcccgaccacgtcgttgaagaagggcagcagcatggacaccaccgtcgtggccaccacgaacgccgtccgccacgtcagccggaacaggctgagcttgtagcaccggccggcggtcccgagcgggagcgggacgtcgnacctcgcccgtgatgtagcgggacttgggccacctctggcgcgcccacttctcgacgaaggcgaacagtggctggcagtagacctggtaggcgccgacgaggtgcacggcgatggcggcgttggcgacgtcgaggagccagaagggctcgtagaagccgaagcccgtgaggaggttcccgggggcgttgtccccgaacgcggcgtaccccatgcacccgcacagcatgtagaagaacgtggtgacggccacgctgacgacggtggcgcgccgcatgaccttggactcggacggcggcggcgcgcggatggtgtcctggatctcgatgaggatgagggagtaggagtaggcgaaggcgatgtcgccgaacgcctgcaggctgcgccacatcttgtcgaccggggtgaccgcgccgacgctgatcnccgtcaggctgccctgcacgcccttgttggacaccacctgcgcgatgcccaggcccaggccgatggtggagtaggtgaaggacatgacggcggcgaggatggagagccacgatatctggtcgaagtccgggatctgcgagaagaaaatctgcacgacgccgaagatgatcatgtagggcgtgctggagatgttgcaggggtccccgtgcccctccacgtggaagcagttcgccctctggatcgccagcatgctaatagaggcggcaatggtgtagcctatggcgactccgacgatgttggcgtactgcaggaagccgcagaaccagaccttgacgccacctgctcggcgaaacgacccacaccagggaaggagatcgaaacgagagagtcagctctttgctctgcaacggccgggcggccaaagggggggaggggattcgtcaagcttccgcacgtactgagattggcgttaaccgcgtccatgtacgtgtagttgcgcttgccggtgcaggcgtcgccggagcccggccag

SEQ ID NO: 76781 - DNA, 804 bp, Zea mays
  Clone ID: MRT4577_170050C.1
cggcgcgcggcacaatcggctcgagcaagccggccgcgtcgggacacgcactccgcctccgctccgctgtctccaccggtccgcccctcctcccctcctttgcgcctccccgaatcgcatcagcctttctcctcgtgtcgcgactcgcgagcgaaaccctcgccatggcggaggcgaccgacaccgccgcagccacgccgccgccagcgccagcgatggcgactttgtccccgcctcctaagtcggggatcccgccgcggtacaacctggacgccaagtgggacgcgtgcctcgacctctccatccgtcgagttgcctactcctccctcgccggcgccttagcgggcctcctcctcttccgtagccctactactcgctgggcatcagttacccttggggctggtgtggggataggggctgcatacactgaatgctcatacttgttcagtggtggtcctccaaattggtcacccaaagtatcaacaattccttctgcacactctgaaggagaagacaagtaaacccttgcccgttggatggtggagttgtggtgtgtgtgaagtactggctgtttgtgctggatattgcactgcctgtgccctggccataccatagcatgcattgagttttctggcaaacccattgaattccccaattgtggtctagcgaggaagtgcctttgcttggtaacttgttcgcgccatacttctggggctgtatcatcgccaaaccatgcgacgcttacttatttcatttggttctctgcatgcttctccaaaaaaaaaaaaaaaaagcggcctaagc

SEQ ID NO: 76782 - DNA, 366 bp, Zea mays
  Clone ID: MRT4577_170051C.1
ttttttttttttttttttttttttttttgggggttttttttttttggggttttttttttttttttttttttttaaccaaaaaggggttattaaaacatggtgggaaaaaaaaacaagcctttgttgtttgagggggccttagaataaaagggtcgacacgacggtaacaaggtttcacgcgggggggggcctatttgtgtaaaagggggaacccgcagggggggtattaggcccggtgtgcgacacaaccagatagatatgctccacctcaaattttattttttaaaaaaagcccttcatgcggggttggtttgatatggacccggggggtgttcaaaaacaatgaaatttggggggggtgttttt

SEQ ID NO: 76783 - DNA, 630 bp, Zea mays
  Clone ID: MRT4577_170052C.1
gccggccgggtcgggatctctcctctaccccttttcctctaacctttagctttcctccctccctccctccctctcctctctccccctcctctaacaaaaactactcccagccattcagatactaacctgctgacctcgctgctgctcgccgccgacacatatgtccgctctaaggtccaagtaccatgagtccaccgagcgtgacgtactacctggacgacgcaacctacagcaaggaactttgctggcctactcgagagcgaaacccagaacgacaccatcgtaagaatcatctctcgagcagtacgaagagatcctgcctgatgatctcctcactgacgaaaacactggccgagcctaggtatacggagttgctaccttccgctatccgcacacagcaataatagcttgctccgaacccccaccacatactgatggcaggcgagacagccgtagtctagcttccctagtcgtgccgagatctaggctctgcctcactccccagcatggaggatctataaactttagagtgatgaaatccttcagccattacttaataatccaaagcggacatcaacgctatttttccttctgcatgccaccatccctcattatgccgtcccataaaga

SEQ ID NO: 76784 - DNA, 515 bp, Zea mays
  Clone ID: MRT4577_170053C.1
aaacctcccatcctttctcttagcaggaggtgaggaaaggggacggaagcacgcagaccgggtcggatccaccggcccgcggaacggatcgaggccaccggcatcctcggctcgcgtcgcgtcgcggcgccgagctcgaaatccccggatcggtgcagctgccccctgccgccgcccgataacgcggcgggagggtggtggcctgtcgatctcgcggcgggagctggttaactacctgccaatttgtggatttgtgtgcgtgcttgattttggtgcgtgtgtggtggtgttgagtcgccggcgtggggtgtcggagctagggtttgggcgttcaggatgacgcgccgggtgcggcggcggacgtgcagggaacgggagggtaaggtggtgcggggcgcatcgcgtgttgtttcggctgggccggaaggcgaggaggatgcggcggcggtggaggtggactggagggctctgtcggctacactttgcttgagctctttgcgcggatgatctaccgc

SEQ ID NO: 76785 - DNA, 342 bp, Zea mays
  Clone ID: MRT4577_170054C.1
gttaatgtgctccatgctaaaactggatcacgtttgggtacatcctcatctcattgtgcgagattcaaaatctcgatcacttccatccaactcgctacttcttcaatggctaccactctttcaaatataatttccctgtctacacaacgtcttcacttgcaaactcctgcaattacctaacttaatcaccttgcatcaaatacatctttgcgctcctgacgctttacctaataactccatacctacaaaccttccaaacagattcgcaagctgaatcttaaatgaaaactgcccttaatgctaacatacagcccatcacatataatgattacgaccacgatg

SEQ ID NO: 76786 - DNA, 534 bp, Zea mays
  Clone ID: MRT4577_170055C.1
gactaactatgaggaaagcggccgcgcccgcaggctcgggtcctgtatagcgggcgcgctccacgcgttcggtgaccaactagcgtcctatattgctcctgggaggccaacactggctgccaaaatcttcagctttcttctgctccttagaaccttctgcaagtgactgcaccagcaccgttgggccacagtgctaacacgctcctatagcttcctttcttcccgcatgcctgtcaccaacggtggcttcagtatgagggagcccaatttttgaaccctgcacgatccaaccggcaactccagcaggcgtgttaccattgtcacacttgttcctccaacaacctggatgacctattgacagctgtacctttggtgcatttgctggcacataacatgctggcacatcatctacgacaacttgtgctgggaaaccttgctggctactcttatgaacagcagtttgttccattcatccacctggctgcattgaactctgctgcttatttgcagcaacaactaccattcatgaaagta

SEQ ID NO: 76787 - DNA, 2190 bp, Zea mays
  Clone ID: MRT4577_170056C.1
cctcgaggccggccgggctgccgtgtacgaccacactgcgctcaccatgtgtacaatgtattctccctagccgaaccgtatcagtagttcagtagttcttccctcgcgttcactccccagcgtgggaaaatcccggaattttcttgtttgtccactggttttcttgcgccaaaaccaggtttctccccgttgccgtggcagaactctgttcttgcccagtctagaagatctgcaccgttccaaccaccaactccggccgccaagcatatatccagcgcggcgaagaattcccaacgcgaaagccaaaacctcttcacttcacttcacgtcgacacgtgcggggagaatatgcgcgcgacaatcccagccctgtcgctcctggtgacgccgcggctcccctcgctcgccgtgccgctggctggaggccgcctccgcgtgggcggtcgtcctcggacccgccttcgcgtggcggcgccgacgtccgtcccaggggaggcggcggagcaggcggagccgagcacgtcggcgcccgagtccggcgagaagttctcgtggagggatcactggtacccggtctccctcgtcgaggacctcgaccccagccgccccaccccgttccagctcctcaaccgcgacctcgtcatctggaaggaacccaagtccggcgagtgggtcgcgctcgacgaccgctgcccccaccgccttgccccgctctcggagggcaggatcgatgagacggggtgcttgcagtgctcgtatcacggatggtcattcgatggctccggcgcctgcaccaagatcccccaggccatgcccgagggtcctgaggcccgtgcggtgcggtcaccgaaggcgtgcgcgatcaagttccccaccctcgtctcccaggggctgctcttcgtgtggcccgatgagaatgggtgggagaaagcggccgccaccaagcctccaatgttgccgaaagaatttgaggacccggccttctccacggtgacaatccagagggacttgttctatggttatgatacgttgatggagaacgtctctgatccgtcccatatagaatttgctcaccacaaggttactggacgaagagatagagccaggcctttgacattcaggatggaatcaagtggtgcctggggttactcaggagcaaattctggtaatcctcgcattactgcaacttttgaggccccttgttatgcattgaacaaaatagagatagacacaaagttacccatttttggcgaccagaaatgggtcatatggatttgctctttcaacattccaatggccccagggaagactcgttctattgtctgtagcgctcgaaactttttccagttcacaatgccaggaaaagcatggtggcagcttgttcctcgatggtatgaacattggacttcaaatttggtctatgatggcgatatgatcgttcttcaaggccaggagaagattttcctagctgcaaccaaggagtcttctacggatattaatcagcagtacacaaagatcacattcacgcccacacaagctgatcgatttgttttagcattccgcacatggctaaggaaatttggcaatagccagccggagtggtttggaaatcctacacaagaagcattgccttccaccgtcctttcaaagcgcgagatgctagacagatacgagcagcacacgttgaaatgctcgtcctgcaaaggagcatataatgcattccagaatctgcagaaggtattcatgggagcgacagtagtttgctgtgctgccgctggtattcctccagatgttcagctcaggttattgatcggtgcggctgctttggtcagtgccgctgtagcatacgcattccatgagctccagaagaattttgtattcgtggattacgtgcatgctgacattgattgaaagattcgtgaggatctgttgtgtcgacatcactggctcgcgagtcgtgtctgtagtctagggctctaggcgtctagctagggaaagtaactttttgccgggtataggtcatattgctcacatatgtattttgtatagtgtatgcactcaactgtagccgattcagtgcgaaaatatagtttttatgttactatctattggattaaaattgtctccagatccttttagcatgtaaaatgccatttttcaaatggaagttctcaattgcgcccctagact

SEQ ID NO: 76788 - DNA, 115 bp, Zea mays
  Clone ID: MRT4577_170057C.1
cctcatcaactacaaggatgtcgacgacagcagcaagacttcgctcatctaggagtgcctgcaatctagtcacagggccggttctgcgacagtatccagagtccaatctctcaat

SEQ ID NO: 76789 - DNA, 757 bp, Zea mays
  unsure (1)..(757): unsure at all n locations
  Clone ID: MRT4577_170058C.1
ccggccgggatagcatttcaggaagcgactcgatcgcgagcgacacgcacgtaggcacgttagtaggaagctcaaggtagaagaagcaccagtgcctgatcgatggcggcccacgctctcctctccggacggagctgctgggccgccccgtgcaggcggccgtctctaggacgccgaagaaggaaggcgaccgttcgatccacagggccagctccagccctccgggcaaccaaggcgaccacaggctgctgcggttcccgctgaacgagtcacctctcctacctccatgggacgctgcccgcggactattacttctacccgctgggcctctcggacccggaggccaccgacggtcttcatcaagcccaagtggctggtctaccactaggtgatcaacgtgcggtacgccatgctgtgcgcgttgcccgacatcgtcccgcagatcttcggcaagatgggcatcatcccgccggacaccgccctgtcgcggatcttgacggacgtcatcccgcccgagctcacctaccactactgtgtcgactcctacacgatcttcgtcatctagatgctggctcatggggttcatggaggaccgccggctccaggactggtacaacccggcctctcatggaaagcagtacttcctcgacctcgagaagttcctcgacgggtccggcgaccgtactaacccggngggcccgtcttcacccggtcgacttcgtcaagaccgagaaggagatgaaggagctcaagctca

SEQ ID NO: 76790 - DNA, 470 bp, Zea mays
  Clone ID: MRT4577_170059C.1
tttacaaagtgatgagtgtactagttccattgtctggacatgagctagagtatgttctttgcttagaactagtacactcatcactttgcgtagaatactcatggggtccatgtgcagaagttattgttgataatgtaggatatggcttattcagatcatatccaagaacatctacctttcatccaggattccaatttcctcaaacttctttgatatttcctacaattcaaagatgtctttcctcacaaaaacaacacggtcgcagttgcaagaacacttactaatctcttcctcatgacaaaggcaaattgcatctgctctgcagttacacataatgtgagctacatagcagtcacgtttgcatatcccacaagaactgtggcatcaatgtctgctttatagcatgtacgggcacccattttcacaagcaaccaacgacagcggtgttgaaccgcatcactgcacaaagg

SEQ ID NO: 76791 - DNA, 3374 bp, Zea mays
  Clone ID: MRT4577_170060C.1
tactcgagagcggaagcctgaagggattgtcacaagccgtttgaggaggcctcgggccgggaggccgcgccgagatgatacgatcaaggagaccggttctcttgagctggggactgcaaaggatacgtggcttcagtcattgtgctctggatttttagatcaagggaccaatgcctccaggataatggcggggaaggacggagtttctctgaaatctgtgtcatacggggcaaggctgcgcaggagttgtgatgcatcactgagagaggcagggtccatgagagacccattcttgaaacacagagtaaagaaatttgatctatctagcctagattggattgatgagattccagattgccctgtattttctccatcaacccaggagtttgaggatcctctggtttatctcagcaaaattgcccctgtggctgcaaaatatgatatatgcaagatcatttcacctgtctctgcttcagtacctgcgggcactgtactaatgaaggaactaggtgggattaagtttacgaccagagttcagcctctccgtcttgctgaatggaccaaggatgacaagtttgccttctttatgagtggaagaaaaaacacctttagggaattcgagaagcaggcaaatatacaatttgaacggagatgctctcgagccgcttgtcttccatcaaggtatatggaagaggagttttggcatgaaatagcttttggcaagatggagtctgttgagtatgcatgtgatatcgatggtagcgcattttcttcttcttctcatgaccaacttgggagaagcaaatggaacttgaagagattctcacggttgccgaactctacgctgcgtcttctcagagctgcagttccaggaataacagatccaatgctgtatattgggatgctctttagtatgtttgcctggcatgtggaagatcattacctgtacagtattaactatcaccactgtggagcccccaaaacatggtatggtattccaggaagtgctgcttctgattttgagaaagtggtacgtgagcatgtatatgatcacgaaattttatcaggtgaaggggaaagtgcagcatttgatgttctgttgggaaagactacaatcttcccacctaatattttactggatcatcatgttccagtctatagagccatacagaaacctggagagtttgttgtaacgtttccccgagcttatcattctggtttcagccatggtttcaattgtggtgaggcagtaaattttgctacgggcgaatggtttcctctaggagcagttgccagtcaacattatgcacttcttaagaggataccagtattaccttatgaggagcttctttgtaaagaagcaacattttgtgctaatgagttttccttgtttgaacacggaaatgtaacattaactggaggcacacatatacagagctatatgaagggtccctttgtgcagttgatgcggttccaacaccgtgttcgttggttgcttgtgaaaatgggtgcccgtacatgctataaagcagacattgatgccacagttctctgtgggatatgcaaacgtgactgctatgtagctcacattatgtgtaactgcagagcagatgcaatttgcctttgtcatgaggaagagattagtaagtgttcttgcaactgcgaccgtgttgtttttgtgaggaaagacatctttgaattggaggaaatatcaaagaagtttgaggaaattggaatactggatgaagtaggaaaacaaatgtctcaaagtgatggctatagcacgcatccttacttgtccaatggcattgaccacaatgctaaatactttccatactgcaagatcctaattgatacatcccctgaacttcgtaccttttcagaggtagatgttcttggatatgatctgaataaaccataccctacattatcaacaataacttctgcacatggaccccatgagtattctacacaaagtgatgagtgtactagttctaagcaaagaacatactctagctcatgtccagagaatggaacgcttagtgtttatcctttatgtacatctgatcaagcattttcaactgacaaattggctgctcaggatactgatgattctgactgtgaggtatttagagttaagagacgatctagcatagttatggagaaaagatgttcagaagatctaacaataactttaactgagaatcaggctttaagacggttaaagaaagcctgttcagatgacagacaagagaacgcaactgaatcacattgccttgacttcatttctggaaatacagataatttcatcaatcgaagcaaacaaaaaatgaatgtagatcagctagatgcaaaaaatgtggaagatgaagttgctttcggccagaaatctatcggttgcagttacctatctccatctgtagatcttgggccaaaacgcttgaaaattcgtggcccatccttcccaagcactgtttctgaagtggaaatatcttataggttccaggaggacattgacttggctagtcagcatactcaatgaagtatgctgctcttggtgctaactgctaacatcaatcgtaacttctggaagatgaaagctcttttttcattggatggttcagaactgattctatctactggtctccaatggaggcactgttatggctggattttatgattctattgccaggtcataggcgatttttctgatgatccgtagctgcacatcacttatttcctttctttgtaggttttccactgtgaataggttagtctactacttttaacaatttggttcattctttttccaccacagatacacctgtacctagaatgctttaatagatcctcatacgaaatggacattgtacattttttttaacaagtcagtcttttgctcattataatctggaaccatttgcaattcttattcttgttcagttgttggcaccggtacatttgtcctcagatgtgttgataactttgatatgttaataaatcgtttgatgctgacaggaattcacttccactgactgtcatgttgcatatgcaacaaagtagatgctttgtgataatgttgaagcgcatgcaaatgctcgaatcaatcatgttctatagaaagtggatacaacagaaggaataaaggagcaacttcttgctgttagatcctggtctactgaaatctgtcacataagatttactttctcttttaagttcaggatataatatttggttagacaattattttaatttgatcatatgtctggttggttagcaaagtaggcaatttgatttgtcccctaagtagcttctatttgtagaatgaattcgtccattataattctccataatgctttaggtagtctatgcag

SEQ ID NO: 76792 - DNA, 1345 bp, Zea mays
  Clone ID: MRT4577_170061C.1
cggacgcgttcctaccacaaaccagcggaccttcagcttctccaccgcggctccgcctcttctttcacggctccaccacgcactaaccctaaagcttccccgcgttgccggcgatgagcagccttcgagccatctcctccctcctccatatctactccacgtccgccgccgccagacgaggagccgggcggctgggcttcgcgccgtcgcccggcgggagattccgggtaccgtcgaattccggtccgcccgcgttcgtgttggacgaggtcgcgagggcggccggcggggttcggaggagggcgtccacgcgcgcggcgagttgggactcggagaaatcgccgtacgagacgcttgagctgggtagggatgcagacgaggagaccataaagactgcctacagaagattggccaagttctatcaccctgatgtttatgatggtaagggaacccttgaggaaggggaaaccgctgaagcgcgtttcattaagatccaagcagcgtatgagctgttgattgatggtgaaaggagaagagcatatgatagagagcatcatgtgaatccgatgaaggcttctcaagcatggatggagtgggtaatgaagaagcggaaagcttttgaccaacgtggtgacatggctgtggctgcttgggctgagcaacagcaacgcgaaatgacgctacgggcacggcgtctctcacgctcaaaggttgaccctgaggaagaaaggaagctatttgccaaggaaaagaaggcatctatggaattctacagcacaactctgaagagacatacccttgtgttacggaagagggatattatgcgcaagaaggcagaggaggagaaggataaggagatcagtagactcctagcggcggaagggcttgagttggatacagatgaagatgaaaacaagacttttctggggtaacgcttttgatacttaccctaatttattctcttcctccattccagcaatcgttcaagatgcagtgacaacgagtgcacaaggcgaaacagttgggctcgtcggaaaccctgtaatctggagatgtgcgccaacaaatattggatcgaaataataatctcccggggcgaaggttagcattttaccggagagcagaaaggaaaggcaaatgaaggatgtgtgagggctgtagtagggttgtaatatgattcaatcacaaaatgagtaaatttcgatgtagtagggttgtaatatggttcaataaaaaatgagtagatttcggtggcgggcctcgattttatcccgagtctcattaagctatgtcacatgaaaattgcacgtttaggtttcccctctcgagttcttattcaggttct

SEQ ID NO: 76793 - DNA, 764 bp, Zea mays
  unsure (1)..(764): unsure at all n locations
  Clone ID: MRT4577_170062C.1
cattgggtacctcgaggccggccggggacgacgatcccgacgccccattctgcccgccatggccgcccacgacgcctccttccacccccgcgatgccctcgcaaacaccatgagcaccatgatccagacaaccgccgtcggcgccgttgtggccggagtccagaacactcttcgcaagcagaatgtcggcgccatgggtatcctcacccgctcgggtggcatcattgccctgtacgccggtgtcggagctacctaccaattcaccctcgacgcgactagcaacctgcgacgcaaggacgactgctacagcgaggccattgctggtttcgccgctggatgtgctctgggtgttggcaggcgaagtcttccctttatgctcggtgccggagccgtaacctcgaccgccctcaccgcgttccgatacaccaacggcctccgaggcgtcggggacatcagagagcaggtcgacgacgatggcgaggttgagcgcagggaggagctgaagaagctgcgcaggcggccactgtccgagacgctggagcagctgggcgagggacgaggaatctacggccccggctacgaggagcggaggcggcagcgattgctagaaaagtacggcattgatgtcaaggcagcccagcagtaggcttagaagcaccctcgtctttttcttttgagtttacaggttcaaaatacccgattgccaagattcgggctgcngtctggtttgtgtacatactacgttagcaattggagcattgtcg

SEQ ID NO: 76794 - DNA, 330 bp, Zea mays
  Clone ID: MRT4577_170063C.1
attcggctcgagaatgtattgccagcacattttttgctccaggtgcgcgcttcctataatggtggggcatctgaggcaagctgtgctgccaaatcttgcatgctgggtgacggttctaaaatgacgtaggcgaggacaagggtcacttatggcattacatctgctaatgaagcacatccgaccaaggtgtttgagttcggataacgtacacagatactgctttataggaggatgctcggtagctaggggcactgtaaatcaagacggcatgcgccacatgttgcgttcgtatatctgctgtccgggattggactcactacctgtctatcc

SEQ ID NO: 76795 - DNA, 808 bp, Zea mays
  Clone ID: MRT4577_170064C.1
gttatttagattgagattgaaatagacaaaagtacagggaagttagtgcaagtcctggtcttcttacaccagccaacgaaaagaaacgacatcgccaatccctagcaggagacacagctccggcttgcggcctgggatccggtccagtatggagccaccccggcgatccttgtgcgtcgttgcctctgaagtctcctcagcggccggatcggacgccgaggacgacaggtactgcagcgccaactctgccctcggcacgcccagctcgatcgctacccttctcccctcctccgacttctgggaccaccagatggacctcctcgacgaccatcccgccaccgccggcttccccaagaaacaccagctcaggtgcctccaaacgctggcatcggcgcagtcgtggccggaaacggtttctcctccggcgactgccggagtcgacgacctcgcgccgcaggggtcgagtcctgcttcaccatatattcctccgctccctcgtcacaaccaggtgcatggatttggtggcaatgatttatttgatgatatggtccaagagatggaacatattctgctcaattcaggggagccacatggaaatggatcttttatgaatgatcgtagaaataatgctctccaggctcaccatttcagagatggcagcactactgcctctacttctggtacagatgatgcctttgtatctcctgttccacagtattcttcaagaatcgattgggtgggagggttgtgggggcaaagcaaggatctggtgatgtttcttttggtgaacgaattggtggtgtcaaaa

SEQ ID NO: 76796 - DNA, 403 bp, Zea mays
  Clone ID: MRT4577_170065C.1
tttttttttttttttttttaaatgaataaagttaatttttagatttaaggctgtacatctggaggacaaaccaagtgtcggaggctcccagaagaatctcatacatgagaggctttacatgtggactatggagtaaatacaaacatacactaaaaactcatcaaatctgctaattatatactctgtggtacaacacgtatcctctttgaatatctttgcctgttctattttaaaacctgaataaacatcttttgaaaatgcacatttcagtgagtgttccctcttgtatcctcatgtaagatggaaaactacataaacttgtctttttgctgtcagtttacccggattttcactgtttggtgtatgtcaatgggttggaggaaagttcaatatatgataacag

SEQ ID NO: 76797 - DNA, 733 bp, Zea mays
  Clone ID: MRT4577_170066C.1
gatgtaaaacctactgtttcctttttctttccttttacaatgtagtgctctggttcattaattaatttcatttcccctctgaatatcccctatatatctataatcaccctctcgagaggaaccagcacaaactcagagaactaccgtgctactagatacatagattgtcagctgtgagaagactcccatccccacaagcccatcatgtcttgcataggtggttcctcctcttccacggcgagcaacaagagaaagggaaaggagattgtggtggaggtgccagctgtggtggaggaggagaagcagcagcaacagcagagaaagggaaaggaggttgcgttggaggaggtgccactgccagcagtggcggagtcttacgacgattcagatttagattcgggttcgggatgggatttctatgaggaggaggaggactcgaagaagaaggagcaagagaggaaggaaaagaaacctgcatggctggatacgctgctgagaaccaagttctggggacccgtgcaaggagcacgggtccaagaacagggcagaccagtgcatgttctgcctcaggtgccccaagctgagttgccctcgctgcgtccacgaccagcccggccaccgccttctcaagatccgccgctacgtttaccgctctgtcgtccacgcttccgacatgcaggagctcggcattcgacgtcttcaggatacagacatatgtcatcaatggcgagaa

SEQ ID NO: 76798 - DNA, 527 bp, Zea mays
  unsure (1)..(527): unsure at all n locations
  Clone ID: MRT4577_170067C.1
cgcggnacgcgtgggcggacgccgtgggcgagagcgtgggcaccgcaccaagcagcacccaacaagacggcaactaagcatacgggcctaccttgtgtgaacaaagaatcctattgtgcttcctcgggtgctggctgaccttcagtagtagcttcttcggacggcttggatgggtcctcattgattgcttcgttgtaattcaataatgaagttttttggctgatgtatgtggcctcctagaaataagaagttatatttccaaaaaaaaaaaaaaaaaaaaaaaaaaaaaaaaaaaaaaaaaaaaaaaaaaaaaaaaaaaaaaaaaaaaaaaaaaaaaaaaaaaaaaaaaaaaaaaaaaaaaaaaaaaaaaaaaaaaaaaaaaaaaggggggggccctttaaaaagaacccaattttacttccccgggcttgcaaggaaaaattttttttttggggcccccaaaatcaattcccggggccggggtttaaaaccggggggaggggaaaaccccgggggttcccaaatta

SEQ ID NO: 76799 - DNA, 936 bp, Zea mays
  Clone ID: MRT4577_170068C.1
ctggttcttagtcatttgacttgcagccaccaagttgtcgtatttcttcccactccggttctcgtctgctgctccacgccgatccaactcggagtccccactccctcgaatcgcagctgctgcagcggagcaccagggtcttgcctcgatttgcggcgaaagcacgccgttttctggtggtttgtagcgccgagcggttcttgattccggcgctggttttggtgctattgaggaggaggtgggggttttctttcgattggaggggtaaaagttgccgcctttcttgcattccactctgttcttggaccggatttcttctccctgcacgaactcgagctcgagctcggctcgggcttctccaacctccaacgcgtagtcccgtctagttttcttacatacaggtggcattttagtgcttgcttctttcaagaactgcagcgtcttgattactgctttacctctttgcggatggatggatgcgattgtattgaatcactttggcaggccgatgatctcttaatgaagtaccagtacatatctgacttctttatcgcacttgcatacttctcgatccctttggagctgatatactttgttcagaagtcagctttcttcccctaccgatgggtactcatacagtttggtgcgttcatcgttctgtgtggggcaacccaccttataaacatgtggactttcactacgcataccaagaccatagctgtggtgctgacagtggcaaaagtggcgacagccgttgtgtcatgcataacagctctgatgcttgttcatataatccctgatctgctgagcgtgaaattgagggagaggttcctgaaagcgaaggccgaggagcttgatagggagatggggataataaggacacaagaggagacgggaagacatgtgcacatgctcacgcacgagataagaagcaca

SEQ ID NO: 76800 - DNA, 444 bp, Zea mays
  Clone ID: MRT4577_170069C.1
gatacaaagggggaaagggacccaaaaaaaggcaaaaaataaaacaaaaaatttaagaaaaaacccaattcactctttagaacaacgggggccttccacaaaaaaacccaaaaggggcaccgggggggccagaaaaaacaaacaacaagaggacctttcccttcttaacaaggaagggaggaacaacaacgacccccatgtaagcggcggacccaaaaaaaaacccaaaaccaaagcccatgcccaggcagggaaaggccggcaacttcccccgagctatggcacgcaccggaaccactgttacctttcccaccttctgccgggggggccctttggaacccttttcgacacccgcagccccgagaagcagaaccgaagccggaagggccttcaaaacaaagggaaagctttaaaaaaaaaacacggggacccccacgggaaaaa

SEQ ID NO: 76801 - DNA, 879 bp, Zea mays
  Clone ID: MRT4577_17006C.1
cattgggtacctcgaggccggccgggaatacagcgtgttcttcgtgccaagcgaagccacgcgaccgactgtgttacgatcccaaatcttcactcccgacgaaatctagaatccaatgagcaatctcgactgacgcctgcttcaccagattatggcgacaccggcgggcctccttctcgcctcgccgccggtgatatcaggtgtcgcggcggtggcggcgtgcgccgcaatggcagtattctacgtcgctgtcctctatgccccgacggtcatcctccggttcccacccccaacctcactccgcaccttcctccaccgtcgcttcgcctgtgccgccgtcgcatccgccgcctccgtccttgccactgcgtccctcctccgagtctggagcctcagcgacttcgctgatatgtttgctgtgttcggcattaggaaggatcacttgattcaggccgtggctattccacttctcctgacatccctagtgtatgctgggtcattcgtcgctagagtgtggctcctagtgagctcgtggggcggtggcgatgaggtggagataggctgcgcacagaggcttgcacaatggatccaagctgctgttgcggatgttatggtttggcggaactatgtagtggcaccatttactgaggagctggttttcagggcatgcatgatacctcttctgctctgtgggggattcaaaatgtctacaattatatttctgagtccaatcttcttcagtctagcgcacttgaaccattttttcgaactacaccagcagggatgtaactttatgagagcgctattgattgtaggtatccagttaggctacatcattttatccttctcatgtatgcccgcacgtctgtgaacgggagc

SEQ ID NO: 76802 - DNA, 421 bp, Zea mays
  Clone ID: MRT4577_170070C.1
aagcatcactcatgatacataaaagaccaagtagcggatactatacattaggattgtctagaccaccctgcatgcccgcgcgtactcttcactaaaaacacttaacgcctagcaaagacgaatgggagatggcttattagactatttcacagagaactagtactactagtaagtagtcgaacgatgttggcgttgatgaggtaggcattaattctagattattactactagtacaaagctaggttacaagcatgcatggctagcttctacaagggctacagcatggctagcttcttgacgttgatggggtaggcgtggtcgggcgagctggagccgtagcccttgcgcgcgatcctggcgttcacggcgtccgtcgggtgcagcccgtcgaagaagacgtactccgtccggtcgctgcctc

SEQ ID NO: 76803 - DNA, 193 bp, Zea mays
  Clone ID: MRT4577_170071C.1
atcttggcctcgtcaatccatcaccacttggcgtctctgagctcctcctccggcttcggggcggtgtcttgccttctgctcggtcgaagaagaagatgaagaaaacatgtgttcgtgatccgtggagtcgtcgtctgcggcgtcggcgggcaagagcgtgtgcgtgatggactgccgcggggccgctgggcca

SEQ ID NO: 76804 - DNA, 504 bp, Zea mays
  Clone ID: MRT4577_170072C.1
agagataaatgtcacaaaccatcagagtatttattacatagcggaagacttattacaaaataaaatgataaatatgaaacgaactaaggatcgttggcgccaatgtcaactgagaaacgacacctagatcagatcatactcctcgccttgtggctcctcctgaaccacctgttcttctccttcaatgagctcctgctcagctacttctatcagttggtcaccaggatcctcggtcacaggcgcttcggtgcataaggagagggtcgaccgatccagtgaaaagcatgagacgaacgacggtgaccccaggattcagcgacaatcattctcccaccgcctgcgatctgatggatggagcgcttgttcccaccggcatcgcctgagctgcagggatcggcggagccctcgatcccaccgcgacaaactacaagctccggcacgaagccggccacacctcggccacccgcgccgagaactctgcatgtcctggggactctacgagcc

SEQ ID NO: 76805 - DNA, 583 bp, Zea mays
  unsure (1)..(583): unsure at all n locations
  Clone ID: MRT4577_170073C.1
cctttgtttttttgttttttttgtttttttttcttgaaaaagagagatgcagtagtagtacactgcaggcagcagtagcacagtacgtgtgaagaagttacaacagacacgtgtatcgaacggaaacggaaatagcgggccggggccgggacgtcacaggggcgcggttgcggcgagccacgtgagcgcggggccgagggcggccggcagcatgggcgaggtgagcaggccgaggaggaaccagttgaggccgagcagcgcgacggcgccgtcgtccccggcccgccggcgcagccgcgacacgctgcgcatggacacggccacgacggcgaacagccccgccagcagcggcaggcacggcgcgtcggccgaccacgccaccgcgcccaccgccagcgatatgccgaggctgaacaggctgcggcaccgcgccacggccgtcgcctgcagggcatcgtagccgtccaccggcggtggctccgacgccgggccgccgccggcatgattggctgactgggctgtcgtcgccaccgccgcgtctttctttcccgatccctcttggccgncggcttcagcttgtcgt

SEQ ID NO: 76806 - DNA, 278 bp, Zea mays
  Clone ID: MRT4577_170074C.1
acgagcccagggtggaatttgaaacctcacacctttttaaggccagtgatcaaggtgacgctcgtcacatcacacaacacagccggcccattattaaaccaccactgacacgactacttactcaaacatgccatacttggccaccccccatatggtgtgagggcgccacatgtatcacgcgcatcatgtgctaaaacgaccacagccttactgaccaccacactaacagtacacaaggtgccggctgctctactcttcaatcctgaaggctgctaggg

SEQ ID NO: 76807 - DNA, 262 bp, Zea mays
  Clone ID: MRT4577_170075C.1
aggctcgagtgccgctattagtcactgactcattatgcacaagatcttcacaacacaaggtgctgaaggcgagcaccgaggaagatggggctcgtgttcgggaagctcttcagccggctcttcgccaagaaggagatgcgaatcctcatggtcggtctcaacgccaccggtaaaaccaccatcctctaggggagatcatcacaaccatccccaccatcggtgagccccagccttgccttttcaacattgtttgatcattttg

SEQ ID NO: 76808 - DNA, 281 bp, Zea mays
  Clone ID: MRT4577_170076C.1
gggaggaaacttggtaaaaagtgggtgggaaacccaccagaaaaataaggaggaccccgggggaaaaggggtacccaccttttcaataccccccaggaaaacccggggaaaaacgaaacggaaaacctatgataaccaccctttgctttgatgtaaaaagggaaaagggtggccagcgggaaaacccattagatggagattttgggggggaaaccctgggcggacacgccggagaaaaaaggaaaggcggtgggggaggcccctagcgggacccagggaac

SEQ ID NO: 76809 - DNA, 212 bp, Zea mays
  Clone ID: MRT4577_170077C.1
caactagcaacatagaaagcatttttttgtaccaacaatgtcatacaaaggggggtgccttctaatgctccttggtacttctgcatgtgctgttacggctaccattatccctaaatgctcacaagctcctatagcttcctttattttcacgaaccttttaccagttgtttttttacattgtgtaaacccaattcttaaacctttcaggatcc

SEQ ID NO: 76810 - DNA, 1736 bp, Zea mays
  Clone ID: MRT4577_170078C.1
ggggggggtggggtgtttttttttttttttttttttttttttttcttttttttttttttttttgaatccagaaacaagggttatattgtatcatgctgtgtacgaaaaaaacccctcagctgtaaaactgtggaacgattctttcttctcttcacatgcacggaaatttgggtccttattggcgtacaaacaaacaaggcaaagagcaggagccacgcaagggaatttggtcctgctgctccaaccggcgagacggcgtcaggtggccggaacaatgcagccaaatgatcataggaatctacagtatcttcggaggtggtacgaggctccctacatctccgagctcctcatcttctcgctcacggtcgagccgaacgacggcccgcccttcctgtaagacaccaggtactccaccgggtaccctttcagcttctgaggcatgatgctgaggtcttcgaaagtcagagcatcttccgagacgaggttgtccacagcaaatgcgttgatttggtctaggttgaaaatggatggtgttggaagcgggaacggcactttattgagcagcatctcccttggggaagcaatagcccttgcaacaggaagagggacattgacatatcttggccattcgcggattgtctcgtacatcagctcagccagctcatggacagtgtaaatttcagggcccccaagttcatatatctttcccatgctagtgccgtcatccttgagggagttcacaatagcagcagcaacatcgattacatacacaggctgaatcttagtagatccaccaccaacaagcgggaggaaaccccaattctttgcaaattgtgcccatctgttcaggattcgatcttctgtgccaatcatggtagcaggcctcatgattgtagcctcagggaattctttgaagactgattgctctcctgcagcttttgtcctcaacattctagattcagaagacggtgacgcccctaggcaagaaacctgaataaatcttatgatacccccatgctccttagcaattgttgcaagctgttcaggcatatggtggtttacttcttcgaagctgtagttccttgtttcatactctcgtcctatgaggttaataaccacatttgacttggccataacagccttaattgaatcaacatctctcggatggtacttcatgggcacaatctgacccaagtcacccataatcttcaggtgacgaggagaatcctcacaacctctgaatgggacaagcacttgagaccccatcttggcaagttgttgcacaagatagcgcccaagaaacccagtagctccaaacaccgtggctacaattccactcacagaagacctccctccggtgcccttgcggacgagatgcccggaccccttgaccgccggcgccctcgcagacatgcatcttgcgccatccgctccaaacaacccttggggagcgagcccgggctgggaggcggatctgaaggcggcgatggcagccgaggtggaaggggagaggtggtggtcgaggaggtgacgcctccacgccgccgactgcatcgtcgctgtccttgtcgccggtggacggtggtcgtcggaggaggcgacgaggcggggcaaagtggcggtggcgacgacggcgagagggagagaaaggaatggcccgggccggcgggcgttccgggcgtccggatctgcccccctgcgggcccgagcccccccatgtcccggacccggccggc

SEQ ID NO: 76811 - DNA, 622 bp, Zea mays
  Clone ID: MRT4577_170079C.1
gaatcgtccttgacgggaccactacctggtgttcgaacccaagttggacaactccaatgtgcagcagaacatcgatttcgtcaacaaacagatcgccagtgatctcagcgccatgacaaggccagatggccctctcacttttgttggtgaatgggtggctgagtggaaggtaaagggtgcttcgaaggaagacttccaacggtgtgcaaatgctcagatggctgtgtatcggaaagccacatttggatgggcttactggtcgtacaagcatgttagcaaccactggagtatggagtggatgatcaacaacggatacatctccttaaaaaatgctcgaggcaactaaatttgcaactatgaacggaagagctgccaactattggagaaaaaaaattatgagcccttggcgcctcaagatattattaatgtaatatgattatgttgtttaatgatttaagtagtatttgtgactttcactggtagagaataggcctttagtcccggttcacaaaggccataaatcccggctgtgcaaccgggactaaatatgcgcgactaaaggccccccccctcttagtcgcgcctcttacgaaccgcgactaaaggcccgtccacgtgggcg

SEQ ID NO: 76812 - DNA, 546 bp, Zea mays
  Clone ID: MRT4577_17007C.1
atttcggcacgaggctaccttactgtgctccagcactctcccactccctccctccttcgctccttccctcccagaccctcccacttaaacccgccgccgccgccgctgccgctccttctcccggtctccactaggctgcaaatgctcggcgtccgcgcctcgtgagggtttcatgttccagatggactgttttaagctgggtgagctacattttatcaggagaaattgatcaattgatttgaagtttgaacaccccaccagaatgtatgaaataaagccagtaattgatcacgctcatggagatgggtgacgatgacaattcttcaagcggaaaatgtggcacatgatcattaaaaatgttactagagaaggagatgtctaaagaagcggaggcggggagaagacatgcaaggggcattgccagattaatggggcttgaggaggatctacctactaggggaccggctgggcgccgtaccggcgggggctgtggtgggagattggggtgcggcgtgccgcgccttgcggggggagagacgcggtggc

SEQ ID NO: 76813 - DNA, 840 bp, Zea mays
  unsure (1)..(840): unsure at all n locations
  Clone ID: MRT4577_170080C.1
acccacagcctcccaccccagtccccaccccgagcccgtgaaccctagcacattcgtgcgccggcggcgatgtcgggctaccctttttacccatacggccgcggtggcgtaggcgaagatgcgtcggcgatgtcgggctaccctttttacccatacggccgcggtggggtaggcgacgatgcggcggcgaggtactcttcctacgagatcgacctcatcgcggcacgctacgctggcgacccgtcaccctacccctacccctccgcctccggcggattcgacccgcatgtcggcgcgaggcgacccgcagatgttctctatcatcaatctattatgggaagccatagtactattgggcagagttatgcattttattctccgaacactatggtcaaacgccctaggcttgaaagcagccttcctatttatccacagcgacctggggaaaaggagtgtgctttctatatgaggaccagaacatgtaagtatgaagaaacctgcaaatttgaccatccacaatgggttccagagggcgggattccaaattggaaagagggtacaaaggctggggaatcctatcccgaacgtccaggggaaccaaattgtcctttttttgtaaagactggtgactgtaagtttgggtctaaatgcaagtccaaccattcaaagaaaaaggatgatggaacagtggctggaccaggcgataaagagtctctattttctggtaattccaccttaccggtgaagccttctgagccttgtccggagcctctaatttctggntattctaccttacccggtgagnccttctaaccttgtccgcactatngcaaaggcaat

SEQ ID NO: 76814 - DNA, 899 bp, Zea mays
  unsure (1)..(899): unsure at all n locations
  Clone ID: MRT4577_170081C.1
tggtacctcgaggccggccggggtacatttgcgtttggacttgacgcactagctctccaagaagtagaacagcacagaagaactcggcgcgccggccgttgcaccggccatgagaggtttctcggattcccgaggttttctaagtttcttcctcggagctgcagtcgccgcggcctgcatcgtgctgctacagccgtccgctctgtgcccgttcgacggcctcacgccggcagatcgtcaagagctggcaatcttgagtaatagaactcatgctgctccctgctcgaagaagcttcacatgcctgctactacctcaccggacgacgtcaggcttctggcgctcctgagaagggcctccatggacgacaacaccatcataatgaccttcacgaacaaggcgtggaccgcgcccggctcgctcatggacctcttcctcgagagcttccgcgtaggcgtgaggacggagccgctcctcaagcacctggtcatcgtcgccgtcgacgacaaggcgcacgagcggtgcgggcaggtgcacccgctctgctaccgcctccgcgtcaggggcgtcgactacgcggcggagcagtcgttcatggagaaggactacctcgacatgatgtggcgccggagccggttccaggcccgggtcctgcggctcggctacagcttcgtcttcacggacatggacatcgtctggctgcggaacccgttgctgcgcgtgcccgtcggcgccgacctcgccatgtcgtccgactacttctacggcgacaacccgtacgacctgaacaagacggccaaacggcgggttcgtgtacgccagggcgagcgccccggacggtggccttctacgngcgctggtacgaggcgcgggaggcgtaccccgagagaaacgagcagac

SEQ ID NO: 76815 - DNA, 108 bp, Zea mays
  Clone ID: MRT4577_170082C.1
ggctctagcaacattcacagaaatgcacgactctggaatctggccagataacataggactggctagtgctgcaaatgcttgacacccccaggaagcaatgcgccaggg

SEQ ID NO: 76816 - DNA, 850 bp, Zea mays
  Clone ID: MRT4577_170083C.1
cgggccgggaaattatcccggacaacacttcccaaccccgaccaaccgcatccaccacgcacgcaagctagccggcccactgtgctacgtacgtacgccaccatgagcgccgccgcccaagaaaccacggccggcggcggcggcgatggcaagcgtcagggaccttgccgcccgggacacctcaagcttggctaccacatcgtggtgtccaacgcggtctacgtactgctggccccgttcgccgcggcgttggcgctccgtgcgtcccgtctcaccccgtccgacctggcggcagcgcgcgcctacctcctcgccaacctccacctcgctgtctccctcgtgtccgtcgccacggccctcgcgacggtctacctcgcgcggcggccgcgcgcggtgtacctgctagacttcgcgtgctacaagcccgggcccgaccacgtggtcacccgggagaccttcatgaagcagtccagcaaggccggggtgttcaccgacgacaacctggcgttccagcggaagatcctggagcggtcggggctcgggcaggggacctacttcccggcggcggtgctcaactcgccccctaacccgtgcatggcggaggcgcggcgggaggcggaggctgttatgttcggcgccatcgacagcctgctcgccaagacaggggtgcgggccagggacatcggcgtcgtggtcgtcaactgcagcctcttcaacccgacgccgtcgctctccgccatggtcgtcaaccactataagctccgcggtaacgtcgccagctacaacctcggcggcatgggatgcagcgcccggcgcatctcttcattcgacctcgccaaaaatctgcttc

SEQ ID NO: 76817 - DNA, 1479 bp, Zea mays
  Clone ID: MRT4577_170084C.1
cttccccagtctgccgtcatccagcagcctcatccaccaccgctcatgaccggtccttatctcgttgctagattttctctcctccccgtctcctgcaaccggccgccatttcccagcatgccatggctatggcttggctcctggatgtcatggagcacggcccttccttgcctctccgtagcgccaggacctcctccgagctctgtctgctccgcgtgaccgtcagaccctgcttcctctcgtgtctcgcttcccagccggccagacactctctcctcgtcgcgcccttggcctttcgcacagttggacgacctcctctgtctattgttgccgtcatgcgtcgcttgccttagcgcatggtttcccagccatggaactccctgcgtgcacccgaccagatctccctggtccttgccggagtttgccggtagcccgcgtcgtccctggcttcagctccagctcgccggccggctgctcgaccccgtcagtccctgcgtgccgccgtgtccctgccgctcaatcagccgtcgttccctgctcgactctagcagttcccatagccgtcctcgttaaattatgttgccgtgctgctctgcgtgatgcaggccacgtccctgttctgctcccgcgccgctccttccctttcgcctacttgtcgtccatggggtgtgccaccgtgaactccctgctccagttcgtcgactcctgcgcgctcggccatctctactcgctccctcgacatcgtgtgtcatgacccctgctcgtcttccccaacatgatgtcgtgccatgtccttgccatcagcctcaccttgctgctggtccactaccttggcgtcagcttccacagcacctcctcgcgccctcccggtagctggcgtgctacctactcggtgaaatatgaaaaccagtggccgatcatgctccgccattaatttcgcttcgcagctcgtctgatgttatagtgctgctatgccacgacacgcgtgccggtgcatcgtctgtgccttgtgttcgtgctggttataactttgtgctgctattgatggtgttaagtgccggtgggctcggccttcttataagtctaaattgcaatctcgctgatggagagtacgtgctcgtccccgagcaaggagctgtccacgaggaagaccaggagcaagctcccaagactaccatcgaggatctccccgcagccccagcatttgaaggtacgcttcaggacatggttgatggtgtgacttggcctaccaccctaccaccgggatggacggtcgagtgggatgctgctccggcaggagaggagcatgaggggtagtgggctaggccttgtcctattcctcgctttcgacaatatcgatcatccgctgcagtctattttgtggacttatataagctacttgaaaaactccgatttatgtaataactctagtactttaatttgaggttttcctattttattgtatttcttctgtgaaac

SEQ ID NO: 76818 - DNA, 609 bp, Zea mays
  Clone ID: MRT4577_170085C.1
aaatctaatctttttctttttcattgaccctatttttgttttcttgttttcaccttaaaactaagccaggatcactgtcacaaagctaagagcctcaagaaccttttgtcacctggacaaaaagaccatcaaactgctaaaagcaagacgatgctcaaggcaagggggagactgaacaccctacttgcaaacagaaacgcgcgaatgaatggttcagataccttgaccaccgcgctaaccaaaaaagtacttgactggccaggacttatccgtgctccaaatcaatgaaccataactcgacagtaagtgggcccaattaaattgtgggggacttccactattgcgggtaccttggcaagccgagccacttatacgtggtggcgaatttcaactgcgggttcattaccaaacccatggatggcaaacgagatccgctgattgactcccgagggaagaacatggattccaacgttcatggcgaccaactgaagggcatactaggtcattatctccataacctcattattgccaggacagggagtgacaagattgatactatcaactcgatccacagcattcccattgacctgaacagcttggtcaatagcc

SEQ ID NO: 76819 - DNA, 1395 bp, Zea mays
  unsure (1)..(1395): unsure at all n locations
  Clone ID: MRT4577_170086C.1
ctcgaggccggccgggccgggctcctcccatctcctaaaccggccgccatttcccagcatgacatggctatggcttggctccaggatgtcatgcagcacggcccatccttgcctctccgtagcgccaggacctcctccgagctctgtctgctccgcttgaccgtcagaccctgcttcctctcatgtctcgcttcccagccggccggacactctctccttgtcgtgcccttggcctttcgcacagttggacgacctcctctgtctattgttgccgtcatgcgtcgcttgccttagcgcacagtttcctagccatggaactccctgcgtgcacccgaccagatctccctggtccttgctggagtttgccggtagcccgcgtcgtccctgacttcaactccagctcgccggccggctgcttgaccccgtcagtccctgcgtgccgccgcgtccctgccgctcaatcagccgtcgtcccctgctcgactctagcagtttccatagccatcctcgttaaattatgttgccgtgctgctctgcgtgatgcaggccacgtccctgttctgctctcgtgccactccttccctttcgcctacttgtcgtccatgggtgtgccaccgtgaactccctgctccagttcgtcgactcctgcgcgctcggncatctctactcgctccctcgacatcgtgtgtcatgacccctgctcgtcttccccagcacgatgtcgtgccatgtccttgccatcaggctcaccttgctgctggtccactaccttggcgtcagcttccacagcacctcctcgcgcccttccggtagctggcgtgctacctactcggtgaaatatgaaaaccagtggccgatcatgctccgccattaatttcgcttcgcagctcgtctgatgttatggtgctgctatgccacgacacgcgtgccggtgcatcgtctgtgccttgtgttcgtgctggtacgataattagtcacgtgatgcggaggaccagaactaagtcgaccacaagatgctggaaagtgtaagcctctccacaagatgatgctggtggacgaaactgtagatggacagacgaagcaagtattagaacaaaggctggtcgtcaagtgatcgacgtctaacaaacactaacctagtgttatccaggttataactttgtgctgctattgatggtgttaagtgccggtgggctcggccttcttataattctaagtaacccttatatacttcttattgaggatggtcccttaagctagcatatatttcaaaactataaataatttataacagttcaaagttatttctttgaaccacttttgcaagcactccgatcatgtatattataaaagttgatgtaacttgtanaaatttggtaataaaattttcgctgc

SEQ ID NO: 76820 - DNA, 482 bp, Zea mays
  Clone ID: MRT4577_170087C.1
aagtctcacaaatgtacatttaatacaacgtgataatgaggcggtacagccatttcacacaacatttacaaacataatcaacatgcataaagatgcggaccaccaggaccgaggcatacaatacatacatgtctgccagcgccaaacgcacaaaccacgacacgcaaactagtggcgcgggaattaatcagttgattagcacacacgcgcttactatgctacgccgactaggtgtagcaaaacgcagtcgacgttaccggccattacagggcctcgggtgaaatgaatggactaattgctgtgcagactgacgactgcatgagcgaaccaaccaaccagaggttgcattgccatgcaataagatgatcgatgtgcaccacccagcatggtgatggatgcgccagcccaaactgttgtcctggaagccgtatgccctgccccgcatgatgatctggctgcgcacgacgcggtaggcctacatg

SEQ ID NO: 76821 - DNA, 484 bp, Zea mays
  unsure (1)..(484): unsure at all n locations
  Clone ID: MRT4577_170088C.1
tcgagcncggcggccgggataacctactctcggtagactgtgcttgcctcactcgatccctccacccacccggccatcggcggctggttgctgctgcttcttgtgtgggttcttccactggcgtgcagggtcgagatcggcagcagcagccgtcgttcctctcttctagctcccgacaatcgattgatctgtctgagggggaaacgagctgcgtggtggtggcggccgccggggaggcgatgaattcgctgagcatggtggaggcgaggctgccgccggggttcaggtcccacccgcgggacgacgagctcgtgctcgactacctggcaaagaaactcggtggcggcggcggaggggcggcggctgcggttgcgagcatgtacggctgccccaccatggtcgacgtcgacctcaacaagatcgagccctgggacctccctgaaattgcatgcattggcggaaaggagtgctacttctactgctt

SEQ ID NO: 76822 - DNA, 142 bp, Zea mays
  Clone ID: MRT4577_170089C.1
ggagcagtattagttgcatggagtgagttcacgatagcgtgaagaattgaggagacatcgctgaatgagagtctgtcggagacctagagcgctcatcaatacggcccttcataaaggggctaccgtccatacagttgagcga

SEQ ID NO: 76823 - DNA, 806 bp, Zea mays
  unsure (1)..(806): unsure at all n locations
  Clone ID: MRT4577_17008C.1
atgtctcactgtgctcccggcggctgcgcatccgccgccggcggcccggagcacgccgcgcttgagaggcacgtcctcgctgcactccgcgagctcatgatgctgatgaagcagggcgagccaatgtggcagccggcagccctgggcggcgaggtgctcgaccaccagctgtatcgtgcgaccacgctcccaggcttactcgagcttcccccgccggggttcacggcgaatggcactcgggacactggcttggttatgtgcactggagccgaccttgtccgcatcttcatggacgagaacgtttggtctgagacgttccccgatatcgtggcaagtgtttccgccgacaacatcggccacggttgtatctgccaagggggagtgatactgatgaaggcaggccttcgggtgctgtcgccaggggtgtcgagttgcgatgtgaagttcgtgaggcaatgccagatgatagagcaaggcgtttgggccgtggtggacgtgtctcttgatgccaatggcacatctgagctcagagcatggaacactggcctaccgggggcctgccgggtgctgccaagtgggtgtcttatcaaggacatgaacaatggctactgcaaggtggcaatgatcgtgaacgcggagtacgacaagggcttcatgcggncgccgctccacccgctgctgagctcagggcacactttcagcgcacgccgctggctgacatcgctccagaggaggtgcgaattccttgcgcagcgcttgagccccgcctatggcatcagcaggggcaggtggtgctataacgcccg

SEQ ID NO: 76824 - DNA, 343 bp, Zea mays
  Clone ID: MRT4577_170090C.1
attcggctcgaggctcacattgtgcaaaggttatcggagggcgaccagggtaaggggggtcaggcggttcagatgcctgcataaatctaccaattagttatggtcaagctgcggtatgtccgacgccggtagtgtcaatgctagccatggttgcttccagggcctgctgcagtctgttggttttgctttgggcgctggagatcaaaatcatattgttatgatggtatctaatcttccactcaaacacagttcataagggagaccgactttgaacgaagagttattgacatatgactcgacgagaggatcatccttcgaaggtaggaaatgcgacctctaccaa

SEQ ID NO: 76825 - DNA, 1418 bp, Zea mays
  Clone ID: MRT4577_170091C.1
tgggaccctcgaggccggccgggccggggcagccagggttacagccaaaccacacggcgatccgccgatcctattatcccaaaaccacaacacaagaacgggaagcgtgcatgcacacgcacgagcacgaacctgagctgtagcgccctctcgctcgctccccgcgcgcaatggccagcgtagccccaggtcccatgcaaaccagccatgcctcacggcggccgatccctacagctacaggccccgtgcccgtggccgtgcttctcgccgccgccgccgtcggcctcctcgcgctgctgccgtcgctggccgaggccgtgtgggaggtgccgcacctcttcctcctcggcgccgtcatctccttcggcgtcttcacgcagaggaacagcgacgccgacggccgcaacaaggacagctcactggcgtggagcgcgcggtgccaccccgatgcccccctcgtcgtgatcgcggatcacacggcgccgagcgacgacgacgacaacgacgactacgggctggaactggaagaaggcgcacgagagacgccgctttcgttgccggtgcggaggctgatgaagcctgcgtctgcgtctgcgtctgcgtctgcgtctgtggcgcaggagtccgaaaccgccggcggccatgccagcgatggtttcggtgaggagacgacggatagccgtgctgcgtctccgtcttcggggtttagggccggcacgcgcgccgtcccttcgccgccgccctctgctcttgacgacgacgacgaccggggcgtttctcagcctgcacggccgctcttcagaaaggccagcaccgactgggatgtggacgccgccgccgacgacgggtcgtccgacgagatgacacccgtgtcgtcagaaaggtcgtcggtccgtgccgacttcgccgcttgtgccagtggctatagcgatagcgacagcgatggcgacggcacgcctgtggatttgaagctggcggagaaggcggaggcgggcggggaggaggaagtggaccggaaggccgacgagttcatcgccaagttcaggcagcagatcaggctccagaggcactagctgggcggccatgcatggcgtggcgtgtgcatgctctgctgagtcctgagctgagcatgcaccgacacacaaataccactgctggtgctggtccagcacgaagggagaacgcagcagtagtttgttcatctacgtctatgacaccagcatgtttcctgtatcattttgctgttttttttttgggttgttgctccggtttcaacaaggagccggaaacatgttttctgtatcgttttaggtctttgttcggttaatcctattacctatgaattggatgagattggaaaaattaagaaagaactttgacttgtttggaatttaaaaaaaaaaaaaaaaaaaactcga

SEQ ID NO: 76826 - DNA, 991 bp, Zea mays
  Clone ID: MRT4577_170092C.1
cactttggtgaaccctgctccaccgttccggtaccatcgaggccggccgggaaaaaccctaaccccccgaatcggatccggccgccggagcgcggaaccccaccccggccgccatggagatgggagggatgagcgacgctgagcggctgttcttcttcgagatggcctgcaagaactccgaggtcgcgtacgagcagaaccccaacgacgccgacaacctgacgcggtggggcggcgcgctgctggagctgtcgcaggtccgaaccggccccgacagcctcaagcttcttgaagatgcggaagccaaactggaggaggcacttcaaattgatcccaacaagtccgatgcactctggtgcttgggaaatgctcagacctctcatggattcttcactccagacaatgcaatagctaatgagttctttacaaaggcaaccggatgtttccagaaggctgttgatgtggaacctgcaaatgagctgtacaggaagtctctagacttgtcaatgaaggcacctgaactgcatttggagatccagaggcaaatggtttctcaagcggcaacacaagcatcctcagcctcaaatccaaggcaatcaaggaagaagaaggacaatgacttctggtacgatgtttgtggatgggtgatccttggcgccggcattgttgcttgggttggattggcaagagcaagcatgcctcccccgacgccaccagccaggtggtcaggctagtgttgtatggagaggagagaggtgtttccatacggtttgctcaaattttcatgcttgttcttttcgagcctcatgtgctgctggatagttttgtactttgcttaccttgataccgttttgaggcaaaaaacatacagtgttgcgactttttgcgttctctatgaatactgaatgttctcaaaaaaaaaaaaaaaaaaaaaaaaaaaaaaaaaaaaaaaaaaaaaaaaaaaaaaagggcgccgctcgcgatctagaac

SEQ ID NO: 76827 - DNA, 574 bp, Zea mays
  unsure (1)..(574): unsure at all n locations
  Clone ID: MRT4577_170093C.1
aattgcaacatttttatgttctctcaacaatctgcgccagatcagtatacatatagattgtggcggctcaaggttgcccttgttgtcaaccgcaagaatcactgcataatcgcccttttattccccaatctatagtcagtcaaaaggctagctagtactcgttgaagtgtattgcgccgagcttccacttccacacgaggaaggcggtgtcgaacatgacgctggtgatgagcgtgaaggagacgaggacgaggaagacgtccacccctccttgggcatcccacgcctgctgtcgtcgaacaggttgcccggcgcggcggcgcctcgggcatccgcaacgcgacccgcgccgnccgcccccaccccccggccttcttcgcgtccgcctccccgcagcgcgtccagcacgccgctcccgaactcggcttggccggtttcgacgccggcggctccgcgtacttgcccagcacgcgcgccgnccgcagccgctcccgcgccgtcagcggctcgctcggcgcgacgccgttggcgttggctaactactgcggcggctgtccgttgccaggcgtcaccg

SEQ ID NO: 76828 - DNA, 865 bp, Zea mays
  Clone ID: MRT4577_170094C.1
caccgccaaccaccgcgctccggctctccccaattctaagcgagacggggcacaggaagaggagagcctaaaaccctaaccccccgaatcggatccggccgccggagcgcggaaccccaccccggccgccatggagatgggagggatgagcgacgctgagcggctgttcttcttcgagatggcctgcaagcggatgtttccagaaggctgttgatgtggaacctgcaaatgagctgtacaggaagtctctagacttgtcaatgaaggcacctgaactgcatttggagatccagaggcaaatggtttctcaagcggcaacacaagcatcctcagcctcaaatccaaggcaatcaaggaagaagaagcacaatgacttctggtacgatgtttgtggatgggtgatccttggcgccggcattgttgcttgggttggattggcaagagcaagcatgcctcccccgacgcccccagccaggtgagaactgatcgagtgacgagtgccaagaacgctttgcaaatgatggcatgcctatattaaggtgtcccagaaccttttaggtgctagtgttgtatggaaaggaaaaaggtgtttccatccggtttgctcaaattttcatgcttgttcttttcgagcctcatgtgctgctggatagttttgtactttgcttaccttgatcccgttttgaggcaaaaaacatacagtgttgcgactttttgcgttctctatgaatactgaatgttctccaatggtgccatacataaagtggacatgctgttcaacccccccaaaaaaaaaaaaaaaaaaaaaaaaaaaaaaaaaaaaaaaaaaaaaaaaaaaaagaaaaaaaaaaaaaaaaaagcggcc

SEQ ID NO: 76829 - DNA, 1230 bp, Zea mays
  Clone ID: MRT4577_170095C.1
ccgggagtgagagataagaaatggaatacccatttcgaagcccaccgaattccctgcgattcctctcccctcgcctcctcgtctccccctagggttagcacctcgctgcctccgattcaatcataatatgggatcgtcggagaggaatcgcaaagagggccgtctcatccgagttaaggaagccatggagcacaaggaggctgggtgccaggcccccgagggacccatcctctgcatcaataactgtggcttcttcggcagcgcggcgaccatgaacatgtgctccaagtgccacaaggagatgataacgaagcaggatcaggccaagctggctgcctcctctatcgacagcatcgtgaacggcagcgacgccgtcatggagccggttgttgctggcagcaacacggtagtagctgttgcccaagttgagttgcaaacaatgaacgtgcagcagcccgctgatgttgccggacccagcgagggggtggcggcgatctccaaaggggggaaggtagggccgaaccggtgcagcgcctgcaggaagagggttggacttacgggattcaactgccggtgtgggaacttgtactgcgcactccaccgctactccgacaagcacgactgcaagttcgactaccggactgctgccagggacgccattgccaaggctaatccggtggtgaaggcagacaagctcgacaagatctagggggggttccctacggttgggtatcaggaagattgtaaaccgcggtaactcgtcatgcggaactgctgccttgccccccgcgcctttctcttccatgtttgctgctacaatcttgttgttgggcattgcagtgcacggtgcacacttgtgtagcccgcctcgagaattcctgcctctgcatctggtcagttctaaaatgatttgcatgttggctatgttgtgtaagctctatttatggtggtctcgctgagacgggtatttggcttcgcagttatctagctatgtgatgtactgttgtcttgtcccctgggtattatatggtacactgcagccagtaatagtaatctgcaactgtccgccaaatggtccgtcgttttcctaaaaaaaaaaaaaaaaagggcggccgcccttttttttttcccatgtacgctgcttcctcgtatacccactttaaatttgtaccatgcatgcatgttccttatgtgaccgtgtgttccataaaaaaaaaaaaaaaaacacac

SEQ ID NO: 76830 - DNA, 1562 bp, Zea mays
  Clone ID: MRT4577_170096C.1
ttgttcacgcgtccgacgggatcggcaacggggggaccgtctatcaggatcctaacacccgttacccggtggtggtgcggttcaacaaggtgaactacgccggagtgtgtaccaacaactacgccttggacgagatcctcgaggtgaaatgagtgaggccagtctgctcaaggaccccatgctcctgtgtgatttgtagttgtgaagcgaggctgctgcctagctgctacgttagctgctagcgtcacatcatgaatcttgtaatagctaaatctccacaatcatcatgtaatttattgcatgctttattcaccgtggactcaatattctctcttgctctaaaatcgatgtattcgtttttctggtgagaacaacgggtacctcgaggcgggccgagcaccagcaacgttcctcatcgcctctcgctttcccctcccccgtctgaaaactggcacgccacgtcccaccgggaaccaccgcgctccggctctccccaattctaagcgagacggggcacaggaagaggagagcctaaaaccctaaccccccgaatcggatccggccgccggagcgcggaaccccaccccggccgccatggagatgggagggatgagcgacgctgagcggctgttcttcttcgagatggcctgcaagaactccgaggtcgcgtacgagcagaaccccaacgacgccgacaacctgacgcggtggggcggcgcgctgctggagctgtcgcaggtccgaaccggccccgacagcctcaagcttcttgaagatgcggaagccaaactggaggaggcacttcaaattgatcccaacaagtccgatgcactctggtgcttgggaaatgctcagacctctcatggattcttcactccagacaatgcaatagctaatgagttctttacaaaggcaaccggatgtttccagaaggctgttgatgtggaacctgcaaatgagctgtacaggaagtctctagacttgtcaatgaaggcacctgaactgcatttggagatccagaggcaaatggtttctcaagcggcaacacaagcatcctcagcctcaaatccaaggcaatcaaggaagaagaaggacaatgacttctggtacgatgtttgtggatgggtgatccttggcgccggcattgttgcttgggttggattggcaagagcaagcatgcctcccccgacgccaccagccaggtgagaactgatcgagtgccaagaacgctttgcaaatgatggcatgcctatattaaggtgtcccagaaccttctaggtgctagtgttgtatggagaggagagaggtgtttccatacggtttgctcaaattttcatgcttgttcttttcgagcctcatgtgctgctggatagttttgtactttgcttaccttgataccgttttgaggcaaaaaacatacagtgttgcgactttttgcgttctctatgaatactgaatgttctcaaatggtgccatacataaagggacatgctgttcacaccgccaaataaatgtatgctttgttttttttttacataaagtggacatgctgttcaacaccg

SEQ ID NO: 76831 - DNA, 2436 bp, Zea mays
  unsure (1)..(2436): unsure at all n locations
  Clone ID: MRT4577_170097C.1
cagacaacactatcggccacatcatatttactaagatacaagcacagatgtacgattggcacgacataataacaacgttgtcagaaaatgcgtaggaccatgaaataccatgtggatatttggattactagaaaggagacaagtctcgaagcttctattacatgagtcattggcagtagataacaataagctcaagcaacattctcaaatttatctcatggtatacagggcttaatcctcatcctcaacaaccttagttcccaaacctttgagaccctccggtgggatctcagcaactgtgaccagagagtagagttcctccttggcgtcttcctcatcgttccggttgcgggcaattctgacacggacacgcctcggcacactgcggataccactgctccagatgtgcttgttgagcttcacgtcaatccggacatcagtagtacccatggccttctgagcgaacttcctgatctccttgatggcatttggtgccttcttcttaaaggtgcatccgtggaggcgtttgtggaggttgatagtgtactcgcgtgtcaccacctcatccttgcgagtgccggcgcctcgcttcttctccgccatctccgctccgcctcggnccattgtttnctcggtaactcggctcgagcatcgcggaaaagatggtccaagtcgaactgaaccaggcgccaccnagtnncgtntcagtggatacaagaacggcattaagaaacccaagcgccaccgccagacctccaccaaggggatggaccccaagttcctgaggaacctgaggtattctaggaagggcaacaaaaagagtggtgaggctgaagctgaggagtaggaaggaaagcatggctttgtttcctctgtttttagctcagttccacctttaggacctggggttttgctaaagatggaacttaagttggtgttactgtatgatggcaaggaccttttgctgccgaaggttatgttttgaagttcatgctaccttttaaagtcctcgttaccttttccccacgaggctcgtctnnnnntaggggatcgtcggagaggaatcgcaaagagggccgtctcatccgagttaaggaagccatggagcacaaggaggctgggtgccaggcccccgagggacccatcctctgcatcaataactgtggcttcttcggcagcgcggcgaccatgaacatgtgctctaagtgccacaaggagatgataacgaagcaggatcaggccaagctggctgcctcctctatcgacagcatcgtgaacggcagcgacgccgtcatggagccggttgttgctggcagcaacacggtagtagctgttgcccaagtcgagttgcaaacaatgaacgtgcagcagcccgctgatgttgccggacccagcgagggggtggcggcgatctccaaaggggggaaggtagggccgaaccggtgcagcgcctgcaggaagagggttgggctcacgggattcaactgccggtgtgggaacttgtactgcgcgctccaccgctactccgacaagcacgactgcaagttcgactaccggactgctgccagggacgccattgccaaggctaatccggtggtgaaggcagacaagctcgacaagatctantcctacttccctacggttgggtgtcaggaagattgtaaaccgcggtaactcgtcatgcggaactgctgccttgccccccgcgcctttctcttccatgtttgctgctacaatcttgttgttgggcattgcagtgcacggtgcacacttgtgtagcccgcctccgagaattctcctgcctctgcactggtgtatgccataaaagtggctaactagatgctgagtgaaggcccattagttcaaatggaagtgttttttgtttatacatatcttcatcgtgatcccttgacgaaatgacaggtttgggctcttgaatacaacttggaaggaaaaaaaacgttgggggagactagttgttgtataattagcttgtgagatgtgagataaatgtgcgtacgttgtcaacgaatagtttcagaagagtcagattggcttccacagttcacctcgctgcaacccaaaatctggtctccactgccggcatttgggggaatttctcggttgggtgaaggctgagttatttcctcgagtggtcaagttgttttacttccacagttcaccagtttcagcttttgtaattcatcggttcatattcttcaggcggcagccagtccgtgctgcgaacgacttcccagatacatgtaacataaatcttataaaaaatatatatgtaacagaaattactttttttgtcgtttctttgtacggcacaaggacagtcgtatttaaccttgagctggttataccagagtgttactattttattatatctgtacttatacaaactacaaggcaatgtattcttcctttgcg

SEQ ID NO: 76832 - DNA, 1977 bp, Zea mays
  Clone ID: MRT4577_170098C.1
cgaggccggccgtcaaaaaaggaagggacttctcgagtctagcccctctgtcgctctcagacgacgggtgcgccgccgccgccgccctaagccaggtgctgactgctgaggctttctttggtctcttcgccggcgacgacacccgccagtatccacggtgtcattgcaagacaagatggtttccttcgagatgaatgacctcaagaagattgggcttggcctgacaggctttggaatattcttctcatttctgggaattgttttcttctttgacaaggggctcatcgcaatgggcaatattcttttcctgtcaggtttgggtttgacaattggtctgaaatcaactatgcagttcttcaccaagccaaagaattacaagggtactatctcatttggtgctggtttttttctggttctcattgggtggccgttttttggcatgctcttagaggcatatggctttattgtactcttcagtgggttctggccaacactttctgtgttcttgcagaggattcctatcatcggctggattttccaacaaccatttgtgacatcgttccttgaccgctacagaggaaaacgtgttccggtctagcaaccttttgcacaatatatgcttgcggtgtagcaactagcagcctgtatttttttactacagtagaaaccgattataccgatgtctgatccctcatgtttatatgttttctttaggattgctctttgtaaattacagcaatacagccccaaactggccaaatcaaaggtccattcctttgagaccaggatgcaggttcacccatgaaatggatctgttgaagaaactcttaagcttgtatggaagtaaaagctaatatgttcctttatatgataatataagttatatattattgccaccgaattccctgcgattcctctcccctcgcctcctcgtctccccctaggggatcgtcggagaggaatcgcaaagagggccgtctcatccgagttaaggaagccatggagcacaaggaggctgggtgccaggcccccgagggacccatcctctgcatcaataactgtggcttcttcggcagcgcggcgaccatgaacatgtgctccaagtgccacaaggagatgataacgaagcaggatcaggccaagctggctgcctcctctatcgacagcatcgtgaacggcagcgacgccgtcatggagccggttgttgctggcagcaacacggtagtagctgttgcccaagttgagttgcaaacaatgaacgtgcagcagcccgctgatgttgccggacccagcgagggggtggcggcgatctccaaaggggggaaggtagggccgaaccggtgcagcgcctggcaggaagagggttggacttacgggattcaactgcccggtgtgggaacttgtactgcgcactccaccgctactccgacaagcacgactgcaagttcgactaccggactgctgccagggacgccattgccaaggctaatccggtggtgaaggcagacaagctcgacaagatctagggggggttcccctacggttgggtatcaggaagattgtaaaccgcggtaactcgtcatggcggaactgctgccttgccccccgcgcctttctcttccatgtttgctgctacaatcttgttgttgggcattgcagtgcacggtgcacacttgtgtagcccgcctccgagaattctcctgcctctgcatctggtcagttctaaaatgatttgcatgttggctatgttgtgtaagctctatttatggtggtctcgctgagacgggtatttggcttcgcagttatctagctatgtgatgtactgttgtcttgtccctgggtattatatggtacactgcagccagtaatagtaatctgcaactgtgcgttaaatggtccgtcgttttcctataaaaaaaaaaaaaaaaaaaaaaaaaaaaaaaaaaagaaaaaaaaaaggaaaaaagcggccctcga

SEQ ID NO: 76833 - DNA, 308 bp, Zea mays
  Clone ID: MRT4577_170099C.1
cttagctcgagcttcttcaccgactaggccttgtctcattgcgaatagactactactcagagggggagccgttgtgaccggcccgaggagaaacctctgttcgcggagactggcatgacccacagcataagctgaaaaaaaatctttaccaacatgacttacatcattaaagcttagactaacattatcatgcaagcttctgttgatcgtctactgcacatgcatgcatgcatgcatcgacggcataagcatgatatcatagaactgcacaaccattctgatctgatgaattgaattgaaaagttact

SEQ ID NO: 76834 - DNA, 589 bp, Zea mays
  Clone ID: MRT4577_17009C.1
ctgtatctaggcgcttggccaacttgtcattctctcttcccgtcgtgacactcagggacgatgctccttctctttgttcttctctaactccagttcaagccggtgagcttggccggtttgaggacgcacacgacgtctctcttctatgtctgttccggcctcttcaccgttgtggtcggccaggcccatgggcccttaccgcaggtgaacgcgtccccatgggagggcgcgtcgctgtcggtcaggtgccgacgtcggcactacggtcggtgaggtaaaaacggatggcctcttagccattatatgtgaagccttgcacccagtttaagcctcgaattcgatccctctccatgtgttgaatgcttgtatgcgatgggtactatgtatgtgtgggcatctagttttggatagctagttgcgagtggatattggttccccgtgcgccttttctgttatttcttttatgggcttttaactaagatttgggtttcagatttcttgaacccgaggccctacacttttccgttcacggttctaaacctaaaacgatctgatcattttgacaatgtctttttgcacctcgaccgtg

SEQ ID NO: 76835 - DNA, 370 bp, Zea mays
  Clone ID: MRT4577_1700C.1
gtcaaaccgacccatgttgcacaagctgagcaccttgttgacgcgctatgaacatacaatccttcaactagagtacccaaccatatttatggggagtccgagcttactcatggtgaagatggaacacagacagcctcccattacatgagatggacgcttgagacatatcttgccatcacactccatggcgcatgcacaaatttggtttgctcgcaaaagaacctaatctactaggatcttgccggactcacaccaggtacccgtcaacaatacacagccctatttcacatatcgtggtgctctcccactgatgcccacagtctgaactcaaatacgattacctgtgtaactaggcttgctttccgtagca

SEQ ID NO: 76836 - DNA, 258 bp, Zea mays
  Clone ID: MRT4577_170100C.1
cccacttgaattctgattttctgaaaattccaccagtaaaataacatttttccattcactaccccaactgggtacatacatttccggttctccgggggggggccccagtttaattaaaaccaattcccgggttctttatttgggagtgggtatacaccacatttcccccggtttattcccagtcagctttgaaaaacccagcttccttctattaaaataatgagactttttctaggaacatgttttccttctggaaaa

SEQ ID NO: 76837 - DNA, 332 bp, Zea mays
  Clone ID: MRT4577_170101C.1
tgcccttgcctttccttggctctcgctgccaacggcatctgcactccatgcccctactatggcttccagaaccaccgtatcatataccccctccgatgtatatgccggctgcgttctatctgccgccgaaccatctagcccagatctgcgagtaccccactcgaccagccggattcagccctagcccagagtgtaggctcctgcgcgtgggtagatgtcctctggccatttctggccctacaagaccatgatgctgatgcaccatctcagcctggcgcagacgctctacgtgtcaccacagtgccacacgctcgatcagcaatcctgccacc

SEQ ID NO: 76838 - DNA, 291 bp, Zea mays
  Clone ID: MRT4577_170102C.1
attgatttaccacgattcaacgggatttgattcattgtctatgacaaatagtccttgctgatagaactgagagactccatctttgggatacaatggttcagtaaggggttaagagtatgattgcaagctatatcacagacttttactacgactatattggattgcacgctgcaagcaggcagcctttcttgaatacattcgcgaggatacatgaagcttgcactgtggggggcagtgatgttatcattgtgcttgttgggaacaaaggtgaccttgtttacaagaggcaag

SEQ ID NO: 76839 - DNA, 125 bp, Zea mays
  unsure (1)..(125): unsure at all n locations
  Clone ID: MRT4577_170103C.1
aaacattaaacaatatagatcttaacnaaccttttctctatatggttcngggaaacaaccaaactcttttaattccacttccactggggatcccggctaaatttacggtttggccttacaaaagg

SEQ ID NO: 76840 - DNA, 1794 bp, Zea mays
  Clone ID: MRT4577_170104C.1
gcgcggcgaagggggagaagcgcaagtggttccccgacgcgcggtggctgccgccgacaggcgttcaggtcgggaccctgtactacgggaacggcgatccgaccacgccgctgtggccgtcgtgcgcggctggggacgactgcgagcggctgagcatggaggagctggacggcagcgaggagatgccgggcatcccggcgctgccagtgtcggccagggacggggagacaatcctcaaggcgatgggcggcgatgtcgcgccacccaagtggcagggcggcgacggcgcgcccgtgtaccggctcggccccggcccggccgtgttgaacctcacctacattggaaacgagactttagcaacaatcgaaaatgtgtttgcggtgatagaaggaaaagaggagcctgacagatatgtgatcataggcaaccatcgtgatgcttggacatttggagcagttgatcctaacagtggaacagcagccatgcttgagatcgcggagaggctgtccaagctacaagcgaaagggtggaggcctagaagaacaataatcctatgcagttgggacgcagaagagtttgccctgatagggtctactgaatgggccgaggagaacatggacactctagcttcaagagctatagcttacctgaacgtggacatatcagtgtttggtcctgggggtcttatgccccgtgcgacccctcaacttgatgaattgatcaaagaagcaagtaaaatggtaccagatcctgatgaaccatctcaaaccttgtatgacaccatgatgcgccatcatccaccgatcactagagtggctggtgctggaacagattttgcagcatttgtccagcatataggagtcccgtcactcgacatgtcttatgggctgtttgaagaataccctgtttaccactcgttgtatgatgattatgtttgggtggagaggtttggagaccccttgttccacaggcatgttgcagtggccagcgtttggggtctgattgcactgaaacttgctgacgacgagatcatacccttcaattacgtctcttatgcctccgaactggaggagtgcacaaaagatatcgtagataaatgtaaaggatttcctgtcagtttctctcctttgcagaactccatcaagcagctcgagagtgctgccaccaaaatttacaaagagaagaagttgctgcaagcagaaaactggagcctaaagacaagtaagtatacgctgaaagtcagggagataaacgaccggttgatgatggccgagcgagcgttcaccaaccgagaaggactggtcgggagaccatggtacaagcatatgatatatgcatcatcggatcaagacgactgggggaccaaagccttccctggtatagtctcggccatggacaaggctaagaagtccaacacaaccgagacgtggcgactgctgcagcacgagatttacagggttgccagggctgtgtccaaggcttctgcagtcctggatggtaaactaacatgatgtgcacgtgcactgcagattttcattctattctacatagatcgaagtacccgatggattcagtttccatttcgtttcttgaaagctgaagtgcgtggaatacctgtcaggcatcattggataattgtgtaaataatgaagaaatatgctcaagttagtgtcctatgaataaagaatagtggaatcatctctcacgatgattcccttgagagaaaaaaaaaaaaaaaaaaaaaaaaaaaaaaaaaaaaaaaaaaaaaaagggcggccaagactagtgagctga

SEQ ID NO: 76841 - DNA, 619 bp, Zea mays
  Clone ID: MRT4577_170105C.1
attctctcgacccgatccgggtcgggtcggccatgacggtagatcggaaggacgctgaggcggcggcggcggcggccgcacccttcgagatcccggcgctccagcctggaagaacttgtggagcagaggaaagtacccggagtcatgttctcgtcaaaccaataggaaaaagcgacctcggagatcacgtgatgggcctaattcagtctctgaaacgatcaggcgatggaaagaagtgaaccaacaactggagcatgatccacagggtgcaaagagggcgaggaagccacctgcaaagggttcaaagaagggctgtatgcaggggaaaggaggacctgagaatacacaatgtggattccgtggtgtaaggcaacgtacttgggggaagtgggttgctgaaattcgggagccaaatcgggtgagcaggctctggttgggaacgttccccactgctgaggatgctgcccgtgcttatgacgaggcagccagagcaatgtatggcgcactggctcgtaccaacttccctgtgcatcctgcacaagctcctgctgtggctgtagcagcggcaattgaaggtgttgtacgtggtgcttcagcatcatgtgagtctactacaaca

SEQ ID NO: 76842 - DNA, 175 bp, Zea mays
  Clone ID: MRT4577_170106C.1
acctacgcctatgtttgtgatgcacacataagacgttgcattccattccattccattccatctcaaatgatacaataacgaccactctctccacacaagcctttacgacgtactgttagtgcttgtgtgctacaaccatactcaagggggagacgcaactatgccgtgggttagg

SEQ ID NO: 76843 - DNA, 881 bp, Zea mays
  Clone ID: MRT4577_170107C.1
gactcaagtggtggactccatctcggaagaggatctggaggcgggcgagtgcggcgagctgcgctccaaaggcagcacgtcgctgaaggggtacgtcggagaccccgaggccacggccgccctcttcgacgagaggggctggttctgcacaggtgacgggatgaagtacgacgaggagggctacttctactttgtggagaagctgagcgagaacatccagtgcggtggcaaagcgatccccgcgaaggagctcgaagacgtcatccgcactcaccccggtgtccgcgatgtcgcagtcctgggccgccctgacccggacgacggcgaggtgcccatggcctttgtggttctcgagccgtccgtgacggccaccaagcaggagatcatccagctcgtgaaagacaagctccccgagtccaaacagctgcgcggaggcgtcgagttcctggacgcactcccgcgtacgacttccggcaagctgtccggccgccagctccgcgaccggatgccgcgccggtccgtggtcggcagcctcttgatgtagacgcagaggccgggcgaggcagacgtcgctcacttccccaagaggtcgtccatgtccggcgagtgactcgccggccaaccccagcggcgcctcttgaaatgtctactctactctacataatttatacgcctttctgatcgaacggacaaaggagtctcgggaccaggaccgggacctgattcacgctcggtgggaaggacaggaatgggcgctgtccagctgaggttcggctggaccgtgcttctcatgatgtacatgtctgtcatatttcattatgtgttagatttgcttgtattaaatttttcttcacattgacccgaaaaggggtttgcaacgg

SEQ ID NO: 76844 - DNA, 579 bp, Zea mays
  Clone ID: MRT4577_170108C.1
cctcgaggccggccggggtttgttctggcacgatccggcccgccgcacgccgcacgccgcacgcgactgagcgcgccgccgcacgcgactgagcacgccgccctcaccgcctcgtccctatcttgccgttgccgcctcgtccctgtcttgccgttgccgcctcgtccccgtctcgccgtcgctgcctcgtctcgtctcaccgccgccttgagcaacaggagttccgtccggcgctggagctaagcctggagttacccattggctggcgttcaccattcagtatgttcctgaagacacctgaagatccgagacctcaccattcaggtccaaagataaagatattatcagcatccctagagaaggtgaaagtcaagtcacgtgatgccagttgacgcatctttaaaagatgtttaatttgaacaaaaaatatgtatcgagaattgtatggcatgcttaaatttctagagagatcgacatgttctatgcttaaatttctagagatatgatatgggctatgcttaaattgtgttgattttatttgcttttgttggtaagaaaaaaaaaaaaaaaaaagcggcc

SEQ ID NO: 76845 - DNA, 180 bp, Zea mays
  Clone ID: MRT4577_170109C.1
cttccaaccgcgctacgctctcttgtccccggtgctcgcttggattcttctctcttcataggaaggaaggattggctaccgagatattcctactaggtgagaggtatcccctttttttttgttgttgtacatttgtactgggtgtaccagctgaacaacgagcctttatgtgtgccatct

SEQ ID NO: 76846 - DNA, 369 bp, Zea mays
  Clone ID: MRT4577_17010C.1
ttcggcgggcctccctccatcgctcgctccggcggtcctcggggtagaggagtcccctccagtagtattgtagtaatcgcacggcagatctcgctcgaccagccggtcggcccgtcgcagtcgcagtgtcgcaccgtccgaccgcctgatgggtgcacggcgatttgttttcgcgccgactcgtgacgggcctgctgctactgccattcgccacgcgcagacgtacatgtattaccagtggagtagcacgcgcgcgcacgtcgccctggaccatgcatgcatgcatgtacaaggaccatggatccgatcatgtattcatgtatgatgggccgcaacgcaacagggccttgatattttagaaaaaaaaaa

SEQ ID NO: 76847 - DNA, 319 bp, Zea mays
  Clone ID: MRT4577_170110C.1
gttggagcgaaaatgaattttttattacaaatagatttcaagtttcaacatggacaagtcataaccggattacaatatatctaatcggggtggctaacaaaagaaacagtttcaaaaagagtaccatcggaaggtataaaccctttataaggtttaaaaatcatgctaccttaagggaccatcctcaatagggaagccaaagatggggtttacttatataagaagggcgagcctaacgaaccttagaccctccccgaacggggccgaaatactacctgataaacatcaggggcttaaaccttgaggccgcattgctcaa

SEQ ID NO: 76848 - DNA, 372 bp, Zea mays
  Clone ID: MRT4577_170111C.1
caatatacacataatatttttgggggcgggggatgacactgaacatgaaaaatgtcacatttcccaaaaataaccgtgcaccatcataatcttggctaaccaatagctgcttcatgtagcacgatttctgcctgctccatataaagattctactggactaccgcggaatactcatattctaataatgcacatcaattcttagatttttgcttatctatattctaatgacacgaagaatcactagctacccctactgagttaaatggcatctgcaagctaccgcaagacaggcctgttaattcatctggcatgggaattccatttccaggaagtactagctgggtttaccatatcccgtaggatttggagcga

SEQ ID NO: 76849 - DNA, 518 bp, Zea mays
  Clone ID: MRT4577_170112C.1
gcgcagtatcacaaaaagccaacagcctggcttcaccaccatggacgggcgtagcagctgctgctctgcgccgcgctagcgttcgcggcgcggacgagctcggccgaggacccggggggcacgtactgcgccaagaacttcacaggagcgcagacgcaggcgagcatctctcaggtcctggacgcgctggtccaacgcgcctccgcggcctactacgccacagtgacagccggcggcggcggcggctcagtcaccatctggggcctgacgcaatgccgtggtgacgatcgggcgtccatactgcgcgcgctgcgtggcggtggaagagcgtcaagcggcagagtggtgccatggccaggcagacgcccgggtctggaacgactactagttcctccgctacaacaacccccacttgctgggccttggcggacaccgggtacgcgctcatcgctatcaacaccatggaacgccaccgacccggccgcgttccgaccgcgccgagcgcaagattcatggcg

SEQ ID NO: 76850 - DNA, 237 bp, Zea mays
  Clone ID: MRT4577_170113C.1
tttttgttctctctctgtctatctctctatgggggtgtctctaaatctgtggggacacacaaaacagagggggaacaaaatcacagtacataagcaggccacacggacaagaaattcctgtgaactgggggatggtcacaacacccatagaagctgaacctactacactgtcatatcacacaagaagagagcttcagcgtgtgagcaagatcatctctcagaaaacaaacagctagc

SEQ ID NO: 76851 - DNA, 866 bp, Zea mays
  unsure (1)..(866): unsure at all n locations
  Clone ID: MRT4577_170114C.1
caaattcgaatggagatctgaaggtaagaaggagaaggagctcgctaacgcagctgggaagctcgcagaatgccagaagacaattgcttctctggatcgtcaaatcaaatcactgacagatctcgacagtgtggtgctagagcctgaaaggcttgaatccagcagggacatgccactgccactggacttcagaaatggcgatgctgaatttgctatgtttgcggatgacttgtacgactttgaccttccaaacaacgacacaagcttcttttctccacccccgtcgtcgatccagccctcgtctccaccctctgagatgtcagtatttgcaggggggctctcgactcttagcagttacaggagcaaaagagcaattagaaggtgatgaaaggaaggctgcccaaatgccatgctaacaaacagtccatggatgccgccatatgtgtaggtaggtcgatgtacattacagagactgattgttagatttgtgtgatgaacatccattccagcaagctcggtttttgtagcctgcttgatgaggtcttactggtggtcgtttgctgtaaaatgtaaacatggttatcttgtgtgattctagttacaggaaagcaccgagcaagtgcatatttagtgtccactagttaggtaccccgtactagaatatttaatttatttaaatatgaaggaagcatgtcacttatttctctaaatttacaacaatagttaggccctgtacgttgatacgatttctatatattacataaatatatcttattttaattaaaaaaaaaaaaaaaaaaaaaaaaaaaaaaaaaaaaaaaaaaaaagggcggccgncggctagggagctcgtccacccgggaatt

SEQ ID NO: 76852 - DNA, 232 bp, Zea mays
  Clone ID: MRT4577_170115C.1
ttttccttgggggggggcgtacctgaccaaagccgtccaggaaagagttggtaaagggacaaggcggaactttgccaatttttacaccataagaaagacaggttcttcgggacaggaaacaggaaacacccgccccgctttgttctccccaggggccacgggaccgacacgtgggggctttaaacgaatgggtgtcgtgctacgaaaacaaactcccagggggcgagaaata

SEQ ID NO: 76853 - DNA, 556 bp, Zea mays
  Clone ID: MRT4577_170116C.1
acgggctgaaataaatgaaatgaagcacgatgactatcgtactagctcgctaactaacttatttaaaagtgttgagctatcgtcctgaaacccattaccgtggatggctgcgtaagcactgacctgaatgaaccattgaaatggaaatgaatagtatctaatgcaaccctataaaaaagtcgaataacaataaaactggtccggcgattttacaccaaaaaaaacttggaaaaaccctgacgtttcccacctgacgggcctgccattaaaaccgcctttttctacctatctaaataacagagaaggcccgatcggaactgccttaacagtgttaatcagccttaaatggagaatgaatacactttattgcccagcattaaacacggctggggtggggaatacccgcaggttacccaatttaattgccttggccctatcccccgttccttaggtttgcttaccttcctttatgcccacatctaccgcctttcccaacaatgctctatattgagggctcattgtacggtcccttttaagggctttaaggcaccccgac

SEQ ID NO: 76854 - DNA, 369 bp, Zea mays
  unsure (1)..(369): unsure at all n locations
  Clone ID: MRT4577_170117C.1
cacgcgtccgcccacccgtccgcccacgcgtgcgtctactcgtccggtctgcccgcccccagtgcgggccaccaccacctgttcgttatcctcccccacacggtcncctcctctgcctcccagcgcgcgcagccccttcccttgctccactccgttgcgctccgaaatggcgcagctggttccttctccccgtgcttcttctcctcccgcgcccgttcctcggtcggcgccgcgaagagccttgtggaagacgaggcggagctcagcgactggattagcgacctcaaaactgactcgttccacctcggtctcagcagcggagacgaaggcgatgcgccgtccacccgcaggtcctcggtcggctcatcc

SEQ ID NO: 76855 - DNA, 508 bp, Zea mays
  Clone ID: MRT4577_170118C.1
ccggccgggagaaacctactactgcttccgtcgccgccgtcgctccccgagccctagtgtccggatttaacttcagacatggcgtacggctatgtcaagccggaggtcgacgccggtgctccctataataggacgttccgcaagtactgttacggtgggagcaacctccatggggtgcttgatactgaccaccgagcactcgtcgtctcagctcttgccagcgcgcgacaggagaaaggtccagattgggctgaagaggaagacgcatcgcgcgctcactccagaagctgcgcaagtgtgaatacaggcatcgctcctgacaggccagaaaccagagccagtgaagacccatctccggaagatgatcattgtgcacggatatgattgatcatcattgctggggcctaccatgggaagaccttctgccaggatgagatcaagcctgaaatgattggtcagtatcttgcgaagatctgcatttcctatcacgcggctgagtacattacga

SEQ ID NO: 76856 - DNA, 1817 bp, Zea mays
  Clone ID: MRT4577_170119C.1
aaaaaaaaaaaaaaaaaaaaaaaaagcgcaaaaagcgcagaacgccagaggttttctccgcagcctaggaaatgtgccccacccgtcgcttcgtcttcctctccttccggcttccggccccgctcctccccaaaatcccccaaaacctgacgagctggagggccgatccgcggctccccgccgcctgatccgagcagtctactcggcccagccggggatccaagcgggatggggtacttgagctccgtgatcggccaccccaccgatggatcctccgtcagcggcggcggcctcagccagaatggtagatttagctatggctatgcaagctcccctgggagaagggcattccatgcaagacttctatgagacaaagaattgatatgcgctgatggtcagatagctgctctttttggagtttttgatggtcatggtgctgctaaggtagcagagtatgttaaagaaaacctgttcaacaatcttgttagtcatccaaagttcatcagtgatactaaagtcgctatagatgatgcttataaaagcaccgacagtgaattcttagaatctgacagtagtcaaaatcaatgcgggtcaactgcatcaactgctgtacttgttggtgatcgtctcttcgtcgcaaatgttggtgactctagggctatcatatgcagggaaggaaatgctattgctgtttcaaaggatcacaagcctgatcaaactgatgagcggcagcgtattgaagatgctggaggttttgtgatgtgggcaggaacatggcgcgttggtggtgtacttgctgtttcgcgtgcttttggtgacaaactcttaaagcaatatgtggttgtggatccggagatccgagaggaagttgttgatgacacgctcgagtttcttatccttgcaagtgatgggctgtgggatgtggtctctaacgaggaagctgtcgcgatgactagatccattaaggacccagaagaggctgcaaagatgctcttgcaagaggcatacaagagggagagcagtgacaacataacttgcgtcgtcgtgcacttcttgcatgggcaaggtagcagcggatacgcttaaagcgtagcagtaaaattattttacgcagtggtgtgctctgatgtacatgcgtcgattgatttcccgatgttaaatggagaaacgtaactacgtaaggtaggaaacgtgtattatgatgggttgaactgggaaatgcgtgtaccctatactatatatatatactgtagtgtggtctgtattgtggtcgcggacgatgtttgggtctgaagatagtgttgtattgttgtgggaaaaaagataattgcgctttaggttttgtttgtttcggattatctgtttgtctcgagggggggcgctcttgcaaaaggggtccaaaagggagagcagtggccccataacttgggtcgtggggccctttttgcatgggcaaggtaacaccggatcccctttaagggtacccgtaaaattttttttccccggggggggcttttatggccctgcgccgatttatttccccatgtttaatggagaaacgtacctccgtaaggtaggaaacgtgtttttttatgggttgaactgggaaatggggggcccccctcctatatatatatactgtaggggggtcccggcccatgtttgggtcttaaaaaagtgttgtttttttgtgggaaaaaaaaaaattgccctttaggttttgtttaaaaaaaaaaaaaaaaaaaaaaaaaaaaaaaaaaaaaaaaaaaaaaaaaaaaaaaaaaaaaaaaaaagaaaaaaaaaaaaaaaaagcggcc

SEQ ID NO: 76857 - DNA, 546 bp, Zea mays
  Clone ID: MRT4577_17011C.1
gaacgtgacgccgcagcagcagggcggaggttgtggcggcgcaggaggaggaggggataccgttagcgcctggaggaacgtcgacattgcctggctcaaggcgaaggaagcttcaataagaagatatgaggcagccaactggttgcgaaggtatgttggggtagtgtgtgcgaaggaccttgcagaagagccttccgaggacgaattccttgttggcctgagaaatggcattattctctgcactgcactcaataagattcaacctggtgcggtacctaaggttgtggaggtgccgtcggattctactgcccctgccgatgctacagctctctgtgcatttcagtactttgagaatgtgagaaatttccttactggcctgcaaggtttaggtcttccaacatttgaggcatcagacctacaaaagggtggacaaggtgttcgagttgtagactgtgttctcgctctgaagtcattttgtgatgctaagcaagtgggaaaacaatcttcattcaaatttggtggcattgtaaagcctttgtcgggaaa

SEQ ID NO: 76858 - DNA, 245 bp, Zea mays
  Clone ID: MRT4577_170120C.1
gttgatggggctggtgtggcgcgcgcgcaccagggcgctggtgatgacgcccgagcagatcaccaagctgctgttcgccgtggacgggcggcgccggatagcgccgacgctacagcggggctactctcgcaacggcatcgtgctaaccaacccccttgccacagacggcgagctgctgtccgcgcccgtgtagagagcggaggtgctggtgcaggacgccatgcggatggaaaccgacgactaca

SEQ ID NO: 76859 - DNA, 285 bp, Zea mays
  Clone ID: MRT4577_170121C.1
ccggcccatgctcttacgtcttgcggtcagttggatcatctatcgccggtggcgccggcggcagccgcacgcgcagtccggcggtgcgccggcgtttcggatcccgatcagtttccccccgcaaattagggggtatgcgccccaggcatccctgcaagacgcaagacgagagtggagattggtaaggctgatgagaactggagctagaactgccctcgcgaccttcggcggtggggccatgctcgtcatggccgtcgcctgtggcggcggagacaacaagggacc

SEQ ID NO: 76860 - DNA, 183 bp, Zea mays
  Clone ID: MRT4577_170122C.1
aggttacccaagccatccccgccaccaatccggagggatcttaaggcatcggcgcagccaccagagaagaaggctacatcgcccgggccgtaacccgcggcgagccctcagcttgtcatcccagggaccaacaaccgaccggccccgcgcccttaggccatgcctggcttgaagaaagccgct

SEQ ID NO: 76861 - DNA, 280 bp, Zea mays
  Clone ID: MRT4577_170123C.1
tggatatgggatcaaaaatttctttttgtcctcaaaggctataattccgttggggaaggttttaaaaatggggggccgtgaaactgaaattagtttttttaataaaatagattttttacttaatatttattataaaaaaaaaaatggtgggcctttttaaaggttccaagttaacttttctgggattgcgacgttatataattttattagtgtccccaaatttaaattaattggccgctgttttaaaaagtggagatgggaaaaactttgtgtttcccaa

SEQ ID NO: 76862 - DNA, 308 bp, Zea mays
  Clone ID: MRT4577_170124C.1
agcagagatatcttgctcaattgctgtcgaaactgctgcacatcggcaccctgcagttgaggagctctctatcaggtgagtctgctgatgcattacatgctgacccacttgcctcgtctgaaaacatggtgcttgacccaatcagatcctcgcatctcgtatccgctcaccatgctaaggagaaccacaccgactgctgcctagactgcaaccatgtatgcaccatcgacatcaaacagcataacgcctttgagaccctgattggcaagcaggacgagatcctgctgccacctcaagcggtgaatatg

SEQ ID NO: 76863 - DNA, 840 bp, Zea mays
  unsure (1)..(840): unsure at all n locations
  Clone ID: MRT4577_170125C.1
ttggccggaggaatgacccaagaggatatagatcaacttgccgctgcatcaaggtcctaccaccaagctcatgcttcgaatggtcagttttatgataaagcagctgtttcaattcagaagaaatacaaaggttggaaaggtcgcaaacattttctcaacatgagaagaaatgcagttaaaatacaggctcatgtaagaggccatcaagtgagaaagaaatacagaacaattgtaagcactgtcagtgtgctagagaaagtaatacttaggtggcgccgtaaaggtcatggcctccgtggcttccgagctgagcagcaatcaatggtcgaagcaatagaggaagatgatgaggaggaggatgacttcgatgatgacgaagcagtcaagatcttccgccggcagaaggtcgatcaagctgtaaaggaggctgtgtcaagagtgctgtccatggtagactctacagaagcgaggatgcaataccggcgaatgcttgaggaatttcgccaggcaactaattggaaggatcaaatgaagtaacatcaatatttgacagtgatttagagttattagggatcaacgacttcatgtaaggagcatttatgtttcgagatctgccagcacccatcaatgacataattaagtatttagggaatgtgttccagttgctactaattggccgtcaaattgtacagtgttagcgaaatcgaaagtagattatttctgccacaatgtattttcactttctgtatttaggtatattttgacaatggcagttcaattaagtatatttttttatggggttggtgacttcgncagtttggaaaaaatcagtttctcaac

SEQ ID NO: 76864 - DNA, 541 bp, Zea mays
  Clone ID: MRT4577_170126C.1
gtgcggcgctcgaggcggccggtctggataaccgagacgcaatcctgcccttaccgagaatctttctattccctgactttaatcccaacaccaatccagactccgccaacgctgcaccgcacgcggaaactgaacgcgccacgcaagttgccaggttgcgccagatcttgtggacgtcttgccgcttccctgcaaccgcctcttatggctcttcgagccgggcgtgctcgcattctacgctaataggaggggtccagagcccctacgagccgatccgccagcccgacctatcaccagctcacaaagatcctaaccaccgcacagttccacctctaccattcctcactagtatcactccctagctaagaacatcccaccactacaacttcctcgctaacggagccatcctcgatccgcgcgctgaagataacgaaatagctccaaaaaccgttaacgatctatgaagctcatccaataggtggaaccatattgcgagaataaccgagacactatgacggagctgccgtcgttcacacgtacg

SEQ ID NO: 76865 - DNA, 2218 bp, Zea mays
  Clone ID: MRT4577_170127C.1
acggattctattaccatgcaagaccagttctcagggctctcaaataacggagttggctatccatgggcattttgaacccttctccagagaagatacaacaatttccttaggacagacaaacaagtttaccattcgtgaggtctctccagaatgggcattttcctatgagatcaccaaggtcatcattacgggagattttctgtctgatccatcgaatttgtgttgggctgtgatgtttggtgacaatgaggtacccgttgaaatagttcagccaggtgttctccgctgtcacacaccactgcacagcaatgggaatctcagaatctgcattacttcgggaaacagagaagtttgtagtgaattcaaagactttgagttccgctcaaaaccaacctcttctagtttcacagacattgcaccatcttctagacatctgaaatccagtgaagagttattacttcttgcaaaatttgctagaatgcttttgtctgggaatggaaaccgtgaagttccagatggtgatccccaatctggacagtgtccaaaacttaagacgaacgaagagctctgggataggttgattaacgaacttaaagtagggtgtgaaaatccattaagctcggttgattggattgtggagcaactgctgaaaagtaatctacaacagtggttatcagtgaagctcagaggattcaatggaacggattttttatccaagcaagagcagggtattatacacttaatctctgccctaggctatgagtgggcattgtctccagttctcagtgctggtgttggtctaaattttcgtgattcaaatggatggactgctcttcattgggctgcttattttggaagggaaaagatggttgctgcacttcttgctgctggtgcatcggcaacagcagttactgatcccactgcacaagacccagtgggtaaaacagcagctttcctggcttctgaacgagggcatacgggacttgcaggttatctttctgaagtgtcgctaactagctatcttgcatcactcactatagaagaaagtgatgtctcaaaaggatcagctgaagttgaagcagagagagctgtggaaggcatatctcagaggaatgcccaacggcatggtggcacagaagatgagctatcaatgaaggattctttggcggcagtgaggaatgcagctcaagcagcagctcgcatccagaatgctttccgtgccttctctttcaggaagagacagcagaagactgctcgacttagggatgtgtatggaatgacccaagaggatatagatgaacttgcagctgcatcaaggttgtaccaccaagctcatgcttcaagtggtcagttttatgatagagcagctgtttcgattcagaagaaatacaaaggatggaaaggtcgcaaacattttctcaacatgagaagaaatgcagttaaaatacaggctcatgtaagaggccatcaagtgagaaagaaatacagaacaattgtaagcactgtcagtgtgctagagaaagtaatacttcggtggcgccggaaaggtcatggcctacgtggcttccgagctgagcagcaaccaatggtcgaagcaatagaggaagatgatgaggaagacgacgatttcgatgatgatgaagcagtcaaggtcttccgtcggcagaaggtcgatcaagctgtaaaagaggctgtgtcaagggtgctgtccatggtagactctaccgaagcgaggatgcaatatcgacgaatgcttgaggagtttcgccaggcaactgcagaattggaaggatcaaatgaagtgacatcaatatttgacagtgacttagagttattagggatcaacaatttcatgtaaagagcatttcggtttcaagatctgagcaatgacataaattaagtatctagggaatgggtttcacctgctactaactacgacctgataatggtcgttagtttatacagtgtttacgaaatggaaagtagattattgctgctatgatgtattgccactctatatttaggtgtattttcccagtggcagttcaatgaacactacattgtggtgtttgtaacttttaataccccgtttggatgtagatattagagtacaaaattgaaaattagaatcagctttccaaaaaaaaaaaaaaaaaaaaaaaaaaaaaaaaaaaaaaaaaaaaaactcgaaaaggggaaaaatttatgtaaaatcctt

SEQ ID NO: 76866 - DNA, 369 bp, Zea mays
  Clone ID: MRT4577_170128C.1
atggtaaattttttattttttttttttttttttttttttttttgttgcgaaataagaaaaatctcgagctaggggctcctgaagacggaaatcccaaaattgccagacggcagaaagataccttttattgttttaatcaagagggcagatgatgtctgcccttacccacccattttttcaattggacaaacgttggatttcgactacgggcgtgaagcgatcaatcaattgttttgaaacctgtcttgctggacccaccaaaatttctgttggggattggggtaagacttactcctatttggagcgatcctttattgaaccacccggggagcgggaaaaaagcaacaatgtcccaagggggggaacggg

SEQ ID NO: 76867 - DNA, 597 bp, Zea mays
  Clone ID: MRT4577_170129C.1
ggccgcgggttttttttttttttttttcacggttcaaaggggcgttaagggaatgtgcactgacagtgacaatatatagattcgatacatcccaatcctcacagcttgctcacatctagcaaagcaaaaccagtaaaaaaaagacaacgggactgagcccggcgctgaattaaccaactgatttcaggaggatagggggcacgaccgccagagaagcaatcgggagaaggatactgaagaggtagcgctcccaccaatcgagcatgtagaggccgatggtgacattgtagaggtggatcttgcgcccgatccagttcatcctcgtccctcccgcgaccccccggcgccgcagctcgcctcgcctagatccgagagaggagcggcgcgctgtttgattcttctatgacttcgactctacgaggattgagacgacgacggcggactttgagcgctgcagatcaaaacccatgggtcccgttgatgcaggatttgtcgggtctgttgttaccggttgagatcgaggtcctggaggcaggtttgattgtcttgccgggctggtgggacatgcgtgcagctccaattgttgtttgctggact

SEQ ID NO: 76868 - DNA, 461 bp, Zea mays
  Clone ID: MRT4577_17012C.1
actcgacaatggggccctaataccggcatgcgcttcctagaaataatcaatatattgattgagatttatctcgaaaaaaaaaaaaaaaaaaaaaaaaaaaaaaaaaaaaaaaaaaaaaaaaaaaaaaaaaataaaaaaaaaaaaaaaaaaaaaaaaaaaaaaaaaaaaaaaaaaaaacaaaaaaaaaaaaaaaaaaatcccccccccggggggccccaaagggggaaattcccccaccttgggggcccctattaggaaacccgaatctcggaacaattttgggaaaaataagagccagaagaatatcctggagaaaatggtttccctaaaaaatgaccccaaataaataaaggcggaaagcaaaagaggtgaacccttgggggcctaaaaacgtgacgcccccacaaaattagggacgcgcccaacgcccggtttcagacggaaaaaaccttgggccccct

SEQ ID NO: 76869 - DNA, 316 bp, Zea mays
  unsure (1)..(316): unsure at all n locations
  Clone ID: MRT4577_170130C.1
cagcggggggggccaaaaacgcagggagggggagcacaaggccacacagagaaacaaggggacaacaaggcccaagggncaaaaggaacgacacagccngaaccagagaaagngaagaaaccggnggagaaccaaaaagccacaacggcaacgcagggcccgaaacaaanaggnagngcgagggggaaaacagcaagcacccaancgaacngagagccngggacagaagacaaagaaaaaggaccacgggccgaganncaatcgcgngagccaaacgcgacagggcgaaagaacacgaacaaaaagaanccgccca

SEQ ID NO: 76870 - DNA, 1309 bp, Zea mays
  unsure (1)..(1309): unsure at all n locations
  Clone ID: MRT4577_170131C.1
ggcaggttactgattcgtacttcagtgatcaactcaacagatggttcaagtaaagtccgcaggccagcaaagcaaggaaccacctaaccaaaaaaaaaattaatcaaaacttgcacaacgtattttttttattccattgaaattaacactagagactattggcttccagggaagatacagacgatggctacactgtaacacttgcttaaattacttcttctcagctcctcagttaagtagttaacaactaattaaacacatggaattacatggggcaaatgatcataagcagatcttgtttgacaatggttatgtactgccttgcccaaggtagttcccctcttggaaaagagtcttcacattactgcgatgcatagnnnnnncaaccaggcgggtattacattaacattccagtggagaggannnnnnnnnnnnnnnnnnnnnnnnnnnnnnnnnnnnnnnnnngagacatactacaccataaaagaggcagtgatgaaactatgaattatttacagatccctaatacaagtgttaagtgatcgcgttgcctgcttggatttgctactgtatctactccactacattcatgaacttgcatcttcacagaagatgtaacataaagaaataatctgctcgtgtagccagttgtgtaattgacttttattacaaaanctgaattcaggggactatgtggcagctggaaacaatgttactccgtagcaggtagtgctgagtctgaatgtaagaagtttgtacctttggaagaacccaaggagatagcggagaatgtaccagaagaggcaaaccatcaaaatatctaacatatagtcaagggataacatgttactttattgaaaaacctttagagcttatgatattcttcagcccaatcataagagcacccaaacttccaagaacctactagagatcatcaacaggctctgtacatgtattaaacaaaccttttttccattgatagaatataaaaanggacagatgaaaataattaacttactaaataaaggctgtaaaatttcttgaacagttttagggtcgaggaagtaggggcactgtaatgacattgtcttgtttgccgaaattgtctgtactgtggaggtaaagttgcaaatgatgggacatgaatgcaagcatttgaattttgaagaacttggcattgcaggttcaaagtgaccaggaagaacatgcagcatggcacccttaactgaaggataaccacagttgcagattgagcaccatcatcaagacagggttagcgtgacagactcagggacacgaggaataaatt

SEQ ID NO: 76871 - DNA, 455 bp, Zea mays
  Clone ID: MRT4577_170132C.1
atcggttacatgttacagggatccatttacttataaacaaacttgtttcgggcttagggcagatttacccaaaactgaacttttgcaaattacttcaaattcttccacaccacttgtagagctccaaatatgaaattttttcacttttacaagctccacaactttgatatatggacttttcacaaattctcaatggattttaaattccacttttgagactaatttatactttcaaatgtgactactatttctccaaaccacctctcaactttgatccaccactaaaagcaaagttactacttaatcaaagatccaacttcggtactcacaacttatggccaaaaaggcccttatttatggacttgctttgattatgcaccatttcactcttgggctcaatttatggttttgaagtccatccctctccttaagcgatcctttcacttgatttacac

SEQ ID NO: 76872 - DNA, 206 bp, Zea mays
  Clone ID: MRT4577_170133C.1
ccctgacctcccccctccccctaccagaaaagacccctcgaaaaacggccgagctgcggcatggctgagatcgagggtggagctactgcggacgacgctacagctgctgcggaagcgacgacgacccctgaggtggcagtgcccgaagccggagccgctactgaggctaaagccccgcacaagcttcaccgtcaacggaccttctg

SEQ ID NO: 76873 - DNA, 540 bp, Zea mays
  unsure (1)..(540): unsure at all n locations
  Clone ID: MRT4577_170134C.1
ccggccggggaccacacgtactgcacggcgttgatgccgcattggcacggccctgatttatnctccccagatcccactcccgtgccactccgaggctctaacacacagcttatcccctgtctctacggctccggcgaatcggcagctcacggcagaaggttagccatggggcaccacgcatcttttgttgctcgctagcttctgcgtgctggcaacatgctccttgctacttgatgcttcctccgatggactgctaataatcaacctgcacacgatgagactggacaaggaagctatgactggtgcgataccgccgaagatcgagagccaccttcgaaggcctgtgggtgctgaccaccatctcagtgcctcaactgatgacatagtgccttcggacaactacctggacacccagtacttcggacagatcagcatgggcgcgccaccacagaacttgacagggataatctacactggaagctccaacgtgggcggtccctcatccaagcgctactttttgaaagcgggctacttacacca

SEQ ID NO: 76874 - DNA, 317 bp, Zea mays
  unsure (1)..(317): unsure at all n locations
  Clone ID: MRT4577_170135C.1
tcctctaaancnacccacctttttctcccatcccaacaacacanctatcaccagcctttttaaaaaccacaggccaaccccataacctcttcctcnctttctccctctactcaactccactatctacacttctaccatcttactcactccctccctcccttatctcaacttcactattctctcatccaccatctcacatattcacataaaacatttcatttcacaactaatcccaccaatcacaaatcatatatattcattcttcctaatcctttacctaacaccaactataagaccattcttttttcttttatcac

SEQ ID NO: 76875 - DNA, 314 bp, Zea mays
  Clone ID: MRT4577_170136C.1
gccggggggactctctcgctccgaggtagggcagggcaggccatagcaggccagcaccctagctagctagcgcgctcgacgactaacctggctcacggcatggcttccaagcagatcggagtcttgacctgcttcattgccatcaccgatctcgccttccgtccatgcgcatccgccgcgcccatggacggcgtctggacgaacggcggcgccacctgggacggccccgccaagggcgctggatccgacggtggtgcgtgagggtaccactgtgccgacaaccaacctccgttctcgacaatgatcaccgacgg

SEQ ID NO: 76876 - DNA, 340 bp, Zea mays
  Clone ID: MRT4577_170137C.1
gttgttaactcacttgttttacctaatataccctgaattgaaagatacccagacaaagccagggggagaaggatcttacaaaagcaacgcaggagccaagcagctaaattcgaacgacttaggggaaaaaacagggaccaccggttcgcagctttagcgaggacatactgccgcttcatccacagtgttcaaccaaatctctgacaagctcattcacgcaggaagtctcctttcattcccacatctcagagcgaccgtgggacactgtaaaagtcgataacaacggaaacctgaacatatgagggagccaagaacgccatatgtgtcggggcacaatcac

SEQ ID NO: 76877 - DNA, 560 bp, Zea mays
  Clone ID: MRT4577_170138C.1
cctcagcatcttccatacccacatcgctgcggtgccggcggcgagcaccgcagccggcgggcctgtcggatgcgcgccgccggctacatgcaatgacgccgttgtttacaagcatatccagaagatggtgcagctcatgcggcaggaggtccaccaggaaggccaacgagatctccgactacatctacgaggaattcaacatatgaaaagatgcttcttgatgaacctgttaaaaaaactatcaagcaagagtatgaacgcaaagataagcacgttgaaatacacaagaaaattcactactatatgcagttcaatgcttatcgcattaaagttcttcaaactcatgatgatctacatgacaaactgaatgacgatgccatgaacgaacttctgcttgaaagtcacattcaccatgaatacaagaaccttttcaaagacctaatcatagcaggattgcttcagttgaaagtaccagcagtatagctacgatgcctgctggatgatcaccatgatgaggaataagatctgcattcagcacagcatgaatctgcatcagaagc

SEQ ID NO: 76878 - DNA, 492 bp, Zea mays
  Clone ID: MRT4577_170139C.1
ccgggctataacaccgttcaacactttcatctcacttcacatggctgcctacaccatggctatcacctccaggcgatggctcggcacccccatcaagtgggttgccttcagccagggccgcatcaccatgcgcaagaccggggcaaaccaagtggcggcgtccggcaccccgctagtaccggccctgaccgagtcaagtacctggcgcccttctccagggagcccccgagctacctgaccggggagttccccgaggcactacggttgggacaccgtcgtgctgtccagctaccccgagacattcaccaagaaccgcgagctgcaggtgatccacttcctgttggccatgctcagcgcgctcgggtgcaacttgcccgagctgctctccctgatcgtcgtgaagttccgcgagggactctggttcaaggccaggtcccagatcttcaggaagagcgtgctgcactacctggggaaccccagcctgatccacgc

SEQ ID NO: 76879 - DNA, 268 bp, Zea mays
  Clone ID: MRT4577_17013C.1
gtggggggcttgataaaacccggggggcccccccaaccacaccaacacaaagtggtagaaccaaagccgacttgccacaaaaacaacgccccagaaagggacgccaacagccccccaccgccaattttcccaaacaagaatggggtaccctacacaaaatctctgatgacgcggatagaatcccaacccggggcgcaaaaccgagggggggccactaaaaaaggccgctaccacacgagccccccgcgcaccggggcccgccggaaaa

SEQ ID NO: 76880 - DNA, 105 bp, Zea mays
  Clone ID: MRT4577_170140C.1
atgctcgagacgctcagaagcaccctacactggcggcaaacaatctgggacacaacacacaaggtttagagttacacatcgaaagatctctgtcgatatgtgagg

SEQ ID NO: 76881 - DNA, 720 bp, Zea mays
  unsure (1)..(720): unsure at all n locations
  Clone ID: MRT4577_170141C.1
ggtaccctngcggncctgccgggnagcatgaattccggggcgactggaaggggaatgctacactccttaaaacctgtgacccacactcaagacgccttgtcgtagactctgattcacctcaagaagtagatgccaacaaagagatcattttcacctatgatattaactttgaggaaagtcctatcaagtgggcgtcacgctgggacacctaccttctgatggcagacgaccaaatccattggttttctattgtcaattcactgatgatagtcctcttcctctctgggatggttgccatgatcatgctccgaactctttaccgcgacatctccaagtacaaccagttagaggaccaggaggacgcccaggaggagacaggatggaagcttgtccatggagatgtgttcaggcctcctgtcaacgctgacctgctgtgcgtatatgtcggtacaggcgtacagttcttaggaatgctgcttgtcaccttgctgtttgccatcctcggcctcctttcacctgcgaatcgcggagggctcatgacagcaatgctcctcctctgggtcttcatggggctgtttgcagggtacgcctcctcgcggctttacaggatgttcaagggctcgcagtggaagaatgtcaccatcaagaccgcgctgatgttccctggcaatcggtttgcaatttttttgggtctggatggcctcaatctggggcgagaaa

SEQ ID NO: 76882 - DNA, 545 bp, Zea mays
  unsure (1)..(545): unsure at all n locations
  Clone ID: MRT4577_170142C.1
attcggctcgagcattcgctagctattagctagctgatcgctcactcagagcttctagctagctagctagagcagcgacttcatcaagcaggtgggcaagttcgcggtgaccgtgtacaagatggctcacatgataccgatgagctacctgaggacgttgcagtgctggtcgtcgccggcgggcggcggcgccaacaactactggatggtgctcacggcgaccaactggaccggcaccgccggcagctacgtctccaccgtgtggggcatcccgggctccgagtccaggacgtggaagctcctgcaccttcaatggcaccatgtgatgagatcgattcgcacgagtgcatccgttgtcgtaccgtacgtcgtctatctatcgatcggcagcaggctatatatggctttttgtgtgtcctggtcctggtatggtttgagtagtcattcagcgtgtcgtgattgctggtcttgctttttgtgtcgtcgatttaccgagtgcattgttgccatgcattattcctagtatatgaatcgaccccangatt

SEQ ID NO: 76883 - DNA, 425 bp, Zea mays
  Clone ID: MRT4577_170143C.1
tgccaaatcacacttcttaagacaaagcggggacagttgtgacgttatatcgctaaggaaaggccctgagcatctgcaagcggaccggaggtcctatcatttaacgaggacgccgccatgcaagaaaggcggcctaagcatctcgaagacgagataaaggatcttagaggtgaccacatggctgagctgcacagaagcagcataacacagggaacttcttgagacggaccctgaatgggataatgctgcccgggcagacatgaacaaaacatctgcccgtgaagcgcctatagttccactggccgatcagacaaaaaatgcccctgtcacaaagctggctacatctggcacataaatagatgtatagaaagccgattacttcaagcttcgtgggaattatactacaatgctccataagagaggcg

SEQ ID NO: 76884 - DNA, 246 bp, Zea mays
  Clone ID: MRT4577_170144C.1
ccttgttttttttttttttttttttcctatttctcctcatttttcttcgggatcactgcatccaccaaccacttggggaaaaaaatctgatcacacagatgcctctttacccacctacacccgggcatcaaaatttacaaaaggggaaaaaggggggaacagaaacccccaggaaaacaaaaattttttcccacggccccggtatattcccccaggggccccaaaggcccaaaaggtcaaagaccc

SEQ ID NO: 76885 - DNA, 876 bp, Zea mays
  Clone ID: MRT4577_170145C.1
aataggcccacaattcatagaagcaaaacccacgagcctaaaactcccaaaccctcctgtcggctgggctctccctccggcgaggccaccatgctagccgccgctcgcccccttcgccgcctctcctcttcttgttcctcttccgtcggcgcccttcgccgcgtcctcctacaccctccagcacccccgccctcgcttcagcctcctctttcgcctctccggacccttacgcgcgcccttcttccgcccctcgccgccgcccacaggttctccactacatccttctctacctccgccccatcacgcctaggagaatgcgttggcgtgttgggagctccggcgatagccgaggaggaggagggggaggagacgggggcgttggtgcggcatgacacggatgcgtacgcggcggtggagctggctctggactcagtggtaaaggtgttcacggtgtcgagcagccccaactacttcttgccatggcagaacaaggcgcagcgggagagcatgggctccgggtttgtaattcctggaagaaggatcgtgacgaatgcacatgtggtagctgatcatacttttgttcttgtgaggaagcatggttcgcctactaaatacaaggcagaagtccaagctgttggtcatgagtgcgacttggctctgttgacagttgagagtgaggagttttgggatggggtgaacagtttggagcttggagacatcccctttttgcaagaagcggtcgcagtggttggctaccctcaaggtggagataatatttctgtcaccaagggggttgtatctagagttgaaccaacacaatatgcccatggtgctacgcagcttatggctatacaaatagatgcagctataaatcca

SEQ ID NO: 76886 - DNA, 232 bp, Zea mays
  Clone ID: MRT4577_170146C.1
ttttcttacaacaacaacaacaacaaagccttttagtcgcaagacaaggggattgcagacagtataatatgatatctcagatttacaaattagtgtcacacttacagatactggctacgacacacattacttcaaattcttgagatctttgggcagatgtttgaccgataagtttttttctgaatgttatcggtgttgtgagattagcttcgataaatttttttctgaatgt

SEQ ID NO: 76887 - DNA, 600 bp, Zea mays
  Clone ID: MRT4577_170147C.1
cgaaacatggattttccctacaataatgcaaccggttgcactggcaactattcctgaaaaaaaaaaaaaaaaaaaaaaaaaaaaaaaaaaaaaaaaaaaaaaaaaaaaaaaaaaaaaaaaaaaaaaaaaaaaaaaaaaaaaaaaaaaaaaaaaaaaaaaaaaaaaaaaaaaaaaaaaaaaaaaaaaaaaaaaaaaaaggggccccccctttttaaaaaaccaaatttaactccccgggcctgccaacaaaaaactttttttttggggccccaaaaataaaataaatggcccgggtttaaaaaacgggggaagggaaaaaacccgggggtccccaaattaaatcctttggaaaaaaacccccttttcccccgttgggtaaaaacaaaaaagccccaaccaaatcccctttccaaaaatttcccaaccctaaagggaaaagggaaccccccttttaccggccaataaaccccgggggggggggggtttcccccaaggggaccctttaattttgcaagcccctaacccccctttctttggtttttttcccttttttttttccaacttttcccggttttcccccgaaaagtttaaaaagggggc

SEQ ID NO: 76888 - DNA, 595 bp, Zea mays
  unsure (1)..(595): unsure at all n locations
  Clone ID: MRT4577_170148C.1
tttattaattttttttccctttcttttttcttttttctttatttcttttttttttttcttttttttttttttctcctccccctttttcccccccttaattcccgccccgtcccctcctccctccccccctcccccatttttggccgcgcggggcctnccccaatccttcccctacccttcccccctgtgaaatttttatccccccccaattcccccccacatcccaccccgaaccctaaattctaaaccccggggcccccaaccagtgaccccccccccattaattcccttgcccccacccccccctttccattccgaaaaccccccctccccccctccttaattaatcccccccccccccgggaaagcccgtttccctattggcccccccggtggttttccccttcccccttgaacccgccccccgcttattccccctcccccccctgcccctaaaaatttcccgcaacccccccccccctgtttgccccccccggccaaaaccccctttgatggccgcctaacccccggatataaccctgaacccccttccggttccgcctttccccccccccgaaatatccccccccccccc

SEQ ID NO: 76889 - DNA, 625 bp, Zea mays
  Clone ID: MRT4577_170149C.1
cagtgtccgccgagctcggcgacctcaccgcgctgcgcgtgctctggctcgccggctgcaacctcgtcggctccatcccggcgtctctcggccggctcgccaacctcaccgacctcgacctgtcgctgaacgcgctcaccggcccgataccaccggagcttgccggtctgacaagcgccgttcagatcgagctgtacaacaactcgctctccggcccaatcccgaagggattcggcaagctcgcggagctcaggagcatagacatctccatgaaccgcctcggcggcactatcccgcatgacctgttcgaggcgccaaagctggagagcctgcacctgtacctgaactcgctcacggggcccgtgccggagtccgcggcgaaggcgtcctcgctcgttgagctgcgcctgttctcgaaccggctgaacggcgcgctgccggcagatctcggtaagaacacgccgctggtgtgcctggacttgtccgacaactccatctccggcgagatcccaaggggcatatgcgaccgcggcgagctggaggagctgttgatgctcaataatgtgctcaccggtcacatccccgaggggcttgggcggtgccataggctgcgacgggtgaggct

SEQ ID NO: 76890 - DNA, 560 bp, Zea mays
  Clone ID: MRT4577_17014C.1
aaaattcaaacaaacgggttttcaaataaatcctcgtttcgaaggccccagccggaggcccgaccctgaaatccaaaccttgtttttggtaaatctttccccaaacccatttaaaaacatttagttggggacgggggcccccccctgtttttcagcgcatcaggggttagtatgaagtaaaaagggggggctaactttacagaacacgggttttaaattcccaggggacgtaagaagggggccgcagttacggggaaaacgatgggcccacatttggcccgactcctgccggggggggggcagttttaggggaaaagcctaggaacagagggccgggggattttcccttaaagcttaaatttttgggaggcccccctgaggggacaaggcctgaggggcccaaaatccttcctctaactaaggactactttggggggttaaattagcccaccaacaaatatttttgtttttcctgataccacaatggggggggggaaaaaaattttttgacttccagggaggcttgccaatagccttttaatgttaaatttctgaaaccc

SEQ ID NO: 76891 - DNA, 227 bp, Zea mays
  Clone ID: MRT4577_170150C.1
acgtggcgtccggccggtctcttgcacagataccttgatctacgacgtacgtacgtatgtatcatgattattcgatcgccaacgtcctgacgacgatggagtctctctcgtctggggccatcactggaccttccttcaaggtagcgcccgcacgcacactggacaactggaggtcattcatcatgagtgtgtctcgacgaaaggccactggtagagcgaccttggac

SEQ ID NO: 76892 - DNA, 355 bp, Zea mays
  unsure (1)..(355): unsure at all n locations
  Clone ID: MRT4577_170151C.1
ttntttttttttttttttttttttttttgtttttttgtgtttttagttggcaacccttttgagatgaattggtgaaagggtgcaatcgggtcagctgcagatcggttaccctacaacgggtggttacacaccggagcgggcctatgccgacgatataacccaccattctggtttatatccgcgatttgttttttatttcagaatggcgcgcgctcgccattgactggccacaaatggggttttatctaggttaggcttccgggccagccgagttagtccttaagggcaactagcccggatccggttggcgaacagggggacggtggatggaccagaccaggccccccaacccggt

SEQ ID NO: 76893 - DNA, 777 bp, Zea mays
  Clone ID: MRT4577_170152C.1
atggagcatgggtggaggcgctcgacggggtcgtggcgcgacaaacttgcggacacggacgcgatgtggcctgctggccggccgcgtagggagggcacgccagcaggggcgggttgcccggctgctggccgcacctgcgctatgcgcgcgcacgaggaagccatggaggaaggggctggggtggcgctcggcaggggaggcgggctgcgcatcgcgctagacggcgatttcgagaggaccttgtcgggacgagttcggccatggctgcagcacggccgcgcgccgcgagcagggtccgaggtcggccgcgcgctcagtggagaagacaaggaggcgaggggaccgaggccaggggaggtagagggagatgggcacagtcgaggccggcctggcggttttctgggtcctgcgagcgtcgcaggggcagttgcgagcgagcggcggcgctgggcaaacgcgcacgcgcgcgctgggctggggcagcggctggggaacgcgcgcgtggcttggggcacgcaggggcgcggtgctgggctgggccgcgcgcgcggctgcctgggcgcgcccgcagcgtgggccggccaggggaggagcaggctgcggcaggaggagagcgagggggaggagctgggccgcggaaagggaagggggaaaggagccggttgggcctgcgcgcgggagtgggccgggggtgaggctgggccggctaagaagattggggaagcaaagcctttttctattttcttcctttttattcttttctttattcctatttga

SEQ ID NO: 76894 - DNA, 1555 bp, Zea mays
  Clone ID: MRT4577_170153C.1
cattgggaccctcgaggccggccgtcgcgtggctcgttgatacgcccgcgagccgcgaccccgcgtacgccatggtccggcctgcgcttatccggcgacattactcacgaggcgatggcgatgcgaggaaggacagctgggacctatccttatttaaaccctgacgccaccttgtgctgttcaaggagtcaatactgaacagtccagtcagtcgtctctacctcatccgcctgacgaatcttgattcttgagcttgattgggtgtcatctcttttagctgcaactgcagctggctgtgatcatggcatcgctgagtgctgacctcttttacgacatactcaagcgtctcgatgctgcagctctggcaagagcaggctgtgcctgcgctgattttcgtgccatatcaaatgaagaggatctgtgggaaaatgcctgcacatctctgtggccatcaatgagacgagatgacgttaggagcttaattgcctctgctggtgggttcaggaagttctatgcggattgtttcacacttatactgaacaaggacgtccctgtggttcaagccaatgaaactaacttctttgccgaagaatgggctgagtctgactactactactacgacgacggcggcatggacgattctgaaaactcattgccttcggatttcgtgtctttgatcgatgtatggtacaaaggccatgcgctctactcgaaggtcatatggggaattcccagctcagacagtgccaatggatggttctacaactacccgttccggatcgacctgtctcaacactcggctgaaaacatcgagaacaacaacggagatgtattcctccaagatgtgcccggcgaaggaggttgccctgccaggtggcggaatgcatcctgctgatgaagttccgcgtgacaggcatgggcggcgaggaggctggggagccttcgacgctcgcgctgacggaactgagcatgcagatccaggacatgggcggcgtccatctcaacggccgctgcagcctcctcctcctcaaggaggcgctgagctgccaccgcagcaggaactacgatgaggtgctggagtcttgcaatttgtacctcaaggcacagagtgagctgaaggaagagaagatacgcagcgagtgccggttcgacacgctgtgtgttttcagtggcattgcaatatttgctgctatctgcaccatgtggtatagaaagttttagaagatctgactccataggtagataaggctagctgcggattcagtaagtgttgtagtgattcacatgcttgagaacttgtaaacactgtgtacttattaatgctggttatttagttctccttagatatttcatggggattcatactttgaaaatagcctgttcctctccttccagagccgcagccacaccatcaagaagactagtagggtgtcaaacaaaccatatctgcagtgctcagcggtaatgctatctccagcagcttacttatctacgtcttttatttcaaactttattttataaataatgcaatctataatgtgaaacagtgttttgc

SEQ ID NO: 76895 - DNA, 788 bp, Zea mays
  unsure (1)..(788): unsure at all n locations
  Clone ID: MRT4577_170154C.1
tctatgcggattgtttcacacttatactgttcaggacgtccctgtggttcaagccaatgaaactagcttctttgccgaagaatgggctgagtctgactactactacgacgacgacggcggcatggacgattctgaaaactcattgccttcggatttcgtgtctttggtcgatgtatggtacaaaggccatgcgctctactcgaaggtcatatggggaattcccagctcagacagtgccaatggatggttctacaactacccgttccggatcgacctgtctcaacactcggctgaaaacaacgagaacaacaacggagatgcattcctatccactgtcagtggcttgtcaccggtaccctcaatggagcaagaaaggaaagacggcaagctatggagggagttgaacgatggtgtaaagctgagctggattgttgtcaacaagaagatgaagagggcagtgaacctgacaagctggcacccgctgagcgggcagaggcactggccgaccgatgctgacttcgttctgcggttcgggtctgtgcttccggcgaaggaggtcctgccctgccaggtggcggaatgcatcctgctgatgaagttccgcgtgacaggcatgggcggcgaggaggctggggagccttcgacgctcgcgctgacggaactgagcatgcagatccaggacatgggcggcgtccatctcaacggncgctgcagcctcctcctnctcaggggagcgctgagctgncaccgcagcaggaactacgatgaggtgctggagtcttgcaatt

SEQ ID NO: 76896 - DNA, 569 bp, Zea mays
  Clone ID: MRT4577_170155C.1
aaaaaaaaaaaaaaaaaaaaaaaaaaaaaaaaaaaaaaaaaaaaaaaaaaaaaaaaaaaaaaaaaaaaaacttttaaaaaaaaaaaaaataaagaaaaaaaatgcccatataaaaaaaaaaaaaaaaaaaaatgggtttttcctttggcgggcccccccctagggggaatttttgcaattttccttcccctggggggcggtttgaccttccttttagggggcccctttgcccttttggggggtggtttcccatttccggggccgcgtttttccacctgggggctggggaaacccgggggttcccccccttttttccctttggggcacatccccttttcccagggggggttatttggaaaggggccctacccgttcccctttccaaaagtttgcccccccttatggggaatgggccccccctttttagggccctttaatcggggggggttggggggtttcccccagggggcccgttacttttcccggccccttatcccccggccttttcctttttttcccttcttttttgcccaggggcgccggtttccccggaaaatttttaaaggggg

SEQ ID NO: 76897 - DNA, 477 bp, Zea mays
  Clone ID: MRT4577_170156C.1
cgaaactgataaggccagactacaacaattctctgtgatgaacaagttcaagaagcatgcacttagggtcaaagctgaacatcttttagatcaagaggctgctgacataaaggatatgtttgagaagatggattttatacacggatcaaatgcttaatttcgatgagctgaagcttggtctgtataaaatcggtcaccaaattcctgatgcagatgttcatatactaatggaagctgtgagtagacattcttttactccacaaccgaaacttattgcacctctttaatattggaacttggaattttttatcgctaaagtgaattacctatgaatgtattttgttcaaacctgggttaaatgtttttccgaatttccattttaatcaagcatttctttcacgaaggggatgaggttgggcccttttatggttactgttagtgcatgttatgccacgcggatgcctgttggaaaacggg

SEQ ID NO: 76898 - DNA, 838 bp, Zea mays
  unsure (1)..(838): unsure at all n locations
  Clone ID: MRT4577_170157C.1
tcggcgccgcccctgtcctaacggctctgcgacttctccgggcaccgcttgcacgccatcagcgccatccccgatacctcaacttgcatatcgcgcgccgccatccaccttgcccatcgtgtgtcgcatgcccaaatctcatatttttatgccccacgcagcctaggccatcccaccgcagagcaggaaaaccctagcgtacccacggaccattgctggcccacatggcatcccggcctgtggccacatccatctcggcgcctcgcccgccacacccaacacgctgcaccgccgctgccgcttctcctcccccaccgcaccatcgccctgagtaccaccgcacacgccgccggggccgcatctctccccgtcagggcccagccgaacactgtcgtcgcctccacctccgcgtttgggccaccgcaagagttcagggctcctctagggttcgagatcaaatccggccagtagagcagcatcctcagcaccacgctcaccatccccctctacctcggcaccggcgtcttcaccctcgggtacacaccacgccttttctcaccatctgagcattgccaaggagctcctctccatccccgatggcaccacttcagattcctgatcagcaggagagtcgttgaggctgagacgacggcacgaatgcggcaaggagcttcagattcactgccattagaaacttgcaggtgaggaaggagagggtccaagttcctgacctctgcatcgactgagagggtccaagttcctgacccctgcattgactaattatcttntgagtttcatcattatgntgaaaatggtatgcgttcaaatactcaattga

SEQ ID NO: 76899 - DNA, 406 bp, Zea mays
  Clone ID: MRT4577_170158C.1
agcccacgcgtccgatatatcgtcccttctctccgactctccctcccttctccacggcccagtgcgcacctctccctccacccctcgtcgcaaggcccaggcacccgagctaggcacgacgatgcaagtcaagccggaagctgcggttccttcgccgtcaccgccatcgccgccagctccgtctttccatcaccgaagaactgaggaggacaacagcggcgtcgaaattccgcggcggtaaccggcctaaacgtatcggcgtcgcggcatacaagggcattccaggcgaggcgaacctgagaatgcccagccgaaacgtcaacgctacgcctacgccgggtacagtgcacttgcacgagcatcgttctcatggggtcactgtctcacttgctggctcactgcacgc

SEQ ID NO: 76900 - DNA, 610 bp, Zea mays
  Clone ID: MRT4577_170159C.1
cccggtgtcgacccacgccgtccggcgtagcagccatggtcactctccgctggtcggtcactcttgcaggctacacccttcactcagacgtactctcttattagctctaggctgtagctagccgcgccactccttcgggtctgcatgaggcttctgataggcacacaatggccactgccgaggtccagacccagaccgtcgtggcggtcgaggaagtcggccgcggtcggagaccctcggcgtcggcacgcatggcccgaggagtctgccacccgccgaggccgaggccgaggccgaggctagttgctcctggtgatcccgaaggagctttccaaggcctagcagcaggcagcctgcgaggcggaggccgcggctactgctggagccgaggagcccgtcgcggccgtgaccggcacgccgaggcggcaggctgttgctcctgctggacccgatgagactcctgcggtcgagcacgaggcagccgccgaggaggaggctgctgctgcttctcctgctggagccgaggagcccgccgcggccgagcctgtcgccaaggcacaagctggtgctcccgaagagctctccgcggactatccggaggctcctgcta

SEQ ID NO: 76901 - DNA, 343 bp, Zea mays
  Clone ID: MRT4577_17015C.1
tattggtaagctggacgcctgcggaccggccggaataattacctgggtcgacgagctattattcggcggccgcccttcctttttttttgggggttttgtacattaattaatgacattatatacaacgggtaataacacacgtttgtgaagcaagcgccgagagagaccacttttatagagggcacatacgcttgccgaccgtctaccagttggattggttagaagacaggtttagtgttacgttcactgtgccctcctggttcggcgagagcgtctccattcccgatagggtttagggttttttagaagatttcagacagtctttgtatagatgcgtccgctt

SEQ ID NO: 76902 - DNA, 579 bp, Zea mays
  Clone ID: MRT4577_170160C.1
ccggccgggacacacacacatccatcaaagaaacaggcacacaagaacaaatacctcgctaccaacaatggcctctaggtcctccatcctacttgcaacgtcgatgctggctgcgctgtttgcggttggtttgtgcaccaccccgctcaccttccaggttggcaagggatccaagcctggccacctgatcctcacccccaatgttgcaaccatatccgacgtggagatcaaagagcacgggggcgatgacttctcctttacgctcaaggagggcccgaccggcacctggacgctcgacaccaaggccccgctcaagtaccccctttgcatccgctttgctgtcaagtccggtggctaccgcatcgctgacgacgtcatccccgctgatttcaaggctggcaccacctataagaccacactcagcatctaatcagcctctgatgatgaattatatttcaaaagagctcacctggtgctcatgttagcaagacaatattttttctatggttattttgtggcaccaaaccacccaagaaatatgtgatacaaaaaaaaaaaaaaaaaaaaaaaggggcggcc

SEQ ID NO: 76903 - DNA, 620 bp, Zea mays
  Clone ID: MRT4577_170161C.1
cctatagggcgattgggatcttcgaggccggccgggacacacacacacacatccatcaaagaaacaggcacacaagaacaaatacctcgccaccaacaatggcctccaggtcctccatcctacttgcaacggcgatgctggttgcgctgtttgcggttggtttgtgcaccaccccgctcaccttccaggttggcaagggatccaagcctggccacctgatcctcacccccaatgttgcaaccatatctgacgtggagatcaaagagcacgggggcgatgacttctcctttacgctcaaggagggcccgaccggcacctggacgctcgacaccaaggccccgctcaagtaccccctttgcatccgctttgctgtcaagtccggtggctaccgcatcgccgacgacgtcatccccgccgatttcaaggccggcaccacctataagaccacactcagcatctaatcagcctctgatgatgaattatatttcaaaagagctcacctggcgctcacgttagcaagacaatattttttctatggttattttgtggcgccaaaccacccaagaaatatgtgatgctacatgtcccgaaaaaaaaaaaaaaaaaaaaaaggggcggcc

SEQ ID NO: 76904 - DNA, 617 bp, Zea mays
  Clone ID: MRT4577_170162C.1
cactcctatgggcaattgggattctcgaggccggccgacacacacacatccatcaaagaaacaggcacacaagaacaaatacctcgctaccaacaatggcctccaggtcctccatcctacttgcaacgtcgatgctggctgcgctgtttgcggttggtttgtgcaccaccccgctcaccttccaggttggcaagggatccaagcctggccacctgatcctcacccccaatgttgcaaccatatccgacgtggagatcaaagagcacgggggcgatgacttctcctttacgctcaaggagggcccgaccggcacctggacgctcgacaccaaggccccgctcaagtaccccctttgcatccgctttgctgtcaagtccggtggctaccgcatcgctgacgacgtcatccccgctgatttcaaggccggcaccacctataagaccacactcagcatctaatcagcctctgatgatgaattatatttcaaaagagctcacctggtgctcatgttagcaagacaatattttttctatggttattttgtggcaccaaaccacccaagaaatatgtgatgctacatgtcccttcggaaaaaaaaaaaaaaaaaatttgcggcc

SEQ ID NO: 76905 - DNA, 273 bp, Zea mays
  Clone ID: MRT4577_170163C.1
gtcttctacctcaagatgaagggtgactaccacaggtaccttgctgagttcacttctggggcagagaggacggatgctgttgagatcaccatggatgcctacaaagctgctcaggacattgctctcgtagatttggctgtaaggcatcccatcagggttgtggtcgctcttaggttctcagtgctctacgacgtgattctggacttacctgatatcgtcttcatgcttgcaatacaggtcttctatgatgcgatccctgtggtaggcagtctg

SEQ ID NO: 76906 - DNA, 576 bp, Zea mays
  Clone ID: MRT4577_170164C.1
gaacaagctttccaaataaattaaaactttttttgagtttttacatgtcaaaacacacaattattgaatattgatacaaacaagtgaaaaaagaagataacattattgatgatacattgcaagagcttcgattgtggacagagtaatcagaatctcattattttgtttcccctagagcgtttctgaggttagagtacttggtttcgagctcataccatgaatccaagttcaccaaacggttaaactcttcgaaagttatcatcttttctaagtggtctttggtggttcctttctccttgagaatcttaagaacatcgacaagagctcgagtcgacgcatagagcgaggtaagtgggtgtgcgatcaagtgaaaacccatttctttaagctcatcaggcgtatgcaatggcgtgcgtccaccttcaagcatgttacacagtctgtaaccttttgtgcgccttccgatttccttaagctcgtcatcgtcccttcggtgcctcaacaaagggaagcatcagctcctgcctccattataaagattagcacgggtcaatggcgtctggaaagtccttgttt

SEQ ID NO: 76907 - DNA, 298 bp, Zea mays
  Clone ID: MRT4577_170165C.1
cggaaacccggggcggcgccacgcgtacgcgcacgcgggcaaggccacaccggcacgacgccccgtccgcacacggagacccgccgggggggcgggcgcagggccagggcggcacccttggcccgcacaacggagacaccggggagcaccagcaaccagagggggaggacccgaagccggcggcagcggcaggaccgcaccgccccctgcaagcgcgacaccacgcgcggacccgaggcccacgccggcgaccaccaaagagaaagggcgggccaccagaagcggaacgacagcgagc

SEQ ID NO: 76908 - DNA, 181 bp, Zea mays
  Clone ID: MRT4577_170166C.1
gtgagatccgacgagtctagccactgtaccacggcgagcagggagagatagaatcgggcggcgccattgctgtcgtcaaacctcacctccatcgccgctcagtgccggatgacccgatcccgggcgttcgagtgtgggcgtggatcattctcggggaagaatccaagtgtgtgggtactcg

SEQ ID NO: 76909 - DNA, 123 bp, Zea mays
  Clone ID: MRT4577_170167C.1
tcacctaatctgcgatcaccaagcgcattatatttaggagatgcaaactcaggtatatgccctattccctagagtaaatgacaggtaaaccaattgtggggtaccctgtcaccctggaggttt

SEQ ID NO: 76910 - DNA, 293 bp, Zea mays
  Clone ID: MRT4577_170169C.1
cccacgcgtccggtctgctcgcttttcctcgcctttcatcctggctgcgaacccgatctcctggtcggcccgcttcgttggggcccaatgccgggacgattcccggggtgactaagccggcggcggaggatcccgctgccgtgaaggcgccggccgggatgaagccttggctgtgaggcgggtgccatctcgctagtccgccggcacgttgggcggctagggtgggaggggccgtatgtatgggcaagtagagcgtggcagacttacctgatgtacatttccttggtgctgta

SEQ ID NO: 76911 - DNA, 129 bp, Zea mays
  Clone ID: MRT4577_17016C.1
cacacataaacaccatacaccggcaagttttaaacacatttgccctcacactccctactcactcaacacattacatcaacccctcatcacaaactcatcttacttcaacctcatatactatctttctcc

SEQ ID NO: 76912 - DNA, 709 bp, Zea mays
  Clone ID: MRT4577_170170C.1
tttcagtcattgaggctaggtggctctggtatactactctcgcgaaactagtatttaatgatcggaacattataaagcattttgaaggtctatctgtggattcatgtgcctagataatttgctgttgaaaagcttgtcggagaagttgtcttcgaacccatctgctgccgacatgtctgaccacctcccattgcaccatgtgaacagaactatctcagactagttacatgcaaagacgtcctacctgtcttggatgacgtttggacagaggatcgcgctgagtgtgagcgattcatggaacatttaaaggacgctgcacctgacaatagtattttactcactactctcagtacaacagatgcagaagcaaagcactctagccatgcatacgacctaccattcttgtctagagaatatatctgcaaagtgttccagctatgttttggaattgccatgaaagctctgaactctgaattcctacagactgcgaaacacattgtggagaaatgctccggagagccccttgacattacagttattgcacgcgtcctccatggaattaaaggaactgaagaatggcgtcacatatgcaataggaatgtattagatgttcaggatgacgaacatacaggatttgcatgcttgctcgttgagatttgctcatttaccggaccatccaaagccctgactgctacactgctctatattt

SEQ ID NO: 76913 - DNA, 2169 bp, Zea mays
  Clone ID: MRT4577_170171C.1
atgccgcctcgtagggctcggggtagtccgcaagttcgtagtggggactcgatgagtccggtggcaatgttagccgtgatgcaggccatgcagcaggagttggccattctgaggcaagctattcctgttgcccctataggtgctgctcagggagccggtggtggaggagtgtccgggggcactgtccctgcgggtgctgctccaggtggcgaggccgaggtgcctcttccagtcagtggtctttgtctgatgcagtggatgggcatgaagtcggatacttttgatggcagtggtactccgatcgagacggtggattggctaacttacgtggaggataagatgaatgtctttgagattgtgtatggtgatcgtgttcgctttggcacacaactgttgaagggagaggctcaaatttggtggagaggcgtgcaggcaacgcactcctcctcaccaggagtcctgtcttgggatgtcttcgtcagacagtttgaaaagagattctaccaggtcaccttcctagagaaaatgaagattgatttgcagtcctacaagcaagagaagaagtctgtcacagagtatgaagtgggcttcaacaagatggtccgctttgtccctcatgtggcttataatgagatggagaaggcgagccagtttcatcagggcctgaaaccttctatcaggcatgccctgggagcctttcagttggtggacttccgtactacagtggagcaggcactgggtgtggagatgcaacaccagtataccatggagtcacagaagtcttcgggtgttgatcagcctcgtggccaggacgcgaggaggggcaacactggagagtgccagtggaatggtaggtattcaatctgcagtcaagaccacaaggatgtggtgtgtaggaggaatcccaatgggaagctcagatgggagccagtgacttcctcctcttctcaggacactgtcaacatgatgtcaagcgctgagcagcaatttttagtttcactccctctgcagcagttttatgtgcctgggacttctcagctcgtgccgatgcagggttttcctcagtatctggctgcgcctactcctgcactgactactcctttgccgtctcagtttggagctccgtgtctgcctcacccggcggctcattggggttcttctgttaatttcacttcgggagcttcctcttctgcgggtatttccggagcttatgtgctacccgctgcagatgccagagagcaaggagacgtgaggttgggtcacccaattttggttagttctgctaatggctccattagtagctgtgtagtttgtccggggtgttccgtcattcttgctgatgaggtcttttcggccaatcttgttgtgatttccttgggggcattcgatgttatcttgggtatggattggttatctcagtatcgcgcagttatatcctgtttttggaagacagtgttattgcaggcgccgtcgggtagggaggtggtattcttgggaagttccctaaagtgcatgttatccttgttggcgcaattgcttccggttcgccggtcaaggaagtcgggaatctttttctccatggtggtggagggtgaggctaccttgcgggtgcatgacatccatgtggtgtgtgactttgctgacgtgtttccggcagagcttccaggcattcctccggagcgcgatgcagcctttgagatcaagctgattccgggtacgcagcctattcataaggccccgtatcggatggccccaaaggagcaggttgaattgaagcgacaattggatgatctgctggctaagggtttcattaggcctagcaggtctccatgggcttccccagtattgtttgttgagaagaaggataaaagcaagaggctatgtgtggattatcgcgctttgaatcaagtgacaatcaagaataaatatccgctaccccgtattgaggttctctttgaacagttgaggggtgcccgggtgttctccaaaattgatttgaactctggttatcatcaattgaggattcatgaggaggatattgagaagaccgctttttgcaccaggtatgggcattatgagttcatagtcatgtcttttggcttaactaatgcccctggtaaggaagcagaagcactagatgagtctgaatcattgggtactgatgcatga

SEQ ID NO: 76914 - DNA, 536 bp, Zea mays
  unsure (1)..(536): unsure at all n locations
  Clone ID: MRT4577_170172C.1
attgggtccctcgaggccggcctacaacgctgctggaagagctgccggctgcggtggatcaactacctcaggccggacatccgccgaggccggttcacggcggaggaggagaaactcatcatcagcctgcacgccattgttggcaacaggtgggcacacattgccagccacttgcccgggcggacggacaacgagatcaagaactactggaactcgtggatcaagaagaagatccggaagccagcgatgagcacgacgacgagctcggccgtgacggcggccagccctccgtgcagcacggcggcgttggacgcggcgcttggtcgtcacctgcagacgccgttcagcgcggcggagcaccggctcgacgccatcctcagccagagccttgccttgccgccgccgaagctgggctccggcgngcggcgggcggcggcggccaagagtccccgccgctgcccccgcactgccccttcttcatgttcgacacgagcgtcagcgtcagcccgccgtcgtcgctggcgtcgcccgcggcc

SEQ ID NO: 76915 - DNA, 2511 bp, Zea mays
  Clone ID: MRT4577_170173C.1
tcacgactttagagcaaaaaccaccgcggccaattcaagatcatgagttgggtaattcccctcatgcttcctcaactgccttgagccatgagcaatcactttgccttcctcgcaatcgccagaccagacgaagagaacacccttctccaagagtctagtcaaaggcttagcaatgctggaaaaatttggtacgaagcgccgataatatccagcaagccccaagaaacttcggatttcagagacactagagggtctcttccacttcaccacagccgcaacattcttgggatcaaccgcaatgccctgttgattaatcacgtgccccaggaaagccacttcggacagccaaaaggcacacttcttcaacttgccatagaactggttcttccttagggcacccagaatgagacggagatgcggctcatgctcgtccttggtctttgaataaatcagaatatcatccaggaacacgaccacaaagtcatccaggaactcatgcaacatcatattcattgcttccataaaagtagcaggggcattagttaagccaaaatacatgactatgaactcgtaatgcccatacctggtgcaaaaagcggtcttctcaatatcctcctcacgaatcctcaattgatgataaccagagttcaaatcaattttggagaacacctgggcacccctcaactgttcaaagagaacctcaatacggggtagcggatatttattctttattgccacttgattcaaagcgcgataatccacatatagcctcttgcttttatccttcttctcaacgaacaatactggggaagcccatcgagacctgctaggcctaatgaaacccttagccaacagatcatccaattgccgcttcaattcaacctgctcctttggggccatccgatacggggccttatgaataggctgtgtacccaaaattagcttaatctcaaaagctgcatcgcgctccggaggaatgcctggaagctctaccagaaacacgtcagcaaagtcacacaccacccagatgtcctgcaataacactgtcttccaaaaacaggatataactgtgcgatactgggataaccaatccatacccaagataacatcgaatgtccccaaggaaatcagaaccagattggccgaaaagacctcatcagcaagaatgacagaacacccctgacaaactgaacagctactaatggagccattagcagaactaacaaaaattgggtgacccaacctccgcagaagaggaagctcccggagtgaaattaatagaagaaccccactgagccgcctggtgaggcagacacggagctccaaactgagacggcataggcgtagacgatgcaggagtaggccggccagatactgaggaaaaccctgcatcggcacgatctgagaactcccaggcacataaagctgttgcggaggaagaggaactgaaaactgctgctcagcacttgacatcatgttgatagtgccctgagaagaggagaaagtcactggctcccatctgagcttcccattaggattcctcctacacaccacatccttgtggtcctgactgcagatagaacacctgccactccactggcactccgagtcagaagatttgccacggtacggatggtggcgctgatgctgagacttgcccctcttgtgggctggacctcccatgttgcccctcctcgcgtcctggccacgaggctgatcaacatccgaagacttctgtgactccatggtatactggtgttgcatctctacacccagtgcctgctccactgtagtacggaagtccaccaacggaaaggctcctagtgcatgcctgatagaaggttttagaccctgacggaactggctcgccttctccatctcattataagccacatgagggacaaagcggaccatcttgttgaagcccacttcatactctgtgacagacttcttctcctgcttgtaggactgcaaatcaatcttcattttctccaggaaggtgaccgggtagaatctcctttcaaactgcctgatgaagacatcccaagacaggactcctggtgaggaggagtgcgcttcctgcacgcctctccaccaaatttgagcctctcccttcagcagctgtgtgccaaagcgaacccgatctccatacacaatctcgaagacattcatcttatcctccacgtaagtcagccaatctgccgcctcaaccggagtaccactgccatcaaaagaatccaacttcatgcccatccactgcatcagagaaagaccactgactagaagaggcacctcggcccggccacctggagcagcacccgcagggacatcgcccctgggcactcctccaccaccagcaccctgagcagcacccacaggggcaacaggaatagcttgccttagaatggccaactcctgctgcatggcctgcatcgcggctaacattgtcgccagactcatcgagtccccactaggaacttgcggactaccccgagccctacgaggcggcat

SEQ ID NO: 76916 - DNA, 1368 bp, Zea mays
  Clone ID: MRT4577_170174C.1
ttatgcataaaaccggggcttgccttccaaagcagtggtaggcaggtcctttggtgcaggctcgggtgctggatctggggctacctcctgagcagctccttgctccggcacgaggatgtactctccgtcagcaaggttacagtctgtcaccatgtctccttgctctctgtcatccgcagcgggtagcacataagctccagaaatgcccgcagaagaggaagctcctggagtgaaattaacagaagaaccccactgagccgtcgggtgaggcagacgcggagctccaaactgagacagcataggagcagacggtgcaggagtaggcgcagccagatactgaggaaaaccctgcattggcacgaactgagaagtcctaggcacataaagctgctgcggaggaagaggaactgaaaactgctgctcagcacttgacatcatgttgatagtgccctgagaagaggaggaagtcaccggctcccatctgagcttcccattaggattcctcctacacaccacatccttgtggtcctgactgcagatcgaacacctgccactccactggcactctacacggcgatgcgcatcaccacagcggaaacaaaccagccctagcccgggcttaggaacagcccgaaacctctgagtacttcctcccgaagtacccgagtcagaagatttgccacggtaaggatggtggcgctgatgctgagacttgaccctcttgtgggctggacctcccgtgttgcccctcctcacgtcctggccacgaggctgatcaacacccgaagacttctgcgactccatggtatactggtgttgcatctccacacccagtgcctgctccaccgtagtacggaagtccaccaacggaaaggctcccagtgcatgcctgatagaaggtttcagaccctgatggaactgacttgccttctccatctcattataagccacatgagggacaaagcggaccatcttgttgaagcccacctcatactctgtgacagacttcttctcctgcttgtaggactgcaagtcaatcttcattttctccaggaaggtgaccgggtagaatctcctttcaaactgcacaatctcgaagacattcatcttatcctccacgtaagtcagccaatctgccgcctccaccggagtaccactgccatcaaaagaatccaacttcatgcccatccactgcatcagagaaagaccactgactagaagaggcacctcagccccgccacctggagcagcacccgcagggacagcgcccccgggcactcctccaccaccagcaccctgagcagcacccgcaggggcaacagtaatagcttgcctcagaatggccaactcctgctgcatggcctgcat

SEQ ID NO: 76917 - DNA, 2501 bp, Zea mays
  Clone ID: MRT4577_170175C.1
tcatgcatcagtacccaatgattcagactcatctagtgcttctgcttccttaccaggggcattagttaagccaaaagacatgactatgaactcataatgcccatacctggtgcaaaaagcggtcttctcaatatcctcctcatgaatcctcaattgatgataaccagagttcaaatcaattttggagaacacccgggcacccctcaactgttcaaagagaacctcaatacggggtagcggatatttattcttgattgtcacttgattcaaagcgcgataatccacacatagcctcttgcttttatccttcttctcaacaaacaatactggggaagcccatggagacctgctaggcctaatgaaacccttagccagcagatcatccaattgtcgcttcaattcaacctgctcctttggggccatccgatacggggccttatgaataggctgtgtacccggaatcagcttgatctcaaaggctgcatcgcgctccggaggaatgcctggaagctctgccggaaacacgtcagcaaagtcacacaccacatggatgtcatgcacccgcaaggcagcctcaccctccaccaccatggagaaaaagattcccgacttccttgaccagcgaaccggaagcaattgcgccaacaaggataacgtgcactttagggaacttcccaagaataccacctccctacccgacggcgcctgcaataacactgtcttccaaaaacaggatataactgcgcgatactgagataaccaatccatacccaagataacatcgaatgcccccaaggaaatcacaacaagattggccgaaaagacctcatcagcaagaatgacggaacaccccggacaaactacacagctactaatggagccattagcagaactaaccaaaattgggtgacccaacctctgcaccgaaagaccagcccacgacacaaaattctccgaaacaaacgaatagctagcgccagagtcaaaaagagcatgggccacaaatgaatcaactgaaaccgtacctgtcaccacgtctccttgctctctggcatctgcagcgggtagcacataagctccggaaatacccgcagaagaggaagctcccgaagtgaaattaacagaagaaccccaatgagccgccgggtgaggcagacacggagctccaaactgagacggcaaaggagtagtcagtgcaggagtaggcgcagccagatactgaggaaaaccctgcatcggcacgagctgagaagtcccaggcacataaaactgctgcagagggagtgaaactaaaaattgctgctcagcgcttgacatcatgttgacagtgtcctgagaagaggaggaagtcactggctcccatctgagcttcccattgggattcctcctacacaccacatccttgtggtcttgactgcagattgaatacctaccattccactggcactctccagtgttgcccctcctcgcgtcctggccacgaggctgatcaacacccgaagacttctgtgactccatggtatactggtgttgcatctccacacccagtgcctgctccactgtagtacggaagtccaccaactgaaaggctcccagggcatgcctgatagaaggtttcaggccctgatgaaactggctcgccttctccatctcattataagccacatgagggacaaagcggaccatcttgttgaagcccacttcatactctgtgacagacttcttctcttgcttgtaggactgcaaatcaatcttcattttctctaggaaggtgacctggtagaatctcttttcaaactgtctaatgaagacatcccaagacaggactcctggtgaggaggagtgcgttgcctgcacgcctctccaccaaatttgagcctctcccttcagcagttgtgtgccaaagcgaacacgatcaccatacacaatctcaaagacattcatcttatcctccacgtaagttagccaatccaccgtctcgatcggagtaccactgccatcaaaagtatccgacttcatgcccatccactgcatcagacaaagaccactgactggaagaggcacctcggcctcgccacctggagcagcacccgcagggacagtgcccccggacactcctccaccaccggctccctgagcagcacctgtaggggcaacaggaatagcttgcctcagaatggccaactcctgctgcatggcctgtatcacggctaacattgccgccggactcatagaatccccactaggaccttgcggactgccccgagccctacgaggcggcataacttcaccgggaatttggacaaagccttaagtacgatccggaagtccaccaccttcgccaaacagatgttcagggtcttcaacttcgtggaactcgaagagccagatcacttggtcgtcgaagcttgatcttcgatccctcgaaacttggagatggatcacattcgatgcctggtaaccgccgggtgcctattcctgcatgatttctcgagccgaat

SEQ ID NO: 76918 - DNA, 960 bp, Zea mays
  Clone ID: MRT4577_170176C.1
atgccgcctcgtagggctcagggtagtccgcaagctcctagtggggactcgatgagtccggcggcaatgttagccgcgatgcaggccatgcagcaggagttggcccttctgaggcaagccattcctgttgcccctgcgggtgctgctcagagtgttggtggtggagaagtgcccggggtcgctgtccctgcgtgtgctgttccaggtggcggggccgaggtgcctcttccagtcagtggtctttctctgatgcagtggatgggcatgaagttggattcttttgatggcagtggtactccggtcgaggcggcagattggttgacttatgtggaggataagatgaatgtcttcgagattgcatatggagatcgggttcgctttggcacacaactgctgaagggagaggctcaaatttggtggagaggcgtgcaggcagcgcactcctcctcaccaggagtcctgtcttgggatgttttcatcaggcagtttgaaaggagattctacccggtcaccttcctggagaaaatgaagattgacttgcagtcctacaagcaggagaagaagtctgtcacagagtatgaggtgggcttcaacaagatggttcgctttgtccctcatgtggcttataatgagatggagaaggcgagccagttccgtcagggtctgaagccttctatcaggcatgctctgggggcctttccgttggtggacttccgtaccacggtggagcaggcactgggtgtggagatgcaacaccagtataccatggagtcgcagaagtcttcgggtgttgatcagcctcgtagccaggacgcgaggaggggcagcacgggaggtctgttgggtctatgcttcgtcgccgaaggtcttatagaaagaagtgatcctcggatgaagctgtttgtacaagatagccgaaggttcctcttcgtaaagcttcggcattgcaaaccgacttaa

SEQ ID NO: 76919 - DNA, 593 bp, Zea mays
  Clone ID: MRT4577_170177C.1
ggtcttaattatcaccatctctatcgtatactattactgaacatcatagaaaagtatatcactcgccccgatctcccgactcttcccgcgcctcagacagcatcaaaatgatatgtctcgattggcagaataacatgctacagagagtgggattcaccgagtccacctattgattgcgacccgcgaacgggcgctgctgaatgtcggagcgcgcgcgcacattctcgatctctccggaatacagcgaccagggtgcgtcgcctaatatgcgatgacctaccgcgctgatcctcatgattgtcgcatgtgctgcttggctcttatcgcatccacgtgttggggaacctgcaccgtcacctcatgctagcgccgggactacgatcaccgataaaattcaggtgagcttcatagctgcctgatccagcagataacttgcaaaccaacagaatacctccactaccacattgtactctgatctcgtcgaaatactcgtgactaatgcttcgtgcaaccgatactgatgattatccacacaacgttgtacttgaacatgagacaaatgccctgacggcctcgagctccacgagatgata

SEQ ID NO: 76920 - DNA, 785 bp, Zea mays
  Clone ID: MRT4577_170178C.1
ccacttctctttggtggcattgaaaatagacacaaatctggtgaaacttggccacatagtaaaacttttaaagtgctaaatgaagaaagtgttgctacagagggtaagaagacgtcaaagtatcgtacaatcaaactttgcagtattgttgaagatctgaaaatcgatatgttcaccccgagtggctggccaacagtcagcggggatgcattgagaagtttggctgataaaatacctacagaatatagttacacaatagattttattcgggaggatgatcattttacctgtcggactcagtatggtcctgggaattcctcttatagtgagcgtgctgatataaatggtggaggaaagaatggaaaagaagatgttgctatgtgtgccatgcttgagatcgaaagtaatgtccgttctttggagcttggttggaggcttttattgcagggagatgatgaagtgatactggaagggccttcagagtctgctgaggtggccaaggctaagtggtggagtgtatgtccaaacctttctacggaaccaacatcttgaacgtccctggctgtcgacgccaagtgtgcaaagagctggtatgctgccaaatagactgaggagacgctgtcacctgccacaaggttgatgacaccagtgcaatcgagaccccactgttcggataaaaaatggtggacccgtcgtcatgcagactgcggttccaggaccttgagtttgttgtggggggtaacccaggccctgacaagacacacgcccatttcttggctgcagca

SEQ ID NO: 76921 - DNA, 340 bp, Zea mays
  Clone ID: MRT4577_170179C.1
gccaccgtcggctcctagcaagggtgctatgacgacgactgctatagctccgtgtcaggattcagcacattagtcatgacatgctgaaactccatctatatagacactagatctattgacataactgtaaacgtatataataaatgcagtcattgtcacattatgcttgtgaagtcctcataggaaaggataactcttgaataaaatgctctggaaagtacctgcctacaatctggacttgcgaacaatcgaataaatggtgacaatgaggctaattgtcttacgttgtacttgatgaactctagagtattatcactcgtcaaactgaaaacgggaacta

SEQ ID NO: 76922 - DNA, 595 bp, Zea mays
  Clone ID: MRT4577_17017C.1
ccgggtggagtccctgtgatcgtttaaagtcgtctgtatacttgtactgaacttcttgtggtgttactgttaggatttatggttgctctctattggtgtgcggtgttactgaacaaatttagttaagaagttaggcatttccataaaaaaaaaaaaaaaaaaaaaaaaaaaaaaaagaaaaaaaaaaaaaaaaaaaaaaaaaaaaaaaaaaaaaaaaaaaaaaaaaaaaaaaaaaaaaaaaaaaaaaaaaaaaaaaatttttttttttaaaaaaaaaaaagggaaagggtggtttaaaaaaacccctttttttaaaaaaaaaaaaaaaggggggcttttgcccaaaaaaccctttaacccccccccccctggggaaacggggggggggttttttaaagtccccaacccggggggaattttttttggtttaaaaacccccgccggttttttttttaaacccaaaaaaggccccttttaaaaaaaaaaaaaaaaaaaatttttgaaaaaagggaaaaattttccccgggggggggccctttttaaacccccaaaattttaaaaaattttttcaaaaacccccttttttttaccgggg

SEQ ID NO: 76923 - DNA, 366 bp, Zea mays
  Clone ID: MRT4577_170180C.1
aaaaacggccgacgacgcgtgcggactggcccacgtcacccctttttcttcttaacatccatactaaaacctcagaatccggcgcttctctcccatcccatgccctcctctcaaccctattccctccccattccttactcatgacgctatcttcccacgccaccacaactactgacgcggcggcacgacggcacctttccccaatacactcgctcctcttcccgtcgattacccacgtcgtctgtctacccccgtcctccgacttccccgctctcactacaactccaccatgccgtggcatcgttcctcttccccgacactcatacctccacccgaccgtatactcactgcatgcatcgaacacct

SEQ ID NO: 76924 - DNA, 286 bp, Zea mays
  unsure (1)..(286): unsure at all n locations
  Clone ID: MRT4577_170181C.1
gccacacattgcgtccgccagnccgacggggtcatgagttaagccaacctcgccgcgatcgggtgagccatggcgaccgccgcgcaccagggcgtgacccatcgcgtcgctgccagtggcagcagggaccacggcgctcgcggcggcgtcgctgaggactccgggcccaacaagaacccggtcggggggggggggcggctcaccctccctncgggcgccgtcccggtggccactccccccggcgctgccgggcctgcgctggcccggcgcgggccgctgccacgcc

SEQ ID NO: 76925 - DNA, 286 bp, Zea mays
  Clone ID: MRT4577_170182C.1
gcaaaaaacagaacgggggggaaactaggtgacagcttaggtcgaactaaagggggactgcgagcccgggactcgtggatgggaaacggaaaaacataagatacccccgggcgcgacacccctctgggggaaaaccacaacacaggggggcgcgataaagggatccccgctcgggaccaaactgggggaaaaaacgggcacagaggtgtcctgtgggaaaaagtgatccgcgcacacatccccacacaatacaagccggaaaaacaaagagtaaagcccggggggc

SEQ ID NO: 76926 - DNA, 414 bp, Zea mays
  Clone ID: MRT4577_170183C.1
agacgggcaacaactaatatcagtagggtgaaatcaaacgagtcacaacacaactgtgcctatactgggcttttataacgcaaactggcaatagaacatcgatatgcaacgaacactgaggggggcagttaacagtgggggggggtacaaggcgatagcatgacctagccatccgagaagccacgatgagcctggagcatgccccaaaccaacctgctgtggccctaagtcttcaacctaaagggaacaaacggaaatcgagggtggtcatacagacggacgattgaaggctatctaagaatccaggcccagactatgcctagagttctaggacagcgtgtgtggcgatcaagaccaagtctctggaagagagcggagcattaagcagccgcctaaaatactggatatgcagaa

SEQ ID NO: 76927 - DNA, 432 bp, Zea mays
  Clone ID: MRT4577_170184C.1
actctcatcctacgtaccggttattagatctttttaataactcaccattttttttaaggtaaacaccaccgtctttatgtttctcccaacacaaatgagatacaaagctggagctggttcttgatggaaacagcaacttatgccacgcaaatgacgagacagagatcagagatatatggccttggccccaccgaagaagcggcgtaacgagtttattttacgcagagtttgttttcacatcggcatctcaagagtgacgaaacgcatggtatgaggacacatgattgaccacaggagatgggtccatctggatggccaaactccctggcgatgatgacgaggccaaacacgggggaggtatctgcctgcaggaggcgggctgttgccgtcgttggagcttaccataagttggagaagcagaagcgcaaacac

SEQ ID NO: 76928 - DNA, 161 bp, Zea mays
  Clone ID: MRT4577_170185C.1
caagagatgctccaacatctcagcctgcaagcaagatcatgtcacggagaccagagtcactcgcagtcaggaaatccattgtctcacttttgagacagattttccatcatatgtcttgctagaagcgcgataagtgctatttatcgtcttgtatatcgaac

SEQ ID NO: 76929 - DNA, 345 bp, Zea mays
  Clone ID: MRT4577_170186C.1
acagacatgcatactacaagcgtaccggggggggacaagaaaggcgccgggcagaagacacagggccggaaaggaagaataaccaagacaaaaacaagaacaaaacacccaaatgcagatgcgccgagcgcaggaccaacaaggacaccacagcacaaatcagatcggcgagtataacacgagatatgggacgggcccaagcttactcacatgacctgacacgatatggtctcaaaaccggacggaccaactaggcagctgcctacaacaaaagccgactgtagactcgccgagggcacaataccgggggggtacataaggaacaacaagggcagggagaggcca

SEQ ID NO: 76930 - DNA, 228 bp, Zea mays
  Clone ID: MRT4577_170187C.1
atgggagagaaagaaagaacagaaggtggagttgtcgaacttgaggctgttgtcgcgctggagagcatgaatcaggcgatggaactaggtggagacccaagtgaagaagtgtctagggtggccaagacgacgatgctaagtggtagaggtggtggtagaagccacaacatgcgaggggaaagcattggtggaggagatggatggccagaggttgtagagtggccctga

SEQ ID NO: 76931 - DNA, 693 bp, Zea mays
  unsure (1)..(693): unsure at all n locations
  Clone ID: MRT4577_170188C.1
ggctcaacattcgcctcgtgctctcggccttttggattcgggattcctcctcctccttctcctcctgatcacctcccactcccactcggccagccccacccaccgccggccccccacccaacggggagcacaggagcagatcgatccagcctcgcggccgcggcacgcgaccgaccgagctgcttgcctgcctgcgtgcctgcgtggtgatcacgtcgcgcctggcggtggtgtaggtccggcgggcaaccgcggtgccagcatggcgagcaacaacggcggcgcgatgcaggagccgctgctgccgaaggcgcccaagagcgggggtggctctggaaggggacgcgcccgtccgcgtccggcgacctcccgtcgtccaaggccgtgctgcggccgccccgccacgtgcccgcgctgctctgcacgctcatcgtcgcgctcggccccgtccagttcggcttcaccagcgggtactcgtccccgacgcaggacgccgtcatccgggacctcaacctctccatctcagaggttctcggcgttcggctcgctgtccaatgtgngcgctatgggtcggggcgatcgccagcgggcagatggccaagtacgttggggcgcagagggtcgctgatgattgccgcggtcccgacatcatgggctggcttgcaatctctttcgcaaggacactacgtttct

SEQ ID NO: 76932 - DNA, 342 bp, Zea mays
  Clone ID: MRT4577_170189C.1
ggttattggatttacttttttttgttggggaaaaaaacaaacccccccccaggggggtaaggggcccccaaccgggggggggcccggctaaaacacccacccggaaaaaaaaaaaccccccccccgggcctgggggcccccccccggaccaactttgggggatcccccgcaggggaacaaaccggggaaggggtttccgggccttgccccaattttttggcccgggcgggaaaaaagaacccaggggggccctggggaccaaaaaggttctcacacgggctcccggggcccaccgggggggattaaagggaaaaatttttggaaaaaaaaaaaaattttttt

SEQ ID NO: 76933 - DNA, 188 bp, Zea mays
  Clone ID: MRT4577_17018C.1
ccggccgggatttacacgtttgtcccccctactattcctatttgctaccacattttcatgacatggggaggacaatgctatatttaaggcacatcatttttcattttatagtcaactgtaatctcgactctcgatagataagactatttgcagtggttccttctaaaaaaaaaaaaaaaaaagcggcc

SEQ ID NO: 76934 - DNA, 499 bp, Zea mays
  Clone ID: MRT4577_170190C.1
ggggatatgcgacagccattttatcatgaacacggacatgtagggacccggacacacacgatgtataggcgcatttagggaacacagattgttttttacgcaccagcaaaagcgcgacgctcggtgcagcgcacttaataggactgatcgaccgtagatcaagggaggcagcctgtattatgacgcacagggccataaaactacggtgagaacatacgagcgagctatggcccttatactgggatcgttggttcaacaacgtctgcctggcaccacagggcgaatgtaaacactgtgcgcgtatccgagcatggttcccagcccctcatagaataccgctaggctgttcgtcgtgggagccatgatggaaaaaatggaatcgtactcgaaacaacaggtccccaggatctgtatgctggagacgaggcttatctaagtcagggtactagcaacatcaaatgcgctgtatggtccccagacttaactgacatgctatgcg

SEQ ID NO: 76935 - DNA, 174 bp, Zea mays
  Clone ID: MRT4577_170191C.1
gcacgcgtacgtcgacgacagaagatgatctattgtgtgaactaacacctctttcgttacttggtcaagcggaacggcgacgacggcatgaggaaaatgcatgatcatataccaaacgagcataggtccaaagtcgacgagaacaaccctgcgatgaactaatccgtatctcca

SEQ ID NO: 76936 - DNA, 373 bp, Zea mays
  Clone ID: MRT4577_170192C.1
aagagaaatttggattgattatggattcccgtaaaattagagcccgcattatttcatcatgggaacaaaagaatgaaagaattctgtatttgattacctattcacggggggggggggggcgctctacaagatctaacccgggaagcaattattcacccccggccttattcttttttttttcttccaagcccaagagggaaaaaagaagaagagaaagggtctttccatgaccccatccatcaattgctttgctgaatggctgatcccaaccggggaaccccttgccattaggggcgtccggaacgccccccttggggttagctgtttgcagggcgctcgcgccatagggctggtgggaccgtggggggacccc

SEQ ID NO: 76937 - DNA, 1768 bp, Zea mays
  Clone ID: MRT4577_170193C.1
ctctccatcggacggcctagacggctcccttcctctccttgccacacttccgctcctctccgagttgtcgtctccgtcgctgctggctgctgcgccactcccccagccccgagatctgctcaacaatggcgacgcggcgccacatcctcctcctcgccgctgccttcgtgtcccttctcgcgctcgaggctgtggagggcctcgaagaggggccccgcgggcgccggctgctggtcctgctggacgacctggccgtgcggtcgtcgcactcggccttcttcggctcgctccaggcgcgcgggttcgatctcgaattccgcctcgccgacgaccccaagctctcgctgcaccgctacggccagtacctctacgatggcctcgtgctgttcgccccctccaccccacgttttggtggatcagtggaccagaacgcagtccttgaatttattgatgctgggcatgatatgatcctggcggcagattcctctgcctctgatcttattcgtggcattgcgacagagtgtggggttgattttgatgaggatccagaggcaatggttattgaccacattaactatgccactatggatgttgaaggcgatcacaccttgattgttggtgatgatcttattcagtcagatgtcatactggggtctaaaaagatcgaggctcctgtattatttcgtggaattggacacacggctaatccatcaaacagtttggttatgaaagtcctatctgcctctccatcagcatactcagctaacccaaagactaagttatcgttgcctccatcgcttactgggtcagctatatcactggtttcggttatgcaggcaagaaataatgctcgggtgctgctatctggatcacttgatcttttttagcaaccggttcctgaagtctggtgttcaaaaggctggtagcaaaacgagatacgagagagctggaaatgagcaattcgtgacagagacaagcaaatgggtcttccatgagagggggcaccttaaggctgttaatgttaagcaccacaaggttggggagaccaatgaaccaggcatgtaccgcattaacgatgacctggaatactctgttgagatctatgaatggtctggaacaagctggaagccatatgttgctgatgatgtgcaactccagtttttcatgatgagtccttatgttctgaaaactatgtcgaatgacaacaagggtttatactcaacatccttcaaagttcctgatgtctacggagttttccagttcaaagttgagtaccagaggctgggatatactggtttgtcttttacaaagcagattccagtgcgcccttacaggcataacgagtatgagaggttcataacatcagcgtacccatactacactgcctcattttcaacgatgtgtgctttcttcatattctcgcttgtgtacctgtaccacaaataaaggactcacgggagcgcacaagtttctggaggctgctgatgcgacctagatctgtggccaagtgttacccggtgcaattttatggaatcatatatttgtagtaggccaacttagctagaattagacgaccgtgaccgcaatcatgggaaatttactcgtgctagtaggatgttcgatctgccccacaaattttttttgttcggatccttctgatcagcacttgtgaaaacgtttacagtctgtagcattgaaaggatgacgaagcatgtagtgattttgaaactactgctcttgctcagttcggatttgttgcccggaattt

SEQ ID NO: 76938 - DNA, 250 bp, Zea mays
  Clone ID: MRT4577_170194C.1
aaaaaccaaaactttattatgaggcatatattatggggcataccacacatgaaaatggggggcggcttactggattattacatatatagatagagggggatggatagaggagatttcccaaatatcatgaatcaggagtagggcggaagggcaggggaaaccccaaaggggttggggcggaagctgggcagatggaaccccggccgggaccacgcgaaggaggactccctaccaccgggaggcccaagaa

SEQ ID NO: 76939 - DNA, 2165 bp, Zea mays
  Clone ID: MRT4577_170195C.1
ctagcttcacaggaacttgtttttttaccagttaccgacaaattggagggccttcgacctggaagccctggtttgactggtgtagttcttggaaactacagtgagatattgccacttatttcttctgtcatgcggtgcatccttttgtgtcgtggcattttacgcattattaacatagttaacatgaggcttatgaaaggacctcgaggccggccgggttgagactatgaattttaatattgttatgtgattgtgagtgaaaaaaaaaaaaaaaaaaattgcgctcctctccgggttgtcgtctccgtcgctgcctgctgcttgctgcgccactccaaacccaacccaaaacccccacacgagatctgcgcagcaatggcgacgcggcgccacgtcctgctcctcctcgccgccgccttcgcgtccctcctcgcgctcgtggccgcggaagggggcgaagaggggccccgcgggcgccggctgctcgtcctcctggacgacctggccgtgcggtcgtcgcactcggccttcttcggctcgctccaggcgcgcgggttcgatctcgacttccgcctcgctgacgatcccaagctctcgctccaccgctacggccagtacctctacgacggcctcgtgctcttcgccccctccacaccacgttttggtggatcagtggaccagaacgcagtcctcgaatttattgatgctgggcatgacatgatcctggcggcagattcctctgcctctgatctcattcgtggcattgcaacagagtgtggggttgattttgatgaggatccagaggcaatggttattgaccatatgaactatgccgtcacagatgttgaaggtgatcacaccttgattgctggtgatgatcttatccattcggatgtgatactagggtctgaaaagattgaggctcctgtattgtttcgaggaattggacacatggctaatccatcaaacagtttggttctgaaggttctatcagcctctccatcagcatattcagctaatccaaagactaagttagcgtctcctccatcgctcactgggtcagctatatcattggtttcggttatgcaggcaagaaataatgctcgggtgctgctatctggatcactcgatctgtttagcaaccggttcctgaagtctggtgttcaaaaggctgatagcaaaacaagatatgagagagctggaaacgagcaatttgtggcagagataagcaaatgggttttccatgagaggggacatctaaaggctgttaatgttaggcatcacaaggttggggagaccaatgaaccaggcatgtaccgcattaatgatgacctggaatactctgttgagatctatgaatggtccggaacaagctggaagccgtatgttgctgatgatgtgcagcttcaatttttcatgatgagcccttacgttctgaaaactatgtcgactgacaacaagggtttgtattcaacaaccttcaaagttccagatgtttatggagttttccagttcaaagttgagtaccaaagactgggatatactggtctgtcttttacaaagcagattccagtacgtccttacagacataatgagtatgagagattcataacatcagcgtacccatactacaccgcctcattttcaacaatgggtgctttcttcgtattctcgtttgtgtacctgtaccacaaataaaggactcatgggagcgcacaagtctctggaggctgacgtgaccaagatctgtgggcactgaatgttgtgctataagccaagagttacccggcgccaattttatggaaccatgtttttgtactgccaacttagataacatttgacgaccgtgaccgcactcatgggaaatttactcgtgctaggatgttcgatctgcccccacggagcgcacaagtctctggaggctgacgtgaccaagatctgtgggcactgaatgttgtgctataagccaagagttacccggcgccaattttatggaaccatgtttttgtactgccaacttagataacatttgacgaccgtgaccgcactcatgggaaatttactcgtgctaggatgttcgatctgcccccacttcttttttttctttcttggaccctttctgatcagcacttgtcagaacgtttacagtctatagcactgaaacg

SEQ ID NO: 76940 - DNA, 1389 bp, Zea mays
  Clone ID: MRT4577_170196C.1
gggccggccgaagcaaacaaaagctccgctgccttgtctgcaatggcgtctggcgcttttcccacgagcgccccctgcccttctcgctctcctccataggcagacgccgcgctcccccaacgccgctccgccgaccccagtcatatctcccgcccccagctgaggcaatggggtcctcgtcctcgccgtcgccgccgccgccgcccatgatcgggcgggccgggaacctcaccgtcttcatcacgccgccgtctcctgctagcacgccgcggggcgctttgcgcacgccgccgcccgagtctccgcgctcggatttctctacacccacccgacagaggatagccccgtcgccctccccttctccctcgccgcagaaacacgagagcccgttcgcggcgcctgcggtggtgttcaccccgcccccgccgtcggctcctgtgaaggtcgcgccgccgccggtgcaggtgccgccgccgcagtacgagaaggcgtccgcgggaggcaagcacgacggatcggcgtttggcttcttctgggacgccgtcgcgcgcgtccaggaagcgcacgccagcctcgacgagtacatggctacctggttcgggttggatcagtccaagtaccagtgggcgctcaacgactactacgaggccacaggcaaggacgtggattgtgtaaagggtagtaagctgaaggagcttactactaaagtgcagaaagtctgaaaaaaaagcaactttgttttgtgttgaagaggtgtagcttgtagcgtatgtctggagaagcatgttccattagttacattttggtgggggccttcttgaaaagtggccatctctgcttcgccaggcagttggacaactggaggccgcggttgaatcaaaggagcggccgttgtttcgttccggtgtttaggatctgctgtaatcctaaggttatgtcaaaacacagaatgggtcttatttgcaatggttctaatctggatgctgtccgttgcttaccgccacaccctcgtcttttctcttatctagatagcaaaagcacgcccataacttgatgtggcaggcgatggtacacaatcatcacttcgtttccgccagacctggctcagggttgtagatcggaggcgcttcccttctggctccttgttgtaaagctgaagagctcacgaattacgatcgtacactgcgttcccttgttgcttgtccggaccggctttggcatatgctgaattgcatgggcgaacacagcagaaatccagcgtcggtgttcagggtaatgcatgtactagtctgcatccaggtttatattcatcatttgttgtatgcatggactctcatgtagccttgcagtttctaaatcagaattacgttataaggctatttttagcaa

SEQ ID NO: 76941 - DNA, 300 bp, Zea mays
  Clone ID: MRT4577_170197C.1
cgccgccgctcctccactgccgcgccgccactcctcttctgataacgacaaaggaggagggcaggctgtacccaccgcaagctcgagcaccctaggcacggttccctccgttcacttaccaggcagcgctcctcccgtcaccgcgcgcaggtgaagtcatcccctagggaggaccccaagaagccccgccatatcactgcacttccttggctacaccgctggcaggacccacatcgtccgccaggctgagaagccagcatccacactccataacaaggaacctcgcgcggctcttaccac

SEQ ID NO: 76942 - DNA, 424 bp, Zea mays
  unsure (1)..(424): unsure at all n locations
  Clone ID: MRT4577_170198C.1
cgcccgcaggccngngcacnncnccancaccaccacggggncnncagaccaggagccnnagggacnccagagcgcagaagaacccgancgacaccaggagggngnngcncgnagcccncgcncnccaggcncncgcngcgagcgccaccnccacgcanacaagcggcggcggcggcggccagccaccgccggcggaacaacaaccgccgccggagcancngccaccnccggancaccggccaccnccggagcancncccaccggcggnccaccagccgacgacgggccaccggccaccgccggnccaagagccgccgccggnncaanngccgccgncaccangccacnacccnacncaaccgccccggccncagccccaaccccagccacacccangcccgngccaacagccgcagccaagccc

SEQ ID NO: 76943 - DNA, 277 bp, Zea mays
  Clone ID: MRT4577_170199C.1
acttgtggtttttaaggcagctgccagttaaatactaacaggtggggcaatttaaaagtttcatacaaatccccatttataatgggtaaaatgtcatgccccatacatccattggcggtggtctaatattatactaacccgggcccggtgcccagtggcataaatgttcccccccaaattccaagggcccccaacccaccctggttgctggccaaccaccttttccctatcgacttggttaaatactaaccactcctaaaagtccactgggagaata

SEQ ID NO: 76944 - DNA, 442 bp, Zea mays
  Clone ID: MRT4577_17019C.1
gcacgagcccgtgcggctgccccacgctcagcacctgctactgcattgtccgatgactacctcagtcagtccccagagaatgacgctagctccgggaagcttgtcatgtttggcaagggcagccctgagttcagcgccggtgggcacgcgttgttgaacaaagactgtgagcttgggcgtggaggctttggggcagtctacaagacggtgctcgcacgcggacagccggtagccatcaagaagcttacagtctctagcttggtcaagtcaaaggatgacttcgagcgacaagtgaagacgctcagcaaggtgcggcaccacaatatcgtcgcgctcagaggcttctactggacttcgtcactgcagctcctcatctatgattacctacctggaggaaacctgcacaaacacctgcacgagtgcaacacagacagcttacttt

SEQ ID NO: 76945 - DNA, 956 bp, Zea mays
  Clone ID: MRT4577_170200C.1
ataataataacacactagggaaaaaaacggaaaacaaacaagtttgacacgcacaaaaaagtgaaatgagcactggctctgcctttgcgaaagatccttttttcgtctgtctagaataatatctattcaatttattttgaactagatcaaaattagattatataatctaaatagattataatcttaaacaaacaactccttagttaatcagatataacacagtagtaatacagtttttttagaaaacaattttttccatctctacatcgcacacacatttttttagctaatcagctgcacgcataaatgagaaaaaacaggacacaatcaacatttattgatgtttctccatttattcttggtgaagtagaggtctatgataacgacctccaatactttgtatgccaaccgaacaatcacgccctcgtgcagtattaatacgtagcatgagctcttggacctttgggggcatggctagggcaataatactgcccgtttcagtttgctttcaccaatcaactactgaattcaatggtgatagagtggaccatgcaggaattagtgtactgtagcttatatatttgtgtttttcagctacagtggaaagctctctgttttttttttaaaaaaaaacaagaaattaaacacgttcaactcgttaacttaatgaaaaaaaagattgagatatagcttgaggggtgaatatctcaatgccagaacgttgtttccaacactcttggtagctcaggacggcagtctaagctggacctttcagacgcgtcaataattcaaggacgagcagtttccaaccatgcatgagcatagaagtaggactctccaaaagcttgctagcttttcaagatcaggcgaggaaaacaggcaaatgaaagaaccactatgggaattcaagaaccgttcgttttcaaaaatctacacacgatcaggcacaacaaaag

SEQ ID NO: 76946 - DNA, 265 bp, Zea mays
  unsure (1)..(265): unsure at all n locations
  Clone ID: MRT4577_170201C.1
tgagcattcataaacacaccatgctaagctcattatcaacaacctaacaacaggtgctaggaagatattatccgttcttgcgcttcttgcgctntttgcgagcgcaacaaatgcgttcattattccacattgctcacttgctccaagttccattattacacagtttctcccaccagttacttcaatggtctttgatcacccagctgtgcaagcctattggctacaacatgcatttgcggctagcgttttactacatccaatttcc

SEQ ID NO: 76947 - DNA, 475 bp, Zea mays
  Clone ID: MRT4577_170202C.1
ccccgggcccattaaaaagggccaggccaaaccgccattttattaaaatggtataggccccccacacagccacaaagcagtttctcgccctggcataaaacaaggccacaacaaaactatatatatagttcctataggcgggggaaaaaaagggcgccattaataaccccgggcctccctggacaactcgaaaagcaaaccaaaaagccggtttctgaagcgggggaaaattgggcctcccgatggctaaaacgtattttcccacccatcgccaaagggcgtcaaaagttgcgaacaggctttaaggctttcgaaaaagaaacaaacccggcccaaaaaacagctgaccatgctttgtaagaatgcaccatggggcccccacactggggcacggcccacccttccaggggggaaagaatcccgccgatgccccaggcgctaataacccgttttggaagccatttctcgcaggcat

SEQ ID NO: 76948 - DNA, 1049 bp, Zea mays
  Clone ID: MRT4577_170203C.1
gcctccaacgcgagctgcgaaagaagagcaggggcaggccaaaaccaagcgaaacaccagctgcgtgcaccaccccctctacggacccacccacccacccacccggagcgaaggggagacagcagcagcagcagaagccgcgcgcgtgcaaactgcaatgggcaacagcatcggcgggcggcgcaagggcgccaaggtgatgcagctggacggcacggcgttccgcgtgaagccgccggcgtccgcgggcacggtgctgcgcgaccacccggggttccagctgctcgagtcggaggaggtgaagctgctgggcgtccgcgcccggccgctggcgcacgacgcgcagctccgcccgggccgcctctacttcctcgtggcgctgccccggccggccgccccgccgcgccgcgcctggtccggcgcgctccacgtcggcgcgcgggagcggctcgagtcgctcatgctcacgcgccgctccacctccgacctctccctcgccgcctccgcggccacgggcacgggcacggcgccgccgtccccgctctccacggcctccgagggcggcgggcccgtccgcctccggatgcgcctgcccaaggcggaggtcgacaggctcatggccgagagccgcgacgccgccgacgccgccgccaggatcatgcagctctgcgccgccgccacgcccgaccggaccccgcgcttcgtgcccactccggactggggcgctggcgccgccgcgttcccgcagacgcccgaccggagcccgaggttcgcggcgacgcccgactggggcactggcttcatgatgccgccgggcgctgcggctgcgccgacgacgccggagaggtggcccgcgctgccccgcactccggagtacgcgtcgacgggcgttaaggctagccggaaagaggtaacgcacagcgccacggcctcgatccctcctcgcagattactgttgtggaacgtacaattcctagattgcacaggcatctcgccgttcgcctctgttcttttttttttttaaaaaaaaactagtttataattatgag

SEQ ID NO: 76949 - DNA, 302 bp, Zea mays
  unsure (1)..(302): unsure at all n locations
  Clone ID: MRT4577_170204C.1
aaaagggcgagacgccgggggggaaaacccacacccggccgccggcaacagcagggacagcaagcagcagggagaggcgacgaacgaggcggaacacagcggagcgaagccaaaaaaacaaacaaaggggggcaccgcgcacaggnccccgaaaagggccaccgagaggggggggggcaaganagaggcaaacagcgcgccaaagaagggaaaaaagagggcanaaaccaaacaagacggcgacagaggcagaagccgacacaagccaacagaagagaccgagagaggggggggcgccggga

SEQ ID NO: 76950 - DNA, 1578 bp, Zea mays
  Clone ID: MRT4577_170205C.1
ctctccatcgcgagctgcgaaagacgagcagagggagggagggcaaagcgaagagaaacacaaccgcgccacccacccacccacccacgcacccggagcgaaggggagaccggccgcaacagaaggcagagagagctagagccgcgcgcggcaatgggcaacagcatcggcgggcggcgcaagggcgccaaggtgatgcagctggacggcacggcgttccgcgtgaagccgccggcgtccgcgggcgcggtgctgcgcgaccacccggggttccagctgctcgagtccgaggaggtgaagctgctgggcgtgcgcgcccggccgctggcgcacgacgcgcagctgcgcccgggcaggctctacttcctcgtggtgctgccccggccgtccgtcccgccgcgccgcgcctggtccggcgcgctccaggtgggcgcgcgggagcggctggagtcgctcatgctcacgcgccgctccacctccgacctctccctgccggcatccgcggtcacggccacggccacggcgccggcgtccccgctctccgagtccgagggtgggcccgtccggctccggatgcgcctgcccaaggcgcaggtcgagaggctcatggccgagagccgcgacggcgccgaggccgcagcccggatcgtgcagctctgcgccgctgctaataaccccgccagcggcgccgccacgcccgagagggggatcctgcggacgcccgagcggagcccgcggttcgtgcccactccggactggggcgtcggcgccgcctcgtccccgcagacgcccgagcggagccccaggttcgcggcgaccacgcccgactgggggactgatgggttcatggtgccggcgggcgctgcgacggcgcccaggacgccggagaggtggcccgcgctgccccgcaccccggagtacgcgtcgcccaacgtcagggccagccggaaagagaagcgaacgcggttcgtggcgctgccggatgagataatcgcgtgacttcttcttcgtctctcccgcgcgcgcgcgcgccgggatgaaacgatcgaggcctgcggttgcttgatttggaggagcgtggcaagcaaaagcatgatgtgctggggtgacgatcagagagcccagaagatgtactagactgattgatggtccgcagcagggtcccagacgctctgtcccgtggttggtcgttttcctcggttgcgagcgagccggggaagagcgcctgctgtgctgccggccggcccacgacggtagcggcggcagctccctgtcttgcctccgacgacgacagggactcaagtgtgtcgtcttcttttttttcttcttcttctactgtggtctgtggtctatgtatcttctacatatttaaggctatcttgctcgtcctctctagatgttgtaggttgctgaagaagcttaggatataaatacttctacatgtatatgaaaacacttgcggaggccatgacagtagccaacagcttcgcgtgtcatcgtctgcgtcgtttagtggcactctagcattcgtctcaatcacatgcatcaatatggattgaagtgaatactaagtattca

SEQ ID NO: 76951 - DNA, 351 bp, Zea mays
  Clone ID: MRT4577_170206C.1
ctcctctcccctatacccaccccacagcggcttgttatactagggcatagggtaaggttctagctcaagtgggaaataggcgggtaacgtagtgcaaaaacaacataggactggctgcggtgacgcacgcgtccgtgcacatatctagggttctagcgcgaaagttctgtaacggcattctggatcggatatccagctttgcaatggacgctcgatcagataccggtactagatgctacctaaccttgcagcgacgccacactgagatggataggggcctggtccaccgaaagcttcgcacaaatgccgtgcgatgatggggcgataggttggaaataatgaggtttcctc

SEQ ID NO: 76952 - DNA, 377 bp, Zea mays
  Clone ID: MRT4577_170207C.1
cggaagcgtgcgaacggcggcagcaaggaaagcaagtcccctagaatggccaccaagtccccaagagagggaaaccaagtcattgaagaagggttagaacctattcacttcactatcacactgctgtagcaagttcgagtctagatgcgaggaatttaggtgttccaaccgaacttcctctttcccttgtaggtcctgatatctgcactggcatgtttgccctgttgtgtaccatgttctgactctccaattcagcattgctgtagaatcatactcactaacaggggaacttaaatggaagcacgtaatactagatccgttgtcaggaacatctgccacctacatctgagatcgtctgtcaggttccgttccgtaat

SEQ ID NO: 76953 - DNA, 264 bp, Zea mays
  Clone ID: MRT4577_170208C.1
agacagaataccaattttttttaggggaaaatgttattgagacctcactcgacaatatacaggtcattcaattattaatgagaactgcaagcactgaagcatacggtcagtacttattggatgcttggaaatcaccaagctgtacttataatgtgtatgtggcttatgctacaacggcattgtgtactgacaaggatacaaaagctggataaagcgttattagaatctggatgaaggaggattatgcataaaccacgatatatc

SEQ ID NO: 76954 - DNA, 277 bp, Zea mays
  Clone ID: MRT4577_170209C.1
caggaggcgcagaaaatcttcaaagccaaccaccccatggacgcagaagttactaaggccaagcttctggggtttggctctgctactcctggacaatgtggaccccaaccctgagaacttcgtgggggcggggatcatccagactaaagccctgcaggtgggctgtatgcttcggctggagcccaatgcccaggcccagatgtaccggctgaccctgcgcaccagcaaggagcccgtctcccgtcacctgtgtgagctgctggcacacagttctgag

SEQ ID NO: 76955 - DNA, 245 bp, Zea mays
  Clone ID: MRT4577_17020C.1
taactctcgcttttctcccgctcggggcgggggccgtgccgttagctgttggtgttgcctcccgcccagttaccatctccttgtgtgttcgtagtcgtgatccccgttcctggtgtgcggcggtggctccggcctggtgaaagccggcttcgccggcggcttcgcccctatggctgtgggggggggcatcgtgttccgtcctcgctctccattgcgtcttggtggggatgggtctcccggtttcc

SEQ ID NO: 76956 - DNA, 301 bp, Zea mays
  Clone ID: MRT4577_170210C.1
gcgccggcctgtgtgtttttttttttttttttttttttggtgttttttttttttttttttttttttgcacaaatgtttgcttgaacgctggcgtaattacccaacccctctcgggttgggtgacaagaaacaaaggacctggggccctcattcaagggggggggggggggggtaccctccgaaaaggaaaaccgcaacaggggcacacacctttagcctgctgggtagcttgaaaaatggggaagatagctgccctggaggggtttattaggccgggagcgcgatgccttttgggaggggg

SEQ ID NO: 76957 - DNA, 1713 bp, Zea mays
  Clone ID: MRT4577_170211C.1
cggtgtgcccccgcccgcgatgccaaaccgcctctgctccccgctgcgcgctgccccgtgatacccgccgacaaactctcgtgcgatacccgtgcgcatgctccgccggtagcaccgccccctgccttctcgcctacctccccgccctcctcctgctatcgctcctccccgctgtcgcctccgtctacaccaagcgcaacactctcaccttcccacgcgtcctcttcgttgtgccctgtgtctggcggaggctcgccgccaagttcctagccgccttcgctctcctcttcgcctaccacgccgctgccgtgctcgtcttcacggcctcctcatcgtcgggttcaacggctccagcctctcgggcctactccgccccagcgccccctccccgaccgcctacctcccaacccttgcccccgcccagtgcagcagccggcctgctccgtgcgcctcatctggggcctccgagacggcaagacgaagaccatcagcgcgctcctgtggtccatgctgatcgagaaccagaggacggtgacctgcgccccgaccaacaccgctgtggcggaggtcgcgtcacgggtccttggtgttatcgaagagtccagcggcggcggtgctgcaacgaagtgtttctttggcgatgtcgtgctcttcggcaacgaggacaggatggctgtggaccggaaactagaaaatatcttcttagacacgcgtgttcgccgtctgcgtcagtgcttgatgccaatcacagggtggacaaagtccctgagctccatgattgcacttcaggaggattcgatggttccgtatgaaaggtatgatgaggccatacaaggttgtgtatttggatttggtttcagaagaaatcaagctaagaaatgtaacagttgtctgttctttacggacgatggatgacaaaaaagttaaggagatgcagaaagatttactgggagtgcgaaaaaagcacgagaagtagagcgagagaaaatgtcattcgagacctacttccagagtaactacaagaagctcgctaaggatttgcgcacttgtgtggagactttcgtcgatgatcttcccagatccgcaacatcagaagaaaacttttgctgcatggcggaggtgctgctcttgctcgatgcgtttggagtgctcgtgcagtctgaaccagtcgaacagcttcaagcgctgttcaaaaggcactccgatgttaggttccggctgagggaggcgatatcctcgtgtcttcgcaagctatggctcctttcttctaactttaagcttcccgaaatgtatgacagccgaacgatcgatctagagttcttgcttcagaatgctaagatcgtgctctgtacagcttcgagctcgtaccgcctgctctacatgcagaaggcccagcccttggaggtccctgtcgtggacgaggccgcgcagcttaaggagtgcgagtcactgatacccctgcagctgcctggcgtccgtcacgctgttctcatcgatgatgagtacctgcttcccgcattggtcaaaagcaagctgaattcttgttgacttcagctcgacgtcgattaccgagagaacgatcaatcagtcgagtattgaagaagaacagtgaaaaacagaggattttctttggacaggccaaaccgggcgacctgcctcctttttgtgtttttctatttattcactggactacacaacgcattacaattactc

SEQ ID NO: 76958 - DNA, 414 bp, Zea mays
  Clone ID: MRT4577_170212C.1
aaaacattgaaacctcttttattgttctttttttttttcttaaaattgtacttttaaaggcaagggaaaaaaaatcgtaattaaagtgcaacggataacccatgacgaagcaatactgatgaataagggatgggctattccctctgctcctgttcctctcctgtcgcggcagctagcgactcaaccgtccaacccggtggcagggtagagggccatatcccaccatcaaccatatcctgaaccgtacccggaattggcttgatgaccatactgtgcacagagtggtgggacttaaccacggaaaggaatgtgcataaaggaattgccgttgattagagaacttccgaggggataccttacccgcaccctatgttaccccttctatttttcctcagtctggaaacacaagcgcaa

SEQ ID NO: 76959 - DNA, 914 bp, Zea mays
  Clone ID: MRT4577_170213C.1
gtgcttgccggccgggactgcagccgggagccccgagaagaaccgcagtcccgctccttccctgccgctgccccgtctgtctccaactccgaatatgtcgtcctcgcccctccccaccacctccggcggggctcacatcttcccgtctccgcctcgaccgcgccaccgccggtgctgccaagtaatcgtcgccgccgccgcttcgccccgttcctacggcgtcggtcgccgcgccgtctccctagccggcgtcgccgcctggcttgccactatcgtaggccgggcagacgcggccagtccatttgacaagtacgtcaagaggaagaagctggagcctttggagacctacgttccggctgtcctgctgaccattgaccaattcgttgatctagagaaatccttagaatttgagaaaccaaggtatgacgagagcagatcattacttcgctctggaccggcatcatctttaagagtcaacattcgggcagtggcacaatatgcttctagtaatggtcaaggcaaggctgcatcagatgctgtggacgagtgcttacgagcactcgaagatctcgactcactactactacatgcatcacggaatgatccgtcagcatccgttgaaaccatgaggagcaagatcagtgttgcccttgcagcattagacaatctcttgcaaacggtgccatctgcagtactggataaaggaaaggcgattgctgatgcataccgaactccagtagatgattatgtagaggaaaatgctgccgagttggatcccaggctgaaacagttggaggatattctttaaggctgaattttgttaggttctatttctatatcatgtatacctgtttggattactaaattcctcgaactgtacatcccaatttataattcgtttgattttttttatc

SEQ ID NO: 76960 - DNA, 146 bp, Zea mays
  Clone ID: MRT4577_170214C.1
ttgttttgatttgaaacaaaaaaacagggaaggccattgagagcaggaaagggattggtacataacgggcaaaatagagcatcggattggaacaatggatcatacacaatacaaagtgacggatggagtgtttggcagggccaaaa

SEQ ID NO: 76961 - DNA, 588 bp, Zea mays
  Clone ID: MRT4577_170215C.1
gcctcgaccgcgccactgccggtgctgccaagtaatcgtcgccgccgccgctccgccccgttcctacggcgtcggtcgccgcgccgtctccctagccggcgtcgccgcctggcttgccactaccgtcggccgtaagtgctactttgctgtactcttctacgtatccacacatcgactcgtttgctactccgccgttcgtcatgtccgcttgtgtctgtggctgatttactgcgccccaaactcccaattgctgcaggggcagacgcggccagtccatttgacaagtacgtcaagaggaagaagctggagcctttggagacctacgttccggctgtcctgctgaccattgaccaattcgttgatctagagaaatccttagaatttgagaaaccaaggtatgacgagagcagatcattacttcggtctggaccggcatcatctttaagagtcaacattcgggcagtggcacaatatgcttctagtaatggtcaaggcaaggctgcatcaaatgctgtggacgagtgcttacgagcactggaagatctcgactcactactactacatgcatcacggaatgatccgtcagca

SEQ ID NO: 76962 - DNA, 571 bp, Zea mays
  Clone ID: MRT4577_170216C.1
gaacatgacctgtctggtgtggcaccaggcagcaagaaattggcatgaaatgaaattggtcttggtcgatcgtcctgttaacagggcgcgacgatcaccaaccacagcatgaatatgaaggccggccggcggggccagcgggggaagaggagcaaaggcaacatcacatctcgatcaatcatgcagtaccccggccgctcgaaacgacgtcgtcctgacgcagatgcacctcgatcgccgtctcgccgtcggcgttactggtcgaacgatcggttagcgcacgcgccacgcctcttcgtcatcgtcacatgatcgatgcaacgacgaccggctgggctggttggtttcttgctcgtcactgtactgtacatgactacgcgccgtgaacttgtagaattttcctgaaaactctaaaaacactttgcttccaaacacctccttagcttgtgcggtacggtgtgtagcttcactccctctacttcaatgtagaagctgatccaccagcaccagcatcgaaattataaacacctgagcagccgagctacacacgacagttaccttctttaaaaac

SEQ ID NO: 76963 - DNA, 379 bp, Zea mays
  Clone ID: MRT4577_170217C.1
actatgaattgaatatttttaacatttactatctccggtcattatttgtggtctgaaaaaaaatttccgatggggaaggggtcccccaaaacccattggaagggatgcgtccaagatcagacaccatggccctttatgaatcggcatacccacagaatcgggacaacggtggtaaaatattacatttccagggacccccaacgcacgccactgtagatgcgcgcacattctcccaacagaagtttggaaaatgcggccgcacaaaaattttccccgtgcggaagaatgaccgttggaagacggccccttaatttgtgtccaaaaaacgcgacgaacctgaagcgctttggaccgttgagtggccttccagatcaggccc

SEQ ID NO: 76964 - DNA, 595 bp, Zea mays
  Clone ID: MRT4577_170218C.1
cacgcctgcagaaccgggcaccctatacacggccggccttaccaatattttttcaaaacttgagcacgtagctctttatgcctgggtggccacctccacaatccaaaatcatgcttacagactcacaactaataagtaatctaaaaaagcgcaccaccaatgatggcttgagggtaggaaaacccacgtcttgacacctctaggctcacacaagccaacacaggaagcaacatacctaggtcacccttgttagcccaacactggtcagccaaatgcatgaaccagtcacttggtacaaaacataaggccacatgatgtacataaactcctactacctgtgatcaaccaatgatctaaataaacacctttctccctactctcaccaacaacaaaatcttacattcaaccaactgtctacactgaaccctgctgcttatttgcagcaacaactattaccattcagacagctagctactgcctactctaagcaacaacaactggttacatttaaccaagctgccagactgaaccccgctgcttattagctacagcaaatactactaccattcaaccagctagctgcagcaaaccctgc

SEQ ID NO: 76965 - DNA, 735 bp, Zea mays
  Clone ID: MRT4577_170219C.1
ccggccatcttcactttaaacgttacttgacaacatcaatcatgggcaacgatcaaaaaatgggcgcctactacgcccccaagggtggtctaccaccccaaacacaaatcctcaccgacagagctatgtttactgaatcatacgccgtcattcccaagggctgcttcagcgatattgtcaccagctttctacctttctgggagcagactcgactatgggttattgcccgtcctctctcaggatttgccgaaaccttctcccaatacataatggaggtttcacctggaggtggtagtgatcgtgctgagatggacgacacagccgagggtgtcctgtttgttgtcgagggtgaaatcactgtaactgtggccggtgaagcacacactctcgatgctggtggctacgcttttctcccacccaagtgtggctggaccctccgcaacaactcaagcgagaacgccagtttccactgggtccgcaaggcctacgaatacgtacccggcctagacgccccagaagccttcttcgccaatgaaaaggacattcaggcaagggaaatgcccgacacaaacggtgcctggtctactacccgattcgttgatcccaccgacgtgcgacacgacatgcacgtcaacatcgtcaccttttcaaacccggcggtctcatcccctttgcagagacacacgttatggagcacggtctttatgttctcgagggaaaggctgtataccgtct

SEQ ID NO: 76966 - DNA, 406 bp, Zea mays
  Clone ID: MRT4577_17021C.1
gcacgaggatccagccctccacacaacgccaccgccacaccaccagctctcctcccccgacggcccgacgcatctcgccgttcttcgcccccatcgtcgtcgcaccggatcatcaccgcccatgccgtctccgccgcggccgctcgcctcgctatgccgcgccctcgtcctcgtcccggcgcttcggctgctccccaccatggcgcactccgggggaccgaaccggcgagggcgcttagcgtcggcgaggagctcgtggctgagaccatgccgctgcgccacggccgccgggtgtacaggatcgacgggccgcgcccgtccgcgtggtacgaagtcaagaatgatctcctacccggcctccataccggcgagcttctccattagactcggggacgattgggattgg

SEQ ID NO: 76967 - DNA, 1185 bp, Zea mays
  Clone ID: MRT4577_170220C.1
cggtcctcgagcctctcgtccctctccctctcctctctcctctccctacccagttgcgcgagccggcgagccctagcaggcaaaagccatggcgtccatggttcttcgtgccgctgccgccgctcgtcttccctccctccgtcctcgccgcaacggcagcggggtgctcaccggcttgaggatcgggacagggcactacggcgtgcggctcgcgctttcttcgtccgcggcagcttctcccaaagagttcgaggtcgcttgccttcctgtcgatgatagcagattgggcccgggggaagattatgtgtctgaccttcgcatggcagacgaggaggagttggaccatttctaccgtgttctcgccattaagactgacatgctgtttagagcctaccctgaacacaagccgtttgcagtttctgaagaggacaaggccgtgcaggagaggttgaaggaatttgcgaacgaatgcatcgacctcctggtcgatgcgttgcgccgcatccccgcggagaaaaggcgcccactgttctcggtgtttggtaatgtgtaccaggtatttgcgtcagtaaagtggtatgcggagggggggtgtgcccagtggtggatggcgctgcagatcacggaggagcttgagatcatgcgcaagatggtgtccagcgcttgcggcggcacccctcttgacagagagacggtgttcgacaggaaggaggccctcaccggtgtcgacgttcaggcggcgctccgcggccacggcgtcgagagcaacttatcactggtgatcttcgagctgatcgacaacatctacagcaatgtcaagtcggacatcgatgacatggtcttcgctttcactgcttagacatcgttacctacgtgtccacaccacatggagcttttcagtcaccaccctcaaatctccaagtgattaggatctctgctacactgcttttactaccctaactcaagttttgatgtgatcggctgcctacaatggtctacagaatctaccctaactcaagttttgatgtgatcggctgcctacagaatcgagctttgagtcactttccctctgttgttcgttccagctatacttttgataatgcatgtgataattgggtcgctgcttttagaactaaagatgtactcaggatcatcctaatacctcataaagccaattcttcttct

SEQ ID NO: 76968 - DNA, 372 bp, Zea mays
  Clone ID: MRT4577_170221C.1
cattttggtcgtccttggccaccaccacgcacgctcgtgtccctaggatgaactcaaattcactagaaactggtaggatttggctggcacggtggcacctcttgtattcgaagttcagccgagccgtgtgtgtatacatgaccacgacctactagaggaggcggtagagcgccatgagctaacaacccaagcagaaccactcatgtctactgcgtcctttgtcacctaccttcagcggccccgggagctgccggcgccggagttccgggcgccgccgccgtccccggtcaccggcgttctgaccggcagcagcagctcggggtcgtccgggtacggcgagtgccaagatgacgacgacatcggcaggttcct

SEQ ID NO: 76969 - DNA, 350 bp, Zea mays
  Clone ID: MRT4577_170222C.1
gtggtttgcttctttcataccttgatccaacatgatgaattgtccataaaagttgaccctgacttaacatggaagaaaaatacatttatgtattatttaaacaacttttttcatagcacatgtctagtgcagtggtgagaagccttcccattgaggcaaaggtctaggctcgacgcagctctctgaaaaaatagaggggtaaggtttgcctcggttattccttacctagatctcactcatgtgggagccaccaacactcggtctgtcctttttcatggcatagatatgcatatgcctacctaccaaatagtggacttccttttctaattgcctcaatcactgttcttaag

SEQ ID NO: 76970 - DNA, 426 bp, Zea mays
  Clone ID: MRT4577_170223C.1
gtcccacaatcaaacacgggggggcacgatatgatagtgcattgtgcattaacatgggaaaggacttttaaatactagacatgctcagataaaaagacggtgggagttcattgaacccatgggatgaaaaaatactgactaacagctgagggagcaagccggaaacttagatacacgacacatacaaggtaaatgccaaaagccaagttgagaatgaatgccaaacagactcattttaagcatatggcatatgttacataagcaatgataaatggaggtgaagactggttatcgaggcatgtgttgagcttaatataaagagtcgtccaaaactcgagatgctcaataaatgccaggaatgactctgtatggtactttgttgcaatatatctttcagtacttaccggactttgatgagcaccggtc

SEQ ID NO: 76971 - DNA, 220 bp, Zea mays
  Clone ID: MRT4577_170224C.1
ctaataaaacagccggggggtgggcaatatataaattgaaatttacatttgtaagaataaacacttctatgaaaccaacggcaaataggaacgggattttcaaggggaattgtgatgcgataatctaccgaaataaggtggccaaattgtacatatatgaatcccaagcatgtgttttggtactacgcatatccagactgcaagggcatagagatctgag

SEQ ID NO: 76972 - DNA, 1889 bp, Zea mays
  Clone ID: MRT4577_170225C.1
caaccatttgcatactcgtctgtagctgcaggcagctttttatcaccactttacccattgcatacatctgaaccagcaaccctcgaggctggccgggtgtactatcagagttctgtaatgtcattaccaccaggctttatttcttctgatggtgcttctaatgcatctggtgtcaaatctgagacaagttactatcctgtttctcgccaaaatttggagattaaaacttgccacaatgcttctggtgatcctgaacaaaattcatatattagcagcgaagatgacagaaacaagacttctgaacctatgggcagaatatcagaatctgaaaagaaacagcaagttgatgttgaacaatcatgtttggagcctgcagcctgcattggaaaggaagcattatctagtcatggtgacaccatattaagtaaaaaggaggatgctggagctctatgctatgaacctccttgctttcggagttttgaatttccctttgtcagctgtgagcttgtaaactccagcgatctcccagaatatagtcctcttggcattcgagagttgatgaggacatccttgaacttccctaccccagtaagattgtggggctcccctactagggatgggagccctgatgctgtgctaaagaatgctgccaaaagattcatgtgcaccccgtccataatgaaaaaaaggcacagagatcttttatctccagttcctgatataagaactgacaagaaaccaaatactgaaagggattttatgagctcaggcatatcctctacaagagttgggaaatcttgcatggatagcgttgatgattcagctgatttagtttcaccgaaagagagtgcatttcaaaagaagctgaagctttgtcacgaaaacaaagaaaatttgaatgaaattgctgatcaaggagaaaatgaagccaatgcaaagcattcttcagggattcttactccgagcagtgttgacaaccataatacacataagaatggtccaaattttcgaattccggagctaaataccactgtacaggctttgtctaactctaaagacataatattttctagatcaaagccatcagaacatgttgaaaaatctgcagcctgcattgatgcagattacgagtatttgaacatattggctgatactccaggtattaaaagaggcttagaatctccttctgcctggaagtctcctgtgttcacaccattccaggatgcatacttcatgagcccagcaagcagagcttttgatgccttaggattggtgaagcagattaatgagcagagtgcttctgctgtggaggaagcacatgaagttctggcaaatggaagcccatggaaacaacataacaaggaaaactctgacaaagaaaatatagaaaatacagctttgaagcatgagcatgtcacaagcaaacctccatcgatactcatggtagaggcacgggtgctcgatttcaatgaatgctccacacctgtgaggaagaaagacgataagaaagtggaaatggttttaggaggacctgcaacatcccctgttacttcctcgcatctttggataaatatgcggtagccctttgaggtgagtgggagtggggatgcttcgcctatgctgttcagtatgtacatgtctgttattcccataatttccaccgttttgaaatacacattccaattagtactttattctttgtgcttggtaccctaaatgtcaattctaaatggaaatacatttttttgtagtgttaagatttgtaatgtgtcatttgattatgttaaatattaaacaaggcaatatatttaaattcagagtatattatgaaaaaaaaaaaaaaaaaaaaaaaaaaaaaaaaaaaaaaaaaaaaaaacccccccaccccc

SEQ ID NO: 76973 - DNA, 980 bp, Zea mays
  Clone ID: MRT4577_170226C.1
ccccacgcgtccgcggacgcgtgggtagattctgaaaaatttacaatatttagctggttcctgattttttttcttgtacctgttactgttagaacacagaactttgacaataccatatcaagtcttttataattttttgcatacgtgattaatttgcttagcccaaaactctgatttaggctaaatagttctagaggctgctaactggttgcactgcacatcaaatgcaggcggagtggatggcaccagaaatacttcgaaatgaaccatcagatgagaaatgtgacgtcttcagctatggggtcatattatgggagctctgtacattgctgcagccatgggaaggtatgaatcccatgcaggttgttggagctgttggttttcagcaacgacggcttgatattcctggtggtgtggatcctgctgtagcagagataataaggagatgctggcagactgatccaaggatgcggccatcattttcagagatcatggctactttgagaccattgttaaaaaacatgcctgccaaccaacctaccaggaagcgggcacaacaaacagatgattaagaatatattggtcagtatcagctgaagacacaggccaaagagagactgcattggtttgtcttgctcttgccttcccagcttcaagcaattggccatctgtaactattaccattgttttgtacagtacgccaaatgcgtatttgatgaagaacagatccatgaagccaaagaaaagaaagggaaaagaaaatttgcgaaagttcgtgcatactatttttgcagacacaatggttactggagtcagaagttgacatgtcatgttgtaacaggatcatcgtcttctgttcagttaggccttatttttgctagtcctcgaactaatggaaaactattccatctttaaggccccatcaaattgtaatgttttactatgaaaaggttggctcacccttgtgtatatcacgtctc

SEQ ID NO: 76974 - DNA, 707 bp, Zea mays
  unsure (1)..(707): unsure at all n locations
  Clone ID: MRT4577_170227C.1
ctctntctctctctctctcttctctctctctctctctcttctctctctctataatctcctctcttttctttcttctctttctttctttctttctttctttctttctttcttttcttttctttttttttttttaaaaaccgggggttttctaccaaccacccccaaacggggcaaaaacgtcgggcccccttccaaaatttattcggggggggggggcctttaaacctcccccccaccccccccacaaaccccccgggggggcggccccataaaaccaccgcccttcaagttcctttcaggcccacccccttgggggggcaagaaaggggggtccccccccaacccctgggcaacccaaaaccaggtcccccaaaaccctggccttggggaaccccagggggccccccaaaaagccgcccccccccccgaaaaaccccccggggggtttatttggaaaaacgtacccaggcaacccccccttccaaataggaccccgggccggacccccccaagggggaaaccccaccccccgggggcccggtccaaggggacccggcccgggacccaaccggggggaaaccagggcaaaagcgggccccgggggaaaatgggatcccgccacaattccacccaaaatacgaagccggaaaccaaaaggggaaagcccggggggcccaaagggggggccaccccccttaatggggggg

SEQ ID NO: 76975 - DNA, 2273 bp, Zea mays
  unsure (1)..(2273): unsure at all n locations
  Clone ID: MRT4577_170228C.1
ggccacgcgtccgcggggccccccctcagagtaagctcggaattcgtttcgagggaacaaccaaaggacctgattgtttacgacacatctctgtttcaaacaacagatgaaatgataaggacaatgaatgagcttgaatccacagcacacgatggttgtgctggtcttggtccttcattgccacctgatcctggacatgagctccaaacaaagattgttccttatcggatgcctcctgacctcaagcctgtccagggattaggtgtttaccataagtttgatttccgggataacatcaatccctctatacctctctatgaaccaagtccagctcctcaggaaaatccattacaacttataaagcaaatgcctgttacagctgctgctgttgcaacagctgcagtggttgcatcttcaatggttgttgctgctgcgaaatctaacagcgatattaaactagatgtgccagttgcagcagctgccactgctgctgcagttgttgctactacagctgctgttaaccaacaatatgaatacttggatccgggttgtcaattgctttgcttgccaagttcatcaaataaattaatccaaaaaggtagacatgacttggtggatgatgatcagctggaaacaaatcatggacaggataatgcccttgagcgtgaaaaggatttggttcaagcaccccaggaagctgagcgaatctctgataggtcaactgggacagagagtgcaagatctgaaatttctcttgataaaatcgcagagtttgaaatccagtgggaagaacttacccttggagaacgagttgggctgggatctttcggagaagtgtatagaggtgaatggcatgaaacagaagtcgcagtcaagaaattcttgcaacaagatatttcaagtgatgctctggaagaatttagaactgaggtgggaataatgagaagactgcgtcatcctaatgttgttctttttatgggtgctgtcactcgtgttcctcatctttctatcgtgactgaatttctgccaaggggtagtttatttcggttaatccataggcccaataaccagttggatcaaaaaaggcgtttaaggatggcacttgatgtggcacgtggtatgaattatttacacaattgcaccccagtcatagttcaccgagacttgaaatctccaaatctacttgttgacaaaaattgggttgtgaaggtctgtgattttggtttatcacgtctgaaacatagtaccttcctttcgtcaagatccgcagctggaacagcggagtggatggcaccagaaatacttcgaaatgaaccatcagatgagaaatgtgacgtcttcagctatggggtcatattatgggagctctgtacattgctgcagccatgggaaggtatgaatcccatgcaggttgttggagctgttggttttcagcaacgacggcttgatattcctggtggtgtggatcctgctgtagcagagataataaggagatgctggcagactgatccaaggatgcggccatcattttcagagatcatggctactttgagaccattgttaaaaaacatgcctgccaaccaacctaccaggaagcgggcacaacaaacagatgattaagaatatattggtcagtatcagctgaagacacaggccaaagagagactgcattggtttgtcttgctcttgccttcccagcttcaagcaattggccatctgtaactattaccattgttttgtacagtacgccaaatgcgtatttgatgaagaacaggtgaattttggtccttttgccttcagcgtttggttctccattggagccagcggaatgctgtctatatctatctgatgaaagccgacccaaataacacagatccatgaagccaaagaaaagaaagggaaaagaaaatttgcgaaagttcgtgcatactatttttgcagacacaatggttactggagtcagaagttgacatgtcatgttgtaacaggatcatcgtcttctgttcagttaggccttatttttgctagtcctcgaactaatggaaaactattccatctttaaggccccatcaaattgtaatgttttactatgaaaaggttggctcacccttgtgtatatcacgtctccaaccaaatctgcttttaattgacaggtagattacaaaagaaaattatgccctttgtactaagaatgatcattctttgcggtaggaaaaatgttaaacctacttttgcaaacataaggttgatatatgttaaaaanaaaaaaanaa

SEQ ID NO: 76976 - DNA, 210 bp, Zea mays
  Clone ID: MRT4577_170229C.1
gcgcgacaaaatgtttagtgcgctgaccgacagccatacccatgaccgtcgcgcgccagcctatggacatgtccgacgagctgacgtaccaggtcttctggcgtgaggtggcgcagcgtgtgccctaccagtacggtgagcgcattgacacagtggtgcacagcgcagaggactggtgcaagcgtgacttcgttttttgccatacacagg

SEQ ID NO: 76977 - DNA, 360 bp, Zea mays
  Clone ID: MRT4577_17022C.1
ccaaggggaggactgttatattacaaaaaaggaggccaagagactaatggagtgtttggtttgaagaattatatagtccatcatcttctcactccccacttttttgttgggtttggggaatggagggagttaatccatccccacctcattcctcatagttagttgtttagtcctaatatgtggaaggaacccatcccaccaaattggaggaatggacccatgatgcaccacttaattttggatagtgcgattcatcaaaccaaacacctgataaattttcggaaaccaactaactgtgtaaagctacagtcctaatataattcgagacatatgggttttacaacacaatggccacaaaat

SEQ ID NO: 76978 - DNA, 262 bp, Zea mays
  Clone ID: MRT4577_170230C.1
aaaacaacaactcattggatcccgggatacaagccccagcaaatacaagcaaacaaacccataagcaaacaaacacatgaatactggtacagataccacacaagcgagctagagggagggggaaattgtatcttacgttcataccatggaaagccaaaagggggggggtcaaaccaaataaaaaccgacacgggaaggtcccctactggttgggaaaagccaaactgaacgcgaaacaaaagcgcgggccattggcaggggg

SEQ ID NO: 76979 - DNA, 271 bp, Zea mays
  Clone ID: MRT4577_170231C.1
accatgacgacgatgatgataacaatgacgacgacgaggatgacaattacaacgattgccgagtggagtgcatcgaggactgcatcgactacgtgcccggcatttgttaccgccactgcgtctcctactcctgcctctacctgccaccatatagctaccgaagagcagcttgcttccggcgatgcggccacagatgctaccaccatggccatcatcatcaccaccatcaccaccaccaccatgaagatgacgatgacgatgaccaccacgt

SEQ ID NO: 76980 - DNA, 596 bp, Zea mays
  Clone ID: MRT4577_170232C.1
aaaaaacaaagccaaaaaccctgggaaataaaaattacttatcctttacataaccgggtggaaaaaacccacttgaaaagaacggggggtgacagttttatcacggaagggcatcaaacccacatgacgggggaggccgaggaacaaacggggcccggggaactcattcacatatggaatggccataaaaaggggccccacccccccaagggcaactagggggaaaaccctggggatggggggccaaccaaagctgttttgtttccttggggggcagaaaaaaacttggggatagcgggcatgatcccgggggtcttggcgggcacaaagcttttgaggccctgcttggggaaaccccccccctccttagggttttaaagcccgccgggggccccccctgccttggttaccctgacttccgggtggccggggatgttccggaaaacctgaaccccggaaatgccaacgggatctcccttcgccgggaacagggggtacccctgggggggggacccaggggggggccatcaaactaggacccggccgcgacggggaagggcggggaaaggggaaaaagggaaaaaggggcctcgggc

SEQ ID NO: 76981 - DNA, 684 bp, Zea mays
  Clone ID: MRT4577_170233C.1
cattgggtacctcgaggccggccggggaagacctcattattgcaaggatgagcaatccatattccactttactctgatgctagcatgtagcttcttcgctttgcgtctctacaccaacagtaataccatcgccagtcgcatacaggatgcgcgcgctatcctctcgcgcatagtcggcgaacagggacttggtctgatgatgaggcgcgagcccgcccagcggagcgattgtgtgacacgcgtccagcacgatctccgccgaccgtggtgcccggacatgatagaacatggaagaatgatgaacctcctcctcctcgacggcatctcgttgcccaccgcctgcatggtcgacacctacggcgacttcttcggccctgtcggctctgattaacgctgcgacagcgacctacgtgaaggacaagctgggcaacgacatcacggaggaggcgtggctcaacacgcacggtcccaacgatcgcacgctcgcgcatgggctcaagggtgaccccacgtacctggtggtggagcaggacaagacgctggccacctacgggatcaacgccgtgtgcactcacctccgggtgcgtcgggcctgggaacggcgccgagaacaagttcatttgcccatggcgcggattccagtacaacaaccgggggagaggggccccggggaccgcgcgacct

SEQ ID NO: 76982 - DNA, 750 bp, Zea mays
  Clone ID: MRT4577_170234C.1
cgggccgccgacgcaaccgtcaccgcccggcctctgcatcctccctctcctcatacagcagatgtcatcgcaagcaattcggcacgaggctagatcctcggccataagcagcagcaccactccaaacctagccgagctcgcagcggaagggggaggctcactattttgccatggcgctggtcgcgcacctccagggcttgctgcccctgcgccgagggagaggggagagctcgccggttccggtgatggctatgtcttcgccgtccaacatgacgccggcatcacgctcctcgacgcctgcaacaccatcgtcgcacgcctccaccgcctccttgcgtgcctcgcggtcgacctccttttttcctcctaacgtctgggcgagctcccgtcgcctgaggccactcgcgcccgcgacgacaacccccggcacaacgctgctggtgcgcgaaactgcctgcaaacttgatagaacttcatagatctggcaaaactttcatttgagtgtacgtctccactgaccactgcatgcctccattgttaccctcgtggtgcaacactgaattgaactgaacatgtgcgcaaagctgtaaaggtcgattgcaaagttgacctccaataccctccagctatgaaggcaaagcgagcgcactgtccgtagtgtgctcgagcaggaatgtttcttctctcgtgcttcacttccagtccaaaaaaaaaaaaaaaaaaaaaaaaaaaaaaaaactcgagagaggg

SEQ ID NO: 76983 - DNA, 828 bp, Zea mays
  Clone ID: MRT4577_170235C.1
gccggccgggccgggccccccaatcctaaacctaatcccctctcttctcggctctcgcgtctctcccacggtgccgctctcggcctccacctcttcctcgtcccctcccctctgctcgacagctctgcccctaatccgaggcatacgtcggcgagcctatatcggtcgtcgacagatctgacgctctggtgactgctggtgctctaatcctcctctcctatccttccggtgaccctctccgtaaccctaatcctcaatctagtcgctctggtgttcttgtctcctctcctctcgttgcctcgtcggtggatatggtgctccagcgtgcaggacgtcgtgcatcaggttggtgccgctcgccatgaggagccgaagacgtcaaggtggcgggctgattggctaacggctggtgcattgtggccttgttcttggtgccatgtcatccattggagatgtccaggagctgctggacccaatcgctgaggacgagaggaggctagaagacgagaacgaggccgaggatgccctccagtttctggttggtggtgctggtgtcattgaggcgggaccgcccctggatccacatcgacaagccccacgacgagccccacggtcgaggcgacagtggctctagatcccgccccaacccagccacccgttcgaggaggagggaatcgacgtctaaagtctggctagactttgaagaagtgactgccatggaggaaggtaaggagataagaatcgctgctgcttgcccttactgtctgtgaataaagttcatccgataagtccttttcctgataaaaaaaaaaaaaaaaggccctaggg

SEQ ID NO: 76984 - DNA, 1194 bp, Zea mays
  Clone ID: MRT4577_170236C.1
gaattgggtacctcgaggccggccgggagctcacttcgctcccctctttcttccccacgaaaccagagcaaattccggcgagccggtgcggtgcggcggaggaggccgagggagacgccggcgcgagaaggagcatcaggaggaggcagcggagatggatccggactcggtgaagtcgacgctctctaacctggccttcggcaacgtcatcgccgccgccgcccgcgacctccaaaaggaaatggtggctaaagacaaggctcaagcagcacctgcaagccatgatgaagttgatcttgatgagctgttggatgacccagaacttgagaagttgcacgcggagagaattgctgcccttaagaaagaagttgagaagcgtgaagtgctaaaaaggcaaggtcatggtgaatacagggagataactgaaggggacttcctcggggaggttactggcagtgaaaaagtcatatgccatttttaccaccgtgaattttaccgttgcaagatcatggataagcatttgaaggcccttgccccagtctatgtgggaacaaaattcgtcaagcttgatgctgaaaatgctccattctttgtggccaaactggcaatcaagacactgccatgtgtaatattgttcaagaagggtattgctgttgaccgattagttgggtttcaagatctcagaagtaaagacgattttccgacaagagcgttggaaaatattctcaagacgaaagggataattgatgagaagaagaaagatgacgacgatgacgatgaagaaagcgaggctaagaataggagggttaggtcttcaactgctcaagactctgactcagactgaacctgagatgaggatcgaggactcaccgtttttgcactttggattttgtttgtttgtttgttctgtgttgtgctgtactgtactgtaattgatttgtgtaaccatgtatcggtaccagacaccacaacaagaacatgtacaagagattctttagcatccattgtgtgtaaaagctagggtttgtggctgccttttatttcgtttttcctcagccatcataggatggtacggctgatgtataatagattactatttgctatgtgggcgtcagatttgttttggcgtgcgctaaagtgaaaaaggtcgcatgaaagcatgactttttcacaaaaaaaaaaaaaaaaaaaact

SEQ ID NO: 76985 - DNA, 206 bp, Zea mays
  Clone ID: MRT4577_170237C.1
gggcatgagccacctgggggggacctgccacctggggagcatctcccaccggcggtccacgtgccgacaccatgctactaccttacaaaaccgccccggtctgagcctaatccagagccacacctatgcccgtgccaacagccgaatacaagcccgtgccagatggagggaacctgcggggttggaagcacccagatcctgggcca

SEQ ID NO: 76986 - DNA, 1213 bp, Zea mays
  unsure (1)..(1213): unsure at all n locations
  Clone ID: MRT4577_170238C.1
cattgggtacctcgaggccggccgggacttcgcttcgcttttccttcacgaaaacagagcaaatccggcgagccggtgcggcggagggagacgcctgctcgagaaggaggattagcaggaggcagcggagatggatccggacgcagtgaagtcgacgctctctaaccttgccttcggcaacgtcatcgccgccgccgcccgcgacctccagaaggaaatggtggctaaagacaaggctcaagcagcacctgcaagccatgatgaagttgatcttgatgagttgatggatgaccctgaacttgagaagttgcacgcggagagaattgctgcccttaagaaagaggttgagaagcgtgaagtgctaaaaaggcaaggtcacggtgaatacagggaggtaattgaaggggacttccttggggaggttactggcagtgaaagagtcatatgtcatttctatcaccgtgaattttaccgttgcaagatcatggataagcatttgaaggcccttgctcctgtctatgtgggaacaaaattcatcaagcttgatgctgaaaatgctccattctttgtagccaaactggcaatcaaaaccttgccatgtgtaatattgttcaagaagggtattgctgttgaccggttagttgggtttcaagatctcggaagtaaagacgatttttcaacaagagcgttggaaaacattctcaagatgaaagggataatcgatgagaagaagaaagatgacgatgatgatgatgaagaaagcgagtctaagaataggaggattagatcttcaactgctcaagattctgactcggactgaacatgagatggggattgaggattcaccctttttgcactttatattttgtctgttctgtactgcaattgatttgtgcgactcatgtatctataccagataaccagaacaaaagcatgtacaagagattcttaacttatctaacttatgaacacgttcaaaattgagctggcataactcaaaaaaaaaagcggccnnnnnnnnnnnnnnnnnnnnnnnnnnnnnnnnnnnnnnnnnnannaaanaaaaaaaaaaaaaaaaaaaaaaaagggcggacgnanaaaaaggaaacaaaaaaaaaaaaaaaaaaagggggggggccgctttgggggttccaggtttacttccccgtgcttgcaaggttatagtttttttatgggggcccctaaattaaat

SEQ ID NO: 76987 - DNA, 730 bp, Zea mays
  Clone ID: MRT4577_170239C.1
atggatgcggacgctccggcgacggcgacgccatccaggaagccggcgtcccactccctcccgccgccgcccgcactgttcgccgcccgcgcgcgctcccgggttgccgacctgggtgccggcgcagcgttcccagcccccccacctgacacgccgccgcgccgctcgcccatcaccgtgccgttcctctgggaggaggcgcccgggaagcccaaggcgctgcccgccgccgcgacaccggctgcagccaacgccggctcctttaccgaagtcgccggtcggcgtcaggacagaggccacgcggacctgcctcgccccctgccgctgaagctgcccccgcggctacagcaggcggcgtcgtcgttcgccgcggcggacacccccgctgtcccccaagaccgtgctccagggcggcaggaggcggccgaggtgggcccggagaggcgcctctgccttccggaggacgccgagcgccggcgggggactcttctctcgaaactggagcaagcccacggcggcggcaagcaacaagaacggagacggtgaccatgagcgggacgcggcgggcccagacgccccgtggtgctccccggcgtcctcgtcctcttcctcatccgcctccacctgcttcggcgtcgacggccacggccacggaggtcgcgcgaggcccgccgacggacgggaggtctgctcggaggaggacgacggctccccgaggggctcggattaa

SEQ ID NO: 76988 - DNA, 194 bp, Zea mays
  Clone ID: MRT4577_17023C.1
gtggttgtggttgttgtggtgtttttttgttgttgttgtttttggtgtttttgttgtgtgtggtttgacgggaaaaagtgcgagcgtgttgggcaacaatctggggagccctagcgaggtacacttggggcacgtgttggttgatggctggagggattaaaaccgacaggggcaactggaaacataaacagggc

SEQ ID NO: 76989 - DNA, 407 bp, Zea mays
  Clone ID: MRT4577_170240C.1
cggacgcgtgggattgtggggatctcttcttgctgcctgtcgaagccacagttgtgttgagctggctgagttatcagtggaacgtcttgcagatcttggagctgatgattctggagtctatgtccttctgtcaaatatctatgctgatgaaggaatgtggggtgatgttttgaggattaggaaattgatgagtgatgagggaatgagaaaggatattggacggagtgtgattgaagtggatggtgaaatacatgagttcgtgaatggagttggctcatatatttgtaaggatgaaatgtacttgatgctgtggaatttgtctaacatggtggcatctatttgatgctcctttgtctaccaaaacaaagtactaatcctctagattaaaaccttacaaaattaataac

SEQ ID NO: 76990 - DNA, 290 bp, Zea mays
  Clone ID: MRT4577_170241C.1
ccttccttttttggttggtttttttaatcttttgggggggttttttttctcttcggaaaggaacgggaacacctttctttagatagataagaaaacccggccgaagccaggatggggccacacataataccctacattacgaacacgacgtctgcggtgccgtcaccaccacccttgtgccgaccgacaaaagcgactccgcgtaaaaaaccttcgacaacaccctcttgccgaccgacgtaagcgacaccgccttcttaacccccttcactgatcccagcacaatagca

SEQ ID NO: 76991 - DNA, 604 bp, Zea mays
  unsure (1)..(604): unsure at all n locations
  Clone ID: MRT4577_170242C.1
gcgaaatagatcaggctcgggcattcagcagagtggttacgcccgatcgtgtcgggtgacaagcgcttgcgcttgtatcctgtaaacacagcatgaaaaataacctgtcttctagttgctacgcctggaacaaacaaaagaagtaatcaatgattcacttcccgttgcagatgtggagctattttctttgtgttaacattgcctttacaaaaccaaacagcaccattgcgataaagaaactggaataatacattttattgcggacttttaactgaaattgtttcacagcatgtgtatgttgactatgttctatgcatattctgactgcactgttaagctgactttgactcattcgcactccaactttatagttttcttcggtggatgaagctgtggctactagggatgctgtttacaacctacagtggcccccaaacaatggcaataagttggttgccgagtttgttgatcctcaggaagtgaagctcaaggtcgacccttctcccccgccagctgctcctgttagcccagctgctgccacaagggcacctnctgttcaacatactcagacaaacanagtgtgccacgccaggctgctgcacca

SEQ ID NO: 76992 - DNA, 482 bp, Zea mays
  unsure (1)..(482): unsure at all n locations
  Clone ID: MRT4577_170243C.1
ctctctngtattacgcacctcgggggggggggtgggggccctcgatctcnaagcgcagcagcagcagtcaggcggccatggacgccagcgcagcacgagccggcgggaaggcgaataagggcgcggcctggcgcaaggccggttgtttctattaagaagtcggtgactaggttcttgaggggcgggctgcagttccccgtcngccgcattggtcggtatttgaagaagggccagtacccacagcgcgtttgcacgggcacccccttctacctggccgtcgtcctctagtacctggccccctaggtgctggacctggccggtaacgctgccatagacaacaagaagacccacattatcctaatccacttgcttctggccattctcaactacaagaatctcggtaagctgctggttcgcgttaccattaaccacggcggcgttcttcccaacatcaacccggtgttcttgccctagaatacccc

SEQ ID NO: 76993 - DNA, 468 bp, Zea mays
  Clone ID: MRT4577_170244C.1
atcttcttatacttttttttttttttctattttttttatttcctttttcctcttattattctttttttttttttgggcaaagcccagggctctcacaagcaaacaacacaaaaaacccttctttctccctcccaaacccgggcggcggaaaacacaagagtcgcaagggaaccctcaaaggaccttgactaaaagggggggggggccctccccaccctcacccaaaaaagggccgctggtacccccccaatttttctaaaaaaaggcgcggggggccgcccccccccccttcaagggcagcaccttgccccccaggcaaggggggggcccgcctgtattcccccgccgaaggacacgccccccccccccaacttccaaaaaccagattttttactggccccccaaaaaaaagcccgcctcctgctggaactacccccggggaggaacacaacaccacccccccaagga

SEQ ID NO: 76994 - DNA, 143 bp, Zea mays
  unsure (1)..(143): unsure at all n locations
  Clone ID: MRT4577_170245C.1
ggattgagctagtttcaactcatgatactaatgcttatattcagcagccagattgttctatactagattggttggtagacaggggatcacatacactttgtggtcaatcttggcnccaacatnanaattatttttttttttct

SEQ ID NO: 76995 - DNA, 139 bp, Zea mays
  Clone ID: MRT4577_170246C.1
gccgctagggagtcgccttacgaacggagattcacaaggacggctgagcgatccacgtgggagaattactagacaacatcagggagtgggaaatcgatgctgtgtccaccaggaaaagcggaccgtacacaatgactgg

SEQ ID NO: 76996 - DNA, 364 bp, Zea mays
  unsure (1)..(364): unsure at all n locations
  Clone ID: MRT4577_170247C.1
ggcggcgagggaagggctccgcgtcgtgtcccttctcttcctcctcctctctccaacacccgatccatgagcgctgccctccgcattgctcttgataccatccagtacatcgattctgcccccaagatcaaaggccggagaaggaggaagaaaggttagggagtcggctatggcatgcttcttcctcctgccaacgttgtcgtcatctgccacacgcagcatcacaaatagagagagagacaaaaacaaagaggggtcgacaagcactgacacgacccatgtcaatgtggcgcgtcttccgctccctccttcgcgcccgnctaggcggtcgggcgcggcgccgtgcccagccggtgggtcccgc

SEQ ID NO: 76997 - DNA, 484 bp, Zea mays
  Clone ID: MRT4577_170248C.1
ggggggggggggggggggatcccacacaccaaacccgcggtcctgcacacccaacactaaggtggggtagcacgatccatacgctaaatgagagcccaccccgccttggcttaagcaggaacaatcacagagggatctcagagataggcaaagaagagaaacgtgggatacgggtggtggtcagagcggttcaagtatcagacaggtaaaaacgtaggataaggatctgtctaagtcctgtaatgagacagtcgtccgtcaggtagtacatcgggtacctttcacaactcggggttatactcggggttctcaggtcaatcgggtgacggtgggcaccgttgaggtaaggggtagtttgtgttctggtaacacgttcattattataaaggaggtaacaagtgaggagtctcgtcattgtgttaccaagggtagggaggcgactcgctcttctggggactacattccagggactactagagaggag

SEQ ID NO: 76998 - DNA, 603 bp, Zea mays
  Clone ID: MRT4577_170249C.1
tcgagtttttttttttttttttttttttttttttttttttttttttttttttttttttttttttttttttttttttttttttttttttttttttttttttaaaaccgggctgccccaaaggaggccattttagggggtgaaccacagggccccagggggccaaattttttttttttttgggaagccgaaagaaaactttttccaaacataatcgtttagggggaaacaattatagctggggcttggcactggtgggaaaaaagctgacaaaaaatgggcggatttccattggccccaattaaacaacaagttttaaaggatccaaagggcccccccaaaccacctttttgtaagccgaaaaaccttgggccttccatttaaaaacctttttttccatgggtgggcgtttttggtttgccaaaaagcttgttttaataaccttgccaatttttttttccgggaacacttttttgagggcgatactcgttaaaaacaaaaaatccttgtcctccccggccttattttgttgagcaaaccgaaggaaaacacttccattttcaacctcctgaaggggaagctttgcaccattttcaggcaagctgt

SEQ ID NO: 76999 - DNA, 401 bp, Zea mays
  Clone ID: MRT4577_17024C.1
cttaaaccagaaccgggcgtttattttcgtcaacttcatggaaagaagcctctagtcttcaagatcttgggaaaaaatacaatgatctctacgacttaccggcataataaaaaatagttgagccttaaccgcttcacgttttccttgaggacatgaaccggtttaacatttactttacgaaaagcaatggccttagagtaacatccccaagaccaagggccttggtttgccacccacccagtggaaggccaatgttggtcctagaacaaccgaccctcgaatgtggccccatgaacaaaccatcccggaaggacaaccggtgatcatcgtgtgcaccaagaacaatcgaaacacaacgtgtgcgcctaagattcctgccaaacaagctgaaggtgagagtt

SEQ ID NO: 77000 - DNA, 788 bp, Zea mays
  Clone ID: MRT4577_170250C.1
attcggctcgagctcgagccgattctaatgatatcttcagcttgtaccaaaacaagtgccaatttgaagatatactcctggaaatggacagaatcttacgcccagagggtgcaatcataattcgtgacaaggttgatgttcttgtaaaagtggagaagatagccaatgccatgaggtggaagacaagattggctgatcatgagggtggccctcatgtacctgagaagatactcttcgcggtcaagcaatactggactgctgaaaaaacaagcagctaacgttgttcattttcatttttttctccagtcacagctaacttgccccctggctgtgtttattggaaaaatttctgtcgattatacagcccatgtttgttactgaaaatataaaacaacccccttgagggggagtaaattatgtgggatttagctgtgaacttgggatttgattattccactggtgccgagacgcagaagacatgccaaaaggatcaattggcattgtactggtgactcatatctgatcagacagatgcaactgcttatagttggaaccctgcagcagtccgtcaggaagttatgaactagcagtgaacttatagttttgtataggactcctttgcccctccactcactttttttttgttgtatctcagaatttcatcaactggattgtatctcaacccataaggtcttcctatcctattttattttaattgacaaacattttgggcccaaggatgcaacttgtgaccttggttactaatgagatgataatgttttctttct

SEQ ID NO: 77001 - DNA, 390 bp, Zea mays
  Clone ID: MRT4577_170251C.1
ctgctgcattatttattttcagagatgccaaagatactgtaaagattttggcacctctgttagtacaagcaatttctgtaataattgatactttaacttctctatcccattagtgttatctgaagtagcgctatgtatatttatttgaactgaaacaatgttggtgtaaaattgagataatgaggcagtgtacttattatataagtacttgtcacttcagtaagatcactgttaaacatattcaatattgaatatgtttgttacaagagatagtaagctgatcgaactgttcaatgtttttgtgtttggtatacatatatatgtgtgtcctttatatgatgtctatatctgatatatgtatatatgtatgaataaaaaaaatcttttctt

SEQ ID NO: 77002 - DNA, 358 bp, Zea mays
  Clone ID: MRT4577_170252C.1
caaaaaaaaaaaaaaaaaatcaaaaaaagtttaaaatttacaacaaagaaaacaataaaaacgttctgttacaaccggaaacggagctcacacaaaaacaataaaaatctatcttataccaaatcacataaaaaaaagcaccctccccctacataccccaattttattccccctacctttctactcttactcctttttaatacacaaccaaatttcatttcattgccacccttttaaaaacccctaacctctaaaacccctgactttccccaacttattccccttcaataacacccccctttctccctctacctaaacaccaaaaacgcccactctattcgcctttcccacaatttcc

SEQ ID NO: 77003 - DNA, 439 bp, Zea mays
  Clone ID: MRT4577_170253C.1
aatttcaaacctcaaacttattcatgaattggcattattctggggtagaccccccccccacacaacccggccctttttaaacccaccccggccccaattaagaacccaaccagaaaatcctttaccaccctccttttggaaagagggccccaaacaacccaggcccttgggcggttaaaccaacccataactaactgcccaccacggaaacggaccccaggggggagggggctctcctttggaatgtggaagcctgttagggggcggccttcctccacttgttggccggcaaaaatcaaaccctgctggtccggggggatgccctcctggtcctgaatcttcgccttcacattgtcaatggggtccaagctctcaacctccagggttatggtttttccattcagggtctttacaaagatctgcttaccacctctgaggc

SEQ ID NO: 77004 - DNA, 799 bp, Zea mays
  unsure (1)..(799): unsure at all n locations
  Clone ID: MRT4577_170254C.1
cggggcttcgcgacccatctacaatgcctccaaggatacgtattaggccgcgtgccctccgcgcctgcgcttcacaccctacccaccccatctctctacccgcaatcgcgacctacgcctcggtagcagctgcctcagcgacgacccccgcacctcccattcagcagacacacaaagccgcgcccccagtgctacgatacccgcccacccaaccgccctctcacaagccgccggaggtccgcaaaacgcaactgcaccggcagtatcaatcgctcctcaagtcctcgcctttgattttgatattccagcacaacaacgtcaaagcggtagaatggatgagcataagaagggaattggctattgcactacgcaagctggatgcggagagggcgaagaatggacaagagacgcttgcagatgaagttaagatgcaggtcatccagacaaacatctttgcaagcgcattgagagttgtcgagttcttcaacccggagcagttcatgttggaccatgcacaacaccccacagacccgcgcacacccacgagcgcgcagataccgcagacgagtaatgacgcagaggacgagcgctttacacacggtctctccagacgggcgcacgaaatcgcaaacaacaggaagctaaagttggaactagagcctctactctcgggtcctctcgctgttgtcgccttccccgatgtcgctccccagtacctcaaggccgtnctatccatcctgtcaccttcgaagcccgacttccctgcgccaagccggnagggcgagtccagactactacg

SEQ ID NO: 77005 - DNA, 127 bp, Zea mays
  Clone ID: MRT4577_170255C.1
tccgggcgcgtggtctttcgtgatatgccacgaatttgaaagttcgcaaatatctactgaattaagttgctggctttatgagggttacattagaacatatagattgtgaaaatgaagccctctattg

SEQ ID NO: 77006 - DNA, 252 bp, Zea mays
  unsure (1)..(252): unsure at all n locations
  Clone ID: MRT4577_170256C.1
ctccttctttnnnnnacacacacaccacaaggggagcaccctgcgggaggcggcgccaacaagcacaaggcaaaccangccggcaggggaaaccacagcggccccacaggaaaagccacgaccccacaaaaaaccaccgagcaacacaaaaaggagcccgncctcagcgcagcacagaaaggggactcaacccaggccgccaagacgaagncgagagacccagacccacacaaaacacgaccgccaggaaaa

SEQ ID NO: 77007 - DNA, 157 bp, Zea mays
  Clone ID: MRT4577_170257C.1
ctccatttgggtcccccgtctctttctcatggcggcggcagtcggtgccgactccgcatggagtggcggagcggccgggcatcccggcggcggcctttgttgaggacgtctaagaatacctacgacaagtggggattaacttcaactacgtgctaga

SEQ ID NO: 77008 - DNA, 678 bp, Zea mays
  Clone ID: MRT4577_170258C.1
tgcatgcatccatccacgcattttattacgtcgggtggacgcattgcgatatccttttcctgcacttataaagacaggggtagaggaagaagtctctgtcacagcaacgtaacgtcagaaactaaatccttgctcgatcgctagctcgccattgcatccatgagatcgccggtgctgacccgcgtgctcgccgccgcgctcctcgtcgcgtcgtcgtcggcggcgctgtcgcaggccgcgtgggtgcccgtcctggacgtgaacgacctggtgatcaagcaggtggcgcagttcgcggtgctggtgtacggcctggcgcaccacagggacctggcgtacgtgggcgtggtgcgggcgcagacggagcaggccgtcggcggcggcaccaacttccgcctcgtggtggtcgccacgaggcccgacgacggcgggagcaccgcgcggtacgactgcctggtgtggggcgtgccggggtcgcgctccgacacctggaagctccgaaggttcaggaagatcgtccagggctagctatagctgctcatatggatccttctggccttgcaataagcgtcagtaataaggtagtgtttcaatgatcaattgtaagccgtgtcctcctcctcctcctcggctgcaggagccagccaactataatgtagctctcactctatctcgtgc

SEQ ID NO: 77009 - DNA, 368 bp, Zea mays
  Clone ID: MRT4577_170259C.1
cccacgcgttcgcaagccatgtggaggagggctctagcgatggtcctgttcatggctggcgccgcgctgctcgccggggctgcccgcgccggcgcgcagcacgtcatgtggagcatcatgacccagaccatgctgcacagcatgctgagccaccgctgcgacagcgggtgccacagcgactactacacctacgacgccttcatcgaggccgccagcaagttccccagcttcggcaccaccagcgacgagcagacgctcaggcggtagctcggcgacatgttcggccagacgtcccacgaaaccaccactggatgggctactgctgctgatggaccagtcggctggggatactgacaggtgaaggaaca

SEQ ID NO: 77010 - DNA, 635 bp, Zea mays
  Clone ID: MRT4577_17025C.1
cgaccgtttagattgctctccggatgcatttcctgtatggacgatttggtgggatcgtagctcagcaactgcttccttcttccgttgcccgcaatggattcagcgaggagctggttcaccaagctccaaacgagggagaaatccattggcaagaagaaggaattgcctcccaatggcaaggagcccggcgacgatgcgccgtcgagcgcaaccaagcagagggttgcggcggccaagcagtacatcgagaaacactacaaggagcagatgaagcatctgcaggacaggaaagaaagacggtgtagtctagaaaagaaactagcggacgctgatgtgtccgaagaggaggtcaacaacatcctgaagcagttcgagaagaaagagacggagtacatgcggttgcaaaggcacaaaatgagcgtcgaggatttcgagctgctaacaatgatagggaagggagcttttggcgaggtcagagtctgcagagagaagaccacaggaaacgtgtatgcgatgaagaagcttaaaaagtcagaaatgcttcgtcgaggtcaggttgagcatgtgagagccgaacggaaccttcttgccgaggtggaccaccactgcatcgtcaagctgtactgctcgtccag

SEQ ID NO: 77011 - DNA, 343 bp, Zea mays
  Clone ID: MRT4577_170260C.1
ttcccggatccgaatccttcatcaaatttagttgtgaacgcgggtcgcctctgatctgatctggccgccaaagccgtgcccgagcccctctccttgacgacgagttctccacccatctctcttcttcctccctctcgtcgctctctccttcgcctttgcctgccccagtcggtgaggcgaggagcgtggaatatcgcgatgctcgattcaagctgcaacaaactccctcactcgacagagtatgaagcaacagtggctacactttcacaaatggagaagagagctgtaatggcagaaacaatgctggaagctacaaagcaataccagaccatgttcttgggaa

SEQ ID NO: 77012 - DNA, 306 bp, Zea mays
  Clone ID: MRT4577_170261C.1
ttttttttttttttttcggaaacaattaaatctatctttagccaaaatttaatactcctagaagataattcaatcccctcaatctacttcgagcaagatacaaccgggccgggcctcactgacttgcttgtcgactactcgactactcctaggttggtgtgcatgtatggtggtggtgagctcagcacagctgctgttaggctgttagcaaaggtcatccaggctccacaggccgtactcgaaatcctcaaaaaaaaattcctgcagctgcaggccgatcatggagctgtactcgtcgtcagggcc

SEQ ID NO: 77013 - DNA, 275 bp, Zea mays
  Clone ID: MRT4577_170262C.1
gctgctccgaggaaatccaccaccgcggggggggccttttagatcttgttcggggcagcggacagcggcggacgtggggggcgatggctctcaacatgaagaccctgacgcaagcgctggagaaggcgtctgttgtcatcgagaagaccgggtccaccacggtgcatgaggtgacgggccacagcccgctgcaagactactagctgatggaccaggccgggtcccccggaccaagacgcgcgtggcggacctacactgctcaaccccaggacggc

SEQ ID NO: 77014 - DNA, 1113 bp, Zea mays
  Clone ID: MRT4577_170263C.1
gtggaacgacctgtcggagaacgacgtgatctacccgtcggacggcgtggagtacgtgctcaagggctccgagatcttccctggctgctcttcttccggtgcagatcggttccagcacctacgcgtgaccgaccggtcgccgacgaagccgccgccgccgccgccgctggcgctccctcgcatgagccacaacaagcagtaccccgtggacgggtacggagactacgacgccgtggaggaccgggacgacgacgagctgggccactcgtaccaccaccgccggacggcgtcggggcggcccgagaaggccgccgccgccgtctcggcgcgcgcggccaccaaccgggcccgtcccgtggagctccccgtcgaggagacctcgccgccgtcctccacgtcctcggacaagcccccgccgccagcggcgctgcagcagcagccggggaggagggccacgtcggaagtgccggagccgagccgtcccgggtccatgctgctgcagctcatcgcgtgtgggtcgacgacggcgccgtccgcggcaggcggcgtgccggggaagtgccgcgccgagccgaggcggagctgcggcctcgtgagccggctctcggcccgcggcggcgcggacgcggacgcggacgaggacgaggacgacgtgggcgcggggaccgacctgggccgccggttcggccgcctcgccgccgaggacaaggagtacttcagcggcagcatcgtggagggcggcggcggcaggggcacgccgctgccggcgtcgtcgctcaagcgctccaactcgtacaacgaggagaggagctgtaggcccggcggcgttgctggtggtgccgccatcggcgaggaggccatggatgaaggcgacggaggggtcaggggaagatgcatcccggggaggaaaaagccgccgccgcagcagcagcagcagaaatagcgcatttggctcatccttctttatgtgtaaacgcaaatcttgatctgaagacaagcgtagctttgtttagcattttcaattttcaaacatgccgttgtcgtggaggccatgcaggcagcaagtacttagctgtgtctaagtgttgaacacttgaaatcacgttgagcact

SEQ ID NO: 77015 - DNA, 337 bp, Zea mays
  Clone ID: MRT4577_170264C.1
aacaaaagtaatactactgtttagctagaagcaacttttgcccggcatgacaatccttcacttcacacgaataggttatgacacacaagctaacaacctgcatttattcttacccatcgtaaccaccacacatactttatagacatgcaccacggcgtggcacatgcatgctcagacgacgacaactagaacattttaattagtacgaacacacccactctatattggtccggggactagatgagagagagtaagacacacgaacgtaccggcccctgcctgcaccctgttgcagatgcacacacagacaaatacagctagcactgcccggggcctt

SEQ ID NO: 77016 - DNA, 299 bp, Zea mays
  Clone ID: MRT4577_170265C.1
gtcgccttcgtgcccccgttgcgcaaatgctccttcggtccccaattgggccaatagcccgctccgctgccagtcgcggcgtgggtcggggaagaagcttctgtcccgtgccgtagatcgggagaggagctccccgctcccgcctcgtggttcgattccccgtcgacagactttccgggaggcggctacgccctcggctaagagctgcttcctctgcttcgggtcgacggcgcaggactaggagcctaagaagcccgctgccatgggcgctagcaaggacgccaggcctgatcgcgcag

SEQ ID NO: 77017 - DNA, 509 bp, Zea mays
  Clone ID: MRT4577_170266C.1
aaataaattccccccccccccccccccccttgttgtttttttgtgggtttccgcccggttcccccccccaaacaaggggggacagcacaaatttggggggggataatggccccccctttattgggcattcagggaaaaagaaccacccgggggggtgggagcttccagccccaaaaaactttggaaaacagttcggggagctgaaacaaaacaacggaaattaaacgatccaggacaaaaaattccaaattttcccaggaccggggaattaatgaaaaactggggccaaccaaaaaaaaaaaatgggccccgcccccagaaaaatccaggaaaagggccccggggccagcctgtaaaataaataaaagggggccctggccaaaaaatgggaacactgatcaacgaccagggattcagggggaagcaaccctgcaaagaccgggcccaagggctttggtgaaaacggggaaaaaaccctcgggggaaagacccaaacaaggcccagcaaa

SEQ ID NO: 77018 - DNA, 602 bp, Zea mays
  Clone ID: MRT4577_170267C.1
gccggccgttccgggatgccccgactggctcttccacccttctccggtcgccctgccctcagagccgcatcctccgggatgctcgggcgccagtgtccgatccgtgcccgccgcccacgctccccccatccacgcctcccctcaagatggatcaaggcgagaatcttctcccccagagccttcccgctgacgcccgctcgtgcgcagccccagcatctacatcaccgaagagaaagtacatgaaccaccataactttcaactcagcagatgcagtaatctaccctccgtgaccgccactgaaaacgccgacacgctgttcagataggcgctccgcactacgtggctcaacctacacaggccgacataataacaacgctcgctgctgctcccgtctggatgacctgtactttcccaccttcatggtcctgcgtgagcattagatgcggttgaggagagatgttaatatgggggtcttacatattagttcttacactgatagcacactagcagtgtaggccattataagatctagaatgtgtcctgaagagcatgcacacgatcactgtggaaccaacgcagacgctcgaactattgctggcac

SEQ ID NO: 77019 - DNA, 1766 bp, Zea mays
  Clone ID: MRT4577_170268C.1
cccaagagcccaagaaggcagctacctgagagtccgcagctcaggtagtgagcgagctcctctctgcccctggcctcttcttcgttcattcttgtccactcgaggactgcccgtttgacgactgctcgatcagtgtgctagctagctagctagagcaagagaacggctgtaagcgaggagatcgatcgagatggctttcctcaacatggagcagcagacctgggccttcacctttggtatcttaggtaacatagtctcactgatggtgtttctttcaccgctgccgacgttctaccgcgtgtaccgcaacaagtcgacggaggggttccagtcgacgccgtacgtggtgaccctcttcagctgcatgctgtggatcttgtacgccctgctcaagcccggcgccgagctgctggtcaccatcaacggcgtgggctgcgtcgtcgagaccgtgtacctggccatgtacctggtgtacgcgcccaaggccgcccgggtgctggcggccaagatgctgctggggctcaacgtcgccgtcttcggcctcgtcgcgctcgtcaccatgcttctctccgacgccggcctccgcgtgcacgtgctcggctggatctgcgtcagcgtctcgctcagcgtcttcgccgcgccgctcagcataatgcggcaggtgatccggaccaagagcgtggagttcatgcccatctcgctctccttcttcctggtgctcagcgcggtggtctggttcgcgtacggcgcgctgaagaaggacgtgttcgtggcgttccccaacgtgctgggcttcgtcttcggcctcgcgcagatggcgctgtacatggcgtacaggaagcccgcggcggcgctggtgataataccggagcagtccaaggaggaggtggccgagggcaaggccagctgcggcggcgccgaggtgcaccccatcgacatcgcggaggtccacgacctgcagaccgtggtcgtcgacgtagacgtggagcctgtcacctacgccgctgcgtccggtatggtcgacggcagtgtcggcaggcctagggcgccggagcagctggtgatcaagcccgacatggtcaccgtcattgcggcggaggcgtaggttggttaagtagtagcagagtgagtcgatatcgatctgcctacctacagtacagccgcggcggccagatgtactggcagcgttcatgcaggctcgttgacttgaccggtcgagatggttggagtagccgggccgagtagcccagacgtactggcctgtgtcatgaaccggcaagctgataacgcgagcgagagggacgttggttcatcacattcagaagacggcaagctgatagtttctgtctctaggtctctctgtgtgtgtgtgtctgtaatcgactccatcagcttgccgcctttcctgtcctattctgattgttttcatccattgatgccgtcgtcgcagtaataaacttggaacgaacgattccaaaaaaaaaaactcgtgcccctcccgttgactccacccgtagagatgggatgggaatggaagtagccgggtccttgggcgagtagcggcgccttggcacccacgggcaaaccgtactggcctgtgtgatgaaccgccgagagagagatgagataatgtgcgaacgagaaagggtatgggtttggttgtggtagttgaagaagacggctagccagctgctgctgggctctctatatgtctctagatctgtgtgtctgtgtaatcgattccttccccttgcttgccgcctcgg

SEQ ID NO: 77020 - DNA, 452 bp, Zea mays
  Clone ID: MRT4577_170269C.1
atttttacatctgaataacgcaccctgtgcccggtgccgccgacccaaatggcatccacctcgccggaacccgcctcgtggagatctccagggacgccggctgctacaaggtcatcctcgactgcacccccgagctgcgtgcctactatgccaagtgcggattcgtggagaagggtgtccagatggccgtctacttctgagttctgatctagagattcattgctaaggagtgatggcatatgcgctcgttctgcttaaagaccccatctaaatttgccgtgaattttggcaattgagaagcttccttagaactgtattaatcctttaagaaccgatagatgttcatttttgtcttctaattatgtttggcgaggccattatgaataatgttccccacttctgttcccgtttgcatcatcaaacgagatattagcctgtttgttccggattcc

SEQ ID NO: 77021 - DNA, 386 bp, Zea mays
  unsure (1)..(386): unsure at all n locations
  Clone ID: MRT4577_17026C.1
gatcaatgaactgattgtacatttaaaggcagaaaaggagaatgaaactattcaaagcgtgctgggctcagctactcnagactatctggtgtgaaagggtaagcctccacgccatactcactcacaccagatcgaaccattcgtctaagtgtgcaagacaaggtcaattgcgagatttatactatttatttagatccgtgcacatactactctttactatctcatttcaaacaatgtttacaaggtacccatctatgatctttatgagaagtttgttgatcttttctttgcggttgatggcttttcaccactcgcttaattcactgaagtgcttgtttagatctttttgaaactcaaagtattgcgagagtattttataatttttt

SEQ ID NO: 77022 - DNA, 370 bp, Zea mays
  Clone ID: MRT4577_170270C.1
catgatccctaccgccatgggcgcgggatacaacttgactaagctggacaggaggaattcggggtatgtcctgaggctgtgagctttgggtcccatgcagctgggggagtccatacaaacctggaagtaaaccgtgtctggtttgtaaccttcgcttccgtgaatagagagggtggattaaatggttcccaggaagccctctgcgattgttgctcagtcactcagttgcatccagctctttgcggctccatggactgcagcacaccaggtttcctggtccttcaccgtctcctggagctggctcaaactcaggtccattgagttggtgatgccatccagtcatctagtcctctgtcatccccttctgcct

SEQ ID NO: 77023 - DNA, 935 bp, Zea mays
  Clone ID: MRT4577_170271C.1
cctcgaggccgccggccgggagtacgtgatactataggtgtggttagcccggcgactttctgacatttttcacatctgaatcaacgcaccctgtgcccggtgccgccgacccaaatggcatccacctcgccggaacccgccgccgccgacgaaactatcgacaccatccacatccgtcgcctagagtgttccgaccacgagaggggcttcgtcgcccttctctcccagctctccccctgcccggacctcaccacatccgtgttcgccacgcgcttcgccgagctcgcggcgcagggcgacgaccacatcatcctcgtggccgaggacccctccgcctcggaccggcggatcctcgcgacagggtgcctcttcgtggagcgtaagttcctgcgaggctgcggcaaggtggggcacgtggaggacgtggtggtcgatgccgccgcgcgcggcaggggtctcgggctccgcatcgtgcgccgcctcgtggagatctccagggacgccggctgctacaaggtcatcctcgactgcacccccgagctgcgtgcctactatgccaagtgcggattcgtggagaagggtgtccagatggccgtctacttctgagttctgatctagagattcattgctaaggagtgatggcatatgcgctcgttctgcttaaagaccccatctaaatttgccgtgaattttggcaattgagaagcttccttagaactgtattaatcctttataagaaccgatagatgttcatttttgtcttctaattatgtttggcgaggccattatgaataatgttccccacttctgttcccgtttgcatcatcaaacgagatattagcctgtttgttccggattccaaacgcttcggctgaactcgcttatttgaatcatttaaatcaatgtgaatataaaatttgctgagtcatcgtcat

SEQ ID NO: 77024 - DNA, 216 bp, Zea mays
  Clone ID: MRT4577_170272C.1
gttaattaatggtcattcttttcctttttcttgacatcgggagaacggctcccgagcgcccacgtttttttaagaaggggccagcatcctatcctaaaaaaaagggggccccctaattgcaggccacaagaaaattgtcaaagcaacctgccctacctttttaaaaaccccacccgggttcttgcactgaaaattttttcccaaccaaaaaaggag

SEQ ID NO: 77025 - DNA, 293 bp, Zea mays
  Clone ID: MRT4577_170273C.1
ccacgcgtccgaaaaaaaaaaaaaaatatataatataaaaaactatataaatttgatataacggggtcgggacaaggagagtgcggggttgatttggaaatccaggtccccaccccattctacccgtttgcctaggcgagagaatcagatgcccccgtagcataggagtatgtacatattctaattcagcagaggaatgacaagaagagtctgaccacagcgcatgggctgaacaatgagttcagcttcgagaagatcctcattgtcctcaagaaggagttctgctacaacgg

SEQ ID NO: 77026 - DNA, 204 bp, Zea mays
  Clone ID: MRT4577_170274C.1
ttcttttttaaccgggacagctgcccaccggccgggtatttttgcatgggaatgcacacaccactcaacatgcagccaaatgcaaccaggaggccgtctttcaaccattctatcatacgcacaggcgctagcagcagcgccaaggccgctattgacggacacaaaggtttcggaaccagcccttacttagatcagtaacactca

SEQ ID NO: 77027 - DNA, 400 bp, Zea mays
  Clone ID: MRT4577_170275C.1
cattgggtacctcgaggccggccgggaaaaaaatacaaaaaaaaaaaaaaaaaaaaaaaaaaaattacaaaaaaaaaaaaaaaaaaaaaaaaaaaaaaaaaaaaaagaggggcgccggtgatgattcagataactgaaatggaggacctggactgggtgcagcctcagtggtccaggcgagccatgccaaacttcgcaatttgaataaatcaaaatgtatatatttgtttgtaacaaacaatgtgttcgttgttcgctgaagcatgtactatcacgttaaacatgatgtgacgctctcatgccaaacaagatgatgttactgcatctactagcaaaacagttataaataacaactgctaagtagcatttttattggaaaaaaaaaaaaaaaaaagcggcc

SEQ ID NO: 77028 - DNA, 181 bp, Zea mays
  unsure (1)..(181): unsure at all n locations
  Clone ID: MRT4577_170276C.1
gcaggtacacgccccggaaataacctgggggacgacgagtanagtcggcggcggccgccctaaaaaggggggatttaaagagcaagtccggagatacacaccagaacaagaatttatcaaaggatagaaccaagctaaacaaattaacaacctatcgcaaccacaataaacacgaacccgc

SEQ ID NO: 77029 - DNA, 181 bp, Zea mays
  Clone ID: MRT4577_170277C.1
tcatttaacagctatggagaggtttctgaatcaagggtgatcacacactgggagactggaaagtcaagaggtttcggctttgtgaactactccaactgtgatgctgacaattatctaattctgcaaaggatggcctggaaatagaatgcaccgttgcatttgacatgtaatctataaactt

SEQ ID NO: 77030 - DNA, 694 bp, Zea mays
  Clone ID: MRT4577_170278C.1
gacaccacttcacacaatcttcattcgatagcttttgggatttgtacaccttttggggataacttaatactcacggtcacactaaatatacgatatacacgggcaagttgaaaccctgaaccaaaggctgagctgagctggtgtgcacagtcctcaccagctgcttattcacagttcactaacagaacgcttaggctcactgctacacattgcacaatgggggtgtgtcatggctatcggcaggcagcacttcattcacacgctgctcctcgggcgcacgcggacctccagcggcactgccatctcgcaggacagacggagcacctccgagaggtcgacgtcgcctgtgtcgtctgacgctggcagccactcgaactcgtgcagcagcgtggccatccaggaggtcacggtggtcatggccagggactttccggggcagctcctcctgccggacccgaacggcacgaggcgggccgtcggcgccgagcacggacacgtcctggccctcgccgccggggaggaaccgctcgggccggaactcgagcggcgcgtcccacacctcggggtcgcggctgatggcccactggttcaccatggccgtggtgcccgccgggacgaggtggccgtcgacgtacgtgtcggatatggccctgtggcgccacgacaggaggggccccggcgggtgcatccggag

SEQ ID NO: 77031 - DNA, 526 bp, Zea mays
  Clone ID: MRT4577_170279C.1
atttttctatagatatatgaagctctagctatcgctgccgccgctgcacactcctccttttcgatcccttcacgatgcggcgccgtctgcccttccaacatggctccaaatatggataaggccccgccccagtcgtctaagcccgacaacgctgcggggagctcagtgagaaaaaaaacaagtgaaacaaggaaaagctacaggagaaggtgaacaacgcaatgatagttcgaccattctacctactgacaagctgctctctgaggaggccaaggactggcagatcaccccctacctgcgtatccgagcgtctcaggatctatgattccctgcttcggagggatatcagagcactctgatgcttgcctggcctcatcacgattggactcggttcactcaggccagcttatctacaccagggcaccagattccctcggatgagattctccttgtttgacctctctgaatcatctcgacttctttagaacagttgccatctaccgtcattatcttggtaatgctatgc

SEQ ID NO: 77032 - DNA, 469 bp, Zea mays
  Clone ID: MRT4577_17027C.1
aaaggggtatccccccaacccaggccacttttttttaaccggggggggggccccgcccataaaaggggggcttttcaggagcagaaagggggggggacaaaaaaacccaggggttaaaaaaatactttttccacacacacacggggggggggggggtaaaggaattaactggggcgggaataaaaaaacgggttagttaaattaaaaactttaggggatagggatacgcccgctttcacgttttcactggcttgggggcaggtccagatttttttttcaagtagtaaaggggtgggaattttaggatttttatccgggtttaatataataaaaaggggggggggaaaaaaagcttggttttttttgcttgttttacccccaaatggggaggaccaggcccggaaaaaacttttgcccctttttggggggggggttttgcccaaagcacttgggcccttttggggcccct

SEQ ID NO: 77033 - DNA, 278 bp, Zea mays
  Clone ID: MRT4577_170280C.1
gagagattcgaacgggcacacgtgacctgattttagcacttttcagcacgaggatgacgagggatacaattgggaacttgctgacatacatgacctagcgagggaaggagcaactgaagatatagtgaagtatctggcagcgggtgtagaattcaacacgaaagattctgaaagcagtactgcgttgcactgggctggtgacccttgccatcttagagctagctaggctcttacaaaagcgaacgctgaccttaatgccaacgacaaatacaggaaaa

SEQ ID NO: 77034 - DNA, 540 bp, Zea mays
  Clone ID: MRT4577_170281C.1
gccggtaccgcaccgcgccagccatccgatcttcttctggccacggaactctgtgggccgaacaccaatacccgaggccgccgagatggtgggcccgtgggaggcggcaaaccgatggaggacagcgtcacgcgggccacgcggctttcggtgcggcagcgatcagcgcctccgccgtcgccgtgcaccccctcgacacggttaagcactcctccagcttccagctgggctccggcagttggtggaccggctcaggccgcttctggccctgtaggtttggtcggttgctcagggacgtaggccggaaaaaaattaggagggactgaactaaactgtcgcagcgctacgttatattgtgtatattttaaattaggaaaggctctagtgaagcttcattggatcggaagcggtagggagaggccgaagcgggagaaggcagcagtagaaaagcatataaatcctgatttttgtataaaactttctagttcatgcaatcatgcctaatggcttcggatttagttatgtgttacttcacatagg

SEQ ID NO: 77035 - DNA, 239 bp, Zea mays
  Clone ID: MRT4577_170282C.1
attattttttttttttttttttttttaaagaaggggtgcatgctcctggcatatgaggttatgtgcagattacaatgatagaacttcacatgcacaaacctctgggttttgggtttgtattgggttacaatctttctgccttgcagacttatatttccttaagcacgcagggccacattatgtctagaatcctggcttacttcagcaaatttgggggcaaaaatatgatgacgcacaag

SEQ ID NO: 77036 - DNA, 446 bp, Zea mays
  Clone ID: MRT4577_170283C.1
atccttttctctcttgctaactccattcactacaatttactctgactagtcgaactatttcccgttttctgtatgagatcaatgcataacatgttattttaacccccggtattctagaggctacagccagagtttctactttccatccgatgaagtcccacaggacaaggtcgcctcagcatttctatccctgtccataagggatcactcgctcaaacagagatgagattgcgaaaagacatccaccaagacgaaaaagagatcccattcataccatgcgggtaatcgaccacatcctatgtggaggaaattgctgtactctgaataccaagcgtgaggaattcttcctactgcctcataaaggaccatgatgcacatgtatgtcataggacactgttgagagagaaacttcactttactacaagcaatcatgcatccacaatata

SEQ ID NO: 77037 - DNA, 321 bp, Zea mays
  Clone ID: MRT4577_170284C.1
cccattataaataaaaaaaaaaacaaccccattaaggggggaacacaataaacaattttatcaccgaaaaatggctcagggagggaccttaaaattaaacattaatcaactaaagaacccctctaaaaatgatttttcaaaaaaacttacattgcacattggaggctttttattggtaggggaaaaaaaaataaagtcagccatttaaaaaaataaacgtccccctataaactgccagggtgagtttaattttacacggtttattctaaaaacaccggccagaaaaaaggggttaacctgcccccggaaaaacccttaccg

SEQ ID NO: 77038 - DNA, 369 bp, Zea mays
  Clone ID: MRT4577_170285C.1
ccgggcgggtccgggcccgaatttccgggttgtcccacacggtctggacccgtgggctctactggagataagggcacgctttgctatctcgagcgagaatatatgctgacccataaactgaccgaaagaagccagcggtataccactaggagttgtacctcttgaactattgactggaatgaaggcaatccatgatggtaaaaacattgttagagaggtaaacattcgcttaccaggcgaggcgaactttgccggatcataggacagccggatgtgctcataccgtacggaatgcgtaaagaggttcctctgcctaaaaataaggtgcatgcgggacgacacacgatagaggccctacatgggcaacat

SEQ ID NO: 77039 - DNA, 379 bp, Zea mays
  Clone ID: MRT4577_170286C.1
ccacgcgtccggatcgagtatcccaccaccccacccttctttgctaaccgacgcaatggcgactctgaggggtccttcctcagggccgggcggcgccaaggactgcgagcagctccacaaggctttcgaaggttggggcaccaacgagaagctgatcatcttcatcctggaccaccgcaacaccgcgcagcgccacgcgatccgccgcggctacgcctaggcgtacggtaaggagctgctgcgcgctctcagcgacaagatccacggcaagttccagaaggcggcgatcctgtggacgctggaccccgcggagagggacacggagctcgctaacgacgaggcgaagaagatccaccccggcggccgcacgctggtggag

SEQ ID NO: 77040 - DNA, 503 bp, Zea mays
  Clone ID: MRT4577_170287C.1
acgccacaacccatagcacaaggccgcacccacctttccccgttcttctccggcgccgaacatggccgtcgacctcatgggttgcggctacgccccgcatggccacgcggccgaggccgaggagcagttccaggaggccgctgccgcggggctccgcagcctcgagctcgtcatctcctccttctcctcccgcgccggctgcgcgccgcccctcggagagatggccgaccaggcggtgtccaggttccgccgggtcatcaacatcctcgaccgcaccggccacgcccgcttccgccgcggccctgttggagatgccgccgactcgttgactccccctcctgaatcctctgctcctcctcggatgccggcccaggcactggcaccggctgtctcgccgcagctggcgccgcagaaaagcgtgacgctggacttcacgaagcctttgaaggcgccggcggcggccccggctgccgcgccttcggtgacgtcgacgtctttcttct

SEQ ID NO: 77041 - DNA, 552 bp, Zea mays
  unsure (1)..(552): unsure at all n locations
  Clone ID: MRT4577_170288C.1
acggccggggggggggcacagctttattttattctgcgggggggttttttttttgtcctggtcgtgctgccttgttgatggcgggtcttgtccggccgcacaaaacgtggcccctcacagggagcctctcctgcccccttccggggggggggggggtttccctctttcctcctgttgcctttccgttggccgacgctgctcctttggcattgggtctgtgtgctgcgccttgtccccccccgtgcctgcctgccggggtcctcttgtatggtgggccctgcgccccttgtcggcttctggtgcgcgggggcgcatctccatcagcctgggggggcttctccgcaggccaggcgttgccctgcgccttggcttggccggcttggttgtcctnccttggggttgcttcctcttacggccggggttccctccccgtcctggcgcgtgcggttcagggtcctcgttggggcgccacgctgtccgaggttggtcccccggcgggcggttcagcagttccgtgctcctcgccccccgctgccctgcggtcgaccaccg

SEQ ID NO: 77042 - DNA, 554 bp, Zea mays
  Clone ID: MRT4577_170289C.1
ggggtacacgcgcccctcctcgagtttttttttttttttttttttttttttttttttttttttttttttttttttttttttttttttttaagggccgaaaccaggctggttcttggggccaaaaacaacataaagacgacgtctatttggtttatgaacattacccccggggccaacaaacagacaaactaaaaccttttttgggcaacaggggtcccacaggaaaacgggccccttggggggccggttcaagaaaagaagggtaaccgccattacatcgccttttttttcgcaacagggggggggccgtctgaaaaaaagctgcatacggccctaagggaaccccgggggggagccgggctctaaagcccttcctaaggatcttgcccgacgggttctgggggagggattcggggaaaaaaaccttggggatctttttggaaaaaaccaccggcagcatcaggggatttcaggctggagacccaggcgggcgcacaggtttaaattggcacaaacttctttttatttagggaaaaaaaagttcttaggtgggg

SEQ ID NO: 77043 - DNA, 966 bp, Zea mays
  Clone ID: MRT4577_17028C.1
atgttcaacaagaatacggccacattcaagaggtgattttgcaaccccatagccctgggcaaaaacaaacagataatatttccgcctacagcccacaaaaattggtgcaagttattaccttagcaagggcaatattacccgcagaaattaccctacaaataccgcctaatttagtgccaaatttcagtgatctactagcttgtttagctgctggagttagggatttaggtggcattgtacccattgatgaagttaaccctgattatcatcaccaatcggtgaatcaactaagtcaattgctagaagaaaatggctatttattgcaaccaaggtttccagtttatcccacttatttttcctggctcaattgtgatttacagcaacggctatcagtttttatcaactaatatcattagccaatttgggcaacaattttttctgctatctggcgaccataacgttgctggcgatcgccatggacgattgcaaaagcacggaggcgcttacagtaagaatctggtgacaaagaagttctggtgggtaggtcttaaattttgtatggggcctaacgactaagctcaccagacgcagataacctttgtaacccaaccaaacagcttatggcgttccggtgcagctcggttgttagtattcgtcaagcttcagagaatcctcaaatgcctttacattaaagactgaatcaagaatgattggcagccctttgtgtttagctattgagttcgtttcaagatcgacgacccaggacagtgaattaaccttctcccaaaaatgcatctttctcaagctttccttttccacagagctgaaattatttgctccgctttgattcgtaaatatccataaaacgaatccagttactgacatctttacgcttccaaaacctgctttcattgaagaagtaagggagagacagttaagcatctgacgatcaaacgactcaaaaag

SEQ ID NO: 77044 - DNA, 139 bp, Zea mays
  Clone ID: MRT4577_170290C.1
accaggtgtccgagcagaataggccgtcgattacgccacacattaacacaaactaacatgcaagttgccagggcagtgctttaattgatgctcgagttcaagcgcgagaccaatatgacacagtggatttccctgatct

SEQ ID NO: 77045 - DNA, 347 bp, Zea mays
  Clone ID: MRT4577_170291C.1
cccggggaaaaggaggctttcccaggaaggggggggggccctgttttggcctttgggggggccaaaaaccgttttggcgggtctttttaagagccatccaaatccccccggttaaaggaacacggggaaaatgaactaaaattgggggcctttggaaatttccggggaattttttaagccttaaaaaggggcttccagcttgttcaaatttttgggggggggggaaggaaaaacaaaaattatttggttggaaccgcctgcttttggggtttgggagcttttccaacaaattttgaacccctaatgtttttgggtttccggaaaaaagggggaaaatattcccgggg

SEQ ID NO: 77046 - DNA, 297 bp, Zea mays
  Clone ID: MRT4577_170292C.1
gggcgggtactgataatcatcgctagagggcttgctgtcgcttagggtgtaccaagaagctttgctcctgggtgccgcacccaacacgggagctttggcacccgactcgagcgaggtttcactggcctcaaccctcctacacaggatgcccccgtagccgcggcgggcgacacaaagaacatgagtgctactaccggcgcaacctgttgatatataccgccctcggcatgaacctttagtatcacgcccatggacggagggcggcggagctgatacttcaccaactctactgctctg

SEQ ID NO: 77047 - DNA, 266 bp, Zea mays
  Clone ID: MRT4577_170293C.1
agacccacgcgtacacatcgcctctcacttgcacagatacatggacaccgcgccgtgaaacaccatgtgtcgagctcggtccatgctccagtctgagctcggagttctgcgcacccatctcccccggctccttgcagctcggatccctgcacgtggagtcttatccatagccaagatcgttcttgctcgctgtcgatgcctaatacgacgtcagctatcgctacagctatggcgctatatcgatcaggagtccgtatactatgcgc

SEQ ID NO: 77048 - DNA, 406 bp, Zea mays
  unsure (1)..(406): unsure at all n locations
  Clone ID: MRT4577_170294C.1
ccggccgggatcccatccatcacagctagctagcgttcctaatcaccgacgaataatctcttcttcacctcactaacaccgagctagcagctcgctctgtcctgcaacaatggccgctcgctcctcctcccagcagctggtcgcggcggcggtcctggcagcggggctgctgctgctggaggcgccttgcgactctgcgggacaagaaagatgaggaaaaagcacctgaaggagcttaaggccaaggcacagaagggcgcgaattgggggctcgggtctgaagaagaagtggaatgaaatgagagaggtaacccgtctccaataccagaggatgataaggcagctgtctatgcggagttgcgctatcacaaagtngcgatcataaacagtggtacnctctttgtgt

SEQ ID NO: 77049 - DNA, 399 bp, Zea mays
  Clone ID: MRT4577_170295C.1
gttaacgcaggcgcaggggcccaactggttgttttggttgcttaaaattccttgttccacggcttcttccggggttccgcaaccagtttcccttgaaaccggaaatccgggataggaggaagagaaaccggccggaaaagggaagggggtccaggaccgataaaggaatttttgcccggggtcctgccaggttgttagaatcctggcagccatggttttcctgttgggttctgggagattttgggggcgacggactcccttaatgctggtccttggttgttttgggggttcccggaccagaagcggcagcgccaaaggggaaacctttgttgactgggccagggcatggcttaagttaaagaagaaggggaggaggacctttttttttgatttttaacc

SEQ ID NO: 77050 - DNA, 489 bp, Zea mays
  Clone ID: MRT4577_170296C.1
gaaaacggagctggtgcgctgcgcctagacgcgacagagatggcgtctcggggcgggcgacgcgctgggcggggtgactcatcagcaaccccgagggcacgtgccgacgagcgaccgcgaggctgacaaggtggagccgggatgcacgctggcgcttgcacggcggttacgccgccgcgtgtcggcgatgggccccgcccgcgcggtggccggggatgggggctcggagctacacggcacgggtgagtcagcgtcgcgtgtgcgcgcgtggggacggacggtcagcctggatcctgcggtggaggcgcactgggcgtccgcgatcggtgctcagccactaactagctctctgacttgtcggatcccttgtctcctcatctcgtctctctgcatcgcgcggggctgcggtagaacactagaaccagtccggtttgttttgtcgcctttggtttttggttgctacaaaaatttagagataaattatcattc

SEQ ID NO: 77051 - DNA, 188 bp, Zea mays
  unsure (1)..(188): unsure at all n locations
  Clone ID: MRT4577_170297C.1
ccgacgccaggggggagccagtttaagaccncgcaccccaaagagcccaccaccaggcgagcaagaccagcacaaccagcgggcaagagaccacccaaggcaccagcgacaaacaccaccccgagcgggacaggacaagccacagaagccagcgccaggaaagaacacgagggggcagggagaccctg

SEQ ID NO: 77052 - DNA, 234 bp, Zea mays
  Clone ID: MRT4577_170298C.1
cacgccttttctagttttttacaccattgaggggagatggatgaccttggccggtacaagttcatacataacaggaaagaaaacgtcccccagtcagggttggagccttctcataggcacattgaccttggtgcaagcgtgttggtgggcaaaccaacgctggcaccgccgccttgcagggaaagagtggggcctcggggcgggctcgccttgctcacgaggctggaatcaagg

SEQ ID NO: 77053 - DNA, 1577 bp, Zea mays
  Clone ID: MRT4577_170299C.1
cgacgctaggtggggccccagtcacaccatccctccgctgcatcttcaacaaatagcctccggcgcaggtggacgtgggcctcagcgacggcagcttcgcgaggggggccgtgcccagcgcgcagcggcgcatccaccgatgatgtgatatatgaggccttggagttgagggatggaggatctgattatcttggcaagggtgttcttaaggctgtgaacaatgtaaatagcattattggaccagcaattgttggaaagcttgatggaacctccaacgaatggggctggtgcaaacagaagcttggagcaaatgccattcttgcggtctcacttgctgtgtgcaaagctggagctatggtgcagaagattcctctttaccagcacattgcaaatcttgctggaaacaaaactctggtgctccctgtacctgcctttaatgtgattaatggaggatcacatgctggaaacaagcttgccatgcaggagttcatgatcctcccaactggtgcctcattcaaggaggccatgaagatgggagttgaggtgtaccaccatctgaagagcataatcaagaagaactgaagaagtatggtcaagatgctacaaatgttggggatgaaggtggttttgcacctaacattcaggaaaacaaaaaaggccttgaactactgaaggcggctatagaaaaggctggctacactgggaaggtacatcctctcttaactacttggctcacagacagacaaacctttgtgtgcataggtgattcgacttacctgtgtggcaggtgttcattggaatggatgttgctgcttctgaattcttcagtgagaaggacaagacttatgatcttaatttcaaggaggagaacaacgatggttcgaacaaaatatcaggtgacagcctgaaagatctgtacaagtccttcgtttctgagtaccctattgtgtcgatcgaagacccatttgatcaggatgactggaccacttacgccaaactcactggtgagattggacagcaagtgcagattgtaggagacgatcttctcgttactaatcccacaagggtcgccaaggccatcaatgagaagacctgcaacgctcttctcttgaaggtgaaccaaatcggctctgtgaccgagagtatcgaggctgtcagaatgtccaagcgtgctggatggggagtgatggcaagccacaggagtggcgagacagaggacaccttcatttctgacctctcagttggcctggctacgggccaaatcaagacaggagctccctgccggtctgagcgcctggccaaatacaaccagctgcgcttaggatcgaggaagagctcggtgttgccgcagtctacgccggagcgaagttcagagcaccagtggagccctactgaaccacgtgtgcccagagcctggagaaagaagatgaggatgtttccccactagttcgctgctgctttttgatagaatgcctgtacgatcacagtaatagaagtttggccttgtttgccggagagctacactagtggggtttttttttctcgtggaaaaaaagaaagaaataaaaccttttttt

SEQ ID NO: 77054 - DNA, 579 bp, Zea mays
  Clone ID: MRT4577_17029C.1
atgaacaacaagatcgcggtcctgtcaaacttcaccagctacgatgacgcatgcagccaccattcacgcacgccgcctaccaactcccaatgggacacacaatacgacaagagtgtaggttggccctcgggcgcaaactctagcttgcctaaagtcgacttcggcctcaggaaaacctccgcctcgcccgagcctgacctcggctacctgctccccgtgaatcccgcaggaggccactccttcaattgtatcactcacgtcttcaaatctggaagcgagctagaccactacctcaggcagacttctgcctcacccgagccctgctttagtctcgatatcaacaatgaaaaggcgctcgacgtcaccataaacaacaaatcttacgtattactccagggcattttactatactcagtactttgtcgaccactacagcatgggcaacctccttgtaaggggggctcgagtacgagaccgagccctcggccctggcctcggctctcaacagaaattgggcgtctccaccaagcaaaagccaacaacaagtataagaccatgctccgcccatatcgtatatag

SEQ ID NO: 77055 - DNA, 300 bp, Zea mays
  Clone ID: MRT4577_1702C.1
cggtgttggcttctcctaccccaccggttcgtgttcaggttctggttcgtgggccgagagcggaagagcatggcctgcgtctggacggtgagtaccgatgcttcgttggcggtctctgctgagccaccgacgaccactatgtctacaacgacttaagaacctactgagaggtgctctagacgctgatcatactggatcggtatacgcaaaggtctatacgatgctgatgtgactcactatccacggtagactcaatgcgcacaacgactgagatcgtgaacatccaggtgctattgtgac

SEQ ID NO: 77056 - DNA, 471 bp, Zea mays
  Clone ID: MRT4577_170300C.1
gggtaaaccgggccccaaaatatgggtttttttttcatcggggaacaaacccccgacccggaaaccccccatcaaaccccaaatttcctgggccatccgtttccagttcacggccccttaacaacattgcccccttttgggccaaaaacttggaccattcaaccttttttttggaatcccccccgccgccgggtccggcccccccctcctaatccccctccttggggacgaggatctttttgccccccccgtaacacaagaaggcgatcccgggggggggcatgaccttgatgcaactagggccgaaaccccgggacaggccgccgggccccccctttttggggatgcaaaaaatagcgggggggacgttttggaacacctgcctcccgcccacagggcccacctggttttggttgggggccccccccagcgggaaccgggcccaactgggaatggccccccccgccgacc

SEQ ID NO: 77057 - DNA, 356 bp, Zea mays
  Clone ID: MRT4577_170301C.1
cggggcctccaaacaggggtaaaccttattagttttttttataaaagaggtttcaagaaatagtaatcgaattccaaggaagggcaatgcatcaattggttcatcactcaactcctattacctaatgccgcatttaagggataaaagttttaaaacaacaaggggggggcaaatgcccccgggcttgcctgggataaaccctaccttaggggtggtaattgaccaccccttggggggcattttccattccggggctggcttggtgcctccccaagattaatccccccatactgggttggtctgaaccatgtcctttagctcgcataatcatttagcggcccacgactaaacttgac

SEQ ID NO: 77058 - DNA, 412 bp, Zea mays
  Clone ID: MRT4577_170302C.1
tggcgggtgacgcaggtgtgcctcagcacaccacggattgcatataacttggacgacgtgccgactgaagcgacctgcagcagcatcatacttctgctaggacgcgcatgagatccacatatccgttgatgatgggacgccatatgcgcaaaactttgagctctgctgacccacatgcaaggagtctccagagagcgacgcgcatgcagcggccgccaccgatgagctggaccatgaactactactcatgagcctgtggagcgagagcaacctcattagtctctgtagcgctatcaaggagaagactgccaactgattgcatcgtactgtactagcacacatacttgatgacgatcatcagtgaccatgtgacgacatacatggccaagactactgctggcgacgggacaag

SEQ ID NO: 77059 - DNA, 340 bp, Zea mays
  Clone ID: MRT4577_170303C.1
acggggctcaaattctttcgaggaacttaaagcaaggtgcccaaacagcagaaaaatcacatctcttggctctttcactccggcgacatgtcctacaacgatgacgaaccgatcatccattctccaaactcagggccgaggccgacgcccatcgagcccaggagggcgcagctggtgagcaagaacaacaacatggctccactggaggagaatacccacaacgagctgcttgagctgaccggcggcgactccaccagccaccgcactgggctagacctggtggcgatgctggacgcgaacggcaacatacaaggcgagaagatcgagaagatcaataccg

SEQ ID NO: 77060 - DNA, 278 bp, Zea mays
  Clone ID: MRT4577_170304C.1
ctagatcacattctctgtggcacctttcttttccaaccctcatgtgcatgtttcgcgttcggtttcattgaccagggtgactcttttctccatcttccacgtttctcaatcgaaatcgatcacttctacaatatatttctcttatatgtacattctaaagcaagcttatctatatatcatcataacacagttatcacgacctgttccattaccaatctcctgttaacccttccaataatcctttatctagctaatgatctatctattttactatcttc

SEQ ID NO: 77061 - DNA, 487 bp, Zea mays
  Clone ID: MRT4577_170305C.1
gggacgagctacagcgtcagggcgagcaactactacggcgagagcggcgggctctatctgttgcgcgtgatgccgacgcaggccttcgacgcacacgagcccaacgacgccatcctcagcgccaaggcggtcgcggccggcacaccggtcagcggcggcatcatggacaaggcggacgaggacttcttctcggtgcgcgccggcggggcagaaagcgtactgcgcgtcgccctcgagaaccgctccacgacgctgcagcccgaggtcgtcgtctacgacgcggccaaggcgcagatcggcagcgcgcgcaacaccacggccggcggcgacgtgagctacagcttccgggcgcaggcgaaggcggtctattacgtgcgcgtgcgcgactactatcgcaacgcggcgggcgactacacgctcaccgtcaccgcgcttccccccggcgacggctgatcgccgcctcgaggcgcgctgcgccttacgaaag

SEQ ID NO: 77062 - DNA, 582 bp, Zea mays
  Clone ID: MRT4577_170306C.1
ggccggccgggccgggattccttcgtttctgccagtactgtcccgtaccctcctcctcttgcagaacccaatccgatacgtctcccgaccacgcgataatccacacgacagacacacaggaagaactagcttttctggcgcgcgagaagctcttcaccagccacattacttccagaactcgagcaagctcgctctacctgaaagggcgctaccacgctgcatcatgtctgttgccatcccccttgcactcgctgcctccatcatgatcatgattgagcgtgaaatttataacatgtcgtctcggctgtgggaagaaagatcgagctgccaccgcgtaacgactgtgtctgcttggaatggaagccataccggaaagactgcgacgccctcttcgcttgccaaagactagctgataaaaaacgagtcaactacatcctcgcatcaattctcagtgtggatctgagatggtgaagcgagcgtaactctcaaatcaacaccgcctctgttgtggctagttactccattcctttcgtcttttgtgtcccctttcagtccctgcgagctggccttgtacttcctcct

SEQ ID NO: 77063 - DNA, 312 bp, Zea mays
  unsure (1)..(312): unsure at all n locations
  Clone ID: MRT4577_170307C.1
naaccatagcgcgntgcagcgtacgcagtcgnaatcggctcgagctctacttggtgctgcagctcagntgaggcatgcacatcttcgtgnagacactgaccggcaagactatcacgcttgaggtggagtcttcagacaccatcgacaacgtcaaggccaagatccaggacaaggagngcatcacaccggaccagcagcgtatgatcctcgnctggacacaagtctgaggatggccgcactcttgcggattactacatccagaaggagagcactctgcacctggtgctccgtctcaggagtggcatgcagatc

SEQ ID NO: 77064 - DNA, 1203 bp, Zea mays
  unsure (1)..(1203): unsure at all n locations
  Clone ID: MRT4577_170308C.1
nttacnacctcgccggcgattgggaaaaagagaaaagaagaaaaaaaaaaaacccccgcaaggcccaccgcccatgagagcgacgagcaagcgcagcacatatcaagggggggtcccctctcggccttcccccctccgcctcactctctctctcctcccccacctccgtccctccggccgccgccgcgggcgccagagatctccacagagtctcccaatccccaccccgcccgcctccagggtccacgggttcctcccgcctgcctcccccgagcgaggtcggtcgcgccctgtcccggatccgccattcccggttccgcgcctggtttcctgctccggctgcgtggttcctggctgtcgcgtccccgctcttggaccgggctctcctggcctgccgttcgcaggatctcgggccagatcctgccccgcatggggtgtcgtcggttctcagcctagcggcgccgcgccattgcccccaccatcacggagcaatcgcttgcgcggttccttcggttatctgagctgcgggaaatcccccgattgtttctttcgtcgtgcaccaatcgcccttgctgctccccgaatcagcagatccagtccgccgggccttttgcttgtccctaatttgaggcagactggtccccatcaatcaatcgctctcaatcccccctgcgtttcccctgatccctgccccctcccaccatcaccaccaacaaaccacgcacccaagatccgccgctgcattggccgcggccggcgtgcattctgcgaatccgggtgatccaagaggccgcagcaggcgcggcagccgctggccggagatgacgtcgccgtacgcgtcgccgttcctgctctccctgctcctgctcatctccatccctgtcgtcttcctcctcgcgccgcgcctgctcccgcccaagacgctcccggccatcccggacgccgacgagtccgacgacctcgcgctcttccgccgagccatcctctcctcctcgtcggccactcccacgcccacctccgcggcctcctacttcttccgccgccgcccggcgcccaaggtcgctttcctcttcctcaccaactcggacctcgtcttctccccgctctgggagaagttcttccgcggccacacccacctcttcaacctctacgtccacgccgacccctactccgtcctcgagctgccgcccacgccatcctcnc

SEQ ID NO: 77065 - DNA, 385 bp, Zea mays
  Clone ID: MRT4577_170309C.1
aaagaactatgagcacatacgtttgcatttactgccatatataatgatggcgatggatagggtaaaaatcttccccaggcctttaaattcactgtttcaaacccattttttattcttacaatcgttagatcttttattgacagcacctattctaaagcttcaatacataaccacacagaatctaaccctcacatgaatccacttgatattgatccagaccaacaacggaccactacaagactggaagcagatcaacatccattaacactgaattctgacatatggaatctctataaacaacctattcatatcagaacatattgaagaatatacaattaccttaatcatctactaacatcatcttatgaaactggacaaacaaaat

SEQ ID NO: 77066 - DNA, 447 bp, Zea mays
  Clone ID: MRT4577_17030C.1
ggtaccctccgggtcggccgggacccttcactcgatgcctttgtcgcctcgctacaccgacgaagaccacgtccatggagcacgcccgagcaagatgaaagcgcggatcggatgaagactggcgcagtctcccttcgtcctctccgttgcaagacgaaggctctgtcgaagtctgctagtcccgcgtcctcaccacgtcgggaggcccaagtaggattcggcccactgaaacgggccccgcgcggataagcatgttacgggccacgtctgtaataaccttttctgtaatgacagtctgtaacctcctctcgtgagaatattttggggatggaccgggtactcgagggcataaatgtctttgacaagggacggatggtcactcgagtgactataaatacccccgtacagtgcccttgagaggccagattaacagagctattgccaccc

SEQ ID NO: 77067 - DNA, 2198 bp, Zea mays
  Clone ID: MRT4577_170310C.1
attgggacctcgaggccggccgggaatggagtcttttccccgcagcaatagactggtcaccactcacgagagcagaaaacaaacaatgcctccttacctgctcgctgccggcgcgcttatcgtcttcctgtacatcatcaagaaccgcaggagcagaaagctcccgccatccccgccgtcgctaccgctgatcggccaccttcacctcatcggccgcgtcgcgcaccgatccttgctagagctgcaggttcgctatggcggcggcggcggtctcctcttcctgcaactcgggcgcagaccgaccttggtcgtgtccactgcggccgcggccgcggatctgttcaagaaccacgacctcgctttcgcctcccgcccacgcagcgtgggaggggataagctgatgtatgagtgcagcaacgtgtcgttcgcgccttacggcgagaactggcgccggggcaagaagatcgctgtggtccacctcctctctccacggcgcgtggaatcgttcgcgcccgtaagggccgccgaggtagccgcgctcgtcgcacggacacgccgcaccgcggaggctggggaggccgtggagttgagggagctcctgaacggctacgccaacgcggtggccacccgcgcggccaccggtgccgctggggcgacagcagagaagctgaaagagctgatggggaactccgagcccgaggcgctgatggcgggcttccaacccgaagacgtgctgccggacgcaccggcgaggttcgtgagatgggtgacgggcctcaataagaagctcgaagacttggtggagtcgtgggacaagttcctgtccgatatagtggccgcacacaaggagaaggggggtggcgacgcagaggaggatgaggacttcttggatgtcttgcttcggctgcgggaagaaggcgcagatgggctcgagctcacagacgatcgcatcaaagctaccgtcaaggacatgatagcggctgcaactgaaacatcgtcccaaacgctggaatggaccatggccgaactcattgccaacccgcgggtgatgagcaagctccaaggcgagatagcgcgagtcgtcagcgccgatcagacgaccatcgctgaaccggacctgaacaaaatggagtacctgagggcagtgttcaaagaggtgcttcggctccacccaccagcgccgctcctcgtcccgcacgaatcaacaacgcccgcggttgtgcagggctacgagatcccggccaagacggctctcttcgtcaacgtgtgggccatcgggcgggaccctgctgtgtgggacgcaccggacgagttccgcccagagcggttcgtgggcggcagtccctcggtggacttcagaggtaccgactaccagctcatcccgttcggcgccggccggaggatctgccccggcatcaacttcgcgctgccggtcttggagctcgcgcttgtcagccttctgcaccacttcgaatgggagctccccgccggcgtgggaaaggcggacctcgacgtgggcgaggcgccggggatgacgacgccgcggcggattccgctcgtccttgtccccaagtgcaggacgctcgttcagccagcactgcagtagcgcgaggaatttcatgtgtctccatgcagtggcggaaccagaaatatttaagagcttgggtaaaaaataatacttatactgtaaatatgtagctttgtctaatttttacctgtgtttaactatattttactacttgttgtatgtgtataagttcactagcaataatggaggagcctatgctcttgcccccaaaaaaaaaaaaaaaaaaaggccccggggccccgcatatgacccgtgccccggattaatcggacaggactgagggctatctattgagaagttgtggatcaaacaaaattcaagaacacagattgccttacccaaaaaaaaacgcacaagaacactcaattgcagaaagaaatcggtctcttgttgaccgcagtacttgagttcattctccctggattaagttggatagtttggtttttcacatttatagtcttgggccagaataaagagatgaatgtaaggtagcaggctagcagctatcacagtggaagattgttcatgtaatagagtaccgaacgatttagccatattaggcacgagaactgttcatacccccacccctccaatatgattgtaatgttag

SEQ ID NO: 77068 - DNA, 213 bp, Zea mays
  unsure (1)..(213): unsure at all n locations
  Clone ID: MRT4577_170311C.1
agcagcaacaggaggggccacagataaattaccaaaaaccaaccgcattggattggatttggatctgcagcaaacaggacaaggggagcaggaggggggggggggggattggccattgttttcgggggcctaattattttcctcctttccaccttcaccatttacctttccacgagggctcgnagggcaggatcgggccccccgaccttnggg

SEQ ID NO: 77069 - DNA, 221 bp, Zea mays
  Clone ID: MRT4577_170312C.1
atctcattgacttcatattggagaactcgtctccataaatgtgctgatcgttgccggtggtgtcctggcgctcgctgtgtgcgccttcttcattacatgccgctgctgaggctgacaaacaccttcgttatatctaccgcctccgctctatatgccgtcctccgtctatctgtcgtcgcatcatcagtcctattcatggcaataccgcactcatccacctc

SEQ ID NO: 77070 - DNA, 488 bp, Zea mays
  Clone ID: MRT4577_170313C.1
tacaagcttttttttttttttttttttttcttttttttatttttttttttttttttttttatcgaactcccttggagaccaatatcacattagaatcgggaaatggaacttcttatttcgggggggccacatacatcatccaaaaaactttattattgaattacaactaataagcaatctaaaagagggccccaccaatgatgggttggtgggaggaggcccctgggtctgtcaaagcaagggggacaaagggcaacaattgggggagatggaaaaggggtacggggttagccgcaaactggtgggagaaaggcagcaactggtgctgaggcaaaaaggaagcacgggttgctgcagctagctggctaaatgggagcaggatttgctgctgcaaataagcagcgggggtcactgcggccaaatggcaaaaaggaaaaaggggctgcggcccaaagaaagccacacctacgcggcctaaaaaggaaaaa

SEQ ID NO: 77071 - DNA, 351 bp, Zea mays
  Clone ID: MRT4577_170314C.1
gccggcaagatgggaatggttcgccacttcctaataccactggtcccacaggggggcttccttctttgtgccccccctcatctgggtcttctctgcttactgcaaaagaagtcttcaaggctgcccggaccacaaccttggacaccaagcaagcattcccaggcttaacattaattttaagttcacaataaggggtaagggtcaagggaaagaaaaaacctggggagaaaaccaccatggggaaaaaggccagggaaccacccattttacttaatccttcccagaaatggtcagattaataccggccgcttgccgttgatcaacttgtgcccccaccacccttcccccatt

SEQ ID NO: 77072 - DNA, 515 bp, Zea mays
  unsure (1)..(515): unsure at all n locations
  Clone ID: MRT4577_170315C.1
acggcagttatatatacatatatnaggcgagaccagtcctgccaggaaccatccatatatacatgctccggtgagctttgctcgacgacagtcatcatgcatggcgcgcggcgagtgaagtgaatcggagcagtttgggtgccgatttactcaacctgttcttgacggaaccaagccaagatctcgatcgacctggtccactccagtccagaccagaaatggaggtacagatggcagcacaaggccctaaatcgatgggacgacgacgcagcagcacgccgtgtgactctcagcacggcggcggtgccgacaccaagcccgtccccggctacctcaggccgtcggccggctcctgccaccacgtctgcaagtacggcggcacgcacaccttcgaggaccacaacaggccccagcctaggccgcctcggaagcagcagcagccggcggcggagagccacagccacaacagggtgctcgtcaaggtgcggtcgggtggttttcggaggccttccaag

SEQ ID NO: 77073 - DNA, 255 bp, Zea mays
  Clone ID: MRT4577_170316C.1
aggcgggtttgggtttttttttttttttttttttttttttgggtttttttttttttttgcgggcctccaaattttatccattttaaatacacagttaaactacaggcccgaagcgctatgaagccatgcagttaccttctaccaaccaaaacaagggagttgggccaacccgcttctgaaattcatatgccactttccatcctactagaaaacccatttattctagtgcggggcccccgaggggtccatggaccc

SEQ ID NO: 77074 - DNA, 789 bp, Zea mays
  Clone ID: MRT4577_170317C.1
gcagttcctttgcttctcatccgtcgacattcctctccattatttcctaccgccgccatggcctcaagctgctcgagctcgcccccatgtccgatggcagttgtctctgcccctccctgtttttgtgctagccaagttggtccagccccttgcctctccatctcatcagcgccgtgcagctcgcttccatggtcgttccctgctcgttcctccctgacgcgcgctctcaccggccaaacttcctgccccgcggcttctcagctcgccgagctcggccctgccctcaacgccggcgtcctctgctctttcatcaggcagccgccggccgagcttcgcttctctcctcccagccgagcggcttgccctccatgctccctacgcgtcctggatcgcccagcccacccgcgcctgctttccatggccgcggcaacgtcctgcttctccaccggatctcgcgcgccctccctggttcgctggtttgcgcgccctcgcaccctcggctggctcaccccttgccctgccgagcagctcgccgcccccagtcgagttcacccctgcgcgcagccgtaggtttcgctgcgcagcgtttctgctccccagccttcgtcgtgctcgccagcaagtaattcgtaattcatgtcgaagcagcagctgcgaacccttgcgtcgtgctcgtcagttagagtctcgcgtcgtcgatctgtgcagttcctgtttgactatcggttctgcctacgtcgatctcctaattgtcatggatactgaatcgacgtctgttgacaccttttt

SEQ ID NO: 77075 - DNA, 238 bp, Zea mays
  Clone ID: MRT4577_170318C.1
gcacgaggctagacgtgagcgatgccacacgagagacgacaaagagaaggccgcaaaaagacagaagactgtgcctccgatgggctctgcgttgccagtgacagccaagcccttgcttgtaccagccccagcagtggcatggagtatttatactacgatacatagaccgctgctgaatttatgagtggcaaacataacctggcctgcgcgcgtcaacgctttgcacttgcaaggactc

SEQ ID NO: 77076 - DNA, 600 bp, Zea mays
  unsure (1)..(600): unsure at all n locations
  Clone ID: MRT4577_170319C.1
cattgggaccctcgaggccggccgnnnnatttcaaaaaaaaaaaaaaaaaaaaaaaaaactgggtgttgcgtggagaatgcagtcattcattccaagcacgtcattcctgaaagacaaagccaagatcgtcgccggcagttgccaagacgagaggggggaaaaacagggcgagatcgatgactatgagcagtgggcagtcgtcgccgatggagtcaagcagtaaagcatgtccacatagcgacgccgcggcggtgtgctccaataagctgtgccgcgggatgaaagccgtctacctcgtcctcgtcaagaagcaccagccgaagctcgccgcgctcggagtccacctgcaccacctcctctccagaagcaagcgccgcagcagcctcgccacgcgggagcagaacccggcgctgatgtccctgtcgtcgtcgctgtcgtgccggtccatggaccccgccgccgcggttgtgcacccgtacccgcgcggccagggccaccaccgccgcgggtcgtcgtcgaggcacgcggccccgtcgctgtcgtgccggtccatggaccccgcggccgccgtgtgcaagtaccagtaccgtccccgcgag

SEQ ID NO: 77077 - DNA, 193 bp, Zea mays
  Clone ID: MRT4577_17031C.1
atgaaaacagctgtttttcttcttgcttttatctttgctttggtgagctcccaaggaactcctctcatccatctttgtggaagtgggaacgactgcagtcaaattacaactccagtctgtggtcatcttccagaatgcccaagacttggtccttgcagtaaaacctacgcaaatgcttgtgatgcttgtaacg

SEQ ID NO: 77078 - DNA, 437 bp, Zea mays
  Clone ID: MRT4577_170320C.1
gcgcctggtcgtggaatcaggtgtgttacccaccctcacactcacaacgtgccatacatcgtgtggcagcattccgatcaggttttggtgccttggggtggggattcgggtgcctccggtgaggccccactgtgggtcggggcggtgccgttgcctggacggcttgtggaagaagtcaggtcctggtggttggatccgagatacacgatcgggatcgagccatgtcataccgatccagtgtttgcatccggagcattaatcttgtgggcaatggctcagattggccatggccgtacccgtttgcccgggtgcttgaaagccgttagatctagatccgaggggtgagagcgtatatccgacttaataaaactatggtcgttggatcgggatccgagggacccaaaccgtgtaccgattcgtttatatgtgatatgatc

SEQ ID NO: 77079 - DNA, 368 bp, Zea mays
  Clone ID: MRT4577_170321C.1
cgtccacccacacgtctgcccacgcgtccgcccacgcgtccggcaccgtcaggaacccagatgacccgaagaacgcgcacctcaaggcgctggacggcgccgccgagcggctgatcctctgcaaggccgatctgctggactacgacgccatctgccgcgccgtgcagggctgctagggcgtcttccacaccgcctcccccgtcaccgacgacccggagcaaatggtggagccggcggtgcgcggcaccgagtacgtgatcaacgcggcggcggaggccggcaccgtgcggccggtggtgttcacgtcgtccatcggcgccgtgaccatggaccccaagcgcggggccgacctcctggtcgacgagtcc

SEQ ID NO: 77080 - DNA, 1115 bp, Zea mays
  Clone ID: MRT4577_170322C.1
agaatcctaccaaacctagctaccaactcgatcgtcgtcatcacgctcgaccgcacaactgcaccaaggggggaggagacctaaaaactactacatcttttatagctacatctctagctaaagatcgagagggtaaataaggacgagcgggcgcgagctagaagagcagctgcaggtactaccatcatcgtcgtcgtcgtcgccaggatgaccgtcgtcgacgccgtcgtctcctccaccgatgccggcgcccctgctgccgccgccaccgcggtaccggcggggaacgggcagaccgtgtgcgtgaccggcgcggccgggtacatcgcctcgtggttggtgaagctgctgctcgagaagggatacactgtgaagggcaccgtcaggaacccaggcatgcatgcctcctgcttgttgttatatataagcagtctactatgtcgacctgcgcgagcgtggcagcagatggagcgattaacgtgtttgtacatgttcatggcagcagatgacccgaagaacgcgcacctcaaggcgctggacggcgccgccgagcggctgatcctctgcaaggccgatctgctggactacgacgccatctgccgcgccgtgcagggctgccagggcgtcttccacaccgcctcccccgtcaccgacgacccggtgagttccgtcggccggccgggttccagcactcgtcgactgactggtcagtaaagtagtaacaagggaccgcatgcgccatgcatgtgtgcgtgcgtgcaggagcaaatggtggagccggcggtgcgcggcaccgagtacgtgatcaacgcggcggcggaggccggcacggtgcggcgggtggtgttcacgtcgtccatcggcgccgtgaccatggaccccaagcgcgggcccgacgtcgtggtcgacgagtcgtgctggagcgacctcgagttctgcgagaaaaccagggtgggtgtgtgcttgcttgatcacttttatttgatcggtcgtctccatccatccatcatctactactaagtacagtagcttgtaggttgtagctagctcctggtaccgtccgctgcaccacgccagcaccatattaaattagtgttttctttaattttatgcat

SEQ ID NO: 77081 - DNA, 377 bp, Zea mays
  Clone ID: MRT4577_170323C.1
cctttgcttgaatctaccttatacaaacacccccagggagggcttcaggaacaaaagcgggccaacaccaacccgggacaggacacgaacagcaggaacccagacgacctccaaaaggagagggcacccgaccacacaagcacatgggagggaaaaacaacccccgaacaaaagcccaccagggcaaccgagcccaacgcaaggggcgccccccggcagaagagaagacgcgcgacaggggcggacatgcaccacccgccacacgggaaagggcacaccccaaagggagagaagaaggcccgcctggcacgagatcgggccgacagcgacgccagggggaccgagcccagcggaacaaaggagaagaaaacaccagt

SEQ ID NO: 77082 - DNA, 571 bp, Zea mays
  Clone ID: MRT4577_170324C.1
atgcctccggactttgccgatgatgagtgaggctccccacgtgtacagctccgaagaggtcccaccggtcgctcttctgataaagttaccagctgatgattacttgatgtcgctgacgaaggcatcgatgatatctgtttctgcctgccacatctacaacaccgtagatttgattcgtcgacgcgttgacgcatggctacctctccgggatgctcgttcctgagaaccaaccagagcccctggcctgctcctgtgactgctcccctccatatctcggcacttgcgtcctagattgctctcgctcaccatccctgatcttgccgccgctgacgcgacccccgactcatatattcggtacgaggaatatgagaaataacgagaaatatcgttttctgatgcgaactcggctttctgatactcttgatgcgaggattttcgcatatgctcttgagaaggcgaaccgacactgagcggaatactacaacaggctcatatatgacctgcttctccaaggaatatcgccacacgcatgtctctaccagaatgacctcgcatagctactccctgaaca

SEQ ID NO: 77083 - DNA, 375 bp, Zea mays
  Clone ID: MRT4577_170325C.1
cggacgcgtgggaaaaaaaaaaaaaaaaaaaaaaaaaaagggaaaaaagatataaagagaaaaaaagataacaaacacaatagaatagaaaagaaataggggggggtctggtgtaaagtatcttagcttccctgggcgtgcttgcacaactttaggtctggtatagccgtgcctttacccaattgggggggcgtgcttttactccggggggggtggctaaaccttgtgcttaccaggcttaatgggtttgcgcttcataccagtttgtgccagctggatggaataatggaaaagggccctgctgtggttctttacgaacagtgggtgaggtggtttggcgaatggtgcccgctttgtttgggagctttatacggg

SEQ ID NO: 77084 - DNA, 262 bp, Zea mays
  unsure (1)..(262): unsure at all n locations
  Clone ID: MRT4577_170326C.1
ctgaggaagggaaggngaaaacgnncccngngaaccaaaagcccaaggagaagcnngnngacaccaacggcgcaggngaagcnnncgnnggaggcnnccncncacagnnggnncaaggcaagggcanngaagacngcgngagggcaggnngcnangccgcaaacgnnancaaccagcgcccgggcngaaccaacccggagaagccngacnncaacaagngcaaaaacngacgcacgncangagaggcacngnnanaggcaca

SEQ ID NO: 77085 - DNA, 242 bp, Zea mays
  Clone ID: MRT4577_170327C.1
ttttgttgggtttttttgagttttttttgggtttttacacctacaatctgtttgttttttttttttgggacgcctaaaagcgggcacccccccgggaccacaaaaaaaattagtaaagttgtttttcacgggaaccgaatccaaaataacgaattcagaacaacgccctttatacagcccatttgtttgggaactagacattcatcaagcccccggaaattgaagggtaccccccctccccc

SEQ ID NO: 77086 - DNA, 428 bp, Zea mays
  Clone ID: MRT4577_170328C.1
ccccaaaaaaaccggaaaaggaaactttttttttggggggggccacatccttgttcaaaaaaatttttttttgaaataccacctaatagccatccaaaaaaggggcccccccaaggaggggccccccgaaaggaggctggggggttggaaaaaccaggtggaacaaaggccaacattggttgaggttaaaaaagggtgggggggtaaccccaaaccgggtggaaaaaaggcaccacctgttgttgggcaaaaaaggaacccgggtttgttgaacctacccggccccggggttccccccggaatttccgacccggaccttgcgggggccccaccttcccttaaagggagggttataaaagcggggggaaataagggcaaaacctgttcccggggaaaaatggtttcccgccaaaattcccccccaaaaa

SEQ ID NO: 77087 - DNA, 671 bp, Zea mays
  Clone ID: MRT4577_170329C.1
ccggccgggatctgctctcttccaccggcttcttcgaagctgccacgtatgcctccctccgtctccagcagaaccatggagctcgatgtgtgcatcggcctgatcgaggtgcttgcatagggcctcataccctgcaagcccaccacacaacacactctgcactctcgcaggatacgaccgcgcctcgctactccgccggcggcgtagcgggggtgccggagaagacggtggcggcgcagcgcgtcaacatccagatggagcacaagaagggcgccgacagcagcaagaacggtcgcgactgcaagtgacgacccctgcaacggctagatatcactcgagacgcagatcgtgaagaccattatcatcatacatacgccagcgcggcagcagggactatactagagaaataaccgaggaatgtgcaagagatacacactctgtgctgtgagagatggactcagcgagactgagaagtatgggccgctatataacaaggctagtgtgtacccatatgataaggagccggacaagccaaacagttgcagagcaaggaacagagatgacttccgcatgcgccgtgaacggtagaacgcgatagcgtagggcgccgctgagcctcagttggtactagctgctgctgatgaacactctgaggtcaccgcggactgctg

SEQ ID NO: 77088 - DNA, 301 bp, Zea mays
  Clone ID: MRT4577_17032C.1
ggtgtgccatttcatttaccagggaaggttacaccttaacaaaggggggggggttatggaaatctctatgagcaaaccaagatatatcaaactcttttgggggaaacaacttacaaacagggaacccgcgacgcggggccttgacaaccctaaaacatactgggtacatcaaggcttctccaaaattactgggaccgaaaaacattatgaggttgacctacacccgtagcaaactacttccttactggggtctagacatgtaccgggtctactactgaacatgaccggtaattgtcctact

SEQ ID NO: 77089 - DNA, 309 bp, Zea mays
  Clone ID: MRT4577_170330C.1
gtgaggcgcccgtaagcgccgacgtcggctcgagcttgcgggggactacagcctcaagactctacaatctcacttgcgatgtgaagatgcaacagcagaagatgatgatcctgttggtcgacgtgacagcaatggatcagctgaagatgcagcaaatctaactcaaatgcgtgctagctttaatttgcagcatatccgggatagatgggctggccaaaggggaaatagataccaaattagaacagctaggacaactgatgttgacgataggggcgcacccagtacaaaagattccactgctgcaggcat

SEQ ID NO: 77090 - DNA, 464 bp, Zea mays
  Clone ID: MRT4577_170331C.1
ccggccgggagctcgagtgcggaagaagccccctgacctggaggagacgagcaccgccgagcacgtcaccgtggttctcggagtggaccaggagaagaaggccgagcacgagttcagagaggccgtgtgggactgcgacagaggccgaccacggctgaaattgctgtggcaactagcaagcgctacccctgcagctgctgatcacattgaacgatgaccactggataagaatattaactatctagctcgcgggggtgtgttgaacaacaataggcgaggcccgttctaggctgccatacataggtattgcagtggtgggcgtgagcagagagagaaataaagatctatagagtgctatctctatctggatgttctacagtggcctctgtgctaaggtgcgcactggggagtacctgatgtaggtgtacccatacataatatatatgcaatgcccgcgctccttt

SEQ ID NO: 77091 - DNA, 516 bp, Zea mays
  Clone ID: MRT4577_170332C.1
ggccgcttttttttttttttttttcttttttttttttttttttttttttttttttttttttttttttttttttttttttttttttttttttttttttttggacaaaaggattttttgggtaacaaatttacttggcctaccaacccaggaaaaattcatttataaaaaaccccatggaaaaactaaaatgttaaccctaagcttcacccgacccacccccttcaaaaacacattacgggaggaaacaaaccccttcaccaccccttaatataaccccaacatcatggggactaatctatttagctaaccccttctttaacccacctagcaaaatttataaataagtttaccaatccacaaaccccggggaaaaaacaaaaaaagggggacaacaatgctaaaaagcgggggcccggggggggggaaaacaaaacccaggggtccacaaccccccggagcccaataaaccccggttgctaaaggaaacgggggaacggccaaaccctttggcgaggg

SEQ ID NO: 77092 - DNA, 2001 bp, Zea mays
  Clone ID: MRT4577_170333C.1
aattcgtctccagctccgcgccccatccatccattcccatcactgcgctcggcactgccgctcgccctcgccgctccaccttctccctccctctctctctctctgtatcacactcaaaagaagtgcctcgaaaaggaaacgagcaacaggagacagtgaaggggaaggagggggagcgaccaatcggactatcggagcatccaatccaccaccggccgctcgctgttcatccgttacactagcagtataaaacaaaaccctgtgtccctcctttgccggcgcgcagtccagcggcctttccttccttccttcctgtctggtcgcgttccattgctcaccctcctccattctccactggtgtcgtcgtttcgttccagagagctgtgaaaggcgtaaggcgaaacgaagcacgaggggcaggatgccgtaggtggcgaccgtttgtgccgctccgatcgtcgggaggtcggcgcctgaggaggccgtgctttgagttcgactggaggagagccttggcgccggtcgttacggcaagtggagccgtcgccttctacgcaactttgccaggcccgaatacttccgccagctgctgaagcccgttgccgcacgccttccgagcaacctcaaacccgaaccaaactaaccgaaacgcaatttttggattcagttcctagcaatccaaacacaaacacagccagggatcaagcaacacgactcgagtggtccaatgcagggagaccccggttacgggtacggtggctacggcgccggcgccggcggctacggctacgactacgactacgacgtcgccgccaactgcgtcggaggcggctactactcggcgccgaacgaccggtaccctgccgcgcctccgcctgctgcagcctatgaggatccgctcggtggtcggaggcagcacgacttcccggcgccgctcacggggctggagttccagccgtcggacacctgtcccaagaactacgtcatcttcgaccagacgtacgaccggagccgggtgatgttccacccctccctggccaacaacttcggctcctccgccggcggatacgactacggcaaccactgctacggctacgaccagacctaccccggcgagagcgcctaccacggctgcggcgacgacgccggcggcgccggcggcgtctcggtccggcagaaggaggacaccgacgagatcgacgcgctcatgagcacggaggaaggcgacgaagaggacgacgtgctcagcaccggccgcacgcccggatgccgcgccggcggctccccggattccacgtgctcatccggcgggtacgctgggaacagcagcggcggccggaagcacgagacgggcggcggtgagaagaagaaggagcggatgaagaagatggtgcggacgctcaaggggatcatccccggtggcgaccggatggacacgccggccgtgctcgacgaggccgtgaggtacctcaagtcgctcaaggtggaggtcaagaaggccggcgcgcgtgggtcaagcagctagctttccagctgcaactggtagtctggctttgggctttggcagtccaaataggagtgtatctccccgcgcaccggcagataagatgagactggcggtcgtacacgcgaccacctctcattttgattttggcatcagatgtcattctgtgtatctgactactacctagcttggccgctgggcctcccaactcaacggcgtctgcgagaagatggtcaaggaggccaacggtgggcaggcttggacgcggtcatccatgagtggttccgacagtggtggtaatggattggaatcttaaacccaaaatagagaagttttattaagaatctaaggaaaagaattcatcatccaatctatttcagttccaaatcactcatgtccagtctaatccaattgttttagagtccaaatccatcccggacgattcaaataatggcagaaatattatgttcatatgttgatatcatgtttgaagctgc

SEQ ID NO: 77093 - DNA, 221 bp, Zea mays
  Clone ID: MRT4577_170334C.1
attatttttgtttttttccaatactcaacacaccttagtgcataggtgaggaaagtatccattgatcgttaattaacaaacaatcaaaatagtatatttttgaatttgggatgcaggatattatgtaatataaaaaaaatcaccaccctatttttttggcacataactgctagcttaacctatttttatacaaaacaagtatattagtaaactatacctct

SEQ ID NO: 77094 - DNA, 322 bp, Zea mays
  Clone ID: MRT4577_170335C.1
acgtgcaggcctgggtaaacgccttggtatacgcattggaactgggactgtaccaggtagtgtaccacctcgacgatctgcactgctgtcagcatggctggcatcgtgtcagggactggattaagcaaaggtgtaggggcagcttgaatggcagcgttaatgagaatggccaacatgatatccacgttgctacacttcgatacatctgtcgagatctatgtcattgtcgagttccttgtcgtcatgcttgtcctcaaattcaactgcatctgaaactactgcgtcaatgatggattcgttgcggcgtgtgtattgtcagctg

SEQ ID NO: 77095 - DNA, 588 bp, Zea mays
  Clone ID: MRT4577_170336C.1
gggtcccccctcgagtttttttttttttttttttttttttttttttttttttttttttttttttttttttttttttttttttttttttttttttttttttttttttttttggtttaatatccaattggttcttgtacaaaaactagccattacacatcacgcgagggggttcccgattattcgacttgctgcacggttccaattcagttaatcaccaaacacgcgggcacgggggcgccccccacccacgagcccggcccccagccccccccaactaataacaacccccccccaaccaaccaaaccaacccacccaacaggcccagcccagccgggggggctgggctctcctttaccggccgccgcccacaaaacgccgccgaggggcccttgggggcgcgggtgcattaggggcaaacggcctaaagcttgaaggggggggcgtagggggggagccacggttgaacggaaaacaaatggtgcccgcaccccttgggggggcccgggggggtgaccctccccaagtgggaaaaccccccgggggggccacccgagcccaatgggcccaaccccatcccaccacggccc

SEQ ID NO: 77096 - DNA, 137 bp, Zea mays
  Clone ID: MRT4577_170337C.1
ccctttcggtctgtacgtgtaaaagacaagaactaaaagtgtaagcgacatttaacttcaccagttggattggtttgctactcattaactttacctaggccattctcaatgaaataaataatcaatactgtcatatc

SEQ ID NO: 77097 - DNA, 1104 bp, Zea mays
  Clone ID: MRT4577_170338C.1
ccggccgggccgggctagcccgctacccctgccccttctctcttcgtcgcgcctccgcctccgccgtcgtagcatcctcctccgccacctcggccatggcgacatccccagcgctcctcttcccttctccctcctcggcatcctctgcgccttcgtcggcgcgggtggaggcagtggtgcttttcaacgtctgcgacagctacgtgcggcgcccggaccaggcggaccgcgtcatcggcaccctcctcggttccctcctctccgacggcaccgtccacgtccgcaactcctatgtcgtcccccatccatcttacagtcgacactggcttcactaggggggaggcttccatcaaagcctacatctcatccaatctgtcctcagagatagtcaactcgctgcacaatttcaggaaatccctctggatctgaagatgattgaggcggaaaaggctggatttgagatcctgaaatctactatggtagagaagctccccaatgatctggaaggaatggagtcatcgatggggaagctttacattcttatcgatgagatctacaaatacgtcgatgatgttgtggaaggacgcgtggcacccgacaacagaattggaaggttcatctctgattcttttgcttcggtgccgaaattgtccccggctgctttcgataagcttttcaatgacaagattcaggataaccttgcgctggtatacctgtcaagcatcacaaggacacaaatcagcatcgccgagaagttgaacactgctgctcaagtgctgtaggtttggcggtgtggcatctggtttggacgtggatggcttgatgctatctgtgatgcttggcgtaagtgtgattggtgacagaaatgcatttttgtactcattattattattgctaaatgagagacctgatggaaagggttagccaacgatgagatcccataatgttgccagaatgccagtagagtggtggatggcgagatgtttctgtttggatagtattctgtgctccaggttgaatatttgtaatgctcgttggttttgtgtagcgacacatcggcaatgtggagcaatgaagagatttgctccacattttacgtcgttg

SEQ ID NO: 77098 - DNA, 1940 bp, Zea mays
  Clone ID: MRT4577_170339C.1
acatcccacacacagcaatccacactagtacttctacgtcacacgggtcgctgcacacagacacaccaatcgtcggcaccaatggcttactaccaggaggtggactactgctcggaggatgtgaggtctgtggtcccggtcggcttcggccgccacggcggcggcgtccagcagcacgtctgtcaaggataagttcgaggaggtcgacacggtcgcacgcgccgtcgccaaccaccaccaccaccatggtcaccacggcggccacggcttcgtggtgtgctataccagggtcgaggaggacatcaacacctgcaccggcgaggtcctcgagtgcaggcatagcttgctcgcctcggataactgagcagaccgggcggacggcatccacgcccgttcgtgcctggctgcttgcgtatgtgtggctgagagcctcggcgccggggcgggaagcgagaaggaggcccctaggccgctacgcccttggccccttctctctcttcgtcgcgccgccgtagcacgactccgactcggccatggcgacacccccagctctcctattcccttcgccctcttcggcatcttctccgccgtcatccgcgcaggtagaggcggtggtcctcttcaacgtctgcgacagctacgtgcggcgaccggaccaggcagaccgtgtcatcggcaccctccttggatccctcctccccgatggcaccgtccacgtccgcaactcctacgtggtcccccacagcgagtcggccgaccaggtcgccatcgacatcgactaccaccataacatgtacgcctcgcaccagaaggtgaaccccaaggaagtcatcgtcggatggttctcgactggatttggtgtttctgggggaagtacgcttatccatgagttctattcaagggaagtacaaagccccatccatcttacagtcgacaccggcttcactaggggggaagcttccatcaaagcctacgtctcatccaacctgtccctcggtgataggcaactcgctgcgcaatttcaggaaatccctctggatcttaggatgatcggggcagaaaaggctggatttgagatcctgaaatctacgatggtagagaagctccccaatgatctggaaggaatggagtcctcaatggagaagctttacattcttattgatgagatctacaaatacgtcgatgatgttgtggaaggacgcgtggcacctgataacagaatcggaaggttggtctctgaatctgttgcttcaatgccgaaattgtccccagctgctttcgataagcttttcaatgacaagattcaggataaccttgcgctggtatacctgtcaagcatcacaaggacacaaatcagcatcgccgagaagttgaacactgctgctcaggcgctgtgactttggttgtggcagatctatctggttgaaacgtggatgtttggcctacgtgaccaattggtgacagggatgcattttttgttatttgttattaaaaaatgggagagctggcaggaaagaaaagggttagtcaatgatgggatcccggtagagtggtggatgtttctgtttggatagcattatgtgctccaggctgaatatttgtaatgctccttggttgtgtagcgacacagttaacgacatggcaggcaaccgaggtcgtctgggtacatcgcaaataggctggtgccgaggtgacctcgacaggagtcgcagcaggctggcactaatgatgcgaataaagcaatacctcccaacacgttaaaacggggtccaaaattcaccatgattatgaagaagctgtacagctgatggaaacgtaggctcattgcaaatcaataaaatgtactccgtctcaaatattcattcatcgtgtattatatattgatgattggtttggattaccggactgaattttgaagagcagaaacactttaagaaata

SEQ ID NO: 77099 - DNA, 662 bp, Zea mays
  Clone ID: MRT4577_17033C.1
gccccccctcgagtttttttttttttttttttttttttttttttttttttttttttttttttttttttttttttttttttttttttttttttttttttttttttttaacaaacaaaaaaattaagttcggggccagttttaaacttttcctcaaagggggaaaccccgttgttgaaaaaggttgtccagaaaaaatttattttaaacccccccaaaattggttttaaaaaaccccccccacacatgggggttttaaaatgaaacgagggttttttaaaaaaaccaaatttttttttttgccctcccccccccaaaagctgaataaaagggaagggggatgtttatttggggggcaaacggaacccttttataaaagtttggagaaaaaaccaaaggactttggggccctgtttggaaaaggggcccttattgccccaaaaaaaaattttttccccccatttttaaaaaaaatccaaccattttcaaaaaattggggaaaagattcctttggggaggggttccttcccccaaaagtaagggccccgccaattttgggggacgggtaaaaaacaggggccccgtaaagcgggggggaaagttaaaacacccccattgggaacttggaaagaaacaaattttttttggaaccaaaggggggaagg

SEQ ID NO: 77100 - DNA, 1501 bp, Zea mays
  Clone ID: MRT4577_170340C.1
cattggctgcctcgaggccgggccgggctagcccgctacccctgccccttctctcttcgtcgcgcctccgcctccgccgtcgtagcatcctcctccgccacctcggccatggcgacatccccagcgctcctcttcccttctccctcctcggcatcctctgcgccttcgtcggcgcgggtggaggcagtggtgcttttcaacgtctgcgacagctacgtgcggcgcccggaccaggcggaccgcgtcatcggcaccctcctcggttccctcctctccgacggcaccgtccacgtccgcaactcctatgtcgtcccccacagcgagtcagccgaccaggtcgccatcgacatcgactaccaccataacatgtacgcctcgcaccagaaggtgaaccccaaggaggtcatcgtcggatggttctcgactggatttggtgtttctggggggagtacgctcatccacgagttctattcaagggaagtacaaaaccccatccatcttacagtcgacactggcttcactaggggggaggcttccatcaaagcctacatctcatccaatctgtccctcagagatagtcaactcgctgcacaatttcaggaaatccctctggatctgaagatgattgaggcggaaaaggctggatttgagatcctgaaatctactatggtagagaagctccccaatgatctggaaggaatggagtcatcgatggggaagctttacattcttatcgatgagatctacaaatacgtcgatgatgttgtggaaggacgcgtggcacccgacaacagaattggaaggttcatctctgattcttttgcttcggtgccgaaattgtccccggctgctttcgataagcttttcattgacaagattcaggataaccttgcgctggtatacctgtcaagcatcacaaggacacaaatcagcatcgccgagaagttgaacactgctgctcaggcgctgtaggtttggctgtggcagatctatctggtttaaacgtggacgatgctatctgtttggcctacgtgaccaattggtgacagggatgcattttttgttatttgttattaaaaaatgggagagctggcaggaaagaaaagggttagtcaatgatgggatcccggtagagtggtggatgtttctgtttggatagcattatgtgctccaggctgaatatttgtaatgctccttggttgtgtagcgacacagttaacgacatggcaggcaaccgaggtcgtctgggtacatcgcaaataggctggtgccgaggtgacctcgacaggagtcgcagcaggctggcactaatgatgcgaataaagcaatacctcccaacacgttaaaacggggtccaaaattcaccatgattatgaagaagctgtacagctgatggaaacgtaggctcattgcaaatcaataaaatgtactccgtctcaaattaaaattttatttgtatttctagtggatttatttatacaataattaatgtatgttctat

SEQ ID NO: 77101 - DNA, 1126 bp, Zea mays
  Clone ID: MRT4577_170341C.1
ctaaggtttttttttttttttttttttttttttttttttttttttttttttttttttttaccactggggattttgggattactaaaaaggagacaagtctcgaaccttttattacatgagtcattggcaggagataacaataagctcaagcaacattctcaaatttatctcatgggatacagggcttaatcctcatcctcaacaaccttagttcccaaacctttgaaaccctccggggggatctcaacaactgggaccagagagtagagttcctccttggcgttttcctcatcgttccggttgggggcaattttgacacggacacccctcgggcacactggggataccactgctccagatgtgcttgttgagcttcacgtcaatccggacatcagtagtacccatggccttttgagcgaacttcctgatctccttgatggcatttggggcctttttcttaaaggggcatccggggaggcgtttggggaggttgatagtgtactcgcgtgtcaccacctcatccttgcgagtgccggcgcctcgcttcttctccgccatctccgctccgccgccggctccgcgtccgtttctcgcgagccatcgcttcggcatccggaagaaatggccaagtcgaagaaccacacggcgcacaaccagtcgttcaaggcgcacaagaacggcattaagaaacccaagcgccaccgccagacctccaccaaggggatggaccccaagttcctgaggaacctgaggtattctaggaagggcaacaaaaagagtggtgaggctgaagctgaggagtaggaaggaaagcatggctttgtttcctctgtttttagctcagttccacctttaggacctggggttttgctaaagatggaacttaagtggtgttactgtatgatggcaaggaccttttgctgccgaaggttatgttttgaagttcatgctaccttttaaagtacggattaccttgtgcctatgttcattatttttgcctttggcagctaaatttggatttctggattgcgtctgtttttagactagttgcgttgcagggtaacctttttgagatgtggcttaatgttgagaaaatccctttaatgccatcaaaacttatactgct

SEQ ID NO: 77102 - DNA, 316 bp, Zea mays
  Clone ID: MRT4577_170342C.1
cgatattcgtctcgagttttgctcgaaacgtttttcaccgcccggtctccgatctccgatcggggatcccttagcggatccaggatgcaaatcttcgacaagactctcactggaaagactatcaccctcgaagtggagggctatgacaccattgccaactgcacggccaagacccaggacagggaatgcattcgcccgtaccagcagcagatcatcttctctgacaagcaggtctaggacgggcgcacacttgccgactacatcattcagtaggagagcaccctccacctagtactccgactcatgacaggcatgc

SEQ ID NO: 77103 - DNA, 358 bp, Zea mays
  Clone ID: MRT4577_170343C.1
ttgggaccctcgggccggccgggagtgaaggaagagggaagcagtagcagcgccggcggcattactgatacgctggcggagctagagccctaaaccctagctagggcagggccatgccatggtcgtctctacccaggactctgtaagggtgccgccgctccgcctgtcgtaggtacgtacaaaaactgggcggaaagcgcaagaggcagacccaagggcaagaggaatatgaagaacaaactcgcgcgctccgaccaggatgactagcgtccgcacggcggccggagcaagctccagcgccaagtacctaaaggtactccgcaggcggccccgcgactacaaatccggaaacgaggat

SEQ ID NO: 77104 - DNA, 715 bp, Zea mays
  unsure (1)..(715): unsure at all n locations
  Clone ID: MRT4577_170344C.1
cattgggtacctcgaggccggccgggctagccgccgccagaccattcgtttctcgcgagccatcgcttcggcatccggaagaaatggccaagtcgaagaaccacacggcgcacaaccagtcgttcaaggcgcacaagaacggcattaagaaacccaagcgccaccgccagacctccaccaaggggatggaccccaagttcctgaggaacctgaggtattctaggaagggcaacaaaaagagtggtgaggctgaagctgaggagtaggaaggaaagcatggctttgtttcctctgtttttagctcagttccacctttaggacctggggttttgctaaagatggaacttaagttggtgttactgtatgatggcaaggaccttttgctgccgaaggttatgttttgaagttcatgctaccttttaaattacggattaccttgtgctatgttcattatttttgcctttggcagcgaaatttggatttctagactgcgtctgtttttaagaaaaaaaaaaaaaaaaaaaaaaaaaaaaaaaaaaaaaaaaaaaacctccgggcactccacccaactcgccgccgccgttgccaacgccgcctgctgccgaagccgccatgggggcgtacaagtatgtgtcggaactatggaggaggaagcagtcggacgtgatgcgcttcgtgcagcgcgtgcgctgctgggagtacaggcagnagccgt

SEQ ID NO: 77105 - DNA, 451 bp, Zea mays
  Clone ID: MRT4577_170345C.1
aaacaaaaatttaatccaaaaatgggggagaaacccttggaagggcgggcgggaacagaagcaaatatgggggagaaaccaggggggggggaaacccaaagccccccaaggggggaaggactaacgacccgaccccaaaaaaccagggaagttagggggcgcgaccggcaaaacaaaaaccggaaaaaaagggcaagcaacggaaggaccccccaaaaggggatttttatttcggcccttcgggcaggggttaaaggggtttgccgccccccaaacgggggggaaaacctcaaggggggttaaataaaaaccgggtttttctttgaccaaagctccatggtcacaacaccaggtccccagggcaaaaaggattggctaaccccccggggataaaaccgggtcaccaagctaagcccgaaaactgggccacaaacatccattctccgggggg

SEQ ID NO: 77106 - DNA, 1792 bp, Zea mays
  Clone ID: MRT4577_170346C.1
gaagggactaaacatatcaaccctaaacaaagacctttcttaatccaaaactggaatatgcagtacattatttagaccccaatcattcagcccctaaaccacataatgccacttgaagcaatcgatcggtgaatgtgaaacacatatggtaaatctgaagagcaacgagattacactgaccggtaaaaaaaaaagaaaaggaaagttaaattattaatcacccactccgacagcagtgcatgacgtccacaaccgtagaacagtaggtttaactaaatataacccgaatccgagcccgcgcgcaggcgcgcgagcaagctgatcaagcggcggtgcagcgctcgcgcgcgaagccgacgcgtccgttgggcacgtcgaagagcacacggtggttctgctgctgcatgctggcgatgacgttgagcacggtgttgacgccgtcgggcgccgcggccatggccaggcagctgatggtcccgtacgtgctgtggatgaccacgttctcctccggcagcgtcacctgcatgccgtcgaacagcagcgtcatgggcggccacgcgacggcggtggtgttgaagcacgtgtcgaaccctcccagcgaggacacgggcgcgccgacgcggcgccggacctcgtcccgcacggccacgtacgccggcgccaccagccgggtgaacatggtgccagagtccagcacggtgcccgcccccgtcgccgggtcgaacgccgggatgggcaccaccttcctgcccacgcggatgccggtcatgttcacgtagtagagcgacgaccggtgcgggttggccagcagcggcgtcgtcttgatgcgctgcggctggccgttgcgcccgagccggagcgttccagagaagttgagcgacttgaagctggggagacagtacgagaaggtggcctcgtacatgtccttggtctgcgaaaggaatgacagcgggccgcggccgagccccagcagcccctgcggcggcgcagccgtgccagtggccctctgcaggcacccgaaggtgtagcccttcacggcgttgccggcgacggcgagggagtcctgcgacagcgcggcctgcagcgaggagtcggcgtaggtgaggctgaagccgcaggccttgccgccgggcgggcacgccgcgttgggtgcctgcgcgcacagcggcgacccgcagggcaccgtgcggtacgaggcggacgcggccgggtcgaagggcgccgcggacgacgtggggcagcccgcgcagccggcgcaagggatccacgaggcgtcgttgctggtgtcgacggccaggagcagctgctgcggcggcgtgccgaggctggcccgcaccacgtacgtcagcgtctgcagcagctgccgccccgacgcgatgggcgcgtacgcgcgggcgcggccacgcaccgccagcgagtccaggtacagcagccgcgacgcgtcacgcgacgcctggtccgccaggaaccccgcccacgacggcgccgccgtcccggggcccagcggcgagcacggcccgaacgcgtgcgacacctgcagcgtgttccccgcgtccggaggcgtggcggggcacgacgagcgcgagtgcgacgccgccgcgccgcccgcgagaagcagaagcaccgacagcgccgcgccgcaaagcatcctcacacccgtcccgacacggcgcatctctgcgtgcgccgggtgcagtgcaacagcagcacagttgctaagcccgggactggaagctagcgtagcgacgaaacgagagcgcgagacgacggacccgcccacgcgtccgccaat

SEQ ID NO: 77107 - DNA, 133 bp, Zea mays
  Clone ID: MRT4577_170347C.1
agccaaacaaagtgcatgctgtcgcacaatttatacatcagatgcttaaattctcagcgattctcaatcctgtgttcttctgccatggggttttggtcgtgccggccctttttgctttcgtctgtgggggggg

SEQ ID NO: 77108 - DNA, 281 bp, Zea mays
  Clone ID: MRT4577_170348C.1
aagtgaaccaagaggtaaataaacttcaaatagtgacacagagagaactcaaggatcaacattacatggatttacaatatttggcttactcctttccgttctattattagtataccatactaacctgctgcagttacaaccgtttccagtagcttatccaaactcatattcaaaatactatctacaaacaggtcaatttacagtgtaaaatagatatatttagtgaccatgtgggtgcaatgtacagtggtttacccatatgatcatcaaaaccacagttt

SEQ ID NO: 77109 - DNA, 704 bp, Zea mays
  Clone ID: MRT4577_170349C.1
ccggccgggaaccgatccgcggttgtggccgtgttcgagctgcgtgacagcggcacgcttcataccatcctacgactactgtactaaatctgcttgcacggaggagcaacacacgagcaatggcgatcgccgccccttcttctgtcctcctcctcccgaccacaccatcgcaggcgccatctccgcgctgagtgtaccgcctccggtcgcgacctctgaggaagttccgtctatgacaaagactcaacaccgccgccgtcgccgcacgcggccacggctccattcgcttcctctgccaccacctccgcggacacggagaggaggaagcacgaactgctacacgcggatcaggaaacagcggcgcggattctcagcgaggtccgaccaacgcgctgccatcgaggaggacgccgaggtcgtgcaggaccgcgatgcggggaaaggaacgccgatagatctcacggcgctcgatgacacctgtgaggctgtgttacacatcggcatcagacgtgcttgtgctgttctaggcgttcgagaggcttccactcctgcaggagggacaaatataccggaaatttgagagcatagatcgatcagatggtggaactgtgatgaatgttggaatgtgtagcatcgataacttgctggacgagcaagaaggtgcaacactgatgggctctgcgaaggttgttgacctgtctaaa

SEQ ID NO: 77110 - DNA, 303 bp, Zea mays
  unsure (1)..(303): unsure at all n locations
  Clone ID: MRT4577_17034C.1
gcaagtacagctaccgtggcgtcgacctagatgcgcttctcgacatgtccactgacgaccggcntccagctcatcgccgcgcgcgccaggagtttgttcagaggggtctgaagaggaagcccatggcgctcatcaagaaactgcgcaaggcgaaaaaggatgctcctgctggtgagaagcctgagccagtcaagacacatctccgtaacatgagcatagtccctgagatgatcggaagcattcgtggcgcctactatggcgagacctaccaccaggctgagatctagcctgtgacgaacgggg

SEQ ID NO: 77111 - DNA, 822 bp, Zea mays
  Clone ID: MRT4577_170350C.1
tcgaagccggccggggcgcgactggcgcccgccgcccggtggtccacgtcccctgtgctcatctttctgctgctgctcgcggcggccacttcgacaaccacgaccaactactcgagattttgaacgtaagttgcgccacgaagccttctggaggagggcacgtctgcctgggcgccacgctaacacgcgaccgacccaggtaggcaccactccgctcaacgcaccgggcggcacccaaatccccaaaccctagcacacgcgcgcacgcacgcggcaccatggcggcggcggcggcgcagcagaagatccggtggggggagctagaggaggacgacggaggggacctcgacttcctcctcccgccgcgggtcgtggtcgggcccgacgagaacgggctcaagaaggtgatcgagtaccgcttcgacgacgacggcaacaaggtcagggtcaccaccaccacccgcgtccgcaagctcgcgcgggcgcgcctctcccgcagcgccatcgagcgccgccagtggcccaagttcggcgacgccctcaaggaggacgccggctccaggctcaccatggtctccaccgaggagatcctcctcgagcgaccccgcgcaccagggagcaaagctgaggaaccagctgcatccggtgacccactggctatggcgagcaagggaggtgctgttctcatggtttgcagaacctgtgggaagaagggcgatcactggacctcaaagtgtccctacaaggaccttgcaccaccgactgaaaccacggacaggcctcctacgtccgatggccctcctgttacgaatgttttttttt

SEQ ID NO: 77112 - DNA, 1348 bp, Zea mays
  Clone ID: MRT4577_170351C.1
actcgaagccggccggggttcgtcctgcggcaacggatatctcggctctagctgcgatgaagaacgtagcaaaatgcgatacctggtgtgaattgcagaatcccgcgaaccatcgagtttttgaacgcaagttgcgcccgaagccttcttggggaagtggcgcccgccgggcgggaaggcgaagacgcgaccgacccaggcaggcaccactccgctcaacgcaccgggcggcacccaaatcccaaaccctagcacacgcaccatggcggcgcagcagaagatccggtggggggagctggaggaggacgatggcggggacctcgatttcctcctcccgccccgcgtcgtcgtcggacccgacgagaacggcctcaagaaggtcatcgagtaccgcttcgacgacgacggcaacaaggtccgggtcacgaccaccacccgcgtccgcaaactcgctcgggcgcgcctctcccgcagcgccatcgagcgccgccagtggcctaagtttggggacgccctcaaggaggacgccggctccaggctcaccatggtctccaccgaggagatcctcctcgagcgcccccgcgccccagggagcaaagctgaggagtcagctgcatctggtgatccgctggctatggcgagcaagggaggtgctgttctcatggtttgcagaacctgtgggaagaagggcgatcactggacctcaaagtgtccgtacaaggacctggcaccaccgactgaaactttcacggacaggcctccaacgtcagatggccctcctgcaccaggtggtcctgctaagggagcatatgttcctccaaccatgagaggaggtgctgataggactggagactcgatgcgccgcaggaacgacgagaattccgtccgtgtgaccaacctctcggaggacacccgcgagcctgacctccttgagctcttccgtgcctttggccctgtcagccgtgtctacgtcgcggtggatcagaagactgggtcgagcagggggtttgggtttgtcaactttgttcacagagaggacgccgagaaggccatcaacaagctcaacgggtatggttatgacaaccttatcctccgagtcgagtgggcgacaccaaggcccaattagttttgccgctacctgctagaatcgcatatttctgttgaattatatcagtatgtttgtttgaattactggtacctgagtcatgaatttatcttgttggaaaaacctgttatgtgtggtttggttggacgagaataactatactcgcttcttttatattgagttcgcatgccgtttgttgtcagcaaaaaaaaaaaaaaaaagcgccaaaaaaaaaaaaaaaaa

SEQ ID NO: 77113 - DNA, 690 bp, Zea mays
  unsure (1)..(690): unsure at all n locations
  Clone ID: MRT4577_170352C.1
cattgggtacctcgaggccggccgggtttaatgtttctttgatattacnanaaaaaaaaaaaaaataaaaaaaaaaaaaaaaaaaaaaaaaaaaaaaaaaaaaaaaaaaaaaaaaaaaaaaaaaaaaaaaaaaaaaaaaaaaaattccgccgccattttcgaaagccaccgaaaccgaagcccgccttcgccgccgccgcctttgggatccccgaaaggtcgaaaacatgtttaccgggttccagggcccaacccccggaacggtccagggtttcggccgaaaaaaaacggttggggccgtcccctacaccaagccggggggggggttgatcaaggggaacggggccccgattgagttcatcaggccggaaatgctccgcctcaaggccttcgagcccatcctgttgggggggggctccaggttcaaggacatcgacatgaggatccgcgtccgaggggggggaaaaacgtcgaaaatctacgccattccccaggccgtcgccaaggggttcgtcccctactaccaaaagaacgtcaacgaggccgccaaaaaggaggtcaaggacattttcacccggaacaaccgcacccttttcgtcgccgaccccaggggttgcgagccgaaaaagttcgggggtcgcggcgcccgcgccaggttccaaaagtcctaccgttgagcgctcggttgcc

SEQ ID NO: 77114 - DNA, 556 bp, Zea mays
  Clone ID: MRT4577_170353C.1
actctgtctttgcagaaagcgggatctttatgatcgcctacctaccaccgtcactccttcccacatacttcaatgtacctcacgggttcgtggttccatcgcactgcgaacacaccgtacaagaacagcatatgaaggcaaataacgcaggccgaaatgaagagaggaaccgcgagctggaaaatggagcgtagagtatcagcattttgtaccacactgaccctggtatgggcaatgacaagaacattcgaggaggcaatgatgcatttatcacctcttatagagcaactggaggagccaataaagagcacattgcataatgttcatgaccgaaatctgagagggactttgatgcgatgactgaagcttaacaatggatcttgcactaatgatcatataatgctaatgaatgactaaaactgcaacatacataatgagattgacttcgccatagctaaacacattgtggcattatatctatatcgagttattaagcacaccttactcggtgcattgatagagtacttcatgcagttacaacctgtttatgcattaa

SEQ ID NO: 77115 - DNA, 495 bp, Zea mays
  unsure (1)..(495): unsure at all n locations
  Clone ID: MRT4577_170354C.1
ccntttcgagcggcaccgccacgggcagtgtcaagcttttcttttgtacaagctttttttttttttttttttttttttttttttttttttttttttttttttttttttttttttttttttttttttttttttttttttttttttttttttttttttttttttttttttttttaccgggggcggaacccggctaaggggaaattaaaacaaattgggggggggatttggggtccccccaccgggccccaaagttggggaaacgaaggcaaaaagtggttacccgggggaaccttttttcggggtccaactcccaccaatttaccagcccggacggaaaagggggaagccggggggccccnaggggcggccccccccaaaaatatggccccggcccgcgggcgggggttcccggncggaaaccccgcccgccgcttgggtttgtgtatacggccccccgggggggaaggggcccgcggcgggggggcccctcccccc

SEQ ID NO: 77116 - DNA, 256 bp, Zea mays
  Clone ID: MRT4577_170355C.1
cttcttttcgtgcagcagatcctttcttagagaatgatcgctctaaaaggatttgtcttttcttttgaatcattaagatgcactgcgagaaccattttcgagtacacttcaaaagtactctagaggatcgcgcttctatcggtggggaactcccttcgcatgatactgcttattaacgcaaactgtttttttgcattcactggtgttgggggaagacggcacccaccatcgggttaaccactgctactggattaag

SEQ ID NO: 77117 - DNA, 1736 bp, Zea mays
  unsure (1)..(1736): unsure at all n locations
  Clone ID: MRT4577_170356C.1
tgcaccgatgttatggtcaatgtatttctcagcatcacaataaccaatcttgggtgtggcgctccgaagcccagatggcttaaaacctttgctctggttggtcattncagacctcgcttttaaattaactccaggtgctgctgttccaaagcttaggcctcctgttgtcacagagggtcattcatctggaacagcagcacctggagttaatttaaaagctacttctgaaagtaccaaccaggtgctgctgttccagatgaatgaccctctgtgacaacaggaggcctaagctttggagtaggagggcagtcattgctcttcctgagggagggggacagtccatttaaactctcagatgtatggctcatcttccctacggtggaagcagttgaagccccagatatgacagagctcatgctgtccatggagctgctaggtgaaatgcttggtgatgcacggtcagcatggcccttagctgggatcctgttccctgatgatcttgagggtatagttttgctgataccagattttgatggcggatgaacagggaccctctgggcagtcctatttttgttgcttaaggttgctgatttggtttttgcttccggcttagtgtccattgacacaccatgagaagttgctgctgatgtgaagggacctgattttgagattgaactagactttgtacccccgccagatctcaggccagctgaagtactggcagttttaccagctgcctgcctgttggcagcacccccagtgctgcttcttttgtctgaaaccccagaggtgacagctgtggtagttgatgacctcatcatagcaactcttggcaaagctctaggaggttttgaggatatctttgcttctgcagctcctagtaaattaactcgtgcagccacaggctctttggtggtgacttgggccctttgtctgacaccggctccttggcttgttgaaacaggggcccttatctttggctggggcatccgatcaacaccttttctagctgcaactgcaacacgaggtacatttgctgtggcctttgggtggtttgagccagcaacaggccgacctggaactttatcaggtttgccaagagacctctggatcgaagcacggacattgtcaaatagttcagtctcaacgctctccatcacccaggattcactttccagagttgaggttgctgattcccccgatctactcatttcctccacgattccaggcaacctggaaccctgcgtcttacggaaggtgctgtttacaatggccaattcctcagtgtcgagaacaccttcacttgtaaaaaaagcgctgtcccaagccaagctcttgcgcaggttcacccccttcttggccttccgctgttccggggagtccgtccgctcggggagcgcctgctcctccatcacactgtccggatccggagcccgtcccgccgccgacggaaaagcgccagaggaagtcgccacggcgcccaccagagaccctgcgtggggcggtgaggcgatgtcgaaaagaagatcgtcctcgacggagacgtcgatgagggtgagcccctccatgggtgcagcgcggaggcctgcggccggtcggagtcaccggagaccggtgggaaaaccctagatcgccaacagttgtcaggatcggagaggaggcgaagggaatgcgagacgagctggagagacgtggaaataggcggcgaggggcggcggctataaaatcccggccgg

SEQ ID NO: 77118 - DNA, 684 bp, Zea mays
  unsure (1)..(684): unsure at all n locations
  Clone ID: MRT4577_170357C.1
gataattaggtatccacctgccgtccttaactcatttgatgtcagtgagcatgtttcctgagcatgctaggctctcgcatcgttgacaaaatggaccatacaaccattcctatgttgccagctttgcttgtcctgtaataaagacatctcagcatagtgcagngaaaaaatatttagttacctcagtggaatcatccagactctctccagagaaaaaaaattatacaatgctgaaagctctccggaacacaccatttgtgcacttgtaatctgaagttctgaaatagtcagtgaaaagctggacgtggttggactccatccagattttcctgctgttggtagtttctggaaacgatcattttggaattgccaggcgggaaggcaggagaaacattcagattcgtagcaagaggcagcctggaaccaggaaatctgtgtggcctacgcttgtgttttgtgcgtcgggggctggcatgctcctttccttcggcgctgtctcgatccggcttgcctctgtgcgccgctgcatcttgcggcggccctcggcttctccggcgagcgactgttccagctcggggaggccggaccctggctgtcctngtgctcggtggggcagactaatttctgcccagatccggtgcgcgccgatgtggtctcgtaagatccgggcagcacacgccctga

SEQ ID NO: 77119 - DNA, 471 bp, Zea mays
  Clone ID: MRT4577_170358C.1
ccggtgccggcaattcccggggcgggaccatagtcttgttcacctgactgacaccaggtggcagactgtttctgtacatgcttaatgggcgctcgatccatcttacctcgaccgaacttgaatcgacgtgatgcaggaggaccttgcagaatcctttctgatgctgacagtgggggccggaacggcattcgggggtggctagctcatgctaggtgacgtcgacgccgcctcagagcatagcgtacgctatggcaagccaggggtctccctcctcgatgtgctgtaccagaggatcactcgctcaacacccacacttggcataagcgtgaccagaaggagcactagcatctgcctcagcacaaggatcggcccgctctgcaggggctgcattatcctcaacaacgccaacaaaggatcccagattcagaagtcgcagtttaaggaggatatagtctactgggaactggggat

SEQ ID NO: 77120 - DNA, 661 bp, Zea mays
  Clone ID: MRT4577_170359C.1
aaaaaaaaaacaaaaaaaaaaaaaaaaataaaaaaaaaaaaaaaaaaaaaaaaaaaaaaaaaaaaaaaaaaaaaaaaaaaaaaaaaaaaaaaaaaaaaaaattccattctggggctccttttccctttccattgggatgggggggggctccggtcctcgattttggaaccctgtttccgtttgtcgagccatggggaagggaagggcacccccgtggaaggggcccacccaccaatttatcctggggggtggcctatccgtttccgttttcctcccgttgttcgggccggggggggaaactggggttggggcgggggcggaggggggcggaaagcatttgggggccggaaaggacaagggaaaactggccgcggagggggatgctgggggaggcggtttaggggaggaaaatgagttcggggggggtttgggttccctcgacagaatgctgaagggggcgatcggaaattctgatccggaaaacctgaaaaagggggcggttgatgggcaaaagttatttgcaaataaactgctcgaggggggcaaggaaattaaggggtggagggaaaagtaaaagatgccatcaaacgctgccttaaggaaaatcgcaatggaggactaaaataattcttccttttcactggaggatcgccaacgcccc

SEQ ID NO: 77121 - DNA, 1205 bp, Zea mays
  unsure (1)..(1205): unsure at all n locations
  Clone ID: MRT4577_17035C.1
cattggtacctcgagccggcgggattgagtccctcgaggccggacgatcttctcctttaccctccctttccccaaaggtcaactcttccatcccctccactcgccgatccccaaaatccaaagcccaaggaaacaaaatgggcaatggcatcaccaagaacccatgcttctccggtgactcgtacgccgccgccgtcgcgtctgacccgctcccggacgacagccatggtcactccttcacctacgtgccatcgggcgccgccttcgaccagccccagacgtctgccgcgacgtcgtcggagtcgtcgttcttctctctgtccggcgccgccatcagcgccaatccggcgacgtcggcgtcgatgccgtcgttccgcctttttaacgagctgacgtggccgccgtcgaccgcgtgcaccttcgagagctcgcggtccttctccgccgttcctctccaggcggcgccgcctagactttccatgtccgggccggtccagttcacgtccggccggttctccgagacatccggctccgcgtccacgatctccggcacgccctcggaccgcccattcatgtcagggccgctcgaccactccttgtccatctcctcgtcgtccgcggggctcctccaaccgagcgtttctcagctcatcgctgagcgccgcgccgcgcgctcccgactccgggatgagcgatccctgctacggttcttcgtcaggaccgcctccaaactctggctcgggtcgccgcgctatggccgccggccacaggaacctgctgatccgataaagttctccttcagcgatggggactaccgctcgccgccgaacagcaatgtggagtgggctcagggcatggccggcgaggaccgcttccacgtcgcggtgtccgaggagcacggctgggtgttcgtcggaatttacgacgggttcaacggccccgacgcgaccgattacctcttcgccaacctctacgtcgccgtgcacaacgagctcaaaggcttgctctgngacggcatccaagcaggcgacagcgccaggtgcggtgagcaagaagcgggcgcaggcaatgccgaacgcctctgtattgctcaggccgacggngacggcgcggaggctaagcgcagacggaccggaagtgcccatgccagggcacagcgccacgccagtgcaccgcgacgtcctgagggcgctggcgcgggcact

SEQ ID NO: 77122 - DNA, 401 bp, Zea mays
  Clone ID: MRT4577_170360C.1
atgtttgttaaataccgaataaatacgggttcaatccggaaaaaacgggatcccgtaaaaacggacggaataagttctctctcgtttctgtctcgtttctatattttttcgtaaatacagaaatagtcgggtcaaatatagaaaacggtacggatcgggatgtgatttttttggtccgttttcaaccctggcgggcgcgtcgcgccgtcgcctattgctggacatccactgctcagtgacgcgggtggccgctcgcctcgcgcagcgcacaccgtccggagaaaaggttccaccgtctacctcggcccgaccggaacccctaaatttcccaaccttccctttccccttcctccttcagtccaccggatcaccacaccccgtcttcaccccgtacaaattca

SEQ ID NO: 77123 - DNA, 243 bp, Zea mays
  unsure (1)..(243): unsure at all n locations
  Clone ID: MRT4577_170361C.1
cgcgtccgnaactgtaaatattactctaaacctacattttcgattatccacacaccctcagcgacttggcttctctaaaggagtatatggccaacacacaacatttcatcaacatacaactgtataacgtaccgaaccagctgatccaattcgagctgatcctgaccaccgccacattcgtgataaccatcttcaacttcgtctcaacgcttttctgcatcaacttcaaggtccctctgttct

SEQ ID NO: 77124 - DNA, 363 bp, Zea mays
  Clone ID: MRT4577_170362C.1
gggccggaacgggttttgggggcaaacccattcctttttttttatgggggggggggccaaattttaaaacgtttttcattttccgggaaatttctcccggggaaaaattttttggtggtggaagaaaccaaacgggcccaatttttggggggtttaaaaaataggggggggagctaaactgacacttgaacccaaatggggggggttctgaaacaactaaaaaaaagggtttttgcccttcaaaaaagccctgaaattcctaaagaccggggagcccccctttgggttcccccggggcatttactcggggggcacccaaaggcgggtcccaacaatttggggggggggctccctgggcttttt

SEQ ID NO: 77125 - DNA, 513 bp, Zea mays
  unsure (1)..(513): unsure at all n locations
  Clone ID: MRT4577_170363C.1
gggtacctcgagggcggccgggcgttcctcgcgtcgcctgcttctgctcccccccacaaccgaaaccccactaataatccgccatggngctcgcctccggnacntgccgntccctcctgggnggctccgccagnaccgcncggctccacctcgctgtctnctcgnnctccaccgcctgctcgatccgcttcccccgcgncgncggcgacggcagggcgaccgactccctccgcgcncccgcgcctcaagatacgtggtacagcatagcgccagaatgtgaccccaaaagccttctgtttcatgattggaatcgcagcgtgacaacagcaacgcactcattggtggaggcttctctttttataatccncacgcaccaaaacctgtgggtgcgacacatctttcgcgattggcacncaatccgaggctgcagcaaaaggtngtaacacacacaaatcccagaatattgataatacaatcgcgacggaacttgatataaagcctggctcctgatca

SEQ ID NO: 77126 - DNA, 322 bp, Zea mays
  Clone ID: MRT4577_170364C.1
ctttttgagctgaagaatggtcagcttaacaattggagctattgagaaagcatggggggattattagttgacaaagggggcacgcgctgctaaattggaaagggatcacctgttactgcaaagactatgtggccggcatggaaaacgattgcgtggtatacagatactgggtgtacaccaatttatgcgcggtgggcagggatacatattaaaaatacaacaactggagagcgaactgatgcttcaaaacttatccaatgcttgcaggcatgggttacatgaccagcttgacattggaccacgacatttttctaaatgaatt

SEQ ID NO: 77127 - DNA, 674 bp, Zea mays
  Clone ID: MRT4577_170365C.1
tggaaatattcgaagggcacgcgagctatttgatgccgctactgtggctgatgcaaagcatattgctgcttggcacggctaaagcagagcgctttgaacaggcacggactttgttcgagcaagccagtcaatccaatccaaaaagttgtgcaagctggctagcttgggctcaggtagaaatgcgtgcaggaaacaataccatggcaagaaagctctttgagaaagctgtccaggctagtcctaaaaaccgattttcatggcatgtatgggcactatttgaggcaaatgaaggtaacattgacagggcaaggaagttgcttaagattggacatgctgtaaatcctagggaccctgtaattctacagtcactcgcgctactggaatacaacttttcatctgcgaatgttgctcgtgtgttattcagaaaagcgtctcagattgatccaagacatcagccagtttggatagcttgggggtggatggaatggaaagaaagaaatgcaagaacagcaagagctctctatcaaagagctttgtcagtcaattcaacaaatgaatgtgctgctcgttgtcttcaggcttggggagtcctagaacagcgtgctggtaactacacggccgctagacgattgttgaggtccttccctgagtataaactcccaaagcgaggcgac

SEQ ID NO: 77128 - DNA, 424 bp, Zea mays
  Clone ID: MRT4577_170366C.1
ggaggggcagggaccttaaaaggaaccattttagtgtctgtttgactatttagggactaaaatgcagggactaaaaattagttcttggaaccaaataggtctaacactctaaaaggaagagctgcagtgttttctagaaatgattgtgtacagaatagtcactgctgtaaagtgggttcataccaatttgatacaacattcaccttcacaaagaaaattcagatgacatgtaagattatgcctgacagcctgaggaggtctttcaaaaaccaatctcacaactgctgtctgacatgtcctttcattacttaatatgtgttcccttgcgtctgtagaaaaactacataaaagaagaaacgatagacaggatgaggttagatgaagaggtgcttatgggatttcttcagggaacacatcaacgtga

SEQ ID NO: 77129 - DNA, 255 bp, Zea mays
  Clone ID: MRT4577_170367C.1
aaggtaccgcaactgtcgggtctcaggctccacgagactgcagcatgcgttcagaggacgcaccctgacggatcgttcacctacgttgacgtctacatcggcacatacaaactcatcagcgcatgccaataagctaggttttgactaccctatgctgtcatgcttaggctactgcggcagccggtacaccttacacctgagcgtaggatgctgcggtacgaagcaggttaactctacgtcggtggtggtggggaa

SEQ ID NO: 77130 - DNA, 489 bp, Zea mays
  Clone ID: MRT4577_170368C.1
tcttctaccctgaaaggctcaatataagaaagaaaggaatagtgctcacagaaattaccaatacgcgaacgagtagttactctcttgctgatgtcacctagtatttggtccaccagatgatccctttgaattgtggctcagatttggattggcggtgcctttggtacttcttcctcttggtcttcttgttcttatgctccccttgatccatgcaatcatctcgaggtacctattctgcatcttgagttgggggttgcaccgtcattgaggaaggaggttgatcttcctcttgttgttcctgcggtcgcacatcacatatcaccatagtcctcattgcgactgttggaacctcgttctcatctatctcatcgagatcaacttactcccttagagagccattagtctcatcaaatacaacgtcactagtgaattcaactaaacccaaagatttgttgaagaccctatatgcctttgtatttgaatcataac

SEQ ID NO: 77131 - DNA, 265 bp, Zea mays
  unsure (1)..(265): unsure at all n locations
  Clone ID: MRT4577_170369C.1
ggaaaattatctctagcatttattgtagagtaatacaaagagtaatcttggcagaagatgggtacgttgttgcccagtttccctttgtatttgtcagtaatccatgatttcatgacaacgatgaattgctggctgaaatcggctccacctttaagccaaaatcctgaaactgctaacgcatgcttgcaagttcctttgtatcctttcttctgagcataccnnanaataaaaaatataaaaaattaaaaaaataataatacccttt

SEQ ID NO: 77132 - DNA, 440 bp, Zea mays
  unsure (1)..(440): unsure at all n locations
  Clone ID: MRT4577_17036C.1
accgccacatagagcgcactatagtgcccctactgtggcacacaatatattgcgttatcatacgctccgtgctctctgtgcgtgctgctccagcgagcatattaccgcaatgctcacacactcctatagcgcacctgctatccccatacctctcaccaacgatgtcttcagtatgtgaaaatccaattcttctaccctacacgatccaacaggcaatcgcagcaggcatcttacctttatcacccttgtgcctccaacaatcatcagccctattacagcagttacctttggtgcatatatcgncacataacatcacggcacaacaactacaacaactcgtgctagcgaacacttgctgtctactctcagcaacagcagttacactttgggcacttgttggcacacaacataaggcacaaaaactacaacaactcgtgcta

SEQ ID NO: 77133 - DNA, 256 bp, Zea mays
  Clone ID: MRT4577_170370C.1
ccacgcatccgaacaatcacctgtcgcctcttttcctctcccctgactaacccttccctctggccaccctcaaatcgctctctcgctcgctctctcctttcccccttatacactctcgtggtagggggtccgctcatctcactgactattatatgtgcggcttctccgacgccttcaggcttttcgaggtgggctctcattgtttcatcacatcctacgatcttgtttctgtcattcatttactgtgtcatcattc

SEQ ID NO: 77134 - DNA, 547 bp, Zea mays
  Clone ID: MRT4577_170371C.1
ccgggttctgacccacgcgttcttataaaaaaaaaaaaaaaaaaaaaaaaaagaggggggggggggggaaaaaaaaaaaaaaaaaaaaaaaaaaaggaagaccaaatataagggatccaaatttaaagtaacccttgcttacttacgacataccctctttttataatccctccttatattcaataacttgttttttttttatacaccctcatttttgggggggggggggggttaaacaccttaatctccttacaaaacttcccttttccaacatttccctttttaccaaaaatgccctttccaaaagcccttccaaaaacttatctcaccctcaatggcgaatgttacaaaccttttggcaccccatttatcccggcggattaaccgtttaccctcacattaacccctacacttgtcagtttcctatcgcccgttccttttccttttttcctttcctttttccccatttttttctgttttccccctcagtttttacccccggagctctattttggggtcccatttaaagcttcacggttccttttcc

SEQ ID NO: 77135 - DNA, 480 bp, Zea mays
  Clone ID: MRT4577_170372C.1
ccgggaaccagggggccctccattaaactaaattcggtccccccccaagcaaaagcaagggccaaaaaaagaaaaacgggatgacattgccaaacgggccatgggcccattatcaagcccataaaactggacataaaccccaagcccccccataacacccaaaaaaaggggtttctagcgggcaaaaaggcaattcgggggttttgatgacaaaacaaccaaatttcgggggaacaacaaaggcacttccatggcccaacatttgtttcccccttaaaaactggaaattgtcttaaggggggcgctgccaataaacgggaattgctgctagaaataagaaatcaaccccggaataatcagttctaccacgggaggggcatcgacggggacagcaaccttcacggggggcatgccaccccaggctgggatccccccggaccttttcttggggttatcaaaaacagaaaggccctttgggat

SEQ ID NO: 77136 - DNA, 1384 bp, Zea mays
  unsure (1)..(1384): unsure at all n locations
  Clone ID: MRT4577_170373C.1
gggaccctcgaggccggccgggccgggaccacgctgtgagtgactcggtcgcatcttccccattctccatcgaggcatcgacccaccggcggcggcgcaagtgaagcgaagaggaaaggaagctacgagatgtcggcgaccactgcagcggtgcccttctggcgggcggcggggatgacctacatcggctactccaacatctgcgctgcgctggtccggaactgcctcaaggagcccttcaagtctgaggccgcgtcccgcgagaaggttcatttctccatttccaagtggacggatggcaagcaggagaagccaactgtccgcacagaatcggatgactaagggctggcgccatggcgacatagtccttcctacagatgatttgaagcgtcgttgcaagtttctgggacttgttatttagttggcttgatttgtaatcaatgctgaagaataaatactttttgcgacaatggtctttttacaatgtcgtgctgggttcgttgaggtctcggtagcttcttccccattccattcggccattctccaccgtccaaccaaccaccggcggcggcacaagggaagcgaagaggaatcaacgcgatgtctgcgaccacggcggcggtgcccttctggcgggcggccgggatgacctacatcggctactccaacatctgcgctgcgctggtacggaactgcctcaaggagcccttcaagtccgaggccgcgtcccgcgagaaggtccatttctccatctccaagtggacggatggcaaacaggagaagcccactgtccgcacagaatccgatgaataaagctctggtgccatagtggcatagtccttgctacagatgatttgaagtgttgttgcaagtttccggaacatgctatttagctggcttgattttatagtcaatgctgaataataaatactttttacgacaattgtctttttcgttgctaattgcactcgccctacctgaatcagtcatgtgaacatcatggaatgcttcagttttgtacaaactaaatttgttgtgctgtccgacagattctatgtctggtccttaaaaataaaggaataatgaatgtagtgtttttgaaaaaaaaaaaaaaaaaaaaaaacctcctttttttctctcatccgaattcccaggcaggcaggtcggcgaggagggcaggaagaccgaagaccgagccgtgcgggggctcgggacgggaacgggacaggaccccaaaatctcaatcctttcctgcccgcccgcccgtgcccgtcgacgcgtcgttcttgccggccgngccccacctncgccctntcctcctccagggggatcggatacgccacaggctgcgcgatggtgctggtggtcttcggctacggctccc

SEQ ID NO: 77137 - DNA, 194 bp, Zea mays
  unsure (1)..(194): unsure at all n locations
  Clone ID: MRT4577_170374C.1
gggtttacctaactaacagnagcaacagcagcaactagaagtttttgttttttaaacccattaattgcttaatttgcggagagcgggcgttaggcaagtgatttgaattagctgttcctcgtttggtttgtgtatcaacaaaacaattgttcgttgatttttcttggaagcaaagtaaagtaaaccaaccttct

SEQ ID NO: 77138 - DNA, 1803 bp, Zea mays
  Clone ID: MRT4577_170375C.1
ccggccgggaaatgaatctagtccttcctttcttgtatcttccctctgacgccgcgtccgctgtcagtgactcggtcgcatcttccccattctccatcgacccaccggcggcggcgcaagtgaagcgaagaggaaaggaagctacgagatgtcggcgaccactgcagcggtgcccttctggcgggcggcggggatgacctacatcggctactccaacatctgcgctgcgctggtccggaactgcctcaaggagcccttcaagtctgaggccgcgtcccgcgagaaggttcatttctccatttccaagtggacggatggcaagcaggagaagccacctgtccgcacagaatcggatgactaagggctggcgcgccatcgcgacatagtccttcctacagatgatttgacgcgtctgtggacgtttcccgggacatggtttatttctcgatttgatagttgatggatggcaaggaggagaagcccactgtccctgcgggtgtcgcggtagcttcgtccccattcacattcggccattctccaccgtccaaccaaccaccggcggcggcacaagggaagcgaagaggaatcaacgcgatgtctgcgaccacggcggcggtgcccttctggcgggcggccgggatgacctacatcggctactccaacatctgcgctgcgctggtacggaactgcctcaaggagcccttcaagtccgaggccgcgtcccgcgagaaggtccatttctccatctccaagtggacggatggcaaacaggagaagcccactgtccgcacagaatccgatgaataaagctctggtgccatagtggcatagtccttgctacagatgatttgaagtgttgttgcaagtttccggaacatgctatttagctggcttgattttatagtcaatgctgaataataaatactttttacgacaattgtctttttcgttgctaattgcactcgccctacctgaatcagtcatgtgaacatcatggaatgcttcagttttgtacaaactaaatttgttgtgctgtccgacagattctatgtctggtccttaaaaataaaggaataatgaatgtagtgtttttggaaaaaaaaaaaaaaaaaaaaaaccttgtctcggtagcttcttcgccattcccattcggccattctccaccgtccaaccaaccaccggcggcggcacaagggaagcgaagaggaatcaacgcgatgtctgcgaccacggcggcggtgcccttctggcgggcggccgggatgacctacatcggctactccaacatctgcgctgcgctggtacggaactgcctcaaggagcccttcaagtccgaggccgcttcccgcgagaaggtccatttctccatctccaagtggacggatggcaaacaggagaagcccactgtccgcacagaatccgatgaataaagctctggggccatagtggcatagtccttgctacagatgatttgaagtgttgttgcaagtttccggaacatgctatttagctggcttgattttatagtaatgctgaataataaatacttttttacggcaattgtcttttttcgttgctaattgcactcgccctacctgaatcagtcatgtgaacatcatggaatgcttcagttttgtacagactaaatttattgtgctgtccgacagattctatgcctggtccttaaaaataaaggaatactgaatgcagtgtttttgaaggccccataaaaaaaaaaaaatgaaaccgatgaaaaaaaaaggcccctagggtttttaaattaaaaaaaaggcccctagggcc

SEQ ID NO: 77139 - DNA, 243 bp, Zea mays
  Clone ID: MRT4577_170376C.1
tcgcttcacgtacttcaggctgcgttcgacccactagggcactggatgctgcagaccctgtgggggctcacaccggtgcgggatgcgactcatggagggcctactcgatgacgtacttcgagaggctgatggctcgactggactgacctgatacgttgcggccctgtcaaagccggctatatcaagcgctcatatgctgcaggacgctattacacggggcacacctctagtcaaatcaaggcg

SEQ ID NO: 77140 - DNA, 1238 bp, Zea mays
  Clone ID: MRT4577_170377C.1
tttgccgggtcaatgtagtgtggtaggttactgggaacacatagatctggaggacgtgatgacaccagctgaagtgtacagcacattgagagacaagggctattgtatcgagtacaaaagaatacctctaaccagggaaagagaagcattagctgccgatgtagatgctatacaatcatcaattgatgaatctgctaggtactatctctttatttcacacactggatatggaggtgttgcttatgcgatggccattacctgcctgggactgagtgcagatgcaaagtttgtaatggaagaaacagcagaaacacactttgtatcaacatctcttgcgaaaaatgtgtccatcaaaactaaaactgacatagcacttaagcagggtgactaccgtgacatattaaaccttactagagtgttggtacatgggcccaagagcaaagaagaggttgacacagttattgacaggtgttctggtgctggtcatctgcgcgaagatattatgcattacaggaaagcactgcaagattgttcacatgacgacgacgacgactgtgatgaggaacactcttatctcactgatatgggcacaaaagctttgaggcgttacttttttctgatcaccttcagatcctacctatacagcacgacatcatgcaaaacaacatttacatcatggatgaaggcaaggcctgaacttggccacctttgcgacaatctaaagctggacaaataggccatcttcatgtgacgtgattatgtagttgtgtcacttccttggacacattcacccagagtttcaaaaaggaaggagactaaaagaacgggtagagaggaagcagtggttatgggagttgtggacaatgaaagagcagcttaggctgtccgaaagtagggcattgtactatacttgtcggtgttaattgacaccagcaagcatgtatatattgtcaggcgtattatagatgaacatattagatatttctattgtagtattttctcaaattttaaaagaatcatttcatgcagttcattctcatgtatgtatctgatatgcttgctttttcagcagcgtttttttagacaaagctcttcggcagctttgatttttgaaaaaaaaaaaaaaaaaaaaaaaaaaaaaaaaaaaaaaaaaaaataaaaaaaaaaaatataaaaaaaaaaaaataattttataaaaaaaaaaaaattttatataaaaaaatatttataaagggggg

SEQ ID NO: 77141 - DNA, 364 bp, Zea mays
  Clone ID: MRT4577_170378C.1
gttgcaggaagcagttatcgctaaaaaaaaaatagaagtagctatggccggccaaggtgtcagcgtgccagctgctgcaggagggatcgccgtgggcgtctttggcactgctgcagcctgcaggctggcagcgtgtgtacgtgcctctgctttgtcccagctgcacgtaaccgctggatgcttgtctgacaacggtcctggtggtcggccgatttggctgctgtgctgagcagcaaagatacgatctccgctgctccgctgctatgtgcctgttgactcttgtgcagtcgtgctgctgtgttctgcccgcagtgcgcaggtggaggcagatcgattttcgcatcgtctctttctgttgggaaac

SEQ ID NO: 77142 - DNA, 176 bp, Zea mays
  Clone ID: MRT4577_170379C.1
gccgactgcgagtgatagccatgtggaggaggcgcaggcaggggatcaagacaaacacacagatccaggctccaccccgcacgtcgggcgtgagggaagggaccagccccagcacctgaccacttggttgggtcgggagacgacgcaggacatgatggatcacctgagcctggcgc

SEQ ID NO: 77143 - DNA, 194 bp, Zea mays
  Clone ID: MRT4577_17037C.1
ctgtaatgttatttcccacccccatgtaatcttggtgagtctttgctgactggctcacttctcggaagctcctttggcgcgcatacggagcttaactgggccgggcagaaaagactctccaggagggtacagcggggcctctgccttttgcgtccctcggccgtggtggtcggttctttgtcctgggggggggg

SEQ ID NO: 77144 - DNA, 121 bp, Zea mays
  Clone ID: MRT4577_170380C.1
tttgtttttttatacacagggtccagattacaaccatacactagccgggaaagaggggtgacaccccccacgcggaacagcgttgaccctataaatggcactcacaatgtacgaagagttc

SEQ ID NO: 77145 - DNA, 238 bp, Zea mays
  Clone ID: MRT4577_170381C.1
agcagaaagcaagatagctagatgagtccttctgcatgatgagatcagcgggggaggtgatgatctttctatatccgtatgcattccctctcttatgagtgcctaaagagcacaacaattatatcattcagtgctcccatctgcttcgcacatctggctgctgctcacgttggccagtttataaagtgcgcttggaagtcccagacgtcctccactcataggggtgcatacttcatac

SEQ ID NO: 77146 - DNA, 1287 bp, Zea mays
  Clone ID: MRT4577_170382C.1
gagacaatttaatttggttggcccgatcctttttggattggtcatctctgtcaagcacggcctaagtcctaaacagacacgggccggacttagccgtcgacctcaggctggaccggcccacgttcgctccggtccactcagaacggaaaccagcaaacgacatctctccccggcggcccggtcccttcatctctcgccgctgtcgtcgccgccgcgccggtatctgcagcttcccgcaccgtatcctgcggaagaagtttctaacgggctacatcccaccaccgcacgatgtcggcagcggcgcgagtgctgccgaaggcggtgaccttcgtgacgggcaacgccaagaagctggaggaggtccgcgccatcctcgggtcttccgtcccattccagtcgctcaagctcgacctgcctgaactgcaaggggagccagagtacatatccaaagagaaagcacgaatcgctgcatctcaggtgaatgggcctgtactggtggaggacacctgcctatgttttaatgcgctcaaaggcctaccaggaccctacataaagtggtttcttgagaagattgggcatgaaggtttaaataatctgttaaaagcttatgaagataaatcagcgtttgctatgtgcatcttctctcttgctcttggacctggagaggaaccaatcacatttgttggcaaaactgcgggaaagatcgtgcctgctagaggccctaattattttgggtgggatcctgtgttccagccagatggttttgaacaaacatatgctgagatgcccaagtcagtgaagaacaacatatctcacagagggaaagctcttgctctggtgaaagaacacttcgcatctgctagctatacagttcagagcaacgactcaacttaaagtttgacttggattcctagacgaatgaactgtcattctggaatgtaaactgaactactacttttagtccggtgcctattatacttgcgagttgcgacatttttttattggatcaacactagaatcacaaacaggataaatagattacacagcacccttcaccaggtatcaatgccgataagccaaacgcacacaaaattttcacacggagagatactacacactatctgcatttgactagatgcagaaacacaccaaagaatcgttggctaaaaacctgacaacctctagggcctcctgagtttaacatggagaggcatctccttgtaggtggtgactcgttccctggcctgccgcatcggccttccaagagatgatctgcgcctcgtgccg

SEQ ID NO: 77147 - DNA, 377 bp, Zea mays
  Clone ID: MRT4577_170383C.1
gccggccgggttttggaccaaaatgtaagaacacacgcccggcgctgtgacgcctacgctactagtcagtactcagtacagtagtcacccccaaagctccgccatcctcaaggagtcgtcgctggcgtgggccgagctcgccctcgccttgtgacacgctctactcccaccacctttgtgaatccatacggctgctgattgatttccttgactggcgtagggtttgctgccggtctcaactgagcagccgtttcgtatgaatgaatgaaacctgaaaggccatatgtatgttcttgtcatccatccgttcgttctaaaaaaaaaaaaaaaaaaaaaaaaaaaaaaaaaaagaaaaaaaaaaaaaaaaaaggccccta

SEQ ID NO: 77148 - DNA, 520 bp, Zea mays
  Clone ID: MRT4577_170384C.1
ccggccgggacctttccactaccccccgcacagtgcacacgcagttcgcacccacgccccccgcaggccggaggagccagccgcgatggcgcagcagcccccgcaccggcacgccaagacggactcggaggcgacgtccagcatggcggcggcctactacgtgcagtcgccgagccacgacgacggcgagaacaagacggccgcgtcctccttccactcgtccccggcggcgtccccgccgcggttgctgggccgggcgtcaagggactcctcctcgtcctcccgcttctcctccggccatcgaggaggagggtctcctcggcatgtccgacgacgacgacggcgacggcaccagccgcggcgcgctcagcgcgatccctaagagggcgcgctacgcgctgggcttcgcgggcgccttcctcgcgctcttcttcctcttcgcgctcgtcctgtggggcgccagccgcgcccagcgccccgtcgtcaccctgcgctccgtcaacttccaccgcttcgtcgt

SEQ ID NO: 77149 - DNA, 1520 bp, Zea mays
  Clone ID: MRT4577_170385C.1
actaccccccgcacagtgcacacgcagttcgcacccacgccccccgcaggccggaggagccagccgcgatggcgcagcagcccccgcaccggcacgccaagacggactcggaggcgacgtccagcatggcggcggcctactacgtgcagtcgccgagccacgacgacggcgagaacaagacggccgcgtcctccttccactcgtccccggcggcgtccccgccgcggtcgctgggccgggcgtcaagggactcctcctcgtcctcccgcttctcctccgccaaggccgcctcctcctccgtcgctgtccccgtccccggcgccggcgccggcgggcggcggcgcggcagcccgtggatgaaggaggcggccatcgaggaggagggtctcctcggcatgtccgacgacgacgacggcgacggcaccagccgcggcgcgctcagcgcgatccctaagagggcgcgctacgcgctgggcttcgcgggcgccttcctcgcgctcttcttcctcttcgcgctcgtcctgtggggcgccagccgcgcccagcgccccgtcgtcaccctgcgctccgtcaccttccaccgcttcgtcgtccaggccggcaccgacgcgtcgctcgtgcccaccgagatggcctcgctcaacgccaccgtcgccctcgccttccgcaacgccggcaccttcttcggcgtccacgtctccgccgaccccgtcacgctccactacacccagctccagctcgcgtcgggcgatatcaagtatttctaccagccgcggaagagccagcgcgggctggcggtggcggtggtgggcgacaaggtgccgctgtacggcggcgggtcgggcctgagcagcaccgcgacgacgctgccgccgcccaggaagcgcgcgccggcggtggtggtgccgccgccgcccgtgccgctgcagctggcggtgcggctgcggtcgcgcgcgttcgtgctgggcaggctcgtcgcccccaagttctacaccgaggcgcggtgccgcgtcaccatggaccagaccaggctcggcaggcccgtctccctcgccaaggcctgcacctacacccactagctagagcgaaagcgaaacacgcgcgcgcgcgcgcctgctgccctcgccgttttgttcttcacttgagttctctctccgtcgtcgttatactactactaccgcctgcgtgtgcttgcgtgcgtgcgttacatttggatgcatggggccattgttgctcggttgttgtcatgtatgtacagaggatttctttttttttctttttcttttttggtgttggagagttttcattgttgctcgcttcttgttctccttcgtgaccagcttcgtgtagggcatgtaaaatgtcggtgaaattcaatgcgcctgtttggtgaaattcaatgcgctcgaagcagacgtaagattctggtgaaatacacctaaaaattcccggccgcgcatgtaataaagcttcttcaggtgaagtttggatttggacccggccgacagtcaccgaccgca

SEQ ID NO: 77150 - DNA, 594 bp, Zea mays
  Clone ID: MRT4577_170386C.1
gcacgaggcgcccgtacgtgctgagcgtggcactggcggcgtcgcgggctacgacaccaactacgccgtggacgggccgcgtcgccgtcgctgcggccggtggcgcgcgtctgggacggcgccacggggcgggccatggagctgtgggcggaccagcccggggtgcagttctacaccagcaacgggctcgctggcgtcaggggcaagggcggtagcgtgtaccggcggtacgccgcgctgtgcctcgagacgcaggggttccccgatgccgtcaaccacccgagcttcccgtcgcagatcgtgaggccgggcaaggtgtatagccatgacatgctctttaagttctccttcgcctagctacaagactactggtgcatgcggttcatgcgtacacctgcgcagtgctgtgtcaccttgatgtgtcttgattagactcctccgtctactctcaagaactttacatccccaaataacagcgtgctgcccggtacgagctagggttttatatgtatgcgcgggcgcggcttatgctcgataaaaaaaaaaaaaaagggcggcgctcgcgatctagattgaacaaaaaaaaaaaaaaaa

SEQ ID NO: 77151 - DNA, 1487 bp, Zea mays
  Clone ID: MRT4577_170387C.1
ccgcgatgccgccgccgcagcccccgcaccggcatgccaagacggactcggaggtgacgtccagcatggcggcgtcgtccccgccgcgtgcggcctactacgtgcagtcgccgagccacgacgacggcgagaacaagacggccgcgtcctccttccactcgtccccggcggcgtccccgccgcggtcggcgtccaggcactcctcctcctcctcccgcttctccgccagcgcaaagggcaccgcctccgtcgccggaggcgtccccaccggcggtggccggcgacgcggcagcgcgtgggcgaaggaggcggccatcgaggaggagggcctgctcggcgtggacgacggcggcggcggcgacggagacggccgcggcgggatccccaggcgggcgcgctacttgctcggcttcgcgggcgccttcctcggcctgttcctcctcttcgcgctcgtcctctggggcgccagccgcaaccagcgccccgtcgtggccctgcgcgccgtcacgttccaccgcttcgtcgtccaggccggcaccgacgcgtcgctcgtgcccaccgagatggcctcgctcaacgccaccgtcagcctcaccttccgcaacgccggcaccttcttcggcgtccacgtctccgccgaccccgtcacgctccactacgcgcagctccagctcgcgtcgggcaacgtacgttacgtattaagcgccgatcggtgatcattcggccggatcgatgtttgagagagagagagagagagcttcttcattatgttttgtcgcgcgcagatgaagtacttctaccagcccgggaggagccagcggagcctggcggtggcggtggtcggcgacaaggtgcccctgtacggcggcggggcggggctgagcagcaccccgacgacgctgccgccgccgaggaagcgcgcgccgccggtggtggtgccgccgccgcccgtgccgctgcggctggccgtgcgggtgcggtcgcgcgcgttcgtgctggggagcctggtcaagcccaagttctacagcgaggcgcagtgcagcgtcaccatggaccaggccaggctcggtaagccagtctccctcaacaaggcatgcacctacacacactagcttggctaggctacatacatacgcctgctgccgtgggtcgtctcgtcgccaccatggtcgtcgtcgtcgtgaactttgcccttcttcttgaacaacacacactctctctctctctcccttcgcttttctgcgtgcgtgcgtttgttggtcgcttgtcttgtacatagaaatttttagtttctggtgtacgtaggagagttttgagtgagatggaataagaatcaggcatttccctcatacggcgtttccgattgcgtgacatgccgtggagggcatgtaaaatgtcggtgaaattcaatgcgcctgtttggtgaaattcaatgcgctcgaagcagacgtaagattctggtgaaatacccctaaaaattcccggcc

SEQ ID NO: 77152 - DNA, 288 bp, Zea mays
  Clone ID: MRT4577_170388C.1
ccaaaacactgcatgtggaatcacccgggtctcctggtatgcgtgggacagacaatatgtccagagcctgcggatgatgtctcccatccgttaaaggctaacctttcgtccgggctactcccggcccaggccgttgcgcgacggagccccatcatgacgccattgtggaatagagattaactacgccgacatcgccagcttggcccaccacagggacatggtgtacttgataccgactaactgcgcccctgtatctttccccaccatgtgctggtggtcagtgatgac

SEQ ID NO: 77153 - DNA, 313 bp, Zea mays
  Clone ID: MRT4577_170389C.1
ccaccacggcggcggctgcggcgtcgctgctgctgctgctgctcgtgtcgctcgccgcggcggaggacatgtcgatcgtgtcctacgggtgagcgctcgctgatggaggctctgcggatgtacgctgagttgattgcggcgctcggtcggtcctacaacgccgtcggttatgaggagcggcggtactaggtggtccgggacaacctccgctacatcgacgcgcactacgccgccgccgacgcgggcgtccactccttccgcctcggcctcaaccgcttcgccgacctcactaacgacgagtaccgcgtcacct

SEQ ID NO: 77154 - DNA, 210 bp, Zea mays
  Clone ID: MRT4577_17038C.1
ggtcatgactcaagaggcagcccagggggcatttctaggaccacgcgcggcttaaaaggcagtggcttggcaggcagtcgttacatggggtgggggtggtccagcgcactcacaaccttgcaaggacacgtgactgctttgagactgcggcacgcactgggattcgatgtcaacaagcgggggagggtgaggggactgtactggcagagg

SEQ ID NO: 77155 - DNA, 426 bp, Zea mays
  Clone ID: MRT4577_170390C.1
gggaccaaaacctactttctaccattcattcaaacaaagggactgtacaatagaggttctatgcattgacaagatcgggccataactgaggaacacatatgatcaatcactcttaggaaggtgtactggaatttggaacttgcatctatacctttacttcaactatatccacatacttaagctctgtttggggcagcactagtaggccaataacccatagcagcttaccttacacgcccattcttatagcagtgtcagcagactggttaccagagcttatactcataatcttgccattaggccagagtattatggccagctcacgcatgatcgcctatgagcagatgcttgcactgagactttatctttgcgaagatgcgccacgaccaacttgttcataccattgaagcatgcttgtgagcaaat

SEQ ID NO: 77156 - DNA, 840 bp, Zea mays
  unsure (1)..(840): unsure at all n locations
  Clone ID: MRT4577_170391C.1
ccggccggggaaacatccctagctctagccgggcttgaaggagtcatgaatgctcgtcagctcgtgagacgtgacgccgtgtcctgaaaaaaaaaagacccgtcccggcgacccccaacaaccccctttttcccaaaaaattnccccccccgggggggnnnaaaaaaaaanannaaaaaaaaaanaanaaaaaggaggggccccaaaaaaaaaaaaaaaaaaagaggggggggcnctttttttcccggggagaaaaaattggcncccgggggtccctccaaaaaaccccctcggaagaattcttccgggtttttggggntttggggtggggggggtttggggggggttggggtttttttttttttccccttttttgggggnctttcgggggttttccggaaaaaagaattggaaattcggaaaaaactcccccggggggaaaaaatccggggaaaagggggggggggtaaaaaaaaagggccccccaaaacttttttttctcaggggggggggggggggaattccaaaaaaaaaggggggaaaaaaaaagggggggggggggaaaaaaaaaaataaacgggggtgtgtgggaaaaaaaaacggggggggggggggaaatttttttaaaaaaaagggggggggggaaaaaaaaaaaaaaatcggggcggccccccccttgttggtggnaaagggggggaaaaaaaaaaacaccccccaagggggggggggaaaaaaaaaccnattttttttttgggcccctccgggggggggggggagaaaacaaaaaaatttttttttaaaaaaaaaaaaagagggggggcaaaaaaaacaaaggggggg

SEQ ID NO: 77157 - DNA, 351 bp, Zea mays
  Clone ID: MRT4577_170392C.1
gtgatctgatctcctgtagaagaagggcggagctgaagggtttaacggccgtagccacctcggcaggaggtggaccaacagcgcagcgcggatggtgttctctcgggataagtcaatttatgaggcaatggagtgtgcattccccccatcattgttagaatgcgcttataattcagtcgggtcccaatctggtaaaatgattgctcatatgcgtgatgaattgattggcttgtgtgcaagagcgagctatatttacgggacacaggcagaatatctagaggatagcaatgggataaactacatgcagctttcgcattgaataatttggtgatacaatactactttagaacc

SEQ ID NO: 77158 - DNA, 370 bp, Zea mays
  Clone ID: MRT4577_170393C.1
gttgctgtcgccggaattctgctgatttgccattattaacactgcgcttcgggaatttatcgtgtttaagcccataaattatagacatcacacccacaaatcatagactccaaaggcctcggaaggtattaccaggcaagggatgcgacaaattcagtcgtaaaattgcaattatttctgttggtcttggtcgttctggcgcgcagcacggatcgatctatcgagacagagcggtagttcccaaaatcaatcattgggttctccaagtcgccaaaaagaactgcatgcggcagcaaagaatgcttcctccagcttcttttagctttttctaaaaaggaactcctaaaatgtcaaaaaaaaaaggaacaat

SEQ ID NO: 77159 - DNA, 413 bp, Zea mays
  Clone ID: MRT4577_170394C.1
atgctttcttttctttttttaggttgtgttatttttttataaccaccattccttccaaaattggcgtagattgatcaaactgtttgtactgtcttggcatcgtgaaaacctggaaactgtacctaacggaaccgccacctgtcattgtggggggccggaaccctatcctatatgatgcaccccagcaatctaccacatcttacgacctacatgtgttcttcacaaaaacggttatactgctcgcggccatcatataaggagcggttccttgctcaaagaattggacgtaccggacaacggtaggtacagattccagtatcaacgaactttgcactgcaagcatgatcgtcctgccacgcaaattctggtatggttcgtggcgaggataaattgacactccctgacgacgtatc

SEQ ID NO: 77160 - DNA, 498 bp, Zea mays
  Clone ID: MRT4577_170395C.1
atggcggggactctcccgtctccctctagatcccggcggtggcagggcagggctagccttcttcctggagcattccagttcatggcgacgtggaggcctcgaggtgaagccacgtctccttcagcaggcagtgtacttcgtttcactattgctcctgctgcaccggcggcagcttccgggggacctggacgtccaacacggacacgtcccgtgctaaagattcgtgaagctatatctagcggcggtggatcgacgccgtccacggagggttttatgtacaggttgaacatgacgttggtgaagatggtgaggatgacgagtccaagcgtcgagaacgccacgtatgtcggagaaaactctggcagctcgtcggctgatgatccccgcccagttatcatcgtggctcggtccaggtacggatctgtttcaagcaaaccatacatacacacatacagtaacatggcgttcagaaaggctgtaatcgagcggcagctgtaa

SEQ ID NO: 77161 - DNA, 357 bp, Zea mays
  Clone ID: MRT4577_170396C.1
gaagtacactagcaccatcttattaccaatgggagccaggattttggccctcctggccctcctggttttttaagaagcgccggtaccttgacttttatttcacaatgcgtcacaacaatacctctcttcggcgacagcggtgggatttcaatacccaactctacactcctacatggtgcacgaggccattcaagcaagcattttacggtcattagcattaaccctccaacaaccatatgctctattgcaacagccatccttagtgcatctgtatcttcaaagaatagcggttcaacaactacaacaacagttgctaccaacaatcaatcaagtaggtggtgcggaccttgctggtta

SEQ ID NO: 77162 - DNA, 905 bp, Zea mays
  Clone ID: MRT4577_170397C.1
cgattacctaagctacatattcatgttcctctcggtcgcaacatccaacatggtggccacctccttagccaaaaagttaccatacacaggatgaagaacttacacaacatcaagtgtctatgttactgtttcttgctcttgcttgtggcataggaatgtttttgttcaccaaggtgtttggtactcaagtattgactgcttttactggatctgggaattatgaacttatttcttcggccaatacatatgcacagataagaggtttcgcatggcctgcagttcttgttggcttagttgctcaaagtgctagtctgggcatgaaggactcttggggtcctttgaaggcattggcagctgctagtgttataaatggtgttggtgatatatttctttgctctgtttgtgactatggaattgctggtgctgcctgggcaactatggtttcacaggttgttgcagctttcatgatgatgcaaaatctaagcaataagggttttcgagctttctcatttacgattccatcagttagagagctattgcagatatttgaaattgcagctcctgtttttgtgacaatgacgtccaaggtggcattttatgcattgctcacatattctgcgacttctatgggagcaataacgcttgcagcccatcaggttatgatcaatgtcttatgcatgtgtactgtttggggcgaacctctgtctcaaactgcacagtcattcatgcctgagctggtatatggtgctaatcggaatctgaccaaggcaaggatgctattgaagtcacttgtgatcattggagcgataactggattgaccttgggggtagtagggacacttgttccatggcttttccccagtgtctttaccaatgaccaaagggtcatccagcagatgcaccga

SEQ ID NO: 77163 - DNA, 511 bp, Zea mays
  Clone ID: MRT4577_170398C.1
gctcctgccgcgggcctgctacgcctagctgagtatagtgcgctaaatgtaattaagtggatagctgtttacagcgtgaaatacgtgataaaactcataatgtcacacaacttaatagccttgcacatcatgcgcctagcgtgaggtggctaattagcgaacaggcccacatcgattgcccttcccatcactgtgcgctttctgaatggcaaatgtgacgcgccatgtagattaatatttagcgcaacgggcgtggagagtacgctcacctattgcgctacactttgcattgttctatcaccagctagattggctatatttgattgctttctcagcgacgtgtcgcctggatatactcgtaaaggtgtaaaacggtggcttgctttagggttccaatttactgctttatggcgcctaaagcccaaaatattaattagctggattgggtacgtagtgtgccactaccctgatatacggatcttcgcgctgtgacgattgagtaaaggttctt

SEQ ID NO: 77164 - DNA, 379 bp, Zea mays
  Clone ID: MRT4577_170399C.1
caaccccaagcaaaatgggggaaaaaaaaattgccaaaaaaatacccatttccaaaaaaaaaccttacttttttaaccaaaagctaaaaaaaaggcgttcactccaaaaaaatccaagggtgcaaacaacatttgttttttgaaccaggcccttttgactttttaaaaacaaccctaagtttttataggtttgccttattgaaccaccaccccctttaaagggaagggtggcccatgggggggctttttgggaaaccccaaaccccgtgcttaaacttgaaaaaattcaaaacttttggacccacacccctggtcttggaaactttcaagggggagccaaacccaccacggggccctggtaccttaataaaaatggctt

SEQ ID NO: 77165 - DNA, 645 bp, Zea mays
  Clone ID: MRT4577_17039C.1
atggaggacttgagtgcaatgaccacgacaactgtgatcagaaagattgcagcatttgaaatatcgcaaaaaatgggtcaagaggagccaacttcttcaaggccatatgcttttgcatgtgatgaaaagaagaaaggcaagaaaaaggctcccactccaagatccttaagtgaagaagaggaagaagaagaaagaaaaagcaaagaaagagaggatgttttgcatgtggggagaagggtcacttcagggacaactgtccaaatatgtccgaacgcacaaaaaagaggagcaaaggcaaggcattcacaagtgtcaaaacttgggatgattcttcaagcgaagatgatcctccatggtctcacagccaccaatcctcatcattcttatcacggccatcacacaagtgctctatggcaagaggataacaccactgcggaagtgaacaagcctggggagggagaaaccatggtttgtaggctatgctacaaggaatgccacaagtcttaccaatgcaaggtgaagaccgaggataagcaaaagcaaaagctcaagcaaaagccaacaagcaaaatctccaacacctacatcaacaaggtggacaaaaaggtcgctacgccatatttgatcaagaagaaaaagaattga

SEQ ID NO: 77166 - DNA, 767 bp, Zea mays
  Clone ID: MRT4577_1703C.1
cattgggtacctcgaggccggccgggaaggggattccaacaagtgactgatacagagatagagacgcgggaaaatgctgcgccacggggctggccgcatcatgtccgcgcgccgtcgctatcgaccagccgcgagtccgatgatcgccacatccgatgtgcccggggatgtcgccgaggactacacggtcgtcgaggcctggaaggaggttccccccaacatcgagccccggcgccgcccgtctcacttatgtaggcacgttctccgacgttagctaccattcctaccaaggtcaccgtcaagttcagtctccccgacaagtccgagatctacaacgtggacgccgacatgtcaattgtaccagctactatctgggcagatgagtgtgttggcggcccatgatgccacaattgcagagctcatcactggagtgtctcctcgctacactgaaggaaactatgtgatctcgtactttgtgaggaccgcgtcctgctttcgctcatgcgaactccattgctgatattgtgactgctgacggtatccactgtgtatcagatctacccatgatgtggttcacaaggggctgctctgagttcactgacgagctctgactccttctctactgacctgtagaaggatgacgtccagatggtagtccatgttcacagtgtcctccatgttggattgaccggttaattggaggcattctacattgtctagcctgtttcgtttacagatgtacagcgagcttaagtttgcacactcgt

SEQ ID NO: 77167 - DNA, 208 bp, Zea mays
  Clone ID: MRT4577_170400C.1
gctttcgttcgaagtccctcgattccgtgattatcgcatcaccgcctagagagtgagctggaatctatggttccgtctcgatttcttgttgatattaacgcccctctcgaggtagctaagatacgtgatacctgcatgggtaatgagacagacattcccccatccgctgcacaggctcaacgacggattacaggtaggatgcgagcga

SEQ ID NO: 77168 - DNA, 338 bp, Zea mays
  Clone ID: MRT4577_170401C.1
gggggcccccaaaagcccccttttttccttggggttaacctaaaacaaaccctggcgggggtaaccagatccctgggtccccaacccatgctggtggaacccggggtccgtgggggcccgggatgaacccggctcttactgacccaagggggccttggaatcaaaacccccggggggcaaaaacaaacacggcccgaacggaaataacccccttggggtgggggaaacaacccgggagcgaaccggataacttgggcgcgggggcccccccggttatttctcccaaatcccgcgggggttgccccaacccccccccccgttgcccccccgtttgcccc

SEQ ID NO: 77169 - DNA, 323 bp, Zea mays
  Clone ID: MRT4577_170402C.1
gggggctacccacacaatacaatttttaatgtaaaactgtagagcacagggaaacaagggggagagaaaaaaaacggcgggcgaacctccttttgatcgggagccattccaaacaatttgggctaactttcactacataatgaaatgaatttttgcgaacaacatttaaaactggatgatggtctggacactttcttaaacatggaaagaattttttactgacaatttcaggaaccatactcctttctctttctgggactaaccatatgaacataagctaaattttactggtttttttttgccctcctttacgcgcaaataca

SEQ ID NO: 77170 - DNA, 384 bp, Zea mays
  Clone ID: MRT4577_170403C.1
ggttgactgaaaggggggaaccccccaccctcctggttataccttagatgtaaccagggagggaacattatggaaccaatctaaacggggtggttgcctaaaccatttaggggtaaaccattttaaaaggggggggggaaaaaacctatgctcaactaaggtcacttttcccaaaaaaaagtattttaagacaacccactggttcatgattatccatccgggtgaaaattggcttaagctcaaaaagttgggctgcccgcaggggggacatcaacaaccttgcctacgggtaccgttttgcctttaggtttaaggggaaaccttccaagctgggggaaattagaaaacttttgtatggatatcaaggttttcacctgaatgggg

SEQ ID NO: 77171 - DNA, 286 bp, Zea mays
  Clone ID: MRT4577_170404C.1
gtatgtgatcgcctctggtttttgactcggggtggcttaagtaacgcatccagagtgctcaatatcagtgagcacatctttgctggtttcaactgtaccttacgtggtggcaatgttagtccccatgagtatattcaggttggtaagggccgtgatgttggcctcaatcagatatcgatggttgcagcctaggtttctagtggcgacggtgcgcaggcccttagtagggatgtctacaggcttggtcctagactggagttcttgcggatgctctcctgtgtttata

SEQ ID NO: 77172 - DNA, 198 bp, Zea mays
  Clone ID: MRT4577_170405C.1
attcggctcgagcgcacctgtgccttcggttattcctacttcaactggaactatcgctggggaagttgcaagacatcctattggacttaagcgcccaacagaatgaaggagaacaccgcacaggtcacgaaggcagacatgctttggtgcaaggttggtgaacaatcccgatcaggtataggaggggtgttagaaagc

SEQ ID NO: 77173 - DNA, 218 bp, Zea mays
  Clone ID: MRT4577_170406C.1
gggggcgaaagaagaaattgggaaagcccagttgatgaaccaaatgccgaactgataaagttaacaaaactgggttccgacctggtaatggtaacaggggtcataaagcaaacgggctccaaaattggacgtaaacgcataaatttaggggggcccaggactttggatctggcctaacgcaaggacagggctaacaaccaacttattttttttctttt

SEQ ID NO: 77174 - DNA, 323 bp, Zea mays
  Clone ID: MRT4577_170407C.1
atcgcacagggccttgtgctactcgctttctcctctaccatactttccctacagcccgggcgggttcacctaccctaccgtcactcgcccccaagcactatgccaatggcgcgccccgtataactgttcgcgagataggactagaccttgaagcctctaccccttgaagagagcgagagatgtatcaacaggagacagccattagagccactcagctggaccgcaagcggatcaaacacgcgcatgatacacacctactagaaggcagtctagttgccgtccacgtctagctcttcaaccagccagcatactcgaccacacac

SEQ ID NO: 77175 - DNA, 310 bp, Zea mays
  Clone ID: MRT4577_170408C.1
gattgccatttcatcttttttttggaagaaatgcccaccaaaataccgccacgtgctgggaaacacatgcccgaaggggggccccattcatgggtacactaacaacgaggtctaaaggagcggccccccacaactacaggggaccaaccttcacaagacagggtcactcaagccaaaccggtgaaacggcgacaatcctggcctctcagccaaggcagagcccaccgggcttccccccgagcggggattaaggcacggagctccgcggcaacggcccgccggagacgtcgaccaagtgcgctgggcggaa

SEQ ID NO: 77176 - DNA, 392 bp, Zea mays
  Clone ID: MRT4577_170409C.1
cacagacctaggccaagtcgtctcctcttccaccaccaagctcccgtctcttcccctcctggtctcagcgactccatcctctccctctccagatccccgttggctgttacctctccgtctcatcgtcctcaggccaaggtcttgatccgcgatccgccgatttccatccagcgcttagggcgctaagcggtgtcccatcacctgcgggttttgctgtgcggggaggctgatccggcgagcgccttggatgaattcgcgtcggtctcggtcggtgaagctggtgtcagcacgcgccaacggggatgtgttccaggggaatgggtcgcgggcggcgggatccgggggcacattttcacagcggcccacttcaaactctgaaggcgagcggggcg

SEQ ID NO: 77177 - DNA, 398 bp, Zea mays
  unsure (1)..(398): unsure at all n locations
  Clone ID: MRT4577_17040C.1
tatttttttttttagacactggaaattcaaatgcatttatttccacattttcatcatctgtaagggcnnnnnnaataccggtttcttatggtacaacgacaaacaagactctatcaagaatgaacgctcaatgtacagctctaacgttgaggggaggggggactacgtgggtacagcctcaccaagtgggggagatgaatcgtcaggcagcttagcgtccttcgctggtgcttggctcttgtcgtcatcatcctggaaaccttgcttaaagaggtcgcagttggttggctccagtgccttgaatggacgttctcctagtacctgtactacccaatttgtaaattgtaagatataatacaaagagagaaaacaatttctctttaagtttgacctttgtg

SEQ ID NO: 77178 - DNA, 397 bp, Zea mays
  Clone ID: MRT4577_170410C.1
gggataaccaaagataaccatggcccgggaaggcactttccagcggggaacataaaataaaaccgcaagccaggctgagaaaatctaaaagacaaatggtgggaagggcacacgggaagttcgacaaacatagaacaaaattaacagaattacatccaaggccaccaggggtttaaggcaacctcctgggctccctttaaaacttgagcagggggaggagggcaccctaaaaaaaagggcccttgacgttcctaaagaagaaacggttctgggcatccaaaaacttcactctgaccgggggaacctgacccctggggccgggtctggcaattaacttaaacaaaacagaaaggttaacctgggggtccatgctctcgcttttcccggggacggaggc

SEQ ID NO: 77179 - DNA, 863 bp, Zea mays
  unsure (1)..(863): unsure at all n locations
  Clone ID: MRT4577_170412C.1
tttggattgaagggagctctgcttccttccttcccgtccatcagttcccccaccaaaaactagggttagggttagggaggcggcggctgctttattcccgacgccgatcgccatggacactggaggcgcgccggagccggagccggaggaggagaccgtcgtcctccctcattgggtgatgctggaccgcaagggcaacaccctctgccacaacagtctagaagctgctcgtgtggctgtcgacaaggacaagaccgccgctccggtcgacatggacggcggcccctcctgctacgtggccttcaccctcgcggctcctcaaaaagggatctcctgcctcaacctccacttgccggagggacctccaattgccttagacaccccgcccgcctatgccttcctccgggcaaccgacaacaacctcgtcctctttgacatctccaacccgcagaaaaaagtcctcttcgacatctccaacccgagccagagttgctactgggagcccccggcagatctgttcgtctacaaggccggcggtcctcgcccctcggtgcagcggctcccaccctacacaatcgagagcaacatgccgttcctgatgggtttcgtcaccacaggcatcctgcggctcaaagatgaggatcgctacatcgttgccgatatcaatgtctaccgcggaaaaaatggtatgtgtgcccaactctgcgtcttccgctctggggctaaacagtgggaactcagccccgagatgcctgcccctcagccgcangaccagagcaatggcggncagttccccaacctctggtcaaccgacaatctgcttgcttttgccggccgttttcctgtgctgtgttgactacatg

SEQ ID NO: 77180 - DNA, 436 bp, Zea mays
  Clone ID: MRT4577_170413C.1
gaaaccggggcggaccacacccgtccgttggagcaccataaggtgccccagaaccaccgggcggagcagttggaaaaccgccgggaggaaggccggcccttgttccggcctaagggggaaagactacttcaggactgccctttctttccgtggccggatcaaccaattcgttcgcttaaaagccaaaggtttggggccggacttggggctttacggcctaaaggggatcaccagggttttaaagagcggcttaaacgcgacgccggtgatccagggcagaaggggccctttcgccaggtccttgctgttccagttttacttttgggcgggggggaacggaccgttaatggactgccccgggccgaagaagtccacttgttccagggggatccttttccaccctttaaagaaggggttgctaaagcagcagtttaac

SEQ ID NO: 77181 - DNA, 197 bp, Zea mays
  Clone ID: MRT4577_170414C.1
ccttccgcattgcaagcgatattagccctgactatactacatccacggatttgttatcgcaaaaagagaggcggcggaggtgaaacacatccccaccgcagctttacgtctgtccagatgtggccaagatggccaaggtcaaagcggacgtgccggtttcacccccaccgaagcggccctactgaataccatgcggt

SEQ ID NO: 77182 - DNA, 308 bp, Zea mays
  Clone ID: MRT4577_170415C.1
tcaaaggcgcgctcacgccacaaggaagaggccgagagacgcttgaaggctgcaaatgctacgctcgagtccgaggtttcggttacggaggacaagcgtaggaagtcattcacggaaggtgagaggctgtcacacgcactagctgcgcctaatgcggcaccagaggtacctgccgcacaatctaactccgagaatgagccagtcacactaacttcggtggatgtcaccacgacgttggcggacttgctgcccatcactgatttatccgacagcgagactgacatgctaccgtgtcggggttcagatcg

SEQ ID NO: 77183 - DNA, 584 bp, Zea mays
  Clone ID: MRT4577_170416C.1
cctgccgggattttccgatctccattactggagcggcaacaccccattcgaagcgcgcgacagagacgcgatgtaactgcacagatgggtccgaccacgcatactgctcgcaagttcacacaagggaaggctcccaataacgcatcctggccatcaatgctgcccgtatagctcttcccccaccactggtggagtgaacaagccttaccgctaccgccctgcaactgctgccctccgtgagatccacatgtattagaagaggcactgacctgctgatcagagaagctgcccttccagaggcgtcgaacaaggaacacagcacaggatcttgaaacctgattggcggtaccagatacatgctgatgcttgtcctccacgaggctgctgaggcatccttgttggcctgtttgaggacaccaacctgtgccccatccatgctaagccagtgaccaatcatgccaaaggacattcaactggcagagaggatccgctggtgagagggcctaacagccaccttacacatcgtgacaaatacatgaagcactgtggctatggttaatctggtaccattagaaggacatatg

SEQ ID NO: 77184 - DNA, 449 bp, Zea mays
  Clone ID: MRT4577_170417C.1
gtcatgcagcgtcatggctacattggtgagtttgaatatgtggatgaccaccgttctgggaagattgtggtggaactgaatggaaggctaaacaaatgtggtgttattagccctcgctttgatgttggtgtgaaggagattgaaggatggactgccaggctgctcccatcccgtcagtttggctacattgtgttgacgacttctgctggcatcatggaccatgaggaggcccgtaggaagaatgttggaggcaaggttctaggtttcttctattgaagggagtatggcgaaagcactgatgtttccaacaagaactcatctgagcttttgttttttggtctgaatagagtgctttgttaagattgtggaacgtgttgtgtgcttcagaaattgagaaccctgttatgagctatccctgcagttaattattatgacctatatgcctgtct

SEQ ID NO: 77185 - DNA, 2325 bp, Zea mays
  Clone ID: MRT4577_170418C.1
cctcgaggggccggcccgggaaaaaaaaaaaaaaggtaacgataaatcataaaggaattcgaggctggccggggacaagggcccaacacaacccaatccggaaccccaaccccacccccaccaccaagggtccaaagccatgcgtgccgccatggcggcggcggtcctccgacccacggccgccaccctccgcttcctctccaccccaccacaccagcgccgccgcgtcttggtcggacacctcccctttgctcgccgacgccgccactcctccaccgctacggccccagcgctggaggactccagcccccgcagtggcgaaggcaaggccgtgcgccgccgccgcgcccgtgaatctccccagggcctcctccgccaccagctcgacatgtgctcccgcaacgccgacctcaccaccgcgctccgcctctacgacgacgccctctccccggacaaccccatcccgctctccctccaccactacaactgcctgctctacctctgctccaacgccgccgctaccgactctgacagccatatctccgccaccgccgctcagcgcggcttcgacatcttcgccaggatggaggccgacggcgtccagcccaacgaggccaccctcaccagcgtcgcgcgcctcgccgccgccacccgcgaccctgccatggccttctccgtcgtccgccgcatggccgctgcgggcaccccgccgcgcctccgcacctacggccccgccctcttcgcctactgcgatgccaaagatgccgacggcgccaagcaggtcgaggctcacatggacgcatctggcgtcgtgcccgaggagcccgagctcgcagcgttgctccgcgtcaacgcggacacgggcaaggggcgatgaggtttacaggctcctgcacaggacgcgcgtcctcgtcaggcaggtctgcgacaccactgcccaggtcgtcgaggcctggttccggtcggacgcagcgtcccaggcgggggtggacagctgggatcccaccaaggtaaaggagggcgtcgtcaagggcggcggcggctggcatggccagggatggcttggcaagggcgcatggagcgttggctggaccgagatgggcaaggatgggacatgccaacgctgtggggagaggcttgtctgcattgacattgatccagccgagactgacaactttgcaaattcgctcaccgaactggccattaagcttgaggccagggaagatttcctcagttttcagagctggctacgccgccatggaccattcgatgctgttatagacgctgctaatgtaggcctttacaaaagtaaagatttctgtttttcacaggttaactctgttgtaaatgctatacagagagtaactaaatcaaagaagttgccactgatcgttttgcataggagccgtgtaaatgttggtcctgcaaaagccccatacaaccagaagattctggacagttggaggaatgctggagctctgtatgcaacccctcctggctccaatgacgattggtattggctgtatgcagctgtcagttgccgatcgttgcttgttacaaatgatgagatgcgagaccacttgttccaactgcttggcactagttttttccctaggtggaaagaaaaacatcaggtcagactaactttctccgggcatggccctacccttcacttgccgcctccttattcaattgttattcaggaatctgaagatggaagctggcatgtaccaacaacaacaggcgatgatattgaaaagccacggcagtggttgtgcactactagaaaatctttgaggtagatgtgatttaattttggcccagtcaagttgacacagaatggtgccaagttgccaaccttggtgggaactgggaagggtggtggcgtgacaaaccctgaaaccagcaaagcttaaatgcagcaacttgttggcccgaacgaaagaaagctgattggagtacaagtgatgaatatgagcaggccatggatatggaaagccttttgttgtaacatcgtgagctgtttattgctagcccaggttattctagagtagtttgagaaccgtggtaaggtaatttgcttcatgtgagttttacttttattaaatgacgtgccatgccagtgatttgaaggatgtggcaggcaagtaatcaaagaaagagatgaatgttatctaatttgtcattagcacacatacctaacctctggcgccccaatggtttctgacggactggtgaatggtgattgatgagggactgtgttgcaccgtgagttttggtgttaaattttcttaaaagtttaattaaatttagtatatttatagt

SEQ ID NO: 77186 - DNA, 432 bp, Zea mays
  Clone ID: MRT4577_170419C.1
aaaaccaaaatcggggggatttctttccacccggggggtacccgggggcccccatggaaccccaaaatttaaatttcgggcccccccaaaaataggggggcggggccaaaattaatcgggctcaaaacaaatggggccgccaaggggtttccgggggggggcggcaaaagggccaggcggggaaaacactggggaaagggggggggaaaacataatggggacccctttgcctaaaaaaaagggggcccccctttgggaaaacccgggggggaattaaaaaaccccagggggggggaagtataaacttcacccctttttgggagctttttcccccccccggtgggtaaaaagcccttaaaaaacccctgggccccaaatgacgggaaattgcccagggcataaaaagggggggcaatataaattagccctccc

SEQ ID NO: 77187 - DNA, 357 bp, Zea mays
  unsure (1)..(357): unsure at all n locations
  Clone ID: MRT4577_17041C.1
aattcccgnnnnncgacgctcactagtttttggccgcccttttttttttttttttagagtaccatcagatcagatgaaaattaaggcagtttgacactcagagtagcagacaagaagaggtctgctttcctcctagcagtgatccccatggtctcggccatgtccatctcagcaggaaggacgcccgccgggagactccagtcgaagtagaagagcaagctggcgagaccgagctcgacgttggccagcccgaacgacatcccaaggcagatccttcttccggtgcccaactggatgaactccaggtcgttgcccttgaaattccttggggcaccgacgaaccttttagggacgaac

SEQ ID NO: 77188 - DNA, 497 bp, Zea mays
  Clone ID: MRT4577_170420C.1
gcgacaaattccagtatccagtttgagtagacacatgtctggtttatttgttcccataagcacatattgtgtgctagaaatttaatcttaaaccccaagggtacttcccaagtgcatgctaattgctgcagctttttctgaacacagattttgacaaataattaatcttcacccaattacaattcttttacagcatctttgtcattcaataccggtgacacccccgagccaccagaagacaacactgtcaagcggtgagggtcatccttttcattggtggttaagatgcaattgtagccagaattgagaagacttgtatattgctgggctgactctaactgtctggtctggttttcaccccagaagggccttttttgtggtacatgatttattttggttcattaaattaaattgaggcctaggagaattacatactctgattttctttgggtgataaaatgcagaactctgactatctcatttggatttaacacaat

SEQ ID NO: 77189 - DNA, 577 bp, Zea mays
  Clone ID: MRT4577_170421C.1
tcgctggattcccccttacgctgaccaacgactcgttgccgggcggtgagaaccctcgagttggcgtgtgagctggcatggcgtccacgtacccctgccgactccctaaaccagacgctgaggcttgtggagtcttttactgaaaccagcaccagccaatatgttttgtgttggttcagactgtcttactagccgcaagcccaggagcggtggtgaggctacatcggatcttagacggcgcgtggtccgagatgcagacgcattcttgcgctggcgaaagactccttatggcgtcttaccagcatacactagcgagcggtgtttgtcaacctactcgtgtgcattaactagctcgattgaggtgatggcctggttgctgtcatatacagctcagtttttgatctctgcgcacaggctatggaccggaagagggatatgtccacgggggggagagtggtcaaagaattgttattatttgacgattccacactctctgcggatgagcacaaggcgtgcataatgttcaagaggacggacatgaccgactggaacaatatgaatattctaaactgagagg

SEQ ID NO: 77190 - DNA, 394 bp, Zea mays
  Clone ID: MRT4577_170422C.1
gacaacagataacatgatagggggggggtcactaagaaagtgcatccactggtgcacactactgtaattgtgagctgactccaatctgtgtgggccctaacggatagcatcagtgagatgaacttgaggttggatgcttacaggtacgcccacgggacaactgatgtagtaactgggagcccacttaagggttgaaccagcatcaactggagctgattgggatatatggccgggagacacgcctacgggggggagaaacctagcttggacggctccttgggcgacttccggaagcccgtgaaaaacgtattgttatacttgggacataaacagacatgctgacggtggtgaggatcttaaacaagaacccagacagtagggagcttgatgagcc

SEQ ID NO: 77191 - DNA, 500 bp, Zea mays
  unsure (1)..(500): unsure at all n locations
  Clone ID: MRT4577_170423C.1
gggataagaagttagatttgattgattgggaatgaagagtcaacagatcacaacacaaaactgcgtacattctatgaggaaatatgctggccgatatgtatgtacaccaggccaaattgcaaatacaacactggaaaacaaatacatgaccaccatgtatgataagagataggggctgcctgacttttggattattttgttgaccggacaatggacgccacgcaaatcaaatccaggggcttgaagaacttaggctgaacactactgcagatgcgcagaatataaagatttactggacgcagcgtggctagctcgtttcagctactgcccgagggacaccgagaagacgctccatggaaagaagaacattaacaggggcactgagcattgcttgaaagaatccccacggggtcattgaaacccagaacttgtaactgaataatgtgtgagaaataaagaatgcntctgaggaacattggaagtatttggaacacatatgc

SEQ ID NO: 77192 - DNA, 231 bp, Zea mays
  Clone ID: MRT4577_170424C.1
actgaatgctgttgatcttttaaagctactagatcaggaggcgccccttcgggcgccctatcccgcacaaggtaaacaactggatgctggattgaaatgattgtatcctaagggacatgcgacttactgctagtaaataaaattgttgtgtgcctaaaaaaaaaaaaaaaaaaaaaaaaaaaaaaaaaaaaaaaaagtacctaggcacgaaaccacactaagggaggtcct

SEQ ID NO: 77193 - DNA, 310 bp, Zea mays
  Clone ID: MRT4577_170425C.1
aaaaaaaaattcatttaaggaaacccagccctaaactttaataaaaatcttacgggaaaaaaaaacatcctacaggacatccccccaaaaaatttgggggcgggttcctaaaacaacgggtttattttttcgaaaaaaaaactgttttgaaaactcgaaacacccagggggggttttcccctcactggaaaggattcagggccccaaaaaaaaggaacctttacaggatccctggaactataacgaccctgggtttctaaaaggaacgagtttgtcctttgggaaaaaaattagggagggggtcccaaat

SEQ ID NO: 77194 - DNA, 321 bp, Zea mays
  unsure (1)..(321): unsure at all n locations
  Clone ID: MRT4577_170426C.1
naggnaattttacaccatcttccaacaaatcttgttaagaacgatgcaggcttttcatattttctgcaataattttatataaatgttatagctgtatgtattccaagagtcctttcaggaatgctgtacagattctcattttcttttctcgcattacagcaagagaacgtaattatctttttgtggtacgggaaacaaataatcactttgattgcaaaaaaaaaaaaaaaaaaaaaaaaaaaaaaaaaaaaaaaaaaaaaaaaaaaaaaaaaaaaaaaaaaaaaaaaaaaaaaaaaaaaaaaaaaaaaaaaaaaagggggg

SEQ ID NO: 77195 - DNA, 299 bp, Zea mays
  Clone ID: MRT4577_170427C.1
taattccctgttctacccactcttcctaaaaaaaaaaaaaaaaaaaaaaaaaaaaaaaaattttaaaaaaaaaaaaaaaaaaaaaaaaaaaaatgaaaactttgcggtctataaatcggactctccttctctcttgctctcctcttttcttacctctttctttcttgtcaccttactttcatttaattctccttcattttacaacatttttcctttgttaaactcctttcttacccaaataaccctcctttcaccccttttaacttacttcctcttcatccatctctattaattccctc

SEQ ID NO: 77196 - DNA, 639 bp, Zea mays
  Clone ID: MRT4577_170428C.1
tcaggccggccggggacgtcttcttccatgctgacatgatgccttccttcgatcctcttcccatgttctccatgacattctccctgacgagaagattaaaagcgatcttgatgatgtccatgatacgacgtcctacttcgcgcgatgccttctccctccactcctgggacccctttgagggcttccccttcggctccggccacagcagcgtctcttctactcatgcccgacaacaaggtcggcgacagcacccttaactggcgcgactcctagactgaaaggctactccacaagatatactgttcacagctcacctaccccggctgcataatgatccggcgaaggggcaccacgagctatcctgcaaacatcatagcaatggcgaacgatcccacgctcttgtctttaatacatgcacctcgtcaccgcgtggaacgatgcaccggaaaatacctgcgctagtgcctactgatataaaacggcaacagagaacacatcacggtccacatgaaggaagacatagttactcccactgcggcgagagaggacgacaagaagactgaagggaagccgcattaacatctcctgctactacttgctgttgatgaaaactcatcatgccagcgcggacgtgactga

SEQ ID NO: 77197 - DNA, 478 bp, Zea mays
  unsure (1)..(478): unsure at all n locations
  Clone ID: MRT4577_170429C.1
tttttttnnnnnnnnnnnnnnnnnnnnnnnnnnnnnnnnnnnnnnnnnnnnnnnagtacatctgcgtcggaacatacaaatgatactatataaggaatgtcgtttagagagagatgggggtgcagccaatgttaatatggccgttgaactggttgttagtgcagcacacgggttgctgagcgcagttggcaccctggccatttccaatgacggtgatgggagtgcaacccaaaccgacgaggccggtcacgtcactgagaacaatgcccatcaagccaaggaggctggaaacagcgctgctgctggcagattggacggtgttgcagcattgagcatcaccagtgttgcactgggagatggtggtgacagtcggaccaggagcagtcacggtgaccgtcttggttgggacggagttggcggcggcaaggatagcgagggaagagacaacggcgactttggagaacattgtctcgtgccg

SEQ ID NO: 77198 - DNA, 395 bp, Zea mays
  Clone ID: MRT4577_170430C.1
gcacgaggaagctatcccatggctccactgcatcgatccaccgccctacctgcacagcgcagcagcctgtgacacgaacgtagcagatgaagaagatgatgtccgtgtttagctggcaaccatcaccagttcaccaagcatgcttaggttctacttctacctgcagcactagctcattaagcgagcactatctgtggacgctggtgaatcaggcatcccattcatggagatgcggtgatcctcatgctgatcgcgacaatcttggagtgcccgtggaaatgtggtaatcctcattgcgccacgccgtgtgtccagtacgcctgcaaacgcatacatactagctagtagattcaggaagatggttgacgtggattttctggagggccctgccctct

SEQ ID NO: 77199 - DNA, 330 bp, Zea mays
  unsure (1)..(330): unsure at all n locations
  Clone ID: MRT4577_170431C.1
ggccgcaaattttttttttttttttttggggggacacctgaaccggcttcgtttcacaggcttaattggacctggattccgaaagaaaagggtagcatcatcgatctaaacacgaccatgggacaaactcaatctggacgcccaggcgaggggcaatggcgcatgcagcagccaccggacctgggcggggggggggcggaaccttccgtgttgcagcgcacatcctggcggcggggggcgtcctggcggncctacgggacagcccggcgcgtgcggcggcggcgtcgcccaacagcgggcgccggcgtcagcggggcccccgggccgcct

SEQ ID NO: 77200 - DNA, 264 bp, Zea mays
  Clone ID: MRT4577_170432C.1
acgcgctggcaccgttactgtcacagctgccactgtatctatcgggcgtggcgatgctgcatatgggggcagcgtgttatgaatctttgcaagaaagctacaatactttccacgctgaagctgacagatgcgcgtggcaggtgaattggccggacatcacctcgggtctgtagtccatggtggaaacatgcactacaacacagaggtagcacaagcagaaagcggtctcttgtacatcgagatgacaatgtgaatattgcaaaa

SEQ ID NO: 77201 - DNA, 112 bp, Zea mays
  Clone ID: MRT4577_170433C.1
cttaactgcgcataaataaaggtctgaacatatttgtgctagagggcttatatcctacgtgcactccacttgtagtttctggactcctctcgctcgtctgatctaccctccg

SEQ ID NO: 77202 - DNA, 2168 bp, Zea mays
  Clone ID: MRT4577_170434C.1
cattgggtacctcgaggccggccgggacctggactattgcgctcgtatcttcttccttgtgcgcgtgcagccgccgtgcttgcgggttgcggccctgcctctctcctctccggctctcccaccggccaccggccaccggccgccaccgtcgccgccatgccttttcgattccagttcccatggctcaagaacccaactacaaacggcggcacctccaacatagacactaaccctagcccccgcttccccaaccccttcctccctatccaagcccatgtcacctccttcctctcctccttcccccgggcgctcccgccgccgccgccctgggcgcgcatcacctcgccagcctccacctccggggccctacctacctctgagatcgaggagcggctcgccggggtgcccgtgtacgcgctcgccaacgccgcccaggagttcgtgcttgtgtcgtccacacgcgtgggagggcaagggggcgagagcgtgagtccaacgcaggcgctcgggctgctctgcttccggaaggaagatgctgacgcgctgctggagcagatggatggcgatatgcgcgccggctctggtgtcgttcctgtcgcgctgaacaaggttatccaaatgaagtcggatggtgtggcgtttagattcctccctgattcatctcaggtggctaatgcaattaagttgatgcaagatgaaggactgtatgccggagagggatttccaggagtgccagtttttcagtcaaggagcctggtcttgatgagtgacaacaagagatatcgtccagtttttttcagaaaggaggacttggataactcactgcaccggacctcccgtgatcagcaaaaacctaatcctgctgttaggtttggtgacactcaggtttcttctttggaagatatcattaaatctatgaaggatagctcctcctcaaaatgggatgatgttgcatttattcctcctggatttgaccttgctactggctcgacaccatcacagctccgcaagtagttcattctttagaaggaaaacaacctacacatcactcttcactgaagaactgtagccatcttggtcatcataatacttggaccacagcatgatccctccatatttccctgagctcttgatcaatggaagcacctgagacttgaggtcatcagctggtataaaaccactcccagctgcctgaggggaagccgggaggccaagaaagatctgcttcgccggaattgacagccactgcttccatgcatcagcaagatcagtggtgctgcctgaactgtactggcaaggagggttgttgtagaactgcacccagacgtagtcaaacaggccggtgttgagcgcaccaccaacccaggcatcaggaaacgggcattgaggtgcagcggtcaggtacaccctcctgccagagttgctgtaccctttcaagtattttgcaagatcatcccagtgctggtttgtgccgccttcgatgtcgaagtctatgccatcaaggactgcatcacccaaggggcgggaagatgactgaccccccaagaaattgttccacaagtacgtcgcaacatccttggcgtccgcggctgaggaaaggtagtagctgcccgcaccgccgccaatggagagcatgaccttgacaccgctgctctggcacgacttgatgtcgccgctgaggcttgcgcagccgccgtttgtcgggtcacagtggcctgccaggttgaggacaggaggctggccattgccaaaggctgccaggaatgccaagttgacgaacctgtagttgccggtggcgcaggtgtcggccagtgtgccctcgccaccattctgaccccagtatatggaaatgctaccagcttgtgacccaacagtctgtgcaacagctactgcaatcagcagcagtggcaccagcgatgatccggttgccatgtgtggtgattgttttgctctacctgcagtggtgattgttttgctctgtgttgtgagattaggatgcaagggctgctctatatattaggcggattggaagtttgaaaactggttactgccattattgtttatgatcctgcgtgaccttttgggagttggactgtaatttcttttgattgagtgagactggtgaacacatctgaaaggattcggttggcaacttcacagttcagatg

SEQ ID NO: 77203 - DNA, 521 bp, Zea mays
  Clone ID: MRT4577_170435C.1
ctgtcccgtcgagtgcctagctgactgatacgagacatagatgactactaactcggcgtccttcctcctccgagtcaccagcagatttactccctaccgcgctgccgcagctacgaacgtggtcgatgtcactactaccccgcggattcaacacgaaggctccgacagagctatcttctatgatgagctgctgagatggagcgacatgactgagatgagcgagatcagcatatcacccgcggagaaaaaacaagcttgtgctattccactaccacagctccgatacccttggcattcacatgctcacgacggtgtctctctgatactgccaggatatgaaccttctcatggattccatgtttgctcagcgagcactcttagagcgtccacaggtgacgcagaaccgccgcccccaccacatgaccaagtacttaatataccattcactgatcattttatgaaacacccgcctgtggtgcgtgcgtctgaacgtattacgaatgatgcggacgcactacaac

SEQ ID NO: 77204 - DNA, 210 bp, Zea mays
  Clone ID: MRT4577_170436C.1
ctaacaaagataatatctcatcgaggtgggcggctggactggtgcggcgatgggatgggcgatccctgagggttgttggataccgttccagattgtcccatgtgcggcgccaaggctctgcatgtactggaacatctccgccatcctctgctgatctgccaagcgggcctccttctccacctcccgctccgctatcatcctcacctccat

SEQ ID NO: 77205 - DNA, 297 bp, Zea mays
  Clone ID: MRT4577_170437C.1
aggaaaccttttttcatataaaaaaaacatttttaaggttgggaaaaccaggctttaaagggtaaaaaaaaggcattttacacaatattgcctaaaaccaaaaccttaaaaattaaggaagaaacagggaaatggggtcctaaaaagagcacgggttaaaaggttattttacaagaatagacttggtaatttaagggatgatccgggacgcccaattttgcttatatatgggcacctttccttaaagggaccacactttttaggggggacacctatggggggaacacagggtttttt

SEQ ID NO: 77206 - DNA, 349 bp, Zea mays
  Clone ID: MRT4577_170438C.1
gcgtaaggactccagagcgccgagtatagccacgaggatggcgatgaatgaaaagacgatgctgatctactgttcatggcttaacttgataatattaatttaataaggggatttgacttgtacgttctcatagaaatcagagtgtcgtagaaacaattacggtctgttggcaatgtataaaaactagaataatcatagccgagcaagatactttatgatggaaaatacatatgaacctaaacatgtaactagttttgatgtcaaaacatattatttgccagttaactgctactaaatcatatactagattgatatttctttgttatgatcgttggaggtgttaaacttt

SEQ ID NO: 77207 - DNA, 478 bp, Zea mays
  Clone ID: MRT4577_170439C.1
ttgtttcacttctaccattttggcattcgtggttcgagcaagcaccaaaagtggtccatcagtgcttcctacggccttcgtttcaaggaccgattcttcttcagtggatgctgacagctagacatcccgaaagtcatctgaagagtagctcggcacatgtagcctcctggagtcgttgacaactcagtgccatctgaatcataggacaactgaagcaaagtgaggtagtaatggaagaagaattgcaaagatcaggctgcttgccatcatatatatatacatgggaggaggaggaataattgccaggtgccacacaagatcggcctaggtctgttatatgcaatgtccatggtgttaatccaaaatttattgaggtaggcaagccaaagttgaggcagctgtagaatgtgaagaaagccttcacagaatgggcataatacatcaagaagatggtatggagtaaggtgtacagtgagca

SEQ ID NO: 77208 - DNA, 185 bp, Zea mays
  unsure (1)..(185): unsure at all n locations
  Clone ID: MRT4577_17043C.1
cccacgcgtncgcttgattaattaattgagcattcaacataaggacacaattattttcactacacaacaaccaacaaccctgaaagccaaaattggaagggaaaaaaaatcttaatttctttggttaccaaaatgggtgggtcaagggaatgccggccttaaggtcttggggaaactttttagct

SEQ ID NO: 77209 - DNA, 226 bp, Zea mays
  Clone ID: MRT4577_170440C.1
agactaggggaatctaggacacaacctggggcggtataaccaattgtcaatagcctagagttgccggtagcccttcatacttataattttggcgggcaaaggtgttaggcgtttgacccccccccggacgtgtattccacaccttattaacatcagacctaataagtgagagttattcttgtgcactatacctaataaattctatgcacctcactcagatgtctat

SEQ ID NO: 77210 - DNA, 152 bp, Zea mays
  Clone ID: MRT4577_170441C.1
tccgcctataacttatgtgtgtatcggtacgttatgtctccgtctgttctctttctcgtgagcaagcaacacatggctggccgggtggtcttgcatttccattgcataatatgcttatgaagaatgctttgttaatatgattttacagtcct

SEQ ID NO: 77211 - DNA, 178 bp, Zea mays
  Clone ID: MRT4577_170442C.1
ccttccaaagatagggagcttgcaaatgttgctgctgttagggcggccatcaactacgaaattgctaatatgataacacatgccgtgagcacggttggtcggaaggtattggttaccctcgtacaagggaggagatctgaacactttctctatgttgtggaggggatgcagtttgatc

SEQ ID NO: 77212 - DNA, 125 bp, Zea mays
  Clone ID: MRT4577_170443C.1
gcgtctgactcaaacgccgctcccgccacctctctgcgaccgtcgccatggggaccaaggcctgcgagatgcaatcgccaaatcacgactacgccatacccgaattccaggtatcgccgtggtgt

SEQ ID NO: 77213 - DNA, 328 bp, Zea mays
  unsure (1)..(328): unsure at all n locations
  Clone ID: MRT4577_170444C.1
aaattctttttttttttttttttttttttttatttcgcgnnncgnccacacnnnngggggcgcagnnnagcnccacnccagcnccaancacaggcgngaccagagcgcgagagctagctngagggccgngaaatgccgatcantnggatcgccctggggnngccccnggaggtgttccacccgggcgccctcnggcggcgttcgctgggtgggggggggggcctctcttcnnnttcgccggcccgggctccggggtggggtttggcntgctgcccggcggcggtccgtcttcctcgtgcggcctggtcgcggcttttgtggttttcgt

SEQ ID NO: 77214 - DNA, 1529 bp, Zea mays
  Clone ID: MRT4577_170445C.1
ggccgcttttttttttttttttttcaccaacattttgcagcggaaatcttattaccaaattttacaagttacatcaagtttacattgtacatgatcggagtaattgcactaagttttgaatgtataaacatttatatgtttaaaatatatgctagattaagtgaccatccttaataagaagtatagaagaggtacttagacttataagaaggccgagcccaccagcacttagcatcatccttagcaacagacttctattttcgattcttcctcctgcttgggaaccacctttgcacaaaagtagcaaaactctgtaggctcttcacctgggacaaacactacgttagtgtttgttagacgacgcccgcttgacgaccatcttttgttcttatacttgtttcatctgtccatcttcaggttaatccatcaacttcatcttgtggagaagctcacgctttccaacatcttgtggtcgactcatttctggtcctcatcttgtggtcgactcatttctggtcctccgcatcacgtgattaattatcgtacctgatgtgcgatgtgctgaaaccctttttttatcacaaacatcctaggtgcctcacctgttgtaggaatggcagagggagacatcggcgaggagcgatagatggcgcatcggctatccatggcgaggtcgacaactggtcacacattttgtcgaacaagtggtacacaaactcaaacctaggaatgaacgcgagctagagtagcacagagcgcggccaaatatgacatctgcactgacgtgctgagagggggaggtcgtaaatgagttgaggctcgtccaggtgattatggagcacagaggagactcgcgaccagcacgatgtcccgatggccttttctggtgggggcgagacgagcaaggccatcggaggtgcttgggagagaaacagggtcgagcagggagtaagacggatgccgcggccagagggagtcaaggccgacggcgtccatggcagagggcatggcgagcgccagcagaggaggagcgccgcgagagctttccggcgaggtcgcggtcaggtagggagctccatggcgtggactgctccgcggccggatagctgccacgacgcgcacggcaagagggagccgagggcgcgacgattggagctccagggcgtgcggcggcgagcagagaggaagcggctgccaggcaccgtaggagatgggcgctgagcgagcagaggagacggggggcgcgacgcggcactcggactgggcaccgacaggggtaggccaccacgcagaggaagaagatggccagcacaggaacgaggtgtggagtggagagcgccgacacagtgagatggaggaacgggtggggaaagggctcggctgggaagaagcaagtcttcggcggcgggatttgcttccaggaactgagcggcggcaggaaaaatcaaggggaaagagagatagcgacggccgacgggataaggaacaaaagctctggccagagctcccttcaatccaaacccggccgg

SEQ ID NO: 77215 - DNA, 261 bp, Zea mays
  Clone ID: MRT4577_170446C.1
ggaagtccttcaaatattttaatgatggcagttttgaagcaacagaccttttttacacacaaaattcatgtccagaatcatcaaggacagttttaaagatatccaaccgttaacatcgccagggcaataaaaacacaatagtgtcacacttataatgtgacagagtagacacactcacatcacaaagggcaaaaagaacataaaaaatgggtcaatcccaggttggaactgcatattaaacataaactggcctaagctggg

SEQ ID NO: 77216 - DNA, 273 bp, Zea mays
  Clone ID: MRT4577_170447C.1
gttcggggctgttactttttcttcttctttccttacttccgggctgggtggccttcatgctgagggagaaaacgactttgcttcaaccttcctttaaccaaacctgggcaacaaacaaggcgcctgggtttttcactcgtgtgacgaaaaagaaaaaaaaagcctgcacctaaatggggccgaaaaaaatcctattcaaagaagttcttcggctaggggaggaagaaaacttagttgggggctgttaaacattgtttggccttccctttggcc

SEQ ID NO: 77217 - DNA, 442 bp, Zea mays
  Clone ID: MRT4577_170448C.1
gggtacctcgaggccggccggttcgcgaagtgctcaggcttaagatcgccgggaacgtggcgctctgcggcggcgtcccgcagctgggcctgccgcggtgcccagctgctgctgctagcgctagggacacgcaccgtttccgtctgcttcttcgggtggtggcgcctgtgctgagcgtcgcactcttgtcggcggcaatactgctgctcgccattttgcagtgttggtggaagacgacgaggcaggcgaagaccgcagcgccggatgttctcgagggcaagaactaccagagagtgtcgtacgccgaactggccaaagccacgaacggcttcgcgtacacgaacctgatcggcgcagggaagttcgggtccgtgtatctgggcgccctgcccctgacgacaacgaagacgaagagcagggattcagattcagagcccgatag

SEQ ID NO: 77218 - DNA, 365 bp, Zea mays
  Clone ID: MRT4577_170449C.1
atcattattatggttgatcggtacttttttgaggaaggcactatactaagtgttgtgtggggtgggatgaatatttagtctggtcccagaaaacgacacaaaagaaagaaaagctaccaagcacagacaaggagaggctgtcaaaggacacaaagcgagcgggacaagaaccggacctgcgccccaggaagaaaaccgcttgcatctgaaagctgaaccgctggaaggctcagaagaagctaagaacacagaagctgaggtcaaagagccacctatggagactacgcgcaaactggcgcatcaccccaacaacgcctaccgtgggcatgaggggaagaacatcgcacatgtagagaaactgcaag

SEQ ID NO: 77219 - DNA, 305 bp, Zea mays
  Clone ID: MRT4577_17044C.1
gtcgtactaaaccgcacacagacaagcagacatacgagagttgatttgtacttgacatgacgaccgtgacaataaagctcactatgccactggaggtgaacgctgtcaagtataacatgcgcaatgaatatccagacaatgacgaatactctgctatctgtatgtctgactgatcagatgacatagctcaaggagttcattgtgtttccattattgaaacccgtactatggtttactgtaggaactaagcactatagggatatgatactatacagaactgcaggcactgtgaataccctatgcgc

SEQ ID NO: 77220 - DNA, 299 bp, Zea mays
  Clone ID: MRT4577_170450C.1
aggaaggccatgtcctcacctcgaagtactccatctacaactttgtgcacatgctcaagtgcttcatgccggacgacctcaacctcagcgtcctccgcatccttctagcgctcaccgcgctcgccaagccactagacactgtggtctcggtcatcagggagaactaccgcggccattctatcatcgagctcatgggctcaccaacggaggtgctcagcctcgccgcgacaaggctgctcatcaccctgtctccacacattggacacaccatcgtagagaggctctgcaagacacaagga

SEQ ID NO: 77221 - DNA, 1543 bp, Zea mays
  Clone ID: MRT4577_170451C.1
atggccgcaggagctgcctccacgggcaactggtcgcgtgcgaccggcgcaatgcgtgcggccatggtattgtgggtttgtttggcttacatgcgcggtgtgtgcgaggactggtcgccattgcggctgctggtgctcttggtggcggcgacgctggtggcgaggtggttcctaaacgccgtgcggccgcctccctcgacgccgtgcggcacgcccgggggcccgccggtgacggcgcccagggtgcggctgcgcgacgggcggtacctggcgtacgcccagtccggcgtgagcagggacagggcgcgcttcaaggtggtgtactcgcacggcttctccggcagccgcatggactcgccccgcgcttcccaggagctgctggaggagctgggcgtgtacatggtggcgttcgaccgggccgggtacggcgagagcgacccggacccgcggcggtcgccggagagcgcggcgctggacatccaggacctggccgacgcgctgggtctgggtgacaagttccacctcgtctgctcctccctcggttcccacgccggctgggccgccgtcaggtacatcccgcacaggctggcggggctggcaatgatggcgccggtcatcaactaccgctggcgcgggctgccgcgggggctggcccggcagctctacgggaggcagccggtcggcgaccagtggtcgctccgggtcgcctactacgcgccgtggctgctgcactggtggatgagccagccgtggctgcccacctccaccgtcgtcgacggctccgcgcccttccccaacgcgctggacgagaagaaccgcgtcatggcgctctccaacggcatgttccactcgagggcgaggctggcgacgcagcagggcgtacaggagtccttctaccgcgacatgacggtcatgttcgggaggtggacggacttcgagccgacggacctcgagaagccgccgtttccggtgcacctgttccagggtgacgaggacggcgtcgtgcccgtgcagctgcagcggcacatatgcaataagctcggctgggtcagctaccacgagctccccggagctgggcacttcttgtcagcggtgccaggactcggcgacaggatcctcagcacgctcctgtcctcgccggcgtcggcgtgactgatccacgactcgcacctagcaagtactagactactagtacatgactgatgttgctgtagctatgtctccaaagcattgctggtcgctgaagaaaagcactttatatgagcttagactatctctagcagatttattatcacatctcatatctcactctctatttcaaactccattgtacaaacagtacaatctacagtacaaaacaatatttttcccaacgttctggatatggccttagcccctactggtgttgtaccaagaaaccgacgagaaggcacttttatactccctccaatccaaaatagtagtcgttttagctctaaatcatactcaataaagaaaaaaaaaaaaaaaaaaaaaaaaaaaaaaaaaaaaaaaaaaaacaacc

SEQ ID NO: 77222 - DNA, 316 bp, Zea mays
  Clone ID: MRT4577_170452C.1
cccacgcgtccgcccacgcgtccgcccacgcgtccgcccacgcgtccggtttgttatgcgcactggagaaacaaaaatcagcgggctgttaaaactgttaatgagacaataaaactcctgctgctggacagtaattatgagttagatgtaccttcatcaggggtttatttacctctatgatattacatagtataccttgtacatcagaatgatacaaaacaataagtcccaaaaaggaaggtgagttaaaaaacaaaaaaaaaacaaaaaaaaaaaaaaataaaaaagaaaaaagaaaaaaaactaataaaaatat

SEQ ID NO: 77223 - DNA, 563 bp, Zea mays
  Clone ID: MRT4577_170453C.1
cttcagaatacataacgattagagcaaaaccaaaacctgccttacaggcaacaaacgggtatgtatatcacgctcaaactatatagcctgcatctaatagcctagcagcagaattcccctatcaaataggtacaagggatcatcgatccatagttcgttcaagcagcaaccagaagtagaatcgcatacctgcgcgcgcggaattgaacaggagcaggacccagatccggccatcaacggcccccacatcacgggggtgggggagtggaagcatggtaacacgacgaggagcaggacgagcaagggaacgccccacggcgagctgaccttggcggggccccgctcacaacggcccttaaagcggctcttcctcgggatagaagcccaggtagacctcgaaagagacatcggaggacatgcagcggatgaggaggacgagcgcgaaggacacgcccagcatagcccaactcagctgctgtgacaccttgtccattaagtagtcccacgtgtagtaccacgaggcgcccaacagtggcgttaccatcagcagcaccagtatcacc

SEQ ID NO: 77224 - DNA, 725 bp, Zea mays
  unsure (1)..(725): unsure at all n locations
  Clone ID: MRT4577_170454C.1
ctcgaggccggccggggtttnatacaataacctgatcgataccnttttgaatctgacacattcacatacttctcaaaatgttctcaagacaagcaacacagaatgcacgctttgctgctcgctgtgcgcgtcgcccggctgctcgcgtagcaaacccccagtaccgtgcccaacacccacgcttccagtcaacccagacagtcagctccggtaactcgggggccggtacacatgccgcagttggtgctgcttccggtgctcttgccgccatcacagtcggctacatcttctacagacaatcgggtgctagggacgttgtcgcggcctccaagactgcacaaggntacgttaagtcggcttcacaaaagatcaaggagcagacccccgagccaaacgaggcgctacaatggcttcgccaagccgctcagagttatgctgcgttcatccccggtggcaagagctacgttgactctgcctttgatgacctcgatgccatacgggcgaagcaacggcgacgaagtcgacagcattgtacgcgaagcatacgatgagaatgcgacagttctgggcaagggcgacatgagccttgtcactgcacaccaaacctgggacgtcattaccaagcacatgagccggattgcagacctcgccggtgacgcttcacagcaaaatcatggatnaccacccacaactgaaggagaagttgggcgcaacatcgacaagct

SEQ ID NO: 77225 - DNA, 294 bp, Zea mays
  unsure (1)..(294): unsure at all n locations
  Clone ID: MRT4577_170455C.1
cgctcccttcctcttcccccggccacgcacttccccgccccccgaccccggaggcgggcaccggcggnccccacactccgaccctacacgcgcaaatagcccgcctgcatccactaggaggatccccgaagagctaggagaagcgtcgatccgcgaatacgccgagcgcgcaaaggcggactgtgtccgacggctcaccactgccctgctgggggggtgggaccttgacacacccaatcggccaaaagccctcgaggaccccgaacgcctggctagagaaactggttgtaccgc

SEQ ID NO: 77226 - DNA, 176 bp, Zea mays
  Clone ID: MRT4577_170456C.1
gttctagatcgcgagcggccggccctttattattacgctgaacccaacggcgactatttctcccaatatctaaggcgccagaattaacagccccgggaatctttgaaggaacgtccaacttactccagggtcctagaaaggggctttggtcgagggctggaaatgacaattggtcc

SEQ ID NO: 77227 - DNA, 483 bp, Zea mays
  Clone ID: MRT4577_170457C.1
gtcgccgctgcacgctatcccgctgacatctatgcgcctcaccacgccatggtcgtgcggaactgctccagtttcctgatcaagagcaatacgcagacctacagcactgagcccaataacttgaaggcccgcaattccttccgctacaacggactgactcaccgcaagactgtgggcgtggagccggcagccgacggcaaaggtgtcgtggtggtcattaagcggagatccggccagcggaagcctgccacctcctatgtgcggaccaccatcaacaagaatgctcgcgccacgctcagcagcatcagacacatgatccgcaagaacaagtaccgccccgacctgcgcatggcagccatccgcagggccagcgccatcctgcgcagccagaagcctgtgatggtgaagacgacgcggacccgctccaccaagagctcctgagccccctgcccccagagcaataaagtcagctggctctctcaa

SEQ ID NO: 77228 - DNA, 176 bp, Zea mays
  Clone ID: MRT4577_170458C.1
ttttataattacccttttggtataagttttgcaatatgtgtgccatttaaatgagtgaacggggtttttcaccagggcccggagccacagacgcaacaaggcccacgatgcatgataccaagtccagcaaccaagttcaaatgcctcctgtgtacaaaaagactttaccccccaaa

SEQ ID NO: 77229 - DNA, 363 bp, Zea mays
  Clone ID: MRT4577_170459C.1
aataaaaaaaaagaaaaaaaaaaaaaaaaaaaaaaaaaaaaaaattaaataaaaaaaaaaaacactagccattaaaaaaaaaataaatggaaaaactaaaaaaaaaaatataaaaggaaatgcataaactaaaaggcccaaagtctgggctttaaaaaaacccagggtttatttcaatttatttttaaataaaattccaatttcaacaaatacaactttaaatggaaaaagaaacaatgtaggggaaaaaatcaaagaggggggggaaactaacttttattaaaattatacccatgccaaatgcaaaacccattaaaactaagatctaggccacttacaccaaaggccaaatcctgaacaaaa

SEQ ID NO: 77230 - DNA, 766 bp, Zea mays
  Clone ID: MRT4577_17045C.1
tcccgctcactgtccttgtcttctgttggcagacaatgctgtcgtcttgcagatggggcacaagttcttcaccatcagccattgcttcacgcactccgcgtggtacctgtgaccgcagtcaagggtgccaacgcagtctcaagcctggtactcctcctggcatattatgcaaggcatcattctctagagaagatttagatggctgatcagacatgctcgatattcctggaacatataggctagtcctcaatttatctacaatgtgactttttgtcagaccagtattgacatctccaatctgctcttctaatgctaaaagctcctcatacgtcatgctgtctatatctagacgcatatctctatgctcatctacagtatttgacacttcatacaatctcgaaaaatccattattgtagcatgctgctcgggtggtagaatccttatgttgcggtggttaactggatttgccaggaacggatgctgtggaggcccaaaagcacgttcagaactggtgaagagaactggatttcgtggacctaattggagacggtttccagggtaattgccccgtcgcgttttaagtcgtctgcaaaggattcagcacgccgcccgttgggaagggagcttcgaggcggcccgccgcggcgcgtcggccgggcgggctgagccaatggcacgggcccttggggcgcgaacgcccttacgtgggtcgcgtccgtcggctagctgaggcacctttctgctagcttcggattcttgacttta

SEQ ID NO: 77231 - DNA, 743 bp, Zea mays
  unsure (1)..(743): unsure at all n locations
  Clone ID: MRT4577_170460C.1
caggccggccgggagaaagggatttgctgtccgtcactatgcaggagaggtggcttatgatacttcgggttttctggagaagaatagagatttattgcacatggactcgattcagctccttgccaaatgcaaaacttctctgccaaaaatgtttgcatctaagatgttagttcaaccagatgattctatgtctgttccatatagatctagtgctgctgattctcaaaaactaagtgttgccatgaagttcaagggtcaactgttccaacttatgcaaagactggaaagtacaacaccacactttattcgttgcattaaaccaaataatttacaacttcctgcaatttatgaacaaggacttgtgcttcaacaacttaaatgctgtggggttctcgaggttgtccggatttcaagatctgggtatccaacaagaatgactcaccagaagtttgctcggcggatgttgcatctcaaggtccactncagtgtttcagttgcaattcttcatcagttcaacattttacctgagatgtatcaagttggtacacaaagttgttcttccgaactggacagattggcaaacttgaagatactcggaatcgtactctacacggtattctaagggttcaaagctgtttcagggggcatcaagcccgtcatcatgcgagagaacgaataagaggagttttggctcttcaaacatgtaatttctcccaagattacctgaaatattttacctttta

SEQ ID NO: 77232 - DNA, 478 bp, Zea mays
  unsure (1)..(478): unsure at all n locations
  Clone ID: MRT4577_170461C.1
acttcatccaacccaaattaacagtagcccgctgcggcctgcgcgtgagcgatgcccgccgcggcattcgcctccgcgttcgcgtctcctcctcctccgtgggccccacgaccgcctcctcgccacgccagcctccgcctgcccccgccaaggagcagcagcaacaacagcggcggcggcggaggggacaagcccaccacctcgtgggtcagccccgactggctgacgtcgctgtctcgctcggtgctcggccgggggaacgacgactcggggatacccgtcgcctccgccaagctcgacgacgtgcaggacctcctcgggggcgcgctcttcctgccgctcttcaagtggttccgcgaggaagggcccgtctaccgcctcgccgcggngccgcgcgacttcgtcatcgtcagcgaccccgccgtagccaagcacgtcctccgcgggtacggcacgcggtacgagaaggggctcgtcg

SEQ ID NO: 77233 - DNA, 652 bp, Zea mays
  unsure (1)..(652): unsure at all n locations
  Clone ID: MRT4577_170462C.1
atggctttcttcttcttgaggatgttgcatctcaagatccactcagtgtttcagttgcaattcttcatcagttcaacattttacctgagatgtatcaagttggctacacaaagttgttcttccgaactggacaggttagttctatttattcaattttctgccaatggccacattagaaactaaatctattgctttcattacatgtttatagaccattcattgtcttggatttttatctatatatgtatgtactattttatttttgttttaagcatttggtgaaactaatcttgtgttactttgtccttcgatattgggctgaagattggcaaacttgaagatactcggaatcgtactctacacggtattctaagggttcaaagctgtttcagggggcatcaagcccgtcatcatgcgagagaacgaataagaggagttttggctcttcaaacatgtaatttctcccaagattacctgaaatattttaccttttatccttgttgaatttttcctctntaagtttactatatggaatggacccacccttaacttgcagtcattcgtggtgagaaagcacggcaaattattcctctttgttgaggaaacatagagcagcagttattttgcagagtaacttgagatgttggcttgc

SEQ ID NO: 77234 - DNA, 601 bp, Zea mays
  Clone ID: MRT4577_170463C.1
acggccctgtatgcgagcacgcgtggttatggggccacgctatactatgatatttagaccctcctgggctgagtctatgctgctcatacagcttcgggctgcaggaagggtgtacgttgccatgcaccggactcagaatgactaggtctgtgttctatacttgtctggaggcgtaggtgctcctgaactcgcctttcatgttagtgcgctcccttgaaggtgagagaacactgacagcgcaagccatagctcatgaccagtactacccctctttggtgctgaaagctgacgcggattatgctgacagcctctgtttaaccgcggaccgcgatgggctactatcatctggcggaactcggctcataggaactgtgagctaaaaccatggagaatggcgtatgactcactactctagaccgtgtacacagtgcccattttctcgctatgctcgagatgcttcaagatcgatggatgatggcctggctccctgagtctgttcgcttgagatcccaccattagatagatggaccatagtgcatagtactgtgcagtaggaatggcatcaccgaccgtttgcttgtaatgaggacagctgaaagtt

SEQ ID NO: 77235 - DNA, 367 bp, Zea mays
  Clone ID: MRT4577_170464C.1
gccacgcgtaccgaaacaatagcccgggaggctctgacctattatgagaatccacctcgcaccctgttagcggtgactttcctagagcttagtcgcgccgtcgccgaccacaaaacaacacatcgctctgtcgatctcagccatggcggacgtggagacgaccgatgactcgatgaagctctctatccgctgtaccttcaacgatgtgcatgtgaacgatatgtcgctgaacgactacctggctgtgactgcggggaagcacgcgacattcctgtctcactacgcggggcgctactccaagaagcggttacgcaaggcgcagtgcgccatcgacgagcgcctaaccaactatctcatgatgcacggt

SEQ ID NO: 77236 - DNA, 383 bp, Zea mays
  Clone ID: MRT4577_170465C.1
ccgaattcgcggccgcgtcgaccaaggtatcatatgtactggagatcagaatgtctctcaactgagcagccgaacagctgtaaatcaagagggattacagcactagttaccaaaggatagctaaacattaacgaagatacttttcaggctattctcccccttttcagttgctgcagacctgcaatcaaagaactaaaaaaatctcaccatgtgctatcctacatctggctaaggttttcctgtaacctaaaccgatttaactttgtagaagaacatcacatcaagtgacctctatctccatgatgcgatcgtctctttgaagaaaaaacatataggctggaattggctaccttggccagccagttatccaagtccctctcacc

SEQ ID NO: 77237 - DNA, 592 bp, Zea mays
  Clone ID: MRT4577_170466C.1
aagggtaaggggtcctgattaaaaaaaccacagttcccattggtcccttgttttttggccataaaagctaacccatgtaagctggggttgtcatgctgttcagggtttaacacaaaccttttaagctttttcaccagggggggggcccctgggggatttattttttggcaggggttgttggcccggcaggggacattttttccaggtccctttccaaaaaatccaggccgaaaagttttttgacgaggggcattggccccggcccgtcctttttaaacgggaggggaaattttggtggaccagggcaaaccgaaaattccttccggggagttttgggggcccccctttttggccagggccccggggcatttaaaaaaagcgggggctccccggatgctttgaaaaaaaggacacccttttggtcacgggcccttttgatcaactaaacgttaaactgttttgggagggggtcccccggggggatcttgtccccccatgggccatcggggatgaccaaccccccagaggtggggggggcccccccggtgggaaagaagcctactccttggatgaaggccccttccacctggcc

SEQ ID NO: 77238 - DNA, 1328 bp, Zea mays
  Clone ID: MRT4577_170467C.1
ggcacataacttggacaattctcattaatgtgcaaaaaccttgcctgaaggacaactgatgttcacgatcaagcatttcaaaaaatattattcaatccaacatcgggcctgtttggatcggcttctggccgtcagaatcggtttctggccaccaaacgcttcgcttctcagcccgtttcatgaaggcatgaagcagctcagccagtgatcatggtgcctgtgccctcgtctgtgagaatctcaagcagaagagagtgtggaacacgcccatcaatgatacttgcggtgtgtacaccttgtgcaagggcgtgaacacaacactccaccttgggtatcatcccaccagctaccttcccgtcagccaccatcttccgcaccccagcaatgtcgaccaccttcaccaggctcccagggtcattacggtccgccaaaatgccagacacatctgtgagcaacagcagcttctcggcgcccacggcagcggcaatctcgccagccgccgtatcagcattgatgttataggcttgcccagtctcgtcggcggcaacggtggcgataaccgggatatggcccgcggcgatgatgggatggaggacggtggcgtccacgcgcgaaacctcgccgacgaatcccagcgccgctgcatttggagacgggcgagcggtgataaggcgcgcgtccttgccgcacagaccaatggcggtgcctcccgcgatgttgatgagggaaacaaggtttttgttgaccttcccgactagcaccatctcgacgacctccatggtgagcgcgtccgtgacgcggaggccgtcgcggaactgcggctcgacgccgacgcgcagcagccaggaattaatctccggaccgccgccgtgaacaagcacggggcggaggccgacgcaggagagcagcacgagatcgcggatcacggacgcctgcagctccggggacttcatcgccgcaccgccgtacttgaccaccaccgtcttgcctttgaatcgctgaataaaagggagcgcctccgagagcacgtccactcgactcagcgacgcggtggcagcggcagccgacgaaggagacggcgcagccgtggatgtggcggagatgcggaggcggctgcgacggcaagtaggggcggcaagggggcttgcatggttggagctgagagtagggcccgacggcggcggggatgggactggaaggagcgagttggagaggtagggtttcgtgaggagcatggctgcggtgactggggctcgagctcgagctcgactcgccgctggcgttcgacgaaatgtttagaccgaaaggttttctcgaggtacccaatg

SEQ ID NO: 77239 - DNA, 228 bp, Zea mays
  Clone ID: MRT4577_170468C.1
catccatttacgcatacaactgtacgactaccattataaccaatgccctcccaagtaaccaatccattctatcgattccattccaactaatcatccattagaaaacgtcctattctaaccataaatataactcaaacaaaccttcatcatagacttaacctcattcttctcctcaacaccaacctggtcctcatctacgaactctcctcaataacactgaactccttt

SEQ ID NO: 77240 - DNA, 150 bp, Zea mays
  Clone ID: MRT4577_170469C.1
tcgaccacgcgtgcgcgggcccaggtaacgctttaacgccacgcacgcttgtttcccggcctgttaaacggccccaacggcctggtctttgccggccccaaggcgtggtcccccttccccttcaacggcggcggggtctttgcgggccgc

SEQ ID NO: 77241 - DNA, 319 bp, Zea mays
  Clone ID: MRT4577_170470C.1
gccaaggctccggccacgcgtacgggcaagcgtccgcagcgcacatcgggtagcaagacacctaacattccagtgggcttaccgttgcatggaggcatcaggaggatgcgcttgtgcgtatcggcgacgttcattgtgctcagcgtcggctctgcagcgcacgggcgtcgagcatgcccccgccggctgtgggcatgaacaagtcgcgtctagagaatgcgtacgtggatctggaggcgctgaggcgcggcatcacggacgatgcgaagaagctgacggagaacttgtgtcggccgacagtgtgaactacgtcgggtgt

SEQ ID NO: 77242 - DNA, 610 bp, Zea mays
  Clone ID: MRT4577_170471C.1
gcgatcgtttttttttacttttttttcgcctgtatggccaatgggacttttatattgtgcaaccaattgagacccattttaggcacatgaatccacctccgggcctcagcacttgagagaatcctggaccccgatacttatgccagcttcattacttccaagggaacatccaggcgatttacaagccacagtgtatggctacaacactccaaaaccataacgatttcgtgtttgtcggcgctgctaatgaaactgacatgtaaggtgcgaatagtaattgcgggcaaaacaagctgtggtagaatgcctttgaccctcagacagggaaaggcacgttaagacaagggcactcacagaaatccatccaaaaccacacccggaaatgtggagctctattatcccaaatttggatggacattgcagatttcatcatgctggcttaaacacagtggctgacagaaacctcatttccctccaatcttatctactcggttgcggtctacaacgtgggacgaattgtgggaggaattggtcggacctccggccactagagaatcaacataccatggtgcgttattttgcgcccgctggacatggataccatgagaaa

SEQ ID NO: 77243 - DNA, 341 bp, Zea mays
  Clone ID: MRT4577_170472C.1
aggattcggccttagcttttttttttttttttttttttttttttattttttttttttttttttttttttttttttttttttttttttttttttttttttttttttttttttttttttttttttttttttttttttttttttttttttttttgtgggggggtttaccatgcatttacggggcccatttcaccctatgcggcggctgtttccgtttctttgcaccgtgtttttacacacttggaactgcctatcccctggtctttccgatttttttcctttcccaccccgtccgtcttttcccattttctttcatcctatagggccccggctcgctccctttt

SEQ ID NO: 77244 - DNA, 1136 bp, Zea mays
  Clone ID: MRT4577_170473C.1
gcccagcccagccgaccccccggacacgggaagccccctcacgccacgcgacatgggcaagatcaggatgcccgtgccgtccctgttccgccgccgctcctccaagccgccgccgccgcagccgcagcagcaggcgcctgccgcgggcgacggcgacggcagcgggtcccctgagcgggcgattctcgaggccggccgggccccgccgtcatcaaccagcagcacctccatcgaatcttgtaggcaaagccaataatcaatcaccagcgacatcaattccttgcccgaccgcccggccgcgcgtcgaggaaccgccgcacagttccagttccatgggcaaggtgcgctccttcttctgccgcgcccgcagcggcaagcgcggcggctcccggccaggctcgtcgtcctcgtctctctcgtccccgtgcccgtccgcgaggagggcgtcgccgccggccggggacgagacggagcgcgtcttccgcaagttcgacgcgaacggcgacggccagatctcgcggtccgagctggcggcgctgttcgagagcgtgggccacgcggccaccgacgacgaggtgtcgcgcatgatggaggaggccgacgcggacggcgacggctacatcagcctgcccgagttcgcggcgctcatggactcggcgtccggcgacgccgacgccgtcgaggaggacctgcgccacgccttctcggtcttcgacgccgacggcaacggcctcatcacgcccgccgagctcgcgcgcgtcctgcgcggcctcggcgagtccgcctccgtcgcccagtgccgccgcatgatccagggcgtcgaccgcaacggcgacggactcgtgtccttcgacgagttcaagctcatgatggccggcggattcggcaggatcggtgcctaggaacaaggattctgccctgctccgctccccacaaaaaaattggattcatttcattctatgtacatatatgccctatagatcacactggaatcacggagatgtttcctaggtccagattatttgcacgcccagcggcagcacataaaaagcccccattttatttgctagtttggatgttcaaacggattgttttggcttcatcaattgcaatattgagtttgcgccggttcctgg

SEQ ID NO: 77245 - DNA, 391 bp, Zea mays
  Clone ID: MRT4577_170474C.1
cccacgcgtcagcccactcgtcctggaggccggcctgcgcgcgctgggccagagctacttaggtggcggcggcctcgatgggttcgcggccgcgcgtgccacccggctccggcgccagcgccagcgccgcatggccgccttctgctccctcgctgttaatggagatgggaatggcgcggcgggtggccccgtggggagcggcgtcgaggtggcgcgcgccaggaggatgctccatgtcgtgctcgtctcgccgctgataccaggaaatacagggtccattgcaaggacatgtgcagcatctgcagttggcctgcatcttgtcgggccattaggctataaggtagacgacacgaagttgaagcgcgcgggataggattattggccatacgtt

SEQ ID NO: 77246 - DNA, 1054 bp, Zea mays
  Clone ID: MRT4577_170475C.1
gggcgattgggaatcccatcgccgggccggccgggacgcggccctcccgctctcctccctcgccccgcccactcgctcctcatcaaccaccagtgcctccaccgaatcttcaacaggcaaagccaatcaataatcaccagccacatccacatcaatccattccctttcctctcccgctccacttccatgggcaaggttcggtccttcttctcccgctcccgcagcggcaagcgcggcagcgcccggagagcaggctcgtcctcgccgcactcctccgcggcgagcgcgccgccgtccccgtccccactcccgaggaggtcgccgtcgtcgtcgtcaaccaaccagggacgagacggagcgcgtgttccgcaagttcgacgcgaacggcgacgggcagatctcgcggtccgagctggcggcgctgttcgagggcgtgggccacgccgtgaccgacgacgaggtgtcgcgcatgatggaggaggcggacgcggacggcgacggctgcatcagcctgcccgagttcgccgcgctcatggagtccgcgtccgccgacgccgccgccgtcgaggaggacctgcgccacgccttcatggtcttcgacgccgacggcaacggcctcatcacgcccgccgagctcgcgcgcgtcctgcgcggcctcggggagtccgccaccgtcgcccagtgccgccgcatgatccagggcgtcgaccgcaacggcgacggcctcgtctccttcgacgagttcaagctcatgatggccgcgggcggcggcggcggattcggcaggatcggtgcctaggaacaaggatcctgtgcctgtcctgctctgcctctgccctttgctccgctcccacaaattggatttctttcattttatgtatgtacatatactacactggaatcacacggacagcgccacgtaaaaaagacccctttttcatttggtttatgtgtactatacaatgcaaatctgcatccattgtactgctatggatgttcaatggaattgtttcggctttcatcaattgcataaaaaaaaaaaaaaaaaaaaaaa

SEQ ID NO: 77247 - DNA, 170 bp, Zea mays
  Clone ID: MRT4577_170476C.1
ctgacatgcatgcaagtcgccggccgcagagaagggagatgcgcaggggacctgacgagcggggggccctcacgggccgagccaatggcacaccctcttggggcgcgaacgccttaacgtgggtcacggcggtcggtaagcaaaagatccggatgtttgcctgagcggtg

SEQ ID NO: 77248 - DNA, 332 bp, Zea mays
  Clone ID: MRT4577_170477C.1
agacgcgagagggaggagccaggggcaccgccagcgccgccggggggaccaccatcggggcccgcgctgcgagcgccaggaccaatgctcgagggctgccggggccgagggcgaggagcgagagggagcggcgcagctacgccaaggatgacaagaacgcgcgcccagggagcacgaagggcgcaggcgcgccggtgttctccgcatcgagcgcggagataggttaaacttggcccggcgctggtgctcgagaacgacaggatgtcctcgtagggcaccgagttgatactcgtgctgaggaacaacctgatggggaggagactcctgagggt

SEQ ID NO: 77249 - DNA, 336 bp, Zea mays
  unsure (1)..(336): unsure at all n locations
  Clone ID: MRT4577_170478C.1
acgactttttggggaggcccccccgaaggggggggcggggccgcgggccaccggcccgccgcgggggcaagcgagcgccnccgcgcagacgcgacnccccgagccaggccgccggccggcacaggggcggcgggacccagaacggccgagaaccccggcacagagcggcggccaaacaancagcgggggggggggcngcnaacccagcagagncgcccccgggaagccaacagcggacgagccaggagggcggggagacgggagcacnccaggacccggaggggagagcggaacagcaccgcggcgcgagcgccgaaggggcagaggacgccacgc

SEQ ID NO: 77250 - DNA, 367 bp, Zea mays
  Clone ID: MRT4577_170479C.1
tctaccatggcatcaactctctccttggcagaggggcagaaaatttagagtggcgatgcaactaaaggctatattacctatgcatgaaaagaccaagagaaggtaggtggcggagcctaatgcgcaagacgccgatgactttaatatctgactcacaacctacattggacccagctatgaataaagggctccttatatcacctagtcagaaagatagtacatatttggtgctatgtccagtggttctgctctcacattaacacacaacatacgtgacatgaacataataaactaggtcggagttcagtaaatatgcaggtatctcacagttatggaacaggctttagtagccataccttaaatagat

SEQ ID NO: 77251 - DNA, 186 bp, Zea mays
  unsure (1)..(186): unsure at all n locations
  Clone ID: MRT4577_17047C.1
gtcagggtcttgcctgccaatctctacacagcataggccgcgcnacacgtgctctggtctccangtccgattcctcaggctggccttgtngccatgggggcaatgccaacccccacaagtgggtgcgacacctaagccacagcgacgcctatgtcattcggatctgaggctccccaaacgaggaca

SEQ ID NO: 77252 - DNA, 665 bp, Zea mays
  Clone ID: MRT4577_170480C.1
catcgccgcccactccactgcctgttcatcctagcgtcgtgctccgcgcgtgccctacagtgcaactccgtggacaggcaacaagcaatcggcgttttcagatgcgtaagcaggcctttctacagcccctgcttcaaaatagcttgctttatattctgtagattgcatcaaaagaataggtgtttttagcattatgttttccaaacgggattaacattgtacttgccaattgtttgtatcatcaatcttgtcttttcttggtggtaccggtacgtgcaagaattatcatctatccaccatctatccaaggagtgatactactttgcattaagacgaaatgaagaaaatttatgagagcacattggaaatgaacaatggtagtatttcagacagccacaaaaagcgaaaccatatacacgatgaaaagtagcaagcttcagatacaacgatcaggtttaacggagcctgaaagcgacgacgagtaaatcaacgtcattttcatgaagaaaactgccttgcgtatttgcgacgaacattgtcacttttgaagcgtggatgcttttatgtacataaccaggctgatgaaactactttagcttagtatctgtttatgtgatactcatctctgctttactacctatgatgaccatgtcacttttggagcg

SEQ ID NO: 77253 - DNA, 551 bp, Zea mays
  Clone ID: MRT4577_170481C.1
aacaaaaaaggaaagggggaaaaataaattttttttctttccccaacccaaccaaaaaggggggggaaaaaaatttttttcctaaaaccaaacccccttttagggggccccccaaaaaaaaaaggcccttttgaaactttttccgggggtaaaaaaattttgccaaaagttaaaaccaaaacgtggggccaaattacgggtagcaggcaagggcttccaacaggaaaacccgctgggggggggaaggacaattttttggggggaggctggaacccctatttggcccaaaaaaaaacctttgaaaaaaaaaaaaaaaaaacttttcaacaggttgggtaaaagttttcacacaatgggggccccccctttttgaacataggtcccccccccttggaaaagcggggcaccccacttttgggccctttttaaaaaagaaccaaaccccttttaaacctgggggaagggacccccgccaagaaggccccccctttttaaggcccccccacccctgtaaacccccggagggaaaaaattgcccgcagggggccccc

SEQ ID NO: 77254 - DNA, 1034 bp, Zea mays
  Clone ID: MRT4577_170482C.1
ctccaccacaccgctccggtgcccgcgcaggcgcgcaccacgccgccacccatcgtcgtcatgcgcccgtccagtcgcgcgcagccgcagatgccaccgccggcgcgcctgacgcccgcgcggcggctccgcgtggacgtcgaccgcgcgcgccgtccccggtcgagggacccgtggccatcccccgcccgtagcccggcgtcccccgctcggcgtggctcgctgtccccccagcgccgtgtctcgccttcgcagtcaccgaagcagcagcagcagtctagtttcaggaagacgagcggtttcgactccgccggcgcccgcacccgcattgcgcgccgcgcggcgtacaacggcattgccttgtcccccgacgacgaggcctcgaccactttctccgacggcggcagcagcagctccgcctcctcccgctgggacttcgacacgcagctggaccccaggacagaccgcggcctgctagagcggtgcgggaagctgctgagcagcatccacgcgttcacccgcggcgacgcgtcgggtgcggaccagcagccaagccccgtgtccgtgctcgacgcggcggccttcctcgcggacgaggactcgccgtcggcgttgtcggcgtcgaagcgagcgatcgacttccgcagcagcagcgtcggacacccaaagccggcgtccgcggtgtccgacccagagcatgacgagtacgtggacccggaggcgagcggctgcccggacccggactacgcgtacgtggccgagctggtccggcacctcggcggcgctcgtgcccgtgcccgtgacccggccgccgcgtaccgcgccgcggagcagcgcaggcgcgagcgcggcggcgaccccgacacgtggcaccttcggcggctgctgtgcggcgcggtgacggaggcgctggagcggcagcggtcggcgtgcccctgggagccccgggcgtggctccgcggcgccaagctcgtgggccacgtgtgggccgaggtccggcgcgccggggagcccgtggcgccttgccgggtccc

SEQ ID NO: 77255 - DNA, 269 bp, Zea mays
  Clone ID: MRT4577_170483C.1
gggccttagggaaaatcccggggggaccatagctagaatggcctgggttctcttaacacaaaaaacctaatccaaagggcaaaaaaagggttgccatctcaacaattaaacatgacaacattgaaaccaaagttgaggttgcttaagttttaacaggaaccctttcagccacttgggccagaacacgcctttcctgggaggggatgggccggccacccttgggatcgacacccatggttcccgttttctgcaatttttggtggaagttt

SEQ ID NO: 77256 - DNA, 185 bp, Zea mays
  Clone ID: MRT4577_170484C.1
cgtcagatccggaaatcttgctggggggcattattaagccccaggtcgcgtctcaacctcaaacgggtctccatcgacttctaccactgactagcgatctacgagctacgccttctcatactacaccggtagatagtacaacaacactcgaacgatgcaatgagcaagcgccgcgttctcacata

SEQ ID NO: 77257 - DNA, 551 bp, Zea mays
  Clone ID: MRT4577_170485C.1
cgttgctgtcgccgttgctgtcggcgaaagaaatgtgaaatggacggaatatgtccagaaatttccatcggcagcaaaaggaaaaagcagagaaagccaaagaagaaaaacaaacctagcaattcagaaggtggcccacttgccagggtacgatggttcagagttgtgcttgatgaagctcaaacaataaaaaattaccggactcaagtgtctagagcttgttgtggactgagggcacaaaggagatggtgcttatcaggaacacctatacaaaacaaaattgatgatctgtatagctatttctgtttcttgaagtatgaaccttactcaaaatttagtaatttcaaatatatgatcaagcaccaaattactagagattcagttcgtggctataagaaacttcaagctatcttgaggataattctactgcggcgcacaaaagaaacacttatagatggggaaccaatcttaaagctgccaccaaagacaattcagctgaataaaatagatttcacccaagaagagcgagctttctatttgacacttgaaga

SEQ ID NO: 77258 - DNA, 1834 bp, Zea mays
  Clone ID: MRT4577_170486C.1
cctcgaggccggccgggccggggaagcacagaccaagaagtgccctccactttgtaagctcgtttccgaaaagagctctagagccgccacacacacacacaccatggcaccgcgttctctgctggcagtgctcgccgtcgccgccctcgcgttcttgcacgccgcctcggccaagtcgtcgtggcttgacaggaggttcaccacggacggcaccgtccgcacgggatacgacgattcgggccagcaggtggtgatgctccgcctcgaccagcactccggcgctgccggcttcaactccaaggagcagtacctttacggcgagttcagcgtcgagatgaagctcatccgggggaactccgccggcaccgtctcgtgcttctacctctcttccggcgacggcgacgggcgcgacgagatcgacatggagttcatgggcaactcgagcgggcagccggtggtgctgaacaccaacgtgtgggccagcggcgacggcaagaaggagcaccagttcgacctctggttcgacccctccgccgactaccacacctacaccatcatctggaacccgaccaacatcctgttcaaggtcgacgacctcttcatccgctccttcaagcgctacgccgacctgccgtacccgagctccaggcccatgacgctgcacgccacgctgtgggacggcagctactgggccaccgagaagggcagggtcggcatcgactggtccgacgcgcccttcgtcgtctcctaccgcagctactacgccagcgcctgcgtcagcggcggcgcgtgccgggccgccggcagcggcgggtggatgaacaggcagcttgacagcgccgagtggggcaccgtcaggtgggcggagcgcaacttcatgcgctacaactactgccaggatgggtggaggttcccgcaaggactccccgccgagtgcgcccgccactgatatgcgtccgccggttaattcttcgtcgatccagcttggcgtcgtttgttctttgttttgttgggtattctttttttttctacgggtatatgattcttgctcttctttgtggatttgtgattaaaaagcagccctgcagctagcaacgtgtgggcggttgttgtacacctagcttttcctaaaccgaagcatgtattttatttttaatcgtgcctttggatacaggcatgcagcatatatagtattgttgtgagtcgtgaaaattattttttttcctagtgatcactgagatgtataaatggtgaactttaaatctttaatgctaatcaaaaaaaaaaaaaaaaaaaaaaaaaaaaaaaaaaaaaaaaaacatgaacattggtttgtttgtgtccccgatccgttcgcgcggtcgtaccgtccgtcccacacagtgccttgccctgcgccctgccctgccccccccccgacgatttcttgcttcctgttcctcatctaattaatcatcaatggtgtttgttcgtcaccgctgttcttgatggatggatgcacaggacagggcaggacagatgttgttgccttccattccatgtacattttgccgcacatttatacactactagtgcccttgaatgttttcttctttctctctgtgtttttctttacggtttgtgagatttgttactgaaagggagttcataaagataataacgtgaattctactgtactacatacaccgtgaaaacaaaagggaaggcaacgttgtagtatccgttacaaagcaacgacacctaacacatggtgtcagtctcgaccaggtacgaacattactatactaccctgtcgattgactccgatttgacctgctttgggattcggtgcatc

SEQ ID NO: 77259 - DNA, 307 bp, Zea mays
  Clone ID: MRT4577_170487C.1
cacacacatccgaacacgcgtccgatcttaacctatatccatctccatgggggtgcccttatatttgatccagccaagccacccatcctcatgtcggactcgcaggagcaccacttctacttgaaggccgacaccacactcgacaacacctaccctcacgagaccggcaccgttcacaagaacgacttcatccccatcaagaaccggcccttcaaagttgtggagtttcctactctcaaagactggtaagcaatgtcatgccaaatgccactttgtagacatagatatatgcaacggtaaaaagctc

SEQ ID NO: 77260 - DNA, 630 bp, Zea mays
  Clone ID: MRT4577_170488C.1
gattgtctctttagcctagagaagcgggcggcgttgttgctttctctctctcctatcgcggcgcttcctgatcactctcaacagaactgaatgtttcagacgtgtcaagtagagattggagagaacgcggattgggatgatggactacgggggctcgatagtggtgacttccctccagaactgcatacctacctcacaccccaataccgatttgttggtgcgatctacccttgatgacatcactgcccaaatcatgtctcgctaaaatagctgctgatagtgaattcttgcttcggcctactcgcctgagatgacactgtatggactggaacgtggtctgaccaactatgcagctgtctactgcactggccttctgtcgtctcgcctggtgctcgagatcggatgcgtgtgatcaagatgtactatgggcaatagccgacgtcactgtgggaagacttctctgttgagccaggtgatgatatgaggctattccgtagctctcttgcatggtggacttatcacgactacttgacttatccgcggctctgccgtcctcactgtaatcttgcaggggggactgtatattcctcacagcgatatgaggcttgctggattcgatacatgacaacg

SEQ ID NO: 77261 - DNA, 304 bp, Zea mays
  unsure (1)..(304): unsure at all n locations
  Clone ID: MRT4577_170489C.1
tccctcgaggcctccggacacgagtccgactccagagcttggtcaagacgacttgaatcagttctctcccgtttcctccgcctcgccctcgtgtcgtgtcttcctcccccccctccccccctcgatcgccgctccggccatgacgaacgacgggacgcagagcgcgcgcggnggcaggaggtgctgctgcggcacgctcacgcgcgcggacctcctggncttcctggggggggggggcgctctgctccgcgtcctactgcctcggcgtctgggncgncggccgcggggcggccggctggggggg

SEQ ID NO: 77262 - DNA, 397 bp, Zea mays
  Clone ID: MRT4577_17048C.1
cgcacgcgtatggggtccgggcggctcgggtcggcttggcgaaggagcagcaccggtctccttgtctccagagactgagactgtacgagcacgaacagacccgcggactctattcgatccagatccagtgcaacatgccgacgagggcagacaacgcaactcttggacgccagttccggcaggccgagatcatgcccctgaagcggctctaccgttgtcctgctggctggagcgctcgctggctgccggagcttagaacctcacactgactactattgtctcattgttgtactgtctatggacgcacgtatcgaccataggatacttccatgtgctgatattcactgttgataaggcttgcatgacgcgcttggttgaaaagttgaagtgcttctac

SEQ ID NO: 77263 - DNA, 358 bp, Zea mays
  Clone ID: MRT4577_170490C.1
gggggggaaagacataaaatttaatcacaattcatctggggcgggatcaacaacagaaggccacacggtacattttagccaacggtccacaccagcaaaacttggcggctaaagagacggggaaaaaaccttagcttaggagccctcaccaggaatttatttactaaagttgcggcagcagggagggagcgacctctggactctgatcccacagaggtgcccccttcagctggtcaaataacggggaagttcgagaaatatgttcatcagggtgccaagccccccgggggaaaacttgccccccaacagggagcagggcccctttatgccggtccacacccacgggctcctttgggct

SEQ ID NO: 77264 - DNA, 176 bp, Zea mays
  Clone ID: MRT4577_170491C.1
gtaacaaaaacacagtataaaccattcggagaaagaaagggagaggaagatatctgagataaatgatgaaaggagtggatcattggcacatacacaattcaaagatccctgtgggttttaagattgggcaaaaaatattgaaaagccatgtaaaaaactatttgaactacaaaaga

SEQ ID NO: 77265 - DNA, 438 bp, Zea mays
  unsure (1)..(438): unsure at all n locations
  Clone ID: MRT4577_170492C.1
ctgcacgcgtcgtaagtcttgttcctctagacggccggccttggttgggggggggggtttaaaacaaatgcgtttttctacatgttctgtttatgaagaagcccatcgtgttcgttggtgcctcgttgtcaaggttcgtcccgacggttacaagccttcactcttttttggggcctctttgtgtggtggggggaacgtgcatgcggtgttctgggcctgcttgcngttctcatcctgattgatttgctccacctctgatattttttgtaatttttttttccttcttgcctggttggtttgctttggacccggcggttgctccgagtcctttaatcttgttgtgctccttcttctcttttcctgttctttcttgtgtttttcttgctttctttttcttccaccctttatttgtttgtctgttcattttttggtcctggt

SEQ ID NO: 77266 - DNA, 556 bp, Zea mays
  Clone ID: MRT4577_170493C.1
gctttaactgagcgcacgcagtgcctgccaaaggctagagaaagaaaaatccgccttgtactggcaggcggagggcaggctcagacctgcactgtcccctgctgaggatgttgggcgtcggggatctatgtctgtcacagctggcggagcccatggcagccactcgactcagaggggcacaatgtgatcagacaaccttcaccgagaatacaggctcgtcacgggaagaagctttctgctgcaaaaaacccggctgttcactcctccgtactctgatacgtcctgtgagggcactgctgactttaaggcaaggacgggatccagctcaagaggccatcagtatgctcaccaaagcagaagcatggttgcgcgttattcactaacatgcgtaagcaaaccacgtgtgccatgaaagaatctggatccgccttcaaagctaaggagggtaaaaaactctcttaatttgccacatcagcgacgccgaggccaatgacgttaatttctacttagcccatgacgatcctatattctatcgctggcacagggcattgcatac

SEQ ID NO: 77267 - DNA, 769 bp, Zea mays
  Clone ID: MRT4577_170494C.1
ggccgcttttttttttttttttttgataatcaaggccagacacagtttgagttcctgtataacaaatcagtaaaaggatatagctgggacaacaaatttggcctacatctggcaacgactctatgatcaaacactagggtacatgtgaattgatgctctcgatttgaaagtctcggaaaattgtacagtattcctccaaatggatttgctggccaccaactaggttttgcggtaggctacagtggtgataaactgagttgcagaaactagtcagcatagaatgtcaaggatctacgagccgattttccatatccccagtccataacctactttgatcagcaggagctcgaataccatgtgcatgatgctcgtcatgcgcactttggatccaggtatctcggtccaattaacggatacttctaccattgggatcctgaggcgcttgcacaggtatacaagttcaacatcgaaacaccacctcttcaatctgatatttgtgaaaagcttccttgcagctgctcgtgtgaacatcttaaacccacactgtgtatctttgatcccgggaccagcagtcaacaaaactaccaaatgaaaactgttgcaagagcctgcttctctagatgagcccgggaaccaaaaacagcaacttcaacatcagatagattctgagatgaactagatgtccctgggctagacttagctttcttagccaatgcatgaatctgagcttcaagcctttcaaatcggtcactttagttgcccatcagca

SEQ ID NO: 77268 - DNA, 342 bp, Zea mays
  Clone ID: MRT4577_170495C.1
acaagctttttttttttttttttttttttttttttcgtttttttttttttctttttttttttttttttttattttttttttctttcctcgggcgctcgtgccttggggctccgttcccggcaccggggggcggggccccggggggggggctgtgtcacccggttacgcggtctccgggcccaacccccccccgcccccaagctgtggccctgtggccctaaggcccgagcgcccggccagtgacctatctggcaagacgggcggggcgccagctgggaaccctccctccctggcgcccgtgcggcccccgcccattcgccttccgccgacgccggggggccg

SEQ ID NO: 77269 - DNA, 1492 bp, Zea mays
  Clone ID: MRT4577_170496C.1
gcacgagcctggtcggcgtgcagatctccccaactccgggaccagaaaacccacgcgaagaccaagcagcgggtggactcggcaccggccgtcgggaccgcgacgatggccgccgcctggcctctctccgccatcgccggcatcctgccggcctccctctcgctgaccctcctcctcgccaccctcgtatccatcctggtgctgggcgcagcggcgttcttcttcgagcacatccgcaagataggatgcatgcactcgctggagaggtccgccgtctcggacgccttcttcgaggaccccaactcgctcaagaaggtgccctgcccgtcggttttggatcctcctgagaaatatatttcgttgatagttcctgcctacaatgaggagtatcgactccccgaggctcttacagaaacactcaactacttgaagcggagatcaactgctgacaagtccttttcatatgaggtattgattgtcgatgatggtagcactgatgggacctctaaagtcgctttcagttttgtaaagcaacataagattgataatgttagagttcttctacttggaagaaatcatgggaaaggtgaagcagtccgaaaaggaatgcttcattcacgtggtgaactattactcatgcttgatgctgatggtgcaactaaagtgaccgatttggaaaagcttgaagctcagattcatgcattggctaagaaagctaagtctagcccagggacatctactagttcatctcagaatctatctgatgttgaagttgctgtttttggttcccgggctcatctagagaagcaggctcttgcaacaaggaaatggtatagaaactttcttatgaaaggtttccatttggtagttttgttgactgctggtcccgggatcaaagatacacagtgtgggtttaagatgttcacacgagcagctgcaaggaagcttttcacaaatatcagattgaagaggtggtgtttcgatgttgaacttgtatacctgtgcaagcgcctcaggatcccaatggtagaagtatccgttaattggaccgagatacctggatccaaagtgcgcatgacgagcatcatgcacatggtattcgagctcctgctgatcaaagtaggttatggactggggatatggaaaatcggctcgtagatccttgacattctatgctgactagtttctgcaactcagtttatcaccactgtagcctattccgcaaaacctagttggtcgccagcaaatccatttggaggaatactgtacaattttccgagattttcaaatcgagagcatcaattcacatgtaccctagtgtttgatcatagagacgttgacagatgtaggccaaatttgttgtcccagctatatccttttactgatttgttatacaggaactcaaactgtgtctggccttgattatcacaaaaaagggccaaacgtgttgctactgggctttggatcgaaaaaaaaaaaaaaaaaagcggcc

SEQ ID NO: 77270 - DNA, 382 bp, Zea mays
  Clone ID: MRT4577_170497C.1
gggaccattagatcaatatatttctgaactcaaaagaacccaaaagacaccatgaggacgtgggggggtggcttggttctcttggttttcggtgtgagcgtgagatcgacacatacaagcatacaatgggggtgtgaggcagcgacccacggtcatctactgatgtacgggcatctgtgaatttgggatcacctgttaacttgggagcatctgtgaatgtcggaccacctgtcgacgtggggccacctgtcaacgtgggaccatgtgcccatgtgcggtcatctgttgatgtgacgatgccactatgctactaaactactcaagcgtcagggtcatagccagatacacagatacacgtgtgaacaggcgaatagaagcatgt

SEQ ID NO: 77271 - DNA, 330 bp, Zea mays
  Clone ID: MRT4577_170498C.1
ctttttcttattcatcattacacaaaaaacttcctgactcaagactgtcggtgtggcccatgctatactagagcgaacactaacccataaagattctgccagttccaccactaccaaaagtaaatttgtcttaacaaactctcttaactcaactattggcaccctccattacatatccgacttactagaagatgcaactacagaatctcatgacatagaactcatctttaactaacaataaccaagaaacaacatgcttcttgtgctcctcccaaacatatatctgtcacaaactaccttgactctactatttcctgccttgaatacaca

SEQ ID NO: 77272 - DNA, 563 bp, Zea mays
  Clone ID: MRT4577_170499C.1
cccacatcccccaccttttccctcccccaaatatacttcccgtttcttattttttattttttttcaacacaaagcatattattttttattttaaaaaaaaaaacaacattctttttttttttttaccttttttttttcttccccccccattcttattcatattttttcaccacccacatcttcccactgactaatgatttataaaaaaaaaaaaacccaccttttttaaacaaccaacccccccccggtcgcgtgcggcccatccctgtccgttgcttatagcggggggcttccctagaaggggggaggcgggacgaaaaacgaaggggcgggggtccacccaccacgctggtgctagccgggacgaggaacaactaggggatgcgtgctttctgcgccccgccaggaacggcatgtcagcgcaatgcccaactatagaaagctacagcctggggcggagcacaaaccaccccccagggcagaacacagcggggccccgccacagggggaacacccccgcctgcagactcctgctggagacagccaccgaaggaagaccaccg

SEQ ID NO: 77273 - DNA, 676 bp, Zea mays
  Clone ID: MRT4577_17049C.1
gtcattttctggagaggaagactgttccgcagaacacgtggagcctcgtgagtgacccaagcaagccagcaagcgattcaacacttcacgctcatcttcacctctcatctgctcgccgtttccctctcttctttgcgacggcgaaaatggtggagaacggcgtcgagcagcccctgttacagggcggcggccctcctaataacgccgggcacgcaaagccgcctccgggagctaggccgccaaggaggttccgacgctgcaggacggcgccttccaccgacgcggcgcaagaatctcccccgcagagccaggaccaggacccgagcctgcagcgcggcaccacccagctggcgccgcccaaggagcttctgcggggcgcgcggccgagcttcaggctcgtcggcgtcctgctgctggcgtacctcctggccgggaccgtagcgttctacctcgccatggaccacatgtccggcgaccgcaccgggagccgcgtggtggacgcgctctacttctccgtggtcaccatgacgaccgtcgggtacggcgacctcgtcccgtccagcgacgccgcgaagctgctcgcctgcgccttcgccttcgccggcgtggccctcgtcggcaccttcctcagcaaggccgccgactacctcgtcgaggaacaggaggcgctgctctt

SEQ ID NO: 77274 - DNA, 295 bp, Zea mays
  Clone ID: MRT4577_1704C.1
ctctattctttctgtccgtattttttattttggtcatttttttttttttttttttatcttgtgtgtgagaacgaaaccggacttttttttaaccccgttttataattaaccattggtttccaaacagggccttaacacagttgtacaacacaacaggggagggatccaccggtttgaacacacacaatgggtggctgaattctaaatgtgtttgccttttacaggggcaagtaaaccaaacccgtttgcggtaacccccttaggcctggaggggctttctttgaagttacaatat

SEQ ID NO: 77275 - DNA, 308 bp, Zea mays
  Clone ID: MRT4577_170500C.1
attggaaagcaaagttaaatggataaaaaccaaatggggaaattgagttaaaaagtaaaggaaaaaagggattataaaaaaagacgttattggataccccgtagaaattaaaagccataaaaaggggttaaaaaatgactttttggaaaggttgggataaaaaggcgtttaaaaaaattgaaagaaaaggtacagggtaaaaactaaaaggagagccagaaagcttgcattttatttaaaaaaaaggttaatttgaagggaccaaattttttaaattttaaaaaattgcaattttgagggtggtgccc

SEQ ID NO: 77276 - DNA, 211 bp, Zea mays
  Clone ID: MRT4577_170501C.1
cccacgcttgctccgactcgtggtctcacttcttcggtctgtatcaagacttcgggtcagggtttaattccatccgaatctcaagattgcataaatgtcagccatatgttcacacgtcaatcacttaccactacaatcataagaatggtgaccgaatctatggtctgctctacagagacttcaacatgataaactttatgctactgttgga

SEQ ID NO: 77277 - DNA, 276 bp, Zea mays
  Clone ID: MRT4577_170502C.1
cttctcctccgcttattaccacgagctccttttttttgggatccttatggtcttatgtaggggggaaagccgcatccgatgtggtgcaccaccgctccgcctgcaagcttgactgacccaccatcaacgagccggttgagaatgcctatccctcctacggacgagatcctcgactacaaggtcatcacatgacaggagacggagatgtcccgcaacttcgctttggctaccttctcatgcgagaactccatgctcgacgctgtcgagaacatgaac

SEQ ID NO: 77278 - DNA, 651 bp, Zea mays
  Clone ID: MRT4577_170503C.1
gaccgtccgtaccagccgccacccccggccgtatccgccgccaccttcgcgtcctcctcctccgccgtgccttgctgccgtgcctgcgtcccggcgagccgctcagccgcggagcgtcgacctcgccgtatgcagagaccgaggcgctgccggcctgccgcgcctagcccgcgagcagcgagccaccgttcgccgaggcaccgacgtcgaggggagggagctgggagcgcttgcgccgttctcgagccgctgcgccctgaccagctgccgcacaggcgccgccgcagggagactgcggtcaacaagttaggaagctgcagcgctgctcggacgcgtcttcccagcagcaaaggaggaaggaagtttcacctttatcctttagctccaaccccaagcaaagcaaagaaccatcagcctttactttagtgaaagcactgaaagcagaatctaaaggcaaagctacataagaaatggcatcagaagctcgttgcacatttgcatcaagctacaacattgacagttagcaagctccttgtgttacagaactatagcttccttttgtcaaatattatgcggtgtggcactggcactggatagtggatacatagctgctctcaagataagggacatcaggcagaacggatgggttcg

SEQ ID NO: 77279 - DNA, 201 bp, Zea mays
  Clone ID: MRT4577_170504C.1
gagcgtgtgggagtcggagtgccgtcccatcagcaccgtcaacacatgctcgctgctcttgacgtggcatggtctggaggtgttcgacggcagcgaggaggtgtggcacggtgagaccaatacagacggcaccaacttcctcgagacgctagatctcgtggacgacggcgacatgcgcatccgctacaaggacggcgatct

SEQ ID NO: 77280 - DNA, 285 bp, Zea mays
  Clone ID: MRT4577_170505C.1
aattcccgggggggggcactcttccgggcacggtgattggcattttcaagggcgctccctacacgtgccccatcaaggcgccggggcgcatcggggggggggctacccttccatcactgtcgtcaacgtgactggggggggcgccacggcgcttcgcaagggcaagaacggctggaagcccggcacgtacactggcttctgggccgagcccttctggcgtttcattcttgtgaccctatctgtgctcaaggtcagcgccaaggggtgtggagaaggtggttcgag

SEQ ID NO: 77281 - DNA, 581 bp, Zea mays
  Clone ID: MRT4577_170506C.1
cagagatctgggggggggggggggggggttaatccccctcggcaggcggaggtagctaaacccagaccgcaggtgcacgaattgtagtagtcccaccacccgaccctccgtatcacatcagctctagcacgggcacgtcacaacggagggacgataaacagtaccccgcctgctagcagcagcctcaatgatcatcatcgatccgatcgtaagttgggagcagggaacatcagctttcgatgtaggttggggtcgtaaaacattcatgaaaccacccaagatagaaagacaattctaggtacagattatttacataaagtatttcctataggttatgattatactgctggtgctcgacgtccaggtatagtacaaactatacgtattattgctagacgtgatagtctagtagttggaacaactaatattaattctaattacaaatatcattattattaagaacgttgtaaagactttactatagtaagtaataatgaaactcatacttatgattatagtcccaatattccttcttatcatcctttttaaggttcaactgaataaggtcatataaataaagt

SEQ ID NO: 77282 - DNA, 346 bp, Zea mays
  Clone ID: MRT4577_170507C.1
ccatccgcactctctcatctccctagctctccgcctccttcttgatccagccaagccagggatcgccatgtcggactcggaggagcaccacttcgaatcgaaggccgacgccggagcgtccaagacctacccgcagcaggctctgcatcgtccgcatgatcgtgttggtcggatccaccaacctccccctattgtgttggcttgtactgtctactccactgctccagccgtcgcatttctcgtatggggctgttctgatacttaccctgtctggttctttttcaccctctccccaagctcacgtgaatttgtagatgatacttgtagaccatgatttctgattctt

SEQ ID NO: 77283 - DNA, 189 bp, Zea mays
  Clone ID: MRT4577_170508C.1
catacccataaaaaaaaaatgatggtgacccgatcgagtcagctcgccccgccaccgggacccataagcgccactccaccacctgcttgctcacggtccgcaccatactgtacgcgctctacgtctcctcgatcaaccaccttcacacccacgccattaatgattgcaagctgtatcacctgtctccac

SEQ ID NO: 77284 - DNA, 189 bp, Zea mays
  Clone ID: MRT4577_170509C.1
atggcacccaagagagctaacccgaaggatgacgaggctgcgaaggcagcactgcttgccgcaagaaagggcaaggccctcgccctcacccaatccacccaccaagagcccactgaagacaatacgtgctcgggggcgatagctctgttcatctggcctctcacgggcactgtgcgggggtatttatag

SEQ ID NO: 77285 - DNA, 1522 bp, Zea mays
  Clone ID: MRT4577_17050C.1
aattttgttcagaggaagactgttccgcagaacacgtggagcctcgtgagtgacccaagcaagccagcaagcgattcaaggaaaaaaaaaaaaaaaaaaaaaaaaaaaaaaaccacaactcgatgcaaccctaaaattttaagcaaattatttgcctcgtctcctcgcaagcctctcatctgctcgccgtttccctctcttctttgcgacggcgaaaaatggtggagaacggcgtcgagcagcccctgttacagggcggcggccctcctaataacgccgggcacgcgaagccgcctccgggagctaggccgccaaggaggttccgacgctgcaggacggcgccttccaccgacgcggcgcaagaatctcccccgcggagccagcaggacccgagcctgcagcgcggcaccacccagctggcgccgcccaaggagcttctgcggggcgcgcggccgagcttcagggtcgtcggcgtcctcctgctggcgtacctcctggccgggaccgtagcgttctaccttgccatggaccacatgtccggcgaccgcaccgggagccgcgtggtggacgcgctctacttctccgtggtcaccatgacgaccgtcgggtacggcgacctcgtcccgtccagcgacgccgccaagctgctcgcctgcgccttcgccttcgccggcgtggccctcgtcggcaccttcctcagcaaggccgccgactacctcgtcgagaagcaggaggcgctgctcttccgcgcgctccacgcccgcaaccgcaaggcgctgcgcgtcgtggaggcaaacagggtccgctacaagctgtacaccgctgcggcgctcctggccgcggcgctcgcctccggcacagcgttcatggtcgaggtggaagggatgcgccccgtggacgccttctactgcgtgtgcgccacagtgaccacgctcgggtacggcgaccagagcttctcgtccggtggccgggcgcgcgttcgcggcggcctggatcacggtgagcacggtcgtggtggcgctcttcttcctgtacgctgcggagctgggcgcggagcggcgccagcgggcgctggcgcggtgggtgctcaggcgccgaaccacctgcacggacctcgaggcggcggacatattcgggacgaggcgggtcggtgccgcggactttgtgctgtacaagctcaaggagctggggaagattagccaggaagagatcgcggagttcttggaggagttcgacgagctcgacgccgacaactccggcaccctctctccgcacgacctcatcgtggcacagcccggttagcgcggcaatcactggcagccagcaaggcagtaggcaggtggagtgagccagcgtgcagcgtctagactattcctgaccagcgtgccaaagacgtacagtatagagttgtgttggtaactttggagctgggagcctgggagtgggacacgctgaaagctgcctgtactgccaattctgtagcccagtattgttttcaatattctttaggcgttgttcggtt

SEQ ID NO: 77286 - DNA, 127 bp, Zea mays
  unsure (1)..(127): unsure at all n locations
  Clone ID: MRT4577_170510C.1
tcgatctgacagtgcattatcatttatcctccctggccctcccttgcataggaactacgggacttcatctgttccggccngcctattaacccatggcgcgcctttgattctacttacctgtccagtg

SEQ ID NO: 77287 - DNA, 238 bp, Zea mays
  Clone ID: MRT4577_170511C.1
ctgtttttgtttaagactttttcgcaatttcggggttagctcatagcttagaagtacaacatcgcagaaggtccaacatatataaaccagggggctgcagtttttactcattggtttcacacactataatttccaaaacgaatatttaggaacaagggaaggggccccacagatggtcttgtgatccctgtctacacaagctaaccaactgatgatgggtggctatgactgcgaaacc

SEQ ID NO: 77288 - DNA, 830 bp, Zea mays
  Clone ID: MRT4577_170512C.1
accctcgcctcgggcgccgcgaagctatttagcgcggtggccggagcgccggcaacggctgccacaccaacacacacagactgacaggcgcaagaagaggagaggagaagaacagaggggagtggaaataatctagcagcggaaggggaagcagcacgaagggaagcggcagcggaagcggggttctggctaaagtacgttaaggtcttttttatcagcaattccagtaatgtgccttgcctcttttacgtgactatacaagacaatgaatggaactcatccctgggcctccatgtccggaggtccatgttctaaccttggatatgccagggacatgaatggtaatgttccaataagcactacaaattcttctgggccaagcattggagttagctcattggtgactgacgccaactcgtcactttccggtggtgcccagttacagccaagtactagcatgaatggtgattcattgatgcgtgttcctgcgtcaccaatatcgttttcatccaataacatctctggctcttcagtcattgacggttgcatcatgcagcaaagtccaccccaagagcaggtgcagaaacagaggtcttcaagtgtaacatcacaacctgtgattgatgctggtggtgcattgcatgctcagaagaaatcaaggattgatgtttgtcagggtggtatcacggaacaacagctgattcagcaactgctccatggtcagaattctcttcattaccaggggccacagaatccacagcttcaagctttaatgcagcatcataaactggcacaacttcagcaacggcagcagcagcatccattttctc

SEQ ID NO: 77289 - DNA, 399 bp, Zea mays
  Clone ID: MRT4577_170513C.1
tcctctatactgtacagcccttcgccctttttttttttttttttttttcacgcccccacagttatttggtgttggtttttatttatttcttcttttaaaccggaatggaaaaaattccaaatttttaacacccgccccaccagataaaaagatcccccttttccctttgctacgatctacccgcgcttggagaaaaaaaaaacttcctaaaccactccaaaggaaaaatttagtttaaatttttccccccgggcccggttggaggggttcctgaggccccttttttatccggaggagggaccttaacccccaccctcttcctttgcccaaaaaggggcccccccccaaaaaaaaaaattttggcccaagccttcgcccaccccttcgaggaccccgggg

SEQ ID NO: 77290 - DNA, 306 bp, Zea mays
  Clone ID: MRT4577_170514C.1
ggggggaaaaaaaaatgggaaatgggctcccgtctcattccaaatgccgggcttttgcttcccggaaaaccagggccccaaaaccccaaaccggtccccacccccaagcaagggttcccccccccccgggccttccggagcccctgccccccttccccgtgccagtgccacggccggggctttttcaaagggcccgcgacttgaccatgtccctgccccttttcctcggggcggttgcttgtagccccccccgaatgccctcccgctcccttttgaacccggccttggagctcgcgtacagaattt

SEQ ID NO: 77291 - DNA, 269 bp, Zea mays
  Clone ID: MRT4577_170515C.1
acggctgcgctcacacatactcctcattcaatatattccatcctctacattatatgtcaaaccaacagatgtcgttcatcgaccacaagtgctacccctgctcatacaacaacgtcaataaggcccctttcaacaacatgagcgcgtgttgcaacttacccatcttcaaagactgtctaagttgtatatcctgcttctagatcaactgctacaagccaacatactactctctcaagcaccttctacatgtacattacttacataaacta

SEQ ID NO: 77292 - DNA, 311 bp, Zea mays
  Clone ID: MRT4577_170516C.1
aaaggggtcatgggggggattgttcaccctgccccccaggggggggggggaccctccgttactcatggccggtaaagggggaaactagcgggctgggtggctgggcaggggctcctttacatttttccccccggccatagttccctcagaagaaaacccccccgggcgctgctttgaaggggcagggccccggctgttgcagctgcgggccgcacatcgccggcgggtggggggctcccggggccgccattagggccgggggctccccctggggttgttgtttcaggaaggaccgccggcccacccccttt

SEQ ID NO: 77293 - DNA, 221 bp, Zea mays
  Clone ID: MRT4577_170517C.1
aatatataccagaaataaaatgaatggtactttgactgctgtggaaagtttcctgactatacattcaggacctgaggggttgagcattcatgatggtacctggaagtcagcaatttatggttttggagatcagagtaatttgagaaaactaagaaatgtatcaaatctgaaacctgtcccgctcattggtccaaaattgaagagaaggtggccaatttctt

SEQ ID NO: 77294 - DNA, 188 bp, Zea mays
  Clone ID: MRT4577_170518C.1
catcttcctaagtcataagccccatcgagacattggagcatcgtgagacttaaacagtatggtgatgattaatctcaccattttctttcttgaggcattcagatatgactttgctagaaaagagaaaaaaggagggccccccccgagggggtctctttgccccgggagtattttcggggcgtgaacct

SEQ ID NO: 77295 - DNA, 174 bp, Zea mays
  Clone ID: MRT4577_170519C.1
gcgtccaaaacgttataccaaaccctagacctaccctaatccatgctttttgaccacctttagcgtccattgctggggacattccaaaagagggacgggacgatgaacacatcgcaatgttcaatgcatacacagttgagaatactcatcacatagccaacacacgaactgcca

SEQ ID NO: 77296 - DNA, 332 bp, Zea mays
  Clone ID: MRT4577_17051C.1
aattaaaaaaaaatggtttttcgatcatttgcccccagcccagaacccaaataaatgggtggcttttttccttcctttggggggggggcccacatccaccggttaaagccttttggttgaaacctggttggtgtcctccttgtcctggtggccttctttgagcgtccactcaaacttttgcacaaaccttgggagggttggccccccaattttcactgcctggatgcttcccgaacaggccctctttcctccgccaaatgccatggttttgaacatttctgcaactttaaagctcccgtccaaaaacctttttggcctcttttcctggggcg

SEQ ID NO: 77297 - DNA, 238 bp, Zea mays
  Clone ID: MRT4577_170520C.1
ccactcgtccgcccacgcgttcgcggacgcgtgggcgagatgtgaaccagcagcctccaatagaagccagcgcatgggaagtaaaaccgacagacctcagccctcatgcaagcctaccgtcgacttaccaccgctccaacccgagagaaagatggagacgatcaagacgatcctcatagccgcgcttctcgtaatcgccgtctcggccaccgcagtgctgacctacaccgatgtcgac

SEQ ID NO: 77298 - DNA, 669 bp, Zea mays
  Clone ID: MRT4577_170521C.1
ggctagtacctctgtctttgggcaaagttgcgcgagcaagtcgaggagagactggaattctatgacaagggtgttgcgcctcgtaaaaaccttgatgtgatgaaagctgctattgacagtatggtcaatgacaccttaatggatgatgatggtacggcagataatgagaaggcggacacatctgccaagaaaagcaagaaaaagaagacaaaaaccgagactgatggtgatgcaatggatgtggataagccctccaacgtggctgatggagaagctgagcttggaaccaagaagaaaaagaaaaagaagcacaagctagaggaggcacatgaggagaacggtgcagcacatgctaatggcgacgctgaagagacccagactcccaagaagaagaaaaagaagagccgtgaaatttcggaggaagctgaacctaagacagccaccgaggggaagaagaagaaaaagaaggcagtcaaggctgatgaatgacaagctatttgttgtatgtcagtacaaatcctagtatttgttgaaaaccgagataaacacctagcttctagttcatgaggtgtacgatgcaatccaattcaactatgaagttctgcaatccaactcaactacgaagttctatcgtctctaaaaaaaaaaaaaaaaaaggcccctagggcc

SEQ ID NO: 77299 - DNA, 1964 bp, Zea mays
  Clone ID: MRT4577_170522C.1
ccacgcgtccgcttgttgatcctaaaaccctaacccctagccagcgctccgccgccatccgccggcgagatggcgttgtacctgctgttcgagtcggcctccggctacggcctattccatgcgtacggtatcgatgagatcgggcagagcgttgaggccgtgcgctcctccgtgctggacctcgaccgcttcggcaaggccgtcaagctcactgccttcaatcctttctcctctgccgtcgacgcgctcaaccagtgcaacgctatctctgaaggaatcatgaccgatgagttgaggagcttcctggagctgaacctgccgaagcctaaggaggggaagaaggccaaatacagcctcggcgttgtcgagcccaaggtcggctcccacatctccgaggtcaccggcatcccctgtcagagcaacgagttcgtccaggagctgctccgcggtgtccgcctccacttcgaccgtttcatcaacgagcttaaggattctgacttggagaaggcccaacttggcctggggcatagctacagcagggctaaggtgaagttcaatgtgaatcgtgttgacaacatggtgatccaggcaatctttctattggatacgcttgacaaggacatcaattccttctccatgagagtcagggaatggttctcatggcacttccctgagcttgtcaagattgtgaacgacaattacctatatgccaagcttgctaagtttatcgtgaacaaatctgatttgacggaaaaagatattcctgctttggctgatatagttggcgacgaggacaaggctaaagaaattgttgaagcagcaaaggcttcaatgggccaggatctgtcaccagttgatttgatcaatgtccagcaatttgcccaaagggttatgaatctctctgagtatcgcaaaaacctttatgaatatctcgtgactaagatgaatgatattgcgcccaacctgacatcattgattggtgaagtagttggagctcgcctaatctctcatgctggcagtctttcaaaccttgccaagtgtgcagcttccacccttcaaatacttggtgctgagaaggccctattcagagcactgaaaactcgagggaacacaccaaagtatgggcttatattccactcctcctttattggccgtgcttcaactaagaacaagggcagaatggctcgttacctggcaaacaaatgctcgattgcttcacgcattgactgctactcggaggctagcacctctgtctttgggcaaaagttgcgtgagcaagtcgaggagagactggaattctatgacaagggtgttgcgcctcgtaaaaaccttgatgtgatgaaagccgctattgacagcatggtcaatggcacctcaatggatgatgatgatatcgagaagaccgatgcatctcccaagaaaagcaagaaaaagaagaccaaaaccaaggctgatggtgatgcaatggacgtggataaaccctccaacgttgctggtggagaagctgagcctggaactgagaagaagaagaagaaaaagaagcataagctggaggaggaggcacaggaggagaacggtgcagcagatactacccctaagaaaaagaaaaagaagagccgtgaagcttccgaagaagctgaacctaagaccgccaccgatggtaagaagaagaagaaaaagaaggctaaggccgaggatgatgagtagccaagttatttgttgtatggcgtatgaatccgagagtatttgttgaaaaacagagatgaacgcctgcctagctcaactagcttgtagttcatgaggcgtttgatgcaaacccaactcaaagtacgaagttttcctatcgtctttagctttcttgtatttttattttttggttggatatgctagtgaactctagtgacttcgtatgctaaaaaaaaaaaaaaaaaaaaaaaaaaaactcgagactgttctcctcgtgc

SEQ ID NO: 77300 - DNA, 295 bp, Zea mays
  Clone ID: MRT4577_170523C.1
aaatgcaaaagtagttgctaagaagttgggatccaaatgcaagggagacaaaacttgcatatgggttccaaaagttattttgactaaccttgtaggacccaacaagacttgggtttatgcatcctggggctctagctggataatcgacagcggatgcacaaaccacatgacgggggagaagaagacgttcacctcctacgtcaagaacaaggattcccaggatacgattatttttggagatgggaaccaaggcaaggttaaaggattggggaagatagccattacatccgagtag

SEQ ID NO: 77301 - DNA, 2452 bp, Zea mays
  Clone ID: MRT4577_170524C.1
ggccggccgggaaaaaaaataacaaaaaaaaaaaaaaaaaaaaaaaaaaaaaaaaaaccgtcactccttgttgatcctcctaaaaccctaacccctagccagcggctaccgccgccatccgccggcgagatggcgctgtacctgctgttcgagtcggcctccggctacggcctattccatgcgtacggtatcgatgagatcgggcagagcgttgaggccgtgcgctcctccgtgctggacctcgaccgtttcggcaaggccgtcaagctcactgccttcaatcctttctcctctgccgtcgacgcgctcaaccagtgcaacgccatctctgaaggaatcatgaccgatgagttgaggagcttcctggagctgaacctgccgaagcctaaggaggggaagaaggccaaatacagcctcggcgttgtcgagcccaaggtcggctcccacatctccgaggtcaccggcatcccctgtcagagcaacgagttcgtccaggagctgctccgcggtgtccgcctccacttcgaccgtttcatcaacgagcttaaggattctgacttggagaaggcccaacttggcctggggcatagctacagcagggctaaggtgaagttcaatgtgaatcgtgttgataacatggtgatccaagcaatatttctgctggatacacttgacaaggacatcaattccttctccatgagagtcagggaatggttctcatggcacttccctgagcttgtcaagattgtgaatgacaattacctttatgccaagcttgctaagtttattgtgaacaaatctgatttggcggaaaaagatatcccagctttggctgatatagttggtgatgaggacaaggctaaagaaattgttgaagcagcaaaggcttcaatgggccaggatctgtcaccagttgatttgatcaatgtccagcaatttgcccaaagggttatgaatctctctgagtatcgcaaaaacctttatgaatatctcgtgactaagatgaatgatattgcgcccaacctgacatcattgattggtgaagtagttggagctcgcctaatctctcatgctggcagtctttcaaaccttgccaagtgtgcagcttccacccttcaaatacttggtgctgagaaggccctattcagagcactgaaaactcgagggaatactccaaagtatgggcttatattccactcctcctttattggccgtgcttcaaccaagaacaagggcagaatggctcgttacctggcaaacaaatgctcgattgcttcacgcattgactgctactcggaggctagtacctctgtctttgggcaaaagttgcgcgagcaagtcgaggagagactggaattctatgacaagggtgttgcgcctcgtaaaaatcttgatgtgatgaaagctgctattgacagtatggtcaatgacaccttaatggatgatgatggtaaggcagataatgagaaggcggacacatctgccaagaaaagcaagaaaaagaagaccaaaaccgagactgatggtgatgcaatggatgtggataagccctccaacgtggctgatggagaagctgagcttggaaccgagaagaagaaaaagaaaaagaagcacaagctagaggaggcacaggaggagaacggtgcagcacatgctaatggcgacgctgaagagacccagactcccaagaagaagaaaaagaagagccgtgaaatttcggaggaagctgaacctaagacagccactgaggggaagaagaagaaaaatgaagaagctgaacctaagacagccaccgaggggaagaagaagaaaaagaaggcagtcaaggctgatgaatgacaagctatttgttgtatgtcagtacaaatcctagtatttgttgaaaaccgagataagcacctagcttctagttcatgaggtgtacgatgcaattcaattcaactatgaagttctgcaatccaactcaactacgaagttctatcgtctctagcttgattgtaatttttttatgagggtgcggttggataagcaaatagcttggtgagttggcgttcgattgttatattgagtgagaactgagatttgaaggcatcttcgagacacttttttgaaggcagtcaaggctgatgaatgacaagctatttgttgtatgtcagtacaaatcctagtatttgttgaaaaccgagataagcacctagcttctagttcatgaggtgtacgatgcaattcaattcaactatgaagttctgcaatccaactcaactacgaagttctatcgtctctagcttgattgtaatttttttatgagggtgcggttggataagcaaatagcttggtgagttggcgctccattgttatattgagtgagaactgagatttgaaggcatcttcgagacacttttttgaaggcagtcaaggctgatgaatgacaagctatttgttgtatgtcagt

SEQ ID NO: 77302 - DNA, 356 bp, Zea mays
  Clone ID: MRT4577_170525C.1
cgagcgctcctttctagccttcacttctcagcacggctgcctttgacccccgactgcggtcgtcagcacgtccatggagcaagccgacatgccagacgttccccgcgtaaagctaggcatacagcggcttgaggtgtctaagctggcgttcggctgcatggggctaacgggcacttacaacacgccactcggcgacgaggccatggccgacgtcttcgcgcactcgtttcgtcgagggatcacctgtttagacacctgctattcctacgggccacggaccaactagaccctactggggaaggcgctcaagcatctgccgagggagcaattgcatgttgccaccaagttcgtgataa

SEQ ID NO: 77303 - DNA, 2027 bp, Zea mays
  Clone ID: MRT4577_170526C.1
acgagagcccataaattctgccccgccgcctcgtgtcaaccccgtcactcttgtgtcctcctaaaaccctaaccctccgccgcccctcggacccccaaccagcagctgccgcggccatccgccggcgagatggcgctgtacctgctgttcgagtcggcgtccggctacggtctattccacgcgtacggcatcgatgagatcgggcagagcgtggaggccgttcgctcctccgtgctggacctcgatcgcttcggcaaggccgtcaagctcaccgccttcaaccctttctcctctgccgtcgatgcactcaatcagtgcaacgctatatccgaagggatcatgaccgatgaactgaggagtttcctggagctgaacctgccgaagcccaaggaggggaagaaggccaaatacagcctcggggtcgtcgagcccaaggtcggttctcacatctccgaggtcaccggcattccctgccagagcaacgaattcgtccaggagctgctccgcggtgtccgcctccacttcgaccgtttcatcaacgagcttaaggattctgacttggagaaggcccagcttggcctggggcatagctacagcagggccaaggtgaagttcaatgtgaatcgtgttgacaacatggtgatccaggcaatctttctattggatacgcttgacaaggacatcaattccttctccatgagagtcagggaatggttctcatggcacttccctgagcttgtcaagattgtgaacgacaattacctatatgccaagcttggctaagtttatcgtgaacaaatctgatttgacggaaaaagatattcctgctttggctgatatagttggcgacgaggacaaggctaaagaaattgttgaagcagcaaaggcttcaatgggccaggatctgtcaccagttgatttgatcaatgtccagcaatttgcccaaagggttatgaatctctctgagtatcgcaaaaacctttatgagtatcttgtgactaagatgaatgatattgcacccaacctgacatcgttgattggtgaagtagttggagctcgcctaatctctcatgctggcagtctttcaaaccttgctaagtgtgcagcctccacccttcaaatacttggtgctgagaaggccctattcagagcactgaaaactcgagggaacacaccaaagtatgggcttatattccactcctcctttattggccgtgcttcaactaagaacaagggcagaatggctcgttacctggcaaacaaatgctcgattgcttcacgcattgactgctactcggaggctagcacctctgtctttgggcaaaagttgcgtgagcaagtcgaggagagactggaattctatgacaagggtgttgcgcctcgtaaaaaccttgatgtgatgaaagccgctattgacagcatggtcaatggcacctcaatggatgatgatgatatcgagaagaccgatgcatctcccaagaaaagcaagaaaaagaagaccaaaaccaaggctgatggtgatgcaatggacgtggataaaccctccaacgttgctggtggagaagctgagcctggaactgagaagaagaagaagaaaaagaagcataagctggaggaggaggcacaggaggagaacggtgcagcagatactacccctaagaaaaagaaaaagaagagccgtgaagcttccgaagaagctgaacctaagaccgccaccgatggtaagaagaagaagaaaaagaaggctaaggccgaggatgatgagtagccaagttatttgttgtatggcgtatgaatccgagagtatttgttgaaaaacagagatgaacgcctgcctagctcaactagcttgtagttcatgaggcgtttgatgcaaacccaactcaaagtacgaagttttcctatcgtctttagcttgtatttttattttttggttggatatgctagtgaactctagtgacttcgtatgctaacgatgcagaatagcagatccaatcagcagcaaaaaaaaaaaaaaaaaagcggcc

SEQ ID NO: 77304 - DNA, 433 bp, Zea mays
  Clone ID: MRT4577_170527C.1
ggccgcttttttttttttttttttgtttttttttttttttttttttttttttttttttttttttttttttttttttttttggaaaaccaaaattaagcgggttttttttgaaaacattacaaacggggggcccttgcaaatggttaatacaaaaaaggaaactgaatgttacagttttgaaagagtcaaatatcccccaaaagcatcctaaggtcatcctaaaacctgttttttttcacaaaaaaaaatatctaaaaagagttccgaggattaaactgggaagtctacttaagttttgactgggcaaaacttatcaggggcttagcgatagaaacaggagccctacttctggcgggcttctttacgtggaaagttattgacatgaatgcacagataagggcaatcaaaagggttgggtaaacatgagttgatt

SEQ ID NO: 77305 - DNA, 1273 bp, Zea mays
  Clone ID: MRT4577_170528C.1
gtaccttcttcttcctcgtcctcctcccgtgagccatgaatgagctctgcgacctcgaggtgcacatcaatggccatcacacgcttcatctccaccagagcgtcatgtgcgccttctcggggaggctgaggacactggtgaagcaggagaagaagaagaagggcggcggcaggaaggaagccgtgtccatcaatctcgccggcggcttcccgggcggcgccgacggcttcgagctcgtggccaggttctgctacaacgacggccgcgtcctgctctgcccttccaacctcccgctcctgcactgcgccgccgtgtccctggagatgaccgaggaggtgtgcgcctgcaacctgctggcgcaggcggaggccttcgtgaacgggctctactactggacctgggccgacgtgctggccgcggtccggagctgcgagcccttcgccgcggcggccgacgcctcgggactcctggacaggctcatctccgcgctcttctccaagatcaccggcgccaccccgggcccgggcccggggacgccgaaccgctcctcgtcgtcgtgctcgtcgtcgcccgacaccgcgggcttgcgccggtcgtcgtcgtccgccaacaagacgccggagtcgatgcggccctgcgccggcagggagtggtggttcgacgacatgacgtcgctgtccccgccgaccgtcgagaagatgatgcgcgtgctcggctgctacggcgtcgagaacaagaacctgatcctcacgcggttcctgctgcactacctccgcgccgccacgcgcaggccgccggcgcttgagcgggagggcgccgcgctcgccggcctcgcggacacggccgtccacggcgtggcgctcgtcgggggcacggcgttctcgtgccggggcctcttctgggtgctacggatcgtgtcggcggtggggctgagcagggagtgccggcacaagctggagcggctcatggggctcatgctggaccaggccacgctcgacgacctcctcgtctccggcgacgacggcggcggtgtgtacgacgtcaacctggtcatgaggctggtcagggtgttcgtggcctccgaagaggaggcagacgcgccgtcggagaggatgcggaaggtggggcgcctggtcgacaagtacctcggcgaaatctcgccggaccaaggactgaaggtgtccaagttcctcgccgtcgccgagagcctgccggactcggccagggactgctacgacggcgtgtaccgggcgctggacatctacctcgaggt

SEQ ID NO: 77306 - DNA, 547 bp, Zea mays
  Clone ID: MRT4577_170529C.1
cttacaaaaaaagttccgattattgttgtcatcaaacttcaaagcctcgatcaaaacagattttcaactcacacgagacacgaacaattcaaccacacccgaagaacgcatacgatccagtagtggatgtaaacgtacgtaacagtagctcaacacacgaaccgaacaaagccacaccacgaacatctgtctgtcagatcatattatccagctcggcctcagggacagggacgagatggtcggccggcaccggcgcccgcgcctgcggcggcgccggcgccgggtctaggaggcgcaggtactgcttgatgctgtggaagcgcaatggctcgagcaaggtaaggaacggcagggggaagcgccctgacccgcctgagctaagcaggcgaacgttggtgccggcgtccgcgtacccgaagaaagtcggcggcagcgtgggcacgacgtcgcggtcgacgatgacgcgctgcacggacacgtggcgctgcccggccacgagctcgtcgcagaacgcctggttgccgacgcggggggccgcgaacgtcac

SEQ ID NO: 77307 - DNA, 324 bp, Zea mays
  unsure (1)..(324): unsure at all n locations
  Clone ID: MRT4577_17052C.1
ggcatcnnnggcgccccccgcccccgcccaagnntccgnnggcgccggcgnnngcaagtacccacgtgggaagggggccccngnngcggcctttcgtcgagtgaccaagctttcgacccnnggcgccgcnnccgccatttcgaccccaacnngaccccaactttacgaggaggcnnnggaggagnnggaggggcngnngcggaccgagggacccgacgagnngcggccagggnaggggtggtcnngtcggggaggggtggaggtcgcttanaaggtcgccgagaagcagggnnacggcnngtcgccagggntcgnnnacgtcgc

SEQ ID NO: 77308 - DNA, 566 bp, Zea mays
  Clone ID: MRT4577_170530C.1
ggaatacgatacgccgctcgcctgaatcgagaccaccaccgctcccgctctgcctcacctcgccgactagagtttttgccgccgcggatctcgccgtccccgccatggatacgtcgggctcctccgcagccgccggcgacgccccgaccaccggggagcaccggatggggaccaccattgtcggggtctgctacgagggtggcgtcgtcctcggcgctgattccagaaccaacacggggttgtccgtacagttacaataaatgcggatggcgtgaataggaacttctaccctggcgacaagctacccctgtggcacgacgagctggagccccagaactcgttgcttgatattcttgctgccgggaaccctgatcccatggtgcagtgaatttgccctccacttccgttgtgaacttttcactgtacctgacttgttcttgatttcaaccgaagaaagaattggaacatttcctgtcgaactaatgtcgcgccagagtatttacatactgttgttatcacaccttagtaaattcatggttactactgctgtcgtcgttttaaaaacc

SEQ ID NO: 77309 - DNA, 1667 bp, Zea mays
  Clone ID: MRT4577_170531C.1
ctcagtttctttcttgtgaggccgggaaaagaggccaaacgatacaggaatacgatacgccgctcgcctgaatcgagacccccgctcgcctgaatcgcccggctcccgctctgcctcacctcgccgactagagtttttgccgccgcggatctcgccgtccccgccatggatacgtcgcgggctcctccgcagccgccggcgacgccccgaccaccggggagcaccggatggggaccaccattgtcggggtctgctacgagggtggcgtcgtcctcggcgctgattccaggaccagcactggaatgtatgtagccaaccgtgcttcagacaagattacccaattgacagacaatgtgtactcgcacgagctccaaccaaccaacaggccgggccgcccctttgttgcgagtgaggccaaagccgagcaaacaaaacgatatgccgctgccctgaaccgagaccaccaccgctctgcctcgcctcgcctcacctcacctcacctcgccgactagggttttgtaccgccgtggatctcgccgtccccgccatggacgtctcgcacgcgggatcctccgtcgccggcgaggctccgacgaccggggagcaccggatggggactaccatcgtcggggtctgctacgagggcggcgtcgtcctgggcgccgattccaggaccagcactggaatgtatgtagccaaccgtgcttcagacaagattactcaactgacagacaatgtgtatgtctgtcgctctggatctgctgctgatacacaagtcatttcggattatgtacgctatttcctccaccaacacacaatccagcttggacaaccagctaccgttaaagttgcagccaacttgattaggttgctagcttatcagaacaagaacatgttgcaagctggcatgattgttggaggatgggacaagtacgagggaggccaaattttctcagtccctctcggtggaacgatcttgaagcaaccatttgcaattggaggttcaggttcccagttacctatatgctcttcttgatcatgaatggaaagagggaatgagtcaggaagaggcagagaaatttgtggtgaaggtagtttcccttgctatggcccgtgatggtgctagtggaggggttgtccgcacagttacaataaatgcggatggcgtgaagaggaacttttaccctggcgacaagctacccctgtggcacgacgagctggaaccccagaactcgttgcttgatattcttgctgctgggaaccctgatcccatggtgcagtgaactcgccctccacttactttgtgaacttttcactgtatctgacttgttcttgattatttccccttgaactatgtcagaccagagtaatttacgaattgttgttatcgccccttaataaattcatgtttagctgggtgattggcgttttgagttaaaaaaaaaaaaaaaaacggttactggtaagcgtgctactgctgtagttaagcctgtggcaagtattcaaattttcagtaatgaatcccccgttgctacaacaaaaaaaaaaaaaaaaaaaaaaaaaaaaaaaaaaaaaaaaaaaaaaaaaaaaaaaaaaaaaaaaaaaaaaaaaaaaaaaaaaaaaaaaaaaaaaggccgccaccgctgtggtcgttctatctggcgagt

SEQ ID NO: 77310 - DNA, 137 bp, Zea mays
  Clone ID: MRT4577_170532C.1
agaggaggggggttggaccctttacaaacttaattttcgggcttatcccatgtttttagcttacaaccgtagcacaaaacttggaaccctaatttgttttgcgcacgcgcggaccgtccggcccaaaagcgcggacc

SEQ ID NO: 77311 - DNA, 1156 bp, Zea mays
  Clone ID: MRT4577_170533C.1
ccggttttttccatactaagtggtgcatataccttgatcaactgcttaaaaaactctgcctatagtctataggcgtctcttgtgggcctcacaattacttatgggttcctgttcttttaccgtgaagatagatagtaaaccttatgaaccaacttatacagcaacattgtgtgttgcatcatttgatccgttgtaataagttctgcttcctggttttgagataccctgaaagtatttgtttgatttgtgttctgattacaaagaggtggtgcacatccagccacgttcggcaggggcgatatcacgtagtagttaccgcggagcgggcccgatccaacgagtggtttgtgcttgtgtctgagtcgtgcattcctatatttgatttcaacacaacatacaggtacttccggaactcaaaccaaagctttctcatggcgtttgatgaccctggaccttatggacggggaagatacaactggaatatgacccctgaggtcgaactcgaccaatggcgcaaaggctcacagtggttcgaagtacacagagagcttgccattgaaattgtgaaggacacggtctattatccaaaattcaaggagttctgcaggccccattgctatgttgatgagcactatttccccacaatgctgacgattgaagctccaaaccgcctggctaacagaagtgtcacttgggtggattggtcaagaggtggtgcacatccagccacgttcggcaggagagatatcacgttggagttcctgaggagagtccgagagggacggacatgtctacacaataaccagaactcaacgatgtgcttcttgtttgcgcgtaagttcgctccaagtacattggagccgttgttagagctagcgcctactgtgctcggttttggttgatggctgtgtcagtctgaagaggtgccgtctgtaattttgatattagatcattgtaggattacacgcttggagacatgggctcagattgatggatggaaacgtatagtgtcccccctccgcttgttcattatacataaatctgttttgtttttgtacagtaatggcgtgtttagaggcatatgtacttacctcagttcacatgggattgggagtgatttggtgttgaatttaaaaaaaaaaaaaaaccccccccc

SEQ ID NO: 77312 - DNA, 1916 bp, Zea mays
  Clone ID: MRT4577_170534C.1
ttcccgcctcgacccacggaggccaaacgaaaccaaacgatacaggaatacgatacgccgctcgcctgaatctagaccaccaccgctcctgctctgcctcacctcgccgactagagtttttgccgccgcgaatctcgccgtccccgccatggacgcgtcgcacacgggctcctccgcagccgccggcgacgccccgaccaccggggagcaccggatggggaccaccattgtcggggtctgctacgagggtggcgtcgtcctcggcgctgattccaggaccagcactggaatgtatgtagccaaccgtgcttcagacaagattacccaattgacagacaatgtgtacgtttgtcgctctggatctgctgctgatacacaagtcatttcggactatgtacgttatttcctccaccaacacacaatccgggatggacaacgatctacgggattctcgactccgtcccggccgggcagtttctttcttgtgagggaggccaaacgatacaggaatacgatacgccgctcgcctgaatcgagaccaccaccgctcccgctctgcctcacctcgccgactagagtttttgccgccgcggatctcgccgtccccgccatggatacgtcgggctcctccgcagccgccggcgacgccccgaccaccggggagcaccggatggggaccaccattgtcggggtctgctacgagggtggcgtcgtcctcggcgctgattccagaaccagcactggaatgtatgtagccaaccgtgcttcagacaagattacccaattgacagacaatgtgtacgtttgtcgctctggatctgtaagtgttgttgtcttctaatgttattgctctactatgatgtttggtagaaactttcttcttactttgccctttcacaagttattaatgaacattccgtgtcgttactgaatcagttaaacggtatatgagctagtagttattctcattgctgtttttatgctaccccgtctcatattgtctttgctagaaagtaattcctcctttgcatggtgccagagatggcacattcatttttgcaagtttcaaattcacatgcaaaactcttgctattttaatttatcacaggctgctgatacacaagtcatttcggactatgtacgttatttcctccaccaacacacaatccagcttggacaaccagctactgttaaagttgcagctaacttgattaggttgctagcttatcagaataagaacatgttgcaagctggcatgattgttggaggatgggataagtacgagggaggccaaattttctcagtccctcttggtggaacgatcttgaaacaaccatttgcaattggaggctcaggttccagttatctttatgcacttcttgatcatgaatggaaagagggaatgagtcaggaagaggcagagaaatttgtggtgaaggtagtttcccttgctatggcccgtgatggtgctagtggaggggttgtccgtacagttacaataaatgcggatggcgtgaagaggaacttttaccctggcgacaagctacccctgtggcacgacgagctggaaccccagaactcgttgcttgatattcttgctgctgggaaccctgatcccatggtgcagtgaactcgccctccacttactttgtgaacttttcactgtatctgacttgttcttgattatttctccttgaactatgtcagaccagagtaatttacgaattgttgttatcgcaccttaataaattcatgtttagctgggtgattggcgttttgagttaatggttactggtaagcgtgctactgctgtagttaagcctgtggcaagtattcaaattttcagtaatgaatcccccgtagcagccagcaccattctatttgctaaaaaaaaaaaaaaaaaaaggggcggccgc

SEQ ID NO: 77313 - DNA, 746 bp, Zea mays
  Clone ID: MRT4577_170535C.1
tgggaccctcgaggccggccgggaggacacttacgtgaagactcacttccaggtcatcatctccagcactacgagtagtctgacgacacagtgacgatgctgaacgcactagctgtctctcacgcaactgatgtcaagggcaccatcttcttttcacagggatgctatggtccgaccaccgtacactgcaagtatctctgcatctcctgccagggagtccgtgctcctccattgcgcgacgctgctctgctccatcaccaccgaagcggactggcagtgctcggacctcgctccgacgactcttcgaatgcatgtgtgggcaagggaaaatgcaagcaccgccaacatgaccaccgccatgccggtgatcttgtgaatgtgacatcggaataatatgatgttggtaatggcaatattactgacagacagatacctcttgctgtaccccagtcgatcattgatcgactagatgatgaccatgttgatccacaggaccttggcgaacgagaacctaaaccttagcaagagcaccggaaatggtgccatacatgatgcactgtggtatcattgggctcccaggttatagagcgtaacctccgagatatacatcatacaacgccgaatcgagcacctcaagcaagtgcagtgccatttaccactgatattagacaacactacttgagtactccaaataatggactgatccgtgatcatagatgactaatcatgtccttgtatatatgaac

SEQ ID NO: 77314 - DNA, 438 bp, Zea mays
  unsure (1)..(438): unsure at all n locations
  Clone ID: MRT4577_170536C.1
aggtctcttatagccaaagcgggggagcttcttacaatgacgggtgggggtgtgaatccgtaccatgtcagctctttgtaattggacactccgttgcctaaagtttgaccttctttatgtncataaccgaattttgttgggggggggggttngattcnctnacaccttcattcctactttngaatttataataaactccaccccngctgcttggtcttccgtttcctcttctcctctctttgctctggcgatgtcagtctcctttgtgtcctcgggtcgtcttggctccacctaattttggcggtacgagcgtcccncctggttactttctgtgtttcagtgtccttcctcgtctgtttctttctccgtgcctgtgccctgctcctcggccgcctctgcttttgatgccgtgaccccttttctggtctttggcctccc

SEQ ID NO: 77315 - DNA, 402 bp, Zea mays
  unsure (1)..(402): unsure at all n locations
  Clone ID: MRT4577_170537C.1
cgatgccaaaaccctagtctagcgccgccgccgccgcagacgcctccttttcgatcccttcgcaaagcgccgccggggccccatccggcatggctccgaagaaggataaggccccgcccccgtcgtcgaagcccgccaagtccggcggtggcaagcagaagaagaagaagtggagcaagggaaagctaaangataagggnagaagggggtgctgttnnaccannctacctactacaaccttctctctgaggggcccaagcacaagcagattacaccttctatgttttgagagcgccttaggaacaggggggtatgtggcttcggagggcctatcagggagcccccccccccctaggacgccgggggggggggtcgcgaccaaacctgtctttttttcccccc

SEQ ID NO: 77316 - DNA, 419 bp, Zea mays
  Clone ID: MRT4577_170538C.1
cccaaaaccaacgtaaaaaccaaaatggatccggggacacgctaattgaatgtgcgctgaaatggtgcctttaatatgtcagcatcgacacacaactattattattcattaagaagataaccgtcttaagcttgttcaatagggattgggctcagggggcggacatgagattcgagacagcatctcccaaaggcttatttccaatttggcaaaccacattcgttctatcatgttcctaaggaggggctttatccagggactgcaatttcttggagaacttgacggacaaatttaccatctaatgagaagtgtgccagttggttttggagagaatgtaaaactttttaaaactaaagaattcggccattttttatgagtgcagcatgaaaactattttctgaacagcttaatttttccgg

SEQ ID NO: 77317 - DNA, 585 bp, Zea mays
  unsure (1)..(585): unsure at all n locations
  Clone ID: MRT4577_170539C.1
gcgttcgcaggtataggacatctgttttgtgggaggcgggggtttgacatttcgccatagatataggacatcaattttgttagaaccctgtcgttaattcttggcatgtaattttaggtctgtacattggagtacgggacaaccaaacccttggtttagacaactgttttagctcaatggggtggggagcttgagttttgttggcctgatttagtttatttattctacanaaaaaaaaaaaaaaaaaaaaaaaaaaaaaaaaaaaaaaaaaaaaaaaattaaaaaaaaaaaaaaaaaaaaaaaaaaaaaaaaaaaaaaaaaaaaaaaaaaaaaaggggggggcggttttaggggacccaagtttacttccccgggcttgcaacgttatagtttttttttgggggcccctaaattaaattcacgggccggcgttttacaccggggggacggggaaaacccgggggttccccaatttaatcgctttggagaaaatccccttttccccagggggggtaatagcaaaagggccccccccgttcgcctttcccaaaagttgcccccccttatggggaatggggacccccc

SEQ ID NO: 77318 - DNA, 359 bp, Zea mays
  Clone ID: MRT4577_17053C.1
aggaaattggcgtcccattttaaacccggtcaggaatggtaaccgaagtttcaacaccttaacaggaacatattggagccgagagccaagtgcctaaacaggataacataaattttttggccgggacaaacttggggtttacttgcagcaaccattacttcttaaccttttataggtttcgaaataaaaaaaaagggaattttttcgggaaccataatttgtcacatttggccaattttcaaataaaaggcttttttttttttcttagccttcttgagccatttgacaaacgggttcagagcttttacaaaaaattggctggcctttggggttgaaccttttcgggacccaagggcttt

SEQ ID NO: 77319 - DNA, 664 bp, Zea mays
  Clone ID: MRT4577_170540C.1
cccacgcgttcgtatattggcagcagtcacatggcatgaacagtctactatttttcagaaagctcaagtattcatggtcagttgagatattttgtggtgcacagttttcatttcctaatattctattgcccaagtcttggtcacaggagttagccaccaacatagaaagacatttactaccagaaatgctagaagtggctaatggctataattttcatgagcttcatctgatgctggcctctattggagtgacacaaatgatcagttgtggtaaatatttgatatggatcattggcttgctaactccatgggatccgggcagaatggtcttcgacctcaagttcgtgatgcttttggcttgagggcaagccaaatcttaagaaggggggaatgtcaggcatccagtgacagatacaagctacgtctgaggacataaagacaattgggccgaggcagagtgagcgagcccgaacggtaattgtgaagctgagcggcccagagtggccagtaatgtaattttgtgtcgtgagccagttgaacgagtatttagaggagatcgtccatagggaagggggatattcagactgtaaacagaactctaccttgttcgtcgtctcgaacctctgcttcctctgttcctgtgaatctcttgttatcttcctgg

SEQ ID NO: 77320 - DNA, 1756 bp, Zea mays
  Clone ID: MRT4577_170541C.1
gcaccgagttcaccgggcattggcgctggccgccgcgctcggcccggccacggcgcgcgcccagctgcggcgggaccaccaggcgccgccgggcccgcgcccgcacagcgtcaccatcaccgagttcggcgccgtcggggacggcaggacgctcaacacggtccccttccagaacgccgtcttctacgttcgctccttcgccgacaagggcggcgcgcagctgtacgtgcccaggggccgctggctcaccggcagcttcaacctcaccagccacctcaccctctacctggaggaaggcgccgtcatcgtcggcgcaaaggactcatcacaatggctgatcgttgaacctttgccatcttatggccaagggctagaccttcctggtcctagacatcaaagcttgatcagcggatacaacttaaccgatgttgtcataaccgggaacaatggagttattgatggccagggcttggtatggtggcagtggttgcgctcccatgagctgaaccatagccgacccaaccttctggagttcctgtattctgaagatattgtcatctcaaacttgacattcttaaattcaccagcctggagcatacacccggtgtactgcagtaatgtaaaggtccacaatgtgacgattaagacctcattggacgctccactgactgatggcatagttccagattcatgttcaaacttatgcattgaggacagcaccataagtgtcagccatgaagccatctccctgaaaagcgggtgggacaggtatggcatttccttcgggaggcctacctccgacattcgcatcagcagagtggacctgctatcatcttccggagccgctcttgcattcgggagtgagatgtctggtggtatctcagacattcatgttaaccacctccggatccacgactcctccaaaggtatttctttcaagacctcacccggccgtgggggttacatcgaggacgtggtcatctcggaggtacagatggaaaatgtgcatgtcggcatcgagttcaccggcaactgctcgacccacccagatgacagcttcgatccgtccgacctcccggcgatcgaccatgtcaccatgaagaacatggccggcacgaacatctcggtcgccggagttttgtcgggaatcgaaggagccccattcacagccatctgcctttccaaccttaacttctctatggctgctggttctggtccgagttactggtcttgctccgacgtttccggctactccgaggctgtctttcctgaaccctgcacagagctccgtgatccgtcctccagctcttccgtctgctattccctggccagctacagcgccattgaaacagcataaatgtccatccatccttccatccatttcttgttctccccttgagcctgcatcgccgccatcttttgtctcagttcttttttccaatacacacagacagaccaggaaaaagaacaacatcactactctcatggccctaaggctcggatcataagctgcatgaatgatgacctagcttgaaggggaagaagaatcaagtggggggttgtggacagctaggtgcttgcttgtacagctacatttctttattcaatctgtaagaaggaaggatttttttttttttggtttggtaggtgttgagcgcagaacagttgcttcatactattggcatgtgggtataaattatgaaacaccatgattaaattatacgtgtatattccaaaaaaaaaaaaaaaaaaggga

SEQ ID NO: 77321 - DNA, 302 bp, Zea mays
  Clone ID: MRT4577_170542C.1
ttgacacaacgaagatcccatccgaccaccgtgcgtccagtccagacttcatgctgggaagcacgtctctcgtgcattttttcaatatctaaaacccaccgtgatcgatgaggcgcgcactggcacatacctccagcttttccatcctgagccgctcatccccgcaaaccaggatgcccatcacattttcgtccttgacctctacacaaaccatatggtgattgtacttctgcgccctgaccggatcctcatgcttgttcccaactgacccatacctaccacctggctgatcttcaaaaccc

SEQ ID NO: 77322 - DNA, 1001 bp, Zea mays
  unsure (1)..(1001): unsure at all n locations
  Clone ID: MRT4577_170543C.1
ggnaaaacctaatcctttccgttcccggcgcccctttgcgtgccgtcgtatatagcagccgaatagagaggggggcgaggagagatcaggagaacccaaaccacgtcgtcaaccctatctattctttattcgattcgactggactcttctcttctcgccaagaaggaagacgaacgaacaaaatccgatccctttctggtaaatccatcatggcagcggcaggagcagcgctccttcgatcggtggcaaccaagatggcccgcgcaccgcctcgccttccatctgccctggagcgccatcgccgactctcaacgagttctagattctctacatctactggttctacgccgcagccagccaaccagggcccgcaaactcataaccaggaagttcccagcagtctgtggtacagggccatagttgcattcaacgaagctgcatccgttgtaactttcttcctgctcggtggcatcgcgtttatgcattttagtgtcagtccagcactggaccgcatggaggctgacttggacgctcaacgtaaatcatgggccaccatcagggaagagattaagaaaagccatgaaaggacgcgtgcgatcctcgtttttaataaggaaagtcagattgaagctacagatgtttttgaaggcaaaaggattacgggcatcgggacaaagtaaaagcatgttgcttaggtggcttaaggtgatcattggaaacaagagttcaaacaatccttggaggaggatgaggatgccaagaaatgatatggaactgccaatggagatcaaagacgagcaacttatgtgtgattttttgtttttgtttatgataattgattatcagaaacaaaattgtattttttttgttgagcggcgccaaaaaatggtctgtgatagcatctgttagcttcatgactgtaatgaaaatagtttccaataatctagacatgatgaatgaatcaaggaagtaataacctgcccgtgtcgatttgaatggtt

SEQ ID NO: 77323 - DNA, 435 bp, Zea mays
  Clone ID: MRT4577_170544C.1
ccgtgaggctgagatgccaggggtggacgtctaaagaaggaatctcgtgagtcttctaccataattgaaacccctgctcttgtcattgttgcgctcgtggcatatgtgaagacttctcgtggactacgcacactcaactctgactgggcccagcatcattaacgaataagtgaggagatggtactacaagaactggtgcaagagcaagaagaaggctttcacaaagtatgctttaaaatatgaaaatgatgcttggcaggaggaaattcagctgcagcttgagaagatgaagaaatatgcttctgttttgcgtgtcattgttgatacccagattaggaagatgaagggcctgaagcacaagaaagctcacctgattgagattcaggctaatggtggtaccattgttgacaaaggggactcacggttttaattttt

SEQ ID NO: 77324 - DNA, 633 bp, Zea mays
  Clone ID: MRT4577_170545C.1
agggccaaggggggcattttttattttcattatattggaaacatattttaaaacccctaacaaacctttaaaacctagggggggcccaactgcaacgacatcaaatcagcctggggctccccccaaaacaaaaacaaacaaacttgccgaaaatacaacaagctttaatttgtaaaaattgaaaatttcccggcaaatacataggggaccagcgggggggacaatggtcgtctgctgcaggggtagctgcttgttcacggggacaaaaggggacccaaccctgcccggggatcccatggccggccggtgcatttggtagctcgacagccacaacagcttgtaggctgtccccaccgattgggacgtcaacaagccgttgtttcccgctgtttttaggaggctcaccattttggtgacctcgacggggaggactcccaggtccaagccgttccaaaactgccgggcctggacaaacttttcccactggatccgcagtttcgtcgccactttgggggggagggagctaaccccccaaatgtcggggtcaacaaagggggccaccatttccagcacgccgaaccgagcgatggggcttaataccacggggacggggactttctgcagggcgccccc

SEQ ID NO: 77325 - DNA, 663 bp, Zea mays
  unsure (1)..(663): unsure at all n locations
  Clone ID: MRT4577_170546C.1
ccctaacgccgccaccgcccaccanagtccctaacgctgccgccgcccaccagagtccagcctccagcgtccgtccagaagaccagaactccaaacctccagtccagccgtccagggcaccacgcccacgctccagtactccacggaccacggctccaactcggcagctcgcaagtcagctgctcgcctgctccaactcgcaccaccagtcgtcccagcgcacgggcgggaatcgcgggatcccaacgcacggactccccgccgcagtgccgcacatccacagctcaccaggcgtccggcgtcctgccgcccgcgtccaggacagaccaagtcccgccgccggccgcccgcgtccaggcagccgccagcccgctagccgcccgcgtccaaggctccaggcaaccgccactccaccagccgtctcccaggtacgccgccgctgcagatgtcttcgtcggtatcggctacgtcgagcccacagtccacagagaacggtgaccatgacccaagcactaggccagcagcctcatcccctcctctacagattcaggcagggngacgtatcatcctctccggagacgaccaactcagacaccgcaaggtgagctgtgagcactgagcacaatctattcgtttgatttttggtatattcgattcatatat

SEQ ID NO: 77326 - DNA, 344 bp, Zea mays
  Clone ID: MRT4577_170547C.1
ggggttaacaaacaaggcaatattgcaaaaataaaattttgtttcctgggggcgggctgggcaatggtctttacagaaggggcaaacgggataccctgtgaatgacacaagggttggttaggaaaaacatatgggttttccgggggggaaaaataccccgcggatggcccggatattacaaggcccaggctgagggggcccctcaaaaaaggggtttttttttaaacaaacaagggtggggcgagaaaaattttaaccctttttgggggatgagcccccagttcataaaggccggtcccttggggactggcggacccctaggatacattgaaaattttgttttt

SEQ ID NO: 77327 - DNA, 1153 bp, Zea mays
  unsure (1)..(1153): unsure at all n locations
  Clone ID: MRT4577_170548C.1
ctttttcgattccctacctcgaggccggccgctgagattcgcgactccaggcatccacaaaaaaccatctcccccgcggccccggcaccgcacgctcccgacccggcgagtcccactcccacctaagctgagcggccatggcgcggcacctcgcgccttcgtctggaagcctccaccgtctcctcgcgtcctgccactacccgcccacctcccaggcgccgcctccccgtccgctcctcctcccgaagacccgatcggcggctatgcagctcccgcgacgcgggcggcgcgacgtcgtcgccgctgcagctgcctccgcaccgtccccctcttctccgggtaccgaggtggcagtctggggtaaggtctccgccgtgctcttcgatatggatggcgttctctgcaacagcgaggagccctcgcgacaggccggcgtcgacgtcttcgctgagatgggagtcgaggtcgccgtggatgactttgtccccttcatgggcactggtgaggccaatttccttggaggtgtcgcaagagctaaaggagtgaaagatttcaatcctgaaagtgccaagaagagattttttgagatatatcttgacaagtacgcaaagccaaattctggcatcggattccctggggctctggagctcatcttggagtgcaaaaattctggtcttaaggttgccgttgcatccagtgccgacaggattaaggtggatgccaatctggctgctgctggtttgtccgtgtttctatttgatgctattgtttctgctgatgcgtttgaaaaattgaagcccgctccggatatattcctggcagcatcaaagagcttaggtgtcgacacaaatgagtgcattgtgatagaagacgcgcttgctggtgttcaagctgctaatgctgcggaaatgagatgtatcgctgtgacaactactctagaggaaatagcgttacgacaaggcagtccctcgttcatacgaaagaatattggagacatttcaattaacgacattttgtatggtggttctaatgctcgccacagtatgtaatacaaacaaagattattttgatctagtaacatatctcttgtatgaaataatggactagaaactattgaacccattacattaattctgatttatcagcctgnnat

SEQ ID NO: 77328 - DNA, 684 bp, Zea mays
  Clone ID: MRT4577_170549C.1
cctcgaggccggccgggctgcccggagcacgacacgagaacaccaccaccaggcaccacaaccaaccgaccgatcgaagccggcagacaatcaatggacggccagggcaacagcggcagcgcgggcgcgagcgactgcgacgcggtggcgcgggccttcgtggactactactaccgcacgttcgacgccagccgcgccgcgctggccgtgctctacggccagacttccatgctctccttcgagggccacgccgtcgcaggcgccgaggagatcggccggaagctggcgcagctgcccctggagcaatgccggcacgccgtgtgcacgctcgacagccagccctcgccgtctttccccggcagcgtcctggtgttcgtcagcggcaccctccagctcgccggcgaggagcaccagctgaggttcagccagatgtttcagctggtgcccaacgagcaggggagtttcttcgtgcagaacgacatattccggctcaactacggttgacgcagtagccggtgttcttcgtgtgggtgccgaaaggaaggtcaccatatgctttgatgtcacatggacacgcctcgtgttcgtgtaggatgcagtgcagcagcccaatgtttactttcagaaagcgtagcgtcctaaataaagtttcctattaagggaaaaaaaaaaaaaaaagcggcc

SEQ ID NO: 77329 - DNA, 764 bp, Zea mays
  unsure (1)..(764): unsure at all n locations
  Clone ID: MRT4577_17054C.1
acgcctgcaggtatctcggtccggaattcccgggtcgacccacgcgtccggagccgcggcgcactactgagttcccaagaacttctgctagactcctgcccggcctaacccggccctgcccgaccgcacccgagctcagtgtttgctcggcgtctgccgggtccgccatgggagcccggtgccgcagcttttccgcgctcctgctcctgctgcaggtctcctcatggctttgccaggagctggagcctgagtcctgcagtcccggcttcagttccgaggtctacaccttcccggtgccggagaggcacctggagagaggccatgtcctgggcagagtgagatttgaaggatgcaccggccggccaaggacagccttcttttcggaagactcccgattcaaagtggcgacagacggcaccatcacagtgaagcggcatctaaagctccacaagctggagaccagtttcctcgtccgcgcccgggactccagtcatagggagctgtctaccaaagtgacgctgaagtccatggggcaccaccatcaccggcaccaccaccgcgaccctgcctctgaatccaacccagagctgctcatgtttcccagcgtgtacccaggtctcagaagacagaaacgagactgngtcatccctcccatcagctgccccgaaaatgaaaagggtgaattcccaaagaacctgggtcagatcanatccaacagggacaaagaaacaaagggtttctacagcatcaccggccagggagct

SEQ ID NO: 77330 - DNA, 551 bp, Zea mays
  Clone ID: MRT4577_170550C.1
ttgttttttttatttgttaatagtctacggatacatagttcactagggtagcaccaagagtcatggctactgacctttctaattcggttcaaaagcgaacattgaggtatcaagcgttatagcgtgatctgaaatactctgaagacggaaggagggaggcgcaagagagagacacttcacgctatcttcatctcccattgagttgcacttctctcaacgctaaactcaccgcactgctacaccgcaaagcgcgagcggcgtgtttgaaagtgagagactggctagactacgcccgataatgacttccctgatccagaaaaaactccaagatggctctaattatacaaggaatcctgctttcaaagaaaagtgaaatggggatatggcgaaatcagtagacactacggtctagattgtcttgagccttggtctggaaacctgctaagtggaaacttccaaattcaaagaaaccctgaactgaaatatgggcaatcctgctccctatccctcttttgaaaaacaagagcttctcagactagaacccaaaggaa

SEQ ID NO: 77331 - DNA, 899 bp, Zea mays
  Clone ID: MRT4577_170551C.1
ccggccggggcagcgcaaccttgccttgcctgaccgggtgacccctcgcgcggggccgccccctccccccctcccccctcctcggccagtgtcctccgcatctcccgtctctcctgttccgcctcccctccgatctccgccgcatcacctccctcgaaccctagacccacccgcgccccccattgcctccggccgccatgtctgccactcagcttctccgtcgctcccgcaagctgcagagtttgcaaaatgctgtaggttgtgagaatttttttctttttcggcatttctccagtggttccggatcctttatcgccaaggaaaatggtgttggaaaaagaaccagaggtaccagattttcccagcaataccagcctacaaaagaggttgaaccattctcactaggagtaaatggaaactgcacttggagaaaagcatcaaacagccttaccccaagtgctgctagttggctcaatggttcattctcatgtggacaggtagtttcagcacggacattctcaagtagtgcagacctgcctccacatcaagaaattggaatgccttcactttcacctaccatgactgagggaaacattgccaagtggcttaagaaggaaggagataaggtctcccctggcgaggttctctgtgaggtggaaactgataaagcaactgtggagatggagtgcatggaagagggctatcttgctaagattattcatggagatggtgcaaaggagattaaagttggtgaggtcattgctataactgtggaagaagagggtgacattgagaagtttaaggattataagccgtcatcttcagctgaacctgtagctcctgctgaatcaaagctccaaccagaaacttcacaacaaaggtggaggaaaaaagcttac

SEQ ID NO: 77332 - DNA, 363 bp, Zea mays
  Clone ID: MRT4577_170552C.1
aacacatgctcctgcgcgttctactcacacacttagcgcctacaccgctcaccatgcgatcgagtctgacagcaccggcaagtgccaatgactctacagctgatcatgcagtagctaatgcatctgactgggcaatactgtgcataccgaccaacccagcaggatgaaaaccatgatccttgctgcttctaccaccaagggaagggcacgcagcttacaggcgggcaactacggccgtactagcgactgtaacagctgaaagcgatgtaccagttgatgctgctcactgtgtacgatgtaactcagcggccgccggtcctacagactgctctcacgactactaccgaatgaccaccacgagag

SEQ ID NO: 77333 - DNA, 490 bp, Zea mays
  Clone ID: MRT4577_170553C.1
tgcatgcgtgtcaggtcgactctataggatccccctgcgtcgccttgcgcatcatgagccgcactctacagatgcgaaaagagatcctggaggccaagcgcctactgtgtgtctgcacaagctgaaagtgcaacagatgatacgctacgaagagcagactgctcgtgatctcgaacatgagatcgcgctcatgcagtgcgaaggccaccttgtggtgcagcaaggcccacccgtacaacatcgggcacaagtcgatgacctgtacttacctgagcgcagtcagagcatcccacacgccatggcatgccgaggtgtctgctaccttgacgagcgaagtcccttggcgccacacctgcgagtgtcaacatggcccaacaactttaaggcaaggacgtatcccatgtacatcgggagaactgacccatcacagtacatcatgaggtatcaggtcagccatgtattatccggaggggaggactccacgatggtc

SEQ ID NO: 77334 - DNA, 441 bp, Zea mays
  Clone ID: MRT4577_170554C.1
tgctgcatacagttcggaatatttgctagtaacaagtaatctaccattaggtggcgctggaaaaaaaaaaaaaaaaaaaaaaaaaaaaaaaaaaaaaaaaaaaaaaaaaaaagaaaaaaaaaaaaaaaaaaaaaaaaaactgcacctgcccggacgtccaattggaaagggcaaaatatctaaatatccttcactgtgccgcgcgatcgatcttgaaagcaaaaggccacacttaccttatacggaaccaaattaaaagccaatggccgaaaaataacaaagactgggaaagcgaaaaccctgccaaaaccaaactcaattgcctacaataccattcccctttccccagatgtggcaaaaaggaaaaggcccgaacacgtttgccatccctaacagttcccaaatcagaaagggaaacgcacatgccctgtacctaaacat

SEQ ID NO: 77335 - DNA, 332 bp, Zea mays
  Clone ID: MRT4577_170555C.1
ggaacaaaacggaagggcgaggaggacatgaagccaagcccgtcacctgcagctgggacactaaacagataagcttggaccaaggctttccctatgctcaagatattcaaggatgccatgtcagctccaacttgcatcctctacgactgatgactacctatgagagccgccagaagttgatgccagatccgacgcccaaacagcagcagctcctaaagcacgtctagcacactatgaccccctgtaatgagacctgtgaacgaccactggaacctgctaatgggaagcccaaaacgctcgtaccagatggtgtcacggcagaagttatagcg

SEQ ID NO: 77336 - DNA, 783 bp, Zea mays
  Clone ID: MRT4577_170556C.1
ggaccctcgaggtctgtccggtgatgccatcgagctctcctcctcctcctggatattctgcgaacagcttatgcccatcgagggtccttcctagttggcaccatcaactctcttgcagcagttgtaaagatccgaccgatttactatgaccgcgtgttgccagttttgcttgattttgaccctggcttggagactgcaaagggggcacattcagcaagcctgcggtatgctgtaagagcagcttttttggggtttctacggagtccccaccaggcaatgattgagtctaaagacatattggtaaggcggctgcgtgttctcagccctggtgaggcaatggaacaaaatattaggcaggcagagaagatgtctagaaatatagagcgtgcttctcgtgctagcaaggatgagtctacatcatgggagatgccttatggagatataaatcggaagaaacctgctgttcgatcaagtgatacttttactacgtctgatggcatagctaagagagcaagatttgacatgtctgccacttcaaacctgccagttctgggattgtctgattattctgatatgcaggctgacaatgatgccagtgtgggtcattcatccgatccagctatattgaataatgaagtgtctcctgtcgagaagatgattgaaatgattggcgctttgcttgctgaaggagaaagaggagctgaatccttgggtattcttgtctcaacagtagaggcagatgtcatggccgacattgtgatagaaacaatgaacatctaccgg

SEQ ID NO: 77337 - DNA, 472 bp, Zea mays
  Clone ID: MRT4577_170557C.1
aaccaaaaaaaatgctgctatatgtacaagttggcggcgcctttgggagacgcagcgcgtgtgaatattactgagagatgatgagatgacaagacaactccgcctcggttcttttctgcggcgccgctgaggaacgaaatacgcaaaagaaagaaaaaacccgtacatgagcgggtaaaaaataaaatggcggcaggacatgtctgacatctcgactgtttcagacatgctctcatgcttcagatcttcatcttcccgtgtggattgaacgatctgtatcgacagcatcttccacccccctccttttgggcttttcgctgtgcctcataaaattaaaatctggagatacacaggcatagtgaatgtatatagagaagagagcttgttgaatccggccggaacctgagagaacgtgaagcaggtgtcacggggccacgacgcatgtggccctccttcctactcgtccttgctc

SEQ ID NO: 77338 - DNA, 233 bp, Zea mays
  Clone ID: MRT4577_170558C.1
aaaaaaaaaaaaaaaaaaaaaaaaaaaacaataacaaaatacaaaaataagggggtgggagaacaactcctggtgaggcggacagcttctgtcgtcctacctgattcaggttaccgtacggcccccttcctcggtcttttttttatgtggggtgatctaacctcagtggccgtgtggaggcttgccatcgtaacaacttcctatctcttggggagaacaaattttagcgttct

SEQ ID NO: 77339 - DNA, 303 bp, Zea mays
  Clone ID: MRT4577_170559C.1
gtgacgtggagtaagatagacctgtcactgaggctaaggatcccgctctggatctccatgatctgtaccttatgctgcctgtgatgaaggagactaggtgcatgagctctatgcgagtagatgagagctgaggggagctctgactgatgcacacagcatgtctgacgtggagcctatgagagcacatggctactagactcacgtgcacgcccactgtgtgcgcacctaggttatcacctccggtgccctagacatctgcaagcgacgcgcgcactcaaaagagatctggtggtcacaagctgc

SEQ ID NO: 77340 - DNA, 2635 bp, Zea mays
  Clone ID: MRT4577_17055C.1
accgtccgatcccgcgtcaaaattgcccatcccctcgttacgcctgctcgggccggcgggtttctcggacacgccgccatcgccactcgcaggttcgccgccatcacctcgcgctgctcagaagaggaagcctgcttctcccccgacagcgacgacctccgccaccaccttccgcgctaacgacgtcgccatcacctcgcgtcgagccagacgctcaggtcttcatcgtgctcttcaccggcgacgagaacccaccaacaggccatccgagtcggtctcgatgatggcccataagctgagtcctgacacttccaacctcaggaggccaatggcccagtatacggtgttagtgtagccagtggctgcctgcttctccctcctcaaggcggagcgcagcaccgcggctgcgctgctggcggccagagatgatgacgcgttgcggtgtacaactcctggtggcacgggggatctcctcatcaccatgcctttctcggaggatcaaccaaacggaaagtgaaattgttcggatgtttcatcctccaattcgtcagagtgaggaagcaatagcaaccattgtgccaaggtacacatattctatgcgtgtcttggatgagaggttcattaggatcctgaagatattcaagtggggccctgatgctgagaaggcgctggaggttctcatgcttagagttgatcactggttggtacgagaggttatgaaaactgacgttggggtcaatgtgaagatgcagttcttcagatgggctgcaaagcggaggaattatgagcatgacacatccacttacatggcattgatacattgtttggaagtagtggagcagtatggtgagatgtggaagatgatccaagaaatggtacggaatcccatttgtgttgttaccccaacagaactttcagatgtagttcggaagctggggaatgctaagatggtcagcaaggcaattgcaatcttctaccagatcaaaacgcggaagtgtcagccaactgcacaggcatataacagcatgataataatgttgatgcatgagggccaatatgagaaagtccatcaactatacaatgagatgagcactgagggtcattgcttcccagacactatgacatatagtgcattgatttctgccttttgcaaattaggtcgacgtgattcagcaattcagttgttgaatgagatgaaggagatcggtatgcagccaactactaagatatatacaatgttaatagctttgttcttcaaattcaatgatgctcatggagcattgagtttgtttgaagaaatgaggcatcagtattgccgaccggatgtgtttacttacactgagctaatcagaggccttggtaaagctggcagaatagatgaagcatatcacttcttctgtgaaatgcagcgagaaggctgcaggccagacacagtttttatgaataatatgataaatttcttaggcaaggctggccgtttgaatgatgctacgaagttgtttcaggagatggaaacgttgcggtgcattcctagtgtggtgacatacaatactatcataaaagcactttttgaatcaaaatctcgtgcttctgaggttccatcttggtttgaaagaatgaaggcaagtggaatctcccccagttcgttcacctattctatccttattgatggattctgcaaaaccaacaggatggagaaggccatgatgctactggaagagatggatgaaaagggtttccctccatgtccagcggcatattgtagcctgattgatgctcttggaaaagccaagcgttatgatcttgcttgtgagctttttcaggaactaaaggaaaattgtggctcgtccagtgctcgggtatatgcagttatgattaaacacttaggaaaggctggacggcttgatgatgctataaatatgtttgacgaaatgaacaaacttggttgcgctcctgatgtttatgcgtacaatgctctcatgtctggattagcaagaacaggcatgattgatgaagctcttagtacgatgagaagaatgcaagagcatgggtgtattcctgatatcaattcatacaatattatccttaatgggctggcaaaaacgggaggacctcaccgtgcaatggaaatgctttccaacatgaaacaatctacagtaagacctgatgttgtctcctataatactgtccttggtgccttgagtcatgctggcatgtttgaggaggcatcaaagctgatgaaagagatgaatacattggggtttgagtacgatcttattacatattcatctatacttgaggctattggaaaggttgatcatgaatgtgacccttaaggttggaggtgtatcatatgcagtcactcatttggtgcaagcagagcattcaatctagatctagcaatttcatatggaagagattaaacataaaatagtactaggtttcagtaaatgtaaatagccgtcaccattggattttgattagacgcactagatcgtttaattgcacacttacatcaatatgattgattgcactgtatatcttcccctcaaggtcagtccatcttggtttgtaaattaattgtattacagaagctggagtccggccatgcgcgaacgcgtgggtcgacccggga

SEQ ID NO: 77341 - DNA, 312 bp, Zea mays
  Clone ID: MRT4577_170560C.1
actaactatatcatccagcagcaaagcaaaccattggatagatacaataaataaatgagccaacatgctacactgataaaaactggctgcaaaggcgtgacaacatttaacaagactacatggctacactgggaaaattgtatggcctatgaccagatgctgtgaggctgatcttgatgaccctgcagtacttaagagagccggaagatcaggagcccctccacaatctgtgatggtgcagcacccggctgtttggcgctaagggctctctcaaaggtattcactaagaacatctgaaaactccacaacact

SEQ ID NO: 77342 - DNA, 240 bp, Zea mays
  Clone ID: MRT4577_170561C.1
ctcaatttgagttctgtttgaaatgaggacgtacggactggcgcactagtatgtctgcgtataacccgttccgatccgagaaatgtgggtatgacttgctcggaattgtgcccattgccgagcactccttacggaagttgctacatgaggaccgtggtaacaatgctctattcagttactcaatagagaaaatactttgtgtttcaaatgaacatttagcaaccaaaactggctgacgtg

SEQ ID NO: 77343 - DNA, 513 bp, Zea mays
  Clone ID: MRT4577_170562C.1
agcagtggtaacaacgcagagtactttttttttttttttttttttttttttttattttttttttttttttttttttttttttttttttttttaaaggcaaaaaccaaccaaaacccataccacacaaaaccggagggggccccaaaaaaaaggggaccaagaccggaaccaaaaccggaccgaacccctaatcgggccaaggtcaatgggaagggttaatctaagccccacaaagggaaacaaacggggcaaccggccccccggaaaaaaccaagaaaccaccaaagggcccaaggaaccgggggaaggctttttataaaaaatgaaaccaatattagaataacctggccccgaattggagggaaaaaatggcgggggcgctttgggccaacccgggcccgaagggtttaaggggggcgggggccccgggtgaaaggagggaaccggggggggcggggacaaaactggttctaccccaaggggaccggagggaagccccgacccggggggggg

SEQ ID NO: 77344 - DNA, 450 bp, Zea mays
  Clone ID: MRT4577_170563C.1
atggccggttctaaagatcacaccgatatttctccggacaatatcctgaagccgactattgaaagtctaacggtcgatgagcagcaacaatacgaggactacatgcgtcaagcgaaagagaaattcttatcacaatacacggtggatcgccaccagaaagttgtcaaacatggagagaccgacgttgcatctcttttatcttcacttcatgtccccaactacatcggcgacaaatggggattcacagccccaaccattatatggtacgccgatgaactcatatccagggcaaataccaccaccgccgtccctgcttggcagatcggcccctggacatggtcggaccgtccgagcttttgcccggacagtccggcccttacgcagactatccggctttccctgccggatagtccgggaccgcaccagcgctatcgtgtggcgccccaatga

SEQ ID NO: 77345 - DNA, 281 bp, Zea mays
  Clone ID: MRT4577_170564C.1
cacgcgtgcgttagaagcatcatcctccaataatagccagcctctcatattttataaaactctcaccgtcgccataggagagagcattcctacctaccccgtccccaacgcaatccgtctcctacgtaccaccgccaccttaagatcgagatggagatgaataggatcctcttctccgtcctcgtcgtcatctccgtctcggccaccgaattgcttgcctccaccgatgccgcctccgcttactccccaactgtctcctagtcgtccgcctaagctccccc

SEQ ID NO: 77346 - DNA, 632 bp, Zea mays
  Clone ID: MRT4577_170565C.1
tttaaacggttggaacactgatgtttaattgggcttacaagtggtgcctcatcacagcatattgcagacgagctgcgctcaagtttccagaaaacaacccccgcttcggccacacctccacaacctgcaacacagtgaacaggtctgaggtgtaacggtattggatcgtgctcccacaaaggttatctttagtcttcgaccctaacgacggagaaaggacgcaagagtcacggcgtattcagatgcaatagcgaggctgggagcagatggttagcgaacaccaccaccgtatattcatcagcatgtttctgcgaatggagcaacatagatatgctcaaactctgaagatatgcgaaaattaagactcagaatgtctgggctgacctggggtttgcgagtaggatagcttgatgtttgcaaagaagctcgagtgtgggagataggcccgacttggggtgttgtaatcgacctaaattcgtgtaggtaattaaccacttcatgttacttgttgccaaaaaaaaagtgatgattctgcttgtacacacgccttgtttttttttgcttgttcccttgtgacttctgttgaacagcaaaagctatgagcgctaagatgctgtgggaatgaatagaac

SEQ ID NO: 77347 - DNA, 242 bp, Zea mays
  Clone ID: MRT4577_170566C.1
aaggtataatcatatcggagaaattacatcgttgcctggggggattaacacaattacacaattggttttatccatttttggacaatctgaacatggttttgcacgttcttattactacaacaaaaccgaaaagattgtggaaaagaacgcgggcagggcttatgccatgctcagatcggcttatataattaatggatgtggtccaggagttttaaacttgttaaaacattgcacaaaaatta

SEQ ID NO: 77348 - DNA, 1644 bp, Zea mays
  Clone ID: MRT4577_170567C.1
atgtgcaggtccaacagaacttgctctgcctacgcacgctctgaaagccgggcattgcctcttctacctcggttcattatccatggcgggggagaagcacataccaccaccacctgtgccaccacaagacggacgaggagcacgaggagcaggtggccggcggcgggtactgagagttcaccgaggacacggaggccacggtgacggaggtcgtgtccacgggcgagaactagtacgacacagttcaagaaggaggagaagcagcacatgcacaagcacaaccttgggtacctcgggccggccggggtgttatccagtccagtatcctcgacggtcgacgccggcgcgagcagcaaatggccaccgcggcggtgacgatgaccatggcgacgcacaacccccgcgcccgcgcacccctccgcgtctgcgccgcctgggacatgaacccgggagccgccaccgtggccacgcccaagccctccaaggccaaggccaagccgccgccgccgcccgcgaccacaaccccggcccgcccgcctcctctgacccacgccgatctcttcgcgcgctccagcgaggcgcaaggaggggtgaagaagagcacatatatgggctttgagaaatggtggttgccacctgcgccagtggtgaagaaaccccgatcgctctacagtgcggtgtcactggcttacttgggagactgcatatatgaactttatgctcggaggcacttcttctttccacctctgagcatcaatgagtacaacaaacgtgtgatggatgttgtgaagtgtgagtcacaggaccttttgttgaacaagcttcttggagaagattttctaactgaagaagaaagggacatacttcgttgggggcggaatattgttagcagcaaaactcgcaccaggaagcgtgcaggaattgctgtctacaaccgggcatcttcactcgaaacactaattggatatctttacctcacaaatttcaaacggttggaacaactgatgtttcaattgggcttcacaagtggtgcctcatcacagcatattgcagacgagctgcgctcaagtttccagaaaacaacccccgcttcggccacacctccacaacctgcaacacagtgaacaggtctgaggtgtaacggtattggatcgtgctcccacaaaggttatctttagtcttcgaccctaacgacggagaaaggacgcaagagtcacggcgtattcagatgcaatagcgaggctgggagcagatggttagcgaacaccgtattcatcagcatgagcaacatagatatgctcaaactctggagatacgcgaaaattaagactctgaatgtctgggctgacctggggcttgcgagtaggatagcttgatgtttgcaaagaagctctgagtgtgggagataggcccgacttggggtgttgtaatcgacctaaattcgtgtaggtaattaaccacttcatgttacttgttgcaaaaaaaaaactgtgatgattctgcttgtacttgttgccaaaaaaaaagtgatgattctgcttgtacacacgccttgtttttttttctgttcccctgtttctgttaaatatgagctaagatgtgtgggaatgaatagaaaaaaataaaaaaaaaaatcctgcagcc

SEQ ID NO: 77349 - DNA, 406 bp, Zea mays
  Clone ID: MRT4577_170568C.1
gcgattgggttcctcgaggccggccgggatcctcacctcaaacatcaactactataacaccctttttaaacaacttccttccaaccaccaaacaatcttcacaatggctggcgactgtggctgctctggtgcctcttcttgcaactgcggctctagctgctcttgctctggctgcggcaaataaacaacttgatctttgatcattcggataccacttgttctaggcccaagcttgggtcaagatacatcctttgacgacgaatcacggacggagttatgaagggcggagttgagatcatgatgtgattgggatatgcgcttggatagttagctacagattaagcttaaatactacccttgtgctgagtaaaaaaaaaaaaaaaaaagcgaaaaaaaacccgcggcc

SEQ ID NO: 77350 - DNA, 445 bp, Zea mays
  Clone ID: MRT4577_170569C.1
ccccccccccccaggccatcaagaacgtcacgaggtctctgtccatagggggcaacgccgccgccgccgccgccaccgctggcggtggcagccccaggaaggcggcgccggcgttgtccaggcccggcacgcccagcttcctcaagtcgcccttgtcggcgcgccggggcgggggcgacgagggggcgcaaatgctgtcgccggactccttcgagtgacctcttctgcttgcagttgcagtcagcattcagcacgctagaatggacagggatatcgtcgatctgcaacgcccaaattctggatggatgctccgttgaactgaaaccttttgctgtaaaaaagttctctgggggttggagtgcatgcagagcgaatgctttcgaatggcaaaaaaaatttggaaatcgtacggatttcatttttaaaatgaacagaaccaagtttg

SEQ ID NO: 77351 - DNA, 501 bp, Zea mays
  Clone ID: MRT4577_17056C.1
attagagttatatgtggacacaagaggggatactcgtgcctagatgcattaaataaaacctaatcgcgttgcggccgcgcggaatgagattcctacattggagctcaaaagtgcataatgcattacattcaacggaatctaaaccctatacggcaagagttaaatggcggggagcactcacgcaacggagcggagggcacaaccacggatgctggataggatcttaaccggtacacttttcgaagtagacctcggccctgagcttgaatgctatctggccacaggtgaacacgaggaacaggtccaggtgccactttactagccacagacagaactgggaggtgactggcggaggcgtggggaagtgggccagctactggccgatgctggagaagatgagccccgagagggtgtggtggttgatggccaacacgctggactgtcccattccagagaacttgggcccggcccgttgctgatgactcctttccagactacaat

SEQ ID NO: 77352 - DNA, 495 bp, Zea mays
  Clone ID: MRT4577_170570C.1
ccggccgggaaaaaaaaacccaccctcagatctctcgtcaattgagtcatcatgtccgccgcacccttcttctggcgagctcccctcaagtactgccgctgggcagcccgcgagcgtcccgccctcttctggtccgtcatcatcggcgctgctggtcccgttgccatgcccattgtacctccgatccgacactactttggcgatattgatgcgcccccggttcctgtgacctaccccattcccaatactcccaggaaacagcccaccggctacgacgattaagatctcgaattaaagaggaaggaaataacacggctcggaacagaaaagaagaagcgagcatacactattgtacaaactacggcgtcaccagagaaagcgctacagcggagggggaggaatatcatagaggaattaagggacaagagtcgacgtccaaaatttaccagcaattgacgctccaattccaaaaaaaaaaaaaaaaaacccgcggcc

SEQ ID NO: 77353 - DNA, 768 bp, Zea mays
  Clone ID: MRT4577_170571C.1
cattgggacctcgaggcggcgggatcagcttctctccctacgacactatttctgaactgagggactcgggcgctgcgggctctaggtgctacgacattctgtccaccaagctccaatgcgccggatcctcttgctacgccactgccaccgccagccacagctaatccgactataatttttctcttctagaagaaggcggcccacaacgccaatccctctgcatggtcgtcatcgtctacccacatcagatatgatgatcgacaagagactccgatatgacaaggggctctacatgaacgatgaggtcttgcaccgctcggatgtaccgatactacctcatcgtagatcgtatgtgaagaagaatcgtgatccatgtatctagaagtgatactatcattgctccgacacgtgatcctgtatgtctacgacatcgtttagcctgtacaaaaaagcgcacgacttccacgagaaccaggcataccacctgatccttgtcaaatgtaccttgaatacgatgccactggtgctgtcataccacaagcgtatgaccatgtcagagctaactggcgaatcgctacgtactgctgattctagcatatgtccacctggttctgagaccgttacacactcatctacttaaggaacagcttcaacatcgaatgtggtgcctcagaaaaccccgaagtatcgactcaattcttgatgagttagataactggggcccttctgcaatgatgcagtactggaacgaccctgatactcttcaaa

SEQ ID NO: 77354 - DNA, 501 bp, Zea mays
  unsure (1)..(501): unsure at all n locations
  Clone ID: MRT4577_170572C.1
ccctctcgagcttttttttttcttttttttttttttttttttttttttttttttttttttttttttttttttaaaccacggcaattaaaatgggttgggttggaaaaaaaaccggagggatccaataactaactggggaacagaaaaggcaacattttgccttccaaatggttttttttgagccccttcaaaaaaaggggaggggcccccccccttatatgaggggccaggggctcccaaagggaaaatccagaaccattttattcaaggaaaaacatttcagcctgcccgggggaacagttgccaaataaaacttcctgaccccccttgcccaaacggggggggccattgatttgaaatttaaacttttgaaagntcaactggggggcgagcaaaaaaaaaagcccggggggcagttgaaataaaagctggggctttttccaccgcggttgaagaacttgcgcggggggggggcatcccctcagggggggagggagggcc

SEQ ID NO: 77355 - DNA, 744 bp, Zea mays
  Clone ID: MRT4577_170573C.1
ctccttatacatacttatcactcataccccctgcccttctctctagtttgtgcaagtctaaagccgacccttctttacatcctaactaagatctcgtacgtccaccctctatttccatactcgaagaagctcaactttgtcaaacatcgtcattctctcgacaagatccggacgacaatgctggacaaggaagacaggacgagaatggtccccaagagctcaagccagacgaagacgctcctggccgccatggaggaggagagggcgagtacagccaaccggcgcttcctctgcaaggacgacgcctcctccgtctccaacccctccttccgcgtctactacggcgtcgcctccgcggggtcggtgccattcatgtgggagtccgcgccgggcactcccaagcacgccatgtccagcgccaccctcccgcccctcaccccgccgccgtcctactacaagggcgcggccaagaccaagttcgccaaatcccagtcctccaagaagctgctctcgtccaagccgcctagcagcttcgtgcagagcatcctccccaagctgcgcaggagccataccatgcccgtgccgtcgcggtcaccgtcggcgccggcgccggcgccgcccagagagagcgcgcaggtgcagtgtgcccggagccgggggaacaggctgctgctcgcgagcccgcggtcgtccttctcgtccaactcaaggggagacgacgacaacgacgacgaagatgctggt

SEQ ID NO: 77356 - DNA, 301 bp, Zea mays
  unsure (1)..(301): unsure at all n locations
  Clone ID: MRT4577_170574C.1
agctcggaattcggctcgaggcgtgagctcgtcaccccagcgggggcattaaggtggcctgaatgctttgccatgggttcggggcctcggcgcgtggtgacacgggcgggnctngcagcatcccaagtgggggggcgggnggggggctctagcgggcgctgggggctctgcggacctggagcggcacgtacggcgtgaggctggcgggacgagcgcgagcgatcactgcccactttcaaccgcgggaggattacatgccgctgcactttgagccccacccaggcccagaaccttactaagc

SEQ ID NO: 77357 - DNA, 871 bp, Zea mays
  Clone ID: MRT4577_170575C.1
cgcggagctacctcagctgccgtgtcctgcacagccgccgcttccgacgcagcaaaggcgaacgcgaagcagcaagcaatcaagatcgatggggcggtcgccctgctgcgagaaggcgcacaccaacaggggcgcgtggaccaaggaggaggacgagcgcctggtggcctacatccgcgcgcacggcgaagggtgctggcggtcgctgcccaaggcggcgggcctgctgcggtgcggcaagagctgccggctgcggtggatcaactacctccggcccgacctgaagcgcggcaacttcaccgccgacgaggacgacctcatcgtcaagctgcacagcctcctcgggaacaagtacgtgcgcgacgcctccgccgctgctctgctccgtaccgtagtgcactgcacgcggacatgcctgcctctagaagtctagaggctggttggttgcctgccttgccttcgtcggcctcgacgccacccaaccaaaccaagctgaacgaacgtccggtccgattgcctctgccctctgcaggtggtcgctcatcgccgcgcggctcccggggcggacggacaacgagatcaagaactactggaacacgcacgtccggcggaagctgctgggcaggggcatcgaccccgtcacgcaccgccccatcgccgccgacgccgtgaccgtgaccaccgtctcgttccagcccagccccagcgccgccgccgcagcagcagcagaagccgaggcgacggccgccaaggcgcccagatgccccgacctcaacctcgacctctgcatcagcccgccgtgccagagcggggaggaggaggaggtggacctcaagccctccgccgccgtcgtcaagcgggaggttctgct

SEQ ID NO: 77358 - DNA, 305 bp, Zea mays
  Clone ID: MRT4577_170576C.1
ttaagcgcatgggccaactcacaacatatagagtccacaagtacaacaactattgctggcaaaagatgctgcctactcacagaaccaagagtttctgccagttctgctactagctgcattgaactatgatgcttataagcaacaacaactaggactaccattcaagcagtcatatgatgtctaccctcagtaatttgttacattcaaccaactaccagcatggaactatcaggtctatgtacaggcgtaacaactactaccattcaggcagctaaatgatgggagccctgatgccttcttgacac

SEQ ID NO: 77359 - DNA, 203 bp, Zea mays
  Clone ID: MRT4577_170577C.1
ggaccccttggtcccgaccccttggccgaccccttgggcgggactttccaatgcgcgcggtaaggttggttaacttggcggcatgggcttccttggcggcgttttcgtgaaggccgtggccattaagggtcttgcccgcagcttcattttcgggagggaacttgccgttgccagggcctcgggccggttcattcggaaggccc

SEQ ID NO: 77360 - DNA, 605 bp, Zea mays
  Clone ID: MRT4577_170578C.1
ccctcctcgagttttttttttctttttttttttttttttttttttttttttttttttttttttttttttttttttttaaaaaaaaatagccctttcccaaccggtttaaaacattttatggccggaaccaccccaggaatcccccctaaaaaaataaaaaccaaaataaaaagggaaaaaaaaacccccaaaggggggggaaaaaaccaacccatgtacccagggaaggggggttaaacgggaaaaaaccgggtaaaaccccatttgggccccaaaatttccccctaaaaacaacaggggcccaaaaaaggcccctggcaggttggaccccccccacaaggttcggggtctgctaaaacaagcccgaaaggctgggaaatgggggaaaaagccccttgccctgcaaaaggagggggacccaggggttgaggtctttggggccgaacccccttttaaagcggccaaacattggggccccctttgccattttgggacccaccgccggaggcggggggggggccatgcttgggagctttggggcaaggaaaccccttttttttgggggggtttttttttgcggtttgggttaagaaaggggggggggc

SEQ ID NO: 77361 - DNA, 400 bp, Zea mays
  Clone ID: MRT4577_170579C.1
ccgggagcgacggacgcgtaacgcttgtaacctttataaaccacccaagcgtacgcccactacaccaaacctaaccagtttcgaggccatcatattacggctacgtgcgctctttccctttgaagccaacccagcacatgcgttcattactcccgaaggctcacttgctcctaatcacaataagctacagtcgctggtaccagttccttgacagatcttcgaacacgcaaacttgcatgtctacagactacctctagcacttcttaccagcgcattacaacagacagttccacaggagcttcaacagtcttcggatcatgttaatctacaaaccgttgccagccaacaacgatcccaatatctgccatgaatgaaaaacctacccgatagataccctgta

SEQ ID NO: 77362 - DNA, 1244 bp, Zea mays
  Clone ID: MRT4577_17057C.1
gcgagagaagtatggtctacacatgagccagttcacataaacccttcagacccaagcaggtaccagcagaatggcacgccagctaaagaaaggagtcaatgcactgtaatgcgaagaattcttcatgacatcctatgagataatggttttcttgaatgggctagctcaagttgtgcggtttggtgtcatggtgttgttcaaacttcgcagtggtgtgtgaaatagaagaatcccaattcccaagcatattatttgtcacgcttgtttgccggcaggtacaggggaaatacgacagcatcatcgtggaggtgaagagctactacatgtcgatgagcaggtacagggatgataaaaaaagaaaggtatatcttcacgtcgatgagcgggtacagggatgacaaaaaaagaaagggtgagattatgaaggtttatgccaatgatcaaataaaaacatgtgttgagtttccagagtgttttgtataggattgctggtcaaacatgagctgttagtgagagaagaattgtgccctcttccctctggttctccctgattctcacagatgaacaatcttctacatgcaaatttctgttatgcgcgcttgtggtcattggcaggaagactcatgtggtcggaagagggctgatgagcacgatcaccatggatgtggacaccacggcaagggtggacgagttcttggttaccacctttgtaggcccattggtggaggaagacttgacgagaggtgtgtggtgatcaccatctgaatgtgggcgtccaagcttctttgatgccgggtgtattgtcctaattgtgactatcgtcgctggtcgaacatttggctagcatcgatgatgtatactgcaatgtgaatccaataattggcttggctctccatacaaccaataactaggagatcaggtgattgctaattggacaataggggtgctcgtgttgtaatggtgtaataggttcaatgccgtcgtttttacagtcacagtagtcgtgtgttaagtgtccaaggtgatttacctctgccctgtttccggtgtcttagcctgattggatagcttctggggtgcgggatgtgatggagcaaagggattaaaacatgctgatttatgttgcccaaggaattcgccagttgcttaacattttgtttttggcatacttcgtagtcaattactgtccacggattcttgcatatgtgaaactgaggaacatttacttcaaatatcattaaaaa

SEQ ID NO: 77363 - DNA, 511 bp, Zea mays
  unsure (1)..(511): unsure at all n locations
  Clone ID: MRT4577_170580C.1
agaacacaccatgtgaggcgcacnagcaacgaccgaacaacaagggcnaccaaganaggagcccgccgggcgccgcgcgccctgnnagggagcgcaacaaacgcgnncannannccacaangcncacgggccccgagggccaggacaccacagngccgcccaccagnnacgncaaggggcngcgaacagggagcggngcaagccaacacgcaacaacaagcgcnngcggcgagcgncngacaacaaccaanggcccaagngcaacaacaagccgngccacancgaacaagacaagccaccacaacgcaacagcaacaacagacccaaccagcacggagccaccnagccagggggaacccggccgccnacnngcaagagcagcngcnagcaaccaacccaccagcccnggcgaacggaggngcaaaccagcaacaacaacagcnacaacagnaagggccaacgcgaagacaaccagccagggggaaccccgccgcccacggacaacaacaac

SEQ ID NO: 77364 - DNA, 146 bp, Zea mays
  Clone ID: MRT4577_170581C.1
ctgtttttgtaacgacaactacatggtttgtcctggggtgatttttccggccttttgacatctatcaagggttacgatcaagttcactaccaggataatatttttgatttttcaacagcttatatgtaccgctgctatgcttgggg

SEQ ID NO: 77365 - DNA, 405 bp, Zea mays
  Clone ID: MRT4577_170582C.1
aaaggaacgacgccacgcgacccgctgccatgggtgtcctttttcaacaaattttaacggcgatggggaacaactcgggggcaatgaatggaagcaccacatgaatcacagtgcgcatgacctgacacagttggcccaccagcagcaacagcgtgatttaggaaaccaattgcttgcgggcctcatagctggaaacagcttcaattaccttcaatacgactggaaaccttctcaacagagtgagctgtagttataacgctcgcaccgaatatttatacagttatcctagataggtcgggacatcaatgacaacacggaattttcccctaaccacaacctgcccttccttataagcggagagttcttactgatggtgcatgctaaatgtttcttcgaatatatgaa

SEQ ID NO: 77366 - DNA, 455 bp, Zea mays
  Clone ID: MRT4577_170583C.1
gccccagggcaaaaggggggttatatatatatgagagcctacccaacaatggtttacaattgcaaaactagcgggggggaccatcccaaaaaacaaggacattggacagggtgggggcctcaaaagggtatgggtctgaagggcaactcctttaagggaaaaaaggaactggggaacaactttaaaataccgccaaatttggcccctttcaaaagccctaagctctcccgcccaggaagggggtcattaaaaaaagaaaaaaaaccttttgcaaaaacatcgtcccgaaaaagaatgaggagaaaagtaaccgcccattcccttatttggaataaaaagggaaagaattgggctcgggtgcccaccctgcaacacaaaactattattggaaaggacccccctttaccgatggtatcggtaggagaaatgcaaacttgctttatgcacacttttat

SEQ ID NO: 77367 - DNA, 568 bp, Zea mays
  Clone ID: MRT4577_170584C.1
ctactcctccgttccttcgtctcgtcgcgtttccgtctctaaattccttgcttctctccacgctacgctatccggaaccttccggaaggttgctttgccaccctcccttccgttccgtccaacggtgtcgtcgggacagatctgcgctgtcggcggcggcgacggcgccatgggcgagcaggccgcggccgtttcctcctgcgagacgcctgctccggcggaggtggggacaggggtcgggcagaggtcgctgcccacgccgttcttgaacaagacgtaccagctggtggatgacccggcggtcgacgatgtcatctcgtggagcgaggacgggtcggcgttcatcgtgtggcgccccgccgagttcgcgcgcgaccttctccccaagtacttcaagcacaataacttctccagcttcgtgcgccagctcaacacctacggatttaggaagattgtgccggacaggtgggagttcgccaacgactgcttccgtcgaggagaaaagcggctgctttgtgacatacatcggcgaaaggtgacgccgacggtgagcccccttcaccccctt

SEQ ID NO: 77368 - DNA, 345 bp, Zea mays
  Clone ID: MRT4577_170585C.1
acgctccgccagccgctgccactcgccacgttccaccagccggcgccccttcttctcactccgctggcgccggcgccgcgttatccatggcgtcggagaagaagcaatccaacccgatgagggagatcaaggtgcagaagctggtgctcaacatctccgtcggagagagtggggatcgcctcacccgcgccgccaagctaggtacactgtccgttcctttggtatcaggcgtaatgagaagattgcctgctatgttactgtaaggggcgagaaggcaatgcagcttctggagagtggacttaaggtcaaggaatatgaactgctaaggaggaactttagtgacac

SEQ ID NO: 77369 - DNA, 917 bp, Zea mays
  Clone ID: MRT4577_170586C.1
gcacgaggagagagagaactagtctcgagtttttttttttttttttttgcagaaccaaatgaatcggcgcattcagctttcaaagtatagagatcataagctcctctgtccaaacagtcttggcaaataatatcatccgagatcgacaaaacttcagtagaggtgaaaactctgttgctactggtaaacatgtctaacggctgggctgtaacatgtgcgtccctaagaagtgttgccctgagccttgttgaggatgacaccctcgtacttgacctggaaccatttcatagcatcctccttggtcaccctgtgctggatcccaacacgggacttgcaccttcggcgtcgggcgacacggtacccagcgcgctcaaggacgacgtagaaatccattccgtagataccggttgaaggatcatacttgatgccaagatcaatgtgctcctggattccgaaaccaaagcaccctgtgtcactgaagttcctccttagcagttcatattccttgaccttaagtccactctccagaagctgcattgccttctcaccccttacagtaacatagcaggcaatcttctcattacgcctgataccaaaggaacggacagtgtacctagccttagagaacactggtgactggccactcagttgctccaggaccttggcggcgcgggtgaggcgatccccactctctccgacggagatgttgagcaccagcttctgcaccttgatctccctcatcgggttgggttgcttcttctccgacgccatggataaggcggcgccggcgccagcggagtgagaaggaaaaggggcgccggctggtggaacgtggcgagtggcagcggctggcggagcgtggcgaggggcggcggcgggggaattaaaagagggaaaccctagagacagggggggtc

SEQ ID NO: 77370 - DNA, 197 bp, Zea mays
  Clone ID: MRT4577_170587C.1
cacaaaaataaaattatatttgtcttatgtcattacatatgctgaaggatgccttggtgggtggagacccaatagaaattggcagcagatcaactgtttaaagttttaggagcccagagatgaaaacagtatgttataattgttgcaagagtcttatatttgggagtatagtttattacccaagggacagaatgatg

SEQ ID NO: 77371 - DNA, 240 bp, Zea mays
  Clone ID: MRT4577_170588C.1
cttctttttttttttttttattccgcatatgggggagtttttttttataagatctgggcgcaaagtatacatgctacatctcaagcttcgcaatggttagctctatcgtcctatatgatgactagtcttagtactaaaatcgggttgttttagggacactctttcggttatttatcatagcaccatgcattgggacatggataatatcatctttatgatggctttatgggatgggaatgg

SEQ ID NO: 77372 - DNA, 698 bp, Zea mays
  Clone ID: MRT4577_170589C.1
ccttcctcgagtttttttttttttttttttttttttttttttttttttttttttttttttttggtagcaacgaatgatgttgaaaaaagtaagatttatacacgcccttggctttcaatctgatgacagcaaactgggggaaatagtcaaaggctactgttgtttctcagggggggaagccacgttagacgctgatctggattctgattcaccacaagcccttataaccgcctcattctgtgataaaacattgcaaaatattactcgcttgtcgggtcgaaatgctggaagctaggcaacaacgaaaaaagttctgcaagaactgacttctaaaccctgctgtttatcattacatgttattcaataaggtttcaaacctacatgaaatccaagcatttagcattgtccaactttaatacaacgaaaggaacaaacctaaaggttaggaaaacagtttttgcgattatggtaagaaggtaatgttatcaagccgaccctagctcagtcctgtatatttcaaaaccgatatactacacgatatataaagcaaacaacaagaatatgaaagcactagagcagcagattcttgtgagatttgatgtccagttggtcagttttgtaaaactttgaagtgtcatgtatgtacgcccatgtgtatgtattttgtaagaaaacagcggcagcagcagtagagcatg

SEQ ID NO: 77373 - DNA, 542 bp, Zea mays
  Clone ID: MRT4577_17058C.1
accaagtacatttgttatttttcagccagagaccaattttaccgattacagaggagcccaggcaataccctataattaaggaccggatctggacagacaaccaactttactgaaaagcggatcttgacatcctggctactatcagggaaaatttatgatgacgaccaaaaggttttctcatcataatgatcacataaattgaacccggtagaaaaaattaaagaaacctgggtggcctatagtgggaaactactcccataggagctgttgtcataccatgtccgatttatattacgtaacactgaggtgcaaaggttaaaatgaagagagcacacccctcggaaaagaatattggtgcaatctgccacctggatgtttttttttttcaccttaaaaagggcaacttcttttattcttatgaacgtccggcccataaagattcaaagaacctaaggcatcattttttgtccttctcagggaaattgaagaccgtggttactaagggctgcataaaatacaggataagttggatattcctgaat

SEQ ID NO: 77374 - DNA, 214 bp, Zea mays
  Clone ID: MRT4577_170590C.1
atgttttttttttttgggtttttgtttactaatttattgggcgcttatttcaattggttttgtctaccgtattgtaaacccaacgggcattctagcttggaagatgctgcaacctttgcgagcacggacataaaacacggaggaggcaacagaaaaccaggacacacaccaagaatggacagcaaaacaggaccatggtcattgggaaaaggag

SEQ ID NO: 77375 - DNA, 529 bp, Zea mays
  Clone ID: MRT4577_170591C.1
ggtttattcggcagcagcaaatgctactcattatagggatttcgacaaaacgaatttattcatcactaaagccgaagtcagtaggagtactattatgaaaaaattcagacctcgagctcgaggacgtagttattctataaaaaaaacgatgtgtaatataacaattgtactaaaccagtaaaaaaaaaagaaatataatagaaaaatatgggacaaaaaataaaccagtaaaaaaaaaaagaaatataatagaaaaatatgggacaaaaaataaatccactcggtttcagacttggtacaacccaaaatcaccattccttttggttcgcacaaccaaaaaattattctgaaggtctacaggaagataaaaaaatacggaattgtatcaagaactatatacaaaagaataggaaaaaaaggctcgaatagaaaaatggaatcagactcaagttctgaagtaattacacatataaaaaaaaaaaaaaaaaaaaaaaaaaaagtactctgcgttgttaccactgcttaaggg

SEQ ID NO: 77376 - DNA, 228 bp, Zea mays
  Clone ID: MRT4577_170592C.1
tttttgaacttaaagttgtcccaagggtttcacatttaacaatggccgacataataggccatttcaagggcgatgcctgaataccgatgttgggctgacaaatgataataacttgtggaacacaaaaaaaaatttcaaaatcgctccgatatgaactgaatcgccacggggggaactgactactttgattggggacacaaagtttttgttttgaaaactttaggcttt

SEQ ID NO: 77377 - DNA, 413 bp, Zea mays
  unsure (1)..(413): unsure at all n locations
  Clone ID: MRT4577_170593C.1
tagcagttacggtcagatggktcagtagtkgttcattragtcgtcgtccacktcatgaaaaggcagttgaaccgtcttcaccgcacgaaacttgccanctttgttcawakgckcaakctccagcctatagaagtkccaatgcbstcgccggatcacstcgagggccgctaggaagaaggaagttaccctagaatccaagckcccaaaatttggatggatgakgggcttcagccaagckagcctcawcacaagggtcagtcccattnacagggagtatatggattkcctcckgaggatgagggcgttcctkakccaggggtkcttggagttgggctggagcaggccccawtccttkacgaakycccaratacagctgggacaccgtcgcgccgctggacacggcgacgaggagc

SEQ ID NO: 77378 - DNA, 370 bp, Zea mays
  Clone ID: MRT4577_170594C.1
gggacccctcgagccggccgggatccgactgcctacaggcgcctcccacgtctgccagtctgacactccgactcactccccctcccccgccccaacccgtcgcaatggccgccgtctccgcagcaccgaggccctcgatgcctccgcagactcggcctccgagcccacctcatctcctccgcctctccggtcccaatgcgcgggctccccttactccgcagacgattccgctccttgaccacgggctacagtgcctagcaagacacgaccctctggactcatgaagccgtctccgccttcagtgctgccacaggcgatggctccgtgtccctcatcgacgatgaaggatgagacgaaccggttgctcgtg

SEQ ID NO: 77379 - DNA, 1280 bp, Zea mays
  Clone ID: MRT4577_170595C.1
ttcaagaaccagccaagattgagtcccaacagccgtctgggggaggctgttaagcaacttgcacctgccaacttggggctccaatcatcaatggataggcaagtaaatggttcagggacagcatctgttcccctgaagcgcaatcctggatcccatatcagaacattggaattatggggactaagtggagatgttatgggaaagcttgcatgtagcgcactccttggctttgttgtatttagcacattaaaattgaccaggtttcagtttgggcatgtgagatacacggacccaagtagagagtctgcatccatgttgtccttgaatgaagcgtctgcaaaagaaggctcttttatcaccagtcgtgtcaggaagcattttgaaaatatatcaaaatttctttggctgagtgataggcctaattcaaatagcaaaggaagtgataaacacccagcggttaatgatattactgctgcagtttgcaagcaaaagatggatattcaagaagcagaaacacttgtaaaacagtggcaagacataaaatctgaagctcttggccctgactatcaaactgacatgctacctgagattcttgatggttcaatgctctctaagtgggaagacttagcgttattagcaaaggaccagtcttgctattggagatttgtgctgctaaatcttaatgttgttcgagccgagataatcttggatgaaataggtgctggtgaggcagcagaaattgatgctgtacttgaggaagcggctgagcttgttgacgattcccagcccaagaaaccgagttattacagcacatatgaagttcagtacgtattgaggaggcagaatgatggatcttggaaaatctccgaggctgctgtccgggacctgacgtgatttcggccaactcggcaaacgggctacacaaccattggcgtataggcggcatggcaatcttaacctattaggaatgtgtagtggcactattaggttacctgcagttcaatttgagttctttgcattagttagctgagctccgttgggatgctttgaggtcttgagctgctctcatggtgagcttggccctttggattcaggatttgacacaatagttgctggcagtacagatgctaaccagtgctgattccacattcttccttttccgatatgatgtgaattatgttatctagtttttgagttttacccacgtgtaattgaaatccgtgaccgccattgttcaaagaacaatgcaatttgctgaattgatgtttgcgtttaccggc

SEQ ID NO: 77380 - DNA, 466 bp, Zea mays
  Clone ID: MRT4577_170596C.1
attaaaaaaaaaaaagaggggggcaagggttttaaaagggttttttccaaaaagattctgggaaaacggcaaaaggtttcccggtgggcatggaattaaactttacatttttacaaggtcaaacataaaaaaagaacagggccacacactaaattttgattttgaaaagaaaaagccatcggaatcgggaaaaaaccattttccattgaaaatttttggccctggaaagggaaaagggaaatgtttttaaacaaccccctttttgtttgacttaaaagggggggagttaaaaacccggaaaccaaaggggaaaccatttattttgggaacgtccctgatgcaaccattgaaaaaaattccagcccacccatttttttgaataaagggggaaagggggccaccaaaaaatggaaaaaggatggtcccaccgggataaaaaaaaaaaaccctggcgggaacttttttt

SEQ ID NO: 77381 - DNA, 834 bp, Zea mays
  Clone ID: MRT4577_170597C.1
gtgcggcgctcgaggcggccggtcgggaaagaaagaccggatccattttcctctcgggggagcggattgggtagttgcctgcttattgactagttcttggcgtggcggctaactattgtgaattttgttttagtctgtcctgttggcttcttccttccgcttctcctttctggccgccgaaggcaaaccacgcggcttgttcttattgaatccatcaaggacgcaggaaagataggatcttcggctccgattctcggagcaacagcgcgaccgcagcgggttttggtgcttcctttctttagggttgtgtccttgcagaagttgctctgtggaatggggacctgtcggaggagagttctgggggtatggtttttcttctggttcttgttgacacttgagcagtgcacatccctgaatcgtgaaggtgctgctctgctgagatttaaggcggcgatcgaggcagacccatatggtgctttgttggactggaatcaagagagtttgagcccctgtacttggtttggtgtggaatgctccgatgatggactagtcatgtctctgagcttagcaaatcttggtctaaagggtgttttgtctccagagcttggaaagcttatgcaaatgaaatctctaattttgcacaacaactcattctatggtaccatacctagagaaataggagacctacaggatctaaagatgttggatctgggatataataatttcagtggaccaattccatcagagctacaacacatattatcgctagaatttctatttcttgaaggtaacagactttctgggcgttcaccagttggagtacaccaactcact

SEQ ID NO: 77382 - DNA, 615 bp, Zea mays
  Clone ID: MRT4577_170598C.1
gcgacgacgaggtcggtcaaatggcattggaaaccgcaccttctccctcccttaaaccccacgtcgatggcggcagcaaatgtcccccgcacgggcacggcggtggcaaccggcggtgggacatgctgacgcgtttccacgccggctacttccgcatcagcctggcgctcagcgggcaggcgctgctgtggcgcacgctcatcagcagcgactcctcctctactacggcggccacggagcctcccctgcccctgcccctgcccctgctgctgcgctccctgccctccgtggccttccttctcctctggacgctggcgctgctcgccctcctggcgctcgccgcgctctacgccgcgcgctgcctgctccgcttccccgccgtgcgcgcagagttccggcaccacgtcgccatgaactacctgttcgcgccgtggatctcgtgcctactgctactggctctgatgaggaccactcatcctctccaactcgcagccatgatggtgacaaagcagctgcagatgatgatgacgatgatgtccagtggcagactgacacttcaattgacgctgcgaacggcgcatgcaagagcagctgagtgcagcaactgctgaaatg

SEQ ID NO: 77383 - DNA, 113 bp, Zea mays
  unsure (1)..(113): unsure at all n locations
  Clone ID: MRT4577_170599C.1
acacggcatgtacgctgcgccgctcatgtgatgaaattggngatccagacaaagagcgtggaatacatgccccgtgcacctggacccaggtaatcatcgctcatagctatcag

SEQ ID NO: 77384 - DNA, 651 bp, Zea mays
  unsure (1)..(651): unsure at all n locations
  Clone ID: MRT4577_17059C.1
ccaaaaacacctgggcgnaatgattacaatgctgagaggggtaaatctgnccagcagaagtggttcagtggatgttgagcaggcaaaaggactggctccacaagcagtgcccctgttccaagagatgttcccagaaaataccatggcccattattcgatttcccatccttcactaggagacacgattccatgggatctgcaaattacaacagcaatctgtcactaggttatgatgtgaaagatttattagctcaggaggggatgatagttcttggtaggaaacgtgaggataacttaaaaaagataagtggtttgcttgcaatcaatctagagaggaaaagaatccgacctgatcttgtcttgaggctacagatcgaagaaaagaagctcaaactcctagagcatcaggctcgtctaagggatgaagttgagcatgaacaacaagaaatcatggcaatgccagataggatatacagaaagtttgtcagacaatgtgaacgccaacgtgttgagcttgtaaggcaagttcagcagatgcagagagcttcaagagagaaacagctgaaatccattttccagtggcgcaagaagcttttggaggcacattgggccattcgtgatgctcgaataactcgtaatcgtggggtggcc

SEQ ID NO: 77385 - DNA, 345 bp, Zea mays
  Clone ID: MRT4577_1705C.1
ctataacacttgaggctacaacaccaggtttaacgcctggttgtggggctgtaaaagagcaaaagattattgctcatgctggaaagatgagtgatggatacagatggcgtacgtatggacagtaaattcctaacggaaaccaaaccccatgagttattacctttgcacccacggtggatgccctgtccttaaacaatttaataaagcaccagatgatgataacaatatttttgtaacttattaaagcaaacacaatcaccactaacctttcataatcattatcatacctatttctttaattagtacaatcatatacaaccatctttcaacccaacaacataattt

SEQ ID NO: 77386 - DNA, 234 bp, Zea mays
  unsure (1)..(234): unsure at all n locations
  Clone ID: MRT4577_170600C.1
tgcacaggcaccaggtaaatcaaagtttttatgatgaattggtgattgtcttgttttgacaatatatttcccgttttgaccaaatttattcactagtgcacaaccgttgtttattggttagctctgcccccgctggtgtccttactcgtgagctttcatgagatgatacagataaccttgagtgttgcttgtaggttgtaatattatcagtgacaatgaantcctgtcattaag

SEQ ID NO: 77387 - DNA, 320 bp, Zea mays
  Clone ID: MRT4577_170601C.1
acttaaaacatacaatagagatcccccataagcgctttcccccctctagggacatagctcttcacgccacactctttcgccttcgcgtgtcaccacacccccgtctagatcatcaccaaccaccccagtaacccctccacccccttctacatctccttcacccactcctaccgcctcataatagatgctgccaccaaccacctcgccatcaaccccatcaacaccaccttttatgccacccatctcatcatcaggaggatcatcaatgcttctgcccaccaaaatatcaaactgccgccccccaacaacatttctcctcc

SEQ ID NO: 77388 - DNA, 399 bp, Zea mays
  Clone ID: MRT4577_170602C.1
cccacgcgtccgcggacgcgtgggcttgcttggcagcaatcatgttagtgttacccctgcagtacaaaaatctaaaggcaaccttatcaatggtaccccaacaatgcagccctctagcaagacgaccaatacaaccccagtagtgcagctatctcaaggcaaccctactaatgcgtccctagcagtgcagcgctgtcaaggcaacactagagctatcccagcaagtctgcctcttcacactgaacttattggaaaggatgtgatcttatatgccatattgagagatcatcctgtggctaagggaacaattatttcaactaatccaagctcagtgctaggaggagttgctctaggaaagcaatattgtgaggttgttgtgaatgttgtgctgaaaaggga

SEQ ID NO: 77389 - DNA, 206 bp, Zea mays
  Clone ID: MRT4577_170603C.1
gcgcccacgcgtccgctcacccttggccgtcttcgacgagcgccaccacggtaggatgacggggcttaggaaccacaatatcaagacgtttacctgcaagacgatcgtgaaggaccttagctcgtacaataaggtatgttccaaggacgctgccaagactcccgacttgataaagtatgccgctgatacctactacctgttacagc

SEQ ID NO: 77390 - DNA, 671 bp, Zea mays
  Clone ID: MRT4577_170604C.1
ggtacccttcgggttcggcccgaggccaaccccttcggcgcgcgcgccgtcaggctttacctccgcgaggtccgcgacagccaggccaaggcgcgcggcatcgcctacgagaagaagcgccgcaagcgccacccgccggcgcaccgccagcccaagcagcagcagcagcaggacggccagcaccagcacccgtcgcacgccgcgccgggcacggtggccgagccgccggcgccgcacttcttgatcccgcacgcgcacttcctccatggccatttcctggcgccggcgaccgagcccatcgacccggccgcgggcggaggtggcggcactggggatgatattgcgctggcaatggcagccgccgccgaggcgcacgcggccgggttcttgatgccgctgtccgtgttcaactagctagcttgcttgcttgcaccagtacttcttccaccgttccatcggcttaattagcagaaatgcaagagtgattaggcacgtaagtaaacttgcaggttctgctaatggcgaccgatttggtctcggcgtgcgcgcgcgatctaagtatgagatgacactggctgtgtgccccatcatcaaccgctgctactgcctgtctgcctgccagccttttggttgtactagtgattttgcatggtcttgtgtatgcagtgacc

SEQ ID NO: 77391 - DNA, 489 bp, Zea mays
  Clone ID: MRT4577_170605C.1
cactagtaacggccggcagtgagcgtggcaatagggtcttggatatgtgcggactgggacattagtgaaaaaaaaaaacaaagtacaaagcaaaaattgaaaaaaattttttgaattatattttttataaaaaaaaaaaaaaaaaaagtttgttctttggccgtttcctctctagggggaatttttcgtgatatgcatcacactgggggggggtggagcatgcttttggggggcccaattggccctatagtggggcgctttccagttgattggccggggttttacaacgcctgggcgggaaaaaccttggctttcccttgcttaatggttttgtgcggatgcccctttggccagctggggttttcttagagaggggcgaaccgatctccttttctttggtctgcccgcctgtttggagtttggacacccgtgtgccggggcttttctggcggtgggcttggtgcgtctgcgggttgttaccgttttttt

SEQ ID NO: 77392 - DNA, 1621 bp, Zea mays
  Clone ID: MRT4577_170606C.1
ccccggccccgcctgctgctgtgacatgccccatggtcgccgccgctccaggcatcctcccgtggcctcacctccctctcccttcctcctcccacccgtctgacgcctctgacgccgccgcagcagcaacagacgccaacacctccgcgtatgacatccagatcttcgagcccacctccatcgaggagcgtcgtcgcctcctgatccagcggcgtcgcctccgactcgccgcctcccatgcctcgcggctcaccgttgcctcgcgcgtctcctccaaactcatcagcgccaccgcctcctgctccagcggcgtcgcatccgatctgccgcctcccctcctcatggctcgtcgttgcctcccgcctcttccccaacctcgcccttgccgcccttggaggatcccaaatccgacgacgagctcagtaggcccacgcagacgcggatgtgctatgaacttcaggtggaaaatgcattacaatttgtctttcacgatatactgaattgatttatcattgtcctgcaggactggatgatagatccgtgtacgataccaaacaactctccgctctatcattctcctgatgtgcatttctgatatattgagctcaagcgtcagattctgtatcgatggcaatgggttccagaacagtacacaaggcaatttcaagacggttattcaattgctcaaatagttcaaacaaagaaacttaaatgtattaatatgatgatgaatagtctcacacattgtgttggctctgctccatttgtgctgctagaatgtgatttgaagtattcaccttttgacatggataaacatcttctctctgttgcatttgcaggcgaaagaaggctcatgtgctgcttcgaaaatcagttctaagaaggcaaccagggacaacaaacctgataagggaagaaacatgttctggataaatattggcctttgtttcaagactccaagcccgccaccatccagggatcaatcctcaccacgaggaccaggggtgatgccaacaaggtgtacgtgaacctttcctggggtgttgataatttagctctcgcaaacctgttcactgagcaaggaccatctatgacagtgagaacaagtcaagagggtttgatttttgtcatgtatggttccacagaagagcctgagaatgcattatcgaatctcaatggagctatgagttctgaaacccttttttcttccccttgctgctcgcggcatagcatttggaaattgaagtacaatttgtctttcaggatatactgaattgatttatcattgtcctgcaggacttggatgatagatccgtgttacgataccagcatcaaagccgcctagaagcaatactgaactttcacttgagatgtgagtagttgtagtagtagccgtgcaaactctggaatatagtatcatcattcctagatatgtagttgtaaattctctgcccagaggtttgagctatcactcagattatgggttcaatgtcatgtatagagtcaagaaaaaacatcttctgtgcgtcttcgagtctttcaaaggcaaaacaaattacacgcgcgctgacgcgcaccaatttactagtatatattcaggtacaaagtttgttccgatttc

SEQ ID NO: 77393 - DNA, 376 bp, Zea mays
  Clone ID: MRT4577_170607C.1
ctcgagccggtcagattctgtatcgatggcaatgggtgccagaacagtacacaaggcaatttcaagacggttattcaattgctcaaatagttcagcgaaagaaggctcatgtgctgcttcgaaaatcagttctaagaaggcaaccagggacaacaaacctgataagggaagaaacatgttctggataaatattggcctttgtttcaagactccaagcccgccaccatccagggatcaatcctcaccacgaggaccaggggtgatgccaacaaggtgtacgtgaacctttcctggggtgttgataatttagctctcgcaaacctgttcactgagcaaggaccatctatgacagtgagaacaagtcaagagggtttga

SEQ ID NO: 77394 - DNA, 309 bp, Zea mays
  Clone ID: MRT4577_170608C.1
tttgttagtccgacacccgcatgccacaaagcgcacgctggttggtacaggaatgctgtgaaatggccgaccttgccggaaagcgcaacctaggcagtgagcgaaactgccaccgaaagcacctggcggaccgagagtttcattactctcgccaccggtgttgcaggtaaagttaggctacaacaaccttgtctaagatggaacatcgaacaacggcaacatgtggtgcggcaatcgacgattctgaggcaggggtctgttagagcgtgctccacgggcgggactagctggggcggttgctgctgcacg

SEQ ID NO: 77395 - DNA, 597 bp, Zea mays
  Clone ID: MRT4577_170609C.1
cttgactctatacatgacattgaacccataatctgagtgatagctcaaacctctgggcagagaatttacaactacatatctaggaatgatgatactatattccagagtttgggctactactacaactactcacatctcaagtgaaagttcagtattgcttctaggcggctttgatgctggtatcgtaacacggatctatcatccaagtcaccttgttggcatcacccctggtcctcgtggtgaggattgatccctggatggtggcgggcttggagtcttgaaacaaaggccaatatttatccagaacatgtttcttcccttatcaggtttgttgtccctggttgccttcttagaactgattttcgaagcagcacatgagccttctttcgcctgcaaatgcaacagagagaagatgtttatccatgtcaaaaggtgaatacttcaaatcacatttgaactatttgagcaattgaataaccgtcttgaaattgccttgtgtactgttctggaacccattgccatcgatacaagaatttgacaataatatgctcatatgttgatagcaaggactcgatatatttgggtgcctacaactcg

SEQ ID NO: 77396 - DNA, 338 bp, Zea mays
  Clone ID: MRT4577_17060C.1
ggaaaacaaattttactggggggccattttttatagagtactccaacaggggccgggcaaccgggcaggcaatggtacacaaagctagactgctttactaggagtaggaccaagcctgcctttttggactggaaaaaaagctaatggttggtttaacaacctagctcgccagatttttccccaaaacacacccccttgctgttgcaaggcaaaactgccctgcccccacagtcatgacttatgagccgtaaatgaaaacacaacatgagcgtccactggtgggggggactcccaggggggggcgacacaataacttggctagcaataacattaccccc

SEQ ID NO: 77397 - DNA, 460 bp, Zea mays
  Clone ID: MRT4577_170610C.1
atatcctttcacctcgcacaccgttgaaatttgccaaccccccccccccccctccctgggataaacatcttctctctgttacatttgcaggcgaaagaaggctcatgtgctgcttcgaaaatcagttctaagaaggcaaccagggacaacaaacctgataagggaagaaacatgttctggataaatattggcctttgtttcaagactccaagcccgccaccatccagggatcaatcctcaccacgaggaccaggggtgatgccaacaaggttgagaacaagtcaagagggtttgattttttgtcatgtatggttccacagaagagcctgagaatgcattatcgaatctcaatggaggacttggatgatagatccgtgttacgataccagcatcaaagccgcctagaagcaatactgaactttcacttgagatgtgagtagttgttgttgggggccttcgt

SEQ ID NO: 77398 - DNA, 336 bp, Zea mays
  Clone ID: MRT4577_170611C.1
tgtacgttttgaatgcggaagggggcagcccaggaactgtttagctagataggcgacggattacagggccatatcagcatcactgttgttctggtgtgtgcctactagactgcgggatgccaattgggcttggacattggctgactgtggtcccaacagaacctaagtgtgctttgcgttaagcaaggccgatgccacactggtgaaagagatagatgaaacatggatagacatctttagggggctcaaaaggaggttagctgatagaacaactacatgaagctgtactcattaatgaagctgctgtggcaggggggatgcaaaatttggtgcact

SEQ ID NO: 77399 - DNA, 1772 bp, Zea mays
  Clone ID: MRT4577_170612C.1
ccggccggaaccgcgcacatgtgacatgccccatggtcgccgccgctccaggcattctcccgtggcctcacctccctctcccttcctcctcccacccgtctgacgcctctgacgccgccgcagcagcaacagacgccaacacctccgcgtatgacatccagatcttcgagcccacctccatcgaggagcgtcgtcgcctcctgatccagcggcgtcgcctccgactcgccgcctcccatgcctcgcggctcaccgttgcctcgcgcgtctcctccaaactcatcagcgccaccgcctcctgctccagcggcgtcgcatccgatctgccgcctcccctcctcatggctcgtcgttgcctcccgcctcttccccaacctcgcccttgccgcccttggaggatcccaaatccgacgacgagctcagtaggcccacgcagacgcggatgtgctatgaacttcaggttcgtcttttttcctgtacaccaattatagtcctccagcgcctacgaattttttttgcaaactttatacaagtccttcgctcaacaccgcctttggttgcaacggaagctgctactgttgttgaacgttagttgcttttattagatttatgcattttttttaaattcgagttcaaaattaagcaaaacacacgcttaatcaatttttttgcgttgttttcaactgatatatagacaacatactcctatcaagtgccacgctgccggattgacgagttgtaggcaccaaatatatcgagtccttgctatcaacatatgagcatattattgtcaaagtaggcaacatctcatttaacagacaactctccgctctatcattctctcaaggctgatgtgcatttctgatatattgagctcaagcgtcagattctgtatcgatggcaatgggttccagaacagtacacaaggcaatttcaagacggttattcaattgctcaaatagttcagtaagtgagaacaaagaaacttcctaaatgtattaatatggtatgatgaatagtgtctcacacattgtgttgttgagctctggtctccatttccgtgctgctagaatgtgatttgaagtattcaccttttgacatggataaacatcttctctctgttgcatttgcaggcgaaagaaggtctgttgaagcagcctaaactattttcgttgtgatttccaacgctacattttccaatatgcctttgtttcatacatttttcctttttttcaaagaaggctcatgtgctgcttcgaaaatcagttctaagaaggcaaccagggacaacaaacctgataagggaagaaacatgttctggataaatattggcctttgtttcaagactccaagcccgccaccatccagggatcaatcctcaccacgaggaccaggggtgatgccaacaaggtgtacgtgaacctttcctggggtgttgataatttagctctcgcaaacctgttcactgagcaaggaccatctatgacagtgagaacaagtcaagagggtttgatttttgtcatgtatggttccacagaagagcctgagaatgcattatcgaatctcaatggagctatgagttctgaaacccttttttcttccccttgctgctcgcggcatagcatttggaaattgaagtacaatttgtctttcacgatatactgaattgatttatcattgtcctgcaggacttggatgatagatccgtgttacgataccagcatcaaagccgcctagaagcaatactgaactttcacttgagatgtgagtag

SEQ ID NO: 77400 - DNA, 259 bp, Zea mays
  Clone ID: MRT4577_170613C.1
agggtactcgatattacacaaaataacaaagcaggtacaaagtacatacaagccaacgccaacactagatggggatatattattttacagcttattccaaatatagaagatccaggagggccttaagaaagcatccaatgttaagtgcttacattcctggcccttgatgaatgccccaagcaaacaattcctgtttaattaggcatggggaagaacttgttcttttggtaaaaaaaaagaataagtacagtaggcgcct

SEQ ID NO: 77401 - DNA, 310 bp, Zea mays
  unsure (1)..(310): unsure at all n locations
  Clone ID: MRT4577_170614C.1
gtccnggattcccggtcgaccacgcgtccggcaacgcggtactgttggtgttcagactgcctgctgacttccgttcccgtgttggcagcggcggcggcggcgaccactgagcacgttgaggtagttacccaagatgccgaatatcaaaatcttcagcgggagctcccaccaggacttatcccagaaaatcgctgaccgcctgggccttgagctaggcgaggtggtgactaagaaattcagcaaccaggagacctgtgtggaaattggcgaaagcgttcgtggagaagatgtctacattgttcacagtggg

SEQ ID NO: 77402 - DNA, 580 bp, Zea mays
  unsure (1)..(580): unsure at all n locations
  Clone ID: MRT4577_170615C.1
gggaccctcgnagccggccgggtaaaggcctgtagcagtaatagtgtttcctgttattggagtttttttttcctgcgcatatcgatctgagccttacaaattgttaccagccaactatctaatcaatgcctcagccatgaaagagtaaatttacaagcttatttgtagaggatgcttttcattttgcagcagtgtgtagtccatggttcgttttggggaaagttctcacgatctaagcgccgcagtgctggtgatcgatctgtcagtttcggaattggagagctaatgcgtagacatccatgaggttacagtgtcttatcaatcagaggtgatttttgtctgttatgataatttaccatgacaattctgtaattcaaaatcagtttatttttgatttggtgtcagggcaaatctgaaccaattctgtaattcatagttcgagaaggcattttccacaattgtgcgcattatggttcacttcgtcttgtgctaaatcaaacttctaacttcggtcaagtttgtggaaaaaagtactgctacttgatattgtagtaccaaaaaaaaaaaaaaaaaagcggcc

SEQ ID NO: 77403 - DNA, 458 bp, Zea mays
  Clone ID: MRT4577_170616C.1
ggttcaccgccgagcaggtcctcgctcacccgtggatcgtgagcggcggcggagcccgtggcatggagcggccaacctgaggcggcgcgcggcataccataccagcagaccatggcgggcggacgtgtattgccgtagagacacagattcggcaaggaatcccgacgttatgtgcagaggttttgttatgtgcgtacggaccagagaaggagagacggtagctgctgccggctgcagagtagcaagcatcctttgcggtgtactgtagtcgcagactcggtagcagagcagatggatcggcaagaagcttctggtaggcaggcttttggttttcctcaggcccccgggagatgctctttacctatgagcaccctttttggacgtgctggtagctggatgtgtatatacactgaccgtctttgtacaaaccgagaggttgaataaataaataaataaat

SEQ ID NO: 77404 - DNA, 831 bp, Zea mays
  Clone ID: MRT4577_170617C.1
cttaagaaaagcccagcatcgaaaaagggggcgacatctgtctggacctagtgtcagacgcacttcgcggtcccaattggcaaagggtcttcaaacatgttgcagtgacccttgagaaccaacgcgtggagttttctactgcggtgagcctgtccttgtgccccagttacggcagtggtcagcagacttcaccccacaagacgaacccaaagtttgagttccccaaggagaacttctaatggcataactggagaagctttggacgtggtcctctaatgatttcataatgtgaattacgagggttgtaatatatatacgagtagaataaaatgatgggagttattttgttgtagatgccaaaagtcaaccatgttctttttgcaatgtgctctgtccatccctgtttactcctaccaggagatatactctgtcgtctaggcgaagtagataaagtgtcttttgcatacaagcaacattagaagttgtaacacatgagaacatgtcatttcgtttttagaccatttgatagtctgaaaaaaaaaaaaaaaaaaaaaaaaaaaaaaaaaaataaaaaaaaaaaaaaaaaaaaaagatgccaacaatcaaaacagaactgagcccccccccaaaaaaaaaaaaatgaaaaagaaatttagatacaactactaaaacacgtggagttcgtagaaataaaagaaaaaaaaaaaaactgggggcgccttttaaaaaaaaaaaaattttattggccacccttggaacattaactgtttttttttgtagcccaaaaaaaaaaaaaaaaagcggcgtttaaaaaaaagggggaatgaaaaa

SEQ ID NO: 77405 - DNA, 313 bp, Zea mays
  Clone ID: MRT4577_170618C.1
cccacgcgtccgcccacgcgtccgaaacttgtgaattaccattcatccgtggccgctgggtggaaataatgatacttctgctcaagaggatgaacaacacactattcgaagtatacttgatcagggcaagacaacaactacaataggaaaagtaaataatgataacctcagcaggcttctcacagagtacttgggaatggataatatgcttgctcttgtttgcaagacttatgatggtgttaagggtcttgagaaatatgacaaggatgacatcattgataagactagtggcattcatggacttggtcgctct

SEQ ID NO: 77406 - DNA, 522 bp, Zea mays
  Clone ID: MRT4577_170619C.1
atcagggtgcccaggcccaagaagaagagggcaaaagaacccaccggggcagaacagggggggcccccaaacccagggcgaagaacacaaaaacgggggggacccaaacccccccaccccccaacgggaccagagcccaaggacccaccgggggggaaccaaagccccaaaagccacacccaagaaccaacgccccggggcccacacccccccccccacaacacaaggggaaaaaaaacaagggcccccccccgggggccgacccgggaaacccggaccggcacccgaaaaaaaaccagcaccccctaaaggggggcgcccaaaaaccccggacaggcaccggcagagaaaccacctgcgccaaaaagggccccgcaaacaactccccacaacataagaaccaaaagcctaaaggggaaaaacgggggggccccccgagggaaccaaatgaccctaacgggggggttcaaaggggacacactggaggccgaaaaccgggcaagccaactgcaaaaaccaaaa

SEQ ID NO: 77407 - DNA, 234 bp, Zea mays
  unsure (1)..(234): unsure at all n locations
  Clone ID: MRT4577_17061C.1
ttttcttctcacgcgnccgggagcccacaaagggggggctttttttacaccgccggaggtttcccccccaccccccacttcacaccaaatgccccaaaacccttcccgttttaaaaaaccacgaaatttgtaccggccatactcgtcactatttgctgtgaaatgggcaagagccttccttctggtgaaagccaaggatgatagttgccgtgcctgatagagcacaatttcaat

SEQ ID NO: 77408 - DNA, 1548 bp, Zea mays
  Clone ID: MRT4577_170620C.1
ccggccgggctctcatcctctcgacctcgccgcctccctcccaggctcccaccgtgccctaccttttcctcacgcccgcgtctcgccgccacgcccgcgtcgccaattgcggccccccatggagtcgccgccctctcgatctgcgcgccactccatcgtcttcctgtccgcgcctcgtcttcatcctcgtgtcgccaccccgtcccgaggtcgtcctcctcgcgcagtcgcagttggtgcctctcccccaccctgttgtctccctcctcggtccgacgctgctactgccgcccctcgtgggtcagcgctgccgcaagccatatgcacggcgatggcgtcctggtcgctgcagtcggcataatccatggcgtctgccttcttcttgtagaagaccctgcacaggacccagtcctccttgggcggggtgtgcgggttctccatccggaactcgtgcatcacccagctggtcttgacgccgttgggggcgcggccgcggtagaagacgagggtcttgtacatgccgacgacggtgcggtggtggccggcggcggcggcgggccagctgcagggggtgtggatcacgtggtccttgtcggtggccttccagtagccggacttggtggcgcggttgcgtgcctaatcactcattccatgacacggaactgagttaattagccagagtcttgcttgcgagagagggagatggacscagagctaacaatcaagtaaattaagcaattaaggaattcaatttcagtggcaagcaggcacagcaagcatgtaccagggagctcccaggctcgtgggtgtgcagatccacctccaccatggtcgcgccggcgccggcgagccgctcgttggccaccttgccgtgcagatgagcagggagaagtcaagcgtggaaggaacatgtcctggttttttttgtttagttactcaaccattgctatacacctaaacgtgtgctgaatactgtgttcttatataatataataggcaacctttctttggtagcgttgttgttttcttggttgcatctttgccttattctttagtgctgaatactgatcgttgtcttgaactccatggcaggaagaggaagaacagtcaggagaatgatctgatactggctatctcacagcgcagggctgagcggaaaaaacagttcaactccatcctctcgaacatcatgtccaagtgtgactccaaggcgagtagctcggagcccacggaagaagagtttgagcaggcgcaacagacgctggagagcagaagggccaagaggcgcaagtcatgctgctaccagccttcttgccctatgctgaacattgtctgaagcttttggtgtgacctgaatttaccagcatgcaagtgatggtgctaagacccagtttgagcgtgtcagggtgtgtgtcatatctcttgtcctctcacggtgcactatgttgtatggttatcggcttatcaccttgccgagagggaagctctatttgacttgaaagtatcatgacatattttactgtgataattatcattacacaattctcc

SEQ ID NO: 77409 - DNA, 444 bp, Zea mays
  Clone ID: MRT4577_170621C.1
ttcgccggtccacccacgcgaccgcagttacttctccctccgccgccactcccgtcacattcaccgccaccgccaattccatacggtcctccgccacctctgctgatagccacaacagatggcaagcaatggtgatgggcctgcaatcggcatcaatctctgcacgacgtattcttgcgtcagcgtctggcaacattaacgtgtcgacatcatcgctaacgacgatcgtaacggcaccacaccctcgattggtcgccttcacatactccgctcgcctcatccgtcatgcggccaaggatcatgtcgccatgaacaccatcaacaccgtctttgatgcgaaacgtcgcaatggcatgatgtttatttctgactctgtccagagtgatattacactgtggcccttcagtgtcaatccaccgcccggtgagaatccaatgacacttg

SEQ ID NO: 77410 - DNA, 406 bp, Zea mays
  unsure (1)..(406): unsure at all n locations
  Clone ID: MRT4577_170622C.1
ctctcccaaaaagttcctctcccaggtcaactacctrctcwgcaaggcadcctacagcwgcaaaaccaactccaagagcgagttcaawaccggcgccgtrgccaccaccaacctcctatacatctccacccccntcatctacttcaatcactactactccntatccatactcaccatcacwnctaactactacaattacwacaancaccaactcatctcatccanctctccaacwtcaatctctacatctacaatncacahtccwacwacaacacatanttcaattactccaccaaaaaaatcaaaaaaaccaccacmwccttcaacatcacataatacaataatattatttcttcaataaaataaaatacacacactacatatacaacttcactactccaaacct

SEQ ID NO: 77411 - DNA, 556 bp, Zea mays
  Clone ID: MRT4577_170623C.1
gccggccggtccgggatccccgagaaggcgagaaccaatgaactcttcgtcaaaggaactgaagctgaaagaccggccctgttcttgctcccgagtcccgatgctcctcttcggcagaggaagcgccgccatcgcccaagccgcaagacgcctcggcgcggtcgacctcgatgcagtccttgttcgcgttcgcgcacccagccttggttctcacgcgctcgacccggcggcacggaaggcgcaaggagctgatctgtggtcgcgcagaggaagcaagccatgcacgcgtcggggaggaggaacacgacggccgcgggggagaggaggaggaggaacacgcgtagcgtagttcagtgcgtgcaaaaccaaagcaaacgacgacgacttggtaaaggtggtgcagctggtgatgccgatcgttgcggtgaaagtgaaagcgccctccgttagaagagaaggcatggttgctcgtatttataatcgctttttaacatggttgctcgtattttctaaaaaaaaaaaaaaaaaagaaaaaaaaaaaaaaaaaaggccccta

SEQ ID NO: 77412 - DNA, 140 bp, Zea mays
  Clone ID: MRT4577_170624C.1
ccttccgccttttgaagagaccctgttaaggcccttgttctttaaaccaaatccaaattcaatagtaagcatttattctcccgcgggggggtttcttattaagtcccggtaaccatttaatttagtccctttccttgcca

SEQ ID NO: 77413 - DNA, 562 bp, Zea mays
  Clone ID: MRT4577_170625C.1
tctattttatgtcttgtctacttgacaccggagagaccctgtgggtctggcgtcgccgttgatgtagacgtttaccttgtgcgctgcgatgacacgagccacctgctagcttctcagccgcccccagacagccactaggtgccacggactatccatattcagaagaacgctttgcgctcccgcgaggaacaccttatcgaccacagctgcccgtcacttataagcagagcacggccaggttctcgtgttctgccccgaccacaccggtcggttgcccctgcgggatcaccatgacagccacctgtctgatacgatattgcacctgattgtagctcctggcattacgaccaccgacaacgtgttgctcgtgttgccgatgctgatcttgctctaccccgtgcccgggctcacggcgaacgaaaacaccgggcgccggcagactggtgtacacgccatgtgcaattagccctgccccttgacgaccatagctatgttcgtggcacggctgttgcagctacggcgcctcatagaaccgaagcgatgttcgccaggccgaccccat

SEQ ID NO: 77414 - DNA, 424 bp, Zea mays
  Clone ID: MRT4577_170626C.1
ctaaaacagaaattcaatttgggcattaaacacctggggaaccccattgccctataaaccaggcaccaggggcccacgggaacgacaaaggccgggatatctaagcaccataagctaaatgggacggtcccaattcaaacccagggcttaaaaatgcataaaccaccaagttatttgcccctgaagtcccacccccaaggaaaattcctagggatgggggtaagggttaggggagtatgtattagaaaccgggaaaaggagcgtatgccaaacttccttaccctgggaatctcctaactaaaaactcaattttttattgaattttattggtgggggccatcatttggatcccgatcagagagtgagacactcggattgttttctggacgtttgttgcccaccttccaaacgggagacctgaacc

SEQ ID NO: 77415 - DNA, 213 bp, Zea mays
  unsure (1)..(213): unsure at all n locations
  Clone ID: MRT4577_170627C.1
gccgccgacgagcaccagccaggaagaaaagaagcngaaccanggggaagagaaaggcagcngccaagccaccnccnaagaagcgganggacaagcggggggcggnannnnccngcccangggcaaccacgggagnagnnnngagggccgaanngacangaagaancngangggcgaagcanccgggagaaacgggcaggaaaacnncagcac

SEQ ID NO: 77416 - DNA, 240 bp, Zea mays
  Clone ID: MRT4577_170628C.1
cagtgataagggtcatctataatgagcaagatggtcgacgacatgctagatccatgtcgtctaggtctagaactggtgacccccatcctagatctaatgcactcgtgcagtgccctattaagcagggctagctcaaaggcgtgcatgatgtagagcaaacatgtgcttgtgtcaatggatgcatcttgatggccttgttcacactctaaggcatggcgttgatcccagtgggcatggtgg

SEQ ID NO: 77417 - DNA, 1709 bp, Zea mays
  unsure (1)..(1709): unsure at all n locations
  Clone ID: MRT4577_170629C.1
cattgggaccctcgaggccggccggggcgccccgcacaaacagtataggctagccgcgcccgcgcgcaccaccaggccgggcctgcttctgcgcgcgaatccgagcgttgtgtcatacatacgcagcagcacacaacgccgccggcccggcgccaccgcgcgcactcctagcctcgctcgatcgctctccgcagcgaggagccgacgaccatgcacggtggcctggccgccatggacgctcgcccgcgcctcctggtagactagctagctggcagagtcttgtccatccattgccgcgccggcggcacatcatcagaaacaggaagaagctaggaagaaggagcggcagctcgcggtggtagatgacgcttggtgctggtgctggtgccgccgtggccgacatggaggccggcagtagncggcgggtcgtcctccgagaagcggcgcgggcggcgggtcacggaggactggtgctgcgcctgcgcggaggggctcttcctggggcccaacccgatggtggcgcgctacctgtacgcgctcatcttcctcgtcaccaacctcctcgcctggacgctccgcgactacggcgactccgcgctcgccgagctgcagcggctgaaggtctgccagggcgcgcgccactgcctgggcgcggagggcgtgctgcgggtcagcctcggctgcttcgtcttcttcttcgtcatgttcctgtccaccgtgaacgccaggaaggtgcacgactgccgcaactcgtggcattgcgagtggtggccggccaagctcgcgctctggctcggcctcaccgccgtcaccttcctcgcgccgtcgccgctcgtccagctctacgggaaggtggcgcatttcggagcaggggcgttcctggtgatccagctgatcagcgtcaccaggttcatcatgtggctcaacgactggtgccgcgcagagatgacccagaagagataccacttgcagattcaggcggtgtccatcgtcacgtacgtggggtcgctcctggggatcgtgctcatgtacgtgtggtacgcgcccagcccggcctgcaggctcaacatcctcttcatcaccgtcacgctggcgctcgtgcagctcatgaccttcgtctccatgagctccaaggtgaaggcagggtacgtggcgccggggctgatggggatctacgtcgtgttcctgtgctggtcggcgatcagaagcgagccgcacacggaggtttgcaacaggaaggcagaagtcgccacgagcgcagactgggtgaacatcgcgagctttgtgatcgccgtcgtcgtcatcgtggcggcgaccttctcgacggggatcgactccaagtgcctccagttcaagcaggcggagggggagtcggagtcggaggaggaggacgacatcccctacggcctcggcttcttccacctggtgttctccatgggcgccatgtacttcgccatgatcttcgtcggctggaacgcgaacgcggccacaccatggagaggtggacgatcgacgtcgggtgggcgagcacgtgggtgcgcgtcggcaacgagtggctggcggcagtcgtgtacagtgagtcaccctcaactcaactgccctgcccctctcttgctcgcggccatccggccatggccgccatgcatgcgctgcgcttactgatggatgaacgtacggacgagaatgaatgaatgctttgcttttgtcgt

SEQ ID NO: 77418 - DNA, 458 bp, Zea mays
  Clone ID: MRT4577_17062C.1
atacaaaggcacatttatacatttttatttccttactaacagccctgagaggatacttcaacatattagtgtgaaatgtacatcacgagacaataaccttggctccagctgatgatccattaaggcacatgtctaaacttaaatttggcatcttttttgtgcacctacaaattttggtatattgtaacagtcggatactgaggataacacaccatgattctgtctcttcttcctcattgttagaatcaccaaatggctttggatgtaaaaaggcacaagattcatcactaaacctttgatgaactggatgcctcttagctcgtgcttataggcaacggatgccgattttttcaagatgtactctataatgtcctccaattggggaattgtataaaaataacccttggcggcattggactttggccacttcattgagccaaatgcggtgctgattgact

SEQ ID NO: 77419 - DNA, 347 bp, Zea mays
  Clone ID: MRT4577_170630C.1
aaacccactacacagggtggccataagatcgataccaccctccctgggccagggcacgattacgcgcgcactatgaccacacagttcatcaaacccatagacaatacccgtgtgtacactacacactccctttttctgggagccagacataaaggaggggggggtattagaacagacacggaaacggttgcagggagcttcggaccctacctacgacaaagggcggggacttacccggagactgcttgccgacgaatcccttcctgagctcctcaatgctgctagaagagccttcgctgatgagagacggcacccttggcgcctgaggtatccagcggcggaacccg

SEQ ID NO: 77420 - DNA, 266 bp, Zea mays
  Clone ID: MRT4577_170631C.1
aggcatgaggcttgtaccacatgcatcaggtcctccaactctgcaagcggtgagcgccatgcctgcttccgcgcaggctactgctctgcctcgccagcctgctcgcggcggagggatgcatcaccgccgaggcgcactctcagcgtccggacaatcagccagaccggcagatggcactggcggcaggtgttctacgctggcgaggtcgtccactacgctccctggtgggcacagggcctacgagagcggcgccatcagcatcagcc

SEQ ID NO: 77421 - DNA, 584 bp, Zea mays
  Clone ID: MRT4577_170632C.1
cccggtctcctcctcgccattgctgtgcgttctccgcctcaccagatttcgcaacagaaccttcgttccctgccgtctcttgtcggtctggccggccgaggtgggtgatctgtagagcgaaacgccgagccgggagaggagggaggccgcaccggcgattgtagaagcagaaccggtggaggagtagaggagggcgccgaatcgatgcgcggctccgcggacgccgtcgtggttgctcgggacgtggtggcctcgtcgagcccgtccaaggccgcgtcggcgttggacatgacgagatacccgaggctcagcccagatggcctcccgctgcccaatggcagcggcagcggcgcgagcaagaagtgccccaagaagcaacagaagcaccggggcctcaagggcatggagagcatcgacagcgactccgactgaccaccgaccgacggcagcaggccgaagggcgtgcggtggcagcaacgcggcgagacgaagaagaaggaggaggttcggcgacagcgaagggtgcgtgtcaacagccacgcgctctcggagactcacattgtcgcgctgggttaagggatgcc

SEQ ID NO: 77422 - DNA, 1778 bp, Zea mays
  Clone ID: MRT4577_170633C.1
aaagcctcggcccttcaggctggctctgctcctcctcctcctcgccattgctgtgcgctctccacctcaccagatttcgcaacagaaccttcgttccctgccgtctcttgtcggtctggccggccgaggtgggtgatctgtagagcgaaacgccgagcctggagaggagggaggccgcaccggcgattgtagaagcagaaccggtggaggagtagaggagggcgccgaatcgatgcgcggctccgcggacgccgtcgtggttgctcgggacgtggtggcctcgtcgagcccgtccaaggccgcgtcggcgttggacatgacgagatacccgaggctcagcccagatggcctcccgctgcccaatggcagcggcagcggcgcgagcaagaagcctgcagcgccggtgccgccggcccccagatcgagcaaggatgacgtggcaccggccgtcgccaccgacagctcccgcatcgcggcgttcctagcctcgacgtcgctcgagcccaagccgcgcgctcgcgcaccgcagccacagccgacggctcctaactcggcgcccaccgcagccgtcgccgcgaacaggagccccgcgcgcgaccacggccacggccactgctccgaccactccgatcccgcctccccgagctccaccggggcccgcgaattgctgctccggtggggacagaacaagcgcatgcgctgccgccgcgactgcgcgtccgcgtcgccgcagcggcggcaggcgggcggcaagataccgcgccgctcatcgtcgccggcggcggacaatctgatgccgccgccgagcgcagcgccctacgcccgcgggtccaacctccgctacgccacgcctcgcccgccgcgctccggcgccagcgacgcgcaccacggccgcggggccctccccaacccgctcagcaacagaagcaccggggcctcaagggcatggagagcatcgacagcgactccgactgaccaccgaccgacggcagcaggccgaagggcgtgcggtggcagcaacgcggcgagacgaagaagaaggaggaggttcggcgacagcgaagggtgcgtgtcaacagccacgcgctctcggagactcacattgtcgcgctgggttaagggatgccaaaaagaacaagaggagggtggattcagtaggaaaaagacaattctttttcgtgttaaccatagcggcgccgtgctatatagccggcgttttgtatatctgggtagcgacgagacgatgtcgtagccggcgtctttttctttttcgtttcgttcgcgacactgggtgggttgcccgccgcgtttatttgtggttgggtttgtgcatactactactagactgtctcagcaagaggaagcaactagacttttagaccctacttggcatagttcattcattacaacaacaagcactgcctaataaactaaaaggaagagcagcttctgtgcaggacaaggcgttcaagcatttaaaaacgagaggagaaaccgcttcacgatgatggtggcagaagaggcaatgagatggctccctaatagcgtgatgagagagacgtggtgcgagcagccaagccaagcacacttcccttgggtgccagaaaagggtgtgttttgttataaaatattttgtatagtgatcagccccctccctttacagttacttcccaagggacatatctcctggggaacattattttggcttgtatataagggagtctccctggtgtctcgatcatttgtcacttcactcaaacttgttaccactgagaatc

SEQ ID NO: 77423 - DNA, 363 bp, Zea mays
  unsure (1)..(363): unsure at all n locations
  Clone ID: MRT4577_170634C.1
gcgccgccctttccttttnttttttttttttttttttttttggcattgcaagagacaacgggacaatttcataacgccaaagcctttgcatttacaagatgaatctaagaccgcaaggtggggaaaatgccaagctgacgctaactaaaactttttgtacacattccttccgttcatcgatcggcgtcaaaagctggcatcatcctcctctctggcggcggcggacacgtcatcgtcatcttctttggcgccgcctggtccaccaccctttcttttagaaaagctctcaaaccatcatcttccgtggaggtggccgcttactcataccaattacttgaggcggtcctcgtgggcgcctatcct

SEQ ID NO: 77424 - DNA, 829 bp, Zea mays
  Clone ID: MRT4577_170635C.1
cattgggtacctggccggggcttcacttctctgcttccgacctcgtagcgaatcggaccggggggctagggttccggtgcgcctctgcaatcggacgcgaggctaggctgggcatggagggaaccgctgcggcccggaagaggtcccggccggagacggcgaacggggctgccgccgccgggaagcgctccaaagtacgattgggtgcccgtttggcgagggatgtcattttctgcactttgtccctggtggttacccggcagttgcaaaaatgctgaatctaagtagctctgctgtatctgcgccatcaagaactcatgtggatcatgccgctcttaccggtgcctctcatccagcttctacggtcaagacacgcatgtgcaccaagtacaacactacagaaggctgcaagttcggtgataagtgccatttcgctcatagcgaaagagagcttgcgaagccagcctacatgtctcaagaaggacctcctatgggtggtcgatatggacgagctgaacctatgcaaccagctgccatgggccctccagcaggaaactttggtgcctcggcgactgccaagatcagtgtggacgcctctctggccggtggcataatcggcaagggtggggtcaacactaagcagataagtagaattacaggcgtcaagctctccatccgcgaccacgagtctaaccccaacctaaagaacatcgagctggaaggcaattttgaccagatcaagcaagccagcgacttggtgcgtgatctcatcgcaaccatcagcgcaagcatgccagcgaaaaatccatctgctgccgcggcaccagca

SEQ ID NO: 77425 - DNA, 601 bp, Zea mays
  Clone ID: MRT4577_170636C.1
ctggccgggatcccccagcccaaccgctccattcccccccatacaatatcttttctctctcatcctccaaaggaccaagaagtaccatttctgctatctccattcgtctccatcccaacacagcttctcaattcagttcagggaattctcccttttcttttgttttgctctagtgctcttggctgtttactccgcttcttatcctcttctctccacagaagaggagtgcatgtgcagcagctgtaaagacatttttttttcacctcatcttctcccaaggtgttgttggtgccccaggtggaggcaactgccaaagtgtttgggtttcttgaatgttaggcttttttggggaggaggaagggcttgatcaattaggttcagccattcttgccccagtgttcttggattcatggtcgtggaattaatccaagggtagctggagctgctcattttcccttccgagaaaacgaaggcgatcgtttgaacggtagctagctgttgccgttgagccggtgcaatgtcgtcttcctgcatgccgaccggcctgcggctggacctggacatggtgaaggcggcggcgtcgccgggcgcgcactcgtcg

SEQ ID NO: 77426 - DNA, 651 bp, Zea mays
  Clone ID: MRT4577_170637C.1
ttcatcgaggcccaatacccaatgtccgtttttgataaagaaaccaaacagcaacctagcagtcttccttcacttctctgcttccgacctcgtagcgaatcagatcggggggctagggttccggtgcgcctctacaaccggacacgaggctaggctgggcatggagggaatcgtgacggcccgaaagagtcccggccagagacggcgaacggggctgccgccgccgggaagcgctccaaagacacagagtcatttcaaactggtctatcaagcaaatcgaagccttgcaccaagtttttcagtgtggacacctctctggccggtggcataatcgacaagggtgaggtcaacactaagcagataagcagagttacaggcgtcaagctatccatccgcgaccaccagtctaaccccaacctaaagaacatcgagctggaaggaaattttgaccagatcaagcaagtcagcgacttggtgtgtgatctcatcgcaaccatcagcgcaagcatgccagcgaaaaatccatcttctactgtggtgccagcaggaggaggccgaggcagtggtccggggggaacgagcagcaactacaagacgaagttgtgcgaggacttcttgaagctatgctagaacttccaacgactatgtatg

SEQ ID NO: 77427 - DNA, 282 bp, Zea mays
  Clone ID: MRT4577_170638C.1
agcggccggcccgacggcaaccatgtacctgtctgcccatctaccgtaccatactccctgtggcgtataccctgcacattccgccctactcactgattcatgatattaccaaaatctactctatccatccctctctatctatatatgcaataatgcattaagacgacacacattatcatgtgtggcatgaccaataatatatgcatcataataaagggttgggtttacaccactggggttggagcggaaagctgggcaactggtacttggacctgccccggc

SEQ ID NO: 77428 - DNA, 1106 bp, Zea mays
  Clone ID: MRT4577_170639C.1
cctcggggatctttcgatcgttcatcctttcttctccaacacccgtcgctctcttctccaactcgaagatgtcggccgccaccgccctgcttcatcgaggcccaagacccgatctctgtttttgataaagaaaccaaacaacaacctagcagtcttccttcacttctctgcttccgacctcgtagcgaatcagatcggggggctagggttccggtgcgcctctacaactggacgcgaggctaggctgggcatggagggaatcgtcacggcctgaaagaggtcccggccggagacgacgaacggggttgcagccgccgggaagcgctacaaagtgtggacgcctctctggccggttgcataatcgacaagggtggggtcaacactaagcagagttacaggcgtcaagctatccatccgcgaccacgagtctaaccccaacctaaagaacatcgagctggaaggcaattttgaccagatcaagcaagccagcgacttgttgcgtgatctcatcgcaaccatcagcgcaagcatgccagcgaaaaatccatcttctgctgtggcgccagcaggaggaggccaaggcagtggtccggggggcacgagcagcaactacaagacaaagctgtgcgagaacttcttgaagctatgcgagaacttccaacacgactatgtatgagatattatctcttattatgactggatgagatgtgtcttatggctatagatgagacttttgtggtgtaattgatgagactatagatttaaatgttgttatgtgattgtgtgtgagatgttttatgtgaaaatatgttgtgatatagttgtttatatatttgttatgttttggaatgtggtgttagatttaaatactgtgaagggtgcttgtgttttcggttttatgtgccactttgcccatggcgagttcgagcttcggaaaggtgctgttttagagttgaggtgccaactctaggcatgacatgtcctgtgctctccatttgcttctctgaatttcctccttgtagcgttagacggttagactgtcgtattgcgatttcaatggattcaattgagttcagctttaaggaaacgttaatcccctgtgcccc

SEQ ID NO: 77429 - DNA, 648 bp, Zea mays
  Clone ID: MRT4577_17063C.1
ggaaaacatctctgaatgatttaaaggaccttttgagagtgacaatgactgaattctggcataggattatcaaaaacaaagagcagcgatgaccctcagacgagccctctgttctcggctcgctggtcagcggcaagccagcctgaacctttttttttccctcgcggccagagaggaaaaagaactggcatctgaagatgccatcgaaattacagctatctcgctagtaggtcctgctaagaaacatgactagcaatcaatattttacggggaatcaatataatacatagaactatagaagatacatgatagtcatgtgaccgcaacagatgcccaccggagctcaagctctcagctcccggatgtagctgctggagggctacccttaggcgaacattgcaccggctaggtgcgcgtccttcacaaccgtgttcagcttgctgtccagcgggctgaagggcgtgtggtccgcagccggcttcttgtccgcgcgcaggcacgccaggtagccgtccgcctggttgttccagtgcggcagcctgcttatctgcaccgaggcttccttgtccctggacaccggggcaccggacggatccccaaggagaaggaagatgaactgctgctgctgctgtttgctgctcgtgcctt

SEQ ID NO: 77430 - DNA, 1218 bp, Zea mays
  Clone ID: MRT4577_170640C.1
ttccttcttctccaacacccgtcgctctcttctccaactcgaagatgtcggccgccaccgccctgcttcatcgaggcccaagacccaatctccgtttttgataaagaaaccaaacagcaacctagcagtcttccttcacttctctgctcccgacctcgtagcgaatcagatcggggggctagggttccggtgcgcctctacagccggacgcgaggctaggctgggcatggagggaatcgtcacggcctgaaagaggtcctggccggagacgacgaacggggctgcagccgccgggaagcgctacaaagtttggacgcctctctggccggtggcataatcgacaagggtggggtcaacactaagcagagttacaagcgtcaagctatccatccgcgaccacgagtctaaccacaacctaaagaacatcgagctggaaggcaattttgaccagatcaagcaagccagcgacttgttgcgtgatctcatcgcaaccatcagcgcaagcatgccagcgaaaaatccatcttctgctgtggcgccagcaggaggaggccgaggcagtggtccggggggcacgagcagcaactacaagacgaagctgtgcgagaacttcttgaagctatgcgagaacttccaacacgactatgtatgagatattatctcttattatgactggatgagatgtgtcttatggctatagatgagacttttgtggtgtaattgatgagactatagatttaaatattgttatgtgattgtgtgtgagatgttttatgtgaaaatatgttgtgatatagttgtttatatatttgttatgttgtggaaatgggtgtggacctcatcgcgaccatcagcacgagcatgctggcgaaaaactcatctgctgccgtggctccatctggaggccgaggcggtggtctgggtggcaagagcaactacaagacgaagctatgcgagaacttcgtgaagggtgcttgtactttcggcgaacggtgccactttgcccatggcgagaacgagcagcggagaggtgctgtttgagagttgaggtgccaactctaggcatgacatgtcctgtgctctccatttgcttctctgaatttcctccttgtagcgttagacggttagactgtcgtattgcgatttcaatggattcaactgagttcagctttaagaaaacgttaatctgttgtgccccaaaaaatgaaaaaaaaataa

SEQ ID NO: 77431 - DNA, 350 bp, Zea mays
  Clone ID: MRT4577_170641C.1
ccccggtacaaccatacaggtttagcattcttttactttaattttagcaaacgacatagaccagttagcaaagtttggggggggggggggaattttggggacaagatcccagcctaccccaccaaagggcaggtccacgggggtccaggggcgaataaagagacatggaaagattggggggggggggggagggcctaaaagaatgaacaagggtcgccccagcttccatttcaacgggaacataagggtttggcaccccctttcttggggggcttaaggtttttatcttccgccggggggggggaaccggcccccgaccccaggagggccccttggggtgctggttcggg

SEQ ID NO: 77432 - DNA, 504 bp, Zea mays
  Clone ID: MRT4577_170643C.1
gagctcacttttcggttgccgccctttttttttttttttttggtagcgccgtgacggctggaaagttaagtttaggttattacattttatgccgttttcacacagccgggacaagtattaatactactgctaccaactaattcacccaggtgggcccgaatacacgcatattctgcttcctgagtgttttgctgtcttggcgcaacccacctggcactggttcaggttaaccatcttcgcctgattcactgatgtggctaacattcctgcctgctaaaaatgttggttgtcctcaaacagctgcacgaggaaattactgacgaagatccttaacatgcttccaagtggcgagctcctttggcatgtgagtccacttgcccaagatttgagcacaaggattgacattatgcatcacaggggggtgctggaaatattgttccggcacactgaaggaatagccggttgttggtagagttgggggagccactaaacctgcacccaatg

SEQ ID NO: 77433 - DNA, 316 bp, Zea mays
  Clone ID: MRT4577_170644C.1
gggcccccagcctcagggggttacaaaaggacataggcttaagggcccccccctagggggggggacatcttttgggggccaaaaaacttacaagaagggggaaaaacaacataggggggggggtcttcaaccaaagggtggaaaaactttaaacaatatacctaacttagggccaggaagggccccaaccaggaaaccgggtctcaccacccaaaaaaactaggggggggggcccaagagggacttaaaaacctttaaccgggagctactaaaaacacccccgccaacaaaagcgggaactgaaaacccggggggc

SEQ ID NO: 77434 - DNA, 799 bp, Zea mays
  Clone ID: MRT4577_170645C.1
ctcgaggccggccgtcatccaatttccagctctaccctaagtaatgactggttgcttcaatgtgtttcggcttctgttgaacaacagattcatagctccattcaatctacagaaaccatttcatcgcaaaccactggcctgctccccacaatgtctgaaatatcttttgaaacactgattccaatggtataccctatgattcattcttttggctactctgaacatgaaagctctccgaatactgatattcaagctgcaaacttatctttaggttcagatgatgttagccagtattatcaagttgctagtttttttgatcctggggtccctgatacagagctaggggcaagtttcttcaatgacacaccaccagaaacaagttttttgaaccaacagaagcaagtatcttgaatggtacaccaccagaagcaagtatcttgaatgatatagcactagaagcaagtttcttgaatggtacacaactagaagcaagtttcttgaatggtacacaactagaagcaagtttcttgaatgataattcgaaggaccattcacatctttactgtcaggagcctaagcctgattgatggaggccaatggtttgatctgtgtcgcaagcccaggtccgtgagcagcagttctccgttgcacaatcatgattagatactcttgtcttcctagcattttgttaaggtcacagagccttgtgttgtttcaggcagtttgtgtataaagacataccttgagtgcttgaacttcatattcatttattttgaaaaaaaaaaaaaaaaaagcggcc

SEQ ID NO: 77435 - DNA, 260 bp, Zea mays
  Clone ID: MRT4577_170646C.1
aaaaggcttatcgactaatgaatacatccctttcttttggatccatgcttacgagcacgtacagacgggattaacatgtctagctgctaggatcctgagattacgacgacaggaattaatcttaaggtgtcattactatgtgtacccttgtactgcctgactaaatcgggatgttttacattacacttactgcagctttcgtgatagcaaagaggccctgttccaatcgcacttcccaacatatgcacaggctgaacggc

SEQ ID NO: 77436 - DNA, 831 bp, Zea mays
  Clone ID: MRT4577_170647C.1
cccacgcgtccgcccacaattcggcacgaggccacgcgtcctcgcacggaggccggacgcggcaacacaccaccatccacgcactgctagtaagcgagcttagctactgatcgtcgtcaagcactctcgagctcgatctctcgaagcggctagctgctagctgctagcagccaattaatggcgaagccttcgcaggtgctggtgtcggcgctcgccgcctgggcggtggtcctgctgctgctgtgcgccgccgcgccgcggggcgccgacgcggccacggcgtgcgacgccgcgcagctgaccccgtgcgcgggcgccatcatcgggagctcgccgcccaccgcggcgtgctgcagcaggctcagggagcagcagccgtgcctgtgcacgtacgcgcgcgaccccaagctgcagcgctacgtcagctcgcccaacggcaagaacgccatggccgcgtgcaaggtgcccgtgccgtcgtgctaatttaaacttctgttagcgccgccgccgccgcgcgcgtacgtacgtgtcgtgtcgtgaggcgtacctgtgtcggtagcagcatggcccactggacagggacagagtgtggcgtcgcttttttctgtttccgtacgtacgtacttggatcgcggaagcccgtgtatgcgtgttccgttgtggtgttgctgtactcgatctgctgcctgtgtgtatctaccgagctcttcggacagatacgcgtgcgtatgaataaatgatgtaataacgacgtgtgcatccgctatatatatgcatatctatacatatgcttttactattgagactaaaaaaaaaaaaaaaaagccttcg

SEQ ID NO: 77437 - DNA, 710 bp, Zea mays
  Clone ID: MRT4577_170648C.1
ttgggtacctcgaggccggcggccgggccggccgggaaatctctccatcaggcagcacctagctagcagcagccaatgacgaagccttcgcaggtgctgttggcggcgctcgccgcctgggcggtggtcctgctgctgctgtgcgccgccgcgccgcggggcgccgacgcggcgacggcgtgcgacgccacgcagctgacgccgtgcgccggcgccatcatcatcgggaggtcgcccagcgcggcgtgctgcagtaggctcaaggagcagcagccgtgcctgtgcacgtacgcgcgcgaccccaatcttcagcgctacgtcaactcgcccaacggcaagaaggccatggccgcgtgcaaggtgcccgtgccgtcgtgctagttaacttctgtttgcgccgccgccgcgtacgtgtcgtgtcgtgcctgtgtcagtagcagcaaggcccactggacagggacagagtatggcgtcactttctgtttccgtacatacgtacctggatcgtgccgtactgccgtgtatgcgtgttccctggtggtactcgatccgctgcctgttgtgtctaccgagctctttggacagctacgcgtgcgtatgaataaatgatataccagatcgtttgtgctgagaaatcaataaatttataaaacaatgtgcgaaaaaaaaaaaaaaaaaaaaaaacaaaggccaaacctacccccagggcc

SEQ ID NO: 77438 - DNA, 630 bp, Zea mays
  Clone ID: MRT4577_170649C.1
aattcggcacgaggggaaagaaggggcatttgtaccataccgggatagcaaattaacccgtcttctacaggattctctaggaggaaacagcaaaacagttatgattgcatgcattagccctgctgatataaatgcagaagaaaccataaacacactcaaatatgccaatcgcgcacgcaacattcaaaacaaagcagtggtaaaccgtgatccagctacagcagagatgcaaaaattgaggagccagctggagcagctgcaaactgaacttttgttttcccgcagtgggagtgcagcgttagaagaacttcagttgctgcagaaaaaagtctctcttcttgagctgaagaattctgagcttaacaatgaacttaaggagaaggaattgtcatatgagcagttggcagagcgggcacgcgctgctcagttggaaagggatcagttgatgctgaagattgaatctgtgaggaatggaaaatcattggatgatattgaaaatattgataacgaccaagacatggaccttttgaagggctacatatcaaaaatacagcagttggagagtgaactgatgcgtcaaaacttctccaatgcttgcagacatggcttacatgaccagctggccatgga

SEQ ID NO: 77439 - DNA, 351 bp, Zea mays
  Clone ID: MRT4577_17064C.1
cccacgcgtccgcccacgcgtccgcccactcgtccgcccacgcgtccggccacgcgtccggcaacgcaaatctctgttatgctgccaccggccggcaaagtagtggtacactaatataatgctctccggtttgattggtggctcttgtggtgtgtgggagccacgtaatctttgcttggaagggaattgcgttgtacaatgatgaaatgggccgggtaatgcatgggactctggtcaagtatttcgagttaaaaaaaaaaaacatccaaatttaaactaatgaagaaataaataaaaggctaattccgtaaagttcttatcaataggtttacattctgaattgagttaatg

SEQ ID NO: 77440 - DNA, 227 bp, Zea mays
  Clone ID: MRT4577_170650C.1
aggaccctgccaagggggattttttctattattttttttatcgcaggaaccgtccaagtaataaacgcccaagtttccttaggatcccaattgcaataggaatcccatgcctgatcagcccatactggtgcacaagagaatttcttctgcaacttgagtacaccctagactaatcgacgctatgactacaagactccacacgctcagtttattggtattgagaagac

SEQ ID NO: 77441 - DNA, 353 bp, Zea mays
  unsure (1)..(353): unsure at all n locations
  Clone ID: MRT4577_170651C.1
gtgggggggaaaaaaaaaaaaacgggggtttgatcgggggggggggnccaccatctactatcattggactgaacacatctatattnttctttctaagaggagcccatgtggtcattaatattagaaacacagaggctgcatcagaagcgagaaagtattttttggagaagaaccaaacggcgcttattgatgtttttaagctagacctcagctcactcaagtctgtcaggttttttaaggaccaattcaactggatgaaattagatgtaaacatcctgattaataatggaagcgtcatgttatgtcgttttcaactgtctaaaaacggggtcgagatgcaattcgatacaaat

SEQ ID NO: 77442 - DNA, 168 bp, Zea mays
  Clone ID: MRT4577_170652C.1
cacttggcctctcaaccagcggggcgcgcacacgacactgccaacgaggcaccaagaaggcaggaagggtggagtactgctaccagtacaacagcgtcacaatcggaacgaaggagaagaggccgccgctgaggaggggcggcgtcaagctccagatcgtgaagaccc

SEQ ID NO: 77443 - DNA, 377 bp, Zea mays
  Clone ID: MRT4577_170653C.1
gcaacatagaaagcacaatagcgtaccaacaatggcagccaaatattttgatctcttaaggctggttgtccttcctgaaggggctgctactgaaacaattttccagcattgttaaaaagctctaatggcttccattattccacataccctttaacaaacagggcttccatttcatgaacacccaatgcttaaaccttccggattcaacaagacatgtctacatggattataacattaataaccctgttaacttaaaaaccgatcaacctaataccaacactttcattaaatccatttataggcccaaactttaattcacaacaagcaacataaatttggccaaataaactttacttataatgttaaaaaaatccttt

SEQ ID NO: 77444 - DNA, 645 bp, Zea mays
  Clone ID: MRT4577_170654C.1
gggggggggggggggggggggcgccgcttcgccagcgggtgggtctggtgtgtgggaaccaaccccgcccgtagtgcctacccacggggattcaacgggcctactcggcacccataactggagagacagcctcagccgctatagtagtcgtctgagacacgcgcgcctaaagaattacataaggagggaggaggtccacgccaaggggagggttaaggaggtcctgagtacgtatgacaaggacgaataatagagagaccctacctacctaactaggactgcacccgttaaggtcgtgactacaagtccccagacgaggggtcacgccgcccagaggagcttgggcacgacgactaactgtgacggggatcgtgtgtgcgagttcctcgtataataagctgaggtcacgacttgccctttccggaccgagggagtgaccggatcaagtttatcctaccttagttcgacctcagagaccgcatcgggtggtagctccgccagggccacgagaagaggtccgaccccaacgaactagtcgggccaccagaaccacgttggagagtccgagacatagataacaactccgtctacgatgcaagagggtgaaaccactacgaccgagacgaccgccctcaccggtccttc

SEQ ID NO: 77445 - DNA, 306 bp, Zea mays
  Clone ID: MRT4577_170655C.1
attcccgtgctctacccactcttcctaggaagaacatccaaataaaccctaatttccttatcatccatcaatatcaatctctgatcttttttcaaaattgtatgtccctaacaagcataaaatcaagcaccatcgcttaccacgctcacaatactctacctaacatagccataacattctagctaatacatcaccaatatcaaaatatttccatactcatcttaaaacactaacaataactcaaaaaactcccatatatcacaacaccatctatgtatacccatatcatcttcttaactttacttt

SEQ ID NO: 77446 - DNA, 359 bp, Zea mays
  Clone ID: MRT4577_170656C.1
gggaactggggatagaaaaagtttatgtcggagggggataacacgaaaaatttgctaccgcaaccgctcagaaaggggggggccatattaaaaactcattttacatagaaataccattctctctacaaaaagggcctctgaactaaaaaggacgagcccttacgccaagggttaacaaggcgaatctatccttacttataggtaggaaaaaggcttgaaaatttataaacagggaaccgttacctttcggatgacaacacgcaccataaaaaaattgctagcaattccgagccgggacccattgatcctcagctctcccttaggaaggagggttagatctggttgtacttaggcaccta

SEQ ID NO: 77447 - DNA, 751 bp, Zea mays
  Clone ID: MRT4577_170657C.1
ttttttttttttttttctaatgtacatatatattcatcattcattgtccaacttgagattaaatacaacagtatccgggatccggcagggtacaactcacaaaacacgtggtacatttgtttacaccatttctgaaaggctggcgaggttcctgacttttcaggaaacaaaatgggtataatcacggggatcattgacagagggaaatgctgcatcttcctggaggtcaaatgacgattataatcatcttgtgtgcagaatttcatggtcatggaactctaccaccttctataaacttgtttggaagcaacctagtttttaataatctagtttctatctccaatttctagaaactgatttataaaaaaacaaactggttaatggtgtttggaacaacattaattttcataaagtgcctttaactaagtgagaatagtttcttgattttaagaaattgagactctagtttatataaattggagcataaactagtatgtttagaaccaactcagtttttataaaaccctaatgtgtgtgtgtgtcccctattaattgcagtgcaatatcacactgcaatataaccaggtgtgattatgtgttatcgcatttaatgaatataaaagtcccattgagaaatgagaatggccttataagcactgacgaaagaagaacccaccgtatagatattctattcgcggagcaaaagtcatcacaggaggcgatcccccgcgcgcggggcccgtctggaccg

SEQ ID NO: 77448 - DNA, 281 bp, Zea mays
  Clone ID: MRT4577_170658C.1
ggcacagcatgatgcaacgggggttgtttaacataagggggggcaaaacaaataatcaaacccgggcctaattcacttactcctaatgaaaagggaaagagagagagagagagacaagaggccacccctgaatacggctggcatttggagaataaattgtataccctcaaattgagggggttacaccgaccaacataagataggcgccggatgtctgacgccctactgctgtgcgttaccaatggatagcatctaatgggcaatgcaaggaccagagaaaa

SEQ ID NO: 77449 - DNA, 186 bp, Zea mays
  unsure (1)..(186): unsure at all n locations
  Clone ID: MRT4577_170659C.1
ggcagatgaatcaggtcgaaaaggctaaatccgattgaagaccacatcagcaggcccaagaanaagtttagcagcaaaagccggcgcatttatcgagaagatgatagaggatcctcatgttaatgcacgactgcaacaggacttattggcagatgaaggcgagaccccgagtttatttgtggtgtc

SEQ ID NO: 77450 - DNA, 441 bp, Zea mays
  Clone ID: MRT4577_17065C.1
gccggcccggccgtgcctctccactagtcattcctctgaaaaatctccagcccctgcctctccttctccctgctcgtttctccctcagctcccatggctctctttcctctgttaaaataatccttgtgcttttagctggtgtttgttttatttctgttagctgaagtcagtcgcacggtctgttgttggctgtgcgtgtagtgggctcggacgtgcgcgttttgttcgcatggagagcgcgtactgcgccatgtatccaccaggcagttgggatggcagctgcccatgatggttatggggcgtcaggcagggtgttagtgcctcgtttctaggaagtagtgggtcacgttctctattgagtcttttatattccagtgaatagagtctgaaaaagctgttcgtagttcacagcaccaaaaaaaaaaaaaaaaaaggccccta

SEQ ID NO: 77451 - DNA, 274 bp, Zea mays
  unsure (1)..(274): unsure at all n locations
  Clone ID: MRT4577_170660C.1
agcttaatccatctgcccataataatttgagcgattgcaaaatacacacacaagggaagatgtcactagcagactgggctaaccaacaatggcgtaccatagactattagccgctcccttggcgctcactttctcctttcaagtgaggcgcaacaacgtgcanttcatttatttcacacatgcgtcacgttgtctcctaatggccattatgttcacacgtgtcctgccatcaagttacaatcgaatggtgcatcgaaacaccactattggtgca

SEQ ID NO: 77452 - DNA, 465 bp, Zea mays
  Clone ID: MRT4577_170661C.1
caggacaagtggcttgggtaaccaacaccttgaaaataacacgagctctcggccttggaacgggcctgggcaatgccacagggctagactggagcaggcgatggtcggcgaggtggcggctgccgggtacaggggggggggttaagtaacacaaaatccgtggagcttgggccgacggatcagggcggcccggatgtgtaggtgacgagcggctgatatgcgaggcgattgaagcggctttggagaccggcgctgcgatctcttacaccgcgtggcggggctcatgttggtctttgtgtgcccgaatgcggcttccagctcgaggtccacgtcgcgctcgctgctggtgcccttgggggtggggcttcgctcctcctctggaggcgctacgcggccgcccccgccggaggggggccagggaagtgcccccttccggcccgagtggggggccccccctcctcgtgg

SEQ ID NO: 77453 - DNA, 182 bp, Zea mays
  Clone ID: MRT4577_170662C.1
atgagaacacaaccgagagcatggattcaacactggaagagaccacggtagtacaaaccaccaaggcccaacaacagcccccctaactaacgagaacaacaagggacaaatggtcgcccttgccatactctctctgccgggcgggggggaaccagaccacccacctaggttcgacccattcc

SEQ ID NO: 77454 - DNA, 795 bp, Zea mays
  unsure (1)..(795): unsure at all n locations
  Clone ID: MRT4577_170663C.1
cctgtttaaaaaatggtcttcatagtgaaagggaagctggaaagcatcagtgcaaatggcaacaaggctcccttacattatggaaatgtatgggaaaggagctcctcccgtgggacttggaacccttttcaacgaacaaaaatggtgggaaaattaaattccaaggtatgcggttgggtgctatacgtccagtaaaatgtttaacaaatgtttaagcttttgtactcaaaacaaatgatttggaaaaagtcccctcccagtttgctcgattcctgggtaatccccgagtgcagggagcgatcaggtatgaatccccctactggggaaccattgctgcaacttgtattcaggttgcaaggaggtatcgtaaaaggcggctgaaacgagctgagaagtcgaggttgagcgaagagacttatgcctcccttggatcttgacacatgattcttttcagcgtagacggaggggatgatcgctacctgactaggctctaacttttcagtttcagttcagcatttaaagcttttagagctctgaaatttttccgaacatgtctacttggtggaacccaacggggcaaatatttttggctttggtgttccgtgtacataataaaaaaaaagtttttttttttttcccccccccccccctttgcttgagctactacacgcacatatacgttgcattcagattactaggagctatgttatttgcccgccacccgggatgtcaccaggtgtaaataaatattcattataaaagaatacanaattttcaatcaaacacacccccccc

SEQ ID NO: 77455 - DNA, 642 bp, Zea mays
  Clone ID: MRT4577_170664C.1
tgcaacaccaagtcctgttgtgaatgtagaagattcacctacaaagcgtcctactgggaagaaaaaggccaaagaagagcgctttggaaaacgaaaggcaccagaagctatttctgcaattggagagaaactagaaaaattcattgaagcaagcagcaaggttgagaagatggcacaagtgcaacaatgtttggctgacaagaagttagaagtagccaagattaatcacaaagcagcccaagaacaaacaaagtgtaaaatgatagacctttataaagatttattgtgtggttccacggctggtcttagtgaagaagctctagctgagagatcaaaagctttagagtgtatgagattgtctttatttgctccagataattaaggagcttgatcggaaggtttttatatgcacatggagaggctggatctgtgcatggagaccgaacctgggtgtgctaatgttcatgtcgatcaaaagttgttgtccatctcagatctttgctatctatatattaagagaagtttgctataattatatattactatgtattatggactacattatatttatcaacatggatactgttttactatggattaatatattttaatctatgtgttgctattgaaaaaaaaagaaaa

SEQ ID NO: 77456 - DNA, 181 bp, Zea mays
  unsure (1)..(181): unsure at all n locations
  Clone ID: MRT4577_170665C.1
tcgcgtggcgcccttgaataatggtgctttatgaagcgtgtttgctctcnaaccccgatgaccgntgtacaccgaggttcaggcgacttcaccctctcaagcgattaggtacaagccccactttttaagtgtgtgtgtgtgtgtgtgtgtgtgtgtgtgtgtgtgtgtgtacttccccttc

SEQ ID NO: 77457 - DNA, 150 bp, Zea mays
  Clone ID: MRT4577_170666C.1
gtttggtggactagctcgaagcaaaaaaaaatggcacaactctaaataattttgggtcaggccgacccaaaattatgcattggaccaggcttagaccaatgtcgtgctccacaggcgggcacgagcacgacccgtttacaaagtttttgc

SEQ ID NO: 77458 - DNA, 355 bp, Zea mays
  unsure (1)..(355): unsure at all n locations
  Clone ID: MRT4577_170667C.1
aaaagaggtcttgtttttgnnttataaataaatattgtgggttttttttttttttttttttttttttgggaaaaataaaagtttgtttgtttttatttttttgatttaaaaaataaactaaaaaatttaaatttttttttttttggaagaaaanttttttgtgggggggttttttatttttttagnnatnggttggtgatgttagggggaaagttttattttgggggaaatgttcaaccaataggtgtggaaagagtcatgtgtttgatgattttggaggtggtgagtcgataataatactttttggggctgtangtgtttggaataaaaaatgtttttgaggtaggtaattaag

SEQ ID NO: 77459 - DNA, 378 bp, Zea mays
  Clone ID: MRT4577_170668C.1
cgttgtcttgttttattttttttttgtttttgtgttgtctgtttgccgcttttttttcttgccttttttttcaacgggagagccgacaaaggaaaatgaaggcttaatactggaaaggcccggccccaacattttgaacaacgcgaacggcccggcgggaacagggccgccaaaacatagggtccaacaaaataacaaaatttttcttttgtgggccgagcgttatgcaaatgggaaagccccgggaatatatgggactctcggcgaaaggttaagttttaaaaaactggcgcgacttttcttggaagcaaaccctctcgttttttgttggaattggaggggaaaaaaacagtcttcccccccattgcacctttggcc

SEQ ID NO: 77460 - DNA, 600 bp, Zea mays
  Clone ID: MRT4577_170669C.1
ccggggggaatggagctccttgcagaccatgccgccctgtcaggcggaagctgcggttctagccaggaaagacccacaccctgtgggggagagtgtcaaattcactcgtgctactccggcgttaaggcctcttcctagggcgactatactaccactaacatggatagccgttgtgtccggccccaggcgttcccggtgtgcgcggcgacgggcgtggacaggctcctgtggggctatgaggtatgacgaaccatactgcgaacgagaatgaggtgaacaactgatgtaggaggttggcctctgaaccgtgggaggggagacgatacatcctgcattggctctgaagctctgcgcacgagacgacttgtgacataatgcctgggactaacaagtgctgcactgaccctacgcgcagcatgcggagtgggatgctactactactacttggtatcaggggaaaggacactgtgctgggaggtcactatgtcgcgcgcatccatgggcatgatactactcagagcgcttgctgatgactagctgttgatgatgggggatggagcggatcgctcatgcaagatgtgaacatgactctgtcctgtg

SEQ ID NO: 77461 - DNA, 341 bp, Zea mays
  Clone ID: MRT4577_17066C.1
actcgtgggtcgacgcaagcctctaaagtgacgtcgtattaaagcgtgggcggccgcgtgggccggtatctggatcaaggaccatgtccgggacttcctcgtgaaggactcgagcaggccagtgaacatcaggtgcgcgatgattcagatagactgcacgcacacgaaaggcggcctctgcgtggattcggtcgtggtgaaaccgcagcagctctcgcagaacagagcgccctggacttacgtgtagactcgtcgaacaagttgctgctgctgtctacggacgatggatatgatgcacagtttccttttggcttgttctactaccagagtgtcgttttgtt

SEQ ID NO: 77462 - DNA, 590 bp, Zea mays
  Clone ID: MRT4577_170670C.1
ttgggatgcctctcatcaaaccaacttctttacacaatactatcgacgtgctcacggtgcgcctgtatatcgagccaacaaccggaatctcaccattggccttactaccaagacgtggactactgctacgaggaggagagggccccggacgcagctggctaccaacgccacgcggaagtcggccacgacaaccgctgcaaggaaaaattctaagaggttcagacccgcgaacgtggcgctgccaaacattaccaacaacctgaacaccacggaggtcgctcatttccaggctggccttaccacggctcaggaggaagatcacacctgcatccaagagcgacatcagcttacagagatcttctgccgccgcgctaactgaggacgccgggcgccagcaatccacgcccgtgcgcgtctgcctgcatgacccatggatgcctttctacgagcacggtcatctgacttgggtactgtacgaacgagctcgcactcagcatcatgtacgaattactacaataagctcgccgactgcataagacttcttctgaatactaatacctacatcgccacactgaagaaagaaaagatac

SEQ ID NO: 77463 - DNA, 138 bp, Zea mays
  Clone ID: MRT4577_170671C.1
atccgcccgccaaagccgcccctagctgtattcacggggactgggcccccaccctgggacgatccgcgggcaggaccaagccagcatcaaccatgcccggaacatgttggccgggggggccccctgtccgcctggccc

SEQ ID NO: 77464 - DNA, 690 bp, Zea mays
  unsure (1)..(690): unsure at all n locations
  Clone ID: MRT4577_170672C.1
ggccgggccgggggtactctgaatcaccactcactcccacctgctcgccatctccccttctctctctccctgctgccgtgcggctccagctccagctgcaggcgcgggagaggggccgcatcgacctccccaatccccatggccgctaccaagatccttgacaggctcaaggtgggggcttcacctccagcgcccggcggcgcgctcccgctcaccttcttcgacgtgccgtggctcttcacgggccccgtggagcgcgtcttcttctacccctacgcgcacacggcggaccacttcgccgcccacctcctgccgtccctcgtctcctccctctccgccacgctgcgcgcgttctacccgctgctcggccgcgtccgcccgtgcccggacggcggcggcgggtacgaattcttctgctccgacggcggcgaggccgtcgagctcatcgtcgccgagagctccgacgacttcgacgagctctccgccggcgggccgagggacgtcgcccggctctacgcgctggtgccgcggctcccgtcgcccggggccgacggctccttcgccctcgcggcggcgcaggtcaccgtgttccccgcccgcggggtcgccgtcggcgggtccntccaccacgtggcctgcgacgactcccgctacgcggacttcgtcaggacctgggccgcccagtgccgc

SEQ ID NO: 77465 - DNA, 267 bp, Zea mays
  Clone ID: MRT4577_170673C.1
cccacgggggggcccaccaaccgagtcgacgaggccgcccaggtagcgccctcccggacgtgagcgcggaccatcgcgcgcgccgcggacaccaccgacctcgaggcgcccagatctgggccctagcgcccccctccctcctataggactttccccgctgcatggccatggctcgattactgctgtgggggacagcgctgatactcccatccctcctcgccggagttggtcccgccgacgccgccgccctgggccccgccccacgat

SEQ ID NO: 77466 - DNA, 269 bp, Zea mays
  Clone ID: MRT4577_170674C.1
ctttcgtggacactactcatcgcctcaaaggttgggaccgttttactggtaggacacaaatatatgaccactaccgctttgtactgcatctcatgcttgggagcctagatattctcaaacttggaccagactcaggctcctggggcgcactatccagggtcttgatttcaatagccggggcataaccaaccacctaacaactagtctcacacgacaaaaaactgcgcactcatgacacattatgtccgcctgatgcgtgggtgaatctt

SEQ ID NO: 77467 - DNA, 333 bp, Zea mays
  unsure (1)..(333): unsure at all n locations
  Clone ID: MRT4577_170675C.1
ccggccggatagtaccattcactaatccaagacaaaacatggactgtgaatgtgagaaccatgtgagtcgtcgatgcgggcacaggttgcgatggttgtgacgatgcggctcatagtggagaggctgatgttgcgagcctcccaagagtccccccactcaagaacatcacggccacctatggcaaggactggctggacgctaaagcgacatggtatggcaagccgacgggtgccggtcccgatgacaacggtggcggntgcgggtacaaggacgtgaacaaggcccccttcaatagnatgtacgnatgcggnaacatccccatcttcaaggat

SEQ ID NO: 77468 - DNA, 133 bp, Zea mays
  Clone ID: MRT4577_170676C.1
gcggcagaagcgcccctcggacctcgctcccacaacaagctcaagccagccttatatgtctctatgcggcaatggggcgcttccagctcggagacgaggccatggtcatgctcttcaccgcggtggtggcgca

SEQ ID NO: 77469 - DNA, 335 bp, Zea mays
  Clone ID: MRT4577_170677C.1
ttttaataggattcaagcttacagactcgtgcatgccacatcggggctgatgtatagcgtgaaaaaaataaaatccactcgacctacaagaacaccctcaggactggaaaaaccctgatgtgcccaacttaatgaacgagctcacatgatccatgtccccagcgagctaatatataaaattggcccgaaccgatcgttcttgccaacagtctgcgcaaacctaaatggcgaatgggatgcgccctttaacgaaccattaagcgcggatgatgcgggggtatggcaatgggacgcgcccttgatcggcgcattaaacgcggcggttgtggtggtta

SEQ ID NO: 77470 - DNA, 310 bp, Zea mays
  unsure (1)..(310): unsure at all n locations
  Clone ID: MRT4577_170678C.1
aattcggcacgaggccccatacttaccgccgccgtcacttactctctctctactcccaaacaagctccttccgcccatgggcccaccgcggccgtcgccaactcctgctgtctctccgncgttccttctttgttttttntttncccntctgggtgttgaagggggncacccttccacccactcacattttccttgcgggtgggtggcggtgaagatccaaggaggtggacatatggaagggatgagttcgccgttgctgttctgggtggaggggcgcatgctctccccatcggagccgtgtgcgcgaccg

SEQ ID NO: 77471 - DNA, 291 bp, Zea mays
  Clone ID: MRT4577_170679C.1
aataagcgagcgacgacgcgaacggccacgcgggggggaggtttagacggaacacacccaccaccacagccgacagaaaagaaacaaagggaaacggaagcaagcacgaacggaacaaaacaacagaccagaagcgagaaaacaagcagggaaacacaacagaagacaagacagaccgagaaaacgagcagacaacagcaacaccagccgcggaccagaagcgaagccaccagacaccagcacgagagaagggaaagcaagccccgaagaaagagcacaaaagcaaggaca

SEQ ID NO: 77472 - DNA, 649 bp, Zea mays
  Clone ID: MRT4577_17067C.1
ttttttttttttttttttagaaatatgggttttgtgtcacagtgatattacaatagatcaagtttgctaattaataaaacattcttcttttttaatcttgggctaatcagacatcattagtagtgtaacaagtggctacaatcatgttccttctgtcttgcactcgatcaactgtaactatgtgccaaggtacatttattttcataatgtcctgtagccttatctcttctactactctggtagtgcaggtaacactagaaagggctcaaaggtggatatcagcccgagaagctgcaccaaattcagcaccatgaacaccacttgatcacctggcaggaaagcaacatcttgacgtttttgtgcccatgagaatagagcccctgcacctactggagcaattgacttgaagaatgacattgcagttgtcgatataccatttgcggtgcctctttgttcttggcattgatttcatacgtaccacagcattattctgtagaagtgaaattcctgtggtgacagtgatcgcaagagcacttctcatcatggctgcagaacaaagagccaaggaaagtttcactcccgacaggtatgtcataaagggataagttgcaagaacaagtatggacacagcagatgcaatacgtgctga

SEQ ID NO: 77473 - DNA, 1110 bp, Zea mays
  Clone ID: MRT4577_170680C.1
atggccagagtgcgttctaccaccagggttgagcgtgagggaagcgaaactgaagcttcggagactgttcccatctccgaagccatgcaacgatccgggctagtgacttcagaaaagatccctagtgatgatgcagaacaagcagaacaagcaatcgctgaagcagaagaagaagatattgaggaaactgatcccgaagatgattatcgcattgccatgccaagcaagcccatccacctggatttcgggaaatctactgtttcgaaggctgatctttccaagatggctggtttaagattccccctacatgggattattgcagaggtactgaagaggttcgatatctattttcaccagctgacccctaacgctatcattaggcttagtgtttgtatctgggcactccgaagccaagcagtggagccatttgcggacagcttttgccgggttcacgagttgcattatcagacgaaggctagaaaggatggattgcacgacaattttggttgctataacttcgcctatcggaaaaccacaaagtttcctgtaatcagctaccgaagcaaatgggcagcaggctggaagtcagagtggttctatgtcaaggttgatgacgacaaggaaaagcttgtgcaaagtccactcgaactaatcttcggagaaacccgacctcgctgcaacatgacacccgaaggtccaacacaacaagcaatgaatgaattcagaattattgcagagcatatcagcacaagggacctggttcaggagtttttggccttcaaagtttttcccagtgtaaaggagtgggaaatgccgaagctgaagggggagaagaaagaaggtgaacttgtgcgtttaccttactacttcaagtttaagaaatactttaagacaccttgccaagagtggcttgatacaattgaagtaatgtgcaatgaaatacttggcaattattccaaaaaagaagatcagttaatgaccgcagccttcggcacccgtccgaagcgaagactaaaccgagtgctggacgccctgggtttcgaataccctgattatgaaaatttgaacaaaggtaccggaggccaaaaaaggtaccgtcgagacctttga

SEQ ID NO: 77474 - DNA, 2580 bp, Zea mays
  Clone ID: MRT4577_170681C.1
atggccagagtccgttctaccgccagggttgagcgtgagggggacgaaacggaagcttcggagtctgtccctatctccgaagccatgcaacgatccgggctagtgacttcggaaaagattcctagtgatgatgcggaacaagcaatcgctgaagcagaaggagaagatactgaggaaactgaccccgaagatgattatcaccttgccacgccaagcaaacccagccatttggactttgggaaatctactgtttcgaagactgatctggccaaaatggtaaagtcaggctatttcactgaaaatcaaaagaagctattacgcttcgggggagaagagactaccccaaagccggagaaagatgaaattgttatttttaagagcttcctaaaggctgggttaagattccccctacatgggattattgcagaggtattgaagaagttcggaatctattttcaccagctgacccctaacgctatcgttgggcttagtgtgtacatctgggctctccgaagccaggcgatggaaccatttgccgacagcttttgtcgagttcatgaactacattaccaaacgaaagccagaaaagacggattgcatgacaattttggttgctataattttgcttatcggaaaactacgaagtatcctgtgatcagctaccgaagcaaatgggcagcagggtggaaatcggaatggttctatgtcaaggttgatgacgataaggaaaagcttgtgcaaagtccactggaactaatcttcggagagacccgcccccaatgccacatgctaccagagggttcgactcaaaaagcaatgtatgaattcaaaataattgcagagaatatcagtacaagggacctggtccaggagtttttggctttcaaggtttttcctagtgtaaaagagtgggaaatgccgaagctgaagggggagaagaaaaaaggtgaacttgtacgtttaccttattacttcaaatttaagaaatactttaaaactccttgccaagagtggctggatacgattgaagtgatgtgcaatgagatacttggcaattattccaagaaagaagatcaattgatgaccgcagccttcggcacccgcccgaaacgaaggctaaatcgagtgttggacgccttgggtttcgaataccctgattatgaaaatctgaacaaaggtgccggaggccaaaaaaggaaaaggataactgaagccttagatgaaggtgaaaaagagccaataaagaagaaaattccgaagaaaaggaaagctccttctccgaagcgacaagtacccgaagcagaagaaacccccgcatcaccttctgctgctgtcgttgaggaaattctgaaggtaatgactgaatccttacctgcgaagctaagtccactgggccctcaactgacaaagttttttcagaaggacaaggaacccgaaaaaccgaagaagacaatcaaggcaaagaaacaaagaattatcactgtgacagaggtaattgacaagacgccgccaagggcttcagcccagaaaacaccggcggctgcagaggggacagatattgaaattgcaccttcggaggctgcagctgccgaagctgcctcagctgaagatttgaacctggaaagcacaattgaacacattgatcaaatactgctagacatggctgcagaagaagctaccactgctgccgaagaggccgtgatcgcagtgtcgaagaaaggaaaagaaattgttgatgaagcttcagaaaacgaaaccttcgtgttccagaacttaattggagaacatctatcaaaagctgaaatagaagagcttagagagtatgccaaatcctgtggatacaagcctggggcactcctcttcggaggcgttgatgatgagaaattagagtgcattcgagatcaaacaggggccaaaagcatgctgttgagcaaagccttacaaatgcaacaagatctcgaagataagaagcacgaagttataattgaaaatttggaaagcaaaataaaggaacaatcaaatgctttcgagaaaaagaactttgagctccaggcaaccgaaggtttattggcggaagctgaagcaaaaataacagaactgaacacgaagcttctccgccagtctgagcagttcgaacgagaaaaacaagattttattgcaaaacttgaagccgaagctcaacaaaattcagatttgagaaaactgctgacaattggagccagcagtgaaaaattcaccccctcagctgaagatctaccgaaaaccttcgaacatattgagggggagattgacgagctcgacgaagtcatagctgggcatggtgacttctgtgcctgggtggcttctcgagggactgctgcagccttcctgaaggctggttgtgatcatgggaagattgtcaataggccaaatttcactttatcaccatcaatcctggatgacatccctgatctcgcccgaagtatctcgaatcgatttataaaaatgatatggacaaaaggtggtcgagagaaggctggagacgaagctcgtagccaccttgatccagatgacgaagccgaagctgatgatcaaaaataa

SEQ ID NO: 77475 - DNA, 555 bp, Zea mays
  Clone ID: MRT4577_170682C.1
gcgttcggccgtccgccttgcccctaataacctgggggctcctccttgtctccctgaccttccccgctgacagaccccttccccgctgggctagagttatcctccctctgccccgttggccatcaagcggaccaaggcggagatgacgatcgcgtgcgacatgaaagctgtgcagcctgctctatgagtacaccaaggtgctcatcggcctcgccgacaacgtcgagctccaagcagttccaagtacatccgtcggagcctcatggtcgacctcgcgcgcgctcatgggctagatcaccctcatcaggcgctgcatcaaggcttacgcctagaagaccgggaaccacacctttgacccgatcatggacctgctcctcaggaacgttggccttatcttcaccaaagtagacctctacgaggcacacgaggaggtcctcaacaacaatggtgtggctcctgctcgtgtctgtctggtcgatcctgctgatgttgccgtgcccactgacaacactggcctggatccctgccagacctatttcttccaggggcttaaca

SEQ ID NO: 77476 - DNA, 2604 bp, Zea mays
  Clone ID: MRT4577_170684C.1
atggccagagtgcgttctaccgccagggttgaacgtgagggggacgaaactgaagcttcggagactgtccctatctccgaagccatgcaacgatccgggctagtgacttcggaaaagattcctagtgatgatgcagatcaagcaatcgctgaagcagaggaagaagatattgaggaaactgatcccgaagatgattatcgcattgccatgccaagcaaacccagccacttggacttcgggaaatctactgtttcgaaagctgatctgtccaagatggtaaaatcgggcttttttactgaaaatcagaagaagctattgcgcttcgggggagaagagactaccccaaagccggagaaagatgaaattgttattttcaaaagctttctaaaggctggattaaggttccccctacatgggattattgcagaggtactgaataagttcggtatctattttcaccagctgacccctaacgctatcgttagacttattgtttatatctgggcactccgaagccaagcagtggaaccatttgcggacagcttttgccgggttcacgagttgcattatcaaacgaaggctagaaaggatggattgcacgacaattttggttgttataacttcgcctatcggaaaactacaaagtttcctgtaattagctaccgaagcaaatgggcagcaggctggaaatctgagtggttctatgtcaaggttgatgatgacaaggaaaagcttgtgcaaagcccgctggaactaatcttcggagaaacccgacctcgctgcaacatgacacccgaaggtccaacacaacaagcaatgagtgaattcagaattattgcagagcatatcagcacaagggacctggttcaagagtttttagctttcaaagtttttcccagtttgaaagaatgggatatgccgaagctacagggggaaaagaaagaaggtgaacttgtacgtttaccttactatttcaagtttaaaaagtgctggggccaaaaaagaaaaaggataactgaggccatgaatgaagaaaaagaaccattaaagaagaaaattccgaagaagaggaaagcttcttctccgaagcaacaaatatccgaagcagaagaaacccccgcatcaccttctgctgctgtcgttgaggaaattctgaaggtaatgactgaatccttacctgcgaagctaagtccactgggccctcaactgacaaagttttttcagaaggacaaggagcccgaaaaatcgaagaaaacaatcaaggcaaagaaacaaagaattatcactgtgacagaggtaattgacaagacgccgccaagagcttcagcccagaaaacaccagcggctgcagaggagacagatactgaaattgcaccttcggaggccgcagctgccgaagctggctcagctgaaggtttgaacctggagagcacaattgaacacattgaccaaatactgctagacatggctgcagaagaagctaccaccgccgccgaagaggtcgtgaccgcagcgtcggggaaaggaaaagaaattgctgatgaagcttcagaaaacgaaaccttcatgttccagaatttagttggagagcaactatcaaaagctgaaatagaagagcttagagagtatgccaaatcttgtggatacaaacctggggcactcctcttcggaggcgttgatgatgagaaattagattgtattcgagatcaaacaggagccaaaattatcagtactctgtccaagagtatcggcttcccgaagctagaaacagacatcagccgctaccgacgacaacatgtcgttggtagtttattttattccaacttcaagagtatgctgttgagcaaagccttgcaaatgcagcaagattttgaagataagaagcacgaagttataattgaaaatttggaaagcagaataaaggagcaatcggatgttattgagaaaaagaactttgagctccaggcagccgaaggttcattggcggaagctgaagcaaaaataacagaactgaacacgaagcttctccgccaggctgaacagttcgagcgagaaaagctagagcttaatgcaaaacttgaagccgaagctcaacaaaattcagatttgagaaaactattgacaagccttcaagaaaaatgtctggaatttagcaacaaatgcattcaacgattaagaaaaaaattccactcagttggagccagcagtgaaaaattcaccccctcagctgaagatctaccaaagaccttcgaacatattgagggtgagattgacgagctcgacgaagtcatagctgggcatggtgacttctgtgcctgggtagcttctcgaggcactgctgcagctttcctgaaagctggctgcgatcatggaaagattgttaataggccaaatttcactttatcaccatcaatcctggatgacatccctgatgtcgcccgaagtatctctaacagatttgtaaaaatgatatggacaaaaggtgggcgagaaaaggctggagacgaagctcgtagccaccttaaaccagtaagaaaccataccttgtgcttaccttttcttgcaaggtcgatttcgactaacgacgttattcatgtaggatga

SEQ ID NO: 77477 - DNA, 338 bp, Zea mays
  Clone ID: MRT4577_170685C.1
gagcatcaacataaacccataatgattttttttgagtgaaaaattatatttacactcatgtcacatacaagtatactgatagtttgaccctatggcacacatcattttcaaacaacaaacatgaaatatgttcaaatagctgccagggacaacaaacatttattttatccaaaagtaaaacctatactgagttggcgctgccctttaacaattttatgtacctcaccgcacgacctgttggaactggccaactgcaacctcaaagactggtgcaaccccaccacttcaaaagctagtcaccttacctgcacctgcttgcaagccaaaaccgaggagga

SEQ ID NO: 77478 - DNA, 772 bp, Zea mays
  Clone ID: MRT4577_170686C.1
aagtagaaggcagtcactgcaaacaacgaaagctggtgagcaactttgtcaagcctcaagagctcatggaagatggcagtgctccaagacggtctactccacccacccgcagaagcagatctgccgagttccacaatttttcagaaaggaggagaagggataagatcaacgagaagctgaaagcattacaggagcttcttccaaactgcaacaagaccgacaaagtttcgatgctagacgaagcaatcgactacctaaaatcccttcagctacagcttcagcctccagatattatgggtgctatagtagatcatcacattgtcatatatgcacacagatgctggtcatggggaagggaatgtcaccagtggttcctcttgagctgcagcaatacatgcattacatcacggctgaccctgcccagttgcctccattgcgcccatccggccagcagcaccggcaatttcagataactcaagccaacccccagcgacaatctaacgtcgagtcggatttcttgagccagatgcagaacttgcactcttctgagccgcctcagaactttctcaggccgccgaaattgcaactttatacaccggaacagaggggtggcctacccaacacgagccacaacactggatggatttctgggagttcctcgtataacttcatggagtgatgtgctcctaatgacaaaatttgacacggcaggcgtgcagccttgaactcggaagagatcgttcagtttgggacctgcagcatggttcacctg

SEQ ID NO: 77479 - DNA, 2796 bp, Zea mays
  Clone ID: MRT4577_170687C.1
atggccagagtgcgttctaccgctagggttgagcgtgagggaggcgaagctgaaggctcggagactgttcccatctccgaagcgatgcagcgatccggactggtaaccccggaagaaatccccactgctgaggcagaacaggcgactgccgaagcggaagaagggaacattgaggaaactgatcccgaagatgattatcgtattgccatgccgagtaagcccagccacttggacttcggaaagtcgactgtttcgaaggctgatctctccaagatggtgaagtcgggctatttcagtgaaagtcagaagaagctacttcgcttcgggggggaagaaactaccccgaagccagagaaggatgaaatagtcattttcaagagctttctaaaggctgggttgagattccccctgcatgggattattgcagatgtattgaagaggtttgggatctactttcatcagctgactcctaacgctatcgttaggctcagcgtctatatctgggccctccgaagccaggcggtggagccgtttgcggacagcttttgccgagttcacgagctgcactatcagacgaaggctagaaaagatggattgcatgacaactttggttgctataattttgcctatcggaaaaccacaaagtttcctgtcatcagctaccgaagcaagtggccggcaggctggaagtcggagtggttctacgtcaaggttgatgacgacaaggagaagcttgtgcagagtccgcttgaactaatcttcggagaaacccgacctcgttgcaacatgacaccagaaggtccaacccaacaagcgttggctgagtttagaattatttcagagcatatcagcacaagagacctggttcaggagtttttggctttcaggggttttcctaccttaaaagaatgggaaatgccgaagctagagggggagaagaaagaaggggaacttgtgcggttaccttactatttcaagttcaagaaatactttaaaacaccttgccaagagtggctggacacaattgaagtaatgtgcaatgaaatactcggcaattactccaaaaaagaagatcagttgatgactgcggccttcggcacccgtccgaagcgaagattgaaccgagtgctggatgccttgggctttgaataccctgactacgaaaatctgaataaaagtgtcgaaggccggaaaagaaaaaaggtagccgaagcttcagataaagatgagaaggaaccagcaaaaaagaagaatattccgaagaaaaagaaagtattatctgcaaagcaaaagatatccgacaaagaggagacccccgcatcgccctctgccactgacgtggaagagattttgaaggtaatgactgaatccctgcctatgaagctaagtccattggggcctcaactgacgaagttttttcagaaggaaaaggagcccgaacaaacgaagaaatcaattaaaactaaaagacaaagaatcatcgcagtgatagaagtcattgacaagacaccaccgagagcttcggctcagaagataccagaggctgaaggactaacaaatattgaagttgtgccttcggagatggcggctaccgaagctgcttcaaccgaagatttgaacttggaaagcacaattgagcatatcgataaaattctgctagacatggccatagaagaagctaccactgccgccgaagaggccatggccgcagcttctgggaaagaaaaggaaatcgctgacgaagcttcagaggacgaagccttcatgttccaaaatttaattggacaagaattgtcagaggccgaaatggaagagcttaaagaatatgccaaatcttgcggttataagccaggagcactcctcttcgggggaattgacgatgaaaaattgaactgtatccgagaccaaactggagctaagattatcggtactctatcaaagagtatcggttttccgaagctggaaacagacatcagccgctaccgacgacaacatatcgttggtagtttattttattctaatttcaagagtatgctgctgagcaaggctttgaaaatgcagcaagatttagaagacaaaaaacacgaagttataattgaaagcctagagagcaaaataaaagagcaatcagctattgttgaaaagaaagacttcgagcttcggacaactgaaggtttattggcagaagccgaagctaaagaaaaacaagaacttagtgtgaaacttaaagccgaagttcaacaaaattcagatttgaaaaaattattggcaaaccttcaagaaaaatgtttggaatttagcaacaaatgcattcaacgactgagaaaaattttccactcagttggagctagcagtgaaaaattcaccccgtcagctgaagatttaccaaagatctttgaacatatcgaaggtgaaattgatgagcttgacgaagttatagctgggcacggtgacttctgcgcctgggtagcttctcggggcactgctgcagctttcctaaaagctggctgcgatcatggaaagattgtcaataggcccaatttcactttatccccatcaattctagatgacattcctgatctcgcccgaagcatctctaatagatttgtaaaaatgatatggacaaaaggcgggcgagaaaaggctggagacgaagctcggagtcaccttgaaccacttggttttgaccctcaacaacttaatttatgtaggatgacgaagctgagaccgatgcttaaaaagcatgacgccgaagctgaggccccacgaagatcaataggagtagactgtagatag

SEQ ID NO: 77480 - DNA, 3004 bp, Zea mays
  Clone ID: MRT4577_170688C.1
atggccagagtgcattctaccgctagggttgagcgtgagggaggcgaagctgaaggttcggagactattcccatctccaaagtaatgcagcgatccgggctggtaacttcggaaaaaatccccagtgccgatgcagaacaagcaactgccgaagtagaagaagaaaacattgaggaaactgatcctgaagatgattatcgtattgctatgccaagtaagcccagccacttggacttcggaaagtctactgtttcgaaggctgatctctccaagatggtaaagtcgggttttttcagtgaaagtcagaagaagctactacgcttcggtggggaagaaactaccccaaagccggagaaggatgaaatagtcattttcaagagctttctaaaggctggattaagattcccccttcatgggattattgcagagggttttcctagtttaaaagaatgggaaatgccgaagctagagggggagaaaaaagaaggagaacttgtgcgattaccttactatttcaagtttaagaaatactttaaaacaccttgccaagagtggctggatacaattgaagtaatgtgcaatgaaatactcggcaattactccaaaaaagaagatcagttgatgactgcggccttcggcacccgtccgaagcgaagattgaatcgagtgctggacgccttgagttttgaataccctgactacgaaaatttgaataaaggtgtcgaaggccggaaaaggaaaaggatagccgaagctttaaatgaagatgagaaagaaccatcaaaagagaagaaaattccgaagaagaggaaagtaacatctccgaagcaaaaagtatccgacgaagaggagactcccgcatcacactctgccactgacgtggaagaaattttgaaggtaatgactgaattcctgcctgcgaagctaagtccattggggcctcaactgacaaagttttttcagaaggaaaaggagccggaaaaaacgaagaaaacgactaaaacaaagagacaaagaatcatcgcagtgacagaagtcattgacaagacaccaccgagagcttcagctcagaagataccagcggatgaagaaataacaaatattgaaatcacaccttcggaggtcgcggctgccgaagctacctcaattgaagatttgaacttggaaagcacaatcgaacacatcgacaaaatgctgctagacatggccacagaagaagctactactgccgccgaagaggccatggccgcagtgcctaggaaagaaaaggaaattgctgacgaagctgacgaagcttcagaggacgaggccttcatgtttcaaaatttagttggagaaaaattgtcaaaatccgaaatagaagagcttaaagagtatgccaaatcttgcggatataaaccaggagcactcctcttcggaggtattgatgatgaaaaattagactgtatccggaatcaaactggagctaagagtatgctgttgagcaaagctttgaaaatgcagcaagatctggaagacaagaaacacgaagttataattgaaaatttagaaggcaaaataaaagagcaatcagctactattgaaaagaagaacttcgagcttcaagcgactgaaggcttattggcggaagccgaagctaaaataacagaactgaacacgaagcttctctgccaatctgaacaatttgaacaagaaaagcaagaacttaatgcaaaacttgaagccgaagtccaacaaaattcagatttgaaaaaactattggcgggccttcaagacaaatgcttggaatttagcaacaaatgtattcaacgactgagaaaaattttccactcagtcggagctagcagtgagaaattcaccccgtcagctgaagatttaccaaagaccttcgaacatattgagggtgaaattgatgagcttgacgaagttatagccgggcatggtgacttctgcgcctgggtagcttctcggggcattgctgcagctttcctaaaagctggctgcgatcatggaaagattgtcaataggcccaatttcactttatcaccatcaattctagatgacattcctgatctcgcccgaagcatttccaatagatttgtaaagatggtatggacaaaaggcgggcgagaaaaggctggagacgaagctcggagtcatcttgaaccactcgattttgacttacaacaacttaattcatgtagaatgacgaagccgaagctgatgcttaaagagaatgacgccgaagctgaggtcccttgagaaggagctccatttaaagaaatagacgaagatatcactcaccaggttgattccatttgcaataatttattacaccaaagtttaactatatagacggagacattgtgtaccatccctaaagtaagatgccactctaagtaccacgacagcaatgccatactagggcaatagttactccaatacaatttttgtatgtggctaactgttcatattttacactctaccatcatatgatcatatctagcgaagtaaaataaaatggcctgtggatttttttatgcttgctagtatccatattgtaataaaaaataggagtataatatcacatcctcacactataacagtttaaagaatgaattgctcaaacaactagaaaaatctgagcaggaaaagaaacaccttgaagcaagtcttaaaactgagatgcaaaataattcaaatttgcaaaaatccttgaaggagcttcaagagaaatgcctaagcttcggcagccgatgcgtgcagcggctgaaggatgtgtttcattctattggagccagctctgaaaaattacactttcagctgaaaacttgcccaacacattagaatatattgaaggcgaggttgaagctcttgacgaagttattggtagccatgctgacttctgcgccctggtagcttctcggggcacagctaccgcttttctgaaagctggttgcacgcatggaaaaaatgttaataggcccaactacagcttatcatc

SEQ ID NO: 77481 - DNA, 644 bp, Zea mays
  Clone ID: MRT4577_170689C.1
aagagacctggttcaggagtttttggctttcagggtttttcctagtttaaaagaatgggaaatgccgaagctagagggggagaagaaagaaggggaacttgtgcggttaccttattattacaagtttaagaaatactttgaaacaccttgccaagagtggttggatacaattgaaataatgtgcaatgaaatacttggcaattactccaaaaaagaagatcagttgatgactgcggccttcggcacccgtccgaagcgaatactgaatcgagtgttggacgccttgggttttgaataccctgactacgaaaatctgaataaaggtgtcggaggccagaaaaggaaaaggataaccgaagccttaaatgaagatgagaaagaaccatcaaagaagaaaattccgaagaagaggaaagtgtcttcttcgaagcaaaaagtatctgacgaagaagaaactcccgcatcacgccctgccactgacgtggaggaaattttgaaggtaatgactgaatccctgcctgcgaagctaagtccattgtggcctcaactgacaaagttttttcagaaggaaaaggagcccgaaaaaacgaaataacgactaaagcaaagagacaaagaatcatcactgtgacagaggtcattga

SEQ ID NO: 77482 - DNA, 212 bp, Zea mays
  Clone ID: MRT4577_17068C.1
cggcgacgactggcgacagccgcggccgccctactccagggccccaggtccacgtacgacccttcgccgcggcgaacaccaccatatggagagcacggagcgaaggatgctgctgacactgctcctatacgcagtgacagaggtccctgctggagacgcacagaggcaagatcgcccactcgaagaatatgaccaaagccgggggagccgac

SEQ ID NO: 77483 - DNA, 1180 bp, Zea mays
  unsure (1)..(1180): unsure at all n locations
  Clone ID: MRT4577_170690C.1
tgggtacctcgaggccggccgggagcagagaggaagcgagaggcgaggagagagaaagttctcgagctagacgagcgccgtgcgaggagagaagcgagatgagcggtgaggcggcggccgtgggcggaggcgaaggagaggcgaatggcatcccgccgaacgtcaccatctatatcaacaacctcaacgagaagatcaagctcgaagaacttaagaagtccctaacagccgttttttcccagtttgggaaaattcttgatgtgcttgctttcaagactttgaagcataaaggtcaagcttgggttgtcttcgaagatgtcgcatcagctactgaggctctgaagaggatgcagggctttcccttctatgacaaaactatgagaattcaatatgccaagaccaaatcagatattatagcaaaggctgatggcacctttgtacctcgagaaagaagaaagaggactgatgaaaaatctgaaaagaagcagaagcgcgagcatcaccatgatgctggtgctagtcaaattggcatgggtgtaactgcttaccctggtgtttatggggctccacagctcacccagatacctatagcaggaggacaaagggtcatgatgccagagattatcgtaccaaacaacatcttgtttgtccaaaacttgccacacgagacgacgcccatgatgctccagatgctcttctgccagtaccctggcttcaaggaggttcggatgatcgaggcgaagcctgggattgctttcgtggagtatggagacgagacccaggccactgctgccatgaacaaccttcaaagcttcaaaattacaaaagaaaaccagatggtcatcacatatgcgaagaagtaatgagctcccgagcaatgtttacctgatgtgtgagatgttgtattccgagttttacacaactggtaaatttccttcatgtgttaggtagacagcatcctgaacaacctgttaattgtacccactgggctgcagctatgtgcacttcaggaacggagatgaaatgcaaactgttattatttggtctgcgccgcaaaaaaaannnnnnnnnnnnnnnnnnnnnnnnnnnnnnnnnnnnnnnnnnnnnnnnnnnnnnnnnnnnnnnnnnnnnnnnnnnnnnnnnnnnnnnnnnnnnnnnnnnnnnnnnnnnnnncnnnnnt

SEQ ID NO: 77484 - DNA, 1596 bp, Zea mays
  Clone ID: MRT4577_170691C.1
atggccagagtgcgttctaccgccagggttgagcgtgagggaagcgaaactgaagcttcggagactgttcccatctccgaagccatgcaacgatccgggctagtgacttcagaaaagatccctagtgatgatgcagaacaagcagaacaagcaatcgctgaagcagaagaagaagatattgaggaaactgatcccgaagatgattatcgcattgccatgccaagcaagcccagccacctggatttcgggaaatctactgtttcgaaggctgatctttccaagatggtaaagtcgggcttttttaatgaaaatcagaagaagctattacgcttcggggggggggggggggaagagactaccccaaagccggagaaggatgaaattgttattttcaaaagctttctaaaggctggtttaagattccccctacatgggattattgcagaggtactgaagaggttcggtatctattttcaccagctgacccctaacgctatcgttaggcttagtgtttatatctgggcactccgaagccaagcagtggagccatttgcggacagcttttgccgggttcacgagttgcattatcagacgaaggctagaaaggatggattgcacgacaattttggttgctataacttcgcctatcggaaaaccacaaagtttcctgtaatcagctaccgaagcaaatgggcagcaggctggaagtcagagtggttctatgtcaaggttgatgacgacaaggaaaagcttgtgcaaagtccactcgaactaatcttcggagaaacccgacctcgctgcaacatgacacccgaaggtccaacacaacaagcaatgaatgaattcagaattattgcagagcatatcagcacaagggacctggttcaggagtttttggccttcaaagtttttcccagtgtaaaggagtgggaaatgccgaagctgaagggggagaagaaagaaggtgaacttgtgcgtttaccttactacttcaagtttaagaaatactttaagacaccttgccaagagtggcttgatacaattgaagtaatgtgcaatgaaatacttggcaattattccaaaaaagaagatcagttaatgaccgcagccttcggcacccgtccgaagcgaagactaaaccgagtgctggacgccctgggtttcgaataccctgattatgaaaatttgaacaaaggtaccggaggccaaaaaaggaaaaggataactgaagccttaaatgaagatgaaaaagaattaccaaagaagaaaattccgaagaagaagaaagcgtcttctccgaagcgtaaaatacccgacaaagaagaaacccccgcatcaccctctaccactgatgtggaggaaattttgaaggtaatgactgaaactctgcctgcgaagctaagtcctttgaggcctcaactgataaagttttttcagaaggaaaaggaacccgaaaaaatgaagaaaacaactaaagtaaagaggcagagaatcatcggtgtaacagaggtcattgacaagactccgccaagagcttcagctcagaagacaccagcggctgaagaaaggacagatattgaaatcacaccttcggag

SEQ ID NO: 77485 - DNA, 251 bp, Zea mays
  Clone ID: MRT4577_170692C.1
agccacagcgtcagcgcggcgccccagctgatccgcgcgaagccggcctcgagcagcagcggcagcgccaccgctgccgggcccatcaccagcaccaccgggcgcagccggcgccacagcgccgggccctcgtctcggccccagcgcagtcttgtggccggaatcatcaacagcagcgccggcagcagcagcggcgccatcaccgcgtcgaagtagggcgcgcccaccgacagcttgcccaggccgagcgc

SEQ ID NO: 77486 - DNA, 249 bp, Zea mays
  Clone ID: MRT4577_170693C.1
agtaaacgcaaatcatggctcgcgaccgcaccatccacgtcccaccggcatccgcacctgcgtcttcgagaatcctcaaggtccaaggcaaggaaatcgtcggcgaggatgggaaaccagtcatccttcgcggtgctggtctcggcgggcacctcaacatggagaacttcatcaccggctaccccggccacgaaaagtacatgcgcaaggccctcaagaacgccctcggcgaggaaaagtacgactact

SEQ ID NO: 77487 - DNA, 2784 bp, Zea mays
  Clone ID: MRT4577_170694C.1
atggccagagtccgctctaccgccagggttgagcgcgagggggacgaaactgaagcttcggagactctccctatctccgaagccatgcaacgatccgggctagtgacttcggaaaagatccctcatgatgatgcagaacaagcagaacaagcaatcgctgaagcagaggaagaagatattgaggaaactgattctgaagatgattatcgcattgccatgctaagcaagtcgagccacttggacttcgggaaatctactgtttcgaaggctgatctgtccaagatggtaaaatcgggctttttcactgaaaatcagaagaagcttttgcgcttcgggggagaagagactaccccaaaaccggagaaagatgaaattgttattttcaaaagctttctaaaggctggattaaggttccctctacatgggattattgcagaggtgctgaagaggttcggtatttattttcaccagctgacccccaacgctattgttagacttattgtttatatctgggcactccgaagccaagcagtggaaccatttgcggacagcttttgccgggttcacgagttgcattatcaaacgaaggctagaagggatggactgcacgacaattttggttgttataacttcgcctatcggaaaactactaagtttcctgtaattagttaccgaagcaaatgggcagcaggctggaaatctgagtggttctatgtcaaagttgatgacgacaaggaaaagcttgtacaaagcccgctggaattaatcttcggagaaacccgacctcgttgcaacatgacacccgaaggtccaacacaacaagcaatgagtgaattcagaattattgcagagcatatcagcacaagggacctggttcaagagtttttagcattcaaagtttttcccagtttgaaagaatgggaaatgccgaagctacaggaggaaaagaaagaaggtgaactcgtacgtttaccttactatttcaagtttaaaaagtactttaaagcaccttgccaagagtggctagatacgattgaagcaatgtgcaatgaaattcttggcaattattccaaaaaggaagatcaattgatgaccgcagccttcggcacccgtccgaagcgaaggctaaatcgagtgttggacgccttgggctttgattatcctgattatgaaaatctgaacaaaggtgctgggggccaaaaaagaaaaaggataactgaggccataagtgaagaaaaagaaccattaaagaagaaaattccgaagaagaggaaaacttcttctccgaagcaccaaatatccgaagcagaagaaacccccgcatcaccttctgctgctgtcgttgaggaaattctgaaggtaatgactgaaaccttacctgcgaagctaagtccactggaccctcaactgacaaagttttttcagaaggacaaggagcccgaaaaatcgaagaaaacaatcaaggcaaagaaacaaagaattatcactgtgacagaagtaattgacaagacgccgccaagagcttcggtccagaaaacaccagcggctgcagagaagatagatattgaaattgcaccttcggaggccacagctgccgaagctgcctcagctgaagatttgaacctggagagcacaattgaacacattgaccaaatactgctagatatggctgcagaagaagctactaccgccgccgaagaggctgtaaccgcagcttcgggaaaaggaaaagaaattgctgacgaagctttagaaaacgaagccttcatgttccaaaatttagttggagaacaactatcaaaagctgaaatagaagagcttagagagtatgccaaatcctgtggatacaaacctggggcactcctcttcggaggtgttgacgacgaaaaattagattgcattcgagatcaaactggggccaaaattatcggtactctgtcaaagagtatcggcttcccgaagctggaaacagacatcagccgctaccgacgacaacatgtcgttggtagtttattttattccaacttcaagagtatgctgttgagtaaagccttgcaaatgcagcaagattttgaagataagaagcacgaagttataattggaaatttggaaaacagaataaaagagcaatcgaatgttattgagaaaaagaactttgagctccaggcagccgaaggttcgctggcggaagctgaagcaaaaataacagaactgaacacgaagcttctccgccagtctgaacagttcgagcgagaaaagctagagcttactgcaaaacttgaagccgaagctcaacaaaattcagatttgagaaaactactgacaagtcttcaagaaaaatgcttggaatttagcaacaaatgcattcaacgattaagaaagattttttactcagttggagccagcagtgaaaaattcaccccctcagctgaagatctaccgaaaaccttcgaacatattgagggggagattgacgagctcgacgaagtcatagctgggcatggtgacttctgtgcctgggtggcttctcgaggcactgctgcagccttcctgaaggctggctgcgatcatgcaaagattgtcaataggccaaattttactttatcaccatcaatcctggatgacattcctgatctcgcccggagtatctcgaatagatttgtaaaaatgatatggacaaaaggtgggcgagaaaaggctggagacgaagctcgtagccatcttgaaccagtaagaaaccataccttgtgcttacctcttcctgtaaacttgattttgacttag

SEQ ID NO: 77488 - DNA, 2658 bp, Zea mays
  Clone ID: MRT4577_170695C.1
atggccagagtgcgttctaccgctagggttgagcgtgagggaggcgaagctgaagaacaagcaactgccgaagcagaagaagaaaacattgaggaaactgatcccgaagatgattatcgtattgccatgccaagtaagcccagccacttggacttcggaaagtctactgtttcgaaggctgatctctccaagatggtaaagtcgggttatttcagtgaaagtcagaagaagctactacgcttcgggggggaagaaactaccccaaagccggagaaggatgaaatagtcattttcaagagctttctaaaggctggattaagattccccctgcatgggattattgcagaggtattgaagaggtttggtatctactttcatcagttgactcctaacgctatcgttaggcttagtgtttatatctgggccctccgaagccaggcggtggagccgtttgcggacagcttttgtcgagttcatgagctgcactatcagacgaaggctagaaaagatggattgcatgataactttggttgctataattttgcttatcggaaaaccacaaagtttcctgtaatcagctaccgaagcaaatgggcagcaggctggaagtcagagtggttctatgtcaatgttgatgacgacaaggagaagcttgtgcagagtccgcttgaactaatctttggagaaacccgacctcattgcaacatgacaccagaaggtccaacccaacaagcgttggatgaattcagaattattgcagagcatataagtacaagagacctggttcaggagtttttggctttcagggtttttcctagtttaaaagaatgggaaatgccgaagctagagggggagaagaaagaaggggaacttgtgcgattaccttactattacaagtttaagaaatactttaaaacaccttgccaagagtggctggatacaattgaaataatgtgcaatgaaatactcggcaattactccaaaaaagaagatcagttgatgactgcggccttcggcacccgtccgaagcgaagactgaatcgagtgctggacgccttgggttttgaataccctgactacgaaaatctgaataaaggtgtcggaggccggaaaaggaaaaggatagccgaagccttaaatgaagatgagaaagagctatcaaaagagaagaaaattccgaagaagaggaaagtatcatctctgaagcaaaaagtatccgacgaagaggagactcccgcatcacgctctgccactgacgtggaagaaattttgaaggtaatgactgaatccctgcctgcgaagctaagtccattgggacctcaactgacaaagttttttcagaaggaaaaggagcccgaaaaaacgaagaaaacgactaaaacaaagagacaaagaatcatcgcagtgacagaagtctttgacaagacaccaccaagagcttcagctcagaagataccagcggctgaggaaataacaaatattgaaatcacacttttggaggtcgcggctgccgaagctacctcaattgaagatttgaacttggaaagcacaatcgaacacatcgacaaaatgctgctagacatggccacagaagaagctactactgccgccaaagaggccatggccgcagtgtctcggaaagaaaaggaaattgctgacgaagcttcagaggacgaggccttcatgtttcaaaatttagttggagaaaaattgtcaaaaaccgaaatagaagagcttaaagagtatgccaaatcttgcggatataaaccaggagcactcctcttcggaggtattgatgatgaaaaattagactgtatccgggatcaaactggagctaaggttatcggtactctgtcaaagagtatcggttttccgaagctggaaacggacattagccgctaccgacgacaacatatcgttgaaagcaaaataaaagagcaatcagctactattgaaaagaagaacttcgagcttcaggcaactgaaggcttactggcagaagccgaagctaaaataacagaattgaatacgaagcttttctgccaatctgaacagtttgaacaagaaaagcaagaacttaatgcaaaacttgaagccgaagtccaacaaaattcagatttgaaaaaattattggcaagccttcaagacaaatgtttggaatttagcaacaaatgtattcaacgactgagaaaaatcttccactcagttggagctagcagtgagaaattcaccccgtcagctgaagatttaccaaagaccttcgaacatattgagggtgaaattgatgagcttgacgaagttatagccgggcacggtgacttctgcgcctgggtagcttctcggggcactgctgtagctttcctaaaagctggctgcgatcatggaaaaattgtcaataggcccaatttcgctctatcaccatcaattctagatgacattcctgatcttgcccgaagcatttctaatagatttgtaaagatgatatggacaaaaggcgggcgagaaaaagctggagacgaagctcggagtcatcttgaaccacttggttttgacctacaacaacttaattcatgtaggatgacgaagccgagaccgatgcttaaagagaatgacgtcgaagctgaggccccatggagatcaaaaaggagtagactgtag

SEQ ID NO: 77489 - DNA, 237 bp, Zea mays
  Clone ID: MRT4577_170696C.1
atattggaaatttttcatattctaaattttaaaaactgttttactgtggcaaggaacaaggggatccaacgggggaccaaatcgagagaaaccaaacttacataaacgctaataacagaatccaatgaaaccagccgaaaatgcacgccaaaacaaaaggaataaaaaaaagatactaacaaatgggataaaccatgagcgacaaaaaggggaaatcaagccagtgaagcccagggg

SEQ ID NO: 77490 - DNA, 137 bp, Zea mays
  Clone ID: MRT4577_170697C.1
cgctggatgaggtgataacaacccagagtacgcgtgcatggatgtgttttggtattataatcggcgaattgcggattggtcactgttgttttgctgttgtaagatgatgatttagattttcgtataatcctcatttc

SEQ ID NO: 77491 - DNA, 577 bp, Zea mays
  unsure (1)..(577): unsure at all n locations
  Clone ID: MRT4577_170698C.1
cggntttggttctgtgtacaaggggaacgattctagggagggacgacgatggttccgcggtcactactatagcggtgaaaagactactagatggtgctcgtcagggagagaagcaattcagggctgaggtgagttcgataggcctgatccagcatatcaacctggtgaaactggtcggtttctgctgcgagagcgataaaaggttgctagtgtacgagcacatggtcaatggttctctcgacgtccatctgttcaatagtaatggcggcggtggtggtggaaaggatggtgtcgtcgtcctagactggagcacgaggtaccagatcgccgtcggggtcgcgagagggctggcgtacctgcacgagggctgccgcgagcgcatcatccactgcgacatcaagccggagaacatactcctcgacgcgtcgctcgtcccaaagatcgcggatttcgggatggcggcgatcgtgcccagggatttcagccgcgtcctcactacgttcagaggaaccataggctaccttgccccggagtggatcggtggagaagccatcaccgaaaaagtggatgcctacag

SEQ ID NO: 77492 - DNA, 408 bp, Zea mays
  Clone ID: MRT4577_170699C.1
gcgatccaatctagactctcccctcttcctccctccctctctctatctctcttcggggtccgaatctacggacccaagcgaatcgacacctcaccgacatgggccgcacgctcttcatccgtggcaactggaaatgcaatggaaccacagatcatgtcgcgaacatagtcaaaaccctgaatgaacgacaggttcccccttcagatcttgaccaggtcgttgccagccctacttatgtcttccttcctgtgctcaagagccagctgtgccaagagttccatgatgctgctcataactgctgggtgaagaaaggacgtgctttcactggtgaactcagatctgagatgctcctcaaccttggtgatccctgagtcattcttggacactctgaaacgagaactctgcttg

SEQ ID NO: 77493 - DNA, 282 bp, Zea mays
  Clone ID: MRT4577_17069C.1
attataagatcatcgcctcactggtttatagtatacagaccttttctgtatttcatccgatataatcctacaggtgctgtgtcattcataggtgatatatactaaccctgaatagtatacaaaagaaaccatgcatagcaacgactactttgctacgaagaatgactcctttcctgcatctttcatagttctgttaaatatgtttgtacatcgcgtctttttcaaaactagttcttaagaacagactcgatgcaagtgtttctgttctgggaggtattggag

SEQ ID NO: 77494 - DNA, 351 bp, Zea mays
  Clone ID: MRT4577_1706C.1
aggctcaagttcatcgacacatcctcccaaatttggtcactggtcgcttgcagactaccgatagagaaacagaggttatttggtaagctcaagagcgtaaggtcgtctgcggtcgcagctgacaagttccacaatttgagaaaatcatgaaactgtgaaacttttgcttgttacctatgcatgtaccaagattagctacatggatgatttcgaagcatgtcatggtcttttgaggatcgttctactctcaataactgaatcgacaatgctagtgttttggggcaagatcatcaacgtaactatttatattaatctatggatgataaaaaaaaaaaagaggaatcgggctta

SEQ ID NO: 77495 - DNA, 266 bp, Zea mays
  Clone ID: MRT4577_170700C.1
ttgtattcctacggcgacggccgggcgagagggggtgtaattaaaaacaaaccgcggccacatcctgatccagaggacgatggaattccaaatatcctcaatagcagacagccgcggggaatggcctggggaagcctacccgtacgggatggccagagggacctgccaaggcactatgagcagactatagaaattaatacggacgcacatgtgcgtcaaatgctaagatatgacactccaccagaaagtggaactaggcctggcga

SEQ ID NO: 77496 - DNA, 1435 bp, Zea mays
  Clone ID: MRT4577_170701C.1
cataagtttgcaccacacaaccatttggttttatctgttgtcatttgaccttgatggaaaggagtgagatgaacaatggaggaattctgatattatggatttccatttaacttcatcgtacttgcaagccatgcaatatgctattgttgttattgccctttataatctgtgattggactatactgtgtatttaaagcggtatgccacttcttctaaatactatccagccatagattgttattgccctttatatcaaacgatttctatattgataattagtacttcattgattcttcatttaattggaattcaaacaaggatttcggtaaataatgagtgtcaacttttgacaggaagtattcttgttgattgtcaatgcaattgttatgtccatactctttggtaatttgttaacttggaatgctttataggaagaggaatagctgggctatgggacttctcataggcaacccagttatgagcttgcttttgtacttgcaatcctggaaaatgatacattctttcttctgatgacattatttttttctccagcaaccattttaattcaatacatgcattcatttttataaattgtttgattgatctttaggggaccaagttatggttatcgaggtagagtgatgcttgcttttgaagataatggatcctcaaaaattggagtccggtttgacaagcagatccctgatggtaatgatcttggtggtttgtgcgacgaagatcatggcttcttctgctctgctgaattactgtgcccagacttttctgctggtgaagaagttgagaggctagctatgaccgagttaatagaggtcatttcagaagagaacaaatctggacctctgatagtgttacttaaggatgtcgagaaatcattcacgggagttacagagtcactgtcatctttgtggagcaaacttgaatcgcttccatctggtgttcttattataggatcccacactcagatctaaataattaaatttacaggatgaagctctacttacagattggaagcagcagttggatcgtgatgttgaaacccttaaagccaaatcaaacattggtagcattcgcacggtaaactgcagaattgaagacagagttatatgggtttcttggaacttaatatatcccactgtcaactgtacatctttctttaaactgttgggcctgtgatgtctgatctaatatggcctgggtgtattattaacaaatgaccatttgcatgtgtttgatagtatttcttctgtttgatactttgttgcctttttctgtctgaatgtatattttgaccattgattatgcaattattttatgtctatgtatgcaattatctttctcttgtcgatgcaaaatagccagcctgtgcgacttttttctcctattttttaggactgagattgatggatattgtgaa

SEQ ID NO: 77497 - DNA, 263 bp, Zea mays
  Clone ID: MRT4577_170702C.1
ggtgaggagttagcttggatctcgcgcgactcgaatcggtcaggacgccagccaaccgtccaccaaccgcgcaccaccatgttcgcgcgcgaaccggctcgtcctgcgggccgccgcccgtgagcgcgatgcctctcgccagagacgctatgaaggcagtggagagacactacgcggatggactgaccctctggcgcgacacctgtcaaggcaccccacttgagagccccgcgaccatattgcatcgaacagagtccatgggc

SEQ ID NO: 77498 - DNA, 309 bp, Zea mays
  unsure (1)..(309): unsure at all n locations
  Clone ID: MRT4577_170703C.1
ccggcggggggaatgccggcggcggcgngcatgacgacgaggcgggtggtgctggaggtgctacggtcnncctcccncnacnccttccanntgnccttctccttctcnnctannccncccntgtccaccatnctcnnncctnccatcactanncccctctaccnccaccaccacaataacaattaatctnnctcaaatctacatctacactcctttncattccttcacatacctntatcatataaccactattaatcacttactaccacatttcatcactcctattctaataaccaactcaaaataaaa

SEQ ID NO: 77499 - DNA, 260 bp, Zea mays
  Clone ID: MRT4577_170704C.1
gaagaaatgttgatttttaagaaaaatttcagaagggggggaactaaataactataacactagggatgggtaagccaaagcactaatagcagggcaaaagtaaaaaaaataggggcaagggaaaacatgacagggggaaggaattaccgacaagcgggggagcaaacagaaagactaatagacccccccatcctctccaaggtcaccatcttccagctcaggggccccatttcttccccacgcggcccaggacccccggg

SEQ ID NO: 77500 - DNA, 558 bp, Zea mays
  Clone ID: MRT4577_170705C.1
tcgaggccggccgggatcacgtcaagtataacgcggaggctcgagtcattaaggtagctagcccggagcacgcctagacacgccagaagcaatggcggctcagctggccgtcgcgtttctcgccttgatgtcctcctctgccttcttggccgcgtctgggcagaagttcaacgccatcttcagcttcggcgactccatgttcgacatcgggaacctgagcgtgaacggcccccccgtcgtgctgacgctcacccagtcgtcctacggcgagaccttctttggccgcgccacctgccgctgatccgacagacgcctcggcgtcgactttctggccgagaagttctagatggcgatgatgaaaacggcaaactagggcggctcagactttgaatatggtgccaacatggcgattattggtgcgaccaccatggactctggcttcctccagactctgggcatctccgacaagatctgtaacaacgggcccctcaacacccagatccaatggatgcagcagatgatgacgtccatatgcggctcgacgcatgcctgcaagtc

SEQ ID NO: 77501 - DNA, 608 bp, Zea mays
  Clone ID: MRT4577_170706C.1
cattcccggtcgcccagcgtccgtgagaacatccagttcgtcttcgttgggatgcagcgcctaaagactgtcgagcttggtagaacttcagactcttgagactgtggaagccagcaaggacttggctgaacagctgaagaaactgatgcagctaaggactctgtggattgacaatattactaatgctgattgtgcaaatatttttgccagcctatcaagtatgccactcctttccaacttgcttctttctgcaaaggatgaaaatgagccacttcacattgaggctctcaagcctgggtccacaggactccacaggttgattatcagagggcaatgggcgcagcgaacattgcagtgcccaatatttcaaggccatgggagacacctcaagtatttagctctaagctggtgccacctttcagaagatccactggagatgctcgctccacatttgccaaacctcacaaatctgagactcaacaacatgcgtagttccaatatattggttcttcctccaggatcatttcccaacctgaagttgcttgtcctgatgcacatgcctaatgtcaagcagctggtgattggagaaggtgcgctccaatgcatcg

SEQ ID NO: 77502 - DNA, 549 bp, Zea mays
  unsure (1)..(549): unsure at all n locations
  Clone ID: MRT4577_170707C.1
tagacatcacgagtgcgtgcgggctggctctaacggccggctgactcctctggtcatcgacctgcctttcgatgagcaggccatggacatcgtcgtcctcgccactgattcaccagctgctgaagctttagtgcacccagatgttgctgcaccgtagaggaatattagaccaaggcttctgacaatcaaaaaagaaaaatctcctcagaaatgagaagttctctgcttcggattcagtgagatggcaactcatattttgttctgatagctccagaaaactcagtccatctggggttgatgtgttctgctaaccggaagcgttttgaattggccttcaagtttcaaaacttcaaaattgnnctggnaggcatttctgttggaaacattgtttgagcggcaattgtagataccgtcttcagtctttcttcaccaaacgtttacatccaaagttttcgtttgtcatgatgaagctctgcgcactactcgntgaaattgaactcactttttcttgatatactagatgaactcaccaaaaaaaaaaaaaaaaaa

SEQ ID NO: 77503 - DNA, 830 bp, Zea mays
  unsure (1)..(830): unsure at all n locations
  Clone ID: MRT4577_170708C.1
aaccttgggtaccctcgggntctnccgggttccttcaccacgaaccttatttcgcctatctcatttctgttctgctgcaatctagtgcaaaaataatcctctttgggcaaggaccaattgacagcctcacctccttatgttctcctatcctttctgccttcaccatggaccattatttcacctactctcatttttctggtttgctgcaatctagtgcaaaatactactctttaggccgactccagcagtttatccattaacactggtttgcactatagactgcgcagttcgcagagcgaagtttaaatatgggtatgggtaagttgctgtagatagtcttagatgacctatcaacgttggcatgagccttggtcctggggacaccggctgacatacagtaattgatgtccttgtgtacagtcggatttagtaactagtaatgtgcttgccgtcacatctgcatccaggcatgcattattgtttacccatgtgaagaatttatcggttgttgagcaataaatctggcacatttcagtttttagtatatgttttatacctgttctgttcaggttcccatgacccttgtgttcaatgtgacaagcgcaagaagaagaagaacggcggcaggaaacctgaagaaaacgtggaaactttccagggcctaatccgcgaatacctcgaggccgcgcctccttggatcatgacgagcagcgtgaccaaccagggccgcgacgagatactcctgcacatgtctcagcttaggaattattggctcaagcattgagatgcaatgataaccaaaccagggcgaagcaactaaaacagcatgc

SEQ ID NO: 77504 - DNA, 615 bp, Zea mays
  Clone ID: MRT4577_170709C.1
atcagtctccgcctacggcgtcgacaacagagtactgtatagtgtatcgtaatagggttgaggatagtagaaatgatcagcgatgcccactgacgacggtggtgggtgtgatgtctcagggaccgatgagccaggtgacatcccaggtccccacgtgcccgatgcgcccaacgccaaaaacgaacacaacgacaaaaaagaacatagcgactaaaaactttacgctttcaacaagccagaagcccaccctccctactctctaatgtttgatgattgtatagctgatctctaggataaaaaagagtaaagctccgaggtcatcagccatcacctagaacgtaaagatgaaggatagctccccactaacttccaaattcagctcactgttcacttgaaaaatgtcgatgctcgctgccagctgacaagtgagaagaactactaactgctgccagctaccgaccaccaaccccaagccgacaagccccaagcacccagggccgaaggccaggcccaagcctcagccatcgccaaaggcaaaagccctgaccactccaaagcccaatgccccaaaccccaaaccaaaggccaaggccaaggtgtagcctgtggctcctg

SEQ ID NO: 77505 - DNA, 491 bp, Zea mays
  Clone ID: MRT4577_17070C.1
gggggggggggtttttttttttttttttttttttttttttttttttttttttttttttttttttttttttttttttagggaaaaaaaacaaataccgcaacccctcaaggaccacaatttttttttaaaacaacttaaaaaaaattttaggggggggggggtttttttttcatgtttttctacaactttgcccccaaatactggttaaaagcccccaaacccccccttgatatccttttaaaagctcaagggggaaagggttggaacaaaacaaaccaaaaaacgtcccttcttgttaaccaaaaacttggaaaaattccacttgatgctgtcccccaaaaggccacctttgctaaatttaaaaaacttggaaaagggggcaacattgctaccggtgacaaaaaccttggggaaaaagggggacccaaccttgaagcgggggcaggcaaactggacaatctcctcattggtaccaggctcctgcccaccaa

SEQ ID NO: 77506 - DNA, 589 bp, Zea mays
  unsure (1)..(589): unsure at all n locations
  Clone ID: MRT4577_170710C.1
gatatagatgatcatctctcatctatgaatatgcaaagacaacctttgtatggatagtcatctcctatacacagatatccatccaactttttaacacaccatggaaattcagtgacttcagtcaatcattccggggcatccggcatatagtgcattcaaacacaagctcgttcctgtaaaacaagatatcaaggcagacgcatatttgatcgctcagtaaatcaatggggcatgaccagaattagtcgcaaccagttacagtcaaaactgaagtgaaactgaggccctgtttgtttgcctataggattagataatctagcttatgaattatataagcatctaatttagataatctagcttatgaattatataagcatctaatgagttgtttatagattatcataatctaggtatctaaattatatattccacctaataaaccatatntgtttgtttatctttcaacttatttaagctagattatataatctagagggtaaacaaacagagtctgagtggggaaacacaagttttcctctacatagtgtaatgtactacgttagatctgccattcacttgacggactccc

SEQ ID NO: 77507 - DNA, 803 bp, Zea mays
  Clone ID: MRT4577_170711C.1
ccggccgggaccctaaataccgcccccgtttcttcgtctcccattttcctccacggcaccgcgccgccatcatcttcctccgttcgccgatgggcaccatgcctccgcccatggctagccacgtcctccgtgatggcagcgatgctagaagctggatatcgccggtctgcgcaagctttttttttgttgcgcgcttccaacaggtacgtttcctacctagttcatctcgatcttctccccagtccccagtggcacagtcccgtcgtcgaggggcatgtggcgaggttgcgctagtgaggccgagatccagggctgcgccagggatgccaagatctagagctacgccagggacgcggagatctattttgtgttctccgccgtcagtcgatgccgccgatctccagcttcccgaggctgctccaggtgcttccttttcctccctcccatagcggtgaggcatggcgtcgctggtggcgtcgacggccacagacggccaccggggatgattttgggaggaaggagatggaactcaaagacgacgcggcacgctacacagggaatggttggcgggccacggcgtttgctgggctcggaggacggacgaaaggaggctggaaggcttcgccttttttatttctacagaaatcagcctctcgaggcttctagcagctgcatcattgaggtacgttgtttaaaactttggatttcaaaatcatgaaataattaaaacggtattttaggacagctttttgtcctcgtctaataagcggaagttgtagatcctgttgagagctatattttat

SEQ ID NO: 77508 - DNA, 246 bp, Zea mays
  Clone ID: MRT4577_170712C.1
gggccgggaacttccgggttgaaccacaccgtccgaacgaaaacagaggcccgccttgccacgctcccaccctcctgcctacgagcgccacgaccagccgccccagcagaagatgtcggccccgacggtggtgctgctgcacacccgcatgccggattaaccccgcccctgcaggatgaagtgccgcgccgctacggacatggtcaccagctgctccgtgccatagaccgaaggattgatatgcac

SEQ ID NO: 77509 - DNA, 171 bp, Zea mays
  unsure (1)..(171): unsure at all n locations
  Clone ID: MRT4577_170713C.1
gtgaacatgggtgtgggggagctacatgcaggtatcggtcgttgaagagagatctcctgagaggagtatctgcttcgcgttccagctgaaaaagcacgccggaagagaagagagtacaacggncggtcgatcagctaacgatggatcgatcattttttgcccatatttatt

SEQ ID NO: 77510 - DNA, 141 bp, Zea mays
  Clone ID: MRT4577_170714C.1
ggcgactccggtcatcgcgcatgggactggccaaacaagtagattgcgcattcgtgcctgctcaggctagtagacaggtcgagcctcaggacgcacgcagagcgaaagccgaagctcgcccctgatcgaccagtatactac

SEQ ID NO: 77511 - DNA, 439 bp, Zea mays
  Clone ID: MRT4577_170715C.1
ccggccggaatgacatgactgcagtcttagtcagtcgaagtctcttatctctgcgcactctacacaccatatctcaccgcacaacagaattcatgtcgtgtcaatcaatggtgatcggtaccgggaatgcctgctcctcttcgttggcgctggacctcctctgcctgttactacaccgcgagttgtctgaggcacgggcgcactctattcgcgtaccgctggggttgtagctgcaacaccatgcaactgaacacaagaggaaaatgcccagagacaggtacagactcttgttcaggcaagacacactggaggcagaactggtggcccgtgaatgcttcacctgacaagtgctacatcgccgccatgctgcatagggcgctgactactactaaaagagctgactacgttgaagcgcagccccaactacttcatcagtatc

SEQ ID NO: 77512 - DNA, 372 bp, Zea mays
  Clone ID: MRT4577_170716C.1
ttctttcacgcgtccgttccttgcgacagctcgactgatcctaaggtggtgtgccacaatgggtgccaccgcttattggacgccgagggaatgcctcatgccactgaggctggaagacctcaatgatgcttacaagagaccacatataaacccaccgaagattcccaattatagtggaaggaaatgactccaccacccatatcggaaggctaacacgtgattggttgactagttggccacgctcctggccaaagcgttgcgatgatcactctagctgcccgattggatcgctgcaaagtatgcatatctcctgctaccacgcatgcagggactccatctttatatactgatgaaactgtatgcactgaaact

SEQ ID NO: 77513 - DNA, 423 bp, Zea mays
  Clone ID: MRT4577_170717C.1
ctgcaacaacaagccaaccgaacaacagcgaagctgctgccgtctccggtctgccaccaccaccgtctgtgttccacgatcctagcagagatcaagagaaaaggagagggagtacagagtctagagagacggagagaataatggacgacaagagcaagaaggggaggcggaggtccacgccggggagccctggctgccctgcggcggggctcaagggccgggggtcccggtccccgcccggccgctcggtgcctggccggctggcgagcctggtgaaggcgcagagggccaggctccacatcgtgcgccgctgcgtcaccatgctcctgggcttgaaggattaacacttactactagtactagcatttaagcaggccctggggtttttttttcttttctgaattggtctcttctggcctggcc

SEQ ID NO: 77514 - DNA, 476 bp, Zea mays
  Clone ID: MRT4577_170718C.1
gtgcggcgctcgaggccggccggttgcttaaagggcgtgaccgcctcgggctccacctcttcgctaggcgcacacccatcataacagacggcgccgccgttgctgaccacctacagatcgtgaagaatggggcacaggagctcaagaggccccacctcgactgctacagtgccttaggccgagctggcagcacgccacagggtattgattcccgtgcccggagagaaagggagggatgcaccttgatgtgcaacattggtcaaggatatgagaagcctgccatgcactacctcaccagcaggaccaagaaggttggaggtgcacaacaatcactgagctggagctgatcatgatgcacaacaggacctaccgcgatgaactggctcacaacgtgtacaccaagaagcgcaaggagatcgtgaagcgtgctgcacagctcgacaatgtgggcaccgaggagtttgctacgctcacca

SEQ ID NO: 77515 - DNA, 577 bp, Zea mays
  Clone ID: MRT4577_170719C.1
gataggcaccacgtagctgcgatcgtatcgactgaattctgtacctaccagcccataatccatcaacgacagcacgtgaggctggaggacacacggcccgtcgctaccagactcactgaggatggcatgaccctcgtctgctctctgaggtatgtatacatacacagagcatcgtgctctcacccgctttgatattatgtatgatagatgagaaggacacactatgcaaacacaaatacggacaggcagcatcaagctatctacgccggtcgacactgcttaagaggtggactgcacgcatcaaggaggagtcggatccgtagctgctgcacttcatgagcatccactccttgatgacgtaactgagagacgcgagcggtgcgagccatcctaacgagctcttgtgtctacagctgggctgggtatctagcatgtgtatgaaaacacagctcttgctgaagattcgcggacatcggtctacaggatataacgctacatacgcgatctagatacgtagtaggagcatatagctgtacatgagcacaattgcctggacgaaatactgcaacttaatgtg

SEQ ID NO: 77516 - DNA, 631 bp, Zea mays
  unsure (1)..(631): unsure at all n locations
  Clone ID: MRT4577_17071C.1
caaccgaacaagccctttagaccttgtttggatactctcgtatttagttcaatccacatgtataatgtattgagatggattgaagtgtaacttagtttaatttacacctcaatccacctcaatacatgtggatttggattgaagtgtaacttagtttaatttacactcaatccacctcaatacatgtggattgatgtaaatacgggagtatccaaataaggccttattgggatgatgaggccatggtttggtgcctttcttcatttttttgtcagtttattcttattggaacacaatgggcgggtctccgcacccccaccccaaccagacgagttctttaaataattccatgcaccaaaggtttatagtctgtgtgttacttgatcagttgatctataaagtataaatatcacctttacagattactntcatttgaaaatctcatttcaagtggccatgaactaaactgaagtatattttaagtttttttttctgttacactgaaatattttggtttcatgcggaaatttattgaaataaaagtgccaagttctctcttttttttcttcattttatcttgtgcatatagatatccaaatagagtgtattgttaatctctctcctgtcatgc

SEQ ID NO: 77517 - DNA, 561 bp, Zea mays
  unsure (1)..(561): unsure at all n locations
  Clone ID: MRT4577_170720C.1
cattgggtacctcgaggccggccgggacgccataccagaattcctctgctcttcctgattacggtttccccctctctctgctcccgacgtatgagatggagattccgccgcgcactccttccccgacgccatcgtggtcgcagctctgtaaacgagaacgctcgggggtcccaccagtacagcgcacgtgctactccctcaacgaggacatgggcctcgggcggtacctctccagcgacgacttcggcgtcggaggcataccactggggcgactacctctacaccgacggcaagaacgcncgaagacaactcctactacggctgcggtttcggtgccctcacttccgactctcttcacggccgagtcctctttgagctccttctcctccaacatcttggacaaggttgccacaaaggtgactcagattttgagcgatcgctcgaagtccacccttacctcctcgaagatagggaactcctgcggcctcactatagcttctaagatagaccagtattgcaacactctgatttcctagggaatgattgactacagctgaactg

SEQ ID NO: 77518 - DNA, 280 bp, Zea mays
  Clone ID: MRT4577_170721C.1
cacgaggggaaccggctttcttggaaagaaacccaagggacttggaaaaaaccgccccgccaaattcagggggggctcaaattacaaatttactttacaaaaccccgcaaaatttataaaccctaatagggttaagcccgggggggccctcccaaaataaattttacaagggccgggaattaattcacaaacggggaagaacccccccgcgaaaagaaacaccccccggggggttttggacggttataaaccaaccacccgacccgggggtcgaccccgg

SEQ ID NO: 77519 - DNA, 541 bp, Zea mays
  unsure (1)..(541): unsure at all n locations
  Clone ID: MRT4577_170722C.1
cctcgaggccggccgggccgactattcgtcgagtctgcttccattctgttcaagttagcgccgctaatccgctccctattcaccggcgcgtcatgggtcaccagcgcgttcaacaaggtcgccaagaccgccacggacgtcgggacgatgaccaaggagaagatggccgccgaggagcatcacaagggctctggcccgtcttctggcggccactcgtacacgcccatccgatgattcatgcattggcttgctgttacgtgcctcactcaaacggtgttgtactgcatattggtggatgtaaaacatggtcttttagtcccaactcttattatgttgtggttagctagagttgaaacctaatagaaaccacaagttaaggttcaagcacatgaatacctattttccatacacatatatttaaagttaaattttgtactcttatcnnaaaaaaaaaaaaaaaaaaaaaaaaaaaaaaaaaaaaaaaaaaaaaaaaaaaaaaaaaaaaaaaggaaaaaaaaaaaaaaaaaaggcccctagggcc

SEQ ID NO: 77520 - DNA, 959 bp, Zea mays
  Clone ID: MRT4577_170723C.1
cgcccgccgttggcctcccgtatgtgccggcactagcgcaccgctggctgctgcagtgctgacctgcgggggtagccgtggcagcgccgccatcgcctgtagttgatagacttgctagtgcctactactcccatctgccactgccactactcgctcttgtatacggtacattgttgtcttcttcaatagtagacgactcgacgccaagcttctgtgagggcgcgccaatgccagtgatggcacccaccggaggagcaccgtacaatgcgacctctagatctgtcccagcccctcgtctcttgttggagacgccttcatctcgtcttccattaattgcaggccaaactgcaccttcaggtagtgttgcggcatcaacttcaagtgcaaatccaatcgttagtcctgtggtgactgaaagtagtggcattgcacaagcatcacaaccaattctagtggattctgaaccagttaatattaaagatgacgatgatgagcatggtgcaaagaggcaaaagaagtgcacatcagaagtgtggcagtatttcaccagggaaacaaagactgtgacgataaattgcaagaattacacagaaaagtgggcatcttgcaattttccaaggtgcaagacaaaatatagatgtgagagcaccaaaggaacaactggattttggacccatcttaggactacacatagtgtggtcaaaggccaacaacagctagcagtagggaaggatcatgagaaagacataaatattgttgagccttacaagtatgatccagaagtcagcagtagaaagttttatttggcaatcatcatgcatgagtacccttccaatatagtcgagcatgagtatctcattgacttcctcaaatctttgcgccctagctttcctatcaagtctcgcatcattgttagaaaagagatcttgagcatatactcgtaaaaaaaaaaaaaaaaa

SEQ ID NO: 77521 - DNA, 1608 bp, Zea mays
  unsure (1)..(1608): unsure at all n locations
  Clone ID: MRT4577_170724C.1
cctagtatagtgtttacttatctttttgccatgtaaactggaaagggatctaggacgtcgtttggtctctctgctgccttcttcctccttcctccacccctgccttgcccaaagtagtcagtcgtcatcgtctcttccgatcgcctcgagttcattacagttagcgccgctaatcccctccctaatcaccatccatccatcccggtaggattccccagccatgtcggcgaccgcggtgaagtttcccgtggaggcgccgccgaggacagtgaaggtcaccaacgtctctcttagtgcaaccgtgcaagacattaaggagttcttttccttttcaggagatattgaacatgtggagatgcagagtggtgatgagtggtctcaaattgcatatgtcactttcaaagatgcacaaggcgcagaaactgcacttcttctttcgggtgccacaatagttgatctttctgtgatcattggacctgctccagagtatcagccaccccctattgcctctgctccaccaatgagtggaaccagagttccagttggtggagacaacaacgttgtccacaaggccgaggatgttgtgagcactatgcttgccaagggtttcgtgctaggaaaagacgcggttggcaaggccaaagcgttcgatgagaagcacggcttcacatccacagccggtgctaaggtggcctccatcgacaagaagattgggctgagcaataagattaccacaggcacttcgttggtcagcgggaaggtgaaggagatggaccagaagttccaggtctctgacaagacaaagtcagcgttcgcggctgccgagcagaaggtgagcagtgccgggtccgccatcatgaagaacaggtacgtcttcaccggcgcgtcatgggtcaccagcgcgttcaacaaggtcgccaagactgccacggacgtcgggacgatgaccaaggagaagatggctgccgaggagcatcacaagggctccggcccgtcttctggcggccactcgtacacgcccatccgatgattcactcaaacggtgttgtactgcatattggtggatgtaaaacatggtcttttagtcccaactcttattatgttgtggttagctagagttgaaacctaatagaaaccacaagttaaggttcaagcacatgaatacctattttccatacacatatttaaagctaaaaaaaaaaaaaaaaaaaaaaacaagaaaaaaaaaaaaaaaaaagcgcttcggaccttgttgtggtggcaaatgccaaaccacaaactgatgatagatcgcactgagtaaatgaaacgggagtccttcaaaagctgtatgaccgtatattgtactaccaaaaacataggatattatgccgaaccataattattgtgcaaggtctgatagagaccatacctattagagacctaatacaaaggagcaaagccaggagaaacaagtttatgtaaacgattatatagcgntgtgccaagttagtgaaattgctttgaaaaatcgtgccatgttggcatgtgctcatggtaactagccctttggacaactatcatctttgaatgctgcgctcattgtaggtggaagccattctcagaact

SEQ ID NO: 77522 - DNA, 944 bp, Zea mays
  Clone ID: MRT4577_170725C.1
ccggccgggccgggataaacaactagtatagtgtttacttatctttttgccatgtaaactggaaagggatctaggacgtcgtttggtctctctgctgccttcttcctccttcctccacccctgccttgctcaaagtagtcagtcgtcatcgtctcctccgatcgcctccagttcattccagttagcgccgctgatcccctccctaatcaccatccatccatccggtaggattccccagccatgtcggcgaccgcggtgaagtttcccgtggaggcgccgccgaggacagtgaaggtcaccaacgtctctcttagtgcaaccgtgcaagacataaggagttcttttccttttcaggagatattgaacatgtggagatgcagagcttgtttctctttactttggcagtggtgatgagtggtctcaaattgcatatgtcactttcaaagatgcacaaggcgcagaaactgcacttcttctttcgggtgccacaatagttgatctttctgtgatcattggacctgctccagagtatcagccaccccctattgcctctgctccaccaatgagtggaaccagagttccagttggtggagacaacaacgttgtccacaaggccgaggatgttgtgagcactatgcttgccaagggtttcgtgctaggaaaagacgcggttggcaaggccaaagcgttcgatgagaagcacggcttcacatccacagccggtgctaaggtggcctccatcgacaagaagattgggctgagcaataagattaccacaggcacttcgttggtcagcgggaaggtgaaggagatggaccagaagttccaggtctctgacaagacaagtcagcgttcgcggctgccgagcagaaggtgagcagtgccgggtccgccatcatgaagacaggtacgtcttcaccggcgcgtcgtgggtcaccggcgcg

SEQ ID NO: 77523 - DNA, 2679 bp, Zea mays
  Clone ID: MRT4577_170726C.1
ctcgagccgaatcggttcgagcttctccctctgcctcctctcctctagcttgggtgcctcgcttccctcccctgcagcttcctcacgccatgcttgcggacccgcgccaagccttggccacgcagcgagcgcccaacccgacgcaaccgcgacaccgaccctgcccctccctgcactcgacgcgcctggagccccgccagccgagtactgtgaagcgcgccaccgaccggcatccagacccgcgtcgagccccagcccgacaccccggcttccccgcgtctacgcagcagcgccctgctcatccgcaagaactggcagcgaagcttgtcgaaaaaaaagtccggtaaaaaaaaaaaaaaaaaaagattctcaaaaaaaaaagggtttggaagcaaaaatcgtccagtgttttttttttcgttctttgccgtttctgcacacaagtactagtcgtctcctagtcctctcctctgtactagtcgtcgagtctgcttccattctgttcaagttagcgccgctaatccgctccctattcaccatccaatccaatcggcttcccccaggcacccatggcgacggcggtggaggttcccgtggaggcgccggtgaggacagtgaaggtcaccaatgtctctcttagtgcaactgtgcaagacattaaggagttcttttccttttcaggagatattgatcatgtggagatgcagagtggtgatgagtggtcccaagttgcatatgtcactttcaaagatgcacaaggcgcagaaacagcacttcttctttcgggtgccacaatagttgatctttctgtcatcattgcacctgctccagagtatcagccacctcctactgcctctgctccaccaatgagtggaaccagagttccagttggtggtggagacaacaacgttgttcacaaagccgaggacgttgtgagcactatgcttgccaagggtttcgtgctaggcaaagacgcggttggcaaggccaaagcattcgatgagaagcatggcttcacatccacagccggtgctacagtggcctcaattgacaagaagattgggctgactgataagatcacgacaggcacttccttggttagcgggaaggtgaaggagatggaccagaagttccaggtctccgacaagaccaagtccgcactcgctgccgccgagcagaaggtgagcagtgccgggtctgccatcatgaagaacaggtacgtcttcaccggcgcgtcatgggtcaccagcgcgttcaacaaggtcgccaagaccgccacggacgtcgggacgatgaccaaggagaagatggccgccgaggagcatcacaagggctccggcccgtcttctggcggccactcgtacacgcccatccgatgattcatgcattggcttgctgttacgtgcctcactcaaacggtgttgtactgcatattggtggatgtaaaacatggtcttttagtcccaactcttattatgttgtggttagctagagttgaaacctaatagaaaccacaagttaaggttcaagcacatgaatacctattttccatacacatatatttaaagttaaattttgtactcgaaaaaaaaaaaaaaaaaaggcccctagggcttttcaggagatattgatcatgtggagatgcagagtggtgatgagtggtcccaagttgcatatgtcactttcaaagatgcacaaggcgcagaaacagcacttcttctttcgggtgccacaatagttgatctttctgtcatcattgcacctgctccagagcatcagccacctcctactgcctctgctccaccaatgagtggaaccagagttccagttggtggtggagacaacaacgttgttcacaaagccgaggacgttgtgagcactatgcttgccaagggtttcgtgctaggcaaagacgcggttggcaaggccaaagcattcgatgagaagcatggcttcacatccacagccggtgctacagtggcctcaattgacaagaagattgggctgactgataagatcacgacaggcacttccttggttagcgggaaggtgaaggagatggaccagaacaggaaccggcaccagaagacaaagtcagcgttcgccgctgccgagcagaaggtgagcagtgccgggtctgccatcatgaagaacaggtacgtcttcaccggcgcgtcgtgggtcaccggcgcgttcaacaaggtcgccaaggctgccacggacgtcgggacaatgaccaaggagaagatggcggccgaggagcagcagaagggcttctccggcccgtcgtctaggagccactcgtacacgcccatccgatgattcgttggctttctgttatgcgccctccctcagacagacaatgttgtattgtattacacaaacacattggtggatgtaagacataggtagctatatatagaacagatcaccaggccccctcgcaccacttgttcaccgccccatgttctgttaaatttcgtactgcagggatttgtttctttaggacaagcaagtatggtggtgataccaatatgttggtttttacaaatccatgttcagactgtttgtggtttgaatgaacattttgtagaagtggtgggaagttaactggataatatgatgttgctgaaacaacatgctatcactatttgcagttatttggaatgcttcttgttt

SEQ ID NO: 77524 - DNA, 168 bp, Zea mays
  Clone ID: MRT4577_170727C.1
ccggctctacccactcatccgcctccacctatttcctcacctcgttctactaactcaccacatatcacataaacctgaccattatataaaatacttacccccaaaaccatctaataactacaatacatacatacatattcccatctaatccaaaacacccttcttcaa

SEQ ID NO: 77525 - DNA, 595 bp, Zea mays
  Clone ID: MRT4577_170728C.1
agcgtgtgtctctcctgtcctgtcatttttccccccgtcgatacaacaacagctcgcctattctcaggcgcggcgagagatgccgaaggagaccatgagattagggacttcctcctcaccgacaggaggaaggatgcccgttctctgaagatgaagaggtagcaaagatgttagtcaagacccaaggtcgttgtgctccattgatttggacgacctctgcgtctatcgatgctgacaaggaaaccaagtcgaagaaaactcttcccccacagtcgaccgacgaggacgtctgattgccatacatgacaacgacgagatgaacttagccactgttcctgatcggcatcagaacatgctactcaaggtactgttggagactactttattacagctgcccccgttgaatgtgctggatgttgcatttatggagaaataccatgttacatcgtgaggggctgctcaagaagctggagaaccaggaaactgtggcacgccaagagctcagcaagagagcaaaggagctgcccgataaggagctcaagctaccatatctgaaacctttgccgtggacccattggagggtaggctgacttga

SEQ ID NO: 77526 - DNA, 451 bp, Zea mays
  Clone ID: MRT4577_170729C.1
ggggggaaaggtttttttttttacagagggctttgtcctggcttaaaaaaaatgggttggaactttactaatagttacccagctccttttttgtttaaaaaaaacctagggattctttttccatcccaaggccggccggaaaattttgcacttgcttgtttggccctattgaacttttggacaggccggggcaaatgggttccacttggaacaaaggtttgggtagaaagtttgttttaaccccgggtctttttccaagggggggggccccgggccgttttttttctcgcagctaatgttttcaaaatttgggttcagggggggggggacccccacctctttggtgaaaaatccctggggggggaccttgcccatgttgaagcccatccccccccagccttttttttccaggaaccgggtttttttgatggccccccctttgggttggggg

SEQ ID NO: 77527 - DNA, 482 bp, Zea mays
  Clone ID: MRT4577_17072C.1
cccacgcgtccgcttgggagtcgggacggagggttggcggacaaccgcaggcagagagcattcccttttcttggttcggtttggtttcttgggggcgatttcttcttcttcttcttcacaccttggtcggtccggttcggggcgcgaggttgcccgagatggggaacgccagatagggtggtgctgtggaccatgagtgcatgctgaagattggcgagctgtggtcgaagaggaggtgccgcttcttaactttctagatgggcgacaagttctcggagatagttgtggaccacgtcggggagcgcgctaccagctacgatgacttctcaaacagcctccctgcgaatgactgccgatacgcgacctatgatttcgactttgttactgccgaggatgggcagaagagcaggatcttctatgttctatggtgcgcatcctccgccccggcggagagcaagatgctttatgcatgctcaacccag

SEQ ID NO: 77528 - DNA, 266 bp, Zea mays
  Clone ID: MRT4577_170730C.1
cttgtatatgccacactcgcatacacatacctgacaaaaggaaacacaactgccgctttgaataccttggatggtatgacaaagaaccaattgtacataacaccccagatttacaactgcctgtgtacttcttatgctgatgagaaggaaaccctcaatatgctgtgggttcgtgctattgagagaggctaatcaagaagagcgtgtacaaactgatgcacgaagcaaggcatggatcaacaaagcttacagttgagactgggtga

SEQ ID NO: 77529 - DNA, 389 bp, Zea mays
  Clone ID: MRT4577_170731C.1
cccacgcgtccgagaggatgtgcggtatggtagtatataaacagaagctggcaatttcagatgcgatgggactcatggagagagaatttcgtttccacattccaaactaatgcacatatacaattgtaccaaggaggccaatgccatccacaacctgagcttccccctctttacatgctatccaccacaaccagtcatgtttactgatccaggtttctcttatctgatcttatgttaaacagccagcccatgagaaaattggagtggttgactcccagtggattgttcatcaagtcatcccttcgctggtaaccaagtatgccagactattggtaccatctcacttttgtgcacggtacacacatagatacagtgaattctgatcctgt

SEQ ID NO: 77530 - DNA, 301 bp, Zea mays
  Clone ID: MRT4577_170732C.1
cgcacaacatcgagatggacgacaagacgtttctgagcaacatggagagggccgtagactaccttaactccgtggagaaggagttagctagctaccagtacctcaactggaaccccgagaaccgaatcataggacgcatcatgctcgccagagcgtaccactccctctttatgcacaacatgtgcatacgccccactgacgaatagctggatgacttcggcacgccgtacttcaccatctactacgcacggctcatcctctgcatacgctacacccactacatgacgtcgctcacgagcat

SEQ ID NO: 77531 - DNA, 341 bp, Zea mays
  Clone ID: MRT4577_170733C.1
attaactaatgcatgagctagcatggctggtaatgtcctaaccacttggacttcatggcgatcacatattgctagcgctgccgcacatggtgtgacgtggtgatcgcggcataggctagccctcccaatgtccttcatacgctaacatgccagtccactatggctggactgtctgtacgcgtgtacggacatggtatcatctgcctacctttgtcatgttatgaaacgacatttgccacgtggaactacaatgacccagaacactctggggctcctataacgtgtgctacatgctggcacatacgtatcagtgatgacggcttcggttgttggcaatgctt

SEQ ID NO: 77532 - DNA, 182 bp, Zea mays
  Clone ID: MRT4577_170734C.1
tttgaaacatctccaccatgaagatagccttgggtaagaaatctaaggttaagaagcatgcagtgtttgtatcaactataccatgcctaccatttggagcggcgtgtgacaactatgaggttgaaactgaggtaaaatcacatgcatacacacactgtcctgtaacatacccagttgaaact

SEQ ID NO: 77533 - DNA, 268 bp, Zea mays
  Clone ID: MRT4577_170735C.1
gggccacctctgtggaaaccaaagagttctcaccaagcataaacatattcctgggctgatccacaacatgactgcccgctgctgtgacctaccatttccagaacaggcctgctgtgcagaggaggagaaattaaccttcatcaatgatctgtgttgtccccgacgtaacatctggcgagaccctgccctctgctgttacctgagtcctggggatgaacaggtcaactgcttcaacatcaattatctgaggaacgtggctctagtgtct

SEQ ID NO: 77534 - DNA, 363 bp, Zea mays
  unsure (1)..(363): unsure at all n locations
  Clone ID: MRT4577_170736C.1
tttttctttttttttttttttttttttttttttatggttttttttcttttttttcttgttttttttctttttttttgggacctaccaagcccttttttgggcaaatcgggggcttatacccccttttaagggggggcccacagggggcctcgaagcaaccacggtgcattgttggggggggggccccacttgcaagggaagagaccttccaaggggccctaaaacgggggccctatgagccgaggaccccggcagggaccttcccnaaagaaaacggggcccccctgggtttgcccaagcccttttgagccccaagtggcaaggattccctccccggagggaagaggacttggaaaaagcccc

SEQ ID NO: 77535 - DNA, 513 bp, Zea mays
  unsure (1)..(513): unsure at all n locations
  Clone ID: MRT4577_170737C.1
cctccacgcnngttcgcggacgcgtggggctttttgatgttcagtattcttgacccatgtgataacagcagtgttttgaggagctggccaccaaaggtgacacccaggggggaggcgaggatttttaccataggatcaaaaaatacttcataagggggatcatttttattttagaaatggacataaaaagggacacctttttaataggaaagttgaggagggaagctgagggaaaaatgttatgttctgaccaccctgtaccagaaccgagttgaaaaaaattttttttttgacggcaccgactccctcgaaaccgcttaccaaaactaggtttgaggagctgaacaatgatctgctccgcaagactatgatccatgtgaagaaggcgatggaggacactgcccttgagaaaagccacatccaggagatcgccctgcctggtggaagcaccaggattcctagggttcagcagctcctgaaggactacttcattggcaaggagccctacatggg

SEQ ID NO: 77536 - DNA, 433 bp, Zea mays
  Clone ID: MRT4577_170738C.1
gatttcggctcgggggctctttccagagccagagtgttggaccttaatttgaggtcttcaaccatgcacaacgtgtaacacatgcttccctctataagactcctcgcaaagtttgatcacattcacatcccaaggaaacagaccactgctgtccttgctagtgcggctgatatctgtgacaacaacggtggccatacacagacttcagcggacgttggagacccacgtctatcagacgagttctcccacaagaattatggcgggcatacaatggcacgccccttggggggctacccgcttgtttacaaacgtggtgtgagcgttcatcttgtggactgcatcacgagtgagggtcaagcttgcatcgggcgtaccgttcgtgcccaactaggtgtaattctactacacgaacggggtgtcaatatgatacatg

SEQ ID NO: 77537 - DNA, 893 bp, Zea mays
  Clone ID: MRT4577_170739C.1
catgcaaactattctgaacatctctggcaatgctgtaaagtttaccaaggagggacacatcacgcttgtagcttccattatgaaggctgactctttgagagagttcagaaccccagaatttcatccaactgcaagtgatgaacatttctatttgaaagttcaggtaaaagatacaggctgtggagttagtcctcaggatctacctcatgtattcacaaagtttgctcatcctcaaagtggaggaaaccgaggggttaatggtagtggtcttggccttgccatatgcaagaggtttgttagtcttatgggagggcacatctggatcgacaacgaaggaaccggaagaggttgcaccgcaacattcgtcatcaagctgggcgtgtgtgacaacacaaacacctaccagcaacagctgataatgaagtgcatctgagcatttgaaacaaatctagattctagctctagctaaggttatacagatattgtgctgaaccttgatgctactattatgtgtagtaaaattttgggggtcggaattgaccaaacttatggatttattcaacgtttcaattcagtgacaaatgctactattttctatattcagatacttggtactgatttcttgatcaaactcattaaacttagcattccttatagttatccccacacgctgaggttgcgcctgtgccatggcataagacacgcctacatcgtggacggatatgcgctgccatggactgacctcagcgcagatcgtgattgatttgtgggtgaccccggtttgatgtctggttgttgggctgcgcaggtgggctgtcgcttgggatcgaaaaggatagggcatctactgccaccatggggtttgtcgacgacttcaaaaggcatgttgtcgc

SEQ ID NO: 77538 - DNA, 292 bp, Zea mays
  Clone ID: MRT4577_17073C.1
gcgcgcgtaacagaatatcagtccatttggcagggggcctgtaaaagtcaaatacaccgggggtcattttaacaacgctgaccccacaggggcagggggggtttttttctggggggcggcttggagcgcgaaaaccaggatccgggcgccatttattgccataaaaaccgaaacaaaacatgcgggttaacatgtaaaatggttaaataaaacagcgcctagggcgggttcatagtatacacgggggcgacgacgacaacaacaggttcaacaaaggggatacttgaagaga

SEQ ID NO: 77539 - DNA, 301 bp, Zea mays
  Clone ID: MRT4577_170740C.1
attcggctcgagctgaaaaccgctttttgagaatacagtcaacgaattgagactgaaaaacatctgacgtccaaaccgccaccttcgacttttactgctttgcccgagcccttccgcaccgtcgactcccaagacggctaagctcagtggttctgcgacgtctgatgatagattcacatctcgaccatacaatggatgatcataatgaccaggtgaacctgttcttgcttacgagcggagccctgcgacaatcactctactgcgaagattctctactagaattctcgacatgtacgatcac

SEQ ID NO: 77540 - DNA, 439 bp, Zea mays
  Clone ID: MRT4577_170741C.1
acaccaaaacgaggagccggggcgggggcgtttccatccatccattatatatatatgatcgccagcaggcagcaggctaattcttcttcgttctggacaccacacacacacagcttccctctattccattcttccattagccatccagtaaacaaggggggcgcatcgcaatggcaagagctagctaggagattgatccggcctagttctgttcagcatgaggaaggtgtgcgccaacccacacagagaggtcggccttgacacaatgctacaggtgcccgtccagggccagctccaccacgatccatcgtcggcatcctggggcacacggacgcgccggcgactcaccctcaaggcgtgggtgccgtcgccaattgaccaccgccaccggactgccagttcgcggccttctccagcggacttgcaattcatgctcggg

SEQ ID NO: 77541 - DNA, 455 bp, Zea mays
  Clone ID: MRT4577_170742C.1
ctcacggcgcaggggggtcaaagggcgaaggggtaaacccagagaaaggggggcacaaacacaaaagggggggggggggggcggggaaccggacaaaggaggaaaagggccggcaaaacaacatgggggcaacaacaaaacgggggaccacaggaacgagaacgcgagccgaaaaggccacaagaccccaaccacagccggggcgacaacccaggccggggcgaaaaccgaaagggcccccccccccccggagaactggcataggaaagaaagggggggccggagagcgaagggaccaaaagaaggaaagctgaccatgggcagaaggggatagggggccccaggccccaaggggccaaggaaaaaaaccggccataacaaaaaaggggtaaaaaaaaacggaacaagcacactgggaacaggaagaccgaaaaaaaaaagattggcgggaaaaa

SEQ ID NO: 77542 - DNA, 182 bp, Zea mays
  Clone ID: MRT4577_170743C.1
gttgatttatcctgccgctccgggtcaagttcgctttcaggaggtcctccggggttcggtttccgggctgagcgagccaagataccggcccttgatgctgagtaccgctgatttgtcggggggctcgcgtggggcacagacgaccactgcttgcacaacgccttcagtacctacggcgaggt

SEQ ID NO: 77543 - DNA, 375 bp, Zea mays
  unsure (1)..(375): unsure at all n locations
  Clone ID: MRT4577_170744C.1
gtgctggaatgtttaggacgcttcaatagtttcaacagacagtggacgcaacgagttgcttttgatgcaagacatgccagattattatgtacacggattcttgagacgcctattttttttaagtatttacaggaggaggggcattgtccgacgtcgatccacggcggcgtggcgccactcatagcagcccaaaggcaaaatccatgcttcaaaagatgcagatgttcaacagctacctggaggagatttgcgcggtgcantcagattgggtgattgcagatgagcagttaccagcagatgttaagtcagcgatagtggattctgttatgcctgcatatagaggcttaattgggagattgagatcatctcctgaag

SEQ ID NO: 77544 - DNA, 313 bp, Zea mays
  Clone ID: MRT4577_170745C.1
aggtaaacctcctacacgtaccggtaccgaattccaattcccggggcgacggggcgcgtccgattctcttttttccccatactaatatataaatggtgggcctacccatatcttgaccaagagaggcgacggccctcgtgtgggcggtgcggaaaaatgccactaacaaatcagcaggctgtagattacaggaggtttaatcccctcatctttgccgacggcggaactggtataacaacatttgtgaaaaggcacattactggctagttcgggaagaaatttgaacccaccattcctgcataagtacaacctc

SEQ ID NO: 77545 - DNA, 194 bp, Zea mays
  Clone ID: MRT4577_170746C.1
cgtccttcagagagcaacggaagagcttcccggaggcgaggaaaagagggaaagtagccagcaatgtcgaacgcaatgtataataagatgtggcatcagacccaagaaagcctcggtgctgtactcgataaaggagcccagaagatgattgaaccacaaagaaatccgggtttcactttacaacattagcccac

SEQ ID NO: 77546 - DNA, 342 bp, Zea mays
  Clone ID: MRT4577_170747C.1
ccctttcgtccgaccaaccatcgatccaattgccacttgctctccctccaacaagctaaggccggacatccctcttctagctcgcatcattatccatggcggaggacaagcaccaccaccacctgttccaccacaagaaggaccaggagcacgaggagcagctcgccggcatgggcggacccacaggggggcacaggcgggtcctacaccgcgagggaccacgatcccggagggaccaatcagaccaagaagtggtgtttcttctggccgccggactcctcggcctacttgtggcccttgttcttctcggggtgctggtgaaaagcgaatccgccacgagcc

SEQ ID NO: 77547 - DNA, 691 bp, Zea mays
  Clone ID: MRT4577_170748C.1
cgggccctccctcgagttttttttttttttttttttttttttttttttttttttttttttttttttttttttttttttttttttggggggaatacaaaaaaaatgacattgttttgcaaaggctttgggggaaatcagtccaatcgggacttgttgaattacagatgggaactttaaaaaagggtaaaagtccccctcaaaaaaatttaccaacggaaaaacattttagcacacaaacgacttcgaccgggcttgggtgggctccgttttgagctcaggccaagggctgatcgggggggcaacttttggttttggttaccggtcttttttggtcttggacttggaggaaaacaggcgtggcccaaaccagggggttggggctgcccacaacggttgagtgatgcaggacggttaaacacagggtggctaaacacagaagccttggttgtttttcctgagcgcttttgcatttttgcgtcagggtttgaggacctgatcagggttggactgacagcacaacaaaaagagaggtcaaagtccgaaagcatgatgggcccgtcctcccggaaaggacattttcaggcttgaaatcgcggtatatgataccgagcgggggcaagtactccagtgccaggaggacttccgttatgtaaaatcttcactaatcagggcaattgtttcatactggact

SEQ ID NO: 77548 - DNA, 411 bp, Zea mays
  Clone ID: MRT4577_170749C.1
gtacccaaaaagggatacataactggggcgggaaacagggaaccacgcgtgggaacaggccctttgaaatgccgccgagggataaaccccccacacaaaggaacaaagcccgggaaaacccccgggaggcggggctcggggggattccaagaaaaaggccggaaaacgaactttttggcattaaactccccccaaacgaacccccccggaaaaaaagggggatttccctggggtgggcaaaggggtgggcccaaaaggggaaccaaacaccaaccgggtcttggggggggcaaaaaggggagccccaaaaggggccccaccagggggggcaggcccaaaaccaaggggaaccctctttaaaaacccaacccaaacggggactggacgggcccttatttcccccccaaaaac

SEQ ID NO: 77549 - DNA, 1449 bp, Zea mays
  Clone ID: MRT4577_17074C.1
ggccgccgtgtgctggcgattcgcccttcgagcggccgcccgggcaggtactgtgcgcgtgcaaatccagaatgacgtagttctgacgtgggctcgcattgtcgcgtgttacaataatgataataactatgaggaataaatatgggaatgttgccggataaaaaaaaaaaaaaaaaaaaaaaaaaaaaaaataaaaaaaataaaaaaaaaaaaaaaaatttaaggggggggggggtaaaccggcgtccgggattgaggagaaaataaactaattatcccctaatcctccaaatgttcgattaatcccgttatccatggattagatgagataaattaagaagtgtttgactttatttactcatctcctactcaatctatgtggattgggggaccgaacaagccctaacagtgtgcgttttcgcaccccaactgcctttctctctataaaaaaaacccctcgtcgatcaccaccaaagaacacagtaactagctagcagatcaaacaagtagcgacagctcgacaaagatttgtgagagtgatccggcgctgagaagagatggctaagatcgccgcagccgccgcggcggcggcggcgctgtgcttcgcggccctggtggccgtggccgtctgccaaggcgaggtcgagcggcagaggctcagggacctgcagtgctggcaggaggtccaggagagcccgctcgacgcgtgccgccaggtcctcgaccggcagctaaccggcggcggcgtcggcggcccgttccggtggggcaccgggctccggatgcggtgctgccagcagctccaggacgtgagccgcgagtgccgctgcgccgccatccggagcatggtcaggggctacgaggaggccatgccgcctctggagaaaggctggtggccatgggggcggcagcagcagccgccgccgcagggaggaggaggaggacaggggggctactactacccctgcagccgggcaggagagggataccaaacgcagatgtatccaccgtgtcgtcccggcaccaccgggccaaggatcggccgcgtgaggcttacgaaggcccgggagtacgccgcggggttgccgatgatgtgccggctgtcggagccccaggagtgcagcatcttctccggcggcgaccagtactagctaccatggttaaaaaaaaagcgagtcggcgcgaggtgcaaggcgcagcatgtgtactgtgcgcgtgcaaatccagaatgacgtagctctgacgtgggctcgcaatattgtcgcgtgttcgttacaataatgataataactatgaggaataaatatgggaatgttgccagatagtactggcgccggttcttcgaaaaaaaaaaaaaaaaaaaaaaaaaaaaaaaaagaaaaaaaataaaaaaaaaaaaagcttgtactcgcccccggcacaaaccgggcgagcatgcgcttttttttt

SEQ ID NO: 77550 - DNA, 421 bp, Zea mays
  unsure (1)..(421): unsure at all n locations
  Clone ID: MRT4577_170750C.1
cggaggatttcatccccgccccccccccccccaacacacacacacnttttnttaatctttccccttattatggggtcccgaattgattcggagatctcgagcgactctgcacatttcagatgagtggacatttcaattttcaagatgcagaacaaaaaaaaaaaaaaaaaaaaaaaaaaaaaaaaaaaaaacaaataaaaaaataaaactaaaaaaaaaaaaaacaaaaaaaaaaaaaaaaaaaaaaataaaaaagggggggccggttttaaaagatcaaacttaaccaccccgtgcttgagaactataaatctttttattgggggcccacaaagacatttatggggggggggataaaacagttaaaatgggaaaaaccctggcgtcaccaaaataaatgccttaggagaaaacccccttt

SEQ ID NO: 77551 - DNA, 414 bp, Zea mays
  Clone ID: MRT4577_170751C.1
gaatttcccgggcgacgcaccccttcctattaattcaccagttccttaaagaatggaataaggtttccactatttatttttcgggagatgaggccttataaggcatggggaccgacccaattgccaagcaaaattttcttattattttaaaattcaataatattggcccccccttataaacccttattttatagacccatttaaccaaacaatttcttttttttaacttcactttaattactattctttccccccttttaaaaaatatttcaatttaaaaaacctttattttccccaattttttattttttaaaaaaaaacccctttttcccaattcgtaaataacaaagaaactcactctttttcccttttcaaaaaattttcaaacttaaatggcgaattggcccccccttt

SEQ ID NO: 77552 - DNA, 384 bp, Zea mays
  Clone ID: MRT4577_170752C.1
accaagcgaagcacattagcttcaacttaacagcaatggctaccaagatctgatccgtacttgcgctgattgcgctatttgcgagcgcaacacatgcggttattattacataatgctcacttgctacaagttccattattacacagataccgttcaccaggcacttcaatgggcttcgaacacccaactgtgcaagcctataggctacaacaagcaatctctgcaagcgtattacatcaaccaagcttccagttgcagcaacaatccttggtacatcttacagtacaaaccatcgcaacgcatcagcaacaaccattcctaccagcactgaatcacctagccatagcgaaccctgccggctacttgcaacagcagatgcttgca

SEQ ID NO: 77553 - DNA, 522 bp, Zea mays
  unsure (1)..(522): unsure at all n locations
  Clone ID: MRT4577_170753C.1
tttttttttttttttttttttttttttttgtttttttttttttttttggggggggtggatttttttttttttcccttggcctatctcgatttctgcttctttccaaaagttggttttttttgttaaaacctttggggaaaaaggggggggggggggaattnggcattcaaccctcgtttcctcaaggcggggggggcaggaatccgtgggggttgcctgtttgaaccgggtgcaggaagggccccgggcctttgggctttggcgggtttgcgtgggcccgttcccccatggctggtgttccttctctgggtgcggtgtcccgggggctttttttccggggccctcccgaaccngtgccccccccccttctggaatagcacgctgccccccgcggcgggggggcgccccccaaatcttggtgcccgaaccgcgcctgtttctaaaggcttcccagccttttgctcctggtgttttgctgttgccctgtgcccttgttgttgggggggagggtctaatgccctg

SEQ ID NO: 77554 - DNA, 284 bp, Zea mays
  unsure (1)..(284): unsure at all n locations
  Clone ID: MRT4577_170754C.1
cacgcgtgctcccactcttccgcanccaattcnctcgagttcatatcgatcgcgcgccaancaangcagtccnnccggcctctaagaggggaatcaagcaatacaagatggtcaacctctccttcggaagcgtcggcgactccttcagcgccacctccatcaaggcctacgtggcctagttcatcgccaccctcctcttcgtcttcgccggcgtcagttccgccatcgcctacgggcaactgacgaatggcggcgcgctggacccggcgggcctggtggcgatc

SEQ ID NO: 77555 - DNA, 1050 bp, Zea mays
  Clone ID: MRT4577_170755C.1
ccgatcctaagggacgggggaaacccggcagatagcgcgatcacgcgcgtcacccgaaagggaatcgggttaagatttcccgagccgggacgtggcggcagacggcgacgttaggaagtccggcgaagaccccgttcctcccctcgctcccgcgcccggtctcgccgaggcgcgccgccgccgctttcgccttctcccccgccgccgcggcggcccccatcgcggcgtcgctgctccagggccccgtgctggtctgggccggccggctctgcatctactacgcgctcctccacgtcgggcttgccggctctccgcgcaatcccttcctgtcccacgagatcggcggcgaggacggcgccggggacagcgacctagggttctccaaatgggccgagaagctccgtggcggcgcctcaggtgaaaaagatgctcagcataagggaaagctaactagcaaatggaagccgaccaccaaaggcacactgaaaagaacttacagagtacgatcaacggatgaaggaaggcgggtcctcaaggagatcgcttcagttctgtcccaagatgaccattttgtggatgcttcgtctcacaagggttgccaagttaggagggaaagtgctcatggcgaaagtgtttgctgctacaacgtgagagcgttgttcgatgagcttccaactcctcacctgcttctggagataacaccgtttcctgctggacaacttacggacaacgactaccgtaaggcagagaggcttgagatggtcctgaggctcagcacttctatttaaaaaagctggggactgatttttcaattcccctaatacttaatttgcccaagttgtaaattgtcgtcctatgggcctgtaaattgacgcagttggcaaagaatcacttgaaaacacaagttctggttgcataattgatccattgagatactttaggtcattaattttcccctcaatccccgggaactaactccaattaactgaaaaaaaaaaaaaaaaaaaaaaaaaaaaaaaaaaaaaaaaaaaaaaaaaacaccccccacac

SEQ ID NO: 77556 - DNA, 1113 bp, Zea mays
  Clone ID: MRT4577_170756C.1
ccacgcgtccggagcgctcgcgctcggcgcgccgccgcagctcgcgcacactgcagtctgcagctagcccgtatcgccaatcgccatgctcgcctacctcctccacgccccagccgccgccgtcgccgtcgccgcggcgccctgtgcctcctatctccgctcactcccgccggcgaagaccccgttcctcccctcgctcccgcgcccggtctcgccgaggcgcgccgccgccgctttcgccttctcccccgccgccgcggcggcccccatcgcggcgtcgctgctccagggcccctctgggccggccggctctgcatctactacgcgctcctccacgtcgggctcgccggctctccgcgcaatcccttcctgtcccacgagatcggcggcgaggacggcgccggggacagcgacctagggttctccaaatgggccgagaagctccgtggcggtgcctcaggtgaaaaagatgctcagcataagggaaagctaactagcaaatggaagccgacgaccaaaggcacactgaaaagaacttacagagtacgatcaacggatgaaggaaggcgggtcctcaaggagatcgcttcagttctgtcccaagatgaccattttgtggatgcctcgtctcacaagggttgccaagttaggagggaaagtgctcatggcgaaagtgtttgctgctacaacgtgagagcgttgttcgatgagcttccaactcctcacctgcttctggagattacacctttccctgctggacaacttaccgacaacgactaccgaaaggcggagaggcttgagatggtgctgaggctcagcgcttctatttaaaaaactggggactggtttttcaatttcccctagtactttctttgcccaagttgtaaattgtcttcctgtgggcctgtaaattgacgcagttggctaagaactacttgcaaaacacaagttctggttgattatttgagcttaagaacctgatatgatatacacttgggcgtttccctgaactgaaaaaaaaaaaaaagaagggttccttttccttgagtaaggaaatagggatgggcatggattgatccattgatctacttcgcttaagtaacagatttttcc

SEQ ID NO: 77557 - DNA, 1208 bp, Zea mays
  Clone ID: MRT4577_170757C.1
gttccgtgtgcacaccacaccaccgtccgcatggcggtgggcgacgggctgaaaaccgaagcaccgaacacacgcgcaccgcagcttgtccgtatcgcccatcgccatgctcgcctacctcctcaacggcccagccgccgccatcgccgcggcgcccagcgccttcctcctccgctccctcccgccggcgaagaccccgttcctatcctctctcccgcgcccggtctcgccgaggcgcgctgccgcagccgcgttcgccttcaaccccgctgccgcagcggcccccatcgtggcgtcgctgctcgagggccccgtgctggtctgggccggccggctctgcctctactacgcgcttctccacgtcgggctcgccggctccccgcgcaaccccttcctctctacgagatcggcggcgaggacggcgccggggatagcgacctagggttctccaagtgggccgagaagctccgtggcggtgcctcaggtgaaaaagatgctcagcataagagaaagctaactagcaaatggaagcccacgaccaaaggcacactgaagagaacctaccgagtacgttcaacggatgaaggaaggcggatcctgaaggagattgcttcagttctgtcccaagatgatcattttgtggatgcttcgtctcacaagggttgccaaattaggagggaaagtgctcatggcgaaagtgtttgctgctacaacgtgagagcgttgttcgatgagcttccaactcctcacctgcttctggagataacaccgtttcctgctggacaacttacggacaacgactaccgtaaggcagagaggcttgagatggtcctgaggctcagcacttctatttaaaaaacctggggactgatttttcaatttcccctaagggctagtttgcgtactctagtattgacctcaatccacttcaacacatgtggattgagtccaatactagagtatccaaacaaagcctaatactttttttgcccaagttgtaaattgtcttcctatgggcctgtaaattgacgcagttggctaagaaacacttgaaaacacaagttctggttgcatatttagatcctgatatgataaacccttggggggttcccctggaaaaaaaaaaaaaaaaaaaaaaaaaaaaaaaaaaaaaaagaaaaaaaaaaaaaaaaaaagaaaaaaaaaaaaaaaaaaaaaaaacccccccc

SEQ ID NO: 77558 - DNA, 1784 bp, Zea mays
  unsure (1)..(1784): unsure at all n locations
  Clone ID: MRT4577_170758C.1
cagtaacctgacaccttcattccggtggcctgaaatgccatggcgagacacntgatttaacttgagcagccattcccatgatgatttaagtgcatcatcaatccctccattggagaataaaccctggatagctagcttttggagtgctttggcaaacaagttggttcctgtcttaacagcttgcctgacgactgcaggcgtctcatcattcagaaggtgcagcaaacaagggatcatatcaggtagatacctcatgtgttttgacccaagctcaccgatgatctcggcaacaagcgcagcagcgcctccattgctctctctcacgagtcccggcgttccagtggggggcattcatggcggggcagtccgacccgcacctctccatcttctcgccctccgaggtggagttcgtggcggaggatgagattgtcgaaatcgtccccaacatccgcatggacgccctcaacatgatctgcggggatttcgggcccttcttcccccagattcccaccaaggtgcctctctgggcgctgagcgagcaggactgcaggagcagcgagaaaggcaaccgcggcgccccgccgccccgcctcgccgctgcctcacccgccgtgcgctgccgcgacccgaccaaatcgaactgaagctgcgtgaagcggctgttgggctctgttgttggatgggctttcgggcactcagagtgggctgtagtttagagagtcccagcgacctgtagcctcctctctccgtcgacctcgctctcgcctcgccgcctcctacccgcagcagcgcctccattgctctctctcacgagtcccggcgttccagtggggggcattcatggcggggcagtccgacccgcacctctccatcttctcgccctccgaggtggagttcgtggctgaggatgagattgtcgaaatcgtccccaacatccgcatggacgccctcaacatgatctgcggggatttcgggcccttcttcccccagattcccaccaaggtgcctctctggctcgctgtcgcgctcaagaagcgtagcaagtgcaccatccgcaccccggactggatgactgttgaccgcttgacacaggtattggaagcggaaagagagtcgccacgagaattccagccattaccattccactatattgaaatttctaagcttctgtttgatcatgctcgtgatgacatctcagatgcatacctggtaagatctctaattgaggacatcagagatgtcagatttcacaaggttgagactggattagagacgatatctggacgcacccatgccgtaaagctcaaaaatctctctgcaatggaagtgaacattgtccgccctttcatggtgagaactttgcaggcattctataagcacgatagtgcacagatgattcagcaagcagataatatagggagcagagcaacactggttacagaccgtggcccgagaagagatctaaggcgcaggtagtccacttgtattctgccaaaaaaaatgtatatctgaggacagcagcaagtggttgctttcttgcaataataccagctaagtatgtgctaatgagtcctgagatgtatcagatagtaaagcaatggtggatcatagtttgtctacttttatagagggaactggcattgctcttccccgctttgaaattgtactgctttattcctactgatgttatatgcaagtgtgtgtgtgtggctcattgatctctaaagtagcctctgatcaattgaatgttatatgctaagctaatggtggtgtagtttcgggtc

SEQ ID NO: 77559 - DNA, 557 bp, Zea mays
  Clone ID: MRT4577_17075C.1
ttttttttttttttttccccaaaccagaagttgcaatcatattttttaacaaaatttcccagagttattcagtacttgcaattacatcagagcaactcagcagttgcatccacaccacaccagcagttgcaattacaacacaccagcagttgcaatcattttgtttacattttttaacagatatttggatagaattattcagcagttgcaatcacacttaatgcaaggttgcaatcacaccacaccagtagttggaatcatttttgtttaacaggttttttacaatcagaccaaaaaaaaaagggggcagggaggcgcgcgtacaggagggccgagggcgtgctcgggatgttaggtgctctggtcgtatagggaatcttggggtctgtgcatccacaaactaaaatacacatgggtgcattttagtgccgccgtgtgtatatatatatatatatatatatatatatataagcatcactaacgtttaccggctagacgatagaaacacttacactaccctttacattccctttctctaccctttacattactaattt

SEQ ID NO: 77560 - DNA, 2967 bp, Zea mays
  Clone ID: MRT4577_170760C.1
cctcgactcttcgtacgactacgaccgattctttccatctacccccacctactgcttcttctccttagtcctgcgccggccgccgcttcttctccttgcatcctggctggcacggttcaaaccaagctttctctacccaagtcctgcgccggccgccgcttcttctccttgcatccggttcaggatttccagcggcctcgactcccgatccggtctccgtaggagcgtcggtatcctcgtgtctccggcagtctttcgaacctcggttggtcccgattggcgagaaacccccgcgtcgaattggcggccaaggggcgcgggacgcatcattcgattcttggcggctgcttgcctgcttgtgcttgagcgcttaacagaacttcgcgagctgggctttctctaggtggaaagacaatttgatttggagatggggccggaaatgatagagcaggatggatggtaggaaaaggaaggggaaattcaggaattctctcaggcgtatggctatggagtgcctgtgctctggtgagcagttgaaggcgtcagatgagaccatgcggtcatctgattctacgatcacaaaggatttctcggccagtgggtactcttctcggaatggagagattgagcagtaccttgataatggcaacatagaggaagccgagttgtcgctccgggagggcatttgcctaaattatgaggaagcaagggcattgctaggaaggctagaatatcaacggggtcatgtagaggcagcactccgtgtctttgatgggatagacatatctgcattagttcctaagatgaaaatctcaattgctagaaaaacagaccgtcggaagactcattcacagtgggattccccaccaatgcccttgcatgctgtcagccttctcatggaggccatatatcttaaagcaagagcacttcatgatcttgggaaagataaagaagctgcacaagaatgtagaatgatattggatattgtggaagcagctgtacctgagggcttgccagcaggctttgggaaaggctgtaaattgaacgaaataatatgcaaggctgtagagttgctccctgagctgtggaaatcaggggggttttcacttgaaaccatttcttcatataggaggtcacttcttaataattggaatcttgatggagagacaatagcaaggatacaaaagaaatttgctgtttttctcctatatagtggttgtgaagcacgccctccaaatcttcattctcagttggacggttcatttgtacctcgcaacaatattgaagaggctatccttcttttgatgattcttttgaggaagtccaatctcaagaggattgagcaagatccctctgtgatgcatcaccttacttttgcactgtccatgtcaggacagctaattccactggctggacagtttgaagaattgttacctggtgtgttagacaaaaaagaatggttgtacagcgttgcattgtgttatttagcagaagaagatgatctgagtgccctgaatctactcaaaattatactaaaatctggagaggactccgttcaactcatagaactgcttctagcttcaaaggcttgcattgagatgagtattcatactgaaggtgctttttatgcaaggagagccattgcaaatatgcagggaggatgcaaaccaatggcaggacttgcaaacctattgcttggtgttgcactttctaatcaggctagaagtgcaatatctgatacagatagagcttcttggcagtgcgaagcactggaagcccttgggaatgctgaaaaaaatatacatgggaaagattctagggcattatacagtctcagccttgaaaatgctgtgcagaggaaattagaattagctgccttttatgcaaagaggctggtgaaacttgaggctggatcagagttgaggagttggctccttttagctcgaatacttagtgctcaaaagctgtttgctgatgctgaaacagttgttgatgctgctctagatcaaactgggaaatggtgtcaaggagatttattgcgaaccaaagccagaattcaggctgcacaggggcaatttagagaagcggttgaaacatacacccaacttcttgctatcattcaacttagaacgaaaagtttaactgctggagtttgcttgccaaagggcaacaaggatgataaaggcctggaaacagagacctggtatgatctagctctcttatacctaggtatggcacaatggagggatgcagaggtttgtgtattgaagataagatccatcagtccttattctgcattggcttggcatgctacaggaaaaatatatgaagcaaaaggtcttagaaaagaagctttgggagcttttttcagagccttagatcttgatcctaaacatgtcccaagtttaatatcaactgccactgttctacaacaacttggtgacaggccattgccttctatacggtgcttcctgactgatgcattacaactggatagaactaatcatgttgcgtggttcaatcttggccttctttacaaagaggaaggtggcaggtcagcagctgaggctgctgaatgcttccaagctgctgcttttcttaaagaaactgcaccttcagaacctttcagatgacatctacaggggctatagatgtaagctgctgtatgtatttttgatatatttcactgatgaaatagtggattacagagttctaaaaatgatcttcttgggagatcacagcattggaaactgttggaaaaaatgtttaacaattcaatctatagttccaattgttgcctgtatagcaacaagaaagacgatgatcttcgccttgtgtaggaacagtgcttactgtgatatatatatatagatagatgaccagtacattgtgtatcttgagtaaaatggtttcacatataaggtatcagactactctctccgtttgttaagaatttagtcaagatat

SEQ ID NO: 77561 - DNA, 895 bp, Zea mays
  Clone ID: MRT4577_170761C.1
ccggccgggatccggttcgtgtgggggcgggcattcatggcagggcaatctgacccgcacctctccatcttctcgccctccgaggtaaccaaccccttcccttccacactgcacaggcagggactatcttcgtctgtgctgctgcaggtggagttcgtggcggaggatgagatcgtcgaaatcgtcctcaacatccgcatggacgcccttaacatgatctgcggggatttcgggcccttcttcccacagattcccaccaaggtgccgctctggctcgccgtggcgctcaagaagcgtagcaagtgcaccatccgcaccccggactggatgactgttggtattggaagcggaaagagagtcgcctcgggaattccagccattgccattccactatattgaaatttctaagcttctatttgatcatgctggtgatgacatctcagatgcatacctggtgaggtctctaattgaggacatcagagatgtcagattccacaaggttaagaatggattagagacgatatctggacgcacctatgccgtaaagctcaaaaatctctctgcaatggaagtgaacattgtccgcccttttcatggtgagaactttgcaggcattctataagcacgatagtccacagatgattcagcaagcagataatgtagggaccagagcaacactagttacagaccgtggcccccagaataagcttcccttgtagatattgtttcaacttgcttgtggattctcggaggtagttgtccccataaaaaatgtgccctaagaatcttaagatgttgcgcacaaaatagttccatatcagaaaagctggtacatatatataattctaaaaaaaaaaaaaaaaaaaaaaagaaaaaaaaaaaaaaaaaagcggcc

SEQ ID NO: 77562 - DNA, 185 bp, Zea mays
  unsure (1)..(185): unsure at all n locations
  Clone ID: MRT4577_170762C.1
acaaccaagacccccgagaacacgggccgacaggcagcnggcaaggagagacaccagangtctccgngacggcagaggaggcacatgacaacggcgaanacggcacggagcagggccagccccgcggaaaaacgggaaccgcgaaagcagaaccgcnacanaaggagccgaacaacgaagnnccg

SEQ ID NO: 77563 - DNA, 496 bp, Zea mays
  unsure (1)..(496): unsure at all n locations
  Clone ID: MRT4577_170763C.1
ttaggtataatcaattgtaatccgtcaggcccctgcacgccccacgaagctctagcctgcagcgaattgaaaaggccaagccactctagctatggtactagtagtatggtccattgatgctggctgctggggcctcaaagacgatgacggcgaccctgcacgcacgcacgtcgcgccgctgncagcacctagctagctagctagcttacctacctacgccactactagctagtatcctccgcctgctcgccgggggcggccacgaggcgcctgctctcctcctcggcgtcgttggtgagctccagccccgccagcttcttggcgcgcatggcctcgacgcgccagtccgtgcgccagacgacggcgacgaggacgagcgccacgcacgtggccttgcgccgacaggaggccgtaccagaggccgcggaacccggcgcgggcgccgaacgccaggtacaccgccacgggggtgcccaccaggtagaaggagaggagg

SEQ ID NO: 77564 - DNA, 178 bp, Zea mays
  Clone ID: MRT4577_170764C.1
cacgcctgcatgtaccgggcccgctattacacggtcgacccactcgttcgatttcttatgagtgatctttcaataataatgggtaagtccgcctgctgtttgacggcttcctctattattagaactatcatcttataggaaaaaaaaacacaagggccgaccctctaatagatccacc

SEQ ID NO: 77565 - DNA, 181 bp, Zea mays
  Clone ID: MRT4577_170765C.1
tcgtccctctactccgtacagctactcctcataatccaatctgtccttcgtggtcaagacccctggtgggagggtgtgtgttctagtgcaccgtgatgcttcatcctacctcaagaaagttgggttctaccctgataagtttgcctttttcccaccttatgccttttagggccacgacgtg

SEQ ID NO: 77566 - DNA, 198 bp, Zea mays
  Clone ID: MRT4577_170766C.1
aattgcgtcatttgtagcacaaaccaccaagccggggagtcttttaacatggcataccatctaactagcatcccctttttacactggtaacaacattgttcaagatcaccatgcaacgaaactcgcaccacgagcatgccatttttgtcagtttactcagcagtcctatcccaccaaaaaaaatgtgaagtcttatat

SEQ ID NO: 77567 - DNA, 1244 bp, Zea mays
  Clone ID: MRT4577_170767C.1
cgtcgccttcgacccttctccgtcctcccggaacgcccgtcccgtccgtgctccccccatccacatccatcccgtgtgcttctactgctcctcgatttgatcaccgattaggggaggcggtcggccggggagcacgcgcgagagataggataggaggaaagggaagctagcggcttcgctctcgcggggagatggcgcaggcggtggaggagtggtaccggcagatgcccatcatcacgcgctcctacctcaccgccgctgtcgtcaccaccgtcggctgcaccctcgaacactacgagatttggcgcctcgtcactaacttcctctacttccgcaagatggatttggattttctattccacatgttctttcttgcacggtactgcaagcttctggaggaaaactcatttagaggaagaactgctgactttttttacatgctcttgtttggtgctactgtcctaactggcattgttctgatcggagggatgataccttacatttctgagacatttgccagaattctgttcttgagcaattcattgacatttatgatggtttatgtctggagcaagcacaacccttttatccatatgagctttctgggcctgtttacctttacggctgcgtacttaccatgggttcttttgggcttctctatcctcgttggaagcagcacatgggtggacctcttgggtatgattgctggacatgtgtactacttcctggaagatgtatacccacgtatgactgggcgtcgccccctaaagacaccgtccttcattaaggcgctatttgctgatgacaatgttgtggtggcacagccacccaatgctgggattggtgctggtgcaaggttcggtgctattggtgtagatccccaggctcaatgatgaattactttcagtgacctgagggccgaggctgtgactgatctgggatgcggcagtttgtattctctgcgcaaattgcggaactgtacaagccattgttcttgtgtatttatacaggctagatgagagttattgtgcataacaaaaagattagtagtatcggaggcggctaagtttgtcacctgttggcagggcccggaggaaaatggatcgtgatgggcaaacaggccaacccctgttgcagaaacttgttcatgtgacggtttaacatctgacctgctaccctttcatgcatcggtgaatttagtctaggaaactgtttgaagtggggaaatttggtgctttggcagc

SEQ ID NO: 77568 - DNA, 528 bp, Zea mays
  Clone ID: MRT4577_170768C.1
cctcgaggccggccggggaatacgccctagcgcattgtgccactcgatgtccagatcgagacgaccagagtccgccgcgcccgtgaaacaccgactgccgaactcccgatagacctctatttcttgatccacatcaacatgtcctgggaggacaatgcctacttgcacaagttggatgcccaagtagaacggcacgaggacaatggttgaccacatggagaacgtggctaagaccgtctatgtggaagagctcaccgttgacgagcacaacctcttatctgttgactaccacaacgtaattggggaccgccgtgcctcatggagcattatctcctccatctagcataaggaggactcccgtaacaatgaggaacctgttattcagatcaaggagtaccgtggcaagattggggctgaaatgagcaacatttgtgatggcatcctgaaggtgatcgactctcaccttgtgacttcctccactggtgcagaagcgaaggtggtttacctcctgatgaaaggagattatcc

SEQ ID NO: 77569 - DNA, 1603 bp, Zea mays
  Clone ID: MRT4577_170769C.1
gcacgagaccacgtcgccttcgacccttctccgtcctcccggaacgcccgtcccgtccgtcctccccccatccacatccatcccgtgtgcttctactgctcctcgatttgatcaccgattaggggaggcggtttaccagtgagcacgcgcgagagataggataggaggaaagggaagctagcggcttcgctctcgcggggagatggcgcaggcggtggaggagtggtaccggcagatgcccatcatcacgcgctcctacctcaccgccgctgtcgtcaccaccgtcggctgcaccctcgaaatcatttcgccgtatcacctgtaccttaacccgaagctcgtggtgcagcactacgagatttggcgcctcgtcaccaacttcctctacttccgcaagatggatttggattttctattccacatgttctttcttgcacgatactgcaagcttctggaggaaaactcatttagaggaagaactgctgactttttttacatgctcttgtttggtgctactgtcctaactggcattgttctgatcggagggatgataccttacatttctgagacatttgccagaattctgttcttgagcaattcattgacatttatgatggtttatgtctggagcaagcacaacccttttatccatatgagctttctgggcctgtttacctttacggctgcgtacttaccatgggttcttttgggcttctctatcctcgttggaagcagcacatgggtggacctcttgggtatgattgctggacatgtgtactacttcctggaagatgtatacccacgtatgactgggcgtcgccccctaaagacaccgtccttcattaaggcgctatttgctgatgacaatgttgtggtggcacagccacccaatgctgggattggtgctggtgcaaggttcggtgctattggtgtagatccccaggctcaatgatgaattactttcagtgacctgagggccgaggctgtgactgatctgggatgcggcagtttgtattctctgcgcaaattgcggaactgtacaagccattgttcttgtgtatttatacaggctagatgagagttattgtgcataacaaaaagattagtagtatcggaggcggctaagtttgtcacctgttggcagggcccggaggaaaatggatcgtgatgggcaaacaggccaacccctgttgcagaaacttgttcatgtgacggtttaacatctgacctgctaccctttcatgcatcggtgaatttagtctaggaaactgtttgaagcggggaaatttggtgctttggcagcgagaatttggatggagcgctgtaattgcagaatggtgcaaggaatgactcctaacattgtggacgcctggatggtgttcgttttccttcctgattctgctgtgttcaccgatccggatgatctggtctcctggaagcagtctttgtccatttttccttcatcagctgctctttaaccgtaaaatcggcgttcgtcatttcaagtgttgtgaccgtatcccttttctgttatataaataaaatgtttcagttagctgttttatttatataacagaaaagggatacgggttctagatcgcga

SEQ ID NO: 77570 - DNA, 1155 bp, Zea mays
  Clone ID: MRT4577_17076C.1
tcgtacggccgcccgggcaggtgcaaatccagaatgacgtagttctgacgttgggctcgcattgtcgcgtgttacaataatcataataactatgaggaataaatatgggaatgttgccagatagtactggcgtcggttcttaaaaaaaaaaaaaaaaaaaaaaaaaaaaaacaaataaaaaaaaaatgggccgtgggcgtggggccgcggcggcggcggcggcgctgtgcttcgcggccctggtggccgtggccgtctgccaaggcgaggtcgagcggcagaggctcagggacctgcagtgctggcaggaggtccaggagagcccgctcgacgcgtgccgccaggtcctcgaccggcagctaaccggcggcggcggcggcggcccgttccggtggggcaccgggctccggatgcggtgctgccagcagctccaggacgtgagccgcgagtgccgctgcgccgccatccggagcatggtcaggggctacgaggaggccatgccgccgctggagaaaggctggtggccatgggggcggcagcagcagccgccgccgcagggaggaggaggaggacaggggggctactactacccctgcagccgggcaggagagggataccaaacgcagatgtatccaccgtgtcgtcccggcaccaccggcggcgggccaaggatcggccgcgtgaggcttacgaaggcccgggagtacgccgcggggttgccgatgatgtgccggctgtcggagccccaggagtgcagcatcttctccggcggcgaccagtactagctaccatggttaaagcgagtcggcgcgaggtgcaagacgcagcatgtgtactgtgcgcgtgcaaatccagaatgacgtagctctgacgtgggctcgcaatattgtcgcgtgttcgttacaataatgataataactatgaggaataaatatgggaatgttgccagataaaaaaaaaaaaaaaagcttgtaaaaaaaaaaaaaaaaaaaaaaaaaaaaaaaaaaaaaaaaaaaaaaaaaaaaaaaagtggggataaaaaccttaagggggcatttaacaaaactccctcccgggggggccctttggccttatttttagggggcccaatttcccctttaggggggggtataaaaattagaggggggaggtttt

SEQ ID NO: 77571 - DNA, 1246 bp, Zea mays
  Clone ID: MRT4577_170770C.1
gtacactcgccttctacccttctccgtcctccccgaacactccacccaacggcccaacccaaccggggcattcaaccaccccgtgtgctccaaccgctcctcgatttgatcaccgattgcgggaggccgactagggtttaccggtgagcgcgcgcgcgagagagagagagtgagggcggaggaaaggggagatggcgcaggcggtggaggagtggtaccggcagatgcccatcatcacgcgctcctacctcaccgccgccgtcgtcaccaccgtcggctgcaccctcgagatcatttcgccgtatcacctgtacctgaacccgaagctcgtggtgcagcactacgagatctggcgcctcgtcaccaactttctctacttccgcaagatggatttggattttctgttccacatgttttttctcgcacgatactgcaagcttctggaggagaactcatttagaggaagaactgccgactttttttacatgctcttgtttggtgctactgtcctaactagcattgttctgatcggagggatgataccttacatttccgagacatttgccagaattctgttcctgagcaattcattgacgtttatgatggtttatgtctggagcaagcacaatcctttcatccatatgagctttctgggcctgttcacctttacggctgcatacttaccatgggtcctattgggcttctctatcctggtgggaagcagcacatgggttgatctcttgggtatgattgctggacatgtgtactactttctggaagatgtatacccacggatgactggccgccgtccgctgaagacaccgtccttcatcaaggcgctatttgctgatgcgtccacgcgtacgacaatgttgtggtggcacagccacccaatgctggaattggtgctggtgcaaggtcttaggggaaaatgaatagtgatgtgcatacatgccaacccctgttggagaaacttgttcatgtgacgcgagaatttggatggagcgctgatattgcacaatggatgacggaatgactgctaacattgggtacgcctggatggtgttcgttttccttactaattctgctgtgtttaccgaatctagatgatctgaggtcctggaagcagtctttggccatgtttccttcatcagctgctctttaaccgtagaatcggcgttcgtcatttcaagtgttgtgaccgtatcccttttgtggtatataaataaaaatgctcagttagctg

SEQ ID NO: 77572 - DNA, 684 bp, Zea mays
  unsure (1)..(684): unsure at all n locations
  Clone ID: MRT4577_170771C.1
ggtaccctcgggttcggccgggttgttgtttcctgttgtcgcatctcgattttatagatgaaaaggccattgaattatattacaaagataatcctaattaattggtttccaacagtctgttctatttgtaacaatggagatatgattgagttcttcaaacagcctgtataccatgtctgtttatgactgtgcagcttagattgcctcatgttgtaaattgttatagttttagttgctttgtgcatagattcacaaaccaatccagcttgatggtttgctctgatccttttttctcaaacaaattgttatgatcttcttatctggtctgatgctcatgcaaaaagaattgcttgatgtacttacagttgtgtatccactatggattggtaaaagagccatgattatttttagctgcaggaagacagaggaatgagccattgaattttcgtttttggaatcaaactgtatggttcacttttgttctcctttaagattattgtttatatcatattgtggtgagctgctgagtatttctgtcgtgcttgtgagaatcttggtgatatctcatgtgctgctgtactgngatcttttatgtatttatttattggatcttatcaggtcagggatgaaatagaacatcttctagatgataatgaagacatggaacatctgtatctaacaagg

SEQ ID NO: 77573 - DNA, 151 bp, Zea mays
  Clone ID: MRT4577_170772C.1
tgacactatattcctacgccaccagaactggggttgtcttgccacgcgctacctgaggatgatggtgttacgaagcgagcaccacgcatgagcgccccctgacttgtaccgcaactatgaaatcctagtccagagcgccggtgcccctgat

SEQ ID NO: 77574 - DNA, 591 bp, Zea mays
  Clone ID: MRT4577_170774C.1
atcaaccaaatagtacttatgctacatcgtagttcgtctagatgcctgctccgacgatcacccacacatccacaatctcgtcgaacgcgatggtgccctcggcgccactgatggctaggcccaacatacctattttctcggaaggctcatggcaccgaccaccgccgactgcgaagcatctctgctgctcaacgcaggggtccgtgcgtgcgatgcgaacgaggttgcagacgccaccaacacgtgcatgccgactgcctcacacttcgatcactgctgcgaaggagcatgcagcaacgaaacataaggaccgacatgccacatgatattcgaaatgtgcacaaagtgaagaagatagtagttgataatgtcaacattactgacagacagatacctcgtgctggaccccactcaatcgttgaacggggtgtcgttgatcatgatgattctcacgatcttggaaaaggcgaacatgagcttactaggaccagcggaaatggtggcgaacgtgtagcctgagatatcatagatctccgaggtataacgcgtttaacctcctcaggatactccatataacatacaagtgagcac

SEQ ID NO: 77575 - DNA, 460 bp, Zea mays
  Clone ID: MRT4577_170775C.1
ttttcggcacgaggggcgaagttactccacaaccctggggcgaggagatgtcctccaagcggggatcgataccctactgttgtcaataacgcagtgactgaggaccatgaggctgtaccaccggaccctgtggaaaatataggtgacattgcgccacgtcaacctgacgatctgacagacgcagtgcttgaagagggaacaaccactatagatgagattgcaccatgctgattactgagctgtgcaggcaccaaggtctggtgctaatacactggctaccaccacacctattgagaaaacacacagagcactggatgcactactccactagatgtccgagagagcgctgaggactattacactagcagatggcgtgtgaaatactgcgattaataactctctatccgagaacatgcaatccgaagctatgaataatgttgggctgcagtgaactgggcac

SEQ ID NO: 77576 - DNA, 499 bp, Zea mays
  Clone ID: MRT4577_170776C.1
tcttgctgtttatgatggggatgctgtgcccggcttggtttacacacgacggcacagggtcatacatcatggcgactgacaactgatgaagagtgacccccagcgacatgactgaatgaggcaagagggtcacgaaacattatatgtccaggcctttgtggtgaaaccatacgctgatgcgcgaatcaaagagggctatctcttattcacactgcgcagacatcacagactgatcaagagacacgggcactggggtgtagctgctaccctgagtataaaggggccagcttgaggcaacctaccatgacactgggctggagctggtggacactatgctgttgagcaaccgagctcactcataacgagggcttgatagtagatgcatactataagacgacaaaaaggttgatgcacaaggtgcgcaacatgctgatgaccgagatcaggtctaggtgtacatagggcatgaaaaaaatgccaatctgctccttctgctcga

SEQ ID NO: 77577 - DNA, 407 bp, Zea mays
  Clone ID: MRT4577_170777C.1
gtgcctgtactcagggcctatatttgccttataacggggctaatttatgtcattaggtcaaaggaagccctaccggcgtgtcacagcatgacagatgagggagtgaactgtatgttcatcgactttttacatgggcgataacactgggtggtgttacatggatacttcactggactgcattgtcccatatgatgtattttagattgtggttattagcatgaatttcacactagagttattccattgagaactgatacacacatcgttatagagagtgagtaaatcctgacatcatattggaggaagacagaatgaactgggtaccatggcgactcagaataaaatgtgctgtggtgcaccttatggatggattgggaaatccgtactgtgtaagggctcaaactgga

SEQ ID NO: 77578 - DNA, 370 bp, Zea mays
  unsure (1)..(370): unsure at all n locations
  Clone ID: MRT4577_170778C.1
gcgatttttctgctccggacgtcaaataggggcggggcgagtattattttttggaaaccaacnacgacgcggaaccaaacctcacactcgcggtgggtggagccgggaccaagaagaagaaccgcgaccacccatccagtggggagagtaaaaactcgacaaagacagagcccgaccagctcaccgtctacggacggaacaggcgccaggggcacggtacgccctatcacaagaggaagcccactaccgggctgaaacaggtgcacaaagaggacggcgtcggggtgcacccaacgccgccgctaatgtgacacagtctcagcctgaagatggcattactctatgagaagaagcaacagcacccattgca

SEQ ID NO: 77579 - DNA, 700 bp, Zea mays
  Clone ID: MRT4577_170779C.1
agaccatgaattatcgtcatcgctattcaattttttacttttcttttcacccgaataatcatatgagttggttccaagatcacaggaccaacgtgctctgtttggacaaattggtgaccatttctattcacgtttcatccatgacttgcacgtgcagagatcagggcctcccctcgatgatgtggagatgagaatccgacggcccctgcctgtgcctggaatttcctctgtccgtcccggcgtcctcgtcctcgtcctctgcttccaattccagagccaattcaatggcagcgaattcgttcccgtccgtctgagcccgacccgcctactcactcggggatcgcggtgaggtccgacgcgaagcgcacgaggcgcctgccggggcgcgcgggccgccgcaccggtggcgccgccaaggccgtcgtcttgtgctgctcgcgctcctcgtcctctggcggcggcgcgaagacgaggggcgcgacggcgccgcgtctccgccgtcccggcgcggcggaggcggatgcggatgcggaggcccgggaggagagcgcggccgaggcccggacggcgagcgcggcgacctcctcgcgccgcaggccgcggcggcgcgcggcggccgggagcacgaagtagagctgccccgcgcggagcggctccgcgtggggcaccgccggcggggccgggccctcgaagcccatcc

SEQ ID NO: 77580 - DNA, 782 bp, Zea mays
  Clone ID: MRT4577_17077C.1
taggggccttttttttttttttttcgttctgacgtttccatgcgtcctaattaatctcttcgacaccgtgcatttggagaagtttgggaagtccaaatgcaacaaaagacgaatgccaacagttttggactagtagctaggctgatgcgctggtatacaggttatatcgttgttgctgcaacaacggcacacatcatgcgtttggctagctcttacgatggtaattaaaaacaaagacaaaaaaaaaatcggatgcactgctggacgagctgccgccggccggactggagtaggaacgaagcacgcacgtccatgcatgggtgtgttcaggagctagggcactggtacacatgctggcaactacggctggtgtacggccggccgcgacctggacacgctccgaggcaggcagcgcggtcaggattgagcgaggacgaggagctgatgctgtcgaggatgcggcggcgcacctccaattccatcaccgacatcgtcgtcgtcgcttgagccatcatctgccgcgccgcgtgcgccgcgccggtagccctactactggctagcccaacctccatgatgccgccggcgatgttagggccggcgagtgcggcgagcgcgacaccgagcagcgccagctgaaagacgcagaccttgctgtccatggctgcccgcgcgcgtgtcgtcgtcgtccttggaaatgctatgtgcaatgcaagctggtggtggctgcaggtgctatgcccccccacacgtagatgagcgttgctatcccggacccggccggc

SEQ ID NO: 77581 - DNA, 351 bp, Zea mays
  Clone ID: MRT4577_170780C.1
gggggaaaaaaggggcctaagggggaagggcggaaaattccaagagctggggccgacaggcccaaaagggggtggccaaactggggaaaaagattcgctactttttttctatgggaacaaaacggatgagatgcaacattttaagaattgtagggaacaaaggggaaaattggcaacaagtggggacagaggggggcaaacaaaagtaaggggctgaaagggcctcccggggcggggacgctgcttaatgggccccctgggccccataattggatataatgggggacaagcttcctggggattcaagcctgcaaaaccagcgaatttatgctccaacagtataaatggcta

SEQ ID NO: 77582 - DNA, 386 bp, Zea mays
  unsure (1)..(386): unsure at all n locations
  Clone ID: MRT4577_170781C.1
aggttgggcactctccagtccgcgcaagggtgccggacggcgaggaaagggtgcgaggtgcgaggtgcgcgggaagacagcagcccggtcgattcggggcgcggacaccgataaggcgcgcgccacgccgcggccaccacacgtacgtaaggcgccaaccccatcgccgggaaagtatgggggcgctacccgtcgcccacaatctcgctctcaccgccgcgttcctcccgtgccgccgccccgcggcccacggccggtgccggcgccggcggtacagagcggtggtggcgtacatggagccgaaccccaactcgccgggngccatcgcggggngnctcgtcnnngnccttcccatcgngggcctcggggcgcgcttcctcnncgac

SEQ ID NO: 77583 - DNA, 230 bp, Zea mays
  Clone ID: MRT4577_170782C.1
tatgatctaaatgtttggggcaaaagctggattcatcatacctaaaaacaggctggccggttaattcgtaatccggggccccagggccaggaatgaaaccccaactgtttccaacgaaattggcagcaggcttgttaccagaaggccaaagggggggcctgaccttgctttggaccctttcgggggcaaaggaagggttttggcctaccagactcgggtggggcaaattt

SEQ ID NO: 77584 - DNA, 422 bp, Zea mays
  Clone ID: MRT4577_170783C.1
ctaatccctaatccaactggaatgcttctttacattcaaatcctgttctatatctatctttgagttatattgtgaccttaaggtaataatcctggaaatatataaacttcctttatattttatatatcttctctttttctcttcttcataatatttccaaaaccctaaagtgcaactttgggtttaattcaaatatccatctcattattgtatttcttctattattattatatcaccaagtgcacaaacaagcaaaactccatcatgatgcacaatttagtggcatgtccttgattaaccggttcttttaatgaggtgttcacatgtgacgataagtaatttcagcacacacataaaatattgggaatgactcttttcacttttattttattacaatttgggtattacaaatcctacccccc

SEQ ID NO: 77585 - DNA, 282 bp, Zea mays
  Clone ID: MRT4577_170784C.1
aaaccctctccaccgtccacctcagctcccatatccgctcccctacctctccagcatctcccgtctccgtcgtctcgtctctgctcctcacctcgccgccagccatgggtaactcctcgctcccggccagccccccgcgtcggggttttccatttactactactcgctgctccctcctgctccgtgctcagactcagatccgaccaaagctgtttcgctgactaaattctccttcgttttttctttttatggacggattcccggacgcaggcaagatcaaga

SEQ ID NO: 77586 - DNA, 510 bp, Zea mays
  unsure (1)..(510): unsure at all n locations
  Clone ID: MRT4577_170785C.1
aagcagtggtaacaacgcagagtacgcggggatctccccaatctctcggcccttttcctctttcgcgtgctcccgctgtgaaaaagatccaacatgttcggcttggaaaaatcaacacttccatgcttcttttctgctgattcctgaagggctctcacagggaattttcagagctgcagccaaggcataaactttatcactttctatcaacactacagcagtatctccacttccatttatctgatatatcgtggcgccgttttcaacattcccttaaaaatcaggtgagggatatactggatctggagtatgtgcatatatgctatattactgatgcacttgacatgtgagtgagaccttaaaaaattattttgtattttgtgatactggccatgtacttatgacttatgtatactatttgttcaaatgaaggggaacaacatcaatgtgcaaaacttatttaaaaaaaaaaaaaaaaaaannannnnnnnnnnnnnnnnnannangggg

SEQ ID NO: 77587 - DNA, 641 bp, Zea mays
  unsure (1)..(641): unsure at all n locations
  Clone ID: MRT4577_170786C.1
acttcancactatcctaccacggtctttcgtgttatacgataggattgtcttttgatggccatgaaaccccctcagctggcggccggggagcgctgctgggctcacgacgctaaggagggcctccgcgagaaactccgacgttcctacggggccgactccgccacaccggcgggcgatgaacctagtcgtgtcggcgactgtcgtgtctctcgcggcgatgaccccataaggatactcatgctcttggatccctgcggacacacttaaaacacacacctacatctgggcttgcaagagcatggacgaatctgcaaagaactgctcaaccatacttgataggtactgtagcttgtcttgtaaactatggagcatgctgcttgcaccactaatatgaatgcatggctgactaactaggtacatatatggtggtggatggggcagacagaaaatgacaaggcatgcatcccaccgacgtatctgatcttgcatggactacatgagatcttggaatactcttgcctgcaccatgatcgagtttgagatctgtacctattggagccatcaacttgctttccacatacactgtaataaggtcgacctgagtgtacttgtgttacgtcaccagatctttctgctctgt

SEQ ID NO: 77588 - DNA, 354 bp, Zea mays
  Clone ID: MRT4577_170787C.1
tttcgagtactctccgcaacaccgccgcagcgggaaaggttagaccgtcaaggaggaggacaggctccaaccaggacttgacatatacagggttggcctagcgcccgacggcatgatcactggcttgatggcctgcggtggtgacttggccgtcctgttcgctcgatggctgggccgggcctgcccaccaggccaagcgtagggtctctgggacgccagcctcggcgaggggaccgggagggacgaccgaatagaaggagctcctggttggatgacgggtctgcggcatcacgatgccttggctggcgtggactctgggcggacaccacctactgtaactgggctcgggtggac

SEQ ID NO: 77589 - DNA, 298 bp, Zea mays
  Clone ID: MRT4577_170788C.1
tgtgtttactttccggacaacaaccttgcatgtgctcaagcactttggtgtggctctcaatggtttctatctaaatattgacagccgtggatctactcctcttggtggaggtgaggtgtctctccggattcgcaatataaatagcacattgacacgcagcaaattttgtatataaacgtatagccaacaggatatggggtgtttcatattccactctagaatttacacacattttaaacaccatcatttatcctgcacccggaaacattaaacccggcatttcctatgctcatataca

SEQ ID NO: 77590 - DNA, 211 bp, Zea mays
  Clone ID: MRT4577_170789C.1
acgcgcatgtaccatcctctcgctcgccaggagaatcagccgcctctgcttcttccgcgggcagagaatgttttttttcgtgaagactcataataccaatgcgtatttcaaacgttttcaagttaaattcaagaaaaagcgggctggcaagacagactacagggccaggatattgctgattaaccaagacaaaaacaagttcaacacaccc

SEQ ID NO: 77591 - DNA, 211 bp, Zea mays
  Clone ID: MRT4577_17078C.1
tctgtatacataaaaaaaaaaatcttagttgttaatttacacatacggactgctcataatactcacatatacaatatcttcaaagaaagcaaacttacagaatttaatcctaattcactgattgagaactattggcccatgatgttttctaattttattcatacactatctcatttaataacactactaaatacctctaaatacacttatt

SEQ ID NO: 77592 - DNA, 2469 bp, Zea mays
  Clone ID: MRT4577_170790C.1
atttcggcacgaggccccatcccgctccttccctaccaccctaattcgcgctctgaggattaggtggaactggaactggatgcccgcgcagctccagtccggtgggtcatgggtttcggcgcgaggttggctcgggttcgttctcgtagaaagacacagattggtggcgagtggatctggtacgggatgggatggggagttattgtctagcgctagcttcacccaaaatgctgcggacagttggagctcgtgaatctcgcggggtctgtactcgtgtggctggcgtgccactgtagttagaacatgatgtttagacttagagatgcagcgaaggcgaaggatgttgtgtcccattactgggtcaaaatgtgctcctgtatggcttcgacattcggtgccacttctactgtcggccttatggctgctccaacagggaagaatgtgcgccttcagaggagggtgaacttcagagtaagagcagctaaggagctgtacttcaacaaggatggctcagctatcaagaagctccagactggagtcaataagcttgcagacctagtcggagttacactcggaccaaagggaaggaatgttgttttggagagcaagtatggttctcctaaaattgttaacgatggtgttacagttgccagagaggttgagctggaggaccctgtggagaacattggtgctaaattggtcaggcaagcagcagctaagaccaatgatctagctggagatgggacaaccacctctgtggtccttgctcaggggctgatcgctgagggtgttaaggttgtggcagctggtgctaatcctgttcagattactcgtggtatcgagaaaacagcgaaagcactagttgaagaactacggaagttgtctaaggaggtcgaagatagtgagcttgcagatgttgctgctgttagtgcgggcaacaactacgaaattggtaatatgatagcagaggccatgagcaaggtcggtcggaagggtgtggttaccctcgaagaagggaggagttctgaaaactttctctatgttgtggaggggatgcaatttgatcgtggttatatctctccgtactttgtaacagacagtgagaaaatgtctgccgagtatgagaactgcaagctactttggttgacaaaaagatcaccaacgcaagggatcttatcaatgttttggaagaagccatcagaggtggatacccaatcctgataattgctgaggatattgagcaggaggctcttgctacccttgttgtcaacaagctcagaggatcattgaagattgctgccatcaaagcccctggttttggagagcgcaagactcagtacttggatgatattgccatccttactggaggtcagttaaacttccgttctagagcatccttatgatcatgtatgctccttgtttataagcattctttgtttctgcagcaactgtaatcagagatgaagttgggctgtcacttgacaaggctgacaaatcagtccttggaacagcagcaaaggttgtccttactaaagagtcgacaacaattgttggtgatggcagcacccaggacgaagttactaagagggttgcacagattaaaaatctcattgaggcagcagaacaagaatatgaaaaggaaaagctcaatgagaggatagcaaagcttgctggtggtgttgctgtcattcaggtgggagcacaaacagaaactgaactaaaagagaagaagttaagagttgaggatgccctaaatgcaaccaaggctgctgttgaggaaggtattgttgttggtggaggatgcacccttttgcggcttgcagctaaagtcgatgccatcaaggatacactggagaacgatgagcagaaggttggagctgaaatagtaaggagggccctgagctacccacttaaattgattgctaaaaatgccggtgtcaatggcagcgtcgtcactgagaaggtcctttctaacgataacttcaagtatggttacaatgctgctactggacagtacgaggacttgatggctgctggtatcattgatcctacgaaggtggtgagatgctgtttggagcatgccgcgtcggtggccaagaccttcctgacatctgatgttgtggtcgtcgatattaaggagccagagtctgcgccccttgctaacccgatggacaactctggctatggatactaatggagatgagatggccaagccgcatgggaagaagggtgatcaccattttttttttggtaggcgagaagagtcgggtcgaggtagtttttcatcatcagataaaaaaagcgagtttgttgtacgaccattaggcgaaaaataagtgggaggggctgtgtagcccaaatttgtgatgtaaactggagacagacagcagctaaaaacaagcagaaattgctgagtgattttgtaaaaaaaaaaaaaaaacccacgcgtccgctagttctagatcgcga

SEQ ID NO: 77593 - DNA, 2361 bp, Zea mays
  unsure (1)..(2361): unsure at all n locations
  Clone ID: MRT4577_170791C.1
gggtacctcgaggccggccgggacgacccctcagccctcacacaagagacgcagctgcgagtccgccagccttatcctcctccccatctccggcttccaacccgcaagcgcggtaaggtagacatggcttcgacattcggtgccacttctactgtcggccttatggctgctccaacagggaagaatgtgcgccttcagaggagggtgaacttcagagtaagagcagctaaggagctgtacttcaacaaggatggctcagctatcaagaagctccagactggagtcaataagcttgcagacctagtcggagttacactcggaccaaagggaaggaatgttgttttggagagcaagtatggttctcctaaaattgttaacgatggtgttacagttgccagagaggttgagctggaggaccctgtggagaacattggtgctaaattggtcaggcaagcagcagctaagaccaatgatctagctggagatgggacaaccacctctgtggttcttgctcaggggctgatcgctgagggtgttaaggttgtggcagctggtgctaatcctgttcagattactcgtggtatcgagaaaacagcgaaagcactagttgaagaactacggaagttgtctaaggaggtcgaagatagtgagcttgcagatgttgctgctgttagtgcgggcaacaactacgaaattggtaatatgatagcagaggccatgagcaaggttggtcggaagggtgtggttaccctcgaagaagggaggagttctgaaaactttctctatgttgtggaggggatgcaatttgatcgtggttatatctctccgtactttgtaacagacagtgagaaaatgtctgccgagtatgagaactgcaagctacttttggttgacaaaaagatcaccaacgcaagggatcttatcaatgttttggaagaagccatcagaggtggatacccaatcctgataattgctgaggatattgagcaggaggctcttgctacccttgttgtcaacaagctcagaggatcattgaagattgctgccatcaaagcccctggttttggagagcgcaagactcagtacttggatgatattgccatccttactggagcaactgtaatcagagatgaagttgggctgtcacttgacaaggctgacaaatcagtccttggaacagcagcaaaggttgtccttactaaagagtcgacaacaattgttggtgatggcagcacccaggacgaagttactaagagggttgcacagattaaaaatctcattgaggcagcagaacaagaatatgaaaaggaaaagctcaatgagaggatagcaaagcttgctggtggtgttgctgtcattcaggtgggagcacaaacagaaactgaactaaaagagaagaagttaagagttgaggatgccctaaatgcaaccaaggctgctgttgaggaaggtattgttgttggtggaggatgcacccttttgcggcttgcagctaaagtcgatgccatcaaggatacactggagaacgatgagcagaaggttggagctgaaatagtaaggagggccctgagctacccacttaaattgattgctaaaaatgccggtgtcaatggcagcgtcgtcactgagaaggtcctttctaacgataacttcaagtatggttacaatgctgctactggacagtacgaggacttgatggctgctggtatcattgatcccaccaaggtggtgagatgctgcttggagcacgccgcgtcggtggccaagaccttcctgacatcagatgttgtggtcgtcgatattaaggagccagaggccgcgccccttgctaacccgatggacaactctggctatggatactaatggagatgagatggccaagccgcatgggaagaagggtgatcaccatattatttttttggtaggcgagaagagtcgggtcgaggtagtttttcatcatcagataaaaaaagcgagtttgttgtacgaccactaggcgaaaaataagtgggaggggctgtgtagcccaaatttgtgatgtaaactggagacagacagcagctaaaaacaagcagaaattgctgagtgattttgtaactgatttgcagctatgctgaatgcagtttgcacgcgactaaacaggaatctaaaaaaaaaaaaaaaaaaaaaaaaaaaaaaaaaaaaaaaaaaaaaaaaaaaaaaaaaaaaaaaaaaaaaaaaaaaaaaaaaanaaaaaaaaaaaaaaaaaaaaaaaaaaaaaaaaaaaaaaaaaaaaaaaaaataaaaattttaaaggggggggcctttttaaagatccaaattttccttccccttgcttgcaaatttttattttttttttgg

SEQ ID NO: 77594 - DNA, 404 bp, Zea mays
  Clone ID: MRT4577_170792C.1
tcccctcctgccaaggaacaagcggtacacccttgctgggctggacgagggacccgagcacactcaacgggaaccacggcgggcgagcacggccgcagcggctacggcaggcccgacgccagcgaccactacgacagaggaggcaaccacacgaccggcactgaagactacggccgcggcgaaggaggctacaacaagcactgcgaggaagactactactgccgcagcggcggccatgggaacagcaggcccggcggcgaccacgacaggcgcggacactgccgagggggctacaacaagcccgggggcagcgacgactacggccgaggcacccccagcgccggttgcaacaagcacggaaacgacggcaacgacagcgggtacaacagatagggcaccaccaa

SEQ ID NO: 77595 - DNA, 179 bp, Zea mays
  Clone ID: MRT4577_170793C.1
agcccctgaatgccccaaaccgggcaacttgctttacttataaaatcatggcttgcaccctaccgtttggaggactataattgccagggttaagctcatgcctttaaagcacacaacctggtcaccggaccaaccgcaaccagatcaaaggggcaaggacatgcttgacccacaacaac

SEQ ID NO: 77596 - DNA, 171 bp, Zea mays
  Clone ID: MRT4577_170794C.1
atggagaagtttcttctccatggggatataaatggaaaaaacatccctctccacaacgggcatttttttgtcgctgggatggggatggggagctatgccccgaggggctcgcaggtcatgagtgggaggcaggccggcgcctctgctgcggctcggtgcttggcgcagtaa

SEQ ID NO: 77597 - DNA, 232 bp, Zea mays
  unsure (1)..(232): unsure at all n locations
  Clone ID: MRT4577_170795C.1
ggggatgaggatccaggaggggcantccacctcnaagaagcagcgcatcgccacccacacccactnaagggacttnggctcnacntanctgcccnctcctgcgctcctcctcnccctgtgggtttgtcggggggtttancttctntgtgtttcggtactanttcctcactgtgttccctccttcnttttcttattatgggagcggggcangcgcaatggatggcgattgcgt

SEQ ID NO: 77598 - DNA, 309 bp, Zea mays
  unsure (1)..(309): unsure at all n locations
  Clone ID: MRT4577_170796C.1
gttttaaatttgataaatctagtctatattgatatgaatattcatgttttaaaatcatatttgtaagattaaagatattctagatcttttaagcttttaaaataagataatgtctagaaaagcaagggcactactaggttctagagccctatagtgttggcaaggcatgccgactctaataaatggttatgccattttcggccaactanaagtctagtcatataatagatctctcatgatacaatctatatatttaatacttggttcgctttctttctctcacaacttatagttggtatatgtcactct

SEQ ID NO: 77599 - DNA, 366 bp, Zea mays
  Clone ID: MRT4577_170797C.1
cccacccgtccgaacaggattccaaagccttttttgttttggagaaatctgatgtggctctagaaggaaaagtagtggggcatttttggttagttcccaatgcaaaccaagctttcttttgggttaccctcaggagggtttttcttggaagggttggaacccctgccaggctggctgttagaggtttttttttggtccttaaaaagggccagggctttggattgctgggcccaattggagccgggaaaccatcttccattattttgtggatgggcctcattaaacctacttttggtcctgcttttgtccccggatgggttttaattttggccttgggcgccttttttccaattttgggggggggcc

SEQ ID NO: 77600 - DNA, 838 bp, Zea mays
  unsure (1)..(838): unsure at all n locations
  Clone ID: MRT4577_170798C.1
cattgggtacctcgaggccggccgggattccaagctgtcgccactggattcttcgagagatagctcactgcgctgcggcgataccgaacgtggaaaccctatcggccgctgctccttcaaggcgtcagcgtcatcttcgtcgaactgccagcaaccgtgcgttctacggttcttcggcgccgtccacggccccatcccccatgcaccctatcgccggctgcttcttcaacgcatcgtcatcgccgtcggctgcttcttccacgcgtcatcgtcgtctccgtcgaactacccatgatcgtgcactccttgcttcttcagtgccgtccatagtcctccgcaacctatcggtgcctgcttcttcaacacgtcgtcatccccgtccaactgtcggcagcggcgagctctacacaaagcttcggtggaatttctgtgcgacacagattagccagaatagctcctggtctcaaaccgacgaggagctagactatctacagtgcatgcttcttccattcgtcctcctgtagaggcttgtcgcttcgtgccctccatggagcacagcatctttgcggaggtcactctctctctccaaggtgctatcgacgccaccatggctggnggtggaggatgaagacaagtttaaggacgctccagcagtcgccgatcgccatcgcaacgatgcggcggtttgtgtgggcggcgccgcgccacgacacccaatcagcattcgcagcccaccacctgcggcgccggcggagggggcgccaccctcgagcgcactgcaagtggccgttgttgacctcgtctgagagcaaagaagaggaagtgtcgatgctgacct

SEQ ID NO: 77601 - DNA, 219 bp, Zea mays
  Clone ID: MRT4577_170799C.1
attcggctcgagccaaggccaaggaaagttttgtcttcgcctgctgctgtgcctctgtacgggaggacgaagtgaaacgcgcgggccttgctatagggcaggattatgatttgccgcgcctacacgtcaaaagtaccaccggtacgttacaggcggacttgggttaaacataatgtctggatcgtgggctaggtgggagattcgcgccatgtcactaca

SEQ ID NO: 77602 - DNA, 520 bp, Zea mays
  unsure (1)..(520): unsure at all n locations
  Clone ID: MRT4577_17079C.1
aacgtcgagacaattccattcaacaaagcgagcgattggagcactgttttaacgtacgtgttatacaaccagctccatgagttgagactggccagctggggcgaaattgtgaaccaacaaacaaaaatgcagagcctctattgctcttgatggtaaataaaaatgactgggaactgcatcccgaaatggaacatcccgaaaattaaacatgaccttacattgagttgagtttgctgctctcttctacgattatatatagagaaaaaactcacggtatcctcagctcagattgtcttcctgaggaagtaattctttttcatcagtcaaaaatttgcatggtattatttncagataagcacaaaaacagtttggcaggggagcgcttgtgcgtgaatttatatgttaagcagnaaccttctggggtncttgaccacattcttgatgcgccgnaggaagaagacagnctttttgccgtnaatnagcctgtggtcgtatgttagggcgaggtacatcattggcc

SEQ ID NO: 77603 - DNA, 1908 bp, Zea mays
  Clone ID: MRT4577_1707C.1
ccggccgggatagcgatcgtcctacttatcactaccccatcccccgtcccgcgcgccctccctggcttctaatcaagtgcatcatccgctgatagctcgctttgtcgtgcgaagcgattggctacatttccgccacagtccggcgcacttcgacggcaattcggccgtcgagcacggttgcgccgccacgggcctacgacgtgctcctccccgacgcaacgaccggagtaccggaccggacctgcccaacccacggacgacgcggcaagtgaaatccgcgagcgaccctgtgacagaccgggagggtgactccgtgaccgtgagtgcctacccgccgaccgcacgaaccccactcggtcactcccagtctccatctcccactacggcactaccccatccccggtgcggcgccaccttcccggcttccccttccggcctcccccctctcgtcacttatggtgcccagccgctcgctgcgcaactactagcgcaccgtcccctcctcagccatggccgcggcgtcgttcgcccgcgccttatgtctccacatgctcctcctcttcctcgtggttggctcggcgcgctgcaagacggtgaagagagacgtgaaagcattgaatgagatcaaatcttcactaggctggagagttgtatactcatgggtcggtgatgatccttgtgggcatggtgatctacccccctggtctggtgtgacatgttctcagcaaggggattacagagttgtgacggaactggaagtctatgctgtatcaatagttggccctttcccaacagcagtaactaacctgttggatctaagaagattggatctccacaataacaagttgacaggaccaattcccccacagattggacggttgaaacatctcaggatattgaacctgaggtggaataagcttcaagatgtgcttccacctgaaattggtgaactgaagaaactgacacacttgtatttgagcttcaacaacttcaaaggcgagattccagtggagcttgcaaacctgccagaactccgttacctttatcttcacgagaaccgcttcaccgggcgaatcccccctgaacttggaacgctaaagaacctacgtcacctcgacgtgggcaacaaccacctgacaggcactctcagggattttatcggcaacgggaacggcttcccgtccctgagaaatctataccttaacaacaatgagctgactggtgtgctgccagaccagattgcaaacctgacaaaccttgagattctgcacttgtccaataacaagatgatcgggtcgatatcgcctaagctagttcacattccaaggctgatctacttgtacttggacaataacaacttcattgggaggataccggaagggttgtacaggcatccatttctgaaggagctgtacatcgaaggaaaccacttcagaccaggaaccagatcgaagggaacgcacaaggtgctggaactgcctgacgccgacattctagtctagcaagctcgtttgggggacctgaggtcttggcgtcctgcagtagtagactgctgccgctggtaccaggatcacttctgtctgtcgctgtactattccgtggcaaaactacagttgagaaaaaaaaattctcttggaaaaaaaagaggcaaaaaaaaagtgaatagtagaggccacggtcacactgccgtcatcgttagatgagccatgagtgtacaggttgtattgttctgccctgcatcttcgctgtatgatggagatgccggtcagatgtaaagccagcacatcgcatggcaccgacagtcctggtacaactagtggccaatgatatatggcctctttcggaagcaaatttggtgccaccaaaaaaaaaaaaaaatgcttaagagcgtgggcatgtgggggagga

SEQ ID NO: 77604 - DNA, 852 bp, Zea mays
  Clone ID: MRT4577_170800C.1
ctttgtccaaaaccatgaaacgctttgatttatgttgatataatgttcacaaaaaaaatttagttactatccagtttggtacaagttaattcaactgtgctcatgtaccgtttgtaccactcgcgagtttctagtaaagattaaggcccttttcgtttgttctggaacattccagctagaatggtatgtttatttatattaacatagattagccagaatagctcctggtctcaaaccgacgaggagctagactatctacagtgcatgcttcttccattcgtcctcctgtagaggcttgtcgcttcgtgccctccatggagcacactactttgcggaggtcactctctctttccaaggcaagcggcacgctattttcctttgtcacgctccctgtgaagtcgtttgtgcccacgtcccttagcctggcaggtgctatcgacgcccccatggctggggtggaggatgaaaacaagttcaaggacgctccagcagtcgccgatcgccatcgcaacaattcggcggttgtgtgggcggcgccgcgccccgacacccaatcagcatttgcagcccccccccttcggcgccggcggagggggcgccaccctcgagcgccactgcaagtggccgttgttgacctcgtctttaaagccaaaaaaaaggaagttgtcgatgctgacctcgtctcgaaagccaaaaaaaaaggaagttgggggactttgggtcggcctcgggtatgtggagtgggaacaaaaggttttttttgttgacgatgatgcaatcggggtttaaaaatcgattaaattttgctcccgccaatattatttagtaacaaggtcaaaataattccccttt

SEQ ID NO: 77605 - DNA, 680 bp, Zea mays
  Clone ID: MRT4577_170801C.1
acgctcagagtcacagttcactgcgcgcgtcttgcaggtgcaggcaccacaccatggcacctgccgcccctgctgccacgggcgcggcgagccccgctgtcaccaagggcggcggcaaggttgcagcacgctccgtcaggctgggcctccccgcgctgccgccgctgcccggcctcagcctcgccgcgcagggccagacccgggccgcgtcgtccttgtacaagcggctggcgagggacgtggtggccatggccgcgggggagccggcggcgcctcaggctgccaacgaggagctgaccgagttcgtcgacgcgttgaaaaaggagtggttcgcgtaccgaaacctgctattcaagcctgacagggatgctttctttgcgaaggtcagggagatctacgaggatattatcagcgcttaacagatgggagcaccaatgcaaagctcatccaaattaatgaagtccactttaagacatccttctagtttgctgctgttcagttgtttttgctgtgatgtatttcagtgtagcatatggataagtaatttggatgttaaatttagttttctggcccaacagattcggttcacgaaaaaaaaaaaaagtagccactacaacttgcccagaaatcatgttgggctttgcaactaaaaaaaaaaaaaaaggcccctagggccctta

SEQ ID NO: 77606 - DNA, 682 bp, Zea mays
  Clone ID: MRT4577_170802C.1
attgggaccctcgaggccggccgggtaaagacggcgactctgcctgcgcagcattgaccgccgccttcgctcctccacctccccgctcgctctcctgcctccgcgcgggccgcggatcccttcactcgccacagcaagcgctagaagggggaatggagcccggcctcgcatcccgcgtcgcccgttcagccgctcagccgctttccggctgcctgtcgcggcactcgctctcgccgtggctcaaggttccttgctccccctgttcatcatgacgttcctttttggttgcgtgagtttggtttgggcctcggagtgtagtggataaggaatgggggtaggtagcgaggctagtgagggcatctgcacctgctaaaatagattcgaataattggagatcatggggcttcaagccgtgcgtaaaggtaaaggtgtcgagagagagatcgagtttcggtgtgtagcttcagaacaggaaggctttggacctttggtcttttttagaattttattaattgttgttcacatattgctcttgtcacccttgaaacggattaggggctgaatgaacacggtccacgatggcactttggatactccttttgtttttaatactaatagaataggaaaaaagagagggtgaataaccccatcattcctctcactccctgggctggccacctga

SEQ ID NO: 77607 - DNA, 324 bp, Zea mays
  Clone ID: MRT4577_170803C.1
cccaagaaaaggggaagaaaaggaattattaaaaatatcgggaagagggcccggccccaaaggtacccaatctggaaatacaataatgaaggggccgtttaaccgatggggtaaaaaactataaaggggccccctggaaacgtacccttttggaaaaaaattttaaaaaaaatctccctattaatccccccccccacattttttatttttttaccagcgggaaagaaaacaactgaaaaaactgggggttgggacaaagcctttataggcaccaaggcacaaagctttaaaggttgggggtttcgggggtcaacattcctgggt

SEQ ID NO: 77608 - DNA, 967 bp, Zea mays
  Clone ID: MRT4577_170804C.1
atcttatcatcttcccccggggaacgtgtggcgcccgtgccccacttcatccgcgcgcgcgtcagagactcagagcccaagcatagacgtgcgccttcagcagcgcgcggcgacgtcacccgagcgcgcgacacgccccagcgtccacagttcactgcgcgcgcgtcgtgcagacaccacaccatggcacctgccgcccctgctgccacgggcgcggcgagccccgccgtcaccaagggcggcggcaaggttgcagcacgctccgtcaggctgggcctccccgcgctgccgccgctgcccggcctcagcctcgccgcgcagggccagacccgggccgcgtcgtccttgtgcaagcggctggcgagggacgtggtggccatggccgcgggggagccggcggcgcctcaggctgccaacgaggagctgaccgagttcgtcgacgcgttgaaaaaggagtgggacaggatcgaggacaagtacgcggtgaccacgctcgccgtcgccgccacgcttggcatgtggagcgccggtggagtagtgtcggcaatcgataggctccccgtggttcctggtctgatgcaggccgttggaattggatacagcgggtggttcgcgtaccgaaacctgctattcaagcctgacagggatgctttctttgcgaaggtcagggagatctacgaggatattatcagcgcttaacagatgggagcaccaatgcaaagctcatccaaattaatgaagtccactttaagacatccttctagtttgctgctgttcagttgtttttgctgtgatgtatttcagtgtagcatatggataagtaatttggatgttaaatttagttttctggcccaacagattcggttcacgaaaaaaaaaaaaaaaaaaagcggcaacttgtccagtaatcatgttggtttttgtactcaaaacagtgtagttgcaaaaaccctgacgcgccggtagg

SEQ ID NO: 77609 - DNA, 808 bp, Zea mays
  unsure (1)..(808): unsure at all n locations
  Clone ID: MRT4577_170805C.1
tcgcgatctataacctgaaccatctgcagagcttgcagagggggtccaggaggataagaagaagaaaatgagcattggaaggacaatgatgaggcggaaaatgagcctgctgtttctgatgacgaggagggcacggccgaagctgatggcgcagcagaagccgaagaggatgaggaggaggcagggcagtccgaaccttctgaagataatgatgaggtagacgatgacgcggacctgcccgatcctactgctgtcgagcagctgctaaccaaagctgtcgaggagatcaaagcggaggaggagaggagtgcggcggacacagttggggagaacgtctccagcaaagagccagacgaggggaaacccattgcgccttcgagaccgagagacgaggacggcggggaaccggatgggaaagaacccatggatttggaggaggaggccggcagaaccaccgaggagaagtcaccggatgatcacccaggcatcccagctgagaagaagagcggcagtgatgacaaggattccgcnctacctgtaagcgcgtcgtcgtcttcttgagcccagagaataattaaggagaacacgaacaccgatggaaaggcaggctgctgccggtggccgctccagtagtagtagcctctagtgcatctttgttttttttttgaacatgtatgggcgtaccgcgtcgttgtcatgtccaacacgcccctgggttcttaacatcggtccggactggccatgtgggtttgaagtaattgggaagaggtaggttgtggttgaaaaaaaaaaaaaaaaaagcgggcct

SEQ ID NO: 77610 - DNA, 190 bp, Zea mays
  Clone ID: MRT4577_170806C.1
cggaccacacccttccgatcacactactttactaaaagcctaatgtccttttttttggtttggttaaccaaacaaaccgaagcaaatggcgtcgacgatcagggccgccacctcccgaatggtgggggccaaaaccccgtttttgggccagggtggggccgccaccgcctctgccaaggcaagccccttc

SEQ ID NO: 77611 - DNA, 112 bp, Zea mays
  Clone ID: MRT4577_170807C.1
cccacgcgtccgcggaccgtgggcgaccgtggcgctctctctcagtctctctctctcactccccgcatcctccttttcttgcccgcgccggagagaccgatcgagaggccga

SEQ ID NO: 77612 - DNA, 458 bp, Zea mays
  unsure (1)..(458): unsure at all n locations
  Clone ID: MRT4577_170808C.1
ggtggggaaaaacaccagattcagctgtttcgattaagcaacgggctttttgaaacctccaagggtcaaaaaaaaaaaagagggtctacacatggggtccacccccccaccgggcttttttcacaaccaagccgggacagcggtgggatgaacacacctgggaacaactccaattttatttggttttggttcacacaacggcgcagcaccctgcagggaggccgtttttattcaactcggccgcgtccgtgaccggggtcgaccctgcggagggtcctctcangcggaggagggcggcggtgggtttgggatggcggnnacggtcttctgggccgcggggcgcttggcgttctcctcccccccgccttaacttgggggcggtcgttgnccggcccggccttgggggtcttggtgtggttgggcggttggccccgtggttggggggggcgggcgtgaac

SEQ ID NO: 77613 - DNA, 405 bp, Zea mays
  Clone ID: MRT4577_170809C.1
gggtttttccgtttatgactgaccggcccagctagacttcgcataatttgactatggtgcgactcttgtttaattcggcatcacaatggtgatagttggctcctgcgcaaacatgatatccaggaagggctccaggctgattcgagaacgacggatgcggcgctaaatgtgccttggctaaaaagtcggggctaacactatggggtggctactgaaccgtttcagtttaactgctggctggttttggaacagcacgcgcccacctgaggtgacactgatgaccacattgtggtattaataacgattgacacggctaagcagatctgcttatactggcctccctgatagttggtgccgatcctttctaacttttttgtccgatctggctttcttaatgctttaagg

SEQ ID NO: 77614 - DNA, 2644 bp, Zea mays
  Clone ID: MRT4577_17080C.1
taattgatttaacttttcatatatatcatttttccccattttatattggtagggatttgtcttacaaccgctttactggaccaatcccattcaacattggtttcctacaagtggctacactatccttgcaagggaacaagttcactggcccaattccttcagtaattggccttatgcaggctctcgctgtcctagatctgagttacaaccaattatctggtcctataccatctatactaggcaacttgacatacactgagaagctgtacatgcaaggcaacaggttaactggatcgataccaccagagctaggaaatatgtcaacacttcattacctagaactgaatgataatcaacttactgggtcaattccaccagagcttggaaggctaacaggcttgtttgacctgaaccttgcgaataaccaccttgaaggaccaattcctgacaacctaagttcatgtgtgaatctcaatagcttcaatgcttatggcaacaagttaaatggaaccattcctcgttcgctgcggaaacttgaaagcatgacctatttaaatctttcatcaaatttcataagtggctctattcctattgagctatcaaggatcaacaatttggacacgttggacttatcctgtaacatgatgacgggtccaattccatcatccattggcaacctagagcatctattgaggcttaacttgagcaagaatgatctagttggattcatccctgcggagtttggtaatttgagaagtgtcatggagattgatttatcctataatcatcttggtggtctgattcctcaagaacttggaatgctgcaaaacctgatgttgctaaaactggaaaacaacaatataactggcgatgtctcttctctgatgaactgcttcagcctcaatatcttaaatgtgtcatacaataatttggctggtgctgtccctactgacaacaacttcacacggttttcacatgacagctttttaggtaatcctggactctgtggatattggcttggttcttcatgtcgttccactggccaccgagacaaaccgccaatctcaaaggctgccataattggtgttgctgtgggtggacttgttatcctcctgatgatcttagtagctgtatgcaggccacaccatccacctgcttttaaagatgccactgtaagcaagccagtgagcaatggtccacccaagctggtgatccttcatatgaacatggctcttcatgtctttgatgatataatgaggatgactgagaacttgagtgagaaatacatcattggatacggggcatcaagtacagtttataaatgtgttctaaagaattgcaaaccagtggcaataaaaaagctgtatgcccactaccctcagagccttaaggaatttgaaactgagctcgagactgttggtagcatcaaacaccggaatctagtcagccttcaagggtactcgttgtcacctgttgggaacctcctcttttatgattatatggagagtggcagcttatgggatgttttacatgaaggctcatccaagaagaacaaacttgactgggtgactcgcctacggatcgctcttggtgcagctcaaggcctcgcttaccttcaccatgactgcagcccacgaataattcaccgggacgtaaaatcaaagaatatactcctcgacaaagattatgaggcccatcttacagacttcggcatcgctaagagcttatgtgtctcgaagactcacacgtcaacctacgtcatgggcactattggttacattgatcccgagtacgcccgcacctcccgcctcaacgagaagtctgatgtctacagctacggcatcgttctgctggagctgctgaccggcaagaagccagtggacaacgagtgcaatctccatcacttgatcctatcgaagacggcgagcaacgaggtcatggagacggtggaccccgacgtgggagacacctgcaaggacctgggcgaggtgaagaagctgttccagctggcgctcctctgcaccaagcggcagccctcggaccggccgacgatgcacgaggtggtgcgcgtccttgactgcctggtgaacccggagccgccgccgcagccgcagcagcagcagcagaaggcgcacgcgcaccaccagctgccgccgcagccgtcgccgccggcctacgtcgacgagtacgtcagcctgcggggcaccggcgccctctcctgcgccaactcgtccagcacctcggacgccgagctgttcctcaagttcggcgaggccatctcgcagaacatggtgtaggggaagacgtagacgttcggtgaggcgccttgagtgaggccgattgcagggagtagtttgactgacattttgtgggacgcagcgcaggagattaacatgggactcagtagctagggtgttgttagctgtaaaaaaagtcatgtgacgcaagcaagagcagcggagcttcttcctcttctttatcccccctccccatttttctttggtggtctaacttactaggaggctgtattgatccatcatcatctctcccgttcctcttcttgatgatcttgtgactttcgcggtcctctgtattgatccgtgaacttttgtgaaaaaaaaaaaaaaaaaaggcccctagggcc

SEQ ID NO: 77615 - DNA, 318 bp, Zea mays
  Clone ID: MRT4577_170810C.1
ctgtattggacccgttcaggccgagccaactgccggtggcattgccaaggtgcatagtatgtgccagttcgtctaatttcctgtctgtccgctgggctgtcgtgtatatatgatcccctttctgtccaccaattcctacacagggaaaatcgagttctttgacaagacgttttgtttatcctttgacagggaaaccgagttctcgacacgatgtccgccgggtggactgacgagagacacatgctgtatataagctgcatggaggcttgtttcgtcgaccagctatacaaccatggtaaccatgcgcacgacgcaaat

SEQ ID NO: 77616 - DNA, 545 bp, Zea mays
  unsure (1)..(545): unsure at all n locations
  Clone ID: MRT4577_170811C.1
tcgttcttacctaaccaccactgctagacacctgaactatatatgcaagaccggacaccgacggagccacgcgcaggagagatagtggccaaccaccgttacaccagagagaacatacggtacgccccgaggatcgccagctctagctgatagggcgcgcccggcagacactccacgcacactggtgcacagaggtcctgcgatcccttgagtttgctggcaagctgaccgagcttgtcgtcctgggcagactgacgctcacagtcgagctcgtggggctggacctgctaaggccgctcgagctactgaccgtcccactctgggcgcgcgaagggggactggcgctggtgacaggggccgactagtcgtccctgctgcaccggcctgaccgctaccggcgcccacaccgggacgcacaggaactcgaccgggctctactgcatcagcgcgcacagcgcgcagcgcagcgatcagctcgccagcacgagcaccgccgncaacgtgaccagaagagcgaggaagcactacaactcctacgcgccaga

SEQ ID NO: 77617 - DNA, 311 bp, Zea mays
  unsure (1)..(311): unsure at all n locations
  Clone ID: MRT4577_170812C.1
aagtgtcgtccgaagagaaaaggaaagaaaaaaaaaaraaacaaaacacaaacacaacraagacagaggaggaaaaagggacgatwcaccagaagacaacttccaaaggcctagggaatgggaatgacactcctggaaaattaatgacgccgaggwangaagaggaganccanttgaattccctcttcctgaaggagtgatcgaagggggagaaaagagartcggaaaaatcgggagaatsaaggaggaggaggggagagagagagtaactsaagcagaatggaggcagagctccggaccaaaaagaacct

SEQ ID NO: 77618 - DNA, 371 bp, Zea mays
  unsure (1)..(371): unsure at all n locations
  Clone ID: MRT4577_170813C.1
gggcgctgacctctaaggcctcctccacttcccgttgcaattaacttaancggtggttatataaccgtttagacggacactttccctgtgcgggaggggtctatacacagcgcccatgttccctttccccaacacacccacaccatttacatttccctccccccccccccctaaagcgacagttttatctttttgtggcccatccaaaccagacacactttcccgccgtcccgtttcctctccagccccgtaaacattttttttctaaacccggcacatccaagtttgacttatattcccaaccctatgccctcccatatgctctccacctttcccgccattccctccgcgcgtggaaacacccacacggc

SEQ ID NO: 77619 - DNA, 180 bp, Zea mays
  Clone ID: MRT4577_170814C.1
tgcgcgcacagaacgtcaacccgtacgcagacgcagacgctgacaccgcccacgccaacgctaacgccaacgccaacgccagcgccagccttccggagccgccactcctctacgacgtcggaaacccgtccgcgttgcactccagcataccgtcactgtcacaaacagcctcgcactctc

SEQ ID NO: 77620 - DNA, 335 bp, Zea mays
  Clone ID: MRT4577_170815C.1
acccttccatgtggtcatccgccgacaaccctcaccgcgcttccgctgccaatcctcgccgctcttccgctgccaaccgttgcgccggcccgactctgtcctgaagccgtggcgtacgggggattcacttccattcgacgcaatctggcctcgtcgtccatctcgcgggcgcttgttcgtgcgcgtggattgttttatcagggtctcgtacccgtgccctaagtgggagcgtccgctaagtttcctcctaaagggcgcaatcactatggctcgcaactgccttacagcgtgcagcaaccgtactgccaaatccctagtagcactggatttgcagc

SEQ ID NO: 77621 - DNA, 223 bp, Zea mays
  Clone ID: MRT4577_170816C.1
ggtataggttcatggatcgttcagccgcaccggtaatgatttgcctcaaacccccaaggttgaacccctagagaagaacatctagggcaatggacgtgccaacaaatcctccatccccccctctcgggggagttaggtcacctccggtgggcgaggcaagattaaacgctacaatccagctaaaagacagcccggttcatgcatccaacggggagagaaaaga

SEQ ID NO: 77622 - DNA, 350 bp, Zea mays
  unsure (1)..(350): unsure at all n locations
  Clone ID: MRT4577_170817C.1
ctcnctcggacgcgggggcaaacaacaggaggggggactgaaaaaacagacccgcccggcccccgaacgacacgcagagagcggaagacaggacaacgagccgacgaacgagcccgacatgcaaacgacgacgaagccacgcaccacgacagggacaaggggcagcacaaggagaagaaaccggagagaccggacgacgaagaaccagaccacaaccacaaagacgacgaggaggaaacacagaaccaggaggcgcgccacagcacgcagagcaaccccaaggaacgccctaagacgacggaggaggagaggaagcaagaaggcgaaggccaagccgagaggagggagga

SEQ ID NO: 77623 - DNA, 2013 bp, Zea mays
  Clone ID: MRT4577_170818C.1
cccgcaccctccgcgtcggggacccgatccggacaccgctccaggctccacctctctcccatctcacgccaacgctcactggaccattcctccgtgcttgggagcggcggagagctatccacctcgtctcaggcaccctctggcgtccccctccccccgccgcgtgccggcgagctgcggagatccgggattttgacctcgcctccttctgctgacttgtgaacgaggcagcatcatagttcagtttggaaacatgtcatcgaagaagatagagttggatcacaaggacatggtccatgattctgccatcgactactatggcaagcgccttgccactgcctcttcagacttcaccgtgaagatcgttaacattggtgcggcaaatgccccatcccaggtcctggcaacgcttagtggccactatggtcctgtgtggcgtgttgcttgggcccatccaccgctccaggctccacctctctcccatctcacgccaacgctcactggaccattcctccgtgcttgggagcggcggagagctatccacctcgtctcaggcaccctctggcgtccccctccccccgtcgcgtgccggcgagctgcggagatccgggattttgacctcgcctccttctgctgacaatatggattttgtaggaaagagcaaggtgatgttggagccttcggcactgggtctgccctcctgtgttgccctgcatattatttgctggttttcagagttgatgctaaacatgcttatttaactaaactagaaatttgttaccgagacttgtgaacgaggcagcatcatagttcagtttggaaacatgtcatcgaagaagatagagttggatcacaaggacatggtccatgattctgccatcgactactatggcaagcgccttgccactgcctcttcagacttcaccgtgaagatcgtcaacattggtgctgcaaatgccccatcccaggtccttgcaacgctaagtggccactatggtcctgtgtggcgtgttgcttgggcccatccaaagtatggtgcaatccttgcatcgtgcagttatgatggccgtgtcattatttggaaggaggatgcacgaggcaattggtctcaagtccacgtcttcagtgacaacaagtcatctgtcaactccattgcttgggctccgtatgaggttggcctctgccttgcctgtgcatcttctggtggaagaatatccatcttgacgatgcaagctgacgggggttgggatactgcaaccattgagcgagcacatcctgtcggtgcgactgccatatcctgggcccctgcaacagcgtcactagctggtgcaggggagcttgtttacaagcttgtctcaggagggtttgactctgttgttaaggtctggggattcaacaatggtagttggaagctggagagtgctcttatctctgacatgcacacagattgtgtgagggatgtcgcctgggcaccagttttgggattgtccaagtcgaccattgccagtggttcacaagacgggaaggttgtcatctggaccaagggaaaggatggagacaagtgggagggaaagctcatgcgtgacttcggttcccctgtctggagggtgtcgtggtccttgactggcaacatattatgcatagctgctggcgagaacaacataaccctctggaaggaagggtcagatgggcagtgggaggaggcgatgaaggttgaaccataggatgaccggcaaggtttctgaatttcttgtagatccatgtttcgacaaagacaaagcttgctactgttttactagtgtttcgacaaagtttaagtttgccattgtgttttactagtgtttcctgcggatccatgtttcgataaagacaaagcttgacattgtgtttccatagacactcaaattcacatattttagtaattcctgatgagcaattatgctcttggatggatctggtgcgctttagactgacaaattttttattcaggaaacactagtaatgttccctatt

SEQ ID NO: 77624 - DNA, 605 bp, Zea mays
  Clone ID: MRT4577_170819C.1
cgggattctccctcatacagagacacaaaccctacgagtaaccagaaaacgagagaatacatcgctacaagcaattaagcatattgaccagcaatgccacggggcaaacgagaggccctcatgagggaacagtacctacgcaacgctccagctccaagcatccgcttacctctatgcacaattctgtgagatgacgcaaaccgctcgctctccgagaggcactagagcaccctataccagaagatatccaccaccatcgaggcgcaggtcccacacaacaccagatactccgccagagtgcactccaacaaagccaccttcaaggcattcgccaactacatgcgccaagctcaacgtgctcgcccatcgtcattcttcctctacatgccaccacttaagggaatgaggatgaggccacccatcacgacaacaacaacgaagctaccgtcgcctacgaagggacggaaagctcccagcttctgcacagacgacgacaaaagccttacaatcaagactccctttatgacaatggtgatgcagacaatggctagctgaccgcacacaacgatgtatctcactaagaaatccaagacgaatgaccagaa

SEQ ID NO: 77625 - DNA, 251 bp, Zea mays
  Clone ID: MRT4577_17081C.1
catgatgattattgtgaccccacaagcacccccctcaccttacaattatcaacggctttgtataataatagcagcagcattaggagtactattaatgctaaagctaaagttcatgagtgttccatatgtggggcagaattttcatctgggcaagcgttggggggacacatgagaaagcatagaaattttctgagtgcacctattattgggcaattaatattgcaatggtggtgatggaagcctaaagtccg

SEQ ID NO: 77626 - DNA, 214 bp, Zea mays
  Clone ID: MRT4577_170820C.1
ctgggggcccacgctggaggacgctctcggtgacttcggcttccggattggcctgatatgaggacgcataattgcacatctttgatgagcatttatgcgtccttatatctggccaatgctgaatccgaatgccccgaggacggccttcctcggggactttcgattcacgttggcctaattagggacgcaaaattgccattttttatgagcaatt

SEQ ID NO: 77627 - DNA, 1630 bp, Zea mays
  Clone ID: MRT4577_170821C.1
gacgcgtgctggggagcggcggagagctatccacctcgtctcaggcaccctctggcgtccccctccccccgccgcgtgccggcgagccgcggagatccggggttctgacctcgcctccttctgctgagttgatgctaaacatgcttatttaactaaactagaaatttgttaccgagacttgtgaacgaggcagcatcatagttcagtttggaaacatgtcatcgaagaagatagagttggatcacaaggacatggtccatgattctgccatcgactactatggcaagcgccttgccactgcctcttcagacttcaccgtgaagatcgtcaacattggtgctgcaaatgccccatcccaggtccttgcaacgctaagtggccactatggtcctgtgtggcgtgttgcttgggcccatccaaagtatggtgcaatccttgcatcgtgcagttatgatggccgtgtcattatttggaaggaggatgcacgaggcaattggtctcaagtccacgtcttcagtgacaacaagtcatctgtcaactccattgcttgggctccgtatgaggttggcctctgccttgcctgtgcatcttctggtggaagaatatccatcttgacgatgcaagctgacgggggttgggatactgcaaccattgagcgagcacatcctgtcggtgcgactgccatatcctgggcccctgcaacagcgtcactagctggtgcaggggagcttgtttacaagcttgtctcaggagggtttgactctgttgttaaggtctggggattcaacaatggtagttggaagctggagagtgctcttatctctgacatgcacacagattgtgtgagggatgtcgcctgggcaccagttttgggattgtccaagtcgaccattgccagtggttcacaagacgggaaggttgtcatctggaccaagggaaaggatggagacaagtgggagggaaagctcatgcgtgacttcggttcccctgtctggagggtgtcgtggtccttgactggcaacatattatgcatagctgctggcgagaacaacataaccctctggaaggaagggtcagatgggcagtgggaggaggcgatgaaggttgaaccataggatgaccggcaaggtttctgaatttcttgtagatccatgtttcgacaaggacaaagcttgctactgttttactagtgtttcgacaaagtttaagtttgccattgtgttttactagtgtttcctgcggatccatgtttcgataaagacaaagcttgacattgtgtttccatagacactcaaattcacatattttagtaattcctgatgagcaattatgatcttggatggatctggtgcgctttagactggcaattttttattcaggaaacactagtaatgttatctattaaacattgtagcaatttttatttttaattgtgctccaatttctattggtctttgtactgcggctcccccaccactgctatggtgcgcgccatcgtttgagttttattgatttgttgtgcaagcataacatagcaagattctataattcgttccgcgtgtcattccggtgatagatttatgacatttgaggaagggatatgtttgtaataaaaaaccacacccacaac

SEQ ID NO: 77628 - DNA, 824 bp, Zea mays
  Clone ID: MRT4577_170822C.1
gccggccgggcctgggacacccgatccggacaccgctccaggctccacctctctcccatctcacgccaacgctcactggaccattcctccgtgcttgggagcggcggagagctatccacctcgtctcaggcaccctctggcgtccccctccccccgccgcgtgctggcgagctgcggagatccgggattttgacctcgcctccttctgctgtatctgctggttttcagagttgatgctaaacatgcttatttaactaaactagaaatttgttaccgagacttgtgaacgaggcagcatcatagttcagtttggaaacatgtcatcgaagaagatagagttggatcacaaggacatggtccatgattctgccatcgactactatggcaagcgccttgccactgcctcttcagacttcaccgtgaagatcgtcaacattggtgctgcaaatgccccatcccaggtccttgcaacgcttagtggccactatggtcctgtgtggcgtgttgcttgggcccatccaaagtatggtgcaatccttgcatcgtgcagttatgatggccgtgtcattatttggaaggaggatgcacgaggcaattggtctcaagtccacgtcttcagtgacaacaagtcatctgtcaactccattgcttgggctccgtatgaggttggcctctgccttgcctgtgcatcttctggtggaagaatatccatcttgacgatgcaagctgatggggggttggggatactgcaaccattgagcgagcacatcctgtcggtgcaactgccatatcctgggcccctgaacagcgtcactagctggtgc

SEQ ID NO: 77629 - DNA, 418 bp, Zea mays
  Clone ID: MRT4577_170823C.1
gttttgtttttttttttttttttttttttttttttttttttttttttttttttttttttttttttttttttttttttaaaaaaggcgacctggtgggtttacccattttgggggaattgttggcagattttggcagcattcccccccggggggggggtgtttttttttacaggcccccttttttcataagtttccttaggggctcctacagggggtcggcccccccaggggcccaacttttacacggggttttggtacaataatacggggcccggggtacaaaaaaaggcccaacccccgggggtccttgttttttacagggcgggggggcttttgcatttgaagctgcccatgcctgcttatggatttggtggggttatatagggggggttatttaacttgaccgtacgtgcgggcc

SEQ ID NO: 77630 - DNA, 3055 bp, Zea mays
  Clone ID: MRT4577_170824C.1
gctcttcccgtcttgtggggccgggaccatggtttcgcggacccgaccgatcgagacctcgctcatctttgtagcacacccgcaccctccgcgtcgaacacccgatccggacaccgctccaggctccacctctctcccatctcacgccaacgctcactggaccattcctccgtgctggggagcggcggagagctatccacctcgtctcaggcaccctctggcgtccccctccccccgccgcgtgccggcgagccgcggagatccggggttctgacctcgcctccttctgctgacttgtgaacgaggcagcatcatagttcagtttggaaacatgtcatcgaagaagatagagttggatcacaaggacatggtccatgattctgccatcgactactatggcaagcgccttgccactgcctcttcagacttcaccgtgaagatcgtcaacattggtgctgcaaatgccccatcccaggtccttgcaacgctaagtggccactatggtcctgtgtggcgtgttgcttgggcccatccaaagtatggtgcaatccttgcatcgtgcagttatgatggccgtgtcattatttggaaggaggatgcacgaggcaattggtctcaagtccacgtcttcagtgacaacaagtcatctgtcaactccattgcttgggctccgtatgaggttggcctctgccttgcctgtgcatcttctggtggaagaatatccatcttgacgatgcaagctgacgggggttgggatactgcaaccattgagcgagcacatcctgtcggtgcgactgccatatcctgggcccctgcaacagcgtcactagctggtgcaggggagcttgtttacaagcttgtctcaccaagggtttgactgtgttgttaaggtctggggatacaacaatggttagttggaagctgaagaatgctctcatctctgagaggcacaccatttgtgtcagggatgcccgcgtgggcagcagttttgggattgtgcaagtcgaccattgccagttgttcacaagacgggaaggttgtcctctggagcaagggaaagcatgtagacaggtgggagggaaagctcatgtgtaactttggttcccctgtctggagggtgtcatggtccttgactggcaacatattatgcatagctgctggcgagaacatacataacccttctggaaggaagggtcagatgggcagtgggaggaggcgatgaaggttgaaccataggatgaccggcaaggtttctgaatttcttgtagatccatgtttcgacaaagacaaagcttgctactgttttactagtgtttcgacaaagtttaagtttgccattgtgttttactagtgtttcctgcggatccatgtttcgataaagacaaagcttgacattgtgtttccatagacactcaaattcacatattttagtaattcctgatgagcaattatgctcttggatgggtcggatgcggttcgggaccgaattattccaccgagccgaccgatcgagacctcgctcatctttgtaggacacccgcaccctccgcgtcgaacacccgatccggacaccgctccaggctccacctctctcccatctcacgagtcacgccaacgctcactggaccattcctccgtgctggggagcggcggagagctatccacctcgtctcaggcaccctctggcgtccccctccccccgccgcgtgccggcgagccgcggagatccggggttctgacctcgcctccttctgctgacttgtgaacgaggcagcatcatagttcagtttggaaacatgtcatcgaagaagatagagttggatcacaaggacatggtccatgattctgccatcgactactatggcaagcgccttgccactgcctcttcagacttcaccgtgaagatcgtcaacattggtgctgcaaatgccccatcccaggtccttgcaacgcttagtggccactatggtcctgtgtggcgtgttgcttgggcccatccaaagtatggtgcaatccttgcatcgtgcagttatgatggccgtgtcattatttggaaggaggatgcacgaggcaattggtctcaagtccacgtcttcagtgacaacaagtcatctgtcaactccattgcttgggctccgtatgaggttggcctctgccttgcctgtgcatcttctggtggaagaatatccatcttgacgatgcaagctgatgggggttgggatactgcaaccattgagcgagcacatcctgtcggtgcgactgccatatcctgggcccctgcaacagcgtcactagctggtgcaggggagcttgtttacaagcttgtctcaggagggtttgactctgttgttaaggtctggggattcaacaatggtagttggaagctggagagtgctcttatctctgacatgcacacagattgtgtgagggatgtcgcctgggcaccagttttgggattgtccaagtcgaccattgccagtggttcacaagacgggaaggttgtcatctggaccaagggaaaggatggagacaagtgggagggaaagctcatgcgtgacttcggttcccctgtctggagggtgtcgtggtccttgactggcaacatattatgcatagctgctggcgagaacaacataaccctctggaaggaagggtcagatgggcagtgggaggaggcgatgaaggttgaaccataggatgaccggcaaggtttctgaatttcttgtagatccatgtttcgacaaagacaaagcttgctactgttttactagtgtttcgacaaagtttaagtttgccattgtgttttactagtgtttcctgcggatccatgtttcgataaagacaaagcttgacattgtgtttccaaaaaaaaaaaaaaaaagcggccttagtaattcctgatgagcaattatgatcttggatggatctggtgcgctttagactgacaaattttttattcaggaaacactagtaatgttacctattaaacattgtagcaatttttatttttaattgtgctgtcttggatcttggtccaccaaaaaaaaaaaaaaaa

SEQ ID NO: 77631 - DNA, 294 bp, Zea mays
  Clone ID: MRT4577_170825C.1
catcttttcttttctattaggcatatattctgtcttgactgttttttttttaattctcacgaaagactgtttttattgtgggttgaaaaacaaaacggggtgagttatcaccaccttatttttgataaactaatacctagtgtataaggagaaatagggtgactctaccaaccaagcacactatatgtttggaaattcgccctaaagacgagaaactttattgcccaaaatactcattatgcgaggagaacattatcggaaacctactttgggaaatactggggtgcaaattct

SEQ ID NO: 77632 - DNA, 1392 bp, Zea mays
  Clone ID: MRT4577_170826C.1
ccttccttcggccccctacgctctcactgatctgttccaagtggtctgtgatgtgattgaagcacctgccacgcataagcgctcgcgtccacggaatgtgcacatccaccgggataggatgaagccgccggtgagcagggccgccttcgcgtccgtgctgatagggccgcgcacgctcggggcctctctggtggccgcccgctgcgcctcctcctctgccgccgctgccgtcactgcctatgatcatgcatcgtttgtcaaggaaatcgccgcaaccgatcctccagagcatctcaactctctcctcaatgtgcttcaagcacgaggtgaaaagattgtttctcctggagcaaaaagagggttgattccatgtgttgttcccttatcagaaagtccagcaggtgatttgacatctctccttagatggccaaccgctccaactgggatggaaatgcctgttgtggaagttcgtaaacatgggctgtggtttttggctaagaatgtgaaacagtatatccacagaatacttgttgaggctgacttaactggtgatgatttatgggctgctgtgggcgaagctggtaaaaacctttacgctaaaggagaattcaaagagtcgcaggtggcagaccttgatgtctatttgttgaagaaggttggacttttccctgatgttatagagaggaaaacattgcgccatctcgaaaaaggagataatgtctcagctctcatcactggagaattctataccagagataaatttccaggatttggaagaccctttgtgttcaatgcagagatttttaaaagagttggacgtacatctgaagccaaagattcagctcgagtggctctgaaatcaccatggtggacacttggctgcagttacgaagaggctgctgaactagctgggtgggaggatgagcagctagagtttataagagagaaggtaactgaggagggtaagcgcgaggacctgaagagaggaaaggctccagaacaggtgattcttgacgaggcggcattcttaatggatttagcgtccgtggatggtaactgggacgaggttgtggatcggattgctgaatgttacagagaggctgggcttcatgacattgcgaatttcattgcctacagggaatagatgttagattccctatggtctagaatgttattcaagaaattttgattcatttgtgctctgctaatatatattcttatatacgggaagaacgcacaaccgttatatcgcagcagaccttttttgttttgttttggcatcagctagtgaccatagtttctttcctgtatagctctgaatgtacttgttttttccatttaattttccatgcttattcgtggttagtaagtgtcaaaaaaaaaaaaaaaaaa

SEQ ID NO: 77633 - DNA, 572 bp, Zea mays
  Clone ID: MRT4577_170827C.1
ctgccgcctcctcccctgtagcaccgccgccgccgccggactcggaggcgaaggctgcgtttcagagagagaagctgtcgggctgagctgccgcggccgcccactgtcccgttccagccgcgtgtcgctaacgccgtgcacctcgtcggcaccatctgcgcgcccgtgcacatgcagaggctgcccgacggcagattctccgcggtctccgtgctcgtgcacgaccgtggcatcaactcacccaagttctgggttcccatagttttcaaagataactgggcacaaatagctgcttcccacttgaaagaaaatgatcttgtttatgtgtctgggaaattaacatgtgatggtccaccattcaagcttgctgatggcgaagcaaacattcaggtgttagcaaattcgctaaaatttgtcgatagtaaagctgttgaaatggatgccatactggatgaagatgaaggatttttggagattgttgaggctgaaaagaaagttgaagcaaaaaaaaacgacctctacatttccgcctggcacagtttcaggttataaaaacagggcggataagttaa

SEQ ID NO: 77634 - DNA, 1970 bp, Zea mays
  Clone ID: MRT4577_170828C.1
gcctttagttattcccttcccctcggggggctcgcgtgttaatccacggattaaactcgcacctgccctcctcgtccttgacacactgaacgagtgcccgcctgcccggagcagaaccattctcgccctctccctctgcctctgcctccgcctccgcggacgaaccgccggctgggtccaagtttagcgcgtcggaccctcgctccccaatctcagagcaatggaggtggaggcggcggggccggataagctggcgcctccctcgccggtggagggccccggcgagaatggcgcggccaccaaggtgcagaaggtgtaccgcagctaccggacccgccggaagctcgccgactccgccgtcgtcgtcgaggagctctggtggcaggcgctggactacgcgcgcctggagcacagcaccgtctccttcttcgacgagcccaagccggagaccgccgcctcgcgctggaaccgcgtcagcctcaacgcatccaaggtgggccagggtttatccagagacggcaaggccctcaagctggctttccagcactggatcgaagccatcgacccgcggcataggtatgggcacaacctgcacttctactacgatgaatggtgcaaaagccaagcaggccagccattcttctactggcttgatatcggcgagggaaaggatctggaccttcctgaatgtccaagagctttgctgaagcagcaatgcattaggtatcttggtccgcaagagcgtgagcactacgaatacatcattagcgagggaaaggttatccacaaacagtctggggaaccacttgatacaaggcgtcctaaggggactaaatggatatttgttatgagtacagcaaaaaagctttatgctggcaagaaacagagaggcgtgttccagcactccagctttctggcaggaggtgcaactatagctgctgggagattcactgcagaaagtggagtgatcaagtccatctgggcgtacagcggccactacaaacctagcgcagagaacctccacaacttcatgaacttcctcgaagagaacggagtggacctcaaagaagtcgaggtacgctcatctaccaaagaagactacaacgaggacccagtgccagtgccggtacttaacgacacacggagttccacttcagctaccatggaagagggcagaccttccacaggtggcggttcccgtccccgctctaaacagcacagagggcgacgaaggagacagccctccggaagacgaaggacgaggcaggccgagctaccagaggaccttgtcaggcgggctgcagagccccagagccacccaagtgccccagagggcgatcctcgagaggatgaagtccaagggcgagttgtccaagtcgtaccagctcgggcacaggctgtccctcaaatggagcaccggggctggcccgaggatcgggtgcgtcaaggactacccgatggagctccggatgcaggcgctggagatggtggacctttcgcccagagggttgtcgtcgactccgtcgccgtcgaggagactgcctcctccgtgcttttcccccactaaagtcgcctcgccgacgtctccgctcgcgccagttcaggcgtccctgccgcagccaagctaggagctcgagagtagcagcattatgcatggccacgcgcaaatagcacaagaccggttccattcgagagtagcagcacaactcaatgttgtccaagtgaaacagggtgtgggcagaatctgtcacgtttcagacaccggtagctttgaagcagatgtgctagtgtagtgttttttttttactaccatggttgaggaacctgctttgtactgtatcatctgcaaacggaataatgggcaaagcattacatgtgtgtgaaaaaaaaaaaaaaaaacttggtagtcatgtgtgagagagagagagagaaaacaaagcccttgtataccggtcgtgatttgtcaaaaa

SEQ ID NO: 77635 - DNA, 656 bp, Zea mays
  unsure (1)..(656): unsure at all n locations
  Clone ID: MRT4577_170829C.1
ccggccgggaattttcattcgaattcgttttcgtttttcgttcttttttgtttttccccattctcacacgaacaagacgaacacgttcgtccccatcgccgtgttcttcgcgccgccgctgcccaccgatcgaatccgcccgccgcctcccagtaacctccggatccctactcctccaagcttctgtacatctcatcctattcgatttgtctctcgattgccatcatcagtcgcaacccagatatgagtttcactaccaaattctagggtttggggcatatggcctcgtgggtttgggagtgtgatcgacgggcagtgtaataatgttccgtaagagtttctccaatggtcaagacacaaaagctgcaccagctggatgggccaatgggacatcaaagatatcatcaaaagaacagcaaccatataatgttattgctattggaagtcaggacagaacaattactgtttggacaacagcgagtgcacggccattgttcgttgctaagcattttttctctcaaagcgtggttgatttatcttggagccctgatggttattcactttttgcatgctccttggatggatctgntgccaacttccactttgaagcaaaggagcttggatacaagntaagtgattctgatctggatgaattg

SEQ ID NO: 77636 - DNA, 546 bp, Zea mays
  Clone ID: MRT4577_17082C.1
gtctgccaaactactccccctgcaatcggcctcactcaaggcgcctcaccgaacgtctacgtcttcccctacaccatgttctgcgagatggcctcgccgaacttgaggaacagctcggcgtccgaggtgctggacgagttggcgcaggagagggcgccggtgccccgcaggctgacgtactcgtcgacgtaggccggcggcgacggctgcggcggcagctggtggtgcgcgtgcgccttctgctgctgctgctgcggctgcggcggcggctccgggttcaccaggcagtcaaggacgcgcaccacctcgtgcatcgtcggccggtccgagggctgccgcttggtgcagaggagcgccagctggaacagcttcttcacctcgcccaggtccttgcaggtgtctcccacgtcggggtccaccgtctccatgacctcgttgctcgccgtcttcgataggatctgcggttccaaagcacgttcatagatgatcagagcttgactcggtatctgcctgccgatcagtactgaagtttttcctgcgtttcag

SEQ ID NO: 77637 - DNA, 274 bp, Zea mays
  Clone ID: MRT4577_170830C.1
cctacagtgagcaggagatcattataactctcaacagacggagcacagcgcagctacttgccacattcagtagctacaaggatcagttcactcatgcaatcaacaacgatctgcaagctgaccccacagaggagtttcgctcatcactgcgggcaatcatcccgtgcttcacctgcccagacagatacttcgataaagtcagtcaacaggctcttggaggcatgggcactgaatacgatgacgtcaccatggtcgtaactacgcacaccgacgt

SEQ ID NO: 77638 - DNA, 135 bp, Zea mays
  Clone ID: MRT4577_170831C.1
ctgggtgacaagtggctatacgcggcgtgagttcagcatcgatttaggtcaaacatcagctactgctttgcgaccctgataagtacgtgtacgaaccacgtgccgtagtcatggtcattcgcggccatagctttt

SEQ ID NO: 77639 - DNA, 228 bp, Zea mays
  Clone ID: MRT4577_170832C.1
aatggaacctgagtaactagactctattacatcaggccaagtgaacggtccacgtcataggctcaaatacttatacgtgatccaaaaaaacatactctggaggacagcatgctctatccaaacattcaatcggcgactggaccatataacctgaggtaagatcgtcctgctcagccgtctccaaacttgtcggctgcgctgataaaacatctacaatacctgtaacat

SEQ ID NO: 77640 - DNA, 591 bp, Zea mays
  Clone ID: MRT4577_170833C.1
gcagcccagacccagtacgtgtgcccggagagatagctggagctgcaaaggagtgaagagtaccactaaaataaagtaaagaggaagaggaagctcgaacgagcagaggagagctgagccgtctccacgactccacatcaatatagtttccctatatatacaattcaggattctgtgtctgagcaatataaggaggcactgttatatataagtatactcccatcttttgtcctgcgccaactctcgtgaaggcttgtgtgcagctacaagagtagttgacactgataaatactgctacttaataacattgtcactggcctgtggatgctgatcaagatcaagtgtacatccagttctagcccaaaatatgagtggggccttgatagagggttactaataaatgggtctttgtaattacagtaaatgagttagaaggtccactaaaccaaaaaaaaaaagtgggagcccgtaccccgctcaccctaacgttggtctgtccctgtgtacatctcagagtcaccagcttaaaaaactcttgattacccttcttgattcttgtcaccagtaactgaatttggagaaaaattatac

SEQ ID NO: 77641 - DNA, 1252 bp, Zea mays
  Clone ID: MRT4577_170834C.1
cactcctatgggcaattgggttcctcgaggccggccgggacactttccaaaccctacgcaccaccattatattgatcgatctatgctgctgctggtcgcaaccgcaccgcagcttcacgggccgccctctcccaaaaatcgagcaccagagtgtttcaattccttctccatatattattggtgttagtttcctgctttccctagtccctcgcaatcaacagatacctcatggacgatcaggagaacgagaatgagcacgagaagcatgctgatgctgggactgacgtcgaggaagaagaggaggacgaagatggccacaagcgtgtcgtcgttcttgggccccaagtccccctcaaggaacagctcgagcttgacaaggatgatgagagcctgaggaggtggaaggagcaactcctcgggcaagtcgacaccgagcagctcggagagactgcggagccggaggtgaaggtgctcaacctgaccatcctgtcaccggggcggccagatctagtgctaccgatcccgttcgaggccgacgacaagggctatgcatttacgctcaaggatggcagcctctatagcttccgtttctccttcactgtctccaacaacatcgtttcaggcctcaagtacaccaacacggtctggaagactggagtcaaagtggagaaccagaaaatgatgctagggacattcagtccccagcaagagccgtacgtttacgagggtgaagaagagaccacacctgctggcatcttcgcaagaggttcctattctgctaagctaaagttttttgatgatgatggcaagtgttatttggagacgagttactactttgagattagaaaagagtggccagggccagcaacctaatgatatatggagcggcggtgttggattcgttaaacacatacatgttagaactcttagttaagacaagcagaagatctattatattctactgcttctagctagaggatgattgcttcacatgcatatcgtcatgtttaaccaccgtacgtataatttgtttggagtccattattctacgctatttgggtattattattgttaattcacattatagaatcagtcgtgtatggagattcaaagatatatttatatacttatgaccttcttactacaaaaaaaaaaaaaaaaaatttgccccgacaagtaagccggtaaccccggaatttattcccggcccgttacctgcaggggaaccaggttccccaataggaaggcgtat

SEQ ID NO: 77642 - DNA, 574 bp, Zea mays
  Clone ID: MRT4577_170835C.1
gcagaccgttccccacgcacgcacgctcgctcgctcgccgctcgccaacgtcgaggatgcccgcttggcaagggatctatgccccatattccccttgcgtgcaagctcccatccccgtgcccycgccacgagcacccgaggaaaggcttgcccactcgcggataggcagttgacccagggtggcagawagcttkttccggggacgcgaascagctggggagaggaaaaccgggtgggattaaaaggggagggagggagatagacacacgaaagcaacagcaagtagagagagaagggaaaagggtkaagccagggagttgttggttctkgttctggtcggcgtcggaggggaaggggacaacgagcggcgaggtgggcaagcyaaggaaggagggatatggtggcaatctgagtyttcmgatcgcagcggcggaggggatcggcgggagchgggaggcggcactcggatggtatttggtttcgccggcgccggaggcggattcgttgattggcagchgcggggtykcggggcgttggttgtaggagcygtggcgttgggaagcaaattcggagc

SEQ ID NO: 77643 - DNA, 330 bp, Zea mays
  Clone ID: MRT4577_170836C.1
acacctttttaatagcactaaacgactaccccaatagagcacagccagtgataccttagctatcctttcgtcagtctttacgcctgtgcgctgcgctgtgcgctgactaccactgatatgatagatgtcgcactatcatattgaaatttatgcagtagcagaggtaatagcacaagcaatgcagatgccaaggaaatacatacaacctggcgccgtggctgcctcagtcatcccattccctccctcacttcacctcccaccttgatgtctctcgtggtggactcctcctcttgttgccattgcctgactctcgtcgcgcagcgcttgggt

SEQ ID NO: 77644 - DNA, 703 bp, Zea mays
  unsure (1)..(703): unsure at all n locations
  Clone ID: MRT4577_170838C.1
ccggccgggagttctcccgagatcccaaattcccacctcccccacctcgctcgcttaaaagctcgcctcgcctccgccattccgcccccgaccgaatccccctcccaccaccgaacccgcagccgccgcccgccgaactcgcccgctctcgctcactctgtcgcccgtcccgcgacgcgagccaacgcggcgttgatcggcggtcctcagacctgagcccagcccggcccggcccgcgatggagaagacaaagctgccgctgccgctggtgcacggcgagcgtctgtgggcgcggccgtggcggtgggccaagacggccttcttcatcgtggcgatgctggcgtcgctgctgctcgtgtgcgcgccgccgctgctggtcgtgctgctggacctgctcctgccgcccgcgctgctctccagcttcctccgcgcgcagccgccctcctcggcctccttggccgccgcgctcgccgcccaggccaggtccttccgcttcgcctcctcgctcgccgacctccccgcggtctccgccgcgcgctccctcctcatcctctgcgcgtacgccgcggccggaggcggcggcgccgcctacggtgggncgccgtcgcctgcagcgccgcctccgtctgctacgtcctcgccaaggccgnncgccgtcttcggcgccgcgcccgtgtggcggggcaacggccagctcgtcgcc

SEQ ID NO: 77645 - DNA, 303 bp, Zea mays
  Clone ID: MRT4577_170839C.1
ggaaaaaccgggccgaccgacgcgtacgacctgacccactccattttaccatcccattctattcttatcccctaccgctaaccctccctgcctggctttctttctacgccgtgccaaccatcaccctccgctgcctctccatcgccatgtccgacaccgcactccctcccatccacaagctcctccccacagtttccctcccactcctcacctcatccacccgcgcctcgccgctcctcctctacgccaggcgccacctgccgctcgctcccctcattacctcctccgacgccgttgaagcca

SEQ ID NO: 77646 - DNA, 422 bp, Zea mays
  Clone ID: MRT4577_17083C.1
ttgagcaagaatgatctagttggattcatccctgcggagtttggtaatttgagaagtgtcatggagatgtaagtacttgaccttattcatgtgaatccttttattgaatattccttgcattatattttgaatgacttgactgttttttctagtgatttatcctataatcatcttggtggtctgattcctcaagaacttggaatgctgcaaaacctgatgttgctaaaactggaaaacaacaatataactggcgatgtctcttctctgatgaactgcttcagcctcaatatcttaaatgtgtcatacaataatttggctggtgctgtccctactgacaacaacttcacacggttttcacatgacagctttttaggtaatcctggactctgtggatattggcttggttcttcatgtcgttccac

SEQ ID NO: 77647 - DNA, 1384 bp, Zea mays
  Clone ID: MRT4577_170840C.1
agaaactcccacctccggctcctctggtcggccggttctccacccatcccaactcccccacctcgctcgcttaaaagctcgcctcgcccccgaccgaatccaccctcccaccaccgaacccgcagccgccgccgccaaaccacaccgcgctcctctctggcggatagcggacagcgattttgatcggcggtcctcagacctcagcccagcccggcccgcgatggagaagacaaagctgccgctgccgctaccgctacccctggtgcacggcgagcgtctgtgggcgcggccgtggcggtggctgaagacggccttcttcatcgtggcgatgctggcgtcgctgctgctcgtgtgcgcgccgccgctgctggtcgtgctgctggacctgctcctgccgcccgcgctgctctccagcttcctccgcgcgcagccgccctcctccgcctccttcgccgccgcgctcgccgcccaggccaggcccttccgcttcgcctcctcgctcgccgacctccccgcgctctccgccgcgcgctccctcctcatcctctgcgcgtacgccgcgggcggtggcggcggcgccgcatacaggtgggtcgccgtcgcctgcagcgccgcctccgtctgctacgtcctcgccaaggccgtcgccgtcttcggcgccgcgcccgtgtggcggggcaacggccagctcgtcgccgtcgaggccatgttcctcatgtcgctcgcgctcgccgtcgcccacctcgccatggcgtaccgcgcgtcatgccgcgagcgacgacgcctgcagctagtctacagaatcgacgtcgaagcggtaagactgaagggaggccagacgcccaaggcactgaagcaatgcatgatatgacacccatctgctcctagtatcgccgtccccgctgggtggaggtggaattggaaggaaggaacctgaagatgcacggcgcggcggtcttcgtggtgcagaccggcagtgcagtgcagtgcagggggctcatccgcgcccaagttttggctcgagaagctgtgcataccgatcgccgcgtctgtccgtccactccctctgcgtctgtgaatgtgtgccagagtgaacgtgtagtgtcatcctgtacatacgtatggaacacaacattcgtgcttcggcctcctgcagccaatgcgatccaggatgagccgtgtgccaggtgcttgcgttgcctcgtcggcccggaattgtgaatatgcctgtcacgtgcgggcggaggtggcaaatgggcatctctaaatttggtgtttatcctgctttcaagtggatttggaagccttttcctcttagctaaaacataagatcgctcttttatcttctgttaagaatttaagatcgaaaaaaaaaaaaaaaaaa

SEQ ID NO: 77648 - DNA, 570 bp, Zea mays
  Clone ID: MRT4577_170841C.1
gggtacctcgaggccggccgggaacacatctgatctcatctgattgctgggagctagtacagcttccagaactgcttggcttcctacagaaattcaggttttggacctatcatgttgctcacagctttttgcattgcctgagagtgttactaagctcacaaatttagagcacctaaatctgtcatgctgcattagccttgaaaagatgcctggagactacggcagcttaaagaaacttaagcttctgaacatatcatattgttttaaggtccgtatccctaatggcatagccaatatgtctaacctgaaatgtttgatggcggttgggttggacggctactcttgtgggaataaggatgatttcaatattgtaagtagcttactgtgtatgcctaggatagatttgagtaaaaaggacagccccattgctgacttccatgggatcttgaagcacaaaagactacatctttttggtctcggcaacgtgcaaagcattgatgactttgagaacttgggattatgaaggcatcccccacctcaactcactaatacttactagctcctacatga

SEQ ID NO: 77649 - DNA, 356 bp, Zea mays
  Clone ID: MRT4577_170842C.1
aatgttccactcaaaacccagcaggattgcacacacacaataaaaattacctccaaccaaactcccaactggacatagcttttatagcgacaacagtccaagacctctcatcgctgacagtgtgggaccttgcccccggaggataagggaggccaaaccccgccaggtgaaaacgcagacaggccccacactgatgacaacaccaagggcgtgaagaaacaaactcagggaggggtaaaccaccgccaagtggttgacgcacctggccagggactctcaagggcccaccctgtggccacccgggtgtgatgagccaaaaaacatctcgcagtgaccgaaccctatcaggccacctc

SEQ ID NO: 77650 - DNA, 337 bp, Zea mays
  Clone ID: MRT4577_170843C.1
gagccgcccaagcaaaaaaaggggtccaacaccaggcttaaaaaagggttatttccccaccggccaggggggaaggcgaaaaaaaaaaaaagcgccctttttttggggggcaaaaaaaaaaaaagcattgcccgggaggaaaaacaagtcccgggttattccacgcccccttgacaaaaacccaaaccgggacccccggcccgggtataaattggccatgggaacccccggcaattggaaaggggccacctcccgggtgggctgctgtttgagcacccactttttgaagggggggaaaaggaacctcttggaacaagggtaccttttgggggcgggg

SEQ ID NO: 77651 - DNA, 324 bp, Zea mays
  Clone ID: MRT4577_170844C.1
aaaacacttcctgaaaccctacccctggggtcagcagatcaaacaacacctagctctactgctctcatgtctactaccaaacgcgctccgaatcccaaccatgataatgatcatctctaacactaacaccccaagccatacaatccctaaacccttgacaaccagatgctaaatgcctcgagtgagggaagaacatcacattaccacaacctctatgctctacctcacgagaccatacattagaccatcaaaacaattggccaatcagatactactaggtctcatccattcaatcctactattcctaacttaaatgccttttct

SEQ ID NO: 77652 - DNA, 356 bp, Zea mays
  Clone ID: MRT4577_170845C.1
ggcgaccagactacgctgtcactgggtcagttgttctgcgcactacgaatgtcgacccgccctttctcgtgaagcccgagtagcatctgccggtcgaggtgtactcactgacaccaacaactgattcgagaatgtagacgacaacgtcgtggctgctggtgtcgatgcctccgattgctggtccgccccggtgcatgcctacttggaggtgtttcgtctcatccaggttcgtgagcgggagctccttcctttcgatcggcgtgatctccaccatcggaggcgtctccgttctatgcttcaccgtgatattctgaaaatgcccccacaagagcgtatctggtggaccgagcctccta

SEQ ID NO: 77653 - DNA, 900 bp, Zea mays
  unsure (1)..(900): unsure at all n locations
  Clone ID: MRT4577_170846C.1
cattgggtacctcgaggccggccgggaccgctgtctcgttgcctctcaagccaccgcaaacatgttcctacgcacagctctcctctcgctgtccgcccttgcggtggcaaaggaaatgcccaaagatgagcttagggctgcccagctctatgactctggcatcaggcacgagaacaacatggccctgaagaaggagtcatgggctaaacaagaggctgcgggcatgtacaactctgcccagttcgccgaggtcaagaacaaggtcgagtgcatcaacggaactgccatcaccgacaccgatgtgttcaagtgcaagaacatcgatctcctgcacttcttgtcgcatgccgagcttggcagtacccgtggtgtcggatcgtcatcgtggggttggacctcggacgatggtcgcgagtttgttgcaatcggacagcaagatggtgctgcgtttgctgagatcaacaaggaaggcaaactcgtctaccttggacgtcttccagcatactcgacccccagcacctggcgcgagattcgtggccagaacaacctgatgatcatcggtagcgaggcccagggacacggcatccagatcttcgacatgaagaaactactcaccgttaacccggcttccccgaaggtctttagcaactccaaggatcttactggtcacttcaagggcctccccagtggccgagctcacaacgtcgtaaccaaccctgagaccaacttcatctacgccgtcggagcgcagcccaggaccgacaagtgcaagtccggcatcattttcatcgacatcaccgacccttccaacccacncacccctggatgtgcgtcgcaggacggctatgtgcacgatgctcagtggcttatctaccacggccccgacaagcagtttgaggg

SEQ ID NO: 77654 - DNA, 418 bp, Zea mays
  Clone ID: MRT4577_170847C.1
ggaaaccgttttttttggccttccttaattggggggaattaaaacgtgcgtttttggggaggcccccgttttttaatgggttttttttttatttaaaggtcgggggcagggaaaggaaaaaggggtttgttttttttttttaacccgatggggggggttgggggcaaaatttccacaaaaatgcggccccgggtggggggaaaatccgggggcaccaaggggccgagggggaaaaccaaaatgtgggggtccggtttgtccttgaggaaaaccttttggggggcctccacgtttagcccgacaaccttaggccaaaaatttttggggcccccgccgccgccggcgaatttgggggggctaatggggtcggaaactgccggcccagttgacaatttgaccgagggggaggaaaaatttg

SEQ ID NO: 77655 - DNA, 415 bp, Zea mays
  unsure (1)..(415): unsure at all n locations
  Clone ID: MRT4577_170848C.1
gtcggccgttaaccacttccacatccaggggtccagtccagagacacccgagcgacgaagggatccatccatcgtcacaagcatctcgtccatggtgcagcgggccgtcatcgtcaggcatgagcgtgactcggccgccgtgccgccgggcgatcaggccaccacggagacgacggcggcgagggaggtgaagaggaggcggcggctggccgactcgatggccgcgaaccaagcgccggatccttgcggtgcaacgaggccaaggccgaccaccacaacctgcagggccgccggttcaagcgcggctaccgcgcccccggctgcggcgccgtcgactccgcccgcttctaccttgcctgccttgtttgcaccccgccgcgcgcggncgttgttgtcagcggtctcgattatattg

SEQ ID NO: 77656 - DNA, 308 bp, Zea mays
  Clone ID: MRT4577_170849C.1
acaaacatgccacatttggggttttttttttaaacaattcttttccaaaaggctggccccccctgggggcccctcctcgttttgaagaccgaaaccattttgttaacaaaaagccccgagaggcaaggataaaccattttttttgattgttgacccttggtgggaaaaaccaagttgcccaagcttttgcaccccttgggaaaacttggcctttttgacggttcaggggaccaacaccggtttattggtgacctccaatggggatcacaggaagtttgccccgggggctaggactgttatttcaaaaa

SEQ ID NO: 77657 - DNA, 252 bp, Zea mays
  Clone ID: MRT4577_17084C.1
cttgacagcttgagaataaaaaatacattcaccttaatcatgcactaaagaaagctcttggtaattctctagtcatggtattcaggattttacagaaaagcttcagcaattaccaaagtcgaagatgttggacctttttcagaaggattatatccgtgctgttacagtaagcatctttaatatgcctttcttcatattaggacatgtctctgttgttgttttgtgatggatcaggtctgcattcaggttgga

SEQ ID NO: 77658 - DNA, 588 bp, Zea mays
  Clone ID: MRT4577_170850C.1
ggccgtgttcgtacttcgcctatcttcgggactcaaagcttgttacatttactaccgccgccggtgcagactccaccgccatatccggtcgacaccatgagggcagagcatctttgtatccacgatcgggccaagaccggcgatccgaggtcggaaacgcgtgctgggagctttactgcctagagcatggtattcaggctgatggacagatgcccggcgacaagaccattggggggggagaagaagctttcaacaccttcttaagagagcactgctgggaagcacgtccctcgagctgtttttggtgaccttgaaccaactgtcatagaggaggcgaggactggcacctaccgccagctcttgcaccctgagcaaattatcagagggaaggacgatgcaggcaacaacttaacccgtgggcactacaccataggcacggaagaggtcgaaccagggccttgatcgaatcaggaaagctagccgacaactgcactgaacaacgaggcttcctcggcttcaacgctgttgaaggacgaacagactctggccttggagacctcctcctggagcgctggcctgatgactacg

SEQ ID NO: 77659 - DNA, 250 bp, Zea mays
  Clone ID: MRT4577_170851C.1
cggctcgagggatgaaaaggtgaagaaatcaggggattgaggacttgggtgggtgggcatctctcaggagccccatctccgggcgtgtcacctcctgggcagggttctgggaccctctgtgggtgacgcacaccctgggatggggctagtagagccttcaggcgccttcgggcgtggactctggcgcactctagtggacaggagaaggaacgccttccaggaaacctgtggactagggttgcagggactt

SEQ ID NO: 77660 - DNA, 432 bp, Zea mays
  unsure (1)..(432): unsure at all n locations
  Clone ID: MRT4577_170852C.1
tttgggctggtttatgtgcttgtttatgtgcttgtttatgtgcttgtttatgtgcttgctctctcacctgccttttgttctattgtgagttagttgctctgtcagggccctgttgttgttgttgttgctgttgttgtcacgttctgttgtagtctaggaaggctcgttttatgtttagtcttttgcgtcgtcttagcgaggaatttgttatagttagtatgttaggtcttcttcttagtcttcgcctgagacggcggcggtcttacgcccggaggaaccgggcttattaccggtctaggcacggtgcccggtatgggcagcgttacggtattatagggtcgcgacgtcgcaccaggcttttggattacctagtacgagatcgccgttctagaagtcgtcgtcgtcgttttcgttttcntagcgacgaacgtc

SEQ ID NO: 77661 - DNA, 1112 bp, Zea mays
  unsure (1)..(1112): unsure at all n locations
  Clone ID: MRT4577_170853C.1
ccggccgggagacccttccctaccgtatatagncgacggngcttcctaaactaactcattgcagagtgcagacaaacctcacttacattattaatgctctcgcatatttggccgtcaccatcatcagactcagaccccttaaatccgcaatttgccgaatttttcacccatccgtcggatgcggatatgtttcttatctagcctgcaggtccataccattgtcctcctctctctctcactcaagtcgttgcacgccacaccatacacaaactgcagagggaggagcatggcagggctgcagagatcgtcacagacattcaggaggtccggctcatcaggcttggtctgggacgagaggctcacgtcccaggacgacgaccagagcgggccagaggacgcggacgcagccacggatttaaaggagctgaggcactcccgcagcgttggctccgttgggctgcagccgcagccgcagccgcagccgcagcgccggcgcagcgacgacagcggccagggcttccgtactcggcgtgtggccccagccctggacccgccttcgcccaaggttcctggctgcatcttctgcggaattttcaggaaggcgggagcatcagagccaaaatctaaacccagaaggtactaactaagttgttttaccgtgtattggggagctaggatcagagaccgtcagttttccttgagcccgcagaagttcgtgtttttcgtgtatggaatggtagatgagatgtatatgtattgttgtaagtttggagtggacaaagcttttgtgtttcaaaaaaaaaaaaaaaaaaaagggcggccgccaccggagcggagtgcacagaccgtcggttgcccttctgcccgccggcgttcgtgtttgtcgcgtgtgcatgggcagggggctcgtatttgtatgcttgtaagtttggagtggacaaagcttttgtgtttcttcttcctgtgttgctgctttatggctctatccttgaccatcatgtacataataaagtttgcgtaactagcatactgcatacatgtaagttacaagtacatgaacatggtgctcttatttgtatgcttctacatggataaaaaaaaaaaaaaaaaaa

SEQ ID NO: 77662 - DNA, 309 bp, Zea mays
  Clone ID: MRT4577_170854C.1
aattcccgggacgacgagcttcttagtttgcggccgcccttccaattcatgtttttagtgatctgccaacgggttgggggaaaaagcagcataggaatcaccggaagcatccctacctgacggcgcttagatgcacaacaggcctcataggaatacacataacttccaaacaaaaatgaccactctggacaaaaaatatctggcaacgatgaatctgcattacaaaaagaaacaccacccaatggactggcgagcgggggctggtccaatggatcacccctgtgcatgaactggtacactaacactttg

SEQ ID NO: 77663 - DNA, 564 bp, Zea mays
  unsure (1)..(564): unsure at all n locations
  Clone ID: MRT4577_170855C.1
gcgcatcngnttggcccggnnttcgggtnntcgggttgggnngcggcaaggcnnngaagcctgcttccgnaagnaaggggtggcganagnnacatcgnacactgccttctgggaccgagccgctttgtggggttccccgnngcgccgtgnngcgccacgacttacctggnacgtgctacgcttgnngtcggcgacttaccccggttcgacnnccgttcgnngtctctgggaagggcccgtggnggggtacctgnnnagttcgaggttggnnactcgtctggtaccnatgaacctgnngccaagaatggaggggccgtgcggcatcanttcggcacccggtgtcgagggtcctcgcgaagtcaagtccgaccccnngttgcagcccttacagcgaggggtgttcgnngcctccannncggttccgcgnggggtgcgagctcnnatccacggccgcttgggtccatttgctcgccannncctcggcgcccttctttccgtcgaggtgggctccaaccggcnngtcaccttggcaggnnnacgccggcaagggtggnnnagctggtg

SEQ ID NO: 77664 - DNA, 1071 bp, Zea mays
  Clone ID: MRT4577_170856C.1
ccggccgggagtctacagccgtgccgcaacacacagcagcaggccagccggaaggaacagccacgcaccgatcgacgacggcgccccgctagctagctctcgctccatcgctctcattagccagcgaccacatacatatggccaccgtggacgccacgacgccgccggagtccggcggcaagcagcaggcgccgtcccttccggcgtgcagaagcttctccggcgccaacctggcccttcgagtgctcctgttcgcggtgacgctcgcggggctcatcctgctggccaccgccaagcagacggtgcgcgtgccagtcccgcagttcccggggctcctcctctcccgacccgccaagttcacggactcgccggcgctcatatatctgctggtggctctcgtcgtgacgtgcttctacagcttgacggccctcacctcgcttaagctcgtctccggctcgtctcccgctaccaggactctcttcctccttgttctgctcgatgtgttatacgcagctatcatggcttcggcgaccggttcagggggtggtgtagcgtggatcggcctcaagggcaactcgcacaccaactggaacaagatctgcaacatctacggcaagttctgtcgtcacatcggcagctccgttttcttaggcctcgtcgcctccatcatcctcgtcctgcttgccatcctcaacgcccactccttgtaccgccgcagtcgctagctacctcagtacatctgccgctttgaatttgttttatcatatagttcgtccctttgctgtccatcacgtcgaaggtcccgcatgttaatatttgcactgtttttattttttcaaattttgatgctatccatgagtcgctaagctttgatttaacagcaaaatggtcacatagctcaacttagtgctaaaatcaatgagcatgacttagaaaatgaaaaatttaaatttgctagaagcatgctctataaagggagacgccctggcattaaggatggcattggcttccccaagggagaaaatgtccagcttgatgcccataagaacccgtcaaattttgttaagggta

SEQ ID NO: 77665 - DNA, 2024 bp, Zea mays
  Clone ID: MRT4577_170857C.1
cattgggtacctcgagtccctccgggccgggagggactgcactccactgctcaggtcgggaacgcagaggcgggggcaacaagaaggctgggcgagaagacaagaggaagccaaaaggagaacgagttcggaagggagcggatggcaatggctctgctccagctattgctgtcgctcctcatcgtctcctgcgccgcgcagtcgccgtacgcgtcgaaggctcctccgctcagcgcctcggcgccggggggctctgtcgcgccaccgacaacggcggtctcggcgccgcaggcgtctgcacagccgccgacaacagtcgccgcgtctgggcctcaggcctcggccgcagcaccaacaaaagcagccttggcgccacaggcctctgctgcgccgccaactacagctgcctcgccgcagctggctgccacgttggccccggtttcctcaccgccactagctgccgctgcgccacctgcatccgctacccctccaaccacgccaccatcggcaacgcagacgcagcctccagtcgcctccccgcccacggcaatgccaccagcggcggcgctccccccggccacgctccctccagcgatggctccgacgccacttctcgccgcccccgtcatgcctcccgccgccccaccggccacggcgcccgcgccggcccccgtgtctccggctccaactccaagtgtcgccccccgaccccgtcgccgacagaagcccccgccccgtcgcccacaacagaggccccgattccgaccccgtctcccgcgctggcgccgctcagctcggtgtcggtgagcccgtctctgtcgcctggacccgctctcgcccaggatgagtcggcggcgtcgggctcgcgcaccgccctcgccgctctggtgtccttggtggcggtcgggctcgtcgtcttgttttaagtagaactgcgttaaccgttacacgcccataccgttcctcatacgcagggacgtgttctcctgtttgtgttttatggatgcacggatcattcttgttgtaaaaaaaaaaaaaaaaaaaaaaaaaaaaaaaaagccaaaaggagaacgagttcggaagggagcggatggcaatggctctgctccagctattgctgtcgctcctcatcgtctcctgcgccgcgcagtcgccgtacgcgtcgaaggctcctccgctcagcgcctcggcgccggggggctctgtcgcgccaccgacaacggcggtctcggcgccgcaggcgtctgcacagccgccgacaacagtcgccgcgtctgggcctcaggcctcggccgtagcaccaacaaaagcagccttggcgccacaggcctctgctgcgccgccaactacagctgcctcgccgcagctggctgccacgttggccccggtttcctcaccgccactagctgctgctgcgccacctgcctccgctacccctccaaccacgccaccatcggcaacgcagcctccagtctcctccccgccgacggcaatgccaccagcggcgctccctccagcgatggctccgacgccacttctcgccgccccaccggccacggcgcccgtgtctccggctccaactccaagtgtcgccccgaccccgtcgccgacagaagcccccgccccgtcgcccacaacagaggccccggccccgaccccgtctcccgcgctggcgccgctcagctcggtgtcggtgagcccgtctctgtcgccgggacccgctctcgcccaggatgagtcggcggcgccgggctcgcgcaccgccgtcgccgctctggtgtccttggtggcggccgggctcgtcgtcttgttttaagtagagctgcgttaaccgttacacgcccataccgttcctcgcacgcacggtcttgttctcctgtttgtgttttatggatgcacggatcattcttgttgtacaacacgttggtaatttgtttccattcattcatggctgacggcctgcctgcggctttcttttgcaacttgcaagcattactgtgaattgtgatgcgtgtcatgcacag

SEQ ID NO: 77666 - DNA, 1190 bp, Zea mays
  Clone ID: MRT4577_170858C.1
cggcccgacccacgcgtacgcccacgcgtacggccacgcgtcctttatttctctagtaaacctttcaacactgttcaaaacagaatttgttactgtccttgtgtctgcattttctctactatacctctgcaacacatttcaaaaagtataatgagccaactcctctacttgtaatgtcaaggaaagcaacacaggaaatgatgtgcatggtgtgcctaaagattcaacccgttggtccgttctgccaaaccccatcttgtaacagactatcgatggcaaagtactactgcaacatctgcaaatttttcgatgacgaaaggactgtgtaccactgcccgttttgtaatttgtgtcgtcttgggaaaggtcttggtgttgatttctttcattgcatgaaatgcaactgctgtcttggaatgaaattaactgagcacaaatgtcgggaaaaagggctagagacaaattgtccaatatgctgtgacttcctgtttacatcaagtgccgcagtcagagccctcccttgcggccacttcatgcattcagcttgctttcaggcatacacttgtagccactacacttgtcctatctgctgcaaatctctgggagatatggcggtgtattttggcatgcttgatgccttgttggctgctgaagagcttccggaggaataccgtgataggtgtcaggatatactgtgcaatgactgtgagaggaaaggcagatgtcgatttcactggctataccacaaatgcggctcctgtgggtcgtacaatacccgagttatcaagactgacactgcagattgctccacaccaaattagctggagggaacatttgtgcttatttgtagcctttttttttctcttatgtaaatatcttctagcgggaaggaaaaaagagatgtcctgtaggatagttaacataatttcattcgtagcgatatcagttttgtaagtgtagcagtttacaatttactaggtctagtgcgttgtactgccaaaatggacggttctgctggacaaaggacataatccgagaaaataggctagttagaacaaaaaaaaaaaaaaaaagtactcgtgagcatgttctgcaatttggcgggcactcagactatcttcaattatatctactatattccttctttaagaaaaaaaatctttcgtattaattacggtgaaattgtgaca

SEQ ID NO: 77667 - DNA, 533 bp, Zea mays
  Clone ID: MRT4577_170859C.1
atcttctatccgcatcgagagacctcgtcttcctccgcgttctcgtcactctattcatccttcccattctgccgctctctcgtcacgctcggcagttccctccctactgtcacgggcgagattcgcataagaataatcggagctcgcgaggattacgtaagctctgggcgcggtgtaggcctcctgagcagagaaagctcagataggcctaccgtacggccgctatatcgcaacccgagcgcatgagctaggtgttcagggacgataacggtcacggctaatgcaaatgaagtgccgtcgggctctgagaagacagaactctgctctttgcctggagaccatgtcccctcttcggggacgggaagcctgagaatatatcatgctttcgaggatcgtcgcctcatatcgttgtggagtgcgcacccatgccttcagtgactgggagaaggacaatgctcactcgacaggggatgccagaaacgtgggcatctcctcgccaggttaaccttgaggtatggttctatgtgactgtc

SEQ ID NO: 77668 - DNA, 507 bp, Zea mays
  Clone ID: MRT4577_17085C.1
gagctctcatgacggcggccgccttcggagctagcgctgggatgatcgccccggacctcgcagacgagaggtagaggcccgcgaggcggtagtactcccgaaggagcgcgtcctcgtccaggttaggcggcagcgactgcagcggcgccatcaccggagcggacgagaggtcaggagtcgctggcgacagaggcgccgtggcctcaggagccggagccgctgcatgctgctgctggggcgtctgggttgggggcgcaggcagcggcaggggcccgagctctggtgacgcgggctccgacttgggctccctcttgaggaacggcaggaagttgaggtctatggactccgaagacccggccggagacgatatcggcgacgacgacggcgaggattccaccacatccatttccacaaccaaacttccctgtccgtcctcccttgcctccttcgctccaaaactccccaaacgctcgcgggctcgcggcgcgtaacggagacggcaaggtg

SEQ ID NO: 77669 - DNA, 815 bp, Zea mays
  unsure (1)..(815): unsure at all n locations
  Clone ID: MRT4577_170860C.1
gtgccggccgcggcggcacggcggcatgcgcgccgccgtcttcgtcctaggtgcgagcgccgtgcgcgtactgctcttgtcgctgctgccggccggcagcaatgttcatgccacgcacattattgagctacagctagctagcgcctagcgcgggccagccggcgggcgggcgggcgggcgtgtggtgattatataacaataatacgtattagtataatcgcaggcgtccaggcgttcgagatcatggcgatcgcggcggtggggaacaacctcatcacctacgtgttcggggagatgcacttcccgctgtcgcaggcggccaacgtggtgaccaacttcgtcggcaccatcttcctcctcgccctcctcggcggcttcctctccgactcctacctcggctgcttctggaccatgctcatcttcggcttcgtcgagctctcggtacgtcagcgcgctcgctcgctcgttcgttcgattcgttcttgctgcgctagtaaaccttgcgattgttctagttctagctcgtagctcgtcatctggctggctggctggctgctgtgctgctgggcatggtagagtcgtcggtttcaccacgcaccagcaaggcttgtgtgctcgtagtgggcatgcgcctcacggagtgatagctacgtgcccgtgtggcccgggccccggtgcggtgattgacccatcacttcccttttttttttttctagtgggtgtttgcgaggttgttgcgacaacagnnatgtgtttttncttttatcaaaataaacacgcgcaaggaagaacgttgcannagtttcaaannaaaa

SEQ ID NO: 77670 - DNA, 280 bp, Zea mays
  Clone ID: MRT4577_170861C.1
aaatatcctcccttgggcaagatgtaaacatctatttaatctctgtgattggtacatagatgtcattagtgctctattttatgaatgtttatactatttcataattacaaattaaaaattaaatgaaaaagaaagtgatggaagaatatattccaggcaagtgctaaccataagaaagctgggaaacagaattaatatcagacatagaatactaagaaaagaaattaaattgttatggaaaaagagaataccaaagacgcagtatcacatagataacatt

SEQ ID NO: 77671 - DNA, 2075 bp, Zea mays
  unsure (1)..(2075): unsure at all n locations
  Clone ID: MRT4577_170862C.1
atttcgatctgccagatctagacatatataccctccacgcgtccggcatttcccctctctccagcacattgctgcttccacagttccacacacataaggccaccacagcaaataaaggcactgctgcactctctctctctctctctctctctctctctctctacgcgaaaagaaaagaggaaagtgggatagctcaatctctccttccacgcgtcctcagttctcactctagcgctctctctccctcgctctctctctacacatatatatcagtataggatggatgtgcaaacctagcttgctgctgcctttctagctgagaactgagctgtagctgttggtacggttttcctcctcgctcttcttctcctccttcttgctgctggttgccgggagctgagatcgatcgagagcactgctgttgttcgtgcggccggcggcggcggcgcgcggcagtgggcggagacgacgaccgatcggtcagaaggaatgtcgtcggcccaaatcgtgccggcggaccatgtgtgctatgtgcactgcaacttctgcaacacagttctcgcggtgagtgtcccggggaacagcatgctcagcatggtgacagttcggtgtgggcactgcacaaatctactgtcagtgaatctgagagcactcatgcactcagtcccagaacaagatcagctccagggagaacatcagggtccatggcacgttgcgtgagcatcatcagtgcggcggcggccaccatctggagctgggctcttcgtcgtcctcaaggttccggctgccgatgatgatgtcgtacgcgccgcagaacgagcacttgctgcaggaacagacactgaacaacgctcgtccggctcctgagaagaggcagcgggttccgtcggcgtataacagattcatcaaggaagagattcgcaggatcaaggcgaacaaccccgacattagccacagggaagccttcagcacagcagccaagaactgggcacattatccgaacatccatttcggcttaaactccggccgagagggtggcaagaataagctcgtggacgaggctgtcgcggcggtggcggtggctccgaagaagatccaaggtttctactgatcgatgccggtcgatcgagggatcagcgctcgtcgtcatcaactggccggccgggtgtggaagaattaataataccacacaaattataaatgtactgtgatgagtaaattaaagagttatagtggggaatgaagggagagagagatatatagcaatacgtatattaccttaccttattaatgagtgcaaaaaaaacacttgtgaaggtttctactgatgcatgagtgggaagtgaagcatcatacaatcacatgaattatattgctactggcatggtgggcgccatgcatggtttaaattaaccgagaagacgacttaataaatcattatttgacctaccaaaaaaaaaaaaaaaatcatgcatatgcacacacacagcatggcagctagcaatctatccacctcttggccttttgtgtgtgtacgtctgcatgggctaaacacacatgcatatactcaatcattgttgttagctaggggtcatccatggactttgtttattcattgtttttgggagtgggcgccgagaaagatagatggtgagcagataatatcagactgagccatgattttagcctgcactatcagatatgattgtgtgtgtacctatactcccaaagagagaaaaggaaagggaaacaggagcacaaaaagtgatcggcatgcagggtgttaggaaagtgagaaaccatcagcaggcagcaacagcaacgagcgtctgataaaagtcatacactggaccagcagcagcagcttgttgatgcagctagctgcttaaagtagtgacaaactgacaacaacaaaagtagggctagaaaagctactacctggtgtgaaatctctctctagtcctttccgatctaccgtgatctttgatttcgnttatttctctctctcttctttttttttttggtttgggttcatcacaacttttccgatctaccgnggatctttaaattttttt

SEQ ID NO: 77672 - DNA, 502 bp, Zea mays
  Clone ID: MRT4577_170863C.1
gggtaccggcgcccttcctcgagtttttttttttttttttttttttttttttttttttttttttttttgtaaaagaaagaaactctcggaaaaataaaagcagaacaaaacatgccccattttggaggggaaggatacaggaacacaggggcagaacataaaacccatttccggccaggcttggagcaaacgccaaagcctccaacgaggcacctacgtacggaaccccagggagggagcggacaccctacctcgttcgtagtagaagaaaacgggtgaacacacactactgcgcggggcacgcaccgacgacaggggggagcagcttatgtatgagaaacggtagggactcgccatacaggtaaaagagggaacgggccaccccctttagggataaaacacaggcgagggcaaacgccggccgggccgcacaattggagagcgcaacggaggacgtaaacacgacgggctgggaggagtgctctacgcccttggtctgccg

SEQ ID NO: 77673 - DNA, 1065 bp, Zea mays
  Clone ID: MRT4577_170864C.1
gtgtcccggggaacagcatgctcagcatggtgacagttcggtgtgggcactgcacaaatctactgtcagtgaatctgagagcactcatgcactcagtcccagaacaagatcagctccagcaggagaacatcagggtccatggcacgttgcgtgagcatcatcagtgcggcggcgggcaccatctggagctgggctcttcgtcgtcctcaaggttccggctgccgatgatgatgtcgtacgcgccgcagaacgagcacttgctgcaggaacagacactgaacaacgctcgtcgtaagtttcgtttcttgttttgtttgctatatattaattacatgcaatcatgcatgcgtaagtcgatgcgtgcgttttgactgctttgtttcatatctttttttgcaatctcttggttgaaatgagatagcggctcctgagaagaggcagcgggttccgtcggcgtataacagattcatcaaggaagagattcgcaggatcaaggcgaacaaccccgacattagccacagggaagccttcagcacagcagccaagaactgggcacattatccgaacatccatttcggcttaaactccggccgagagggtggcaagaataagctcgtggacgaggctgtcgcggcggtggcggtggctccgaagaagatccaaggtttctactgatcgatgccggtcgatcgagggatcagcgctcgtcgtcatcaactggccggccgggtgtggaagaattaataataccacacaaattataaatgtactgtgatgagtaaattaaagagttatagtggggaatgaagggagagagagatatatagcaatacgtatattaccttaccttattaatgagtgcaaaaaaaacacttgtgaagggagagagagatatatagcaatagtggcgcgtactgatgcatgagtgggaagtgaagcatcatacaatcacatgaattatattgctactggcatggcgtgggcgccatgcatggtttaaattaaccgagaagacgacttaataaatcattatttgacctgaaaaaaaaaaaaaaaaaagcggcc

SEQ ID NO: 77674 - DNA, 580 bp, Zea mays
  Clone ID: MRT4577_170865C.1
ctcctatgggcgattgggttcctcgaggccggccggggccctgggggcaaagccttcgctcgtccccgcccggcgacccagctcaggcgagtctcctctccgacgcggtcgacgccttgccccggtcggccgggttcggcggcccataccatggccgcaatacctcgggcatcggagggcatggagagatcagagttcgtgcgcgttggatctgagccgccctccaacctccagatgcatcaatcgaagatgaatcctgggattttgcggaaggatcacagaaggcctgagcaagaaggagttgcaggatttacttcatgatggggccaagcttctgctgaaagctgcaaatgcgaggaattctgggagagagctgcaagggaacactgaagatggtgaccagatgatggatatggagtgaccgtcggtctctgggtgctggatggttgcttagtggcttgggtctcctttatctagtcggttctgtttagactgcgttctggttttgcgctttgtcgcagtttggtgctgtatttttggctccttgggatgatgacctgctacttggtgtcatgaattt

SEQ ID NO: 77675 - DNA, 391 bp, Zea mays
  Clone ID: MRT4577_170866C.1
ctcgaactatatatgcttactcaattaatgttgaatggttcctcatacactgatcaccatcaatggcgatgtatcagtgccatggcgttcatcataatgtaagctctgaataggaaatgacacaattcagaggctataggagactaattctaagacacatcttagctaggttcataaggtaactagaaagaaaaggtaaagctatgtggatcttacatggagatgtgccatggcgttcgttagtgccattgcatctttcggagatcgccataccacatcgttcattttctctgcgcagaatggaggcgaggtgttctactaaaatgccaagctcctggttgtcctatgtctggtttccaaggtgtttaggttagttatgtttttctcatat

SEQ ID NO: 77676 - DNA, 339 bp, Zea mays
  Clone ID: MRT4577_170867C.1
cccgccccaaagcaaatcaacgggaaaaaaggtttcccaggggggagcattgggcttttttgggggaaaggaacaggggttccctgcccaacaatttctggtacaaaaaaaaaacgggcaaaagagggtcacaaagggccctacagccgggggctcaagggggcaggggcctttttttttgggaaggggaaaaaaaaagagggggggggtggtaattgcctccccaaagggggggcccttaaataacaatcgcctaagggggggggcccctttggttaaagggggggggacgggccaagaggggggcttcaattatgagggccgacccccgggaggggc

SEQ ID NO: 77677 - DNA, 450 bp, Zea mays
  Clone ID: MRT4577_170868C.1
cacctcgctcctctctgtcctgaccaagcagcaacggctgagccctggccgagccgggctggggcgacgcacctgcaccgaccctagtgccactatgtgagcctgtgccattgccacgcccggaagtggctcgatgcccagtggtttttacgcggcgcgcgacgggtcatctcacagtcccatctgcaggagagttcggagcggaggccgagcgggaccgcgggagggggcggccggggtccggtccggggaggcggggaccagggcaacgcacaacgcgccggcggtgaccagtagcccgctctgacaccagctcctcgcatcgcatctcccctactaggcctcctcgtaccggacccggagtgtgctttggccttcggttttaccgcggggacaggacaacgatggcgcacacgggcgctgggcggaagacgacgccggaacggacaa

SEQ ID NO: 77678 - DNA, 353 bp, Zea mays
  unsure (1)..(353): unsure at all n locations
  Clone ID: MRT4577_170869C.1
gcctcggcgccatgtgcggggtcngcctcntcaaggggtgccagagcggcctacttcgacaggggcggggggggggccaactcnctcggctccggctactcccgcgggaccggcctctgcttcctagatcagggatgtgtggntnctcntctacaccggcttttaaaacacccaccccaagcgcaacggccgggactcccacgtgccgggtctggctcccctccccatggggttcggcgggttcatggtgcacctgggcaccatccccggcaccgggaccgggatcaacccggncaggggggggggcnccngccnnatctacaacaaggacaagggctgggaccaccactgga

SEQ ID NO: 77679 - DNA, 355 bp, Zea mays
  Clone ID: MRT4577_17086C.1
cttcgatggccccagggcggcaagaagccgtcggctaataagcctgcagaggaagagcccgcgacagacaacgcggagaacgcttcggcgtagaagaagcccaatgccgagaagcgccttccggcgggcaagttcgtcgctaaggaaggcggcgagggcatgacggggacaaagaaagcgaataattccgtggtgacctacaagatctacatcttcaaagtgctgaagcaggtgcaccttgacatcggcatcttgaccaacgccatgtccatcatgaactccttcatcaacgacatcttcaagaagctcgcggtcgagtccggcaagctggctcgctataacaagaagcccaccg

SEQ ID NO: 77680 - DNA, 655 bp, Zea mays
  Clone ID: MRT4577_170870C.1
cggccgcgtgggcggacgcgtgggcacgaatgtgcccatcccattccccacaaggctccgtcccttcggcggcggcgatgtctctcccccctggcccggcggacagtggcgccggcaccggagacgactggttcctcgactgcggcatcctcgacgacctgcccgccgcggcctgcggggccttcccgtgggacgcgtccccgtcgtcttccaaccccagtcttgatgataagtggtgtggctgcgagtgatgggatgccatgtgctgctcggccatggatggaatcgtgacacctgactggagagccaaagatacaacttctcatcttctcctgtcatgtatgcgctgatgctgctatgatattaattttgagagtaatttgcagtgatcttgttgtttgacctttttttttcttgctttactgaaagcgggtccactccatatgctcagaattcaatgccttacatgtagctagttgtctgattactttcgtccatgaatggtttccagttaattggttgagaacagtgtggaagtgggcagctatgtaaacgccaatgatgcattcaaggagcccaatgatgtcttcaaggagcctggcagcagtaaacgtttacggtcaggatccagtgatatgccaacatctaaagcttg

SEQ ID NO: 77681 - DNA, 219 bp, Zea mays
  Clone ID: MRT4577_170871C.1
cccacgcgtccgcccacgcgtccgcccacgcgtccgcccacgcgtccgagaaaattgtacagatataacccaatcaacaatgaagtactgtgatataatttatggattatgcatggatattgtcttgtttgaggaattttaattgtaatgttatgtttattttttttccctgtgtactataaaggcatgtccatatacacatgatctgtgtgagacata

SEQ ID NO: 77682 - DNA, 1335 bp, Zea mays
  Clone ID: MRT4577_170872C.1
attgggtccctcgaggccggccggggccctggctcaaaaaaaaaaaaaaaaaaaagagaaccatgaacctcgaggccggccgggaccaagagatccacgaatatacccatcccattccccacaaggctccgtcccttcggcggcggcggcgatgtctctcccccctggcccggcggacagtggcgccggcaccggagacgactggttcctcgactgcggcatcctcgacgacctgcccgccgcggcctgcggggccttcccgtgggacgcgtccccgtcgtcttccaaccccagtgtggaagtgggcagctatgtaaacgccaatgatgcattcaaggagcccaatgatgtcttcaaggagcctggcagcagtaaacgtttacggtcaggatccagtgatatgccaacatctaaagcttgcagggaaagaatgaggaggaacaagctgaatgacaggtttcttgaactggggtctgcattagaacctgggaagccagtgaaagctgacaaagctgccatcctaagcgatgctactcgcatggttattcagctccgttcagaatcacagcaactgaaggagactaatggcagcctcgaagaaaagattaaagaactaaaggccgagaaggacgagcttcgcgacgagaagcagaaactgaaactggagaaggagagtctagagcaccagatgaagctgatggcatcggctccagcctacatgccccatccgaccctgatgccggcgcctttcgcccaggcgcccctagctccattccatgcccagggccaagctgcagggcagaagctgatgatgcccttcgtcggctacccagggtacccaatgtggcagttcatgccgccttcagaggtcgacacctcgaaggacagcgaggcgtgccctcctgtcgcatgatcaccttgatggggctggtcctgctcacaccatgtggattagccgcaactagttgtcgttgtcgatccattgatggggtataactgatgttcttaggctatctccagcagcctctctatcctattctctatcttactccctattttaaattttactctataaacagtacagtctatagtgtaagacaatgttttgcatgtttatatccacactttgctggagatgggcatggtagtctgttggtgaccaaggaagctgtgatatctgtggcgaggtgccctgctagaggctcctttaatgggtgtacaattttcgtggtggaaagaagaatgttcgttcttgttctccatagcaacagtgtcatattatctatctatgccatatatattttataaataaaaaaaaaaaaaagcgaacgctgt

SEQ ID NO: 77683 - DNA, 1278 bp, Zea mays
  Clone ID: MRT4577_170873C.1
atggaggcccaggcccacacgtcatgtaaccagcgcgccggttactacgtgcgagaaactgcaccaccacttgcgccagtaccgcgccttctcgactacggaactggtgccgcgactcgaggcaaccctgcgcatggcccaacagtgccaaccgagcacatcggtcacgggtcagtcagccgcgggagaaggcgtgacggtcgatatggccaaaagtgggccggcagtaatggcggcggcaggcgggcgaaagcagcagtcaaatcgactgcaggctcacgtcccctcctggagcagcaggagagccctctcccacggcgtgaagacgacgcgcccgtgttccgttcctcaaacgggaccgggaaaggggatactccgaaagggatccttccctgcgaaggaagcgggccccgagccctcctactgatcagaggttcgaaggctggcccctcggaagggttcgacagccgcctcagagcactcgggctccgcgcccactactggtcaggggttcaaaggctggaccctcggaagggttcgacagccgcctcaggccactcgggctccgcgcccactactgatcaggggttcgtaggctggcccccgaagggttcgacagccgcctcagagcacgcagagcgagggatgactctgggcgccataggaagctccgcctcgcctgaccctagggctcggactccacctcgacctcggaagacggtctccgcctcgcccgacccccggggctcggactcaacctcgacctcggacgacggactccgcttcgcccgaccccagggctcggactcaacctcgactccggaagacggtctccgcctcgcccaaccccagggctcagactcaacctcgactccagaagacggtctccgcctcgcccgaccccagggctcggactcaacctcgaccttggacgacagtctccgtctcgcccgaccccagggctcggactcaacctcgacctcggacgacggactccgcctcgcccgaccccagggctcagactcaacctcgacctcggacgatggtctccgcctcgcccgaccccagggctcggattccacctcgacctcggaagacggtctccgcctcgcccgacccagggctcggactcaacctcgacctcggacgacggtctccgcctcgcccgacccagagctcggactcagcctcgacctcgaaggaatcaccgcctcgctagaccttaggctcggaccgaccacgtcacaggggggccatcattaccctacccctagctag

SEQ ID NO: 77684 - DNA, 896 bp, Zea mays
  Clone ID: MRT4577_170874C.1
aattcggcacgaggcgaatatacccatcccattccccacaaggctccgtcccttcggcggcggcggcgatgtctctcccccctggcccggcggacagtggcaccggcaccggagacgactggttcctcgactgcggcatcctcgacgacctgcccgccgcggcctgcggagccttcccgtgggacgcgtccccgtcgtcttccaaccccaggtccgcccagatcgaccgaccgattcctcccttccccacgccacctcctatttccggaaggcacggatgctttgtttggcgtacggtcctggcgacaggtcccgtgaccccggcgttccgtatctttgcgatgagtatattgtggaatcgtgacgggcggatgaattgttttggtcagcacgggggtgtagtagtctactagatgcatgcgcgtggaggcgtctgatccgtagaggtggtttctttacactgcggatcttccagtctgttgctcgtgctataaacctgccgaggctgcttttgtacaggttaaattagattagagttcccaaacaaaaaaaatggtttcctaaaaaaacaaggctgctgagtttgcgcgctgcaagataacttgccttggtaggtttgttctcgtgtttccgtgactgtgcttatgagttatgacagtggaacggatgtattacgtgtgactatgaccaatgatttgctcaaacgattgagatggatgttttaattgattgatggcgattgtaataccagtcttgatgataagtggtgtggctgcgagtgatgggatgccatgtgttgctcggccatggatggaaatggaatcgtgacacctgactggagagccaaagatacaacttctcatgttctactgaaatgtatgcgctgatgctgctat

SEQ ID NO: 77685 - DNA, 984 bp, Zea mays
  Clone ID: MRT4577_170875C.1
atggctgaaaggtaccaactcccacggagttgcattcctccaacgacaaggcggaaggactacgggtatcccccatccgggggctcagaaggtggaaagacacgatgcataagggagcgcgaagacatggtcgcctttcaagggggtcaccctccttttaaaggcgactctccctacttgcgtccccagccgtcgtgggctgagtcttctccaacacgctccaaggtcctccccctatggtgcgggggctgggtcccacgcgtcatgcaagctggcccagagcagaagaagccaaaccgccgtgcgcggtgcatgcaaccgcccagcggttacgagcattcctccgctttcgcccagaccagcgggcgaaagggcgggcagccatgcaggcggcatgcaaccgcgccaagtgggcgcgcccctccgacttccaacgcacccagcatgggggcccacgcccacgcgtcatgcaaccggcgtgccggtcgctacgtgcaagcaactgcaccgccactcgcaccactgccacgcctcctcgactgtggaaccagtactgcgactcgaggcaaccctgcgtacgacccagcagtgccagccaggcccgacggtcaatacggccaaaaatgggccgacagtaacggcggtggcaggcgggcgggagcaacggtcatgtcgtcagccaagctcacgtcccatcctggggcaggaccgggaaagggggataccccgaaaaggacccttctccgtgaaggaaacaggctccgagcctccatactgatcagaggttcgaaggctggcccctcggaggggtctaacagccgcctcagagcgcgtgggctccacacccactactggtcagaggttcgaaggccggcccctcggaagggttcaacgaccgcctcaggccactcgggctccgcgcccactactgatcagaggttcgaaggctggccctcgaagggttcacagccgcctcggacatag

SEQ ID NO: 77686 - DNA, 1601 bp, Zea mays
  Clone ID: MRT4577_170876C.1
ccggccgggaatttggaaggcacttcgcagcgttggggctaaacttcgattttgaatcccgaacgaaagacaaatcagaactttggttcatgtcgacgcgaggtatcaaatatgaggaaatgtatattccaaaactcgagaaagaacgaatcgttgctattcttgaatgggatcgatcattactccctcaataccgtctcgaagcaatttgtgcagcaatggtagaagcgtggggatacaaagacttgcttcatgagatacgaaagttctatgcgtggctacttgaaatgcaacctttttctagcttggcaaaggaaggctcagctccatacatagccgaatcagctctcaaaaacttatacactggcactaaggtttcagaagatgagttaaatgtctacgcacgacaattcttcaaagatcttccagattacttagaagatgaagtcatagatgtcaaacatcaggctggtgaaaacgttgatgccgggcagaaaaccgaagcacagaaggaggccgaaaagaaagcagctgaagagaagaaagcaaaagaagctgaggctaaacagaaagaagttaaggaaaagacaactgagaaaactggtgatggcacatccacaggaaaagataaggatgtagatgctggaacttcaggttcagtgtcagtacctaaactcaaagctatgtctaagaagatgcgtctacctcaggcaaagggaaagaacattctccatcttgacttccttctgaaatataaaccacaacaacaagatttatcaaacacccgagcaaccagggctgagtttgataggtggtatgaagcagtacagaaagaatacgaacttgatgatacacaaatgacagttgtcatgagtggattgatggtttggtgtattgaaaatggttgctcaccgaacatcaacggtgtctggactatgatggacggagatgaacagagaacatttcctttaaaaccagttattgagaatgcatctccaactttcagacaaattatgcaccactttagtgatgcagctgaagcgtatattgaatatagaaattcaacagagaaatatatgccaagatatggacttcagcgaaacttaaccgactttagccttgcacgctatgcatttgatttctatgagatatcatctcgaactccagtgcgcgcaaaggaagcccacatgcagatgaaagcagcagcagtccgtggttcaaacacacggatgttcggtcttgatgggaatgtcggagaagcccacgaaaatacagaacgccacacagctggcgatgtcagtcgcaacatgcactcccttctgggggtccagcaaggccactgatacggggtttaacttttacgcagtaatttagtaatatataattaagctattgtggtgaggttttacctcgttagttttatctatatattatgctacgtacctactatgtctgcaagtgagtgaggttatacctcgacacttatagtaggcactattactagcttcgaatcacgagacggacgatccattgagtggttctaccacgaggatgcagcgagtttcgtggtgagagagaaaaaaaaaaaaaaaaaagcggcc

SEQ ID NO: 77687 - DNA, 845 bp, Zea mays
  unsure (1)..(845): unsure at all n locations
  Clone ID: MRT4577_170877C.1
gggaccctcgaggccggccgggccgggactcttctcatcttctcctgtcatgtatgcgctgatgctgctatgatattaattttgagagtaatttgcagtgatcttgttgtttgacctttttttttcttgctttactgaaagcggtccactccatatgctcagaattcaatgccttacatgtagctagttgtctgattactttcgtccatgaatggtttccagttaattggttgagaacaggtactagccaaatacgaaaaaaaagttcatgtccagttggagctgctaatcacccttatatttcacagtgtggaagtgggcagctatgtaaacgccaatgatgcattcaaggagcccaatgatgtcttcaaggagcctggcagcagtaaacgtttacggtcaggatccagtgatatgccaacatctaaagcttgcagggaaagaatgaggaggaacaagctgaatgacaggtttcttgaactggggtctgcattagaacctgggaagccagtgaaagctgacaaagctgccatcctaagcgatgctactcgcatggttattcagctccgttcagaatcacagcaactgaaggagactaatggcagcctcgaagaaaagattaaagaactaaaggccgagaaggacgagcttcgcgacgagaagcagaaactgaaactggagaaggagagtctagagcaccagatgaagctgatggcatcggctccagcctacatgccccatccgaccctgatgccggcgccttttcgccccagcgcccctagctccattccatgcccanggccaagctgcagggcagaagctgatgatgcccttcgtcggctacc

SEQ ID NO: 77688 - DNA, 531 bp, Zea mays
  Clone ID: MRT4577_170878C.1
atgcaggcggcatgcaaccgcaccaagggggcgcaccctttcgacttcaacgtgtccagcatggaggcccagacccacacgtcatgtaaccggcgcgccgattgctacgtgcaagaaactgcaccgccacttgcaccactaccgtgcatcctcgactgcagaaccagtaccgcgactcgaggcaaccctgcgcatgacccaacagtgccaaccaggcacatcggtcacgggtcagtcagccgcgggagaaggcgcgacggtcgatacggacaaaaatgggccggtagtaatggcgatggcaggcgggcggaagcagcggtcaagacgtcagcaagctcacgtcccctcctaggacagcgagagaaccctctcccacggcgtgaagacaacgcgcctgtgttccgttcctcgaacggctcgcgcacgcgcaacggctgccccgcgaaccactcgtcccgtcgcattaactctgcggcaggacatgcgacacctttggcaggagaagcaggcgacgcttcgcttcctccataa

SEQ ID NO: 77689 - DNA, 446 bp, Zea mays
  Clone ID: MRT4577_170879C.1
tcgtcatatcagcaaacggcagtgcgttatagaggatcttttttttttttttttttaaaaccaaatcttttttcggaggctgcttttattggtcatcccccacctgctatggggtgcacgtgtccctgcctctttacgtttctggatggcttgggctgggctggggccattctcacaactttaataggcaccggtggggtggaccggtacgcggaacacctcagggggtcgcagggcagcccgctggctggggctccctactgcgccagggcgcccgcggacgagctctttttaccaatcattatggccacagggctgacaccctcagatgacgatgatggacgtgcagtcctgctcacagcagcttcagatgatgatgctgcttgagcgtgccgctgccgccagcagcatcctgtactagccagctctgatgcagcagcagcagc

SEQ ID NO: 77690 - DNA, 393 bp, Zea mays
  Clone ID: MRT4577_17087C.1
acccaaccaaaaaattattaaaaacgcccctttaaaaaaaagggcagtcaaaaaaggaaggggccggaaaccaccaattgggaccgggcccccaacaaaacaaccaaaaaaaagggcaggggggaaccggggtccaacaaaaagagaagggggcaaggcatcaaaaggggagacaagggcacaacgaaggattcaaaggggtctttgatctttggcccacccccccaggaggcaagccccttggggcttggcccacccctccaggaggcaggcccaggaaaaaacaaaagcggccatgggggcctagcaaaccccacaacgggcttttattcacgggggggacggacctaaaacaaaggggtgggggataaaggaaggatgggaacgggacaa

SEQ ID NO: 77691 - DNA, 254 bp, Zea mays
  Clone ID: MRT4577_170880C.1
gagctcacaatacggcgggcgccccttatttttgttcgggggcctttataagagcacatttcggtttttcatttagaaaggtggtgtttgtatcgcactgagaactccaaaggcaagcacggatacaaggaaaacaaaacccccacttgtacaaaggtaaaacacaatcccttgccagaaaaaaactgggaaaaagttggagcactcgctttaaaaaccaggtaacccgcaaaataattccaaaacggagattt

SEQ ID NO: 77692 - DNA, 2695 bp, Zea mays
  Clone ID: MRT4577_170881C.1
gcacgagatgccctggacagctagtcacgaaacatgtcgttaaaggcccgtgtccacactttgcattatatttatccacgcatgaggatgctgagaagtttttcaggccactcatgggcaaatatgataaaagtagacttaacaaagcagcttttgtcaaagatcttacaaaatatgcaaaaccgacttacattggtgaagtcaacactgctttatttgagagagccgttgaacatgttatccggatcttgcgtgatgttggaattcaaacatgtgaatatattacagatgaggatgaaattttcaaatctcttaacatgaatgctgcagttggagcgttatatacaggaaagaagagagaatatttttccgagtacacacaggaagataaagcagagataattaaacaatcgtgcgaaagagtatatgagggtaagctcggaatttggaacggatctcttaaagctgaaatacgacccatagagaaaacggaagcaaataagacgagaacattcacagctgcaccattagaaacattactagcaggtaaggtttgtgttgacgatttcaatggtcaattttattcacaacacttgaatggaccatggacggtcggaataactaagttctacggtggctggaacaaattacttgagaagccaccagatggctggatctactgtgatgcagatggttcgcaattcgatagttcactcactccttatttgataaatgcagtgcttaatattcgattacgattcatggaaccatggaatattggtgaacaaatgctcagaaatttatacacagaaattgttttcacaccaattgcaacacctgatggatccgttatcaagaagtttaaaggtaataacagcggacagccgtcaacagttgttgataacacgctaatggtgattatagctttcaactatacgttgctatcgtgcggcatcgacttggaaaaggctgatgaggtgtgtcgaatgtatgcaaacggagacgatttgttactcgcagtgaacccaacacatgtcaacattctaaatgaatttggaaaacacttcgcagcgttggggcttaatttcgattttgaatcacgaacgaaagacaaatcagaactttggttcatgtcaacgcggggcatcaaacacgaaggaatgtacattccgaaactcgagaaagagcgaattgttgccattcttgaatgggatcgatcattactccctcaataccgtcttgaagcaatttgcgcggcaagtggttgaagcgtggggttacaaagatctgcttcacgagatacgtaaattctatgcgtggctgctcgaaatgcaacctttttctaacttggcaaaggaaggctcagctccatacatagccgaatcggctttgagaaacttatacactggtgctaaggtttcagaagacgaactaaacgtttatgcacgacaattctttgacgatcttccaaactatttagcagacgaagtgatagatgtcaaacatcaagctggtgaaaacgttgatgtcggacagaaaaccgaagcacagaaggaggccgaaaagaaagcagctgaagaaaagaaagcgaaggaagctgaggctaaacaaaaagaaaataaggagaaggcaaatgagaagactggtgatggcgcatctaaggagaaaacaactgagaagactggtgatggcacatccacaggaaaagataaggacgtggacgctggaacttcgggttcagtgtcagtacccaagctcaaagccatgtctaaaaagatgcgtttacctcaggcaaaagggaagaacattcttcatcttgacttccttctgaaatataaaccacaacaacaagatttatcaaacacccgagcaaccagggctgaatttgataggtggtatgaagcagtacagaaagaatacgaacttgatgacacacaaatgacagttgtcatgagtggactgatggtttggtgcattgaaaacggttgctcaccgaacatcaatggtgtctggaccatgatggacggagatgaacagagaacatttcctttaaaaccagttattgagaatgcatctccaactttcagacaaattatgcatcattttagtgatgcagctgaagcgtatatcgagtatagaaactcaacagaaaaatatatgccgaggtatggacttcagcgcaacttaaccgactttagccttgcacgttatgcattcgatttctatgagatatcatctcgaactccagtgcgtgcaaaggaagcccacatgcagatgaaggcagcagcagtccgtggttcaaacacacggatgtttggtcttgatgggaatgtcggagaagcccacgaaaatacagaacgccatacagctggtgatgttagtcgcaatatgcactccctcctgggagttcagcaggggcactgaaacggggttgaacttctacgcagtaatttagtaatatatacgtaagctattgtggtgaggttttacctcgttagttttatatatatattatgctatgttcctactatgtctgcaagtgagtgaggttacacctcgacacttatggtaggcactattactagcttcgaatcacgatacggacggtccattgagtggttctaccacgaggatgcagcgagtttcgtggtgagagacaaaaaaaaaaaataaaaaaaaaaaaaaaaaagcggcc

SEQ ID NO: 77693 - DNA, 864 bp, Zea mays
  Clone ID: MRT4577_170882C.1
atggctgaagggtaccaacttcgacgaagttgcattcctccgacgacaaggcggaaggattgcaggcgtcccccatccgggggctcggaaggtggaaagacacggtgcataagggagcgcgaagacatggccgcctttcaaggaggtcaccctccttttaaaggcgactctccctacttgcttccccagccgtcgtgggctgagtcttctccaacacactccaaggtcctccccctacggcgcgggggctgggccccacgcgtcatgcaagctggcccagggcagaaggagccaaaccgccgcgcgcaggcatgcaactgcccagcggttacaagcattcctccactttcgcccagaccaacgggtgaaagggtggacagccgtgcagtcggcatgcaaccgcgccaagtgggtgcgccccttcgactccaacgcgcccagcatggaggtccaggcccacgcgtcatgcaaccggcgcgccggttgctacgtgcgagcaactgcaccgccactcgcaccactaccgcgcctcctcgactgcagaaccagtaccgcgactcgaggcaaccctgcggaccgggaaagggggataccccgaaagggatccttctctgtgaaggaaacaggccccgagcctccctactgatcagaggttcaaaggctggccccccggaggggttcaacggccgcctcagagcgcttgggttctgcgcccactactggtcagaggttcgatggccggcccctcggaagggttcaacggccgcctcaggccactcgggctccacgcccactactgatcaggggttcgtaggctggccctcgaagggttcacagtcgcctcagacacagagcgagggatga

SEQ ID NO: 77694 - DNA, 456 bp, Zea mays
  Clone ID: MRT4577_170883C.1
atgcaggcggcatgcaaccgcaccaagtgggcgcaccctttcgactccaacgcgtccagcatggaggcccaggcccacacgtcatgtaaccggcgcgccggttgctacacgcaagaaactgcaccaccactcgcgccactaccgtgcctcctcgaatgcggaaccagtaccgcgactcgaggcaaccctgcgtatgacccaacagtgccaaccaggcacatcggtcacggggaccgggaaaggggataccccgaaagggatccttctccgcgaaggaaacgggccccgagcccccctactgatcagaggttcgaaggctggcccctcggaggggttcgacagccgcctcagagcgctcgggctccacgcccgctactggtcagaggttcgagggctggcccctcggaagggttcaacggccgcctcaggccactcagcctccgcgcccactactga

SEQ ID NO: 77695 - DNA, 584 bp, Zea mays
  Clone ID: MRT4577_170884C.1
aaaaatcaagttcaacagatttaagatcaataaatggcttgttcaacatcacagaatctgaataagctaataaccttgttgggtgtcctataaccacacttctagtgcttctttgcagatacacgtcgaaacaaatatcttttgggacgtttctatctccttacaccatactccaacccaacatcaaacctgcattggcatcttcactcactaatcttacacgtagcttgggctcccgttctttaataatttctaattgccataactcaactcatggacccattggaggcaggacatgttctacagctaggcgccaaactagcgtcaactctatatttgcaggtgaccaacattctaacagataataaggggttggctaatgctgctacctccggcttcgtgctccgcaacccagccattagtgcctcggaccaacccttgcggcactgattgatgctacaccaggaaggaactactaagtgctcaagatccaaagagagatgaacaaagttgcagacagtttaacaaaacaggcaaggcagggcatcaattacaggagattgtctttattcttgtcaagcttt

SEQ ID NO: 77696 - DNA, 570 bp, Zea mays
  Clone ID: MRT4577_170885C.1
atgaacagacaccgacactcaaggtgccattacaaacggaaccccggttccacctctgcaggtacgaacaaccccccacgattggagggcctgcggagcaacagaaggtcgacggacggatggctcaccgccgcccgctccagcagcgacgacgacaacttctgctccgagcggccgaacagtagcagcgatgacctcagggcggatgttgctgccataaggccctcgcccacgtccccactcgaggggcgaggacgagcagaaggccgtagagttggagggaccaggaaaggggataccccgaaagggatccttctccacgaaggaaacgggccccgagcccccgtactgatcagaggttcgaaggctggcccctcggaggggttcaacagccgcctcagagcgctcgggctccgcgcccactactggtcagaggttcgaaggccggcccctcggaagggttcaacggtcgcctcaggccactcgggctccgcgcccactactgatcaggggttcgtaggctggccctcgaagggttcacagccgcctcagacgcatagcgagggatga

SEQ ID NO: 77697 - DNA, 303 bp, Zea mays
  Clone ID: MRT4577_170886C.1
atgcaggcggcatgcaaccgcaccaagggggcgcaccctttcgactttgacgcgtccagcatggaggcccaggcccacacgtcatgtaaccggcgcgccggttactacgtgcaagaaactgcaccgccactcatgccactaccgtgcctcctcgactgtggaaccagtaccgcgactcgaggcaaccctgcgcatgacccaacggtgccaaaccaagcacatcggccacggggaccgggaaaggggataccccgaaagggatccttcttcgcgaaggaagcgggccccgagcccccctactga

SEQ ID NO: 77698 - DNA, 679 bp, Zea mays
  Clone ID: MRT4577_170887C.1
ccgggttggttaccaaacctcttctccaccaatcaacaaaagcgatatcctctacataggggagagatgaccaagcccgaaaggagataagaagctgtgccaaaattgctttcggatgtgggaggcctcaaaagctaaaaggcgagttttataggatgacgattagacatgctatgttgcttgatgtagaatgttggcctaaaaaaagacgacaggttcagtatataagtgttacagaatgcttatgttacgttggatttatggccatacaagaagggatcaagtctagaacgacgatatatgtgataggctaggggtagcaccaattgaagaaacgtttgtccaacattggttgagatggtttggacatgtcttcatgagagaccttcagaggcaccagtgtatcctaacttcctaaggcatgatagtaatgggaagagaggaaggggaaggccgacgttgacatgggaagaggcagtgaaaggagacttgaaatgatggaatatatccgaagatttaaccttgaataggagtgcatggaaaacaactatcaacgttcctgaatcttgacttgtggcttctgttgggtttcaactctagtctaacctaacttggttgacactaaaaggctttggtggtttatacttttaaaggctgcgcatgttaagaaaacctatgg

SEQ ID NO: 77699 - DNA, 531 bp, Zea mays
  Clone ID: MRT4577_170888C.1
atgcaggcggcatgcaactgcaccacggggatgcaccctttcgacttcgacgcatccaacatgaaggcccaggcccacacgtcatgtaaccggtgcgccggttactacgtgcgaaaaactgcaccgccacttgcgccagtaccacgccttctcgactgcggaaccggtgccgcgactcgaggcaaccctgcgctcagcccaacagtgccaaccaagcgcatcggtcacgggtcagtcagccgcgggagaaggcgcgacggtcgatatggccagaagtgggccggcagtaatgacggcggcaggcgggcggaagcagcagtcaaatcgcctgcaggctcacgtcccctcccggagcagcaggagagctctctcccacggcgtgaagacgacgtgcccgtgttccgtcccatgaacggctcgcgcacgcacaacggctgccccgcaaaccactcgtcccgtcgcattaactccgcagcaaggcaggcgacacctttggcaggcgaagcgggcgacgcttcacctccgccatga

SEQ ID NO: 77700 - DNA, 384 bp, Zea mays
  Clone ID: MRT4577_170889C.1
atgcaggcggcatgcaaccgcaccaagtgggcgcacccttttgtctccaacgcgtccagcatggaggcccaggcccacacgtcatgtaaccggcgcgccggttgctacatgcaagaaactgcaccaccgctcgcgccactaccgtgcctcctcgactatggaaccagtaccgcgactcgaggcaaccctgtgtatgacccaacagtgccaaccaggcacatcggtcacgggtcagtcagccgcgggagaaggcgcgacggtcgatacggccaaaaatgggccggcagtaatggcggtggcaggcgcgcggaagcagcggtcacgtcgtcagccaagctcacgtcccctcctgggacagcgagagaaccctctcccacggcgtga

SEQ ID NO: 77701 - DNA, 115 bp, Zea mays
  Clone ID: MRT4577_17088C.1
cgcaggacaggaggagcagcgatacaaaggtgttgagcattgccggcggttttggaacccgtggttggatatacgcatcttacttcaactataccgattgaggattacgaccaca

SEQ ID NO: 77702 - DNA, 122 bp, Zea mays
  Clone ID: MRT4577_170890C.1
gtcatgattaaaaccctgggccacatgggggttttactaaagcattattctacacttttttaaggcaaaacaatggggatacaaatggaatctgtgggtatttaaattataccacagttact

SEQ ID NO: 77703 - DNA, 551 bp, Zea mays
  Clone ID: MRT4577_170891C.1
atgcaggcggcatgctaccgcgtcaagtgggcgcacttctccgacttccaacacgcccaacatggagccccaggcccacgcgtcatgcaaccggcgcgccgaattctgcgtgcgagcaactgcaccgtcgcccgcgcctcctcgactgcggaaccaataccgcgactcgaggcgacccagcgcacgacccagcagcgccagcctggcgcgacggtcaatgcggccaaaaatgggccggcagtaatggcagtggcaggcggggaccgggaaagggggataccccgaaaaggatccttccccgtgaaggaaccaggctccgagcctccctactgatcagaggtttgaaggctggcccctcggaagggttcaacagccgcctcagagcgtgtgggctccacacccactactggtcagaggttcgaaggctggcccctcggaagggttcaacggccgcctcaggctactcgggctccgcgcccactactgatcaggggttcgaaggctggcccccgaagggttcacaaccgcctcagacacggagcgagggatga

SEQ ID NO: 77704 - DNA, 289 bp, Zea mays
  unsure (1)..(289): unsure at all n locations
  Clone ID: MRT4577_170892C.1
cccacgcgtccgttttacccgtgccctnnnaaaaccatgacaaaagagagaagataacggagggtcggccggtctacagggcccaagaggaacgcccccgagctgccgctcaaccacatccgcattagactctcatacaagaacgtcacggacctggagaaagcttgtgcggatctggtaaaacagccaaggaccccacttaatggtcttgggacctattccgattcctactgaatgcgtaaaaatgaacagtcccgagccgatttgccttgcaagaacatacacatcc

SEQ ID NO: 77705 - DNA, 1270 bp, Zea mays
  Clone ID: MRT4577_170893C.1
ggtgcccaccggtgcgccaacggtgcgccaccggtgcgccaacggtcgcttccaacggctagttctgacagagagccgttggactcatggcgcaccggacagtgaacagtccactgtccggtgcacaccggacagtccggtgcggtgtccggtgtgccactaaaattcatctccgaaggctgcgctctcgggtttctgcgactgggaaaactctgctgtggaccagcctggccccacctggcagagggtgcaccagacagtccggtgcacaccggacagtccggtgccccaaagccagaaacactaactcttgtttttcagctgattttcaaatcggttttcgctctaacttgtgtgtgagttctagagtgacatctagcactgtatatgagtgcgattgtgcaccaacactacactagaactctcttggtcaaactactcatcgacaacccctctttatagtacggctaaaagagaataaaagacctaactaaatcgcgagtgttcacatctccttgacactcggactccgtagaccttcaccttttgttccgtcgttttagccgtcgcttcgagttcttatctccgggattgttttcaccgttgtagtacttctacctgtcatgcgacctaacttaccatttgtctctgcaaaacatacgttagtcacatataatattacgttgtcattaatcactaaaaccaaccaggggtctagatgctttcagtggataaaaacaaaaatctgcatggcgccctgacaggacacgcttgctcggctgtgacaaaaaaatattttctgcgcaccctgccgccctcacacttctgtacggaagtgacaaaaaaatattttccttgctgcgcgggcgacacagcgaccggtcacaaaaaagttactgtgcgactggaaaaggtgagcagacagcgaccggacacaaaaacaaaaagctgcgcgcacggcactagactgtggctgtgaccaaaaaaatgtgcgcgcagtagttgttgatcggaagcggctgggcaaaaaaaaagaatcgctggctcccctgcagagttgaagcgaccggacagagaaaaaaaaataaaagaatcgctggctcccctgcagagttgaagcgaccggacagagaaaaaaaaataaaattctgcgtgcgcagcagctgctgacgagacagcccccaataaaaatttctggcgcgcgggctgacaacgctgtgcagaagcgtccaaaaaaaagttctgcgcgcgccctgacattgcatgcatt

SEQ ID NO: 77706 - DNA, 710 bp, Zea mays
  Clone ID: MRT4577_170894C.1
ctacatctcacaccccataaattctgatgaacgtcagattaagatacgtcctaatctcccgccgccgccgatgctaataccataatgctcgccggtgccgacggtgttgccactggcatctagcctctgcacatatgaaacaccatacacctgatgagcgatgaccaacgactgccacaaccggaactggaactcaatgacaacacctacctccaatctcatcttctacaagatccacatcactaacatgatgtggaagcaggatgacctcctgaaacaccatgtcaagtacatatgacttctgcgcaaaacatcgagctcgactattggatctactttgtctacgactatgactactgcaccgagaataactggcggaaaaacatgatcttctgcatcgactgtgcttctgatgcatgggggagaatggagcaagatcatctacttcaagtccgaactgaccatcatttcttacttgtaaggccttcaggtagatcttgagggcacctacttcggcaaagatgagcatgatcacatacaaccgcgctctctttgatgatattcatttatcaattgtccataccgaagaatatattatcatcataccatatgatgaaaacttctctgagtcacttatgtaaagactgaatacaccccttggctgactatggtctagacaatataccaccctcttcatcgtgagccatatt

SEQ ID NO: 77707 - DNA, 614 bp, Zea mays
  Clone ID: MRT4577_170895C.1
cggggaattcgaatacgaacgcataatatccataccatttgctccactagctacatgttaacatgtagagctgtagctaagatgcactatattttttactcaaggtatcggtgcaaatttgtcctaaattattagacactctagattgctcaaccgtatccatgcatgcgtgtattttcttacagctatgcgttgctatagaaattaaacaagttgacgaccaaactaactaattcgtgaaggtcgaattaatgttctgccacactgcttatcaccacatagatatcttggaggcagtggaagatcataaatcagctttagtgattgttgatggcttcggtcattgattgtgaggagctcttgtgcttatttttgtgagagattcatgaagagcaattctagtgaaatcttggatggttatagtgcttttgtagtgtggttcttatgttgcccatattatggatttgacgtgtgatgtcaattagcgtgtgaaccacctatcttcaactcaccacaaaaacaatgtaggttgcctgcaagcaaccactcctcatgaatatatcttgtgccatcccttgtcaaaaaaaaaaaaaaaaagcggcctcgagctccag

SEQ ID NO: 77708 - DNA, 179 bp, Zea mays
  Clone ID: MRT4577_170896C.1
ctggtacattgggccaggcggagaagaggaagacagaccagttcctgagggatgcagtggaaaccagactgagaatgctgatcccatacattgagcactggccccgggctctcagcatcctcatgctccctcacaacatcccgtctagcctgagcctgctcaccagcatggtggatgac

SEQ ID NO: 77709 - DNA, 288 bp, Zea mays
  Clone ID: MRT4577_170897C.1
acgacaatgcgcacttggatgcgaatggtcgtggcaacccagactccaccacttgaagtatatctgggttattcccagctcagggagaagatgccagatcatatctatgacattaaggacttactactgaccggatggaggaaggattctcgctcagtgaataacaagaggagcacgtgtgtgggatactgaagtagctctgctccaactactgggacacgattttgatgtttgattctgagaaggcagactagccagagtaaagtttttctgcacatgttaccgtcg

SEQ ID NO: 77710 - DNA, 463 bp, Zea mays
  Clone ID: MRT4577_170898C.1
tgtccggggagcccaacaccgtcgtcgtcctatctcctaggatatttttcttcagctctatcctatatgtgtcttcatctccaagccgccgcccatgggtgttgattttatcctgtgtgcgttgctgattttcctgcgcggtgtgctcatcttgtcgccagatctttttcctttcctgtatgagcgctcactccctcatctccctcctcagccagcactcgcctctggccatggacatcagcgcagcagcgcgtggtagaggccctccgacctccgagttgacctccggtcggcgtcgtttctctagtccccaactcgacgtcctcctctgccgcgggctcccactcctcctgacgcgcgttcctcccctacgctgggccatggtcaccgcgagccgtgaatttccctgcgcgcgtgcacccatgccaagctcccagcgttgccccccctccctctgctcgct

SEQ ID NO: 77711 - DNA, 535 bp, Zea mays
  Clone ID: MRT4577_170899C.1
ggttggtggggggttttttttttttttttttttttttttttttttttatttttttttttttttttttttttttggattgggccatcaaaaacataaagggggcggtagattcattaaaaccaaaactttattatgaccacgcatatattaggggggggaccacacatgaaaagggggggcggcttacgggattattacatatatagatagagagagaggggtagaggggatttcccaaatatcatgaatcaatagtagggcggaagggcagcggaaaccccacaggggttggggcggtagctgggcaactggtactgggagagtccacccatggccgggatgttctgggccatcataatggccatgggggtgaaaccctgggctgccaacaactgctgctgctgctgcataaaagctggctcgaacaggctgctgctgggggaagcggcaccctcaagctggataaaaatttgcagctgctgggcgacggactgcacgtccataaacctaatctggtggtggcaacactgttgcc

SEQ ID NO: 77712 - DNA, 2169 bp, Zea mays
  unsure (1)..(2169): unsure at all n locations
  Clone ID: MRT4577_17089C.1
cggncgcgtgggatttcatatttgattcataacttctgtgtgctccccttaaaggttgttgtctattaagaagtggaatacacgataatatgcaaccacaaattgtttatcgtgcggtatccaaaaagtttacatgtatacatctcttcagcattttagtttccatttagtatcttctactctctatttgaaagaagtgaagttcttccactccccaaacttataaatcatgttttactgttgtgaattgttttgcttagatgtagacaattttgttttttataggaacatagtttttcaaattgcaccccaaaatatgatagcttatatattttggttatgattaggagtgttgggctgctggctgcccgctttttttttcttttttcctttttaggacactttggagacaatagttcttatggcgcaagcaaattcggcacgaggcgctcctctgctctgtgactcatcgctcgacgacgaaaacactcgttggatgttgcgctgtgttccaatccaatccgctccgctccgctccgctccgcaacccaattcccatctccgccggtgagggattcgccacaccacacgccaggccgcccctcggtcgcggaacccacttcctgctggcgcgcgccgtcttccgttggtccggacatgtgtctttgacagatcgttacaggaggaaagaggtgcccctgtttgtccacaatggctttagctcatgccagcgccatgtttcctccctcgagcccctcacataaaacttgggaggacccgtcattcttcaagtggagaaagcgtgaggcgcatgtaccactgcgctcacaggacacgctggaagcggctctgaagtattggcatgaacggaggaatgtgaactatcacaatgctgacactgctgtctggaacgatgacgctgttcgcggtgctctggaaagtgctgccttttggtccaagggcttaccgtacgccaaatctctaagcggatactggaaattccttctgtcgccttcagcggaaagtattccggagagattctattatgctcattttgatgattcgaactggtcgggtttgccagttccctcaaattggcaaatgcatgggtttgaccgtccaatctacacaaatgtcacatatcctttcccattgaacccaccatttgtgccggctgataatcccacaggttgttacaggacagtctttcacatcccaaaagagtggaaaggtcggaggatcttgctgcactttgaagctgttgattctgcattctttgcttgggtaaatggagtactagttgggtatagccaggatagcagacttcctgctgagtttgaaattactgattgctgccatccttgtgattcggacaaggaaaatgttcttgctgttcaagttatgaggtggagtgatggctcttatcttgaagatcaggatcactggaggttgtctggtattcacagggatgtgctcctactatcaaagccacagatttttatcacagattacttcttcaaagcaaccttggatgaaaatttcagtttagccgatattgaggttgaggtggagattgactcacacaagcaagaccaggagcacgtcccaactttgtctattgaagcaacactcattgataactctggactatctaacagtatagatgctgatctttcatccgctaatgcagtcaatttgaaaccgaagccaaaacgaactcgaagcccttgtcttggttttcatggttatgtacttggtggaaaaatagaaaatccaaaactttggtctagtgagcatcctaacttatacacgcttgttgttctccttaaagatgccaatgggaagcttattgactgtgaatcatgccaagtgggcattcgtaatgtggtcatggcacacaagcaaatgctcgtcaatggatgtcctgttgtgctaagaggtgtcaacagacatgagcaccatccacgccttggaaagacaaatttagaagcatgcatgatcaaggacctgattttgatgaggcaaaacaatatcaatgctgttagaaatagccattacccacagcacccaaggtggtatgagttatgtgacatttttggtctttatgtcatagatgaagccaacattgagacacatggttttgatgaatctaacactttcaaacatcct

SEQ ID NO: 77713 - DNA, 307 bp, Zea mays
  Clone ID: MRT4577_1708C.1
cacaagctttttttttttttttttttccaaacatccttttccctatatattattcctttccatttaaagggtgcattcaggtaatggctcaaactgccacccatggtgaggggtgacactccgttactcatcgccgatgagcgagggaacggcttttgggtggatggtctactgcttcattaaatgaatactacgaaaaaaaaaccacaaacaggctgggggcccttggcggcgaccccgcgggggctgtctgtggatagatccatcacacttggggggccccgtggccggttttccggtcgggctc

SEQ ID NO: 77714 - DNA, 366 bp, Zea mays
  Clone ID: MRT4577_170900C.1
ctggcgttttagcatacgcgattttcacgatattagcatcacagaagtcgacgctcacgtggcacgttgcacatggcttcatgacgagtcagctacatgacgaagcgcactaagaaggcacgaattcgcggcaaagatggaaccatgtatggtgctagctagcagaagcacattatgactatggaggcatctcagcattcctagaacttacgctagatgtgtgggaagtttgcttgtaacaggaaagcaaatcgaatctgggggcgcaaagactgtgggaaaggcaaagcttgtggcgcatacaccaagaacactgctaagtccgacaccgtcagacacacgatacggccactggaggaacacact

SEQ ID NO: 77715 - DNA, 593 bp, Zea mays
  Clone ID: MRT4577_170901C.1
gcccctcctcgagtttttttttttttttttttttttttttttttttttttttttttttttttttttgggggaaaaacataccttttttctttacaaactacttccccattttttttttacaaacaaataataaaacccctaaaaaggaaacctttaaaaaaatttggggggacggggctctccaatcataaaaaaaaatcatgtgggacctttgggtcccccaaaaataaaaacctaaaaccgggccttctttataaaaacttcattttccgttttcattcttaaaacatcctgggcactttggttcgtttttttaaacccccgggaaatttttacaacaaaatggatctgccctttggccagccccttttacagggtaaaataaaaaccggctggttggaaattataatcgggccaaattatataacccaatttttttgaactaaggggccgttggttttacccgattatataggggggattataataaaagggggggggggataaaatttcactgcgggaccttaaataacctgaaataacctagtttggaggaccttattttagtttatttaggaccccagggggttatt

SEQ ID NO: 77716 - DNA, 735 bp, Zea mays
  Clone ID: MRT4577_170902C.1
gggatggcaccataacggttaatgtttttgacgaccccgccagtagcaccactttacccatgacggaaggtggtccctccatcaatgctgttcaagttcccctgctcacgttggattcggccctggtcaagcttggcttgccccaaccccaggtgattaaaatcgacacccagggcaatgaattgtccatcctccggggagcagcccaaacattagccaaagttgatgttttatttctggagtgctggctctatcggggttacggtcccaaaacccccctgttaacggagattgcccattggttgttgccattcaactttcgcctttgggacgtttctgagccctaccgtggtccccagggggagttgaccactctggattgcattttcattaacaccgccgccggcctagttccaaactggtactactagcttttccctttcctctagaaagtgtctgaaaagtgcaaagctaggtgttcatccccctaaatcaacccactaaagctctggcggagggcttttgtgacagttccccccttcccaaggggggctaggggggattaaacagtcaaaactcaactttacctagccggagccttaattacgaaagtaagggagcttaacaaaggtgaattcttgccccgcttaatatagtcattctggatttttgagcgatgctggggaaaatatctctgcattttcttattcgtaggctataatttgcctggagtag

SEQ ID NO: 77717 - DNA, 156 bp, Zea mays
  Clone ID: MRT4577_170903C.1
ctgcgtttttctttcggtttactggagccgtcccgcgctctccgatgctcgcgctgctctggcctcatatccggtctctacagatggcgagagggaggataggaggcatttcccatcactcagattagagatcacataagcgcagcgctactgctg

SEQ ID NO: 77718 - DNA, 2513 bp, Zea mays
  Clone ID: MRT4577_170904C.1
tcctcattcgcgaaaagaaaaacacaaggcgaccgcagagggcaggacaggacagagacgccgaggctaggcagtccatctgttggggtggccagtggggatctcgccggccgggaggtctggggggcgggggctgccaaacttcgccatattggtgaatcactgaatccgcccctgccagcaaccgttctgacgtggcggggtggggcaggatccaaatggcggcggcaatagaggaactgcggctcctgggatccatccctgtactggaaggtccgggagaggtcgacggcgtggtgggtgaggaagggcgaccgcgaggcggcggcgacgacgaggagatcctgcgattcatggactcggtggacagctacctgctcctcatggactccctatcctccgctcttcgtcaggtatgcgatcctgcagtattggtatttgttccccaacatggcatggtctattcactcttgattcagcggaacacatgcggcgaaatactaatcggtcggtgtaacaagaaacacagtcctttgctttagtaatttgcacaatgttacaaaccctttgagcagaaccgtgtttctacccattcttgttgtaacataacctgaggacagtgagagagattttactgagccaaagatgaggcatcgaggatcagttactaccccagaaaagggaacccatgaaagtgcaaacaccacaacactgtctacaggtgctgatgctagcaaaagtgtttaaagagctagaccaacagatatgatcagtctttggtatgatatgtatccttaaaactaagaaccccccaaataaattatgaatagagcgcattagttgtgctctaagctgttatatacatacttcattatgtgcgatatgttgccctaccaactgcattttgtagactatactttgtgacagtgtccctgattaaccttgaattacgcttgcaaagatcaattttccaaagcctgtccgttctctattatgttcaacttgtagtgagtaatgactatgtgatgtttggacgtgatgctccgacatactcttggcttttgatttttggattgagagtgaaagttatctttgcctgtttccgccacactgtatcatacaacatgaatacagggctggcttgacctggcaagtgctcgccattctatgggcacatcacgcgtttcgagtacactgtttgatcacaaggagcagtctgctgccactaagcttcaagttgttgatcatgatggcctgaaatcatcagagtcaataccacactttgctctatcaaagtggtctttgcaagaagaatgtcactccacctatgatctcagtgagagagattttactgagccaaagatgaggcatcgaggatcagttactaccccagaaaagggaaaccatgaaagtgcaaacaccacaacactgtctacaggtgctgatgctagcaatcgtgtaagtttggtacaaaagttcctttcttcaaaggcattggaatgtcagatagtgaaatactgcttagagggagcaaagatttatgactaattcatgagctatgttcaatgcaaaaacataggttttatgtgcttgagttaccagtggctgaaatttgccccttgatatgcttgatccaagatatgccaatggttaacataaataccacaagaataatatattgcagtatgctaagccaatttcagttaggtttctatcaacagctgggtatggaacagctgtattttggtacagtgaataagaaattgctatacttctgggatgttcagatttgttgattctccttttggccattttgcacattaggttcaaagagcgagatcaaaagcattatcagtctttgggggattggtatccccaaaactaagaaccgcccaactttcatttgaaacaggttttgattcttcgtgacaaaattgtatccagattaaactatttttttatctaactgtacttgtatttgttgcagcacttgacttgattgtggagctagcaaattcaaggtcgaatatgttagctagtttctcccacttaaaagagtgaagacattatgttatgagattttgtaccttgggcaccatctattcagcactcatgagatcgcagcaactgtaaactaagttttgagatccagtatattttaagaacgactaaatagcatataatgcttgctatgctgattactcgctgcgaaggtgtagctcacatatctgtgaatgcgagaacacatgctggaagcagtcagaaattgcttgaggcaaccagaaatcaaccaaccatcaaaatgattcctttcaacacccgatgcaagtcatgtatggatatggtttagagtatgcgtttggcaccctggtgggctctgcttgtctatactgttggattgaattattcagacggacactaacggcggcagacatctggacactccaataaaaaaaatgaaatctgtacttgtataacttctatcaagcaaaatgacgtgtttatgttgcttt

SEQ ID NO: 77719 - DNA, 1376 bp, Zea mays
  Clone ID: MRT4577_170905C.1
aattcggcacgagggacgagccgccgccactgcggacgcgggggaccatagcgccgaacgggacgcgctgctgcgtcgccccctccccgcgcctcacgtctgcactggccggccacgccagctaatcaagtccaggagtaccatttcctcttccggccacggtgggttctccgtttcaacggacctccggttcatggcgagcgaggcgaaggagatgaagtacaggaggaggggcagggttcccgggccgccggagcacgggcaacgcagcgaccggagcggcgcgctggactgggccgcgctcaagcacgaccccgcggagctgctccggaagctcgacgaggtacgggaccagatcacccgctcctgcgagctcatggggccgccgccgccggaccgccaccgcgcgatgagccgccgcacggtctcgctgcgcccctcgtacgccgagccgccgcacgcggcaggccgggcccccgaccactaccgctcgcgctacgccgaccgcgtggggactagcttgccggggagctcgtatgaccaccggtcgcagcgctccgtacccgacgacgaggcgtactccaggcagccgttccggcagcagtactaccatgagaggcagcgggagagccacggctttggccacgggaggcgccaccatagctcctgccagtgcgcgcactggctccagagccagcgggcgccggtggtggcgccgccgaaggaccacgtcccgatggccaggtacttcgcgggtcaggggtcctttcggttcgatagatcccagccaatctcgtcggagcttgaccggaggtctgtggcttcgtctctctactcgcacctttccgtgtccaagaggagggtggagtatttcaggaaaaagctgagaagttctgccggccgacgaggggcgccgcgccttttctcgtgtgcacctcctgttcccatctcctgcagctgccgcaggggaagttcgcaggccggaagaaggatcaggtccagtgcggttcttgttcagagatcattgctttggagcctaagcaagtgaaagttcatccggtgatcacgccaccgtctttcccagtatcaaaaggtgtcagaagtaaaggttccagtcaccgggacaccaagagttccgggtggtatcaacatcaggatgatgacaacttcaatttctataagccgcaagcacagaagaaggattttgctgacaatatgtcaccgtcttctaccgccagttatggtagaacagacagtgagcatgggtcaaacaggagcgttcagttaaaatcagtgcctgccagcaggtctagattttcaaatgacccaaaggatatattatgtcaaggagatacaggcggtcaagtggaagcttc

SEQ ID NO: 77720 - DNA, 1207 bp, Zea mays
  Clone ID: MRT4577_170906C.1
taagcagtggtaacaacgcagagtactttttttttttttttttttttttttttttcactagcgggtgaaagggcggaccgccacacaggcggcatgcaactgcaccacggggatgcacctttttgacttcgacgcatccagtatggaggcccaggcccacacgtcatgtaaccggggcgccggtttctacgtgcgaaaaactgcactgccacttacgccaatgccgcgccttctcgactacggaaccggtgccgtgactcgaggcaaccctgcgcatggcccaacagtgccaaccaagcacatcggtcataggtcagtcagccgcgggaggaggcgcgacagtcaatatggccaaaagtgggccagcagtagtggcggcagcaggcggccggaggtagcagtcaaatcatctgcaggctcacatcagctcctggagcagcaggggagccctctcccactcgcgtgaagacgacgcgcccatgctccgtccctcgaacggttcacgcaacggctgccccgcgaaccactcgtcccgtcgcattaactccacggcagggcaggcgacacctttggcaggcgaagcgggcgatgcttcacctccgccatgatgaccgcgtcaaaaaaaaaggtgtgccacatcgtttaattgtgtatccttttcctcttcccctttctctctcttgctacagggaccgggaaagggggtactctgaaagggatccttctctgcgaaggaaacgggccctgagccctcctactgatcagaggttcgaaggctggcccctcggaagggttcgacagccgcctcagagcactcgggctccgcgcccactactggtcagaggttcaaaggctggcccatcggaagggttcgacgacctcctcagtctacttgggctccgcgcccactactgatcaggggttcgaaggctggccccccaaagggttcgatagccgcctcagaacacacagagcgagagatgactcatggtacgtccgatacatggccgaggctcgggctacgctcccgaggtaccctaggacatttccgagaccagcaggagcgattctgtaacggaatcccatcagagggaggcattgaaccctcggaccctatcaaacgggaccgggtccggcaaatcacatgcaggtacttttggagcgcgcctctgggccactccgcgtactctgcgttgttaccactgct

SEQ ID NO: 77721 - DNA, 420 bp, Zea mays
  Clone ID: MRT4577_170907C.1
atgcaggcggcatgcaaccgtgccaagtgggcgcgccccttcgactccaacgagcccagcatggaggtccaggcccacgcgtcatgcaaccggcacgtcggttgctacgtgacaggcggcgcctcaggcgggagaagcaagcgacgcttcgccttcgccataataaccgcgtcgaaaaagggaccaggaaagggggataccccgaaaaggacccttctccgtgaaggaaacaggctccgagcctccctactaatcagaggttcgaaggccggcccctcggaggggttcaatggccgcctcagatcgattgggttctgcgcccactactggtcagaggttcgatggccggcccctcgaatggttcaacggccacctcaggccactcgggctccacgcccactactgatcatgggttcgtag

SEQ ID NO: 77722 - DNA, 400 bp, Zea mays
  Clone ID: MRT4577_170908C.1
tcggtctaagcagcctaaaaaaccgtgtcgctggcctgctcagttcctttttgcgcagccggttgcgccaggcttcaccgtccgagtgccagcgatcccggttgggtccgcgaggcggagaccgtcgggggcgcaccagctgcggggcaaggaggtttggtggagcatccgcacccagaggccccagctaagtacctgcatctcccagtgccgctgccacccgatgcggccttcttgctctacggccttactggaccacgccggccctctgggcccaaccggcgctcctcttatgcctctccggtggagcgtgccctttttcgaccaattgtggcgcctgtcgctgttctttctgcgctggtggtatctgaatgtggcgacacgacactacgatccttca

SEQ ID NO: 77723 - DNA, 557 bp, Zea mays
  unsure (1)..(557): unsure at all n locations
  Clone ID: MRT4577_170909C.1
ccgaccgacagcaaagacaaggagagggggaaggacccggacgcggaggcgaaagcccncgaggagcacaacnaccggacgaacgacaccaaccgcgcggcgcnggnggggcggaaacaggagaccaacangcncaccaacgagggccggggggggagggcccanccgccanngccggcaagcacggaacacagaccgaacaagccagcgagcaccagaacgacaccgncgacngccagccgacggggccccagggaggcaagcacgacacacgaaccgganccaaccgcaccggccccgaggagcaccccaacaagnacacacaggcaacccaaangccgacggcagaagaaacccccgacgggcagaaggacaggnnacggcagaacaaaggcaaaaagacagacgaaaacgcaggggaagaaaaaaagagaagagggccaaaagnagagaccaagaaaaccaacagaagccgaaaacaccaagcacccacagaaccccccacgggaggagagaaaaaacnggaaaaaacaaaaaaaaccccggcacaaggaagc

SEQ ID NO: 77724 - DNA, 798 bp, Zea mays
  Clone ID: MRT4577_17090C.1
tgtctctgtgtgtgtgtgtgccctcacctatcacctgcaagttgctgctacatgggggaaacttttcccgtatgtcggcctgcagcagatctcaaaactctgaaatgagtattgcggcgagcaacggacatgaccaggatgccttgggacaggaaccatagctgagaattctgacaataattatcgggcaggagaatagctcagactttcgtcagtatttctgcaccgtccctagtcaccagtatggtatgctcaaactgcgcagcccagctaccatcagcagtgacagtcgtccatccatcttcccatgtaacacactctgttttctccattgtgagtataggttcaattgtaaatgtttggccctcaaccatacgccctgagttttcgttggctacaaaatcaagaattccggacgcgtatgtatactaaaattcaagcatgatttcaacaggacattatggcaactgaccccccaaaaaactcaactaggcaagagagacatcccactgattttgttctcaagaagttcatgccagctttcaaacctggattggtcatgggggtttcattgatccctggatttcaatggtctaaccagtgtaaatcaagataaactggcttataatgacagcgtagacagttctgcaaggaaataagacgtttccatcttgccagtgataatttaagcatacatgtagctaaaatgtttagtaccacatattgtcagtctaaagaagccaatgtgcctagcaagcgatggaattgaaaatttaggacatctgaacacgaaaccag

SEQ ID NO: 77725 - DNA, 684 bp, Zea mays
  Clone ID: MRT4577_170910C.1
atgcaggcggtatgcaaccgcaccaagggggcgcaccctttcgacttcgacgcgtccagcatggagccccaggcccacacgtcatgtaactggcgcgccggttactacgtgcaagaaactgcactgccaatcgcgccagtaccgcgcctcctcgactgcggaaccggtgccgcgactcgaggcgaccctgcgcatgacccgacagtgccaaccgagcacatcggtcacggggaccgggaaaggggatactccaaaagggatccttctccgcaaaggaagcgggcctcgagccccctactgatcagaggttcgaaggctggcccctcggaaaggttcaacagccgcctcagagcactcgggctccgcgcccactattggtcagaggttcgaaggctggcccctcggaagggttcaacggccgcctcaggccactcgggctccgcgcccactactgatcaggggttcgtaggctggccccagaagggttcgacagccgcctcagagcacgcagagcaagggatgaccctgggctcgggggctgctctcgcaaacccggctccagccaaaccgttgacagcgtcaacataccagcccgagaacttgggactcgactatgcacccaggctatggccagttcacatgagggaacaaccagaccggccaaagcatcatgaaacgcgctaa

SEQ ID NO: 77726 - DNA, 789 bp, Zea mays
  Clone ID: MRT4577_170911C.1
atggttgccttccaagggggtcaccctccttttaaaggcaactctccccacttgcgtcctcagccgtcgcggactgagtcttctccaacacgctccaaggtcttccccctaagacatgggggctgggtcccacgcgtcatgcaagctggcccaggacagaaggagccaaaaccgccgtgcgcggtgcgcgtaactgcccagcggttacaagcgctcctccactttcgcccagaccagcggatgaaagagcggaccaccatgcacgcggcatgcaaccgcaccaagggggcgcaccctttcgacttcgacgcgtccagcatggaggcccaggcccacacgtcatgtaaccggcgcgccggttactacgtgcgagaaactgcaccgccacccacgccagtgccgcgccttctcgactgtggaaccggtgccgcgactcgaggcgaccctgcgcatgacccgacagtgccaaccgggcacatcggtcacgggtcagtcagccgcgggagaaggctcgacggtcgatatggccaaaaatgggccggcagtaatggcggtgacaggcgggcggaagcagcagtaaagtcgtcagcaagctcacgccccctcctgggacagcgagagaaccctctcccacggcgtgaagacgacgcgcccgggttccgttcctcgaacggctcgtgcacgcacaacggctgccccgcgaaccactcgtcccgtcgcattaactctgcggcaggacaggcggcacctttggcaggcgaagcaggcaacgcttcacctccgccataa

SEQ ID NO: 77727 - DNA, 828 bp, Zea mays
  Clone ID: MRT4577_170912C.1
atggacgggtcttctttccgagccaactctgtctctgttcacgctgacaccgctacccctggcacggggactgagtcttctccaacacgctccaaggtcctcccccaacggcgcggggactgggtcccacacgtcatgcaagccggcccagagcagaagaagccaaaccgccgtgcgcggtgcgtgcaaccgcccagcggttacaagcggctctccacttttgcccagaccagcgggcgaaagggcgggcagccatgcaggcggcatgcaaccgcgccaagtgggcgcacttctccgagtcccaacacgcccagcatggaggcccaggcccacgcgtcatgcaaccggcgcgccgaatgcttcgtgcatgcaactgcaccgccacttgcgccaccaccgcgcctcctcgactgcggaaccaataccacgactcgaggcgacccaacgcacgacccagcagcgccagcctggcgcgacggtcaatgcggccaaaaatgggccgacagtaatggcggtggcaggcgggcaggagcagcgggaccgggaaagggggataccccgaaaaggatccttccccgtgaaggaaccaggctccgagcctccctactgataagaggttcgaaggctggcccctcggaagggttcgatagccgcctcagatcgcgtgggctctacacccactactggtcagaggttcgaaggtcggcccctcggaagggttcaacgaccgcctcaggctactcgggctccgcgcccattactgatcaggggttcgaaggctggcccccgaagggttcacagccgcctcagacacagagcgagggatga

SEQ ID NO: 77728 - DNA, 516 bp, Zea mays
  Clone ID: MRT4577_170913C.1
atggctgaaaggtaccaactcccacgaagttgcgttcccccaacgacaaggcggaaagactgcgggcatcccccatccgggggctcggaaggtggaaagatacgatgcataagggagcaaaaagacatggtcgcctttcaagggggtcaccctccttttaaaggcgactctccctacttgcgtccccagccgtcacgggctgagtcttctccaacacgctccaaggaaccgggaaagggggataacccgaaaaggatccttctccgtgaaggaaacaggctccgagcctccctactgatcagaggttcgaaggctggcccctcggaagggtttaacagccgcctcagagcgcgtgggctccacacccactactgttcagaggttcgaaggccagcccctcggaagggttcaacagccgcctcaggccactcgggctccgcgcccactactgatcaggggttcgtaggctggccctcgaagggttcacagccgcctcagacacagagcgagggatga

SEQ ID NO: 77729 - DNA, 143 bp, Zea mays
  Clone ID: MRT4577_170914C.1
aagcagcaagacgacacacattatcatatatatgatagatagggatggatggattagatgccccaaccatcaccaatcactcataaggcggaatggcatggcgacacgccacagggcagggggcggtgcgaactaaccacata

SEQ ID NO: 77730 - DNA, 477 bp, Zea mays
  Clone ID: MRT4577_170915C.1
atggaggcccaggcccacgcgttgtgcaaccggcgcgccggatgctgcgtgcgagcaactgcaccgccgcccgcgccactaccgcgcctcctcgactgcggaaccaataccgcgactcaaggcggcgcctctggcaggggaagcgggcgacgcttcgccttcgccataatgaccgcgtcgaaaaagggaccgggaaagggggataccccgaaaaggatccttccccgtgaaggaaccaggctccgagcctccctactaatcagaggttcgaaggctggcccctcggaggggttcaacagccgcctcagagcgcgtgggctccacacccactactggtcagaggttcgaaggccggcccctcggaagggttcaacgaccgcctcaggctactcaggcttcgcgcccactactgatcaggggttcgaaggctggccctcgaagggttcacagccgcctcagacgcagagcgagggatga

SEQ ID NO: 77731 - DNA, 1705 bp, Zea mays
  Clone ID: MRT4577_170916C.1
aattcggcacgaggcgagcacacgcgcagagcgggggcgaaggcaagagcaaacagagtagccgccgccgccgtcgccgtcgtcgtcgtgtgtgtgtgtggagaggaaagaccgggttttgttttttacggcttagcgttgagcagctgagatgttgcgagcgctggcggcgaggtgctgcggccactggccgccgggcgccgcggcggcggacgggatgctgtggcaggcggagctgcggccgcacgcggcgggggagttctcgatggccgcggcgcaggccaacctggccatggaggaccaggcgcaggtgctggcgtccccggccgccacgctcgtcggcgtctacgacggccacggcggggccgacgcatcccggttcctccgctcccggctcttcccgcatgtccaacgcgtcgtgcaggagcaggggggcatgagcgccgaggcgattcggagcgcgttcggcgcggccgaggaggagttccataggcaggtgaggcaggagtggaggagccggccgcggctcgctgccgtgggctcctgctgcctgctcggggccatctccggggacacgctgtacgtggccaacgccggcgattcccgcgccgtgctcggccgccgagtgcccggcggcggggcggccgtcgccgagcggctctccgccgagcacaacgcggcgtgcgaggaggtgcggcgcgagctcgccgcgctcaaccccgacgacgcgcagatcgttgtgcacgccaggggagcctggagggtcaaggggataattcaggtgtcgagatccattggcgatttttatctcaagaaaccggagtatagcctggaccccttgttccggcaagttggggcccctattgcgctgaagaggccagctctcagcgctgaaccatcggttcaagtacgcaagctgaaaccaaacgacctgttcctgatatttgcttcagatggcctttgggagcacctcagcgacgatgctgcggtgcagattgtcttcaagaatccgagaactgggatagccagcagactggtgaaggctgccttgaaggaagcgaccaggaagagggaggtcaggtaccgtgatctgaggacgatcgagagaggggtgaggcggcatttccacgacgacatcagcgtcgtcgtggtctacctcgatggccaccgcgagcgtcgccacaccagggtcgttgactcgagcagcaactgcaccagtgcgcccgtcgacatccactcctccaactcccgctagtttccggagccccttgcaacgcgagctgaactctgggtgggaggtgaggtgggtgcagccgtagccatcggaatcggaacaagtcgatatgtacataggtaggactgggtgcgtggcattttgatgccggagaagatcatttggtctcgaaactacttagcacaagtggttaatgactgcatttttcttgtttctttttgtctgaaaccagcagcaagcccgtccattggatcggacttatttttaaggtaagaaatagttgatgacgaactggaggttggttaatggagaccaaagaatatatgctctgctcagtgctcaggatcatagaatttaggttccggcctgagaatatatactctttgcaacggatgagatgctcttatttcatttagcatcgtttttttttgtcggaaacttctttatgtatgcagtgccaagattaccact

SEQ ID NO: 77732 - DNA, 384 bp, Zea mays
  Clone ID: MRT4577_170917C.1
atgcaggcggcatgcaaccgcaccaagggggcgcaccctttcgacttcgacgcgtctagcatggaggcccaggcccacacgtcatgtaaccggcgcgccggttgctacgtgcaagcaactgcaccgccactcgcgccactaccacgcctcctcgactgcggaaccagtaccacgactcgaggcaaccctgcgtatgacccaacagtgccagtcaggcgcatcggtcacgggtcagtcagtcgcgggagaaggcgcgacggtcgatacggccaaaaatgggccggcagtaatggcggtggcaggcgagcggaagcagcggtcaagtcatcagccaagctcacgtcccctcctgggacagcgagggaaccctctctcacggcgtga

SEQ ID NO: 77733 - DNA, 478 bp, Zea mays
  Clone ID: MRT4577_170918C.1
gtgggagtgccgcagctggttttttttgcgctctcctctccgctggcgattcatacccccggcgagggagcggatacactgagtatattctgcccctccaatagggacggaggagatgccggggatgcctctgatcgatgtcccccgctggaatgtgaaagccccatccgtgccagtgatgctcgaattcgcagatcaggacgtcgagcctcatgacccgcctgggggctagagcaaaggcaccatcttctggagaggattaaaaattaccgctttagtgcagatgtgacttccccaccgccgcatactgctgtaggaggccatgctgcactccttcctaagcgtacaactctgactgaagatgagattgaggctattatgctgggggactccatctgatatcacctcgtatggattgcaattgctatgaccatcaattatatcgcttaccccgatattattgcccttcaacctctgt

SEQ ID NO: 77734 - DNA, 1049 bp, Zea mays
  Clone ID: MRT4577_170919C.1
ggctggaaaatctgaatttttcacataagcacaagtaagctaacatgtgaaggttgtgatgtcaggtgtcgagatccattggcgatttttatctcaagaaaccggagtatagcctggaccccttgttccggcaagttggggcccctattgcgctgaagaggccagctctcagcgctgaaccatcggttcaagtacgcaagctgaaaccaaacgacctgttcctgatatttgcttcagatggcctttgggagcacctcagcgacgatgctgcggtgcagattgtcttcaagaatccgagaactgtaagtgatcctcattattataaggtctttatctctacgctcacgttgtttgcagcctagctaatcatgtgtgttggcaaactttgttcaggggatagccagcagactggtgaaggctgccttgaaggaagcgaccaggaagagggaggtcaggtaccgtgatctgaggacgatcgagagaggggtgaggcggcatttccacgacgacatcagcgtcgtcgtggtctacctcgatggccaccgcgagcgccgccacaccagggtcgttgactcgagcagcaactgcaccagtgcgcccgtcgacatccactcctccaactcccgctagtttccggagccccttgcaacgcgagctgaactctggcccacgcgtccgagctgagggactgcagtgccatagccataggaagggaagaactcgagatgtacatagatagcgtgggtgtgtagcatcggaaaagatcatttggtctggaactacgtagcgtaattggtcagtcagatcattttcttgtttctttttgtctgattatgcttacccagtggtaaatccgtccattgtatcggatttaatttaaaaattctgtaatacagaggtgtcgtgaaatagttgatgacgcaactggaggttagtggtgactggtgaccaaagaacatatgctctgcttatgatctagaagttaggttgtgacatgagaatatatactatttatttgcaacggatgagatgctcttatttcatttagc

SEQ ID NO: 77735 - DNA, 270 bp, Zea mays
  Clone ID: MRT4577_17091C.1
ggcttccacatcacgcagtcaataaacgtacctaaatgatttgcataatgcacatgaatgcatagcactgacttcactgtacaactaaaattcttcacataaaatgctgatagcgcctaccggcaaggcactaaaattactaagcaaataaattcaacttaccagcatcaaacatgactcactactcgcgagaatgctaataaatcctggctcgagcttatcgttgaacacctgacggtgtggtgcggcttcactttcttctccatatct

SEQ ID NO: 77736 - DNA, 525 bp, Zea mays
  Clone ID: MRT4577_170920C.1
atgcaggccgcatgcaactgcaccacggggacacaccctttcgacttcgacgcatccagcgtggcggcccaggcccacacgtcatgtaaccggcgcgtcggttactacatgcgaaaaactgcaccgtcacttgcgccagtaccgcgccttctcgactacggaactggtgtcgcgactcgaggcaaccctgcgcatagcccaacagtgccaaccgagcgcaacggtcacgggtcagtcagccgcgggagaaggcgcgacggtcgatatggccaaaagtgggccgacagtaatggcggcggcaagcgggcggaagcagcagtcaaatcgtctgcaggctcacgtcccctcctggagcagcaggggagccctctctcacggcgtgaagacgacgcgcccgtgttctgtccctcgaacggctcacgcaacggctgccccgcgaaccactcgttccgtcgcattaactctgcggcagggcaggcgacacctttggcaggcgaagcgggcgacgcttcacctccgccatga

SEQ ID NO: 77737 - DNA, 1596 bp, Zea mays
  Clone ID: MRT4577_170921C.1
atggcgcgggggctgggtcccacacgtcatgcaagctggcccagggcagaagaagccaaaccgccgtgcgcggtgcatgcaaccgcccagcggttacaagtgtccctccactttcgcccagaccagcgggtgaaagggcgggcagccatgcaggcggcacgcaaccgcgccaagtgggcgcgcccctccgacttccaacgcacccagcatggaggcccaggcccacgcgtcatgcaaccggtgcgtcggttgctgcgtgcgagcaactacaccgccactcgcaccactgccacgcctcctcgactgtggaaccagtaccgcgactcgaggcaaccctgcgtacgacccagcagtgccagccaggcgcgacggtcaatacggccaaaagtgggccggcagtaatgacggtggcaggcgggcgggagcagcggtcacgtcgtcagccaagctcacgtcccatccgggggcagcaagagaaccccctctcacggcgtgaagacaacgcgcccgtgatccgttcctcgaacggctcgcgcacgcgcaacggccgccccgagaaccactcgccccgtcacattaactccgcggcgggacaggcggcgcttctggcaggagcagcgggcgacgcttcgccttcgccataatgaccgcgtcaaaaaaaaggtacgccacgtcattcgatttcgtgtccttttccttttcctctttctctctcttacaacagggaccgggaaagggggataccccgaaaaggatccttctccgtgaaggaaccaggctccgagcctccctactgatcagaggttcgaaggctggcccctcggaggagttcaacagctgcctcagagcacgtgggctccacacccactactggtcagaggttcgaaggccgacccctcggaagggttcaacgaccgcctcagactactcgggctccgcgcccactactgatcaggggttcgaaggctggccctcgaagggttcacaaccgcctcagacacagagcgagggatggccctgggtacgttcgatacataaccaaggctcgggctacgctcccgaggtaccctaagacatttccgagaccagcgggaacgatcttgtaacggaatcccatcagagggaggcatcgagccctcggaccccgtcgaaaggggaccgggtctggcaaatcacccgcaggtacttttggagcgcgcctccgggcctctagccgacccctaacgaatggggcacgggcgtccactcggattacccgttagcaactcactggagacaccatgttcggcgccctccgagggcaacatggcgctttcccccctcctccttgcggaaaggcgacgcaggggcgtatgaaaaaaagccgagtctgtccttgaccgtcctctcgctctgtgcggaggctcggggggctgctctcgcaaacccggctccggccaaaccgttgatagcgtcaacataccagcccgagaacttgggactcgactatgcacccgggctacggccagttcgcatgagggaacaaccagaccgaccgaggcatcacgaaacgcgctaagacctcaaaggagtcaaaccactcctccgaggcctcgg

SEQ ID NO: 77738 - DNA, 332 bp, Zea mays
  Clone ID: MRT4577_170922C.1
tataaattgcacacctgggaaacgaaacatacatatgtgtgggttaacaaaaaagacagcaaactagcctatatttatgtactcaatgaagatagcatgatttggcagctgaaatacagcgggggtggctactaatcttgattaacacagccacaaggtgtttttcctaactcaaaagtgcaactacctatcggtgctgattcctgaccggttgaatacacaagctggctcgcttaaaaacctacacatacatcattacaagcgttggcgcaggacatattattttcgggggtacacgctacagcttatcggctctcgctgggctaggaatc

SEQ ID NO: 77739 - DNA, 432 bp, Zea mays
  Clone ID: MRT4577_170923C.1
gtgaattccgttgctgtcgctggcttttatttttggatatttccctaagtctcttccactttctatccttgtccgtagcatgacaatgcttgtcccatagggcacagggagcaggacaatcacagacataacaatggcacatgctacaatgacttgcatgagaactggtgctgaatggcaaggcagcgcatagatgccgtggatgagggaaatctctgcatgctaactctcctttctccgcaactatctgcagttcatcctcaggggcatctcgtggcggtcccccctcctcctttgcaacggcaaccggcttatcagggtcaccgtcaagaatgacgcaatcatcgccatcatcgtcgcaacgagcatcaggcatggtgttcgtgttcttggcaccaaccgcaacctccttcgacagcaacggaattcgag

SEQ ID NO: 77740 - DNA, 318 bp, Zea mays
  Clone ID: MRT4577_170924C.1
ttctgtttgtgaacaagggggggagcatggcgctgcccgaggtgtcgggggtgttccagggcgacgcgtgcctggacgtggacacgtccgggatcctgtacttggctgacgtgtagcaggcttgcctggcgttctcgcccaacactgacgacaccaacttggccatcgtcgggaacacgcagcagaagactcactgtgtgctgaacgacattggtaagaacatcgttgggttcgccccgtgagcttgctgatacggccatggtttgtgaaaaactacatatcatttgcatccaccaaagtggtcagttttttacaaat

SEQ ID NO: 77741 - DNA, 619 bp, Zea mays
  Clone ID: MRT4577_170925C.1
agagcttcagagctgatgaattgcttctggtgtcctgtccatctcaagatcaagatgagaaaagtagcaccgtcctcgccatctccatcttggtcctcctctcccttgcctcccaggtctcaaggtgtgcagcatcagctgagggaatcgctggagtctccacgaagcggcatcggctcaggcctcatctccaggtgcaagaacaattgcatggcgatatgaaagaccacctggaattccagagtcccagccggaagcttgggcctgggcatcaggtggtgagcacggtggagttgaagcatcacgggaggattaccaccgggcacaagggtggcagcgcgggtggaggtgccgccggtggtgccgcgggcgcgggcgcgggtgggcggaacgtcggcggcgggggcgccgtgacgaggccgcacggctccaagaacggcgcggcggcgctgccggtgccggtggcgttgctcgccttgggctgtggcgttgctctgtcagccttgagctactgatgaaatggagctctacgtcagtcagtatctccgagccgattttacgggtaattagtgtgctagtttctcgatttgtttgttgctatatagtatttgatatcaat

SEQ ID NO: 77742 - DNA, 488 bp, Zea mays
  Clone ID: MRT4577_170926C.1
gttcaccggtctcgcacactgttgtcggtaggcgctatcatcgccagcgactcgtttctcctccgctgcattggtcatgcttgtcgtggctagaccacaaaccttcctcaagcatgggcgtgacatcgccttagactagctccaacaggccagctatttggcaaggcaaagctaatttagcttgtcatgtagtactgttcgtgctccaatagcccagctatctagcccagccaaattacatgggaggagagagaaccggcaaattagctggcctagacacgccagccattcttcaaccgtcacgctcacctcgcgagggaatcggcgggcagcggctccacgaggatctgcgagggcgtggcttcatcgacgaccaggatggacatccagttcaactccgaaaagtggtcgctccctgtagcctcagccatgatggaacttgagaagtacaaccttaccagtgcatttactggatcaatgcataacat

SEQ ID NO: 77743 - DNA, 2204 bp, Zea mays
  Clone ID: MRT4577_170927C.1
tcatccgttcattagtcaaagaaagagaaggatgcagcaaacaaacagaggattactgcaggatattaaatgaagattgcccaaaacctttatgagggtatcaacctttcctcagaagaaacaactgggttaataacgtacataagaactgatgggttccatatttctgatggagctgtggaggacattcgttcactagttaaagaaagatatggtcagaagtacgtttcggaggacattaggaagtatttaaagaaggtgaaaaatgctcaagaagcccatgaagccattaggcccaccagtataaggaggccgccatcatcattggttggaatacttgatgatgattctctaaaactgtacactctaatatggaaaaggacaatggcttgccaaatggaagcttccagaactgtagatgattcaagtggatgtctggcattcctgaaggagagatgaattttcattccactgcatcaaaactgaacttcaagggatatcgagctgtctatgaggatgatcaggccagtccatgcattgacagctctgtacggagattctgtgcatgagtgtagctaagaggccttgtcgaaattaatggttgcagtgacaattccatttctttatcctctttctttctcaggctactgcagattatttgttatcatttaactactccattacgtaattcatctccttaccaggttaaggacttggtgtttcctgttaacgtgcatcttggccagcacttcactaaaccaccaccacgatattctgagggtgcattgattaaaaagctagaagaacttggaattggaaggccatctacttatgcatctataatgaaagtattactggatcggaagtacgtgacagcaaaaagtcgagttctacaccctgagttccgtggtcgaatggtctcggcattccttttgcaccatttctctgaggtttctgattacaactttacagctaacatggagacagagctagataatgtctctgctgggtcaactgaatggaagggtcttctgaaagactactgggaacgattcagcaaatattgtgcagatgtgagtaaactggatggcagaaaggtagagagaatgcttgaagaaaaatttggtcctatcctcttttccgatgtttacaaggattgtagaatttgccctagttgttctgaaggaaccttgagattcaaagttagtaggtacggtgaaggctattttgtaggttgtgatcgacatccaaaatgcaagtacattgctcgctcactgtcacagcaagaagatgaaactgaacccatagaagaaaatgcaaaatcttttgaacccaggttacttggtgtcatgcctgattctgatcaaaaggtgtttttgaaacaagggccatatggctactatgttcaagttggagaggacaaaaaaggtctgtttccaaaaagggtttccctttccaaggtcaaagatatagactctgttactctagaagatgcaattgagcttttgcaatatcccaaaatcctgggaaaacatcctgaagatgataatcttgtacttataacacattctaaggttggatacaacatcaagcacaggagatttattgctcaagtgccaaagaacatggacccaaagaagatgacacttgagcgtgcactcaagcttctgagtagtaaaagtgtcagacggattggtcgtctaaaggggaaggtcgaaaagaaggaacccattgaatggcattagctgagcctgcctgcactcgtgtgtgcaaaaaaaaaaaaaaaaaatcagagagaagtcaacattcatagcatgcagaggttcagcctttcgtgtgtttaactgcttatgatgagagcggagaagggggccccatgtgtgacaaagaacaagtgccaagggaatgcacaaccagacatattcgggtcatatctttgatttcatatttttcctttagtcatcaacatcataagctgcattgaacgcgcggacacagaataccagactataaaattctgagcttaacaaagatgagagggtggtttcatcacctattttacataatcgctgcatttcctaattactttcacattttgtactagagataaatgcatcttttaccacaggaaacccattttagttgtgaccgtcgtgtaggttatgtactcatgtgtaagaattgtatatgctacttcacagctg

SEQ ID NO: 77744 - DNA, 806 bp, Zea mays
  Clone ID: MRT4577_170928C.1
gcttaaccctagccgaaagaaacaatgtctctcctcccctgagcgcgctcgtggccgccccttgttggccatggctctccagctccgccgcctcctcccgcacggatacgcccagcgacaccgcgccgtcatccacgcgctatcgctgctgccgccgccgcccgcaatgattcaagtggatgttggcattcctgaaggagagatgaattttcattccactgcatcaaaactggacttcaagggataccgagctgtctatgaggatgatcaggccagtccatgcattgacagctctgagggagattgtgtgcatgagtgtaactttgaggccttgtcgaaattaatggttaaggacttggtgtttcctgttaacgtgcatcttggccagcacttcactaaaccaccaccacgatattctgagggtgcattgattaaaaagctagaagaacttggaattggaaggccatctacttatgcatctataatgaaagtgttactggatcggaagtacgtgacagcaaaaagtcgagttctacaccctgagttccgtggtcgaatggtctcggcattccttttgcaccatttctctgaggtttctgattacaactttacagctaacatggagacagagctagataatgtctctgctgggtcaactgaatggaagggtcttctgaaagactactgggaacgattcagcaaatattgtgcagatgtgagtaaactggatggcagaaaggtagagagaatgcttgactatgttttctgtgcgcttcttttgtttcagtttatgccataggtttaaa

SEQ ID NO: 77745 - DNA, 1056 bp, Zea mays
  Clone ID: MRT4577_170929C.1
cgatttgggttcggagaagcctgcggaagcacattaagaatttgagagtatcaacagttggtgtaggcgcaataggttatattggtaacaagggatcaatatcggtcagcatgtctgtacatgagactcctttgggagaagaactcctgcacctgactgctggtgaaaaagacgggggtgacctaaaaggctactttcatacaagaggggtgagcttacactttctgatcaccgccctgagtctgcagtctacgtggctgagattgaagttccataagcggattatatgcaggagagaccatcactaccgaatcaacgaatccttggttggacaacaaggtcgccgaaccacgcaggactcagcttctagcacaagtgccatcagcggaagagagcaatgaaaaaacagtgcttagaattcagtcagacattgttgatttgcagcattgtatcatccttcacaagcagcatatttgccgtggattattttttctgcacgcttgtttgatgaagagcatctcaagcactatgtcatccatgacatagtatcctttgaaaaaaatgtcaaatttgttcaaataatgttcagcttacactttctgatcaccgccctgtggctgcagtctacgtggcagaggttgaagttttctgccgtagaaagccgcagagggctctaacattcactgatgcagagagcaggaccatcaatcatcagagaaggatggatggactggttgaacaaagaggtcgccgaaccatgagatatgcaatttctagcacaagttccaagtgaggtggtgccatgccaatgacagtttttagaactcagtcagacattgttgatttgcactattgtatcatccttcacaagcagcatatttgtcatggattattttttctgcacgcttgtttgatgaagttcatctcaagcactatgctccatgacatagtatccttcgaaaaaaaaatgtcaaatttgttcatataatgttctttcttgttgtgaactaggaagagatggttcaacatgcttcatataatgtcaaatttgttttt

SEQ ID NO: 77746 - DNA, 644 bp, Zea mays
  unsure (1)..(644): unsure at all n locations
  Clone ID: MRT4577_17092C.1
ccggccgggcccaagtcccggcccaacccatctgtagcactaggcaacagcgaagctgagctgagagctgtcactgcatctgcctcatctaccagatggtgatgatgtcgggacttgctgcctacggttcactaagtatgacaacgaccgggaacgcgccgttatcatggaatacacgggcaccgccggcgcgactcgctttccagaggcggcggcgcatgagtacgatcacggccacggtcacgtgcaggcgcgaggcggcgatgacggccccggagaaggcggacgtgctgcggtcgctagacgggtgggcggagtcgaacctgctgccgctgctgaagccggtggagcgggcatggcagccgcacgacctgctgccggactcggcgtcgccggggttccgcgaggcggtggacgagctgcgggcgcgggcgcgagagatccccgacgactactacgtgtgcctggtgggcaacatggtgacggaggaggccctccccacgtaccacgccgccctcaaacagcttcgtgggctacgacagcccctccagcgccgatgnctggggcgcggtggtcccgcggctggaccgccgaggagaaccgccacggcgacctgctgaaccgctatctctacctgtgcggcc

SEQ ID NO: 77747 - DNA, 311 bp, Zea mays
  Clone ID: MRT4577_170930C.1
gcaccgcgtaattgatctttatttgcttctactcatttagttttctcaaaaaatttgttagcatttgttgacaaacgtaggaaagtagtaatagtggcattgaaggcgctgactccagcaacacatgctatggtgggacaacaaccatactgaattgtgtgaattggattgaaagtaactcctgggatgaccgtcatggtcttgtcgtttgcccacatagagtggttttgtcatccatccttctctttaaatatcaaatttgtaattgtttttttcttttttagaacacacaatcactttctgccatctct

SEQ ID NO: 77748 - DNA, 1164 bp, Zea mays
  Clone ID: MRT4577_170931C.1
ccggccgggtgagggaacaagttcatttaacctactttcttaatctttgtgcaccactctagaacaacctacatttgggaaaaatggtagtgatccttttacaagaacatctttcagtaataggctagcacaaaaaatagttggcgtccgtaacactgtgttgaagtttcttttcttttacataatagctagataatgtctctgctgggtcaactgaatggaagggtcttctgaaagactactgggagcgattcagcaaatattgtgcagatgtgagtaaactggatggcagaaaggtagagagaatgcttgaagaaaaatttggtcctatcctcttttccgatgtttacaaggattgtagaatttgccctagttgttctgaaggaaccttgagattcaaagttagtaggtacggtgaaggctattttgtaggttgtgatcgacatccaaaatgcaggtacattgctcgctcactgtcacagcaagaagatgaaactgaacccatagaagaaaatgcaaaatcttttgaacccaggttacttggtgtcatgcctgattctgatcaaaaggtgtttttgaaacaagggccatatggctactatgttcaagttggagaggacaaaaaaggtctgtttccaaaaagggtttccctttccaaggtcaaagatatagactctgttactctagaagatgcaattgagcttttgcaatatcccaaaatctgggaaaacatcctgaagatgataatcttgtacttataacacattctaaggttggatacaacatcaagcacaggagatttattgctcaagtgccaaaggtctgttacgttcatttcagaaaccaaactaacatatcggtctataaccatccagttccttgtgttggagaaatataaaagatgtttacatctttacttttgatgatttccaatcagtgcacgtgcatttattagcaccctgggtatatttggactgtttcattgcaaggctgacaatattttgaaaatgtgatgatggcagaacatggacccaaagaagatgacacttgagcgtgcactcaagcttctgagtagtaaaagtgtcagacggattggtcgtctaaaggggaaggtcgaaaagaaggaacccattgaatggcattagctgagcctgcctgcactcg

SEQ ID NO: 77749 - DNA, 183 bp, Zea mays
  Clone ID: MRT4577_170932C.1
ttatttattttttttttatttttttagggggtggggttattatggtggggggcaaaaatacacgggcagttttagagtttaaaggcagcgctgttgtaacaaattggcaggtatactccagtaaaatagaacagggtttagaccgggaattttgaccagataccccatacatagggggagaaa

SEQ ID NO: 77750 - DNA, 384 bp, Zea mays
  unsure (1)..(384): unsure at all n locations
  Clone ID: MRT4577_170933C.1
acatctcgtcacacaccgaaacatgtaagctagacatggcagactggacgtcgctcccctcggacctcctccgccgcgtcggcgacgacctcctcaccgagcatgacatcgattgcttcatgaacatgcgcgcggtgtgccgcaactggcgctctgccacggccaagccaggccgtgacgacctccgtttctgcccgggccagtgggtcatgctcgaggaggcatccaaggtcgacggcgactccacgcgcctcttcatcaacgtctccactggacgcttcctccgccgccgtctcccgctgctccgcgaccacaccctgatggncgnnctcacatattacactcctcttcttccagaaaaagtatgtgtcccccgcgccctct

SEQ ID NO: 77751 - DNA, 275 bp, Zea mays
  Clone ID: MRT4577_170934C.1
gggtccatccacgcgtctaaagaaaatcgaatcaacaaaaacaatgaataacaacaaacacagaaattaaaagatgacgaattcagacacagaataacgcaaaagggggcggccgtactataagatcaaaacttaggtcaccatgcatacaatctcatacatcttcgaaaaggtccccgcaaatccaatccactggacgtctattataatcctccagcacgggaaaaccctgctctcacctaacttacgcgctttgcaccatacccccctttcac

SEQ ID NO: 77752 - DNA, 440 bp, Zea mays
  Clone ID: MRT4577_170935C.1
gttgacgagaagcacttaagttctttttatcagagtgggtgtttctttacatcaaaactactctttgttgaagtggaatgatttgtgggagactgagttctgggacaaagttgaaggtggcctcatgattcatgaacgagccaagggcattagggtaatcggtagcttttgacaacttgattaagagatttttatccttcttggccgatagttagtcttaattgtttcgtggatcattaaggacgatcaaattttcgtgcttaaagtcagctcagacctgctagcctgctctgttggctagattctcatcatcggttccttgtatatttttgcatattgcagttttggatgctagcaattgcgactggcttctcctattactatctgaagcttcgaacttggaagataactctctcggccttagcggtttggtgctgact

SEQ ID NO: 77753 - DNA, 488 bp, Zea mays
  Clone ID: MRT4577_170936C.1
aggggaaaggggggggggggtcatcaaacaccaaaacaatggggatctatttgcgaggggtagggggttaaacaaccaaaggggcacaaaacataaaccttgcggttcaaaagcgtgggacaatccataaaaaaccgggccatgctcccaaaccatccgggggcaggggttaatacagcaaggggacaaacaaaagtatcacagtttgaggattttaaaaaatgggacttgtcccttcaccccaacaccttacggcttgaggttgccaaaaaacctttgcttttcatcggggggctggaaaccacccggcccaaatttggacgaggggtcaataaacttgagcttgatctcctccagcgccagccgggaagtctgcttcaagggggggctggggggggggaccacccttttttttggacccacacaggagcccttgatcatcaggtagtcacccttcacaataccataaggggggaagccacccatgg

SEQ ID NO: 77754 - DNA, 117 bp, Zea mays
  Clone ID: MRT4577_170937C.1
tattcggcacgagggttggctaattccgggctttttaacgtcctggagacggggttctaatcctatccttaagtagggtaccattggggtgaaaaaaaattgcttttggaagaattt

SEQ ID NO: 77755 - DNA, 380 bp, Zea mays
  Clone ID: MRT4577_170938C.1
acccacgcgtccgcggacgcgtgggcaattccagcttcatcaccaagtctcaaactttcaacaatcttcttcgccacatagctaccagcaatctctcaaaatgtccgtcttcaatggaacctacaatatccgcagcgccctgtcccagcgcaagcctgttgatctcgaggcctccaaccctaccggccgtctgatcgaatacacattccacggcggccccaaccagcaatggcgcttcgctcacgtccaaaatgacgagtttagcattcaaaatgttgccaccggcacctatgccgttgctccaagtggaaacgatgccacaatcaaagccgccagaaccgaccccaagagcaactcagccgctcgctggaagattgtca

SEQ ID NO: 77756 - DNA, 309 bp, Zea mays
  Clone ID: MRT4577_170939C.1
acctcttccatttctcgcgtctcctctggccaccaccaggagcaaagcccgagccgcaacgcctctcgatccacgaatctccccagcggatctgctggttccggaagggtttggagcgcgccggagcctggaggcgtctcggcgtgcgcgtaaggttgggccgtcgagctgtttcggtaggggagggggaggcgcatgaggattcgcgagctgggggacggcgacgggaggccggtggagggggaggagcaggaggacgcctgggcgcacggcggccgcggtgaggtcctgcccctgacggccacgcgc

SEQ ID NO: 77757 - DNA, 595 bp, Zea mays
  Clone ID: MRT4577_17093C.1
ccggccgggccgggacctcttctccgctttttcactgaatcggcggagcctcattgcctactaccggcctgagatggtgtagttcctggagcccggcaagggcgttatcctctttttcggtgggtcacccaggacgcaagggcgcgatgaagtccgccgtccacgaggggacgcgagatcgagcgtacgtcgactgcctatgcccgccgctcggcaagtatcccattaaagtgattgacgagtgctcctgcaacaagactggcagataacacgcctgcgtttggggtgtcgttctgctcggcaacttgacggagctcactggccacccgctacaccatgcaaaataaaattgagggacatctcatcggacgggacctacaggctctccacgcgctagagcaaggccaaatcctggaacgcctccaaggcgcgcactaacatgagagatgacagaccggaagaacacgtgattctttacactaacccacgcttctagacagacggcgcgagcctcatactgactcgatctatctgtcaatttctatggccgtgaatcccaaaaggaatctgtgttccgctatacccatgaaggctg

SEQ ID NO: 77758 - DNA, 1329 bp, Zea mays
  Clone ID: MRT4577_170940C.1
tcaaagacctcatctaaacaaagaagcagaagtcaagcatgcacaaaagttgctccaaaatgcatctggtttaatagcatctgcagtggacataaacagtgcacggaaaaacagtaagccattggaatcatcagggagaaacagccagcagcaatcactgcagctgaggattgatgcagagacctcacagccttctcctcggctttcagatccacagaatgccaaaaggtgggagcattattttcgaagcgttacaattgatgatggtggagaagcattttcactgatgaacagaaacttgccaatatatatgcgctgtccacattgcaaggtctcagaaaggaaggaacatcaagatgtaaagtttgctggtgttgtgtctcaacttcagcggattttcattgtgacacctgatttccctgttctgttggcaagctgcccacttgtacagtttgaggggtcatgtttgccatcaaatgtctctgatcatgatcgagaaggatcattcagtattgggtgccgagttatcctcccacctgagagctttcttactatgaggcttccctttgtctatggtgttgagacaaaggagggaagtaaatttcccctcaaatactttgagcgacaaccagaactcacagcatggcttgttgcaggcacagccctgcaaatcgtgtcggtaggggatgtcactgagaaagaaaccgttatgaagtgatagacatgtcatataaagctttactggctttagcatgttctagtcatatatcagtgatttgctatcggcattgaataggtctgttgatggttatattctgtctgaagttttcacttctactcctgaacttgtgctgctaagctgttgacacaactattgcttgctttcactgtgctggaagcattgtgaaatagaagttccgctgatatctgcctgacctggatggtgtatatagatgcaagcagagggggcaggcccacaggcaatcacgccgttcttgtctttgtacatgaaaggtgccaggaggttaagtttagctggttatgtaaaggtccgctttttgaggacctgtccagtggatcaatcccattcctagactggtttgccttgaggcttggagattttgtagtaagactattagttcaattgagctgtttgtccagttgatgagttgttttattcctaggcttgttgagaaatctggccttggaatatagaacccagaagaaaggatttttctgaatgatgttgtagcaaacggttgcttgagatgcatgatcacctcaaataaacttgactgctccgaccgggctcgcgccccgggttttgca

SEQ ID NO: 77759 - DNA, 495 bp, Zea mays
  Clone ID: MRT4577_170941C.1
atcccttctttaattcgccgccgccgcctgctgtatgctgccgtcgccgggggagaagcgcctgcgagatgctatcgccagatcaagaacaagccataccccaaggccaggtactgccgtgatcggcctgaccccacgatcaggatctacgatgtcggcatgaagagaaaggggggtgttgagttccactactgtgtgcaccttgcctcttgggagaaggagaatgtctccagcgaggctcttgaggctgcccgtattgccgtgaacaagcacatgaccaagtctggaggaaaggatgccttgcaccttcgggtgcgggtatcaccccttccatgtccttcgcatcaacgagatgctttcgtgcgctgcggctgataggctccagactgtaatgaggggggcctttggcaagcctcacggcacctgtgctagggtggccattggtcaaggtctactttgctgctcgacgcaaggacaacaatgcatgacatgcca

SEQ ID NO: 77760 - DNA, 531 bp, Zea mays
  Clone ID: MRT4577_170942C.1
atgcaggcggcatgcaactacaccaagggggcgcaccctttcgacttcgacgcgtccatcatggagtcccaggcccacacgtcatatattcggtgcaccggttactacatgcgagaaactgcactgccacttgcgccagtaccgcgccttctcgactgcggaaccggtgccgcgactcgaggcaaccctgcgcatggcccaacagtgccaaccgagcacatcggtcatgggtcagtcagccgcgggagaaggcgcgacggtcgatatggccaaaagtggaccgacagtaatggcggcggcaggcgggcggaagcagcggtcaagtcgtctgcaggctcacgtcccctcctgggacaacgagagaaccctctcccacgacatgaagacgacgcgcccgtgttccgttcctcgaacggctcacgcacgcacaacggctgccccgcgaaacactcgtcccgtcgcattaactctgcgacagggcaggcggcacctttggcaggcgaagcaggcgacgcttcacctccgccatga

SEQ ID NO: 77761 - DNA, 447 bp, Zea mays
  Clone ID: MRT4577_170943C.1
atgcaggcggcatgcgaccgcaccaagggggcgcactctttcgacttcgacgcgtccagcatggaggcccaggcccacacgtcatgcaaccagttcgccggttgctacgtgcaagaaactgcaccgccactaccatgcctcctcgactgcggaaccagtaccgcggctcgaggcaaccctgcgcatgacctaacagtgccaaccaggcacatcggtcacggggaccgggaaaggggataccctaaaagggatccttctccgcgaaggaaacgggccccgagcccccctactgatcagaggttcgaaggctggcccctcggaggggttcaacagccacctcagagcgctcgggctctgcgcccactactggtcagaggttcgaaggccggcccctcggaaaggttcaacggccgcctcaggccgctcgggctccgcgcccactactga

SEQ ID NO: 77762 - DNA, 230 bp, Zea mays
  unsure (1)..(230): unsure at all n locations
  Clone ID: MRT4577_170944C.1
gcggggcgncnncccggtcgtcgggnctgcccgctgngtttnngcntntnnntnngcggnggggaagnnncttncgnggnttccccttgtnncggcgtgcgttccgggngcngcccngcttgggagtcgggcggtctcgccgcccgntttgtggtgtggngnggcgttctttgcgtcgggccgggcccttgttctgtgggntggggcgcctgtgtgggtgtgtgcttcgt

SEQ ID NO: 77763 - DNA, 567 bp, Zea mays
  Clone ID: MRT4577_170945C.1
atttatgtaatcattgtattcgtgatacaaatcctaacacgtatatggttcgtattcggttgccttctaaaatcagttgtgagcctctaatcagtgaagctgctcttcatagcacctatgaatctatagctaccgaactgtcctcccttcactttcccttcacttatccatatcatcctctatgcccgtgcgggtacccatgccgtcccttgaatggcactgaaaccgctgtacaggctcagctgttcatcgcagaggtaggtagtcaacgaatgggtatcgctggcttcgcggccccatctttgttgctggccgagttgggtgatccttaacccaagtacgcctacggtcgcgaattgtttaaccaccatgtaatcagtgactgaccctcgggccctggtggtttctgtcgtttccatccgctggcaactcgccggttgatgtctctgtcttttgtaattgtttttttactttacgtaaaacatgtgaaggcatattcttagactagtttggcaactcctttttccaaaggattccttttttaaaaaaaaactaattttatttgag

SEQ ID NO: 77764 - DNA, 486 bp, Zea mays
  Clone ID: MRT4577_170946C.1
atgcaggcggcatgcaaaccgcgccaagtgggcgcacttctccgacttccaacatgcccagcatggaggcccaggcccacgcgtcatgcaaccgacgcgccggatgctgcgtgcgagcgactgcaccgccacccgcgccactaccgcgcctcctcgactgcggaaccaatgccgcaactcgaggcgacccagcagcgccagcctggcgcgacggtcaatgcggccaaaaatgggccggcaataatagcggtggcaggcaggcaggagcagcggtcacgtcgtcagccaggcttacgtcctatccaggggcagcgagagaaccctctctcacggcgtgaagacgacgcgcccgtgttccgttcctcgaacggcccgcgcacgcgcaacggccgccccgcgaaccactcgccccgtcgcattaactccgcggcgggacaagcgacgcctctggcaggagaagcaagcgacgcttcgccttcgccataa

SEQ ID NO: 77765 - DNA, 264 bp, Zea mays
  Clone ID: MRT4577_170947C.1
cccgcttgcaaagaagtgaatctcagttctttagagacgcctacatgcgcggaaattctctgggaatgagatggacgctcgactgtgctcaatctgcggtgaagaacactttgcctcttcgtctgaccacattcgtgagaaacacggatgtgggctgtgcttgcgtggcgtttctattactgctttcaagaataacgacccccttggaggagataagctagtcactgtatatgatattgtccgtcatcattggatcacataagg

SEQ ID NO: 77766 - DNA, 630 bp, Zea mays
  Clone ID: MRT4577_170948C.1
atgccgaaaatacatacatgctcaggccccgacagccgcaatgaacaagacaccggcacccaaggtgccattacaaacggaactccggttccacctccgcaggtacgaacaacccccacgattggagggcctgcggagcaacagaaggccgacggatggctcgccgccgcccgctccagcagcagcgacaacgacttctgctccgagcggccgaacagcagcagcgatgacctcagggcggatgctgctgccataaggccctcgcctacgtcccccctcgaggggcgaggacgagcagaaggccgtagagttggagggaccggaagaggggataccccgaaagggatccttctccgcgaaggaaatgggccccgagcccccctactgatcagaggttcgaaggctggcccctcggaagggttcaacagctgcctcagagcactcgggctccgcgcccactactggtcaggggttcgaaggtcggcccctcgaaagggttcaacagccgcctcaggccactcgggctccgcgcccactactgatcaggggttcgtaggctggccctcgaagggttcggcagccgcctcagacgcagagctagggatgaccctgggtacgttcgatacataa

SEQ ID NO: 77767 - DNA, 690 bp, Zea mays
  Clone ID: MRT4577_170949C.1
atggctgaaaggtaccgactcctatggagttgcgttcctccaacgacaaggcgaaaggactgcgggcatcccccatccgggggcttggaaggtggaaagacacgatgcataagggagcgcgaagacatggtcgcctttcaagggggtcaccctccttttaaaggcgactctccctacttgcgtccccagccgtcgtgggctgagtcttctccaacacgctccaaggtcctccccctacggcgcgggggctgggtcccacacgtcatgcaagccgtcctagggcagaagaagccaaaccgccacgcgcggtgcatgcaaccgcccagcggttacaagcagttctccacttttgcccagactagcaggcgaaagggcgggcagccatgcaggcggcgtgcaaccgcgccaagtgggcgcacctctctgacttccaacgcgcccagcatggaagcccacgcccacgcgtcatgcaaccggcgcgccggtcgctacgtgcaagcaaccgcaccgccactcgcaccactgccacgcctcctcgactgcggaaccagtaccgcgactcaaggcaaccctgcgtacgacccagcagtgccagccaggcgcgacggtcaatgcggccaaaaacgggccgatagtgatggcggtgggaccgggaaagggggataccccgaaaaggacccttctccgtga

SEQ ID NO: 77768 - DNA, 523 bp, Zea mays
  Clone ID: MRT4577_17094C.1
gctagaacaatgaatcagtttagacttatgcaaaactcacaggtgacagacaatgtttccaaccatgctacaataccacagtgtgctccagatgcacaactcacaggtgacaaccgtgccacaataccaaacaaggcacaggttgtagagcctgcacatgcagagcaggtgcctatgcagtcagaaagggctgtagaaaagacatggcaggtgcgtcttaatcagctctcgcccattccttcttttgctccaggtgaacaactaacagacgaaaaggttgtagagcctgcacatgcagagcaagtgcatcttgctcggctctcgcccagtccatcaagggagagggcccatctcagtcagtttgctccaggtgctcaactcacagatgaagaagcggctacactaaaggaagaagaccgtcctcaaattgaccttctggatggtttgccccgcctagttgaggctgtagccaggacgcctgtgagctacaaaaattcaaaacggaagaagtctttgaaattag

SEQ ID NO: 77769 - DNA, 176 bp, Zea mays
  Clone ID: MRT4577_170950C.1
cccacgcgtccgcgcacgactgcgtgggactttgtgtgcagatacctggtgcagacccagatgggcaacgtgaatggacgactgtggacaagcacatgagcctggtcatatacccgacgatcaaggcggatactaaggccactacctgaaccggctcttctaccaatgctacaact

SEQ ID NO: 77770 - DNA, 495 bp, Zea mays
  Clone ID: MRT4577_170951C.1
atgcaggcggcatgcagccgcgccaagtgggcgcgcccctccgacttccaacgcacccagcatggaggcccaggcccacgcgtcatgcaaccggcgccggatgctacgtgcaagcaactgcaccgccactcgcaccactaccacgcctcctcgactgcggaaccagtaccgcgactcgaggcaaccctgcgtacgacccagcagtgccagccaggcgcgacggtcaatacggccaaaaatgggccggcagtaatggcagtggcaggcgggcaggagcagcggtcacgtcgtcagccaagctcacgtcccatccaggggcagcgagagagccctctctcacgacgtgaagacggcgcgcccgtgttccgttcctcgaacggctcgcgcacgcgcaacggccgcctcgcgaaccactcgccccgtcgcattaactccgcggcgggacaggcggcgcctctggcaggggaagcaagcgacgcttcgccttcgccataa

SEQ ID NO: 77771 - DNA, 321 bp, Zea mays
  Clone ID: MRT4577_170952C.1
atgcaggcggcatgcaaccgcaccaagggggcgcaccctttcgacttcgacgcgtccggcatggcgacctgggcccacacgtcatgtaaccggcgtgccggttactacgtgcaagaaactgcaccgccacttgcaccagtactgcgccctctcgactgcggaaccgataccgcgactcgaggcgaccctgcgcatgacccgacagtgccaaccgggcacatcggtcacggggaccaagaaaggggataccccgaaagggatccttctccgcgaaggaaacgggccccgagcccccctactgatcagaggttcgaaggctag

SEQ ID NO: 77772 - DNA, 267 bp, Zea mays
  unsure (1)..(267): unsure at all n locations
  Clone ID: MRT4577_170953C.1
atacagacacaccacccacccaaccactcgattcagccgccaccgccgcgcgtacaagcaggtggagaaaagatgccggctagccacggcatgagcacgcggacgcgagacctcttcgagcgcaccttcagaaagnagagcaacatcccgctcaacaactacctccgcacctacaagatcggcgattacgtcgatgtaacagtgaacggcgccgtacaaaaggggatgccgcacgagttctacgacggacgcacggtacgcgtatag

SEQ ID NO: 77773 - DNA, 699 bp, Zea mays
  Clone ID: MRT4577_170954C.1
atgccgcgcctcctcgactacggaaccggtgtcgcgactcgaggcaaccctgcgcatggcccaaaagtgccaaccaagcacatcggtcacagggaccaggaaaggggatactccgaaagggatccttctctacgaaggaagcgggccccgagccctcctactgatcaagggttcgaagggtggcccctcggaagggttcgacagccaccccagagcacttgggctccgcgcccactactgatcagaagttcgaaggctggcccctcggaagggttcgacagccgcctcagagcactcgggctccgcgcccactactggtcagaggtacttttggagcgtgcctctagtccactagccgacccttatcgaacgggtcacgggcgtccactcggatcacccgttagcaactcactggaaacaccatgttcggcgccctccgagggcaacatggtgcttttcccccctcctccttgcggaaaggcgacgaaggggcgtatgaaaaaagccgagtcagtccttgaccgtcctctcgccctgtgcagaggctcgggggctgctctcgcaaacctggctccggccaaaccgttgacagcgtcaacataccagcccgagaactcagaacctgactatgcacccgggctacgaccagttcgcatgagggaacaaccagaccggccgaggcgttacgaaaggcactaa

SEQ ID NO: 77774 - DNA, 555 bp, Zea mays
  Clone ID: MRT4577_170955C.1
atggaggcccaggcccacatgtcatgtaaccggcgcgtcggttaccacgtgcgaaaaactgcaccgccacttacgccaatgccacgcctcctcgactgcggaatcggtgccgcgactcgaggcaaccctgcgcacggcccagcagtgccaaccaggtgcatcgaccacggggaccgggaaaggggatactccgaaagggatccttctatgcgaaggaagcgggccccgagccctcctactgatcagaggttcgaaggctggcccctcggaagggttcgacagccgcctcagagcactcgggctccgcgcccactactggtcagaggttcaaaggctggcccctcgaaagggttcgacagccgcctcaggccactcgggctccgtgcccactaccgatcaggggttcgaaggctggcccccgaagggttcgacagccgcctcagaacatgcagagcgagggataactctgggtacgtccgatacatggtcgaggctcgggctacgctcccgaggtaccctaggacatttccgagaccagcaggagcgattctataa

SEQ ID NO: 77775 - DNA, 519 bp, Zea mays
  Clone ID: MRT4577_170956C.1
atgcgggcggcatgcaaccgcgccaagtgggcgcgcttcgccgactcccaacacgcccagcctagaggcccaggcccacgcgtcatgcaactggcgcgccgactgcttcgtgcatgcaactgcaccgccacttgcgccaccaccgcgcctcctcgactgcggaaccaataccgcgactcgaggcgacccagcgcacgactcagcagcgccagcctggcgcggcagacaggcagcgcctctggcaggaaaagcgggcgacgcttcgccttcgctataatgaccgcgccagtaaagggaccgggaaagggggataccccgaaaagggtccttccccgtgaaggaaccaggctccgagcctccctactgatcagaggttcgaaggctggccccccgaagggttcgacagccgcctcagatcgcgtgggccctacacccactactggtcagaggttcgaaggtcggccccccgaagggttccacggccgcctcaggctactcgggttccgtgcccattactga

SEQ ID NO: 77776 - DNA, 492 bp, Zea mays
  Clone ID: MRT4577_170957C.1
caaaaaatggcatggcatcattttgtaaaaaaaggaaccaaaggaccgggaaccccccgggggggtggggagcggaaggaaggacaaaaaacctttctccagaaacgagactttccggaccggaaaaaaaaaagggggggcaaccccaacccgggctgcggctgctatgcagggaccataagggggggcagtcccatcgggggggggccccccacctggggtagggaccccaggggcagctgccgttggcgttggccccgggaaaaaccatccccatcccggccggaaatcccactaggaggataataatggcaacggcaaggagggcccactggtccccgaggtacttcctggcgggccagggccccccggcgggaagcccctacccccccatccaccccaagggggggcccatgaccccaacaaacccgattaggaaccccgcaaggaacccgccgagggcccccaggttgtcaacggggggcaggaccc

SEQ ID NO: 77777 - DNA, 933 bp, Zea mays
  Clone ID: MRT4577_170958C.1
cctcgaggccggccggagccaagctagcagctccccgtccgcaattgccctctttgagctctggagctgccccatgcaggcagacgctcgtcacactggctaaccaacaccgcccgcgcccgcctgcgcctgctgctgccagccccactagacccctccagcgcctcgacaaaatgcagcagcacctgtccacgaccacttcgccttcaccttcccccacacaaaagttaggacttaccaacatggcttactctgtccgcaaggtcgctgcggcgaacacgctcgagcaccgcgtcttcattgagaaggacggccagcccatctcggcatggcacgacatcccgctgtatgccaacgagcagcagacggtcctcaacatgatcgtcgaggtcccccgctggagcaacgcgaagatggagatctccaaggaggagaccctgaaccccatcaagcaggacatcaagaagggcaagctccgcttcgtccgcaactgcttcccccacaagggctacctttggaactacggtgccttcccccagacctgggaggatcccaacgtcacccaccccgagaccaaggccaacggcgacaacgacccgctcgacgtctgcgagattggcgagctcgtcaacaagcccggagatgtcatccaggtcaaggtcctcggtgtcatggctctgctcgacgagggtgagaccgactggaagatcatcgtcgtcaacgtgaacgaccccctggcccccaagctcacgatgtcgaggatgtcgagcgtcacctgcccggtcttctccgtgccaccaacgagtggttccgcatctataagattcccgatggcaagcccgagaaccaattcgccttctccggcgagtgcaagaacaagaagtacgccatggatattgtccgtgagtgcgccgaggcttgggagaagctcgt

SEQ ID NO: 77778 - DNA, 314 bp, Zea mays
  Clone ID: MRT4577_170959C.1
gcgtcgtctattggcctgctagagccaaccagaagagctcgcagacactgagagtgcgtgtgagagagaggatgacgggtggcagggtactcgctgctctcctagtggacctgcaggccgtgtgccatgtcggacatcatcccagagatggcgatctgtgacttcaacttgcagccctgtggctactccatgaacgctgttcatgggcatgctttgtccaccattcatgtgaccccaaaggaccgatttgagctatgcaaggtacaaggtgctgggctccaacccggactctttctcttatggtgacctggtta

SEQ ID NO: 77779 - DNA, 364 bp, Zea mays
  unsure (1)..(364): unsure at all n locations
  Clone ID: MRT4577_17095C.1
ccacacctccnactagttctagatctttagcttccgccctgantccaangngaagcaagggttttatttttttcgaaagaccaacaaaatttcctgttccatcaaaataaagagaggcaaaccacattacgacgagagcaaaccaccactcgtcagaatctaaacagattgaaaaaaaaggacccattcttgctcatgatgcccccacaacaaaatcacctgattagctctcgagcaaacaccaccatacatttattgcgaccatacaaacattgtaacaaaaggcagcagcgagctaatatagctccccaaaaaaacatcctcatcctcttccttttttaataagccctcacttattacccaa

SEQ ID NO: 77780 - DNA, 164 bp, Zea mays
  unsure (1)..(164): unsure at all n locations
  Clone ID: MRT4577_170960C.1
gacntcgnngagctgggcagcgcggactggtaccttcatggagatggacaagagggccaacccttgaactggaacacgcgtatgaagaatagcccttggtttgcctataaggctggcatatattaaccaagactggtcgcctgggatcgcgtctaaggacatta

SEQ ID NO: 77781 - DNA, 350 bp, Zea mays
  Clone ID: MRT4577_170961C.1
aaaaaagcaccttttttttttggggaagccccaaacatttgacaaaaaactttttttttggactgtaacctataaaaaatttaaaagggggccccccccatggtggggtggtggtaaaacccttctgggtttgacaaagcaagctggttgaatggccacaattgtttccattgacaaagggtccccccgtttggcccaacgtgctggttaaaccggaacaaccgtggttgtatcaaaaaggatgcagggcttacaccaactaactggctgaaaggaaaaagctgatgctcttttaaaatagcaggagagttcaatgcttcccgatggctgaatggaaaaaaattctgggg

SEQ ID NO: 77782 - DNA, 288 bp, Zea mays
  Clone ID: MRT4577_170962C.1
tgccactcgttcgacggcgtcgacgagaagtgtctagcccctagagcgggtttagttagaggcgtacgggctgtcgttctcgtcggcggcggcttccattatcagtgtttgcgagagcactaccttctgcatgtgtccctagcttttcactctttgcgcgctgtctcgctactccttgtaacatctttttttgtcttgggcctgcacgtttttttcttgttttattttttttttgttttttttagtttttatttttatttttattttatatttatttttttttttttt

SEQ ID NO: 77783 - DNA, 252 bp, Zea mays
  Clone ID: MRT4577_170963C.1
gggcaccacgcgccacgaggatcagccacctctatcgaacgaacaaagaccaaagggaatccgccgtagtggatcctacccacatggccgctcagggaccaacaaagtgccctaggagcttcgccatgacacgacgaaggtgtccatggtagaggtggtggacattcattgccgagatcgctacaattgctcgtcgaagtggattgatgcctcggttccacgcctcaccacgggaagtagatcctcactgtg

SEQ ID NO: 77784 - DNA, 1076 bp, Zea mays
  Clone ID: MRT4577_170964C.1
gttgctcctcaagttcacgctgcggctatataaagccacgcctccattaccctgcttggccaaagcaacaacagaagcaaacataattaagcagttggtggtcattagcgtactgcacagagtgcctacagaaaagctagagaagtaaacaaaatggctgcgtcctcgtacttccttcttgctgcttttctagcggtggttgcttcccatgccaccgcttccgatcctagcccgctccaggatttctgtgttgcggacatgcactctcctgtgaaggtgaatggatttgtttgcaaggactccatggccgtgaccgcagatgacttcttcaaagcagccaatcttgataaggctagagacaccatgaagagcaaggtgggatccaatgtcactttgatcaacgtcatccagctccctggcctcaacactcttggcatctccctggcacgtatcgactacgcgccattgggcgagaacccgccgcacacccacccacgtgccacggagatcctcacggttcttgaggggacactctacgtcgggtttgtcacctccaacccaaacaagctatttgccaaggtgctcaacaagggtgatgtgttcgtattcccccaaggtctcatccatttccaattcaacccggtctataacaagccggccgttgctatcgcggcgctcagcagccagaaccctggggttattaccatcgccaatgcggtcttcggatcaaagccaccgatttcggatgatgtcttggcaaaggctttccaggtggagaaggggacaattgattggctccaggctcaattctgggagaacaaccactactaaataaatcacatatagcttatcgtatcaaagaatgcttttaaatatgcactttgagtaatacaactacatgatttgagttttcatggtaaaataggccctaaaataagaaggtagaatttcgagtgttttgggtgctattttgtatcgcatgcttcttggtgcaatgacctctatggaagttcgaaataataatctttgttcttgtcgttgggttagatttcactaaaaaaaaaaaaaaatgaacg

SEQ ID NO: 77785 - DNA, 1000 bp, Zea mays
  Clone ID: MRT4577_170965C.1
cattgggtacctcgaggccggccgggacaacatcaacaaagcaaacatactgtacacagtagtgccaacattaaatggctgcgtcctcgtacttccttcttgctgcttttctagctgtaacagcttctcatgccaccgcttccgatcctagcccgctccaggatttctgtgttgctgatattcactctcctgtgaaggtgaatggatttgtttgtaaggatcctatggcggtgaccccagatgacttcttcaaagcagccaatcttgataaagctagagacaccatgaagagtaaggtggggtccaatgtcactttgatcaacgtcatccagctccctggcctcaacactcttggcatctccctggcacgtatcgactacgcgccattgggcgagaacccgccgcacacccacccacgtgccacggagatcctcacggttctcgaggggacactgtacgtcgggtttgtcacctccaacccaaacaagctatttgccaaggtgctcaacaagggcgatgtgttcgtgttcccccaaggtctcatccattttcaattcaacccggtctatgacaagccggccgttgctatcgcggctctcagcagccagaaccctggggttattaccatcgccaatgcggtctttggatcaaagccaccgatttcggatgatgtcttggccaaggcttttcaggtggagaaggggacgattgattggctccaggctcaattctgggagaacaaccactactaaataaatcacatatcgcttatcgtataaaagaatgctttttacatatgcactttgagtaataatacaactacatgtttttaggtttcatagtaaaataggccctaaaattaaaaaagtagaggttccagtgttttgggtgctattttgtatcgcatggttcttggtgcaatgacctctatggaagttctaaataataatcttaaaaaaaaaaaaaaagtgcggacctctggtagatctcatcttacgta

SEQ ID NO: 77786 - DNA, 999 bp, Zea mays
  unsure (1)..(999): unsure at all n locations
  Clone ID: MRT4577_170966C.1
tctccatctccacggggtgccttcaggcttcgtgttgcaagatacccccaatgcctgcaagatggtagaatctgtatggactctatacaaaattgataagttcgagctcttgaaggtttgtccttactggtttgtattatcagtttgaaggttgtaatggaagttgttaataatctacgcaatatccactgtaaaggtgttgcagacctggtgacagataaagtgaaacaacatactgtttcaacctattgttctatattttgttcaacatagacaagttgagtgaaccagtcattttgaaagttgtcaccactcaccaagaacttcaaagaccacctcatacatggggaggaaggcgaccttgttgaagattccttattagagtacctctggtgcattgaccgtttaggtttggtccctcactcagtttgtacctctaatttgatgaacatctatttaatattgtaaccattttcgtactttgtaatatcgtataggtccagcaattttccaaataatttctcgaattattgcagcaaacctatgaactaaaacagattagtcgatcctccatttcattcatttagaaggtgatatagttctctgtattactattgttatccctgcgacaaaatgaattcagccttgtgtattattattgacaagcagatagaggaatagaagagttagtacaattcatatatttgatatttcaagcagtaagggtgtggatgcatatacgggtattgtacctgaagctgatgagaaaagtaagctagcagcatgacagggatctaatctaccaaatttcttcttccatatggaactttgttattggcttatcacctgcataatgtcatcgaggatttggagctgatgttataatgacaccaggatcttgaanaaaggatctgaacctgatgtgatgtgctaaagaagcttgtaagcactaggatattgtcgtcaatatttaatgagnagagcctattattgatacat

SEQ ID NO: 77787 - DNA, 221 bp, Zea mays
  Clone ID: MRT4577_170967C.1
ggggcaactgcttttattaaaactacttgagggtgacctaccactttatcattagtaagttcagcacttgccgggtgcgcatttaaaaccacaagaacccgcttagcgaacacaggaacccaaaagggcgcaacctacatccatgtttgtccaggggtgaagagacatctaaatactggctccaccgaccggattacagctattactttcgatccatgcct

SEQ ID NO: 77788 - DNA, 1565 bp, Zea mays
  unsure (1)..(1565): unsure at all n locations
  Clone ID: MRT4577_170968C.1
gcttggttggtgatatattattgnaactaaagaaagaaaggacgaaaggggggaaagagagaaaaatattttttttaaaaaagaaaactccacgcagacgcgtttctttccctccatgggcgcgcgcttaccaattcgaaacaaacaaaaagcgaaaatccaagcgaagccaaggcacccactcgattgtcgattcccgatccctcctcccctcgcgtaccgtaggcgtccagcgcggcagggccggggcaagcaacggcaacctcgcgcgctcatgtcgtctcctccctccggatgccaatgtctagccatgcccacgccggccaccgccgtcttttcctcctgacgagcacgagcacgagtcttgctttcgtcgccgccgtcctcctcctgatcgtcgacgcgtgcgcggcgtcgcggcagttctccacggtcgccatctcccacgcgcccaacgccacgctcgtctgcgcgctcgtcaccagcgccgatgacgcgggagcggggccaccaggctcttccaagctgcgctgcacctcgctccccgacggccagcagttcgtctacccctccgctgacatcccctacaacgccatcgccgccgggaccgacttcctgtgcggcctcatggcgccgctcggcggccacgccgccatggcgctggtggntccttctccgaggagttcgccgccaaccgctccncgccccgtcggccggccgcctctactggggcccctcgctacgcntcgctcagcgccggcggctcccacgcctgcggcctctccgacgaccacggcccgnnttgctgggagtggccccgcctcgccctcccccaaggcctcgacttctcccgcatcgcgctgggccacgacttcctctgcggcatcgacaagctcgataacaccagcatgagctgctacggcgccatggcggcgccgtcgctcgcgcccgaccccgcggccttgaggaccgtcgccgccggccaccgccacgcgtgcgccgtcgacgcggagggcggcttcgcctgctggggcgacggcgacggcgacgtccccgaggtgccggcacacgagctgccggacgacatgttggccatggcgctcggcaacggcacgacctgcatcctctccggcagcggcagggtccggtgctggggcgccgtccaggtgccggaccagtacaggaccgcggatttcctggccatcgaggccgacggcgacgcggtgtgcggcatcctcaacagcaactactccgtcgcgtgctgggggaggagcgaccgcttcggcgccggcggtagcctggtctacaacagcaccatgcccggcgcgtgcgcgcgcaagaagagctgcccctgcgacatcatctcgggctccggcgcgctctgcggcaccggcggcgccgagggcggcgaggagctcgccgtctgccgggcctgcgcgacgccgttgaacgcgtccaggatcctcattgccaacggcagggcgggaccggcagccggaggcgacgccgggaagaagaaggccaagaccctggccgtcgcggtcggcgtcggcgccgcggtactc

SEQ ID NO: 77789 - DNA, 387 bp, Zea mays
  Clone ID: MRT4577_170969C.1
acttagctgagctgatggacaaggtgctcaagaaccgtcgttttgtcatggcttacatgcccggatattctgcatgggcaatcttgactgggaagggaccactaaagaacctggctgacaacatagccaagaaagcctacaacaacgcgtggggctacgccaacaactttgttcccaggaagcgaggtacgcaccgtcggggaccatgacgagtactgatgcatgggagcgcacgctggtcttctaatgcgaccaagaaggaactatggctcagacgacaaagaatcattgagcatattgtccaaaaaaaaaaaataagggaaaatcggacttgaggatccaacgatgacgtacgccgtgcatcgccaggggggtaaccactcacta

SEQ ID NO: 77790 - DNA, 126 bp, Zea mays
  Clone ID: MRT4577_17096C.1
ccattggggtcactacagagcatcctcatgcactacgaacctagaccactatgatcgactgtgtcactgactttacgcttgctccttgggcccctccacgctacagggcaacttccatatcactta

SEQ ID NO: 77791 - DNA, 270 bp, Zea mays
  Clone ID: MRT4577_170970C.1
cccttttaatttttttttaaaggaaacatgttttattttacatttatggctaaaccagagcgaaacactttttttataaaatctgggcaaagaaattgcgagtacccaaaagggcccttgaaacgtaccggaacaaactgtttccatacaaggcaggcggctttcaaagggtttgaacttagccagggccattagcactttggttactaataaagtacgctaccaattaccaggtggtacacacagccacagacacggaatttgacacaa

SEQ ID NO: 77792 - DNA, 730 bp, Zea mays
  unsure (1)..(730): unsure at all n locations
  Clone ID: MRT4577_170971C.1
cctatgggcgattgggtatctcgaggccggccgggcacacacacacatccatcaaagaaacaggcacacaagaacaaatacctcgctaccaacaatggcctccaggtcctccatcctacttgcaacgtcgatgctggctgcgctgtttgcggttggtttgtgcaccaccccgctcaccttccaggttggcaagggatccaagcctggccacctgatcctcacccccaatgttgcaaccatatccgacgtggagatcaaagagcacgggggcgatgacttctcctttacgctcaaggagggcccgactggcacgtggacgctcgacaccaaggccccactcaagtaccccctttgcatccgctttgctgtcaagtctggcggctaccgcatcgccgacgacgtcatccccgccgatttcaaggctggcaccacctataagaccacactcagcatctaatcaacctctcatgatgaattatatttcaaaagagctcacctagcgcatgtgttacaagacaatattattttttcaatggctttttttggcaccagaccacccaagaaataagttatgctacatgtctcttctgacgccttgttgtgttgggttgatattattacataaactaaatacattatttatttaagattttaggagaaatatgttgatctgatccaccttcattatcgagatggttgtacgaaaaaaaaaaaaanaaaatttgcggcc

SEQ ID NO: 77793 - DNA, 730 bp, Zea mays
  Clone ID: MRT4577_170972C.1
ccatccataacgaaacagcgcacaagaacaaatacctcgccgccaacaatggctccatgtcctccatcctgctcgcaacggcgatgctggttgtgatgtttgcggttggtttgtgcaccaccccgctcaccttccaggttggcaagggatccaagcctggccacctgatcctcacccccaatgttgcaaccatatccaatgtggagatcaaagagcacggtggcaatgacttctcctttacgctcaaggagggaccgaccggcacctggacgctcgacaccaaggcctcgctcaagtaccccctttgcatctgctttgctgtcaagtctggtggctactgcatcgccgacgatgtcatccccgccgatttcaaggccggcaccacctacaagaccacactcaacatctaattagcctctcatgatgaattagatttcaaaagagctcatctggcgcacatgttagcaagacaatattattttttctatggttattttgtggcaccaaactacccaagaaataagtgatgctacatgccccttctgacgccttgttgtgttgggttgatattattacataaactagatacattatttatttgaggttttaggagaaatatgatgatgttgaccacattcattatcgagatgcctgtacatttgattttccaatgttttcatacttatgaaatgctttgtttgtcaaaaaaaaaaaaaaaaaatttgcggcc

SEQ ID NO: 77794 - DNA, 669 bp, Zea mays
  Clone ID: MRT4577_170973C.1
atgcaggcggcatgcaaccgcaccaagggggcgcaccctttcgactccgacacgtccggcatcggggcccaggcccacacgtcatgtaaccggcgccccggttactacgtgcgggaaactgcaccgccacttgcgccagtatcacgccttttcgactgccgaaccggtgccgcgactcgaggtaaccctgtgcatggcccaacagtgccaaccgagcacatcgatcacgggacaggcggcacctttggcaagcgacgcttcacctccgccataatgaccgcgtcaaaaaaggtgcgccacgccgttcgatttcgtatccttttcctcttcctctttctctctcttgctacatggaccgggaaaggggatactctgaaagggatccttcttcgcgaaggaagcgggccccgagccctcctactgatcagaagttcgaaggctggcccctcggaagggttcaacagccgcctcagagcactcgggctccgcgcccactactggtcagaggttcgaaggttggcccctcgaaagggttcgacagccgcctcaggcccctcgggctccgcgcccactactggtcagaggttcgaaggctggcccctgggaagggttcgacagccgcctcaggccactcgggctccgcgcccactactgatcaagggttcgtag
